(19) United States
(12) Patent Application Publication
(10) Pub. No.: US 2008/0229439 A1
(43) Pub. Date: Sep. 18, 2008

(54) Nucleic acid molecules and other molecules associated with transcription in plants and uses thereof for plant improvement

(76) Inventors: Thomas J. La Rosa, Fenton, MO (US); Linda Lutfiyya, St. Louis, MO (US); Yihua Zhou, Ballwin, MO (US); David K. Kovalic, Clayton, MO (US); Andrey A. Boukharov, Melrose, MA (US); Ping Li, St. Peters, MO (US); Wei Wu, Chesterfield, MO (US); Timothy W. Conner, Chesterfield, MO (US); Jingdong Liu, Chesterfield, MO (US)

Correspondence Address: ARNOLD & PORTER, LLP, 555 TWELFTH STREET, N.W., ATTN: IP DOCKETING, WASHINGTON, DC, 20004, US

(21) Appl. No.: 11/980,417

(22) Filed: Oct. 31, 2007

Related U.S. Application Data
(63) Continuation-in-part of application No. 10/438,246, filed on May 14, 2003.
Application No. 10/438,246 is a continuation-in-part of application No. 10/424,599, filed on Apr. 28, 2003.
Application No. 10/424,599 is a continuation-in-part of application No. 09/985,678, filed on Nov. 5, 2001, now abandoned.
Application No. 09/985,678 is a continuation of application No. 09/304,517, filed on May 6, 1999, now abandoned.
Application No. 10/438,246 is a continuation-in-part of application No. 09/565,306, filed on May 4, 2000, now abandoned.
Application No. 10/438,246 is a continuation-in-part of application No. 10/155,881, filed on May 22, 2002, now abandoned.
Application No. 10/155,881 is a continuation-in-part of application No. 09/816,660, filed on Mar. 26, 2001, now abandoned.
Application No. 09/816,660 is a continuation-in-part of application No. 09/733,089, filed on Dec. 11, 2000, now abandoned.
(60) Provisional application No. 60/132,860, filed on May 7, 1999.

(51) Int. Cl. C12N 15/29; C07K 14/42; A01H 5/00; A01H 1/02

(52) U.S. Cl. 800/260; 536/23.6; 530/372; 530/378; 800/320.1; 800/320.3; 800/314; 800/312; 800/298; 800/278

(57) ABSTRACT

Polynucleotides useful for improvement of plants are provided. In particular, polynucleotide sequences are provided from plant sources. Polypeptides encoded by the polynucleotide sequences are also provided. The disclosed polynucleotides and polypeptides find use in production of transgenic plants to produce plants having improved properties.

[0001] This application claims the benefit of U.S. application Ser. No. 09/938,294 filed Aug. 24, 2001, 10/155,881 filed May 22, 2002, 09/922,293 filed Aug. 6, 2001, 09/816,660 filed Mar. 26, 2001, 10/361,942 filed Feb. 10, 2003, and 09/828,073 filed Apr. 5, 2001, hereby incorporated by reference herein in their entirety.

### INCORPORATION OF SEQUENCE LISTING

[0002] Two copies of the sequence listing (Seq. Listing Copy 1 and Seq. Listing Copy 2) and a computer-readable form of the sequence listing, all on CD-ROMs, each containing the file named 53333.rpt, which is 107,924,626 bytes (measured in MS-DOS) and was created on Jul. 8, 2005, are herein incorporated by reference.

### FIELD OF THE INVENTION

[0003] Disclosed herein are inventions in the field of plant biochemistry and genetics. More specifically, this invention pertains to transcription factors, nucleic acid fragments encoding transcription factors, as well as plants and other organisms expressing transcription factors. This invention also relates to methods of using such agents, for example, in plant breeding.

### BACKGROUND OF THE INVENTION

[0004] Transcription is the essential first step in the conversion of the genetic information in the DNA into protein and the major point at which gene expression is controlled. Transcription of protein-coding genes is accomplished by the multisubunit enzyme RNA polymerase II and an ensemble of ancillary proteins called transcription factors. Basal (or general) transcription factors (a universal set of cellular proteins required for the transcription of all protein-coding genes) assist RNA polymerase II in aligning itself to the core region encompassing the transcription initiation site of genes and accurately initiating transcription. RNA polymerase II, basal transcription factors and an array of other proteins known as transcription co-factors comprise the basal transcription machinery that determines the constitutive level of gene transcription. Other transcription factors, termed gene-specific transcription factors, modulate transcription of a subset of protein-coding genes in response to specific environmental signals through binding to characteristic, cis-acting DNA sequence elements (motifs) and interactions with the basal transcription machinery. Cis-acting DNA sequence elements are often parts of larger regulatory entities called promoters or enhancers that confer a specific expression pattern to linked transcription units, their target genes. Collectively, these regions might bind several different gene-specific transcription factors each of which might contribute positively (activators) or negatively (repressors) to transcription initiation and rate. Protein-protein interactions between DNA-bound gene-specific transcription factors often result in synergistic or inhibitory regulatory effects. It is the sum of these combinatorial interactions that defines the transcriptional identity of a gene, turning genes on and off as appropriate for a specific biological context. In this manner, genes can be regulated, for example, tissue specifically, with a certain temporal or developmental pattern or become responsive to exogenous cues.

[0005] The identification of transcription factors and the subsequent modification of their activity may result in dramatic changes to a plant leading to plants with highly desirable, commercial traits. Root growth, tolerance to salt or cold stress, and flower characteristics are only some examples of plant traits that may be altered by modifying transcription factors.

[0006] Transcription factors may be identified by the presence of conserved functional domains. Typically, they are comprised of two domains that represent discrete functional entities. One of these is responsible for sequence-specific DNA recognition and binding (DNA binding domain); and the other facilitates communication with the basal transcription machinery, resulting in either the activation or repression of transcription initiation (transeffector domain). In addition, transcription factors also may contain oligomerization domains. This domain type may be adjacent to or overlap DNA binding domains and may act with them to effect the transcription factor's affinity for certain cis elements or other aspects of transcription factor activity. Nuclear localization signals that are characterized by a core peptide enriched in arginine and lysine may be present as well.

[0007] Such functional domains may be identified by examining the primary amino acid sequence of a putative transcription factor. For example, one class of transcription factors, the leucine zipper proteins, derive their name from the repeats they share of four or five leucine residues precisely seven amino acids apart. These domains provide hydrophobic faces through which leucine zipper proteins interact to form dimers. Zinc finger proteins are transcription factors so called because of the presence of repeated motifs of cysteine and histidine that are reported to fold up into a three-dimensional structure coordinated by a zinc ion.

[0008] Protein domains indicative of transcription factors have been described using Profile Hidden Markov Models (e.g. Profile HMM). Profile HMMs are based on position specific sequence information from multiple alignments. Different residues in a functional sequence are subject to different selective pressures. Multiple alignments of a sequence family reveal this in their pattern of conservation. Some positions are more conserved than others, and some regions of a multiple alignment are reported to tolerate insertions and deletions more than other regions.

[0009] An HMM (Hidden Markov Model) is used to statistically describe a protein family's consensus sequence. This statistical description can be used for sensitive and selective database searching. The model consists of a linear sequence of nodes with a “begin” state and an “end” state. A typical model can contain hundreds of nodes. Each node between the beginning and end state corresponds to a column in a multiple alignment. Each node in an HMM has a match state, an insert state, and a delete state with position-specific probabilities for transitioning into each of these states from the previous state. In addition to a transition probability, the match state also has position specific probabilities for emitting a particular residue. Likewise, the insert state has probabilities for inserting a residue at the position given by the node. There is also a chance that no residue is associated with a node. That probability is indicated by the probability of transitioning to the delete state. Both transition and emission probabilities can be generated from a multiple alignment of a family of sequences. An HMM can be aligned with a new sequence to determine the probability that the sequence belongs to the modeled family. The most probable path through the HMM (i.e. which transitions were taken and which residues were emitted at match and insert sites) taken to generate a sequence similar to the new sequence determines the similarity score.

[0010] Several available software packages implement profile HMMs or HMM-like models. These include SAM, HMMER, and HMMpro. Additionally, two collections of profile HMMs are currently available: the Pfam database and the PROSITE Profiles database.

[0011] Sequence similarity searches against known transcription factors or transcription factor domains resulting in statistically significant similarity between a putative and known transcription factor also provide strong evidence that both code for proteins with similar three dimensional structure and are thus likely to exhibit equivalent biochemical functions. The use of amino acid comparison methods-in particular those such as BLAST and FASTA which are sufficiently fast to search protein sequence databases (such as NCBI's non-redundant amino acid databases or Transfac which contains transcription factor domains have been used for such purposes). More rigorous algorithms such as that of the Frame+ program are also used.

[0012] Nucleic acid sequences and/or translations of nucleic acid sequences disclosed herein are cDNA and genomic sequences that have been queried for the presence of transcription factor functional domains. These sequences may be used in DNA constructs useful for imparting unique genetic properties into transgenic organisms. They may also be used to identify other transcription factor sequences.

### SUMMARY OF THE INVENTION

[0013] This invention provides a substantially purified nucleic acid molecule comprising nucleic acid sequences and the polypeptides encoded by such molecules from corn, soy, and rice. Nucleic acid sequences for the substantially purified nucleic acid molecules of the present invention are provided in the attached Sequence Listing as SEQ ID NO: 1-5429, SEQ ID NO: 10859-15800, SEQ ID NO: 20743-23549, and SEQ ID NO: 26357-29936. Amino acid sequences for the substantially purified polypeptides or fragment thereof of the present invention are provided as SEQ ID NO: 5430-10858, SEQ ID NO: 15801-20742, SEQ ID NO: 23550-26356, and SEQ ID NO: 29937-33516. Preferred subsets of the polynucleotides and polypeptides of this invention are useful for improvement of one or more important properties in plants.

[0014] The present invention also provides a method of producing a plant containing an overexpressed plant transcription factor comprising transforming said plant with a functional first nucleic acid molecule, wherein said first nucleic acid molecule comprises a promoter region, wherein said promoter region is linked to a structural region, wherein said structural region comprises a second nucleic acid molecule having a nucleic acid sequence selected from the group consisting of SEQ ID NO: 1-5429, SEQ ID NO: 10859-15800, SEQ ID NO: 20743-23549, and SEQ ID NO: 26357-29936; wherein said structural region is linked to a 3′ non-translated sequence that functions in the plant to cause termination of transcription of transcription and addition of polyadenylated ribonucleotides to a 3′ end of a mRNA molecule; and wherein said function first nucleic acid molecule results in overexpression of the plant transcription factor and then growing said plant.

[0015] The present invention also provides a method for determining a level or pattern of a plant transcription factor in a plant cell or plant tissue comprising incubating, under conditions permitting nucleic acid hybridization, a marker nucleic acid molecule, the marker nucleic acid molecule selected from the group of marker nucleic acid molecules which specifically hybridize to a nucleic acid molecule having the nucleic acid sequence selected from the group consisting of SEQ ID NO: 1-5429, SEQ ID NO: 10859-15800, SEQ ID NO: 20743-23549, and SEQ ID NO: 26357-29936 or complements thereof or fragments of either, with a complementary nucleic acid molecule obtained from the plant cell or plant tissue, wherein nucleic acid hybridization between the marker nucleic acid molecule and the complementary nucleic acid molecule obtained from the plant cell or plant tissue permits the detection of an mRNA for the enzyme; permitting hybridization between the marker nucleic acid molecule and the complementary nucleic acid molecule obtained from the plant cell or plant tissue; and then detecting the level or pattern of the complementary nucleic acid, wherein the detection of the complementary nucleic acid is predictive of the level or pattern of the plant transcription factor.

[0016] This invention also provides a transformed organism, particularly a transformed plant, preferably a transformed crop plant, comprising a recombinant DNA construct of the present invention.

### DETAILED DESCRIPTION OF THE INVENTION

[0017] The present invention provides polynucleotides, or nucleic acid molecules, representing DNA sequences and the polypeptides encoded by such polynucleotides from corn, soy, and rice. The polynucleotides and polypeptides of the present invention find a number of uses, for example in recombinant DNA constructs, in physical arrays of molecules, and for use as plant breeding markers. In addition, the nucleotide and amino acid sequences of the polynucleotides and polypeptides find use in computer based storage and analysis systems.

[0018] Depending on the intended use, the polynucleotides of the present invention may be present in the form of DNA, such as cDNA or genomic DNA, or as RNA, for example mRNA. The polynucleotides of the present invention may be single or double stranded and may represent the coding, or sense strand of a gene, or the non-coding, antisense, strand.

[0019] The polynucleotides of the present invention find particular use in generation of transgenic plants to provide for increased or decreased expression of the polypeptides encoded by the cDNA polynucleotides provided herein. As a result of such biotechnological applications, plants, particularly crop plants, having improved properties are obtained. Crop plants of interest in the present invention include, but are not limited to soy, cotton, canola, maize, wheat, sunflower, sorghum, alfalfa, barley, millet, rice, tobacco, fruit and vegetable crops, and turf grass. Of particular interest are uses of the disclosed polynucleotides to provide plants having improved yield resulting from improved utilization of key biochemical compounds, such as nitrogen, phosphorous and carbohydrate, or resulting from improved responses to environmental stresses, such as cold, heat, drought, salt, and attack by pests or pathogens. Polynucleotides of the present invention may also be used to provide plants having improved growth and development, and ultimately increased yield, as the result of modified expression of plant growth regulators or modification of cell cycle or photosynthesis pathways. Other traits of interest that may be modified in plants using polynucleotides of the present invention include flavonoid content, seed oil and protein quantity and quality, herbicide tolerance, and rate of homologous recombination.

[0020] The term “isolated” is used herein in reference to purified polynucleotide or polypeptide molecules. As used herein, “purified” refers to a polynucleotide or polypeptide molecule separated from substantially all other molecules normally associated with it in its native state. More preferably, a substantially purified molecule is the predominant species present in a preparation. A substantially purified molecule may be greater than 60% free, preferably 75% free, more preferably 90% free, and most preferably 95% free from the other molecules (exclusive of solvent) present in the natural mixture. The term “isolated” is also used herein in reference to polynucleotide molecules that are separated from nucleic acids which normally flank the polynucleotide in nature. Thus, polynucleotides fused to regulatory or coding sequences with which they are not normally associated, for example as the result of recombinant techniques, are considered isolated herein. Such molecules are considered isolated even when present, for example in the chromosome of a host cell, or in a nucleic acid solution. The terms “isolated” and “purified” as used herein are not intended to encompass molecules present in their native state.

[0021] As used herein a “transgenic” organism is one whose genome has been altered by the incorporation of foreign genetic material or additional copies of native genetic material, e.g. by transformation or recombination.

[0022] It is understood that the molecules of the invention may be labeled with reagents that facilitate detection of the molecule. As used herein, a label can be any reagent that facilitates detection, including fluorescent labels, chemical labels, or modified bases, including nucleotides with radioactive elements, e.g. ³²P, ³³P, ³⁵S or ¹²⁵I such as ³²P deoxycytidine-5′-triphosphate (³²PdCTP).

[0023] Polynucleotides of the present invention are capable of specifically hybridizing to other polynucleotides under certain circumstances. As used herein, two polynucleotides are said to be capable of specifically hybridizing to one another if the two molecules are capable of forming an anti-parallel, double-stranded nucleic acid structure. A nucleic acid molecule is said to be the “complement” of another nucleic acid molecule if the molecules exhibit complete complementarity. As used herein, molecules are said to exhibit “complete complementarity” when every nucleotide in each of the molecules is complementary to the corresponding nucleotide of the other. Two molecules are said to be “minimally complementary” if they can hybridize to one another with sufficient stability to permit them to remain annealed to one another under at least conventional “low-stringency” conditions. Similarly, the molecules are said to be “complementary” if they can hybridize to one another with sufficient stability to permit them to remain annealed to one another under conventional “high-stringency” conditions. Conventional stringency conditions are known to those skilled in the art and can be found, for example in Molecular Cloning: A Laboratory Manual, 3^{rd} edition Volumes 1, 2, and 3. J. F. Sambrook, D. W. Russell, and N. Irwin, Cold Spring Harbor Laboratory Press, 2000.

[0024] Departures from complete complementarity are therefore permissible, as long as such departures do not completely preclude the capacity of the molecules to form a double-stranded structure. Thus, in order for a nucleic acid molecule to serve as a primer or probe it need only be sufficiently complementary in sequence to be able to form a stable double-stranded structure under the particular solvent and salt concentrations employed. Appropriate stringency conditions which promote DNA hybridization are, for example, 6.0× sodium chloride/sodium citrate (SSC) at about 45° C., followed by a wash of 2.0×SSC at 50° C. Such conditions are known to those skilled in the art and can be found, for example in Current Protocols in Molecular Biology, John Wiley & Sons, N.Y. (1989). Salt concentration and temperature in the wash step can be adjusted to alter hybridization stringency. For example, conditions may vary from low stringency of about 2.0×SSC at 40° C. to moderately stringent conditions of about 2.0×SSC at 50° C. to high stringency conditions of about 0.2×SSC at 50° C.

[0025] As used herein “sequence identity” refers to the extent to which two optimally aligned polynucleotide or peptide sequences are invariant throughout a window of alignment of components, e.g. nucleotides or amino acids. An “identity fraction” for aligned segments of a test sequence and a reference sequence is the number of identical components which are shared by the two aligned sequences divided by the total number of components in the reference sequence segment, i.e. the entire reference sequence or a smaller defined part of the reference sequence. “Percent identity” is the identity fraction times 100. Comparison of sequences to determine percent identity can be accomplished by a number of well-known methods, including for example by using mathematical algorithms, such as those in the BLAST suite of sequence analysis programs.

[0026] Polynucleotides

[0027] This invention provides polynucleotides comprising regions that encode polypeptides. The encoded polypeptides may be the complete protein encoded by the gene represented by the polynucleotide, or may be fragments of the encoded protein. Preferably, polynucleotides provided herein encode polypeptides constituting a substantial portion of the complete protein, and more preferentially, constituting a sufficient portion of the complete protein to provide the relevant biological activity.

[0028] A particularly preferred embodiment of the nucleic acid molecules of the present invention are plant nucleic acid molecules that comprise a nucleic acid sequence which encodes a transcription factor from one of the categories of transcription factors in Table 2 or fragment thereof, more preferably a nucleic acid molecule comprising a nucleic acid selected from the group consisting of SEQ ID NO: 1-5429, SEQ ID NO: 10859-15800, SEQ ID NO: 20743-23549, and SEQ ID NO: 26357-29936 or a nucleic acid molecule comprising a nucleic acid sequence which encodes a transcription factor from one of the categories of transcription factors in Table 2 or fragment thereof comprising an amino acid selected from the group consisting of SEQ ID NO: 1-5429, SEQ ID NO: 10859-15800, SEQ ID NO: 20743-23549, and SEQ ID NO: 26357-29936.

[0029] Polynucleotides of the present invention are generally used to impart such biological properties by providing for enhanced protein activity in a transgenic organism, preferably a transgenic plant, although in some cases, improved properties are obtained by providing for reduced protein activity in a transgenic plant. Reduced protein activity and enhanced protein activity are measured by reference to a wild type cell or organism and can be determined by direct or indirect measurement. Direct measurement of protein activity might include an analytical assay for the protein, per se, or enzymatic product of protein activity. Indirect assay might include measurement of a property affected by the protein. Enhanced protein activity can be achieved in a number of ways, for example by overproduction of mRNA encoding the protein or by gene shuffling. One skilled in the are will know methods to achieve overproduction of mRNA, for example by providing increased copies of the native gene or by introducing a construct having a heterologous promoter linked to the gene into a target cell or organism. Reduced protein activity can be achieved by a variety of mechanisms including antisense, mutation or knockout. Antisense RNA will reduce the level of expressed protein resulting in reduced protein activity as compared to wild type activity levels. A mutation in the gene encoding a protein may reduce the level of expressed protein and/or interfere with the function of expressed protein to cause reduced protein activity.

[0030] The polynucleotides of this invention represent cDNA sequences from corn, soy, and rice. Nucleic acid sequences of the polynucleotides of the present invention are provided herein as SEQ ID NO: 1-5429, SEQ ID NO: 10859-15800, SEQ ID NO: 20743-23549, and SEQ ID NO: 26357-29936.

[0031] A subset of the nucleic molecules of this invention includes fragments of the disclosed polynucleotides consisting of oligonucleotides of at least 15, preferably at least 16 or 17, more preferably at least 18 or 19, and even more preferably at least 20 or more, consecutive nucleotides. Such oligonucleotides are fragments of the larger molecules having a sequence selected from the group of polynucleotide sequences consisting of SEQ ID NO: 1-5429, SEQ ID NO: 10859-15800, SEQ ID NO: 20743-23549, and SEQ ID NO: 26357-29936, and find use, for example as probes and primers for detection of the polynucleotides of the present invention.

[0032] Also of interest in the present invention are variants of the polynucleotides provided herein. Such variants may be naturally occurring, including homologous polynucleotides from the same or a different species, or may be non-natural variants, for example polynucleotides synthesized using chemical synthesis methods, or generated using recombinant DNA techniques. With respect to nucleotide sequences, degeneracy of the genetic code provides the possibility to substitute at least one base of the protein encoding sequence of a gene with a different base without causing the amino acid sequence of the polypeptide produced from the gene to be changed. Hence, the DNA of the present invention may also have any base sequence that has been changed from SEQ ID NO: 1-5429, SEQ ID NO: 10859-15800, SEQ ID NO: 20743-23549, and SEQ ID NO: 26357-29936 by substitution in accordance with degeneracy of the genetic code.

[0033] Polynucleotides of the present invention that are variants of the polynucleotides provided herein will generally demonstrate significant identity with the polynucleotides provided herein. Of particular interest are polynucleotide homologs having at least about 60% sequence identity, at least about 70% sequence identity, at least about 80% sequence identity, at least about 85% sequence identity, and more preferably at least about 90%, 95% or even greater, such as 98% or 99% sequence identity with polynucleotide sequences described herein.

[0034] Nucleic acid molecules of the present invention also include homologues. Particularly preferred homologues are selected from the group consisting of Arabidopsis, alfalfa, barley, Brassica, broccoli, cabbage, citrus, cotton, garlic, oat, oilseed rape, onion, canola, flax, an ornamental plant, peanut, pepper, potato, rye, sorghum, strawberry, sugarcane, sugarbeet, tomato, wheat, poplar, pine, fir, eucalyptus, apple, lettuce, lentils, grape, banana, tea, turf grasses, sunflower, and Phaseolus.

[0035] In a preferred embodiment, nucleic acid molecules having SEQ ID NO: 1-5429, SEQ ID NO: 10859-15800, SEQ ID NO: 20743-23549, AND SEQ ID NO: 26357-29936 or complements thereof and fragments of either can be utilized to obtain such homologues.

[0036] Protein and Polypeptide Molecules

[0037] This invention also provides polypeptides encoded by polynucleotides of the present invention. Amino acid sequences of the polypeptides of the present invention are provided herein as SEQ ID NO: 5430-10858, SEQ ID NO: 15801-20742, SEQ ID NO: 23550-26356, and SEQ ID NO: 29937-33516.

[0038] As used herein, the term “protein molecule” or “peptide molecule” includes any molecule that comprises five or more amino acids. It is well known in the art that proteins may undergo modification, including post-translational modifications, such as, but not limited to, disulfide bond formation, glycosylation, phosphorylation, or oligomerization. Thus, as used herein, the term “protein molecule” or “peptide molecule” includes any protein molecule that is modified by any biological or non-biological process. The terms “amino acid” and “amino acids” refer to all naturally occurring L-amino acids. This definition is meant to include norleucine, norvaline, ornithine, homocysteine, and homoserine.

[0039] One or more of the protein or fragment of peptide molecules may be produced via chemical synthesis, or more preferably, by expressing in a suitable bacterial or eukaryotic host. Suitable methods for expression are well known to those skilled in the art.

[0040] A “protein fragment” is a peptide or polypeptide molecule whose amino acid sequence comprises a subset of the amino acid sequence of that protein. A protein or fragment thereof that comprises one or more additional peptide regions not derived from that protein is a “fusion” protein. Such molecules may be derivatized to contain carbohydrate or other moieties (such as keyhole limpet hemocyanin, etc.). Fusion protein or peptide molecules of the invention are preferably produced via recombinant means.

[0041] Another class of agents comprise protein or peptide molecules or fragments or fusions thereof comprising SEQ ID NO: 5430-10858, SEQ ID NO: 15801-20742, SEQ ID NO: 23550-26356, and SEQ ID NO: 29937-33516 in which conservative, non-essential or non-relevant amino acid residues have been added, replaced or deleted. Computerized means for designing modifications in protein structure are known in the art.

[0042] In a preferred embodiment, nucleic acid molecules having SEQ ID NO: 1-5429, SEQ ID NO: 10859-15800, SEQ ID NO: 20743-23549, and SEQ ID NO: 26357-29936 or polypeptide molecules having SEQ ID NO: 5430-10858, SEQ ID NO: 15801-20742, SEQ ID NO: 23550-26356, and SEQ ID NO: 29937-33516 or complements and fragments of any can be utilized to obtain such homologues.

[0043] Agents of the invention include proteins comprising at least about a contiguous 10 amino acid region more preferably comprising at least a contiguous 25, 40, 50, 75 or 125 amino acid region of a protein or fragment thereof of the present invention. In another preferred embodiment, the proteins of the present invention include a between about 10 and about 25 contiguous amino acid region, more preferably between about 20 and about 50 contiguous amino acid region and even more preferably between about 40 and about 80 contiguous amino acid region.

[0044] In a preferred embodiment the protein is selected from the group consisting of a plant, more preferably a maize, soybean, or rice transcription factor from the group consisting of Table 2. In another preferred embodiment, the protein comprises an amino acid sequence selected from the group consisting of SEQ ID NO: 5430-10858, SEQ ID NO: 15801-20742, SEQ ID NO: 23550-26356, and SEQ ID NO: 29937-33516.

[0045] Protein molecules of the present invention include homologues of proteins or fragments thereof comprising a protein sequence selected from SEQ ID NO: 5430-10858, SEQ ID NO: 15801-20742, SEQ ID NO: 23550-26356, and SEQ ID NO: 29937-33516 or fragment thereof or encoded by SEQ ID NO: 1-5429, SEQ ID NO: 10859-15800, SEQ ID NO: 20743-23549, and SEQ ID NO: 26357-29936 or fragments thereof. Preferred protein molecules of the invention include homologues of proteins or fragments having an amino acid sequence selected from the group consisting of SEQ ID NO: 5430-10858, SEQ ID NO: 15801-20742, SEQ ID NO: 23550-26356, and SEQ ID NO: 29937-33516 or fragment thereof.

[0046] A homologue protein may be derived from, but not limited to, alfalfa, barley, Brassica, broccoli, cabbage, citrus, cotton, garlic, oat, oilseed rape, onion, canola, flax, an ornamental plant, pea, peanut, pepper, potato, rye, sorghum, strawberry, sugarcane, sugar beet, tomato, wheat, poplar, pine, fir, eucalyptus, apple, lettuce, lentils, grape, banana, tea, turf grasses, sunflower, oil palm, Phaseolus etc. Particularly preferred species for use in the isolation of homologs would include, barley, cotton, oat, oilseed rape, canola, ornamentals, sugarcane, sugar beet, tomato, potato, wheat and turf grasses. Such a homologue can be obtained by any of a variety of methods. Most preferably, as indicated above, one or more of the disclosed sequences (such as SEQ ID NO: 1-5429, SEQ ID NO: 10859-15800, SEQ ID NO: 20743-23549, and SEQ ID NO: 26357-29936 or complements thereof) will be used in defining a pair of primers to isolate the homologue-encoding nucleic acid molecules from any desired species. Such molecules can be expressed to yield protein homologues by recombinant means.

[0047] Recombinant DNA Constructs

[0048] The present invention also encompasses the use of polynucleotides of the present invention in recombinant constructs, i.e. constructs comprising polynucleotides that are constructed or modified outside of cells and that join nucleic acids that are not found joined in nature. Using methods known to those of ordinary skill in the art, polypeptide encoding sequences of this invention can be inserted into recombinant DNA constructs that can be introduced into a host cell of choice for expression of the encoded protein, or to provide for reduction of expression of the encoded protein, for example by antisense or cosuppression methods. Potential host cells include both prokaryotic and eukaryotic cells. Of particular interest in the present invention is the use of the polynucleotides of the present invention for preparation of constructs for use in plant transformation.

[0049] In plant transformation, exogenous genetic material is transferred into a plant cell. By “exogenous” it is meant that a nucleic acid molecule, for example a recombinant DNA construct comprising a polynucleotide of the present invention, is produced outside the organism, e.g. plant, into which it is introduced. An exogenous nucleic acid molecule can have a naturally occurring or non-naturally occurring nucleotide sequence. One skilled in the art recognizes that an exogenous nucleic acid molecule can be derived from the same species into which it is introduced or from a different species. Such exogenous genetic material may be transferred into either monocot or dicot plants including, but not limited to, soy, cotton, canola, maize, teosinte, wheat, rice and Arabidopsis plants. Transformed plant cells comprising such exogenous genetic material may be regenerated to produce whole transformed plants.

[0050] Exogenous genetic material may be transferred into a plant cell by the use of a DNA vector or construct designed for such a purpose. A construct can comprise a number of sequence elements, including promoters, encoding regions, and selectable markers. Vectors are available which have been designed to replicate in both E. coli and A. tumefaciens and have all of the features required for transferring large inserts of DNA into plant chromosomes. Design of such vectors is generally within the skill of the art.

[0051] A construct will generally include a plant promoter to direct transcription of the protein-encoding region or the antisense sequence of choice. Numerous promoters, which are active in plant cells, have been described in the literature. These include the nopaline synthase (NOS) promoter and octopine synthase (OCS) promoters carried on tumor-inducing plasmids of Agrobacterium tumefaciens or caulimovirus promoters such as the Cauliflower Mosaic Virus (CaMV) 19S or 35S promoter (U.S. Pat. No. 5,352,605), and the Figwort Mosaic Virus (FMV) 35S-promoter (U.S. Pat. No. 5,378,619). These promoters and numerous others have been used to create recombinant vectors for expression in plants. Any promoter known or found to cause transcription of DNA in plant cells can be used in the present invention. Other useful promoters are described, for example, in U.S. Pat. Nos. 5,378,619; 5,391,725; 5,428,147; 5,447,858; 5,608,144; 5,614,399; 5,633,441, and 5,633,435, all of which are incorporated herein by reference.

[0052] In addition, promoter enhancers, such as the CaMV 35S enhancer or a tissue specific enhancer, may be used to enhance gene transcription levels. Enhancers often are found 5′ to the start of transcription in a promoter that functions in eukaryotic cells, but can often be inserted in the forward or reverse orientation 5′ or 3′ to the coding sequence. In some instances, these 5′ enhancing elements are introns. Deemed to be particularly useful as enhancers are the 5′ introns of the rice actin 1 and rice actin 2 genes. Examples of other enhancers which could be used in accordance with the invention include elements from octopine synthase genes, the maize alcohol dehydrogenase gene intron 1, elements from the maize shrunken 1 gene, the sucrose synthase intron, the TMV omega element, and promoters from non-plant eukaryotes.

[0053] DNA constructs can also contain one or more 5′ non-translated leader sequences which serve to enhance polypeptide production from the resulting mRNA transcripts. Such sequences may be derived from the promoter selected to express the gene or can be specifically modified to increase translation of the mRNA. Such regions may also be obtained from viral RNAs, from suitable eukaryotic genes, or from a synthetic gene sequence. For a review of optimizing expression of transgenes, see Koziel et al. (1996) Plant Mol. Biol. 32:393-405).

[0054] Constructs and vectors may also include, with the coding region of interest, a nucleic acid sequence that acts, in whole or in part, to terminate transcription of that region. One type of 3′ untranslated sequence which may be used is a 3′ UTR from the nopaline synthase gene (nos 3′) of Agrobacterium tumefaciens. Other 3′ termination regions of interest include those from a gene encoding the small subunit of a ribulose-1,5-bisphosphate carboxylase-oxygenase (rbcS), and more specifically, from a rice rbcS gene (U.S. Pat. No. 6,426,446), the 3′ UTR for the T7 transcript of Agrobacterium tumefaciens, the 3′ end of the protease inhibitor I or II genes from potato or tomato, and the 3′ region isolated from Cauliflower Mosaic Virus. Alternatively, one also could use a gamma coixin, oleosin 3 or other 3′ UTRs from the genus Coix (PCT Publication WO 99/58659).

[0055] Constructs and vectors may also include a selectable marker. Selectable markers may be used to select for plants or plant cells that contain the exogenous genetic material. Useful selectable marker genes include those conferring resistance to antibiotics such as kanamycin (nptII), hygromycin B (aph IV) and gentamycin (aac3 and aacC4) or resistance to herbicides such as glufosinate (bar or pat) and glyphosate (EPSPS). Examples of such selectable markers are illustrated in U.S. Pat. Nos. 5,550,318; 5,633,435; 5,780,708 and 6,118,047, all of which are incorporated herein by reference.

[0056] Constructs and vectors may also include a screenable marker. Screenable markers may be used to monitor transformation. Exemplary screenable markers include genes expressing a colored or fluorescent protein such as a luciferase or green fluorescent protein (GFP), a β-glucuronidase or uidA gene (GUS) which encodes an enzyme for which various chromogenic substrates are known or an R-locus gene, which encodes a product that regulates the production of anthocyanin pigments (red color) in plant tissues. Other possible selectable and/or screenable marker genes will be apparent to those of skill in the art.

[0057] Constructs and vectors may also include a transit peptide for targeting of a gene target to a plant organelle, particularly to a chloroplast, leucoplast or other plastid organelle (U.S. Pat. No. 5,188,642).

[0058] For use in Agrobacterium mediated transformation methods, constructs of the present invention will also include T-DNA border regions flanking the DNA to be inserted into the plant genome to provide for transfer of the DNA into the plant host chromosome as discussed in more detail below. An exemplary plasmid that finds use in such transformation methods is pMON18365, a T-DNA vector that can be used to clone exogenous genes and transfer them into plants using Agrobacterium-mediated transformation. See US Patent Application 20030024014, herein incorporated by reference. This vector contains the left border and right border sequences necessary for Agrobacterium transformation. The plasmid also has origins of replication for maintaining the plasmid in both E. coli and Agrobacterium tumefaciens strains.

[0059] A candidate gene is prepared for insertion into the T-DNA vector, for example using well-known gene cloning techniques such as PCR. Restriction sites may be introduced onto each end of the gene to facilitate cloning. For example, candidate genes may be amplified by PCR techniques using a set of primers. Both the amplified DNA and the cloning vector are cut with the same restriction enzymes, for example, NotI and PstI. The resulting fragments are gel-purified, ligated together, and transformed into E. coli. Plasmid DNA containing the vector with inserted gene may be isolated from E. coli cells selected for spectinomycin resistance, and the presence of the desired insert verified by digestion with the appropriate restriction enzymes. Undigested plasmid may then be transformed into Agrobacterium tumefaciens using techniques well known to those in the art, and transformed Agrobacterium cells containing the vector of interest selected based on spectinomycin resistance. These and other similar constructs useful for plant transformation may be readily prepared by one skilled in the art.

[0060] Transformation Methods and Transpenic Plants

[0061] Methods and compositions for transforming bacteria and other microorganisms are known in the art. See for example Molecular Cloning: A Laboratory Manual, 3^{rd} edition Volumes 1, 2, and 3. J. F. Sambrook, D. W. Russell, and N. Irwin, Cold Spring Harbor Laboratory Press, 2000.

[0062] Technology for introduction of DNA into cells is well known to those of skill in the art. Methods and materials for transforming plants by introducing a transgenic DNA construct into a plant genome in the practice of this invention can include any of the well-known and demonstrated methods including electroporation as illustrated in U.S. Pat. No. 5,384,253, microprojectile bombardment as illustrated in U.S. Pat. Nos. 5,015,580; 5,550,318; 5,538,880; 6,160,208; 6,399,861 and 6,403,865, Agrobacterium-mediated transformation as illustrated in U.S. Pat. Nos. 5,635,055; 5,824,877; 5,591,616; 5,981,840 and 6,384,301, and protoplast transformation as illustrated in U.S. Pat. No. 5,508,184, all of which are incorporated herein by reference.

[0063] Any of the polynucleotides of the present invention may be introduced into a plant cell in a permanent or transient manner in combination with other genetic elements such as vectors, promoters enhancers etc. Further any of the polynucleotides of the present invention may be introduced into a plant cell in a manner that allows for production of the polypeptide or fragment thereof encoded by the polynucleotide in the plant cell, or in a manner that provides for decreased expression of an endogenous gene and concomitant decreased production of protein.

[0064] It is also to be understood that two different transgenic plants can also be mated to produce offspring that contain two independently segregating added, exogenous genes. Selfing of appropriate progeny can produce plants that are homozygous for both added, exogenous genes that encode a polypeptide of interest. Back-crossing to a parental plant and out-crossing with a non-transgenic plant are also contemplated, as is vegetative propagation.

[0065] Expression of the polynucleotides of the present invention and the concomitant production of polypeptides encoded by the polynucleotides is of interest for production of transgenic plants having improved properties, particularly, improved properties which result in crop plant yield improvement. Expression of polypeptides of the present invention in plant cells may be evaluated by specifically identifying the protein products of the introduced genes or evaluating the phenotypic changes brought about by their expression. It is noted that when the polypeptide being produced in a transgenic plant is native to the target plant species, quantitative analyses comparing the transformed plant to wild type plants may be required to demonstrate increased expression of the polypeptide of this invention.

[0066] Assays for the production and identification of specific proteins make use of various physical-chemical, structural, functional, or other properties of the proteins. Unique physical-chemical or structural properties allow the proteins to be separated and identified by electrophoretic procedures, such as native or denaturing gel electrophoresis or isoelectric focusing, or by chromatographic techniques such as ion exchange or gel exclusion chromatography. The unique structures of individual proteins offer opportunities for use of specific antibodies to detect their presence in formats such as an ELISA assay. Combinations of approaches may be employed with even greater specificity such as western blotting in which antibodies are used to locate individual gene products that have been separated by electrophoretic techniques. Additional techniques may be employed to absolutely confirm the identity of the product of interest such as evaluation by amino acid sequencing following purification. Although these are among the most commonly employed, other procedures may be additionally used.

[0067] Assay procedures may also be used to identify the expression of proteins by their functionality, particularly where the expressed protein is an enzyme capable of catalyzing chemical reactions involving specific substrates and products. These reactions may be measured, for example in plant extracts, by providing and quantifying the loss of substrates or the generation of products of the reactions by physical and/or chemical procedures.

[0068] In many cases, the expression of a gene product is determined by evaluating the phenotypic results of its expression. Such evaluations may be simply as visual observations, or may involve assays. Such assays may take many forms including but not limited to analyzing changes in the chemical composition, morphology, or physiological properties of the plant. Chemical composition may be altered by expression of genes encoding enzymes or storage proteins which change amino acid composition and may be detected by amino acid analysis, or by enzymes which change starch quantity which may be analyzed by near infrared reflectance spectrometry. Morphological changes may include greater stature or thicker stalks.

[0069] Plants with decreased expression of a gene of interest can also be achieved through the use of polynucleotides of the present invention, for example by expression of antisense nucleic acids, or by identification of plants transformed with sense expression constructs that exhibit cosuppression effects.

[0070] Antisense approaches are a way of preventing or reducing gene function by targeting the genetic material as disclosed in U.S. Pat. Nos. 4,801,540; 5,107,065; 5,759,829; 5,910,444; 6,184,439; and 6,198,026, all of which are incorporated herein by reference. The objective of the antisense approach is to use a sequence complementary to the target gene to block its expression and create a mutant cell line or organism in which the level of a single chosen protein is selectively reduced or abolished. Antisense techniques have several advantages over other ‘reverse genetic’ approaches. The site of inactivation and its developmental effect can be manipulated by the choice of promoter for antisense genes or by the timing of external application or microinjection. Antisense can manipulate its specificity by selecting either unique regions of the target gene or regions where it shares homology to other related genes.

[0071] The principle of regulation by antisense RNA is that RNA that is complementary to the target mRNA is introduced into cells, resulting in specific RNA:RNA duplexes being formed by base pairing between the antisense substrate and the target. Under one embodiment, the process involves the introduction and expression of an antisense gene sequence. Such a sequence is one in which part or all of the normal gene sequences are placed under a promoter in inverted orientation so that the ‘wrong’ or complementary strand is transcribed into a noncoding antisense RNA that hybridizes with the target mRNA and interferes with its expression. An antisense vector is constructed by standard procedures and introduced into cells by transformation, transfection, electroporation, microinjection, infection, etc. The type of transformation and choice of vector will determine whether expression is transient or stable. The promoter used for the antisense gene may influence the level, timing, tissue, specificity, or inducibility of the antisense inhibition.

[0072] As used herein “gene suppression” means any of the well-known methods for suppressing expression of protein from a gene including sense suppression, anti-sense suppression and RNAi suppression. In suppressing genes to provide plants with a desirable phenotype, anti-sense and RNAi gene suppression methods are preferred. More particularly, for a description of anti-sense regulation of gene expression in plant cells see U.S. Pat. No. 5,107,065 and for a description of RNAi gene suppression in plants by transcription of a dsRNA see U.S. Pat. No. 6,506,559, U.S. Patent Application Publication No. 2002/0168707 A1, and U.S. patent application Ser. No. 09/423,143 (see WO 98/53083), 09/127,735 (see WO 99/53050) and 09/084,942 (see WO 99/61631), all of which are incorporated herein by reference. Suppression of an gene by RNAi can be achieved using a recombinant DNA construct having a promoter operably linked to a DNA element comprising a sense and anti-sense element of a segment of genomic DNA of the gene, e.g., a segment of at least about 23 nucleotides, more preferably about 50 to 200 nucleotides where the sense and anti-sense DNA components can be directly linked or joined by an intron or artificial DNA segment that can form a loop when the transcribed RNA hybridizes to form a hairpin structure. For example, genomic DNA from a polymorphic locus of SEQ ID NO: 1-5429, SEQ ID NO: 10859-15800, SEQ ID NO: 20743-23549, AND SEQ ID NO: 26357-29936 can be used in a recombinant construct for suppression of a cognate gene by RNAi suppression.

[0073] Insertion mutations created by transposable elements may also prevent gene function. For example, in many dicot plants, transformation with the T-DNA of Agrobacterium may be readily achieved and large numbers of transformants can be rapidly obtained. Also, some species have lines with active transposable elements that can efficiently be used for the generation of large numbers of insertion mutations, while some other species lack such options. Mutant plants produced by Agrobacterium or transposon mutagenesis and having altered expression of a polypeptide of interest can be identified using the polynucleotides of the present invention. For example, a large population of mutated plants may be screened with polynucleotides encoding the polypeptide of interest to detect mutated plants having an insertion in the gene encoding the polypeptide of interest.

[0074] Polynucleotides of the present invention may be used in site-directed mutagenesis. Site-directed mutagenesis may be utilized to modify nucleic acid sequences, particularly as it is a technique that allows one or more of the amino acids encoded by a nucleic acid molecule to be altered (e.g., a threonine to be replaced by a methionine). Three basic methods for site-directed mutagenesis are often employed. These are cassette mutagenesis, primer extension, and methods based upon PCR.

[0075] In addition to the above-discussed procedures, practitioners are familiar with the standard resource materials which describe specific conditions and procedures for the construction, manipulation and isolation of macromolecules (e.g., DNA molecules, plasmids, etc.), generation of recombinant organisms and the screening and isolating of clones.

[0076] Arrays

[0077] The polynucleotide or polypeptide molecules of this invention may also be used to prepare arrays of target molecules arranged on a surface of a substrate. The target molecules are preferably known molecules, e.g. polynucleotides (including oligonucleotides) or polypeptides, which are capable of binding to specific probes, such as complementary nucleic acids or specific antibodies. The target molecules are preferably immobilized, e.g. by covalent or non-covalent bonding, to the surface in small amounts of substantially purified and isolated molecules in a grid pattern. By immobilized is meant that the target molecules maintain their position relative to the solid support under hybridization and washing conditions. Target molecules are deposited in small footprint, isolated quantities of “spotted elements” of preferably single-stranded polynucleotide preferably arranged in rectangular grids in a density of about 30 to 100 or more, e.g. up to about 1000, spotted elements per square centimeter. In addition in preferred embodiments arrays comprise at least about 100 or more, e.g. at least about 1000 to 5000, distinct target polynucleotides per unit substrate. Where detection of transcription for a large number of genes is desired, the economics of arrays favors a high density design criteria provided that the target molecules are sufficiently separated so that the intensity of the indicia of a binding event associated with highly expressed probe molecules does not overwhelm and mask the indicia of neighboring binding events. For high-density microarrays each spotted element may contain up to about 10⁷ or more copies of the target molecule, e.g. single stranded cDNA, on glass substrates or nylon substrates.

[0078] Arrays of this invention can be prepared with molecules from a single species, preferably a plant species, or with molecules from other species, particularly other plant species. Arrays with target molecules from a single species can be used with probe molecules from the same species or a different species due to the ability of cross species homologous genes to hybridize. It is generally preferred for high stringency hybridization that the target and probe molecules are from the same species.

[0079] In preferred aspects of this invention the organism of interest is a plant and the target molecules are polynucleotides or oligonucleotides with nucleic acid sequences having at least 80 percent sequence identity to a corresponding sequence of the same length in a polynucleotide having a sequence selected from the group consisting of SEQ ID NO: 1-5429, SEQ ID NO: 10859-15800, SEQ ID NO: 20743-23549, and SEQ ID NO: 26357-29936 or complements thereof. In other preferred aspects of the invention at least 10% of the target molecules on an array have at least 15, more preferably at least 20, consecutive nucleotides of sequence having at least 80%, more preferably up to 100%, identity with a corresponding sequence of the same length in a polynucleotide having a sequence selected from the group consisting of SEQ ID NO: 1-5429, SEQ ID NO: 10859-15800, SEQ ID NO: 20743-23549, and SEQ ID NO: 26357-29936 or complements or fragments thereof.

[0080] Such arrays are useful in a variety of applications, including gene discovery, genomic research, molecular breeding and bioactive compound screening. One important use of arrays is in the analysis of differential gene transcription, e.g. transcription profiling where the production of mRNA in different cells, normally a cell of interest and a control, is compared and discrepancies in gene expression are identified. In such assays, the presence of discrepancies indicates a difference in gene expression levels in the cells being compared. Such information is useful for the identification of the types of genes expressed in a particular cell or tissue type in a known environment. Such applications generally involve the following steps: (a) preparation of probe, e.g. attaching a label to a plurality of expressed molecules; (b) contact of probe with the array under conditions sufficient for probe to bind with corresponding target, e.g. by hybridization or specific binding; (c) removal of unbound probe from the array; and (d) detection of bound probe.

[0081] A probe may be prepared with RNA extracted from a given cell line or tissue. The probe may be produced by reverse transcription of mRNA or total RNA and labeled with radioactive or fluorescent labeling. A probe is typically a mixture containing many different sequences in various amounts, corresponding to the numbers of copies of the original mRNA species extracted from the sample.

[0082] The initial RNA sample for probe preparation will typically be derived from a physiological source. The physiological source may be selected from a variety of organisms, with physiological sources of interest including single celled organisms such as yeast and multicellular organisms, including plants and animals, particularly plants, where the physiological sources from multicellular organisms may be derived from particular organs or tissues of the multicellular organism, or from isolated cells derived from an organ, or tissue of the organism. The physiological sources may also be multicellular organisms at different developmental stages (e.g., 10-day-old seedlings), or organisms grown under different environmental conditions (e.g., drought-stressed plants) or treated with chemicals.

[0083] In preparing the RNA probe, the physiological source may be subjected to a number of different processing steps, where such processing steps might include tissue homogenation, cell isolation and cytoplasmic extraction, nucleic acid extraction and the like, where such processing steps are known to the those of skill in the art. Methods of isolating RNA from cells, tissues, organs or whole organisms are known to those of skill in the art.

[0084] Computer Based Systems and Methods

[0085] The sequence of the molecules of this invention can be provided in a variety of media to facilitate use thereof. Such media can also provide a subset thereof in a form that allows a skilled artisan to examine the sequences. In a preferred embodiment, 20, preferably 50, more preferably 100, even more preferably 200 or more of the polynucleotide and/or the polypeptide sequences of the present invention can be recorded on computer readable media. As used herein, “computer readable media” refers to any medium that can be read and accessed directly by a computer. Such media include, but are not limited to: magnetic storage media, such as floppy discs, hard disc, storage medium, and magnetic tape: optical storage media such as CD-ROM; electrical storage media such as RAM and ROM; and hybrids of these categories such as magnetic/optical storage media. A skilled artisan can readily appreciate how any of the presently known computer readable media can be used to create a manufacture comprising a computer readable medium having recorded thereon a nucleotide sequence of the present invention.

[0086] As used herein, “recorded” refers to a process for storing information on computer readable media. A skilled artisan can readily adopt any of the presently known methods for recording information on computer readable media to generate media comprising the nucleotide sequence information of the present invention. A variety of data storage structures are available to a skilled artisan for creating a computer readable medium having recorded thereon a nucleotide sequence of the present invention. The choice of the data storage structure will generally be based on the means chosen to access the stored information. In addition, a variety of data processor programs and formats can be used to store the nucleotide sequence information of the present invention on computer readable media. The sequence information can be represented in a word processing text file, formatted in commercially-available software such as WordPerfect and Microsoft Word, or represented in the form of an ASCII file, stored in a database application, such as DB2, Sybase, Oracle, or the like. A skilled artisan can readily adapt any number of data processor structuring formats (e.g., text file or database) in order to obtain a computer readable medium having recorded thereon the nucleotide sequence information of the present invention.

[0087] By providing one or more of polynucleotide or polypeptide sequences of the present invention in a computer readable medium, a skilled artisan can routinely access the sequence information for a variety of purposes. The examples which follow demonstrate how software which implements the BLAST and BLAZE search algorithms on a Sybase system can be used to identify open reading frames (ORFs) within the genome that contain homology to ORFs or polypeptides from other organisms. Such ORFs are polypeptide encoding fragments within the sequences of the present invention and are useful in producing commercially important polypeptides such as enzymes used in amino acid biosynthesis, metabolism, transcription, translation, RNA processing, nucleic acid and a protein degradation, protein modification, and DNA replication, restriction, modification, recombination, and repair.

[0088] The present invention further provides systems, particularly computer-based systems, which contain the sequence information described herein. Such systems are designed to identify commercially important fragments of the nucleic acid molecule of the present invention. As used herein, “a computer-based system” refers to the hardware, software, and memory used to analyze the sequence information of the present invention. A skilled artisan can readily appreciate that any one of the currently available computer-based systems are suitable for use in the present invention.

[0089] As indicated above, the computer-based systems of the present invention comprise a database having stored therein a nucleotide sequence of the present invention and the necessary hardware and software for supporting and implementing a homology search. As used herein, “database” refers to memory system that can store searchable nucleotide sequence information. As used herein “query sequence” is a nucleic acid sequence, or an amino acid sequence, or a nucleic acid sequence corresponding to an amino acid sequence, or an amino acid sequence corresponding to a nucleic acid sequence, that is used to query a collection of nucleic acid or amino acid sequences. As used herein, “homology search” refers to one or more programs which are implemented on the computer-based system to compare a query sequence, i.e., gene or peptide or a conserved region (motif), with the sequence information stored within the database. Homology searches are used to identify segments and/or regions of the sequence of the present invention that match a particular query sequence. A variety of known searching algorithms are incorporated into commercially available software for conducting homology searches of databases and computer readable media comprising sequences of molecules of the present invention.

[0090] Commonly preferred sequence length of a query sequence is from about 10 to 100 or more amino acids or from about 20 to 300 or more nucleotide residues. There are a variety of motifs known in the art. Protein motifs include, but are not limited to, enzymatic active sites and signal sequences. An amino acid query is converted to all of the nucleic acid sequences that encode that amino acid sequence by a software program, such as TBLASTN, which is then used to search the database. Nucleic acid query sequences that are motifs include, but are not limited to, promoter sequences, cis elements, hairpin structures and inducible expression elements (protein binding sequences).

[0091] Thus, the present invention further provides an input device for receiving a query sequence, a memory for storing sequences (the query sequences of the present invention and sequences identified using a homology search as described above) and an output device for outputting the identified homologous sequences. A variety of structural formats for the input and output presentations can be used to input and output information in the computer-based systems of the present invention. A preferred format for an output presentation ranks fragments of the sequence of the present invention by varying degrees of homology to the query sequence. Such presentation provides a skilled artisan with a ranking of sequences that contain various amounts of the query sequence and identifies the degree of homology contained in the identified fragment.

[0092] Having now generally described the invention, the same will be more readily understood through reference to the following examples which are provided by way of illustration, and are not intended to be limiting of the present invention, unless specified.

### EXAMPLE 1

[0093] This example illustrates the construction of the rice genomic library. BACs are stable, non-chimeric cloning systems having genomic fragment inserts (100-300 kb) and their DNA can be prepared for most types of experiments including DNA sequencing. BAC vector, pBeloBAC11, is derived from the endogenous E. coli F-factor plasmid, which contains genes for strict copy number control and unidirectional origin of DNA replication. Additionally, pBeloBAC11 has three unique restriction enzyme sites (Hind III, Bam HI and Sph I) located within the LacZ gene that can be used as cloning sites for megabase-size plant DNA. Indigo, another BAC vector contains Hind III and Eco RI cloning sites. This vector also contains a random mutation in the LacZ gene that allows for darker blue colonies.

[0094] As an alternative, the P1-derived artificial chromosome (PAC) can be used as a large DNA fragment cloning vector (Ioannou et al., Nature Genet. 6:84-89 (1994; Suzuki et al., Gene 199:133-137 (1997). The PAC vector has most of the features of the BAC system, but also contains some of the elements of the bacteriophage P1 cloning system.

[0095] BAC libraries are generated by ligating size-selected restriction digested DNA with pBeloBAC11 followed by electroporation into E. coli. BAC library construction and characterization is extremely efficient when compared to YAC (yeast artificial chromosome) library construction and analysis, particularly because of the chimerism associated with YACs and difficulties associated with extracting YAC DNA.

[0096] There are general methods for preparing megabase-size DNA from plants. For example, the protoplast method yields megabase-size DNA of high quality with minimal breakage. The process involves preparing young leaves that are manually feathered with a razor-blade before being incubated for four to five hours with cell-wall-degrading enzymes. The second method developed by Zhange et al., Plant J 7:175-184 (1995), is a universal nuclei method that works well for several divergent plant taxa. Fresh or frozen tissue is homogenized with a blender or mortar and pestle. Nuclei are then isolated and embedded. DNA prepared by the nucleic method is often more concentrated and is reported to contain lower amounts of chloroplast DNA than the protoplast method.

[0097] Once protoplasts or nuclei are produced, they are embedded in an agarose matrix as plugs or microbeads. The agarose provides a support matrix to prevent shearing of the DNA while allowing enzymes and buffers to diffuse into the DNA. The DNA is purified and manipulated in the agarose and is stable for more than one year at 4° C.

[0098] Once high molecular weight DNA has been prepared, it is fragmented to the desired size range. In general, DNA fragmentation utilizes two general approaches, 1) physical shearing and 2) partial digestion with a restriction enzyme that cuts relatively frequently within the genome. Since physical shearing is not dependent upon the frequency and distribution of particular restriction enzymes sites, this method should yield the most random distribution of DNA fragments. However, the ends of the sheared DNA fragments must be repaired and cloned directly or restriction enzyme sites added by the addition of synthetic linkers. Because of the subsequent steps required to clone DNA fragmented by shearing, most protocols fragment DNA by partial restriction enzyme digestion. The advantage of partial restriction enzyme digestion is that no further enzymatic modification of the ends of the restriction fragments is necessary. Four common techniques that can be used to achieve reproducible partial digestion of megabase-size DNA are 1) varying the concentration of the restriction enzyme, 2) varying the time of incubation with the restriction enzyme 3) varying the concentration of an enzyme cofactor (e.g., Mg²⁺) and 4) varying the ratio of endonuclease to methylase.

[0099] There are three cloning sites in pBeloBAC11, but only Hind III and Bam HI produce 5′ overhangs for easy vector dephosphorylation. These two restriction enzymes are primarily used to construct BAC libraries. The optimal partial digestion conditions for megabase-size DNA are determined by wide and narrow window digestions. To optimize the optimum amount of Hind III, 1, 2, 3, 10, and 5-units of enzyme are each added to 50 ml aliquots of microbeads and incubated at 37° C. for 20 minutes.

[0100] After partial digestion of megabase-size DNA, the DNA is run on a pulsed-field gel, and DNA in a size range of 100-500 kb is excised from the gel. This DNA is ligated to the BAC vector or subjected to a second size selection on a pulsed field gel under different running conditions. Studies have previously reported that two rounds of size selection can eliminate small DNA fragments co-migrating with the selected range in the first pulse-field fractionation. Such a strategy results in an increase in insert sizes and a more uniform insert size distribution. A practical approach to performing size selections is to first test for the number of clones/microliter of ligation and insert size from the first size selected material. If the numbers are good (500 to 2000 white colony/microliter of ligation) and the size range is also good (50 to 300 kb) then a second size selection is practical. When performing a second size selection one expects an 80 to 95% decrease in the number of recombinant clones per transformation.

[0101] Twenty to two hundred nanograms of the size-selected DNA are ligated to dephosphorylated BAC vector (molar ratio of 10 to 1 in BAC vector excess). Most BAC libraries use a molar ratio of 5 to 15:1 (size selected DNA: BAC vector).

[0102] Transformation is carried out by electroporation and the transformation efficiency for BACs is about 40 to 1,500 transformants from one microliter of ligation product or 20 to 1000 transformants/ng DNA.

[0103] Several tests can be carried out to determine the quality of a BAC library. Three basic tests to evaluate the quality include: the genome coverage of a BAC library-average insert size, average number of clones hybridizing with single copy probes and chloroplast DNA content.

[0104] The determination of the average insert size of the library is assessed in two ways. First, during library construction every ligation is tested to determine the average insert size by assaying 20-50 BAC clones per ligation. DNA is isolated from recombinant clones using a standard mini preparation protocol, digested with Not I to free the insert from the BAC vector and then sized using pulsed field gel electrophoresis (Maule, Molecular Biotechnology 9:107-126 (1998)).

[0105] To determine the genome coverage of the library, it is screened with single copy RFLP markers distributed randomly across the genome by hybridization. Microtiter plates containing BAC clones are spotted onto Hybond membranes. Bacteria from 48 or 72 plates are spotted twice onto one membrane resulting in 18,000 to 27,648 unique clones on each membrane in either a 4×4 or 5×5 orientation. Since each clone is present twice, false positives are easily eliminated and true positives are easily recognized and identified.

[0106] Finally, the chloroplast DNA content in the BAC library is estimated by hybridizing three chloroplast genes spaced evenly across the chloroplast genome to the library on high density hybridization filters.

[0107] There are strategies for isolating rare sequences within the genome. For example, higher plant genomes can range in size from 100 Mb/1C (Arabidopsis) to 15,966 Mb/C (Triticum aestivum), (Arumuganathan and Earle, Plant Mol Bio Rep. 9: 208-219 (1991)). The number of clones required to achieve a given probability that any DNA sequence will be represented in a genomic library is N=ln(1−P))/(ln(1−L/G)) where N is the number of clones required, P is the probability desired to get the target sequence, L is the length of the average clone insert in base pairs and G is the haploid genome length in base pairs (Clarke et al., Cell 9:91-100 (1976)).

[0108] The rice BAC library of the present invention is constructed in the pBeloBAC11 or similar vector. Inserts are generated by partial Eco RI digestion or other enzymatic digestion of DNA.

### EXAMPLE 2

[0109] This example serves to illustrate how the genomic sequences are sequenced and combined into contigs. Basic methods can be used for DNA sequencing and are well known to one skilled in the art. Automation and advances in technology such as the replacement of radioisotopes with fluorescence-based sequencing have reduced the effort required to sequence DNA. Automated sequencers are available from, for example, Pharmacia Biotech, Inc., Piscataway, N.J. (Pharmacia ALF), LI-COR, Inc., Lincoln, Nebr. (LI-COR 4,000) and Millipore, Bedford, Mass. (Millipore BaseStation).

[0110] In addition, advances in capillary gel electrophoresis have also reduced the effort required to sequence DNA and such advances provide a rapid high resolution approach for sequencing DNA samples. The 3700 DNA Sequencer (Perkin-Elmer Corp., Applied Biosystems Div., Foster City, Calif.) is a machine that uses this technology.

[0111] A number of sequencing techniques are known in the art, including fluorescence-based sequencing methodologies. These methods have the detection, automation and instrumentation capability necessary for the analysis of large volumes of sequence data. With these types of automated systems, fluorescent dye-labeled sequence reaction products are detected and data entered directly into the computer, producing a chromatogram that is subsequently viewed, stored, and analyzed using the corresponding software programs. These methods are known to those of skill in the art and have been described and reviewed.

[0112] PHRED is used to call the bases from the sequence trace files. Phred uses Fourier methods to examine the four base traces in the region surrounding each point in the data set in order to predict a series of evenly spaced predicted locations. That is, it determines where the peaks would be centered if there were no compressions, dropouts, or other factors shifting the peaks from their “true” locations. Next, PHRED examines each trace to find the centers of the actual, or observed peaks and the areas of these peaks relative to their neighbors. The peaks are detected independently along each of the four traces so many peaks overlap. A dynamic programming algorithm is used to match the observed peaks detected in the second step with the predicted peak locations found in the first step.

[0113] After the base calling is completed, contaminating sequences (e.g., E. coli) are removed, and BAC vector and sub-cloning vectors sequence segments with >30 bases are trimmed and constraints are made for the assembler. Rice contigs are assembled using CAP3.

[0114] A two-step re-assembly process is employed to reduce sequence redundancies caused by overlaps between BAC clones. In the first step, BAC clones are grouped into clusters based on overlaps between contig sequences from different BACs. These overlaps are identified by comparing each sequence in the dataset against every other sequence, by BLASTN. BACs containing overlaps greater than 5,000 base pairs in length and greater than 94% in sequence identity are put into the same cluster. Repetitive sequences are masked prior to this procedure to avoid false joining by repetitive elements present in the genome. In the second step, sequences from each BAC cluster are assembled by PHRAP.longread, which is able to handle very long sequences. A minimum match is set at 100 bp and a minimum score is set at 600 as a threshold to join input contigs into longer contigs.

[0115] Oryza sativa contigs are assembled using PANGEA clustering tools and PHRAP. PANGEA clustering tools are a series of scripts that group sequences (clusters) by comparing pairs of sequences for overlapping bases. The overlap is determined using the following high stringency parameters: word size=8; window size=60; and identity is 93%. Each of the clusters is then assembled using PHRAP. This step results in islands. The next step is to combine the islands together to collapse the contig number even further. Default, less stringent parameters, are used in this step: minimum match=14, minimum score=30; and the penalty is −2.

### EXAMPLE 3

[0116] This example illustrates the identification of genes within rice genomic contig libraries as assembled above. The genes and partial genes embedded in such contigs are identified through a series of bioinformatic analyses. The tools to define genes fall into two categories: homology-based and predictive-based methods. Homology-based searches (e.g., GAP2, BLASTX supplemented by NAP and TBLASTX) detect conserved sequences during comparisons of DNA sequences or hypothetically translated protein sequences to public and/or proprietary DNA and protein databases. Existence of an Oryza sativa gene is inferred if significant sequence similarity extends over the majority of the target gene. Since homology-based methods may overlook genes unique to Oryza sativa, for which homologous nucleic acid molecules have not yet been identified in databases, gene prediction programs are also used. Predictive methods employed in the definition of the Oryza sativa genes include the use of the GenScan gene predictive software program. In general terms, GenScan infers the presence and extent of a gene through a search for “gene-like” grammar.

[0117] The homology-based methods used to define the Oryza sativa gene set include BLASTX supplemented by NAP. NAP is part of the Analysis and Annotation Tool (AAT) for Finding Genes in Genomic Sequences. The AAT package includes two sets of programs, one set DPS/NAP (referred to as “NAP”) for comparing the query sequence with a protein database, and the other set DDS/GAP2 (referred to as “GAP2”) for comparing the query sequence with a cDNA database. Each set contains a fast database search program and a rigorous alignment program. The database search program quickly identifies regions of the query sequence that are similar to a database sequence. Then the alignment program constructs an optimal alignment for each region and the database sequence. The alignment program also reports the coordinates of exons in the query sequence.

[0118] The NAP program computes a global alignment of a DNA sequence and a protein sequence without penalizing terminal gaps. NAP handles frameshifts and long introns in the DNA sequence. The program delivers the alignment in linear space; so long sequences can be aligned. It makes use of splice site consensuses in alignment computation. Both strands of the DNA sequence are compared with the protein sequence and one of the two alignments with the larger score is reported.

[0119] NAP takes a nucleotide sequence, translates it in three forward reading frames and three reverse complement reading frames, and then compares the six translations against a protein sequence database (e.g. the non-redundant protein (i.e., nr-aa) database maintained by the National Center for Biotechnology Information as part of GenBank and available at the web site: www.ncbi.nlm.nih.gov).

[0120] The second homology-based method used for gene discovery is BLASTX hits extended with the NAP software package. BLASTX is run with the Oryza sativa genomic contigs as queries against the GenBank non-redundant protein data library identified as “nr.aa”. NAP is used to better align the amino acid sequences as compared to the genomic sequence. NAP extends the match in regions where BLASTX has identified high-scoring-pairs (HSPs), predicts introns, and then links the exons into a single ORF prediction. Experience suggests that NAP tends to mispredict the first exon. The NAP parameters are:

[0121] gap extension penalty=1

[0122] gap open penalty=15

[0123] gap length for constant penalty=25

[0124] min exon length (in aa)=7

[0125] minimum total length of all exons in a gene (in nucleotide)=200

[0126] homology >40%

[0127] The NAP alignment score and GenBank reference number for best match are reported for each contig for which there is a NAP hit.

[0128] The GenScan program is “trained” with Arabidopsis thaliana characteristics. Though better than the “off-the-shelf” version, the GenScan trained to identify Oryza sativa and Arabidopsis thaliana genes proved more proficient at predicting exons than predicting full-length genes. Predicting full-length genes is compromised by point mutations in the unfinished contigs, as well as by the short length of the contigs relative to the typical length of a gene. Due to the errors found in the full-length gene predictions by GenScan, inclusion of GenScan-predicted genes is limited to those genes and exons whose probabilities are above a conservative probability threshold. The GenScan parameters are:

[0129] weighted mean GenScan P value>0.4

[0130] mean GenScan T value>0

[0131] mean GenScan Coding score>50

[0132] length>200 bp

[0133] The weighted mean GenScan P value is a probability for correctly predicting ORFs or partial ORFs and is defined as the (1/Σlᵢ)(Σlᵢ Pᵢ), where “1” is the length of an exon and “P” is the probability or correctness for the exon.

### EXAMPLE 4

[0134] This example illustrates the generation of the EST libraries from cDNA prepared from a variety of Glycine max, Oryza sativa, and Zea mays tissue. Seeds are planted in commonly used planting pots and grown in an environmental chamber. Tissue is harvested as follows:
[0135] a) For leaf tissue-based cDNA, leaf blades are cut with sharp scissors at seven weeks after planting;
[0136] b) For root tissue-based cDNA, roots of seven-week old plants are rinsed intensively with tap water to wash away dirt, and briefly blotted by paper towel to take away free water;
[0137] c) For stem tissue-based cDNA, stems are collected seven to eight weeks after planting by cutting the stems from the base and cutting the top of the plant to remove the floral tissue;
[0138] d) For flower bud tissue-based cDNA, green and unopened flower buds are harvested about seven weeks after planting;
[0139] e) For open flower tissue-based cDNA, completely opened flowers with all parts of floral structure observable, but no siliques are appearing, and are harvested about seven weeks after planting;
[0140] f) For immature seed tissue-based cDNA, seeds are harvested at approximately 7-8 weeks of age. The seeds range in maturity from the smallest seeds that could be dissected from siliques to just before starting to turn yellow in color.

[0141] All tissue is immediately frozen in liquid nitrogen and stored at −80° C. until total RNA extraction. The stored RNA is purified using Trizol reagent from Life Technologies (Gibco BRL, Life Technologies, Gaithersburg, Md. U.S.A.), essentially as recommended by the manufacturer. Poly A+ RNA (mRNA) is purified using magnetic oligo dT beads essentially as recommended by the manufacturer (Dynabeads, Dynal Corporation, Lake Success, N.Y. U.S.A.).

[0142] Construction of plant cDNA libraries is well-known in the art and a number of cloning strategies exist. A number of cDNA library construction kits are commercially available. The Superscript™ Plasmid System for cDNA synthesis and Plasmid Cloning (Gibco BRL, Life Technologies, Gaithersburg, Md. U.S.A.) is used, following the conditions suggested by the manufacturer.

[0143] The cDNA libraries are plated on LB agar containing the appropriate antibiotics for selection and incubated at 37° for a sufficient time to allow the growth of individual colonies. Single colonies are individually placed in each well of a 96-well microtiter plates containing LB liquid including the selective antibiotics. The plates are incubated overnight at approximately 37° C. with gentle shaking to promote growth of the cultures. The plasmid DNA is isolated from each clone using Qiaprep plasmid isolation kits, using the conditions recommended by the manufacturer (Qiagen Inc., Santa Clara, Calif. U.S.A.).

[0144] The template plasmid DNA clones are used for subsequent sequencing. For sequencing the cDNA libraries, a commercially available sequencing kit, such as the ABI PRISM dRhodamine Terminator Cycle Sequencing Ready Reaction Kit with AmpliTaq® DNA Polymerase, FS, is used under the conditions recommended by the manufacturer (PE Applied Biosystems, Foster City, Calif.). The ESTs of the present invention are generated by sequencing initiated from the 5′ end of each cDNA clone.

[0145] A number of sequencing techniques are known in the art, including fluorescence-based sequencing methodologies. These methods have the detection, automation and instrumentation capability necessary for the analysis of large volumes of sequence data. Currently, the 377 DNA Sequencer (Perkin-Elmer Corp., Applied Biosystems Div., Foster City, Calif.) allows the most rapid electrophoresis and data collection. With these types of automated systems, fluorescent dye-labeled sequence reaction products are detected and data entered directly into the computer, producing a chromatogram that is subsequently viewed, stored, and analyzed using the corresponding software programs. These methods are known to those of skill in the art and have been described and reviewed.

[0146] The generated ESTs (including any full length cDNA sequences) are combined with ESTs and full length cDNA sequences in public databases such as GenBank. Duplicate sequences are removed; and duplicate sequence identification numbers are replaced. The combined dataset is then clustered and assembled using Pangea Systems tool identified as CAT v.3.2. First, the EST sequences are screened and filtered, e.g. high frequency words are masked to prevent spurious clustering; sequence common to known contaminants such as cloning bacteria are masked; high frequency repeated sequences and simple sequences are masked; unmasked sequences of less than 100 bp are eliminated. The thus-screened and filtered ESTs are combined and subjected to a word-based clustering algorithm which calculates sequence pair distances based on word frequencies and uses a single linkage method to group like sequences into clusters of more than one sequence, as appropriate. Clustered sequence files are assembled individually using an iterative method based on PHRAP/CRAW/MAP providing one or more self-consistent consensus sequences and inconsistent singleton sequences. The assembled clustered sequence files are checked for completeness and parsed to create data representing each consensus contiguous sequence (contig), the initial EST sequences, and the relative position of each EST in a respective contig. The sequence of the 5′ most clone is identified from each contig. The initial sequences that are not included in a contig are separated out. A FASTA file is created consisting of sequences comprising the sequence of each contig and all original sequences which were not included in a contig.

### EXAMPLE 5

[0147] cDNA sequences are assembled as above and are translated into all six reading frames. Translations of genes or gene fragments from genomic DNA whose coordinates are determined by Genscan or AAT/NAP are searched against standard or fragment Pfam (version 5.3) profile Hidden Markov Models for transcription factor families as are the cDNA translations. HMMs for transcription factor families in Pfam were rebuilt using HMMER software based on the full alignment provided in Pfam. The E value cutoff is set at 10.

[0148] Hidden Markov Models are constructed for transcription factor families not included in the Pfam database by aligning known domains manually. Hidden Markov Models are built using hmmbuild (with and without the-f option) using the HMMER software with the alignments as input. HMM models are calibrated using the HMMER software (hmmcalibrate) with the HMM model as input. Protein data sets are searched with the HMM models using hmmsearch in the HMMER software package version 2.1.1 using default parameters.

[0149] Framealign searches are used when known transcription factor domains are not detected by Hidden Markov Models. In these cases, the domains per transcription factor family are listed from the Transfac database. Using Gencore software version 4.5.4 DNA datasets are framealign searched with each domain using an E value cutoff of 1E-3 all other parameters are default. The search results are combined for all domains per family.

[0150] Additional transcription factors are found by keyword searches that are carried out against cDNA sequences annotated using the BLAST 2.0 suite of programs with default parameters. Keyword searching is carried out against the top hit (E value better than or equal to 1E-08) using terms indicative of transcription factor families from Table 2.

### DESCRIPTION OF THE TABLES

[0151] Table 1 of U.S. application Ser. No. 10/438,246 lists the amino acid sequences translated from nucleotide sequences determined to be transcription factors as analyzed in Example 5, above. Column headings are as follows:
[0152] SEQ NUM: The entries in the SEQ NUM column refer to the corresponding sequence in the sequence listing.
[0153] SEQ ID: The SEQ ID is the name of the sequence.
[0154] Family/Method/E value: Entries in this column list the transcription factor family to which the sequence belongs. The families are described in Table 2. The entries also list the method used to determine transcription factor family. “HMM” refers to the Hidden Markov Model method as described in Example 5. “Framesearch” refers to the framealign search method described in Example 5 and “keyword” refers to BLAST annotation followed by keyword searching as described in Example 5. The E value for each of the methods is also listed in this column. E value is defined as the expectation E (range 0 to infinity) calculated for an alignment between the query sequence and a database sequence can be extrapolated to an expectation over the entire database search, by converting the pairwise expectation to a probability (range 0-1) and multiplying the result by the ratio of the entire database size (expressed in residues) to the length of the matching database sequence. In detail:
   [0155] E_database=(1−exp(−E)) D/d where D is the size of the database; d is the length of the matching database sequence; and the quantity (1−exp(−E)) is the probability, P, corresponding to the expectation E for the pairwise sequence comparison.

[0156] Table 2 lists transcription factor families, a brief description of each, and other related families. Column headings are as follows:
[0157] Transcription Factor Family: Entries in this column list the transcription factor families as listed in the Pfam database, Transfac, or PROSITE.
[0158] Family Name and Domain Description: Entries in this column describe the transcription factor families listed in column 1. These descriptions are from the Pfam database, Transfac, or PROSITE.

TABLE 2

| Transcription | |
|---|---|
| Factor Family | Family Name and Domain Description |
| AP2 | This 60 amino acid residue domain can bind to DNA -- this domain is plant specific -- members |
| | of this family are suggested to be related to pyridoxal phosphate-binding domains such as found |
| | in aminotran 2-ethylene response (inducible). Examples: ethylene-responsive element binding |
| | proteins (EREBPs) & E. coli universal stress protein UspA |
| ANK | Ankyrin repeat. Some Ankyrin-only proteins will interact with rel-ankyrin proteins to inhibit |
| | DNA binding activity. Examples: IkB α, γ, β and cactus. |
| ARF | Auxin response factor -- plant specific. Not in Pfam - not to be confused with similarly named |
| | ADP-ribosylation factor (GTP binding protein) that is listed as ARF in Pfam. |
| ARID | AT-Rich Interaction Domain - DNA-binding. Examples: Structural homology with T4 RNase |
| | H, E. coli endonuclease III & Bacillus subtilis DNA polymerase I |
| AT-hook | The AT-hook is an AT-rich DNA-binding motif that was first described in mammalian high- |
| | mobility-group non-histone chromosomal protein HMG-I/Y. It is necessary and sufficient for |
| | binding to the narrow minor groove of stretches of AT-rich DNA via a conserved nine amino |
| | acid peptide (KRPRGRPKK). Many of the AT-hook DNA-binding motif proteins have been |
| | shown to have an effect on the structure and architecture of chromatin at levels beyond the |
| | action of the basic histones. They have been shown to also play a role in transcription regulation |
| | by acting as cofactors. |
| 14-3-3 | The 14-3-3 proteins are a family of closely related acidic homodimeric proteins of about 30 Kd. |
| | The GF14 (G-Box Factor 14-3-3 Homolog) family is a group of proteins similar to 14-3-3 |
| | proteins that bind G-box oligonucleotides in promoters to regulate transcription. |
| B3 | Similar to ARF - plant specific. Not in Pfam. Binds DNA directly. |
| BAH | Bromo-adjacent homology. Appears to act as a protein-protein interaction module specialized |
| | in gene silencing. It might play an important role by linking DNA methylation, replication and |
| | transcriptional regulation. Examples: DNA (cytosine-5) methyltransferases & Origin recognition |
| | complex 1 (Orc1) proteins. |
| basic | This basic domain is found in the MyoD family of muscle specific proteins that control muscle |
| | development. The bHLH region of the MyoD family includes the basic domain and the Helix- |
| | loop-helix (HLH) motif. The bHLH region mediates specific DNA binding with 12 residues of |
| | the basic domain involved in DNA binding. The basic domain forms an extended alpha helix in |
| | the structure. |
| BPF-1 | The parsley BPF-1 protein (Box P-binding factor) was identified as a transcription factor that |
| | bound the promoter of phenylalanine ammonia lyase (PAL1) in response to a fungal elicitor. An |
| | Arabidopsis homolog HPPBF-1 (H-protein promoter binding factor-1), was found to regulate |
| | light-dependent expression of the H subunit of glycine decarboxylase, a mitochondrial enzyme |
| | complex involved in photorespiration. |
| bromodomain | About 70 amino acids -- Exact function of this domain is not yet known but it is thought to be |
| | involved in protein-protein interactions and it may be important for the assembly or activity of |
| | multicomponent complexes involved in transcriptional activation. Examples: Mammalian |
| | CREB-binding protein; also found in many chromatin associated proteins -- bromodomains can |
| | interact specifically with acetylated lysine. |
| BTB | Named for BR-C, ttk and bab -- approximately 115 amino acids. The POZ or BTB domain is |
| | also known as BR-C/Ttk or ZiN Found primarily in zinc finger proteins -- present near the N- |
| | terminus of a fraction of zinc finger (zf-C2H2) proteins. The BTB/POZ domain mediates |
| | homomeric dimerization and in some instances heteromeric dimerization - inhibits the |
| | interaction of their associated finger regions with DNA -- shown to mediate transcriptional |
| | repression and to interact with components of histone deacetylase co-repressor complexes. Other |
| | Examples: Drosophila bric a brac protein plus an estimated 40 members in Drosophila. |
| BZIP | Basic region mediating sequence-specific DNA-binding followed by a leucine zipper required |
| | for dimerization -- family is quite large. Examples: Fos, Jun, CRE, & Arabidopsis G-box |
| | binding factors GBF. |
| CBFD, NFYB, | Histone-like transcription factors (CBF/NF-Y) and archaeal histones CCAAT-binding factor |
| HMF | (CBF). Heteromeric transcription factor that consists of two different components, both needed |
| | for DNA-binding. First subunit of CBFD (NF-YB) binds DNA (protein of 116 to 210 amino- |
| | acid residues); the second subunit of CBFD (NF-YA) contains an N-terminal subunit-association |
| | domain and a C-terminal DNA recognition domain (a protein of 265 to 350 amino-acid |
| | residues). Other Examples: histone-like subunits of transcription factor IID. |
| chromo | CHRromatin Organization MOdifier -- about 60 amino acids Originally found in proteins that |
| | modify the structure of chromatin to the condensed morphology of heterochromatin (Drosophila |
| | modifiers of variegation). Examples: Fission yeast swi6 (repression of the silent mating-type |
| | loci mat2 and mat3), Drosophila protein Su(var)3-9 (a suppressor of position-effect variegation), |
| | & mammalian DNA-binding/helicase proteins CHD-1 to CHD-4. |
| chromo shadow | This domain is distantly related to chromo. This domain is always found in association with a |
| | chromo domain although not all chromo domain proteins contain the chromo shadow. |
| | Examples: Fission yeast swi6 (repression of the silent mating-type loci mat2 and mat3). |
| Copper-fist | Some fungal transcription factors contain a N-terminal domain that seems to be involved in |
| | copper-dependent DNA-binding -- undergo a conformational change in presence of copper. |
| | Examples: Yeast ACE1 (or CUP2) and Candida glabrata AMT1 that regulate the expression of |
| | the metallothionein genes -- Yarrowia lipolytica copper resistance protein CRF1. |
| CSD | Cold shock domain -- about 70 amino acids. Binds to the CCAAT-containing Y box and the B |
| | box. Binds to cold tolerance gene promoters in bacteria. Examples: E. coli protein CS7.4 (gene |
| | cspA) that is induced in response to low temperature & Bacillus subtilis cold-shock proteins |
| | cspB and cspC. |
| Ctf/nf1 | Nuclear factor I (NF-I) or CCAAT box-binding transcription factor (CTF) (also known as |
| | TGGCA-binding proteins) are a family of vertebrate nuclear proteins which recognize and bind, |
| | as dimers, the palindromic DNA sequence 5′-TGGCANNNTGCCA-3′. CTF/NF-I binding sites |
| | are present in viral and cellular promoters and in the origin of DNA replication of Adenovirus |
| | type 2. |
| Dm-domain | The DM domain is named after dsx and mab-3 -- dsx contains a single amino-terminal DM |
| | domain, whereas mab-3 contains two amino-terminal domains. The DM domain has a pattern of |
| | conserved zinc chelating residues C2H2C4. The dsx DM domain has been shown to dimerize |
| | and bind palindromic DNA. |
| Dof | Dof proteins are a family of TFs that share a unique DNA-binding domain of ~52 aa. May form |
| | a single zinc-finger that is essential for DNA recognition. Plant specific and have various roles |
| | in the cell. Found in both monocots and dicots. |
| DPB | Described by Mendel as the DNA-binding protein (DBP) family, a collection of miscellaneous |
| | proteins that have been functionally identified by their ability to physically bind to DNA via a |
| | DNA-binding domain. Here, includes the remorin like DNA-binding proteins. |
| | Also see TEO which describes the PCF½ like TFs. |
| ENBP | ENBP1 (early nodulin gene-binding protein 1), binds to an AT-rich regulatory element of |
| | psENOD12b to regulate its expression upon infection of plant root hairs by nitrogen-fixing |
| | bacteria. ENBP1 and ENBP1-like transcription factors are probably involved in general cellular |
| | processes, others than in a symbiotic context. |
| Ets | Ets transcription factors are nuclear effectors of the Ras-MAP-kinase signaling pathway. |
| | Avian leukemia virus E26 is a replication defective retrovirus that induces a mixed |
| | erythroid/myeloid leukemia in chickens. E26 virus carries two distinct oncogenes, v-myb and v- |
| | ets. The ets portion of this oncogene is required for the induction of erythroblastosis. V-ets and |
| | c-ets-1, its cellular progenitor, have been shown to be nuclear DNA-binding proteins. |
| Fork_head | About 100 amino-acid residues, also known as the “winged helix” - present in some eukaryotic |
| | trasncription factors - involved in DNA-binding. Examples: Drosophila forkhead (fkh), |
| | mammalian transcriptional activators HNF-3-alpha, -beta, and -gamma, human HTLF, Xenopus |
| | XFKH1, yeast HCM1, yeast FKH1. |
| GATA | GATA family of transcription factors are proteins that bind to DNA sites with the consensus |
| | sequence (A/T)GATA(A/G). Contain a pair of highly similar ‘zinc finger’ type domains. |
| | Examples: GATA 1-4 are TF found in mammals; they regulate development in certain cell |
| | types by binding to the GATA promoter region of globulin genes, & others. Note: A similar |
| | single ‘zinc finger’ domain protein is involved in positive and negative nitrogen metabolism |
| | gene regulation in fungus and yeast and also Neurospora crassa light regulated genes. |
| Gld | A domain with limited amino acid similarity to the TEA DNA binding domain found in a |
| | number of regulatory genes from fungi, insects, and mammals. This domain is predicted to form |
| | two alpha helices with sequence similarity to two alpha helices of the TEA domain that are |
| | implicated in DNA binding. These proteins are not picked up by Pfam's TEA model. Found in |
| | some response_reg proteins. Examples: ARR, AT1; both in Arabidopsis. Golden2 in maize. |
| HhH | Helix-hairpin-helix motif - multiple domains found in a protein. These HhH motifs bind DNA in |
| | a non-sequence-specific manner. Examples: Rat pol beta, endonuclease III, AlkA, & the 5′ |
| | nuclease domain of Taq pol I. |
| Hist_deacetyl | Regulation of transcription is caused in part by reversibly acetylating histones on several lysine |
| | residues. Histone deacetylases catalyze the removal of the acetyl group. |
| HLH | Helix-loop-helix domain - 40 to 50 amino acid residues. Two amphipathic helices joined by a |
| | variable length linker region that could form a loop. This ‘helix-loop-helix’ (HLH) domain |
| | mediates protein dimerization -- most of these proteins have an extra basic region of about 15 |
| | amino acid residues adjacent to the HLH domain which specifically binds to DNA - members of |
| | the family are referred to as basic helix-loop-helix proteins (bHLH) -- bind E boxes -- |
| | dimerization is necessary but independent of DNA binding -- proteins without basic region act |
| | as repressors since they are unable to bind DNA but do dimerize. Examples: Myc (oncogene), |
| | Myo (muscle differentiation), Maize anthocyanin regulatory proteins, and other cellular |
| | differentiation TFs. |
| HMG_box | High mobility group; relatively low molecular weight non-histone components in chromatin |
| | Known to bind to nucleosomes in active chromatin - thought to be involved in chromatin |
| | formation. |
| HMG14_17 | High mobility group. HMG14 and HMG17 are two related proteins of about 100 amino acid |
| | residues that bind to the inner side of the nucleosomal DNA thus altering the interaction between |
| | the DNA and the histone octamer. These two proteins may be involved in the process that |
| | maintains transcribable genes in a unique chromatin conformation. |
| Homeobox | Master control homeotic genes that determine body plan -- 60-residue motif - subfamilies |
| | named for 3 Drosophila gene families. Play an important role in development - most are known |
| | to be sequence-specific DNA-binding transcription factors. The domain binds DNA through a |
| | helix-turn-helix (HTH) structure. -- Homeobox is a 3-element fingerprint that provides a |
| | signature for the homeobox domain of homeotic proteins. Examples: Drosophila hox proteins: |
| | antennapedia (Antp), abdominal-A (abd-A), deformed (Dfd), proboscipedia (pb), sex combs |
| | reduced (scr), and ultrabithorax (ubx) which are collectively known as the ‘antennapedia’ |
| | subfamily; the engrailed subfamily defined by engrailed (en) which specifies the body |
| | segmentation pattern and is required for the development of the CNS; and the paired gene |
| | subfamily. |
| Histone | Histone protein is unique to eukaryotes -- an octamer is assembled to form chromatin with 146 |
| | base pairs of DNA organized into a superhelix around a histone octomer to create a nucleosome |
| | (‘beads on a string’). Examples: H2A, H2B, H3, & H4. |
| HSF_DNA- | Heat shock factor (HSF) is a DNA-binding protein that specifically binds heat shock promoter |
| binding | elements (HSE). HSF is expressed at normal temperatures but is activated by heat shock or |
| | chemical stresses. |
| IAA | The Aux/IAA proteins were identified as a class of short-lived, nuclear localized proteins that |
| | are rapidly transcriptionally induced in response to auxin. These proteins contain four highly |
| | conserved domains (boxes I, II, III, IV) - this model covers boxes III and IV. See ARF family in |
| | this document for related proteins. |
| IBR | The IBR (In Between Ring fingers) domain is found to occur between pairs of ring fingers (Zf- |
| | C3HC4). The function of this domain is unknown. |
| irf | This family of transcription factors is important in the regulation of interferons in response to |
| | infection by virus and in the regulation of interferon-inducible genes. Three of the five |
| | conserved tryptophan residues bind to DNA. |
| K-box | K-box region is commonly found associated with SRF-type transcription factors. The K-box is a |
| | possible coiled-coil structure. Possible role in multimer formation. Examples: PISTILLATA |
| | (PI) gene of Arabidopsis causes homeotic conversion of petals to sepals and of stamens to |
| | carpels & SRF (Serum response factor) binds the serum response element. |
| KRAB | The KRAB domain (or Kruppel-associated box) is present in about a third of zinc finger |
| | proteins containing C2H2 fingers. The KRAB domain is found to be involved in protein-protein |
| | interactions. |
| LIM | Cysteine-rich domain of about 60 amino-acid residues. Generally occurs as two tandem copies |
| | in proteins - in the LIM domain, there are seven conserved cysteine residues and a histidine -- |
| | the LIM domain binds two zinc ions -- LIM does not bind DNA, rather it seems to act as |
| | interface for protein-protein interaction. Examples: Pollen specific protein (SF3), Mammalian |
| | zinc absorption protein, Vertebrate paxillin (cytoskeletal focal adhesion protein), Plaque |
| | adhesion protein, and several homeotic proteins. |
| Linker_histone | Member of histone octamer - see histone. Examples: H1, H5 |
| MADS | See SRF-TF |
| Myb_DNA- | This family contains the DNA-binding domains from the Myb proteins, as well as the SANT |
| binding | domain family. Retroviral oncogene v-myb, and its cellular counterpart c-myb, encode nuclear |
| | DNA-binding proteins that specifically recognize the sequence YAAC(G/T)G. |
| | Examples: Maize C1 protein (anthocyanin biosynthesis), Maize P protein (regulates the |
| | biosynthetic pathway of a flavonoid-derived pigment in certain floral tissues), Arabidopsis GL1 |
| | (required for the initiation of differentiation of leaf hair cells/trichomes), Yeast txn & telomere |
| | length proteins. |
| Myc N Term | Myc amino-terminal region. The myc family belongs to the basic helix-loop-helix leucine zipper |
| | class of transcription factors. Myc forms a heterodimer with Max, and this complex regulates |
| | cell growth through direct activation of genes involved in cell replication. c-Myc can also |
| | repress the transcription of specific genes. |
| NAM | The NAM (no apical meristem) family is a group of transcription factors that share a highly |
| | conserved N-terminal domain of about 150 amino acids, designated the NAC domain (NAC |
| | stands for Petunia, NAM, and Arabidopsis, ATAF1, ATAF2 and CUC2). Present in monocots |
| | and dicots. Probably have roles in the regulation of embryo and flower development. Plant |
| | specific. |
| NAP_FAMILY | Nucleosome assembly protein (NAP) - histone chaperonel May be involved in regulating gene |
| | expression as a result of histone accessibility. NAP-2 (human NAP clone) can interact with both |
| | core and linker histones and recombinant NAP-2 can transfer histones onto naked DNA |
| | templates. |
| P53 | The p53 tumor antigen is a protein found in increased amounts in a wide variety of transformed |
| | cells. p53 is probably involved in cell cycle regulation, and may be a trans-activator that acts to |
| | negatively regulate cellular division by controlling a set of genes required for this process. |
| Pax | “paired box” domain -- a 124 amino-acid conserved domain -- generally located in the N- |
| | terminal section of the proteins -- function of this conserved domain is not yet known. In some |
| | of the pax proteins, there is a homeobox domain upstream of the paired box. Examples: |
| | Drosophila segmentation pair-rule class protein paired (prd), Drosophila proteins Pox-meso and |
| | Pox-neuro, the PAX proteins. |
| PHD | Zinc finger-like motif. Regulate the expression of the homeotic genes through a mechanism |
| | thought to involve some aspect of chromatin structure. Speculate that the PHD-fingers are |
| | protein-protein interaction domains or that they recognize a family of related targets in the |
| | nucleus such as the nucleosomal histone tails. |
| POU | ‘POU’ (pronounced ‘pow’) domain -- a 70 to 75 amino-acid region found upstream of a |
| | homeobox domain in some eukaryotic transcription factors. It is thought to confer high-affinity |
| | site-specific DNA-binding and to mediate cooperative protein-protein interaction on DNA. |
| | Examples: Oct genes (bind to immunoglobulim promoter octomer region to activate genes), |
| | Neuronal development genes, & C. elegans development genes |
| Protamine_p2 | Protamine P2 can substitute for histones in the chromatin of sperm. |
| Response_reg | This domain receives the signal from the sensor partner in bacterial two-component systems. It |
| | is usually found N-terminal to a DNA binding effector domain (e.g.GLD). |
| Rhd | Conserved domain in a family of eukaryotic transcription factors with basic impact on |
| | oncogenesis, embryonic development and differentiation including immune response and acute |
| | phase reaction -- composed of two structural domains, the N-terminal region is similar to that |
| | found in P53, whereas the C terminal region is an immunoglobulin-like fold. Examples: NF- |
| | kappa-B, RelB, Drosophila Dif. |
| Runt | New family of heteromeric TFs. |
| Scan | The SCAN domain (named after SRE-ZBP, CTfin51, AW-1 and Number 18 cDNA) is found in |
| | several zf-c2h2 proteins. This conserved domain has been shown to be able to mediate homo- |
| | and hetero-oligomerisation. |
| SCR | The Arabidopsis SCARECROW gene regulates an assymetric cell division essential for proper |
| | radial organization of root cell layers. It was tentatively described as a transcription factor based |
| | on the presence of homopolymeric stretches of several amino acids, the presence of a basic |
| | domain similar to that of the basic-leucine zipper family of transcription factors, and the |
| | presence of leucine heptad repeats. Two SCARECROW homologs, RGA and GA1, are involved |
| | in the gibberellin signal transduction pathway. |
| SBPB | A new family of DNA binding proteins (putative transcriptional regulators) called squamosa |
| | promoter binding proteins or SBPs that potentially regulate floral transition. The SBPs possess a |
| | bipartite nuclear localization signal, a putative acidic activation domain and a so-called SBP-box |
| | DNA binding domain motif that does not show similarity to any known DNA binding motif. |
| SET | SET (Suvar3-9, Enhancer-of-zeste, & Trithorax) domains appear to be protein-protein |
| | interaction domains. It has been demonstrated that SET domains mediate interactions with a |
| | family of proteins that display similarity with dual-specificity phosphatases (dsPTPases). Link |
| | SET-domain containing components of the epigenetic regulatory machinery with signalling |
| | pathways involved in growth and differentiation. Examples: ASH1 protein contains a SET |
| | domain and a PHD finger (required for stable patterns of homeotic gene expression in |
| | Drosophila). |
| SNF2_N | SNF2 and “others” N-terminal domain. Examples: This domain is found in proteins involved in |
| | a variety of processes including transcription regulation (e.g., SNF2, STH1, brahma, MOT1), |
| | DNA repair (e.g., ERCC6, RAD16, RAD5), DNA recombination (e.g., RAD54), & chromatin |
| | unwinding (e.g., ISWI) as well as a variety of other proteins with little functional information |
| | (e.g., lodestar, ETL1). |
| SRF-TF | 56 amino-acid residues - function as dimers- commonly homeotic proteins. Examples: Human |
| (MADS) | serum response factor (SRF), a ubiquitous nuclear protein important for cell proliferation and |
| | differentiation; homeotic proteins involved in control of floral development; yeast arginine |
| | metabolism regulation protein I, & yeast mating type specific genes. |
| Stat | STAT proteins (Signal Transducers and Activators of Transcription) are a family of |
| | transcription factors that are specifically activated to regulate gene transcription when cells |
| | encounter cytokines and growth factors. STAT proteins also include an SH2 domain. |
| TBP | Transcription factor TFIID (or TATA-binding protein, TBP). General factor that plays a major |
| | role in the activation of eukaryotic genes transcribed by RNA polymerase II - binds the TATA |
| | box -- C-terminal domain of about 180 residues contains two conserved repeats of a 77 amino- |
| | acid region. Generates a saddle-shaped structure that sits astride the DNA. |
| t-box | About 170 to 190 amino acids, known as the T-box domain. First found in mouse T locus |
| | (Brachyury) protein, a transcription factor involved in mesoderm differentiation. |
| | Essential in tissue specification, morphogenesis and organogenesis |
| Tea | A DNA-binding region of about 66 to 68 amino acids that has been found in the N-terminal |
| | section of several regulatory proteins. Examples: Mammalian enhancer factor TEF-1, |
| | Drosophila scalloped protein (gene sd), Emericella nidulans regulatory protein abaA, yeast |
| | trans-acting factor TEC1, C. elegans hypothetical protein F28B12.2. |
| TEO | The founding members of this gene family are teosinte-branched1 of maize and cycloidea of |
| | Antirrhinum (snapdragon), both of which are involved in the control of plant form and structure. |
| | They have limited similarity to the rice DNA binding proteins PCF1 and PCF2. All share a |
| | predicted basic-helix-loop-helix domain, TCP, which has been shown to be required for DNA |
| | binding of PCF1 and PCF2. |
| TFIIS | Transcription factor S-II (TFIIS). Necessary for efficient RNA polymerase II transcription |
| | elongation, past template-encoded pause sites. TFIIS shows DNA-binding activity only in the |
| | presence of RNA polymerase II. Contains four cysteines that bind a zinc ion and fold in a |
| | conformation termed a ‘zinc ribbon’. Examples: also includes the eukaryotic and archebacterial |
| | RNA polymerase subunits of the 15 Kd/M family, African swine fever virus protein I243L, & |
| | Vaccinia virus RNA polymerase. |
| Trihelix | Plant specific domain involved in light response -- plant specific; not in Pfam. |
| Transcript_fac2 | Transcription factor TFIIB repeat. |
| WRKY | ~50-60 aa domain. Often repeated within a WRKY protein, but it may also be present as a single |
| | copy. WRKY proteins contain several general features typical of transcription factors, like |
| | putative nuclear localization signals and transcription activation domains. Founding members |
| | are ABF1 and ABF2 proteins. May be involved in regulation of sporamin and alpha-amy genes. |
| | May also play a role in the signal transduction pathway that leads to pathogenesis-related (PR) |
| | gene activation in response to pathogens. |
| ZF-B box | B-box zinc finger. |
| ZF-C2H2 | The first zinc finger class to be characterized -- the first pair of zinc coordinating residues are |
| | cysteines, while the second pair are histidines. A number of experimental reports have |
| | demonstrated the zinc-dependent DNA or RNA binding property of some members of this class. |
| | Examples: Mammalian transcription factors Sp1-4, Xenopus transcription factor TFIIIA, & |
| | Drosophila Hunchback and Kruppel |
| Zf-C3HC4 | Conserved cysteine-rich domain of 40 to 60 residues (called C3HC4 zinc-finger or ‘RING’ |
| | finger) that binds two atoms of zinc, and is probably involved in mediating protein-protein |
| | interactions. |
| ZF-C4 | Conserved cysteine-rich DNA-binding region of some 65 residues. Almost always the DNA- |
| | binding domain of a nuclear hormone receptor. Receptors for steroid, thyroid, and retinoid |
| | hormones belong to a family of nuclear trans-acting transcriptional regulatory factors. These |
| | proteins regulate diverse biological processes such as pattern formation, cellular differentiation |
| | and homeostasis. |
| ZF-CCCH | Zinc finger |
| ZF-CCHC | A family of CCHC zinc fingers, mostly from retroviral gag proteins (nucleocapsid). Prototype |
| | structure is from HIV. Also contains members involved in eukaryotic gene regulation, such as |
| | C. elegans GLH-1. Structure is an 18-residue zinc finger. |
| ZF-CHC2 | CHC2 zinc finger |
| ZF-CONSTANS | CONSTANS family zinc finger. So far only reported in plants. CONSTANS (CO) gene of |
| | Arabidopsis promotes flowering. Some transgenic plants containing extra copies of CO flowered |
| | earlier than wild type, suggesting that CO activity is limiting on flowering time. Double mutants |
| | were constructed containing CO and mutations affecting gibberellic acid responses, meristem |
| | identity, or phytochrome function, and their phenotypes suggested a model for the role of CO in |
| | promoting flowering. |
| Zf-C2HC | A DNA-binding zinc finger domain. Examples: human myelin transcription factor (Myt), C. elegans |
| | hypothetical protein F52F12.6, |
| ZF-MYND | DNA-binding domain found in Drosophila DEAF-1 protein that binds to a 120 bp homeotic |
| | response element. |
| ZN_CLUS | A cysteine-rich region that binds DNA in a zinc-dependent fashion. Found in fungal |
| | transcriptional activator proteins. It has been shown that this region forms a binuclear zinc |
| | cluster where six conserved cysteines bind two zinc cations. |
| ZZ | New putative zinc finger in dystrophin and other proteins. Binds calmodulin. DNA-binding not |
| | yet shown. |
| ZF-NF-X1 | Cysteine-rich sequence-specific DNA-binding protein. Interacts with the conserved X-box motif |
| | of the human major histocompatibility complex class II genes via a repeated Cys-His domain |
| | and functions as a transcriptional repressor. |

[0159] All publications and patent applications cited herein are incorporated by reference in their entirely to the same extent as if each individual publication or patent application was specifically and individually indicated to be incorporated by reference.

[0160] Although the foregoing invention has been described in some detail by way of illustration and example for purposes of clarity of understanding, it will be obvious that certain changes and modifications may be practiced within the scope of the appended claims.

1-4. (canceled)

5. A substantially purified nucleic acid molecule comprising a nucleic acid sequence wherein said nucleic acid sequence:
(a) hybridizes under stringent conditions to a nucleic acid sequence selected from the group consisting of SEQ ID NO: 1-5429, SEQ ID NO: 10859-15800, SEQ ID NO: 20743-23549, and SEQ ID NO: 26357-29936, a complement thereof or a fragment of any of the foregoing, or
(b) exhibits a 90% or greater identity to a nucleic acid sequence selected from the group consisting of SEQ ID NO: 1-5429, SEQ ID NO: 10859-15800, SEQ ID NO: 20743-23549, and SEQ ID NO: 26357-29936, a complement thereof or a fragment of any of the foregoing.

6. The substantially purified nucleic acid molecule of claim 5, wherein said nucleic acid molecule encodes a protein selected from the group consisting of a corn protein, a soy protein, a rice protein, and a fragment thereof.

7. The substantially purified nucleic acid molecule of claim 6, wherein said nucleic acid molecule encodes a corn protein or fragment thereof.

8. The substantially purified nucleic acid molecule of claim 6, wherein said nucleic acid molecule encodes a soy protein or fragment thereof.

9. The substantially purified nucleic acid molecule of claim 6, wherein said nucleic acid molecule encodes a rice protein or fragment thereof.

10. A substantially purified nucleic acid molecule comprising a nucleic acid sequence that shares between 100% and 90% sequence identity with a nucleic acid sequence selected from the group consisting of SEQ ID NO: 1-5429, SEQ ID NO: 10859-15800, SEQ ID NO: 20743-23549, and SEQ ID NO: 26357-29936, a complement thereof or a fragment of any of the foregoing.

11. The substantially purified nucleic acid molecule of claim 10, wherein said nucleic acid sequence shares between 100% and 95% sequence identity with a nucleic acid sequence selected from the group consisting of SEQ ID NO: 1-5429, SEQ ID NO: 10859-15800, SEQ ID NO: 20743-23549, and SEQ ID NO: 26357-29936, a complement thereof or a fragment of any of the foregoing.

12. The substantially purified nucleic acid molecule of claim 11, wherein said nucleic acid sequence shares between 100% and 98% sequence identity with a nucleic acid sequence selected from the group consisting of SEQ ID NO: 1-5429, SEQ ID NO: 10859-15800, SEQ ID NO: 20743-23549, and SEQ ID NO: 26357-29936, a complement thereof or a fragment of any of the foregoing.

13. The substantially purified nucleic acid molecule of claim 12, wherein said nucleic acid sequence shares between 100% and 99% sequence identity with a nucleic acid sequence selected from the group consisting of SEQ ID NO: 1-5429, SEQ ID NO: 10859-15800, SEQ ID NO: 20743-23549, and SEQ ID NO: 26357-29936, a complement thereof or a fragment of any of the foregoing.

14. The substantially purified nucleic acid molecule of claim 13, wherein said nucleic acid sequence shares 100% sequence identity with a nucleic acid sequence selected from the group consisting of SEQ ID NO: 1-5429, SEQ ID NO: 10859-15800, SEQ ID NO: 20743-23549, and SEQ ID NO: 26357-29936, a complement thereof or a fragment of any of the foregoing.

15. A substantially purified polypeptide, wherein said polypeptide is encoded by a nucleic acid molecule comprising a nucleic acid sequence, wherein said nucleic acid sequence:
(a) hybridizes under stringent conditions to a nucleic acid sequence selected from the group consisting of SEQ ID NO: 1-5429, SEQ ID NO: 10859-15800, SEQ ID NO: 20743-23549, and SEQ ID NO: 26357-29936, a complement thereof or a fragment of any of the foregoing, or
(b) exhibits a 90% or greater identity to a nucleic acid sequence selected from the group consisting of SEQ ID NO: 1-5429, SEQ ID NO: 10859-15800, SEQ ID NO: 20743-23549, and SEQ ID NO: 26357-29936, a complement thereof or a fragment of any of the foregoing.

16. A substantially purified polypeptide comprising an amino acid sequence that shares between 100% and 90% sequence identity with an amino acid sequence selected from the group consisting of SEQ ID NO: 5430-10858, SEQ ID NO: 15801-20742, SEQ ID NO: 23550-26356, and SEQ ID NO: 29937-33516, or a fragment thereof.

17. The substantially purified polypeptide of claim 16, wherein said amino acid sequence shares between 100% and 95% sequence identity with an amino acid sequence selected from the group consisting of SEQ ID NO: 5430-10858, SEQ ID NO: 15801-20742, SEQ ID NO: 23550-26356, and SEQ ID NO: 29937-33516, or a fragment thereof.

18. The substantially purified polypeptide of claim 17, wherein said amino acid sequence shares between 100% and 98% sequence identity with an amino acid sequence selected from the group consisting of SEQ ID NO: 5430-10858, SEQ ID NO: 15801-20742, SEQ ID NO: 23550-26356, and SEQ ID NO: 29937-33516, or a fragment thereof.

19. The substantially purified polypeptide of claim 18, wherein said amino acid sequence shares between 100% and 99% sequence identity with an amino acid sequence selected from the group consisting of SEQ ID NO: 5430-10858, SEQ ID NO: 15801-20742, SEQ ID NO: 23550-26356, and SEQ ID NO: 29937-33516, or a fragment thereof.

20. The substantially purified polypeptide of claim 19, wherein said amino acid sequence shares 100% sequence identity with an amino acid sequence selected from the group consisting of SEQ ID NO: 5430-10858, SEQ ID NO: 15801-20742, SEQ ID NO: 23550-26356, and SEQ ID NO: 29937-33516, or a fragment thereof.

21. A transformed plant having a nucleic acid molecule which comprises:
(a) an exogenous promoter region which functions in a plant cell to cause the production of an mRNA molecule; which is linked to;
(b) a structural nucleic acid molecule, wherein said structural nucleic acid molecule comprises a nucleic acid sequence, wherein said nucleic acid sequence
(i) hybridizes under stringent conditions to a nucleic acid sequence selected from the group consisting of SEQ ID NO: 1-5429, SEQ ID NO: 10859-15800, SEQ ID NO: 20743-23549, and SEQ ID NO: 26357-29936, a complement thereof or a fragment of any of the foregoing; or
(ii) exhibits a 90% or greater identity to a nucleic acid sequence selected from the group consisting of SEQ ID NO: 1-5429, SEQ ID NO: 10859-15800, SEQ ID NO: 20743-23549, and SEQ ID NO: 26357-29936, a complement thereof or a fragment of any of the foregoing,
which is linked to
(c) a 3′ non-translated sequence that functions in said plant cell to cause the termination of transcription and the addition of polyadenylated ribonucleotides to said 3′ end of said mRNA molecule.

22. The transformed plant according to claim 21, wherein said nucleic acid sequence is a complement of a nucleic acid sequence selected from the group consisting of SEQ ID NO: 1-5429, SEQ ID NO: 10859-15800, SEQ ID NO: 20743-23549, and SEQ ID NO: 26357-29936 or a fragment thereof.

23. The transformed plant according to claim 22, wherein said plant is selected from the group consisting of soybean, maize, cotton and wheat.

24. A transformed plant having a nucleic acid molecule comprising a nucleic acid sequence encoding a polypeptide having an amino acid sequence, wherein said amino acid sequence exhibits a 90% or greater identity with an amino acid sequence selected from the group consisting of SEQ ID NO: 5430-10858, SEQ ID NO: 15801-20742, SEQ ID NO: 23550-26356, and SEQ ID NO: 29937-33516, or a fragment thereof.

25. A transformed seed comprising a transformed plant cell comprising a nucleic acid molecule which comprises:
(a) an exogenous promoter region which functions in said plant cell to cause the production of an mRNA molecule; which is linked to;
(b) a structural nucleic acid molecule, wherein said structural nucleic acid molecule comprises a nucleic acid sequence, wherein said nucleic acid sequence
(i) hybridizes under stringent conditions to a nucleic acid sequence selected from the group consisting of SEQ ID NO: 1-5429, SEQ ID NO: 10859-15800, SEQ ID NO: 20743-23549, and SEQ ID NO: 26357-29936, a complement thereof or a fragment of any of the foregoing; or
(ii) exhibits a 90% or greater identity to a nucleic acid sequence selected from the group consisting of SEQ ID NO: 1-5429, SEQ ID NO: 10859-15800, SEQ ID NO: 20743-23549, and SEQ ID NO: 26357-29936, a complement thereof or a fragment of any of the foregoing,
which is linked to
(c) a 3′ non-translated sequence that functions in said plant cell to cause the termination of transcription and the addition of polyadenylated ribonucleotides to said 3′ end of said mRNA molecule.

26. The transformed seed according to claim 25, wherein said nucleic acid sequence is a complement of a nucleic acid sequence selected from the group consisting of SEQ ID NO: 1-5429, SEQ ID NO: 10859-15800, SEQ ID NO: 20743-23549, and SEQ ID NO: 26357-29936 or a fragment thereof.

27. The transformed seed according to claim 25, wherein said seed is selected from the group consisting of soybean, maize, cotton and wheat seed.

28. The transformed seed according to claim 25, wherein said exogenous promoter region functions in a seed cell.

29. The transformed seed according to claim 25, wherein said exogenous promoter region functions in a leaf cell.

30. A transformed seed comprising a transformed plant cell comprising a nucleic acid molecule comprising a nucleic acid sequence encoding a polypeptide having an amino acid sequence, wherein said amino acid sequence exhibits a 90% or greater identity with an amino acid sequence selected from the group consisting of SEQ ID NO: 5430-10858, SEQ ID NO: 15801-20742, SEQ ID NO: 23550-26356, and SEQ ID NO: 29937-33516, or a fragment thereof.

31. A method of producing a genetically transformed plant, comprising the steps of:
(a) inserting into the genome of a plant cell a recombinant, double-stranded DNA molecule comprising
(i) a promoter which functions in plant cells to cause the production of an RNA sequence,
(ii) a structural nucleic acid molecule, wherein said structural nucleic acid molecule comprises a nucleic acid sequence, wherein said nucleic acid sequence
(A) hybridizes under stringent conditions to a nucleic acid sequence selected from the group consisting of SEQ ID NO: 1-5429, SEQ ID NO: 10859-15800, SEQ ID NO: 20743-23549, and SEQ ID NO: 26357-29936, a complement thereof or a fragment of any of the foregoing; or
(B) exhibits a 90% or greater identity to a nucleic acid sequence selected from the group consisting of SEQ ID NO: 1-5429, SEQ ID NO: 10859-15800, SEQ ID NO: 20743-23549, and SEQ ID NO: 26357-29936, a complement thereof or a fragment of any of the foregoing,
which is linked to
(iii) a 3′ non-translated sequence which functions in plant cells to cause the addition of polyadenylated nucleotides to the 3′ end of RNA sequence,
(b) obtaining a transformed plant cell with said structural nucleic acid molecule that encodes one or more proteins, wherein said structural nucleic acid molecule is transcribed and results in expression of said protein(s); and
(c) regenerating from said transformed plant cell a genetically transformed plant.

32. A method for reducing expression of a protein in a plant cell comprising growing a transformed plant cell containing a nucleic acid molecule wherein the non-transcribed strand of said nucleic acid molecule encodes a protein or fragment thereof, and wherein the transcribed strand of said nucleic acid molecule is complementary to a nucleic acid molecule comprising a nucleic acid sequence selected from the group consisting of SEQ ID NO: 1-5429, SEQ ID NO: 10859-15800, SEQ ID NO: 20743-23549, and SEQ ID NO: 26357-29936, a complement thereof or a fragment of any of the foregoing, and whereby said transcribed strand reduces or depresses expression of said protein.

33. A method for increasing expression of a protein in a plant cell comprising growing a transformed plant cell containing a nucleic acid molecule that encodes a protein or fragment thereof, wherein said nucleic acid molecule comprises a nucleic acid sequence selected from the group consisting of SEQ ID NO: 1-5429, SEQ ID NO: 10859-15800, SEQ ID NO: 20743-23549, and SEQ ID NO: 26357-29936, a complement thereof or a fragment of any of the foregoing, and whereby said nucleic acid molecule increases expression of said protein.

34. A method of producing a plant containing reduced levels of a protein comprising:
(a) transforming a plant cell with a nucleic acid molecule comprising a nucleic acid sequence selected from the group consisting of SEQ ID NO: 1-5429, SEQ ID NO: 10859-15800, SEQ ID NO: 20743-23549, and SEQ ID NO: 26357-29936, a complement thereof or a fragment of any of the foregoing, wherein said nucleic acid molecule is transcribed and results in co-suppression of endogenous protein synthesis activity, and
(b) regenerating said plant comprising said plant cell and producing subsequent progeny from said plant.

35. A method of growing a transgenic plant comprising:
(a) planting a transformed seed comprising a nucleic acid sequence selected from the group consisting of SEQ ID NO: 1-5429, SEQ ID NO: 10859-15800, SEQ ID NO: 20743-23549, and SEQ ID NO: 26357-29936, a complement thereof or a fragment of any of the foregoing, and
(b) growing a plant from said seed.

36. A method of producing a genetically transformed plant, comprising the steps of:
(a) inserting into the genome of a plant cell a recombinant, double-stranded DNA molecule comprising
(i) a promoter which functions in plant cells to cause the production of an RNA sequence,
(ii) a structural nucleic acid molecule, wherein said structural nucleic acid molecule comprises a nucleic acid sequence encoding a polypeptide having an amino acid sequence, wherein said amino acid sequence exhibits a 90% or greater identity with an amino acid sequence selected from the group consisting of SEQ ID NO: 5430-10858, SEQ ID NO: 15801-20742, SEQ ID NO: 23550-26356, and SEQ ID NO: 29937-33516, or a fragment thereof.
which is linked to
(iii) a 3′ non-translated sequence which functions in plant cells to cause the addition of polyadenylated nucleotides to the 3′ end of RNA sequence,
(b) obtaining a transformed plant cell with said structural nucleic acid molecule that encodes one or more proteins, wherein said structural nucleic acid molecule is transcribed and results in expression of said protein(s); and
(c) regenerating from said transformed plant cell a genetically transformed plant.

37. A method for increasing expression of a protein in a plant cell comprising growing a transformed plant cell containing a nucleic acid molecule that encodes a protein or fragment thereof, wherein said nucleic acid molecule comprises a nucleic acid sequence encoding a polypeptide having an amino acid sequence, wherein said amino acid sequence exhibits a 90% or greater identity with an amino acid sequence selected from the group consisting of SEQ ID NO: 5430-10858, SEQ ID NO: 15801-20742, SEQ ID NO: 23550-26356, and SEQ ID NO: 29937-33516, or a fragment thereof, and whereby said nucleic acid molecule increases expression of said protein.

38. A method of producing a plant containing reduced levels of a protein comprising:
(a) transforming a plant cell with a nucleic acid molecule comprising a nucleic acid sequence encoding a polypeptide having an amino acid sequence, wherein said amino acid sequence exhibits a 90% or greater identity with an amino acid sequence selected from the group consisting of SEQ ID NO: 5430-10858, SEQ ID NO: 15801-20742, SEQ ID NO: 23550-26356, and SEQ ID NO: 29937-33516, or a fragment thereof, wherein said nucleic acid molecule is transcribed and results in co-suppression of endogenous protein synthesis activity, and
(b) regenerating said plant comprising said plant cell and producing subsequent progeny from said plant.

39. A method of growing a transgenic plant comprising (a) planting a transformed seed comprising a nucleic acid sequence encoding a polypeptide having an amino acid sequence, wherein said amino acid sequence exhibits a 90% or greater identity with an amino acid sequence selected from the group consisting of SEQ ID NO: 5430-10858, SEQ ID NO: 15801-20742, SEQ ID NO: 23550-26356, and SEQ ID NO: 29937-33516, or a fragment thereof, and
(b) growing a plant from said seed.

The application's sequence listing, which the Patent Office published only in electronic form, follows.

SEQUENCE LISTING (33528 sequences)

SEQ ID NO: 1 - DNA, 186 bp, Zea mays
  Clone ID: TF_LIB3180-007-P2-M1-H1
tcgcgcgttggattcggttcacaggatcctctgcgccaccgcaaccgtgtgaccggccgtgccgccggcgattccgattcggcgacccgtgccaggcccggtcgcagacatgttgccgtcggagccgacccgggaggagagcgtgtacatgggcaagcttgcggagcaagcggagcggtaccagga

SEQ ID NO: 2 - DNA, 1680 bp, Zea mays
  Clone ID: TF_ZmC261_27
gaatagatgagacttttgtctaacttcaatgtaggagtttacaatgcagagaggattgagatgcattatcgatatactcctcaccagtataagttttgcctgctcgcatgaatagatgagactcaagtgtggcttcatgtgagtctaaagcaaaaaatatgcagggggaggggtatcaaaactaccttctccaagtattcttgcaacttttttattctgcccatatagtcttgatcctcaacgcacaatgaaataggatttgaatcgacacctggtccttcaaactggagcgggcctgggtttctgtagacatcttccaacaaaaagctggaagaattctgtctcaacacactaggaaaagttgagctgaatcatcagattcgggatgtagtagtagctgcttccttataaaagggggcaaaaactcaaagtgcagatgcccatggtgaaagctgagaagagatattctcaacagaaacacctttgccatggaagccatggatttcctataaacaaatagctccagtgagtaaaattataaatgggtagtcataagacgtgtaaacgtacctaaagcagagcatatagttcaggaatattctccacaagtgtctcaaataatcagatccaagcaaccatgagcatgacaaaattaagtattaggtatgtattgtttcatttgataattctaggatgtttgtacttcacatcagagttcagttgtttcaacatctttgtttctctaatgcagctactactacatcctgaatctgatgattcagctcaactttcctagattgagactgaaaagctgctagcccagttagttgagactgagatgaacagacgtttgaaggaggacacttacaaaggaaagaagtttaatgcattctgtcacttcttgggctaccaagctaggggagcactgcctgcaaagtttgattgcgattatgcctacgttttggggcatgtgtgctaccacatcatagctgccggattgaacggataacggatacatgactacagtgacaaatcttaagaatccagtgaacaagtggcgatgtggtgcgactcctatttcgtattactactttattcgcttgatgggacgcaaggcttcccatgtggcattggaatgtgctcttcaatcacatccaaacatggtcaaattttcaccattgatccaacctctgctacggcaatttccagcatcggcggtgtgctctttacaaagccttagagctgcctctcctgcaaagtctgaacttgcagagatagtcccacaagagaaatcaccaaaagattccattcaaccaatgtcaccgagtccaaggtattctacctcaagatgaagggcgactaccacaggtcaggcagagagccttggaaccgaactcttggagatggtgcctagcagggaagaggagattaagttgaaagaataaagggaggatgctttgtcgacttttgtagttaatgattatgtgagacttcagtttaagggctcaacttttactggttcttggaagtcatttagtagccctaagatttcatcagcattcttagtagtaattgctatagtatcaaatgggattgtggtatgagttgctcgagtactaagtactaacgttgttgtacattgtgaagctaagtgggtaatatcaaaagggattaagattt

SEQ ID NO: 3 - DNA, 888 bp, Zea mays
  Clone ID: TF_ZmC74_176
ggatattgctctggaggaattggcccccacccatcctattaggctttggctggtgctgaacttctcaactcgcctgaccatgcgtccatgcttgcagtctcgccaaataggtttgatttttgcacccattacatggactgtgtagtgttattttcttctttttttgcaatccttatgatccgaatgtgagctctgtgaaaaatatgaactaaggttattatgcatttcacagttcagacagctgttatgaaataacctggctttagctataacttgtgactagtgcaacatattagtattttttatagactagtgtaagcaactaaaggtctgtttggttgggctgtggctgtggaaaaagttgctggggctgtgagctgtggaaaaagctgctgtaggctgtatgctgttaaaaagctaaaaaacaattggtggaaaccactaaaagtcgttaaaagttcttcgatatacgttttcacagttccatccaaaagccactaaaagcaggtccaggggtgctttcagttttgcactacgagaaagtcggcttttagaaaaagctgcttcttggatccaaccctttggttggcttttggcttttagggggcaaaagccaaagccaaaagccaaaccaaacacaccctaaaggtgagttgaatctaaactgcagatgaagaactgaagatagtggtaagttattatgatcaacctgggattgccctcaccaacgggcgtgaatcgctcaggagccatcgatcccgtgtatcttttaactagaagtaatttatgctgggacaaagtctaacaacatttttgagcaagttactaataacatcagtaacttggatggttctatcgctataaatgttgattgtgcttcaaaagttg

SEQ ID NO: 4 - DNA, 676 bp, Zea mays
  unsure (1)..(676): unsure at all n locations
  Clone ID: TF_LIB4725-004-R1-K1-B3
cggggnnatgcagcttctgaaggacaacttagcattgtggacatcagaactaactggaggtgaagcatccaagggtaacgacgatgtcgacatggaggtacggcgcccctgccctttgacttgaatttggtttcgttagtaaaactccatgtgcttgagactccgcaatgtatgtgaaaggatgaagtggtcaaaatgcacaaaacactactaatcgtttccatcttatataaacgattttgcaatataaaagcttggatcatatttcacgacctcagcctgcatcaacagagtgaagtgaaatacaagtttgttcccattagatgatgtacttcaaaactatggcctgtgcacattttactctaggctgaagtccatgtcctacccatccggaatttctaattttttttattagcaagccacggtactttctttgctgccaaatctgaagtttgtttgtgtgcatgttttaagatgggcgatggaggctgatacattctccatgtttgggcagggttgatacattctccatgttttaaggaaacacagaaagcacgcaaaatatccaggctgtgatgctagcgaacctgngtcctcaagttntttctgcatcggaactcagaggagccttgtgtatttttctgaagtttctgtccgtctcgggttttttttttga

SEQ ID NO: 5 - DNA, 294 bp, Zea mays
  Clone ID: TF_LIB4763-041-A1-K1-A8
tagccaagtactgctgactcggaggagctcacggtggaggagcgaaacctcatgtctgtgcctacaagaacgccaccggacgccgccgcgcctcatggcgcatcatctcctccatcgagccgaggccgaggggcgaggcatgaggacgagtaacactcataagattaatcgtgccagattgaactgcctcgcaagatctggtctggcaatccccaacctgcttgagacccatctttgctgccgtcatccacccccccccggaggccaacggtcttctacctccccgatggaagg

SEQ ID NO: 6 - DNA, 601 bp, Zea mays
  Clone ID: TF_LIB4740-096-A1-K1-E7
gggacctcgagccgggcgggacccgaaccaaagccactcggatccatctcccactctcccctcctcgtcatcggctcctccgcctccacctccgcccgccccctgatccggatcgacgacgccgaccccagatccctttcctctccgccgtctcgcggagcgcgcggaggaggaggagagatacgaggaaagggttgaagtaatgaagaaggcagatgagatggttgagtgggaggagtacactagaggaggagggaaaaatgatgtgtgaggcatagaagaacgacaagggagggagaagagtaagaatgacatgaaatagtaggcgattgagcataaggaggaggtgcgaggcaatgaggattgagtaagagacagcaaggattataggagaaaagatgagattgagctgagaggatgtgggaggatattgtaaagatgcatgagactcatcaagagtcgtcttccattgctcccgagtcaaaggaattctataagaagaagaagggagagaagtacagatacgaagctgaaataaagaatggagctgagagaaaggatatagctgagaacgagaagaggagatacgaggatgagaagg

SEQ ID NO: 7 - DNA, 322 bp, Zea mays
  Clone ID: TF_LIB3136-048-Q1-K1-H1
gttgaccaagatctgtgatggcatcctcaagctgcttgagacccatcttgggccgacttccactgacgaccagttcaatgtcttctatgtcaagatgaagggtgactgctacagattccttgatgtgttcaagactggagctgtgagacaggacgccgttctaaacacgatcgtggcatacatagctgcccatgacattgctctggctgagctcgctacaactcaccctattgggcttggactggctcttaacttctcagtgttctactatgagattctgaacgcacctgatcctcacctgcatgtctagcaaagcatgctt

SEQ ID NO: 8 - DNA, 1257 bp, Zea mays
  Clone ID: TF_ZmC74_212
gcgtagtccgtcgcctaccggctatcatcagcacgcaccgccgccgcctctcatctcatcgccgcgctgcttccccgcccgcccccggattggcgctgccgcacccagatcttccccacccaaatcgactccgccatcgtccggatccacgcagagccgtcgcggatcgacgtgctgccgccacagattgcgcgctgtcgtacggatcgagagacacccaccgcaagccttccgcgctggcgccgttcgggaagtaaggaggctacggagagggcacaagctggggggtgtcgaactccgtggagaacgcgcgggcggtggatgcctagctctggtagtctggtgggagggtgaggaaaatctagattctgagaagtatgaagagctgattgagttcatggagaaggtggctaagacagttgattctgaggagcactacgttctgtcaattgcttacaagattgtcatggaacccaatgtgcttcatggtgcatcatatcctccattgagtagggggaagaaggccgtgtcaacgtggactgtgtcactctcattgaggactaccataacaagattgaagttgaactcagcaagatctgtgatggaatcctcaagctccttgattcccaccgtttccgcctcattaacagctgcagagtccaaggtcttctacctcaagatgaagggtgattactacgggtaccttgcggagtttgaaactggatctaggagaaaagatgcagctagaataccatggatattgctctggaggaattggcccccacccatcctattaggctttggctggtgctgaacttctcaactcgcctgaccatgcgtccatgcttgcagtctcgccaaataggaccgtgagatgatgatcgagccagggatgtggtgccaaccacaagatgccgtggtggacgaccggaaaaatgatggacttacccagtggatgctcgccaagcgagtacctcccccagcaaacactatttaagtgttaaaataaaggtactccttaggatgattggttgctggtgtgacttggcctccatccctgccaccgggatagacggtcgagtgggttattgcttccgcaggagaggaccaggaggagtggcgtggccaggcttcaccatgttgctcggttcttctccgttagttatttccgctgcattaaaaattttggttattatttctaaaactccgataatgtaatcactaatgatacttattaaatttatggtattgtgtttt

SEQ ID NO: 9 - DNA, 630 bp, Zea mays
  Clone ID: TF_LIB4720-012-R1-K1-B9
gcatgtattccacgctctttgtttggatcccaatttcatgaccgagagcagcgcatggccattgcctttgggttcgatttccaacgatcaagaggacacgatgttctatgctgcagatgaagggagactactactgatacctctctttgtataagactggcacctccaaagaaaggacgctgctaactacaccatctcgacctagaaggataccaactacattaattactgtgaccttcatgcaacttactgtattaggctccaactgaaactatacctaccacaggtctactatgaaaaacacagctaacttgattacgcatggagctttaaacaacatgcactttactactgcatgtgggtactgcataccctagctgaggagtgctacatggacaccactctgatgatgaacatacttattcatcactggatgctatggactattgacatatcggaagcacctgctgaagacatcagatgggcgcccaaccaccactgctgcgagggcaaggaagacctgtcttacatgccttgaacctactgcctagtgttggatgctgtctattgacattatgcaatgtgatctgcaccctgctttattgtaagcgacgcttgtagcatccgtct

SEQ ID NO: 10 - DNA, 417 bp, Zea mays
  Clone ID: TF_LIB189-022-Q1-E1-E2
agtacatggccatatcgataatatcgataaaagaacaaacttaatcctggcgccgggggaaaatgttcaaatgggcaaactgggttaacaaggccaaagaaaggagaatcccgttagaaacaaaaacaatttaaacttaacaagggaaaacgttccaaaattcaaggctaaactgagcaatatctgtaatggcatcctgaagctgcttgactcccacctagtgccttcttttactgctgctgaatcaaaggtcttctacctcaagatgaagggtgactatcacaggtatcttgcggaatttaagactggtcctgagaggaaggaatctgctgagagcacgatgatggcctacaaaggtgctcaaggaaattgcccgggttaacctggaacctacccatccgataaggcttgggcttg

SEQ ID NO: 11 - DNA, 648 bp, Zea mays
  Clone ID: TF_LIB4742-038-R1-K1-B11
cattgggacctcgagccggcgggatcccgcatattctcaggagcctctccgaaacacgacttcgatggattccaccaccacgaccttcctcgattcctgctggtcgtgaaaatgtccacggagcccctacggaccagctccccgcgcgaccaccgcttcctgctgaagatgaagcatgtgctcggcaactacaccaatgcgtggagctggatgatcaagatgatcaactgcccgatcgagctactcatgcgatacaagttcagcctctaggatccacaaccccatcttgatggccgcgagcgtccatgtcaaggcataccccatgatgatccgcctgcgagagcgcgagcatgtgacgcacatctacaccacatcaccaggcagtcggcgagaatttcgtcctctcctacgacaagtctgtaaccgaagccgccaagagtgtggcaaacgacatctgcaggcttaacgtgcccacgattctagttgccgatatctagagatgcaggccgattactacactatacctaggttggcactgactggaactgaaagactcgacgcctctgataacacgatggtgcgatatcaggctgtccatgacattgctctggttgagcttgctccaactcatcctagtagggttgtact

SEQ ID NO: 12 - DNA, 295 bp, Zea mays
  unsure (1)..(295): unsure at all n locations
  Clone ID: TF_LIB3245-475-P1-N1-F12
gcacgccnnccggnnngggaaggcgaggagaggggaaccccggcccagggagaggggnggggaggggaacggcggcggaggagaaggaggagcgggagaagcncgngngccnggccaagcnngccgagcaggcggagcggnacgacgaaanggnggaaaacaagaagaancnngcnagganggacgngganangagngcngaagaaaggcannngnncncagnnggnnncaagaacacnannggagcaaagagggcancaaggagaancaaggggncacaagagcaaaagggcgc

SEQ ID NO: 13 - DNA, 1342 bp, Zea mays
  Clone ID: TF_ZmC25776_1
tttttcacacacacacacacacacaaggggggggggggagcggaattaagccagctcgtggcgcaatccgaccacgcgtctgtgggcgcgtcgtgtttagtttactgttgtgtgcccaagtgatccagtccacaggctcaggctctactgctctaggaggaggaggagtgatgagctctgcagccagtgacccctgtcggcggcggtagcttaaattggccaccatgtcgcccgggccatcggactcctctgcaaataaagccatcgggggagtgactgactgagtcagtgagtgggtgtgaggagagctttgaggggaggggagctagctagctactgcctactggaggagggcttcctccgacgccggacatgggggaggtgaagcacctgtgcctggccaagttcaaggagggcgtcgtggtggacgacgtgctcaagggcatgaccgacctcgccgccgggatggacacggtcaagtctttcgagtggggccaggacgtgctgaaccaggagatgctgacgcagggcttcacgcacgtcttctcgctcaccttcgcctccgccgccgacctcgccgcctacatggcccacgacagccacaccgcgttcgccgccaccttcatggccgccatcgacaaggtgctcgtcgtcgacttccccgtcgtcgtcgccaagcctccgccgtcggcatgacccgcttgccgctctcgcatccgccggccactgtacgcctccccttctcaggtcgcgcagcagatccacgtgtgcctgcggccgcggtgctggtagtagtactagtactgtctattgcctattgcctgttatgtatgttctatctatctatgtccacgtacctacctactattattgtttggttatcttcggaataaattttcggtcacttttatggtaacaaatatcaagcggctagctgcttgcaatacaccctttccgatgtttatgatggattctctgtcctaatcgaaaaaaaaaaaaaaaagcccctaaggctattcttacagatctaaagagctttgatgctgccttcatgtgcacactggagtgggatgaatatgtaaccttgtgtcggaaaaacttgctatactctgggtcctctcgaatttactttactcgcacctattgactgcgtctgctgctgctgatttagtattctgctacctcaatatgaacggtgactatcacatgtatggtgcggaggttttttttggtgctgagaggaatgcctctgctgggactcagtggtggcctatgaggctgctcaggccattgctctggattagctggcgcctacccatcccgctgcgctggggcttgctct

SEQ ID NO: 14 - DNA, 273 bp, Zea mays
  Clone ID: TF_jC-zmX700102161b1
gtccgacgagatcctcaggtgggcctttctcagccgttgtctgtttatccatgccaccggcgaagatatgttagagctggatggcgctggagctgagtgccccaaagatagcaccccaattatgcaggtgtttgaccacaacgtaaactagtggacttatgacatgcaggatgatggtggcaatcaaatgccatactgaaacacgtctgacgaggagcaggtggaggcagcatgccatgccatgccttgcctgtccaaggaccatagacgcgt

SEQ ID NO: 15 - DNA, 182 bp, Zea mays
  Clone ID: TF_LIB4338-018-R1-K1-H6
ttcgaggcggccggccgagggggcactccatgatctgacaacatgatcctcattcttacgggactactccttatgctcgatggaggagagattgcgccatgaggcacgagagggccccaattgcatatctctgtcaacaacatgagtatgagggagccgcctcctccaacggaggaggctct

SEQ ID NO: 16 - DNA, 305 bp, Zea mays
  Clone ID: TF_LIB3067-047-Q1-K1-G7
gctgagcgttcacgagcgcaacctctcgtttgtcgcatacaacaatgtgatcgggactcgccgtgcttcatggcgcattggctcttctattgaacagaaggaggagtcccgtaagaacgaagagcatgtgaaccttatcaaggaataccgtgcgaagatcgaggctttattgtgttatatcttatatgtcatcctgaatttgctttactcccacctagtgccttcttctactgctgctgaatcaatggtcttttaccttatgacgatggtttactatcaaaggtatcttgcggaatttaagactg

SEQ ID NO: 17 - DNA, 592 bp, Zea mays
  Clone ID: TF_LIB4185-048-R1-K1-F7
ggtaccgcggcccctctctcgagtttttttttttttttttttttttttttttttttttttttttttttttttttttttttggattagaaacagccctgacagtctatgcgtggataaaaaaaacagttttccatgggggtacaaagatgcctttgaggcccagaaaaaaaaaaaaaaagcaccaacagatttagaggctcaccagttcaaacctttgaaacacttggtagggggggacggactccaggaccaaacgagggccaaaagaggggaacaaacagacctcaaaaaaaaaacccgggacggacagaaacttcaaaaaaatacacagggctcctttgagttccgaggcaaaaaaaacttggggacccaggttcgttagcatcacagccgggatattttggggggctttttgggtttccttaaaacagggggaagggatcaaccctccatggccacatgggcgctcccctgggaggcttcacctccagttagttttggggtccacaaggctaagtggtccttcaaaagctgcatcataatggggctatccttggaaactcccctcccagaatttatctcaggaggagcc

SEQ ID NO: 18 - DNA, 825 bp, Zea mays
  Clone ID: TF_ZmC261_38
gccttgtgtctttactctaaatgatagtattactactttattcgcttgatgggacgcggggcttcccatgtggcattggaatgtgctcttcaatcacatccaaacatggtatgttttttccttacttgcatgtgacctgtcacatttttttctcacatggatctggaagagccgcgtgagaggaagctaaagggttctggcttaagctgtatcaggtcaaattttcaccattgatccaacctctgctacggcaatttccagcatcggcggtgtgctctttacaaagccttagagctgcctctcctgcaaagtctgaacttgcagagatagtcccacaagagaaatcaccaaaagattccattcaaccaatgtcaccgagtccaaggtattctacctcaagatgaagggcgactaccacagtcaggtgcatagaggaaggatgctgcggggagcaccatgaatccctacaaagctgctcgagtttcctctgactgttcaccattattggaagcaggtcaggcagagagccttggaaccgaactcttggagatggtgcctagcagggaagaggagattaagttgaaagaataaagggaggatgctttgtcgacttttgtagttaatgattatgtgagacttcagtttaagggctcaacttttactggttcttggaagtcatttagtagccctaagatttcatcagcattcttagtagtaattgctatagtatcaaatgggattgtggtatgagttgctcgagtactaagtactaacgttgttgtacattgtgaagctaagtgggtaatatcaaaagggattaagatt

SEQ ID NO: 19 - DNA, 154 bp, Zea mays
  unsure (1)..(154): unsure at all n locations
  Clone ID: TF_LIB3594-021-Q6-K6-C1
cggttccccgnaccacactcgttcctcgcgggacccagnagcagccccgcgccagnagtaatttgttcttttaacaattgtcgcgggnaggacatgtttacatggccaagttggctgtagcaggctgaaggtatgaggagatggttgagtatat

SEQ ID NO: 20 - DNA, 804 bp, Zea mays
  Clone ID: TF_LIB4758-090-R1-K1-A10
cattgggaccctcgaggccggccggacgccactcatgaacacgcccaagctctctaggacttctcataaggcactctgacatcctccgtacttctcgttctgagcacccctcagtaccacttcgtgttcgaagattgctcgctctcaatatgtgcatatgattgaccctgcttggaagacagctcatttgcttcccacgccatgagtgctacgacaaatcgccatgactatgacctcatgactgctcaatgtggaagatacatacgtcttgagtgcggcgtacagaaacgtacttgaatgcgaacgcgccgcatgccgtatgatctcctccatggagcagacgaagctagatgcaggaaatgagcgctgaacgacactcatcagagattatcgcggtgagatatagattcgacttacccttatctgccatgcgtgtactacagtttgcattgagaccgtcttcgtcgcccgcatctactcgcccccgatcccaggggcctctatctcctaccgaaggtgattactacacataccttgcgtgaagtcaagagtggacctgacacacaagacgccgctgataacaaatgtggatacagctgccagcttgctcgttgactgtccactccgctattagttggactgcactacttccaggtctactataattcgactcactgatccgcctgcagtcttgcaaagcaggctgtttgacgaggccatctcggaactggacacctctgagcgaggagtcctacaaggacacgcactttgatcatgcagctccttcgtgataactgtacctat

SEQ ID NO: 21 - DNA, 396 bp, Zea mays
  Clone ID: TF_LIB3150-041-Q1-N1-A4
tcactcgttaaatgtgtacatggcgaaactccccgagcgggcctacaggcacgaggaaatggtttattttatggagaacgtaacgaagactgacgactcgcacgagctcactgtggaggaacactaccttctgagtgctgcatacaagaacgtcattgccgtccgcagtgcgttatagcacatgatctccttcatcgagcagcacgatcagggtcaaggcgctgaggacactcgtcacactcttaagggccaatacctggatcgactgaaactgagctcaccaagatctgtgatggcgagatgaagcttgtctaatgtgagcttgtgccgtcttacatcgttcccgagatcaaggccttatatctcaagatgaaaggtgactactacagatacact

SEQ ID NO: 22 - DNA, 569 bp, Zea mays
  Clone ID: TF_LIB3150-041-Q1-N1-A4.F2
tcattcgggacatgtgtaccatgcgcgaagactcgcgcgcgccatgccgagcaggcactaccgaaatggcccgtatttcatggagaatgaaaccaaaactgttgactcggacgtagctcactgcctaggagcgcaaccttctcgtctgcagcatacacacaacatacttgcagcccgcctagcctgatggcgcatgcatgctgcctacatgagatcagcatagcatgacagttctaggcaatgaggacactgtcacactcataaacgactaccgtggcaagactgatactgaactcaccaagatctgtcacggcatgctgaagcttgtcgaatctcacctctgtgccggtcttccaccgctcccgagtccacggtcttatatctcaagatgaaaggcgactactacagataccttgctgagttcaagactggatctgatagaaaagacgctgatgataacaccatggttggcatacacggctgcccatgacattgctttggctgagcttgctccaactcaccctattaggcttgcactggcactcaacttctgaacgttctactatgag

SEQ ID NO: 23 - DNA, 435 bp, Zea mays
  Clone ID: TF_LIB4602-006-R1-K1-A7
ggacactattccgacgcacacgagtatcacggctgactcggaatgctgtgaaaactcctccgccaaatggcatcagcacaactctcacagggagaaaatgggtgcatggcctaacctcgcccaccatacatagaggtgccaaaaaatggttcagccaatggataacgtacggaaaactggtcacctctagagggaggggggaaaagcacagcctactgtctgtggtgtacaagaacgtctttggaacccctcgttgctggtggcgccttatatactccatcgtccaggaagaggaaggtctacgtattgatgaccggcaacgactgtccttgactaccctggcggggatgaagatgatctcaccatgatctgtgattgggtgctcgctcttgtcgactctcatctcgtgacgtctttcaccggtcccgagtgcaa

SEQ ID NO: 24 - DNA, 298 bp, Zea mays
  Clone ID: TF_LIB4148-012-Q1-K1-E3
cggaaaatcccgggtccgtacccacgcgtgccgattgttgaatgcgagagctcgcaccaactcacccaatccgtctaggtctggcatcgaacttctctgtgtgctactactagatccttaactctcctgatcgtgcctgcagcctcgccaaacaggcctttgctgacgcgatagcccagttggacactgtaggtggcgagccatacaaagacaggaccgtgatcatgcagcttgtccgtgacagcctgactctctggacatccgacatgccggtatgttccctttccatcctaatcct

SEQ ID NO: 25 - DNA, 316 bp, Zea mays
  Clone ID: TF_LIB4605-012-R1-K1-A3
aaaatgtgtacacgatcattatcgctacgcaagtgggcacgttcaagaacatggtcaacttgttggtaaggatcagcaggactgtggactggggggaactgactaccgaggagctaaatctcttgaccgtacaataccagatcgtaaccgcagatcacctgacctcaaggtccatgttctactccgtccagcatcaaggggagggcagtggcattgaggtcagagacacaatgaccctggtttttagggacaagacagacaccgaattgaccatcatgtgcccagagtaaataagctgatcgaaagctatgttgtg

SEQ ID NO: 26 - DNA, 272 bp, Zea mays
  Clone ID: TF_LIB3118-029-P1-K1-H11
gcattaccatattcacgaccgcccagacatagtcattcaccaggagtaaggaggaacttttatagatatacaagagggaagagaacgtctacataaacaagctggctgagcagtaccaaaggcatgaagagaacgtggcgatattgagaaggaggctaacactgaacatgtggaatatgctactgttgcggaccgaaacctttaggtggtctcatacaaaaatgcgagtggcactggctgagcttgacggggcaacgcgtcttgtattgaac

SEQ ID NO: 27 - DNA, 657 bp, Zea mays
  Clone ID: TF_ZmC772117_1
accccgaaatgcgctgccgcccagcacggctgtgcctccgagcacgttatccctcatgctccatcactaatgactgacttttaacggaatgatgagggacagaaaatgtttacatcatcaaactgattaaccaagcatgggaggttgcataccgagctcggaggatatggagagcgtgtgtaacactgtatatgtggatgacctcactgccaaagagcgctaccttctgtgtgacgcgtacaagaatgtgatcgaggctatgcgcgctacatgcatcataggagatgccattcgaacaaaaggaggagtaccctatgaacaaagagcactgtgaatgttatccctacaatatcatagtcgaggatcgcaggcatgatgctgattcagtatactgtgatggtatccttgaactgcaccgacttccacctacgtgcctatttctactgctggtgacacatgtggcgttccactctcaagaggaagggcagagtatcacgagtatctggcgcaatttacgactcttgctcagaggcaggaatctgctgtgagcccatggtggtctataaggatgatcagcacattgctgtagcctgactgtcacctacccatctcgacaggctgtgacttgcacctaaatatacagtgatctattgtgag

SEQ ID NO: 28 - DNA, 272 bp, Zea mays
  Clone ID: TF_700029541H1
tgcggaatttgctttctgtcgcctacaagaacgtcatcggtgcacgccggcctcttggaggatcgttacctcgatcgagcaaaaggaggagtccaaaggcaacgagtctcaggtcacattgatcaaggagtaccgtcagaagattgagaccgagttggccaagatctgcgaagacatccttgaagttttggacaagcacttgattccttccgctcagaccggtgaatccaaggttttctaccacaagatgaagggtgactaccaccgttact

SEQ ID NO: 29 - DNA, 341 bp, Zea mays
  Clone ID: TF_LIB3591-080-Q6-K6-E7
cctgctagttccggtccggtcttcccgggcccatcttgtgccgtcttccactgcccccgagtccaaggtcttctatctcaagatgggtctcaagcagtttgaggctgccatcacatatcttggtcattttattcttaagctgtttgttacccatcttgtgctgtttttcactgttctctagttcatggttttttctcttctgattttcgtgtatcccttcagattccttgttttgtttaagactgtagttctctgataggtctctttttttaacattatgttgtttcaccttgttgttcagcactttctttctctttgtttttccctgttttttttttttt

SEQ ID NO: 30 - DNA, 342 bp, Zea mays
  Clone ID: TF_LIB3608-027-Q6-K2-D4
gacacacgcatagccgcagagatccgttacatctgcatgttttgaaaactgaactgtgagatggcatcagctagagctcttccgtgaggaaaatgtgtacatggctaatctcgtcgagcaggccgagaggtactaggaaatggttgagttcatggagaaggtaccgaacactgttgactcggaggagctcactgtggacgaccgcaacctcctgtctgttgcatacaagaacgttattggagcccgacgagcctcatggcgcatcatctactccatcgagcagaacgaggagggtcgacgcaatgaggaccgtgtaacactcattaacgactaccgtggcaa

SEQ ID NO: 31 - DNA, 450 bp, Zea mays
  unsure (1)..(450): unsure at all n locations
  Clone ID: TF_LIB3592-001-P1-K6-H4
ccctgcgtccgnctagttctagtacgcgggcggccgctcgctgactagtactagtcggatacttctagatcgcgggcggtcgcgcttggtttctttctgtcgtcacgctttttggtacgaggagatggttgagtgcatggagaaggtgtccatgactgttgactcggaggagctcactgtggaggagggaagcctcttgtttgttgcatacaagaacgtgattggagcccgacgtgacttattgggcattatttacttcagtgagctagaagaggttggcctaggcaatgaggacctagtaatactcatcaaggattatcgtggttagattgagactgagttgactcaagactgtgatggcattctgaagctggttgagacctatattgtgtcggttttcacttttnncgagttcaagatttttatgttaagatgaagggtgattattac

SEQ ID NO: 32 - DNA, 288 bp, Zea mays
  Clone ID: TF_LIB3152-012-P1-K1-D11
cgtgagtaaaatgtgtactatgcttagctcgccgagcaggcggagagggtcgaggagatggttgagttcatggagaaggtattcaagactgttgacttggaggagctcactgtggaggagcgaaaccttcttgttgttgcatacaataactttattggagcccgccgctccttatggcgcatcattttcttcatcgagcataaggaggatggccaaggtcttgatgtcctagtttcactcattaaggattattttggcaagattgatactgagctgatcatagatctg

SEQ ID NO: 33 - DNA, 379 bp, Zea mays
  Clone ID: TF_LIB3150-049-Q1-N1-C9
caagatcgaggctgaactgagcaatatcttgccacgatattccgtgatgagggactgcaaattatgaaaactgaactgtaagacggcatcaacagagctttaccgagaggaaaatgtgtacatggcagaagctcgccgaacaagcgaagaggtacgaggagatggatgagttcatgtaaaaggtaaccaatactgtatactggtaggaactaactgtggaggagcgaaacctcctgtactgagcatacaagaacgtgattggagcccgacgcgcctcatggcgcataatatactccatagagcagaaagaagaaggccgaagcaatgaggaccgagtaacactcatcaaggattatcgtggcaagactgagactgagct

SEQ ID NO: 34 - DNA, 332 bp, Zea mays
  Clone ID: TF_LIB3075-028-Q1-K1-D9
gcgttcaaagctgtaccccagaggtcggatcctttgtcaatgacagtgaatggcatccagcgtgcctagaacattacgtcaggcgagatctgtctccaacccaccccatcaagcttgtgctcgctctcaacttctcagtgttctactaccaaatccttaacttccgtgatctctcctgcaaccctgcaaaacaggtcttcgattaggcaatctcttagctacacagcctgtgataggagttctacaaagacatgactttgatcatgcagttcctgcacgacaactcgaccctattgacttcctacacctactacgatggctgcaactagatc

SEQ ID NO: 35 - DNA, 675 bp, Zea mays
  Clone ID: TF_LIB4171-050-R1-L1-G6
aattcggcacgaggctccgggatagccctaatcagatgactagaaggcagctcgtcaagaaaattacacaaagaagaaatatacttgatgtatgaactttgtgtcagctatgtattcagtaatttatacgtcgtcgcaacgcacgggcacataactattgataaattatgttggcaacaaaagcaatttggaattcattatttttgtggacatgcattaatgaaatcaacacagtatagaaagtgaagactaggaaaggtgcagcagaaactccagctgtgtcatacctcaggaatctgaagatttgccgtactcaagccatgctgctccaatacccttggcgtttgatgaggctatttctcagttggatacgcttggcgaggattcatacaaagatagcaccttaatcatgcagctcctgagggacaacttaaccctatggtccgctgacagcacaacgttaacgaaccggagcacctgaactagcagtcacgtctgcaatatacacaccagcaaaacactcatgtaacactaaacagttcatgcatatccttgaccgaagacgatgttgcaaaggtttcagacatcagcttttggcgttgacaagaaacaagatgacgagtacaaatgctcctgatgagtacaacgccagtgtattaagtttgcttttgtact

SEQ ID NO: 36 - DNA, 689 bp, Zea mays
  Clone ID: TF_LIB4758-089-R1-K1-A5
cattgggaccctcgaggccggccgggacacccctccttcagacctccagctcttgcggccgacctgcctcacacgcgaggacgccatggtctgcggatcttgagtgctgaactgaacgcatgcgatcagcacgacgctttaccgcgtgctgaatgtgtctctcctcgatcatcgctgagcaggtgctcagtgaccagaagatggtcgacgtcctgtgcaaggtaatctgcattgctgactcgctcgacctcactgagatggagcacctcctcttgctcggtgcgtacatgaacgccattgcagcccgccgcgccttccgcttcctcgtctcctccatcatcctgagggacgacatccgaggcattgttccccgcaaaaccctcatcaaggattatcctctcgagattgtcactgcgctcaacgacatctctgctgcgatcctcaagatgcttgagatgcatcttgctgccgctcccactgccctcaagctccaggccgtctatctctacaggctcctcgattacttctcataccgttgctgagtgcaactctggtgatgccatcaaggacctcgctgagaacacgatggagaaatacaaggctgcccacgacattgctctgcctgtagcttgctctcgactcaccctattaagattgcactcgaacattaacttctcagtgctctacta

SEQ ID NO: 37 - DNA, 279 bp, Zea mays
  Clone ID: TF_LIB3245-170-P1-N1-A6
gcgatttctacagatacctcgctgagaacaagactggggctgagagaaaggaggcgggctgagaacacgatggaggcatacaaggctggccaggacattgctctggctgagctagctccaactcaccctattaggcttggactggcactgaacttctcagggggctactacgagagtccgaactcacctgatcgcgcctgcaggctcggaaagcaggcttttgacgaggccatctcggaactggacaccccgagcgagggaggccgacaaggacaggac

SEQ ID NO: 38 - DNA, 551 bp, Zea mays
  unsure (1)..(551): unsure at all n locations
  Clone ID: TF_LIB4827-032-A1-N1-B4
ccggccgggnnaaaagtgacccgtgcactggcccccgttcgccgccctccccgccgtggggtccggtccgccgccctccccgcccatcccccgcccaacccgccgccggttcccgtccagccacacgcgccttcttcctcccccggcgccttctcggtgaaccagacccgtccggccgtccctcacccgtgcgactcccgcagcgccggcccctccgtcacctccgcatcctccccgtccttgcggccatatccgtcgtctccgcatcctccttcctacgctctgtcggcgtggcctccccatcccggtgttctccgattttggggggcgtccctttgcccgctccggtctgctcctccagagtccggtccagcggagcgcactacgacacagatcggcagccgtccatccctttccagctctccagagcctccgccggcgcatccggcgactgatttgcagcatttgatgaggctcttactgagataaattctggtgagggagtttacaaggatagcacacttattatgcaacttctgaaggacaacttg

SEQ ID NO: 39 - DNA, 1534 bp, Zea mays
  Clone ID: TF_ZmC5000_20
tttggtatcatcatgtctgactaacccttttttactttcattgaatgaagttcgtacatgtatttgaggtattttttattttcttcctactataagccttgcttagatactgatctaagatcatctccaagggacagacaaaaaatcctagaggttctcacataagtacggtttagagaagggataaaccgaggaaagcctcccccacaaatacagaaaggctgcctcgaacctatgatttggtgactcagtgaaacaaacaactctcactactgcactaggcctgccattgtttacgagcatccccaagggccttacttaaattcactctctaaattttaatttggtgagccattttaataaaaatatgtttgataggttttttatcttctaacaatttttatgtatcttgtacgcactctagagaaccaacccactcactgctctttatttactgcatgctatttaggtctgctaagcaaaaaatgatattctttctcaatcttttgtcatgtttagataaatttggtggttttaggataaagtttgtgaagggcttcactttttttttctataattagaatttaactcaaaagttttcccttgaaattcaagttgattttgagaagtatgaagggatgattaaggtcatggagaaggtggtaatacagttaattctatggagctcactggaggagcactaccttttgccagttgcttgcaagaatgtaattggaatccgatgtgcttcatggcgcatcgtatcctccattgagtatagggaataaggttgtgtcaacatggaccgtgccactctcatcgagggctaccataacaagattgaagttgaactcaacaagatctgcgttggaatcctcaagctctttgcttcccaccttcccccctcattaatagttccaaagtccaaggtcttctacctcaagatgaagggtgattactacaggatattgctttggaggagttggcccccttatcctattaggctttggctgatgcttaacctctcaactctcctgatcttgctcgtggtctccccaaacaggtttggtttctagatccattacatggagtgtgtagtgtttttcctcttttttgcaatcctcatgatgtgccaccaggtctggtctaatcgttcccctaaaattgtggcctataatcagcttcttggcctatgatccttttgtatgtaggcaaagccaacgaatgaaagggactcactcgcagcaacaaccaaaaagctgatcacgcattctccttttcacatttgttgcatttaattaattcatccaatagcataaattggcactccttttgtgttattgctctttggttggtcttattgttgttgttgtactgcttgccatgtgtattttatcataagtgttgttttggctaatccctaacgatgcaatacatttgagcaacaattcaattgttttgttttttgaactagttattctaaatacccaatgttcacagcatatttcacttccaaaaaaaaaaaaaaaaaaaa

SEQ ID NO: 40 - DNA, 331 bp, Zea mays
  Clone ID: TF_LIB4742-139-Q1-K1-E4
ccggccgggaatctatccaccgagcacgacgcacgcagagccgctgagatccgtcacactgcaagttttgaaaactgaactggaagatggcatcagcatagctttcccgtgaggaaaatgtgcacatggcgaagctcgccgagtatgcacagaggtaccaggaaatgcttgaggtcatggagaagggaccgaaaactgttgactcggaggagctcactgtggaggagcgcaacctcctgtctgttgcatacaagaacgccattggagcccgccgtgcctcatgccgcatcatctcctccgtccacaataaggaggagcgaccaagaacacg

SEQ ID NO: 41 - DNA, 770 bp, Zea mays
  Clone ID: TF_LIB5116-030-A1-PF1-H7
catcccgcacctccccacaaacgcgtattgcctcctacgcccccggatccgctgctccaccccccaactccgttgccacacgcccttgcacaagcgagcgagcaaccatgtcgccagcagagccgacgcgagacgagagcgtctacatggccaagcttgcggagcaggccgagcgctacgaggagatggtggagttcatggagcgcgtcgcgaaggccaccggcggagcagaaggaggaaggtcggggcaacgacgcgcacgccgccaccatccgctcctaccgcagcaagatcgaggccgagctcgcaaagatctgcgacggcatcctcgccctgcttgattcccacctcgtgccatccgccggagctgccgagtccaaagtcttctatctcaagatgaagggcgactaccacaggtaccttgcagagtttaagtccggtggggagaggaaggaagccgccgagagcaccatgaacgcgtacaaagctgctcaggatatcgccctagcagatttggctccaacccaccccatcaggcttgggcttgcactcaacttttctgtgttctactatgagatcttgaactcccctgaccgcgcctgcaaccttgcaaaacaagcctttgatgaggctatatcagagctggacagcttaggcgaggaatcctacaaggacagcactttaatcatgcagctcctgcgtgacaatttgactctatggacatccgacaccaatgaggatgacgttgatgagattaaggaagccccagc

SEQ ID NO: 42 - DNA, 585 bp, Zea mays
  Clone ID: TF_ZmC374965_1
gcggagatccgctgccacaccgatcgtggctgctccgtatctatctcacgacctcaaggaagatacctatttcaccaataacggcgagagagtgaacacgcacgcacgggccatcatggaccagagcatactacctgtgctggtcgtgctggaagatcatatggttatgtgtttgcatactgatgccgcggaaaagctgagtgctggcctccgaaacctttggggtgaagcctacccaactgtgatagagaccgaccgagctatgccgcacgccggtattaccgttgcacaaaaggacgtgtgctgaactactttcatatgtgaaccttatcaaggaggacggccgctctatcggagccgaactgaccaacacctgcgagggaatcttgaacctgcttgtctcccacctaaagccttcttctacggccgctgaatcacaggcttctaccgcaaaaacactggcgactatcacaggaatcttgcggaatttaatactgctgctgacaggaaggaatctgctgaaaacaccctggcggactataatgctgatcaggacattgctctggctgagctggcacctaccca

SEQ ID NO: 43 - DNA, 399 bp, Zea mays
  Clone ID: TF_LIB3150-097-P1-N1-B9
ctactttagctaatctcagatcccccccgccctagacgcaggcccatgccaggagtgggtgggttcttttatcgatattatccatatggcgagggaggagaatgtctacatggccaagctggctgagcaggccgaaaggtatgaagagatggttgagtatattgagaacgtggctaagactgtatatgttgaagagcttacttgtgaggagcgtaactctattgtcaggcgcatacaaatattttattggagctagctttgttttatgttgcattgtcatttctatttgaactaatgaggattcccttttagaactaatagcctgttaaccctatcaagggatacccgtccgaatattcaggcttaactttgctcttttttgtaatggcatatccttaa

SEQ ID NO: 44 - DNA, 189 bp, Zea mays
  Clone ID: TF_ZM4633.C5.o3.fg
atggattgtgtcactctcatcgaggactaccataacaagattgaatttgaactcaataagatctatgatggaatcctcaagctctttgcttcccaccttcccccctcactaacagttccaaagtccaaggtcttctacctcaagatgaagggtgattactacaggtaccttgcggagtttgaaacttga

SEQ ID NO: 45 - DNA, 326 bp, Zea mays
  unsure (1)..(326): unsure at all n locations
  Clone ID: TF_LIB4760-023-R1-K1-E2
gctgcttgagacccatcttgtgtccgtcttccctgcccccgatccaggtcttctatgtaagatgaagggtgattacatacagatacctcgctgagttcaagactggagctgagagagggggcgctgctgagaacacgatggtggcatacaaggctgcccaggacattgctctggctgagcttgctccaactcaccctattangcttgnactgggattagacaaggcactnttctactatnanaccctcaactcacctaaccgcgggggcagtcttncaaancannnctggggcccggcccccccccgcccggcccccccccccccc

SEQ ID NO: 46 - DNA, 361 bp, Zea mays
  unsure (1)..(361): unsure at all n locations
  Clone ID: TF_LIB4725-021-R2-K1-H11
cgacgcacgcagagccgcactttacgcgcacactgcaagatttagaaacctgttttttaagagggcatcagcagagcttcccgcttgaaaagtgacatggcgaactcgcggcaggcccagaggacgaggaaaggacgagtcatggagaaggtagcgaaaactggtgactcagacgagctcactggggaggagcgcaacctactgactgttgtattcaagaacgncattggagcccgccatgcctcatggcgcatcatctactccatagagcataaagaggagggtagaggcaatgatgaccgagacacactcatcaaggactaccgaggcaagatcgaaactgagcacaccaaggactgcg

SEQ ID NO: 47 - DNA, 857 bp, Zea mays
  Clone ID: TF_LIB5075-004-R1-XP1-A10
gccggccggttcgggattacctactccaccatcaatccccccaatcctgttcaaccacaccaccgcccttcttccgccaaacacccccaccccaccgacacaacacataccgctctcactccatccacccacccgaacaacatctccaaaatggccactgagcgcgagagcaagaccttcctcgcgaggctctgcgagcaggccgagcgctacgatgagatggtcacctacatgaaggaagtcgcaaagatcggtggcgagctcacagtcgacgagcgcaacctcctttccgttgcctacaagaacgtcgtcggcacccgccgtgcttcctggcgcatcatctccagcatcgagcagaaggaggaggccaagggcaccgacaagcacgtcggcatcatccgcgagtaccgccagaagatcgagctcgagctcgagaaggtctgcgaggatgttctctccgtcctcgacgagagcctcatccccaaggccgagactggcgagagcaaggtcttctaccacaagatgaagggtgactaccaccgttacctcgccgagttcgcctctggcgacaagcgcaagtctgccgccaccgccgcgcacgacgcctacaagaacgccaccgacgtcgcccagaccgagcttactcccactcaccccatccgtctcggcctcgccctcaacttctccgtcttctactacgagatcctcaactctcccgaccgtgcctgccacctcgccaagcaggccttcgacgacgccatcgccgagctcgacagcctcagcgaggagtcctaccgcgacagcaccctcatcatgcagctcctccgtgacacctcaccctctggacctcctctgac

SEQ ID NO: 48 - DNA, 276 bp, Zea mays
  Clone ID: TF_700028918H1
cggctcgagcggctcgaggcagttcacccgcgcccgagacgcaaccccgcgccaagactaagtttgctcttttatcgatatggcgagggacgagacatgtctacatggccaagctggctgagcaggccgtaaggtatgaagagatggttgagtatatggagaaggtggctaagactgtagatgtggaagagctcactgttgaggagcgtaacctcttgtcggtcgcatacaagaatgtgattggggctcgccgtgcttcatggcgcattgtctctt

SEQ ID NO: 49 - DNA, 678 bp, Zea mays
  Clone ID: TF_LIB4743-076-R1-K1-E9
ccggccgggcccaatcttaacgatggagcacgatgcacgcatgagtcgtagagattcgcctctctgcatgttttgaaaactgaactgccagatggcactacccagagctttcccgcgaggaaaatgtgtacatggcgaagctctgcctagcaggcatagaggcaaccaagaaatggttgagtctatggagaacgcagcgacaactgccgactcggacgagctcattgtggacgagcgcaccctgctgactgctggctacatcaacgagattcgagcccgccgcgcctcaagtatcatcatgtgcttcatctagcagaacgatgagaggccgaggcagacaggaccgtgtaacactcatcaaggactaccgatacatgattgaaactgcgctcaccaagatctgtgatggcatactcaagcttctcgaatctcaccttgtgccggcttacaccgctcccgagtgcaagggcttctatctcaagatgaagggtgactactacagataccttgctgagttcaagactggagctgagagaaaggacgctgctgagaacaccatggtggcatacaaggctgcccaggacattgctttggctgagcttgctccaactcaccctattaggcttggactggcactcaacttctcagtgttctactatgagattcttaacttacccg

SEQ ID NO: 50 - DNA, 274 bp, Zea mays
  unsure (1)..(274): unsure at all n locations
  Clone ID: TF_14202479
ggcctgcctgccgtttccatctccatccagttctccgcvvccacccasccasscactcsagtsstttcsccaacscakggssgccgccgccgccgccgccggcacccgggaggagatggtctacatggccaagctagcbgacagngcggacggtacgaggagatggtcgagttcatggwtwwtktcgcdgccgccgccgagctcaccgtcgaggagcgsaacctgctctccgtcgcgctacaagaacgtcatcggcgcgcgccgccctgcctgg

SEQ ID NO: 51 - DNA, 325 bp, Zea mays
  Clone ID: TF_LIB3354-005-P1-K1-E2
gcacaaacgcgttgcatcacgtccacaggatcctgtgcgccaccgcaaccgtgtgaccgcccgtgccgccggcgatcccgatccgccgacccgtcccagcctcgctcgtagccatgtggccggcggagccgacgcgggaggagagcgtgtacatggccaagcttgcggagcaggcggagcggtacgaggagatggtcgagttcatggagcgcgtcgcgcgctacgcctgggggcgccggtggcaggaactagctctcggtggaggggctgaacctgatgtccagcgcacacatgaacgtgatggggctccgatgtgcctggtggt

SEQ ID NO: 52 - DNA, 864 bp, Zea mays
  Clone ID: TF_13150965
ggttccccgaccacaccgttcctccgagcccwggagcagccccgcgccaggaggaagtttgttcttttaacaatatgtcgagggaggagaatgtktacatggccaagttggctgagbaggctgaaaggtatgargagatggttgagtatatkgagaaggtggctaaractgtagawgttgaagarctcactgttgaggagcgtaaccctytgtctkttgcatacaagaatgtkawttgggctcgccgcgcttcawggcgcattgtttcttccattgaacaaaargaggagtyccgtaagaacgaagagcatgttaaccttatcaaggaatatcgtggcaagatcsaggctkaactkagcmatawctgttawggaatcttgaagcygcctkactcccaccyagtgcctycttctacygcygccgaatcaaaggkcttctacctcaagawgaagggtgactatcacaggkatcttgcggaatttaagacttgtgcygagaggaaggaatctctcygararcacaawggtggcctawaargctgcccaggacawttctcttgctgaaccggcaccyacccatccsataaggctgggacttgctcytaatttttcartkttctattatgagaatctkaacyccccagacaaagcttgcaacctggcaaagcaggsgtttgawgaagcbatctcttaattagacagcctttgtgaggagtyawacaaggatagcactctkatcatgcmactccygagggataacttgaccctttggacaaccgacctcacggaggatggtgctgaagaaggcaaaaatgccccsaaargtgaagcaggcgaaggacaataatcttcggagggggtkcaa

SEQ ID NO: 53 - DNA, 420 bp, Zea mays
  Clone ID: TF_LIB3075-048-Q1-K1-C12
gcagttccccgaccacaccgttcctccgagcccattagcagccccgctccaggaggaagtttgttgttttaacaatatgtcgagggaggagaatgtttacatggccaagttggctgatcaggctgaaaggtatgaggagatggttgagtatatggagaaggtggctaagactgtagatgtggaagagctcactgttgaggagcgtaaccttctgtctgttgcatacaagaatgtgattggggctcgcctcgcttgatggcgcattgattctttcattgaacaaaaggacgagtgccgtaagaacgaagagcatgtgaaccttatcaaggaatatcgcgtcatgatcgacgctgaactgatcaatttctgggacgcttcttgaagctgcttgacttccacttattgccttcttatactgct

SEQ ID NO: 54 - DNA, 422 bp, Zea mays
  unsure (1)..(422): unsure at all n locations
  Clone ID: TF_LIB143-064-Q1-E1-A12
tacaacactctatactgactcctagtacctccgagcccaagagcaaccccgcgccaagaagaaatttggtcctttaacaataagttcaaggaaggaaatgtttaaaatggcaaatttgctgaacaaggctaaaaggtataaggaaatggttaattaaatgaaaaaggtggtaaaaacggtaaatgtggaagagctcaatgtttaaggagcgtaaaccttctgtctgtttgcatacaaagaatgtgattgggggctcgccgcgcttcatggcgcattgtttcatccaatgaacaaaaggangagtcccgtaagaacgaagagcatgtgaatcttatcaaggaatatcgtggcaagatcgaggctgaactgagcaatatctgtgatggcatcttgaagctgcttgactcccacctagtgccttc

SEQ ID NO: 55 - DNA, 359 bp, Zea mays
  Clone ID: TF_LIB3227-018-P1-K1-F4
cccacccatgcgcaagcccaggcccggacgaaggccaggaggaaaacagtatttttaacaatgtgaatggggacgtgaacgattacattgaccaggctgctaggcatgctgagaggtatgaggatatggataaggatattgagactgtggatatgactgagcatactgaagagctgactgaccttgtgcgtgacctatacactaatgcatacaagactgtgattgctgcatggcgcactgtatgttgcattgaacattacgttgaacacaaggaggactaccagcatatcgacctgcttgtggactatatcaaggagtttcatgctaagatcaacgctgtactgaacagcatctgggat

SEQ ID NO: 56 - DNA, 828 bp, Zea mays
  Clone ID: TF_ZmC744_7
cctcgaggccggccgggctccgccctagcgcactgagccactcaacgtcgagatcgagacgacccgagtccgccgcgcccgtgcaccaccgaccgtcgaactcccgaaagtaactctatttcttgatcaacatcaacatgtcgcgggaggataatgtttacatggccaagctggctgagcaagcagaacggtacgaggaaatggttgagtacatggagaaggtggctaagaccgtagatgtggaagagctcaccgttgaggagcggaacctcttatctgttgcctacaagaacgtaattggggcccgccgtgcctcatggcgcattatctcctccatcgagcataaggaggagtcccagtcgaaggtgttttacctcaagatgaagggagattatcacaggtaccttgctgagtttaagactggtgctgagaggaaggaagctgcagagagtacaatgatagcttataaggcagctcaggatattgcgttggcggaactggcatctactcatcccataagacttggacttgcacttaacttctcagttttctattacgagattctgaactctccagacaaagcttgcaaccttgccaggcaggcgtttgatgaggctatttctcagttggatacgcttggcgaggattcatacaaagatagcaccttgatcatgcagctcctgagggacaacctaaccctatggaccgctgacagcacaacggaggacagcatcgaggagggcaatgaggcctcgaagggtgatgctggtgagggtcagtagtctggtaaacctcgattgatggttcggcatgtttttgaagtctact

SEQ ID NO: 57 - DNA, 1686 bp, Zea mays
  Clone ID: TF_UC-ZMFLMO17248F03_FLI
cgaggagaggggaaccccggcccagggagagttgtggggaggggatcggcggcggaggagatggaggagcgggagaagctcgtgtgcctggccaagcttgccgagcaggcggagcggtacgacgataatgattatgaagagcaagcaaacctgtacagtgaggaaactgggaatcggtacaacgaggacccagcagattcttaccaggaagagcaggagaatgcattcagtgggggcataaaccaacaggacaacttgcaggtcaacaatgttgacgataacaaatggcctggatggcctggagagagtgttttccgcatactcgttccagctcagaaggttggagctatcattggccgcaaaggggagtttatcaagaagatgtgcgaggagactaaagcgcgcatcaaaatacttgatggcccacctggtgtaccagaaagagcagtaatgatttcagcaaaggatgaaccagatgcacctctctctccagctatggatggcttacttagagttcataaaagaataactgatagttcagatggtgaatctagtcaacctcaacgaagtgctggtaatataggaccaacacgacttctagtgccatcttcgcaagctggcagccttattggcaagcagggagcaactattaaatcaatacaagattcttcaaaatctattgtccgtattgttgagaatgtgcctcctgttgcactaaatgatgatagagttgtggagatacaaggcgagcctcttggtgtccaggaagcagtggaattaatatcgagtcacctgagaaaatttcttgttgaccgcagtgttctaccattgtttgaagcgcatatgaaaatgcatggtatgccgagggagcaaccagtgccacctccccagcattggggccctcctcaaacctggatccgccctccaaacattcctccaggtggtcctggttttggaggaaatccacagttcatgcatccaaggccgcaagacagttactatcctttctcctgatgtcccccatatggaaaagcagccgcactacggtatttctgcatacggccgggaggccccaccaagtggtgcttctgctacagggaatcaaccaccctctcatgcaggttctcaggtggctcatgacatgcacattccccttgcctacgctgatgctgtgattggggcagctggtgctagtatcagttatatccgtagacacagcggcgcaacagtaactattcaagagagcagaggtgcacccggagagatgaccgtggagataactgggactgcagcccaagttcaaactgcgcagcagctgatccagaatttcatggcagaagctgccccaccaccaccaggcccggcgccagcttccaaccctcccgcaccaccagttgatccaagctatggctcttacccaccaccatatggagcagctccttcttatggttcttccgcagctgctgggcctccgcagtacaatggtgggaactacggtggcccgacctaccctcccagctatggctattagtagacaagtgtagcataccaaggatttgcccccccccccccctctttttttccgaataacgacagtgttgggcttgacatccccctgcccctggttgggagtgcagtttttaaaaccacaatttttcaataccagtctgataattgctatgatat

SEQ ID NO: 58 - DNA, 269 bp, Zea mays
  unsure (1)..(269): unsure at all n locations
  Clone ID: TF_700552665H1
gtggcaagatcgacgctgaactgagcaatatctgctgatggaatcttgacagctgcattgactcccatctngtgcctntcttcgtactgctgctagaatcaaaggtcttctacctcacagatgaagggtgactatcacaggtatccttgcggaatttaagactggtgctgagaggaaggaatctgctgagagcaccatggtggcctatacagctgctcaggacattgctctcgctgagctggcacctacacatccgataaggctgggac

SEQ ID NO: 59 - DNA, 528 bp, Zea mays
  Clone ID: TF_LIB4758-050-R1-K1-E5
ttgggtacctcgaggccggccgggacctccatcaaactcttcgattcagctccagaggatcatctgcggaactcacgatggcgctgccggctgcggttgcggctacctcaaggcgacgacctgtcacgtcgcagcacagcttagcgtcgctccgatgtatggcggctgcgcatctgatgcggtaggagacggcgtacatgtgccaatctggcacaggatccaaaatgccaagaggagatggtgtagtgcatgcagcgcgtcgcgagctccccacgcaggacctgccgaagataggaaatgttcctgaagaagcgcgacatgatgttcatgacctacaagaacgggataccatcccggacggtgtcatggtggatcttctcatccatctaggagacataaaaggcatccacaaactacgtcttctgcgtgctgatcctgagatagcggtactagatcataaccgaggtctcacatatctgaaactcgattttcagcctgactgactcgctcctatcggcataatccgga

SEQ ID NO: 60 - DNA, 740 bp, Zea mays
  Clone ID: TF_LIB4742-030-R1-K1-A3
cattgggtacctcgaggccggccgggatttcgttctccgaatcacgacgtatctggtagctttgtgatccaacacaatgcagatatagaaaactgaactgtaagattaataagcagacctttcccgagatgaagatgtgtgacatggcggaacatgcgcctgagaagtgcacgagaggaactgagggaaatgggttgcaattcgatgcgaccaaggtcaccagagacacatgtgtgatctcgagagtgagcgtcactgcttgtgactgagccgcaatccctcactgctcgtgctgtgcatcacagacagactgccatgtaccagcgccgcacctgcctctatcgtcccactcatctcatccattcatccgaacgaggagggtcgaggccatgaagaacgtgtaatacttgtctagagactaccgctggcaatatctgaaactgacttaaccaagatctgtgattgtatactcaagcttctcaaatgtcactctttcgtcagtcttccactacatccacgagtgcgaagaccgttctatcttaagatgacaggtgactactacacatactttgctgatctacgactgcatctcattagaaagacgctgatctcaacacctatggctgatatacaacgctgcccaggaattgcttttctgagctatgctcaactcaccctattacgctttcactgacactctacttctgcttgatctactatgagattctcaactcacgcca

SEQ ID NO: 61 - DNA, 588 bp, Zea mays
  Clone ID: TF_LIB4979-021-A1-K1-G9
tttggaggatggctttgatgagggaatctccaaactatacagagctgggacaggactactacaaggacagaactctgatcatgcttttcctgcgtgacaactggaccctatggacttccaacaccaactacgatctccagacatcgagatcaaagaaccacctgctgcccccacagaatccggcccctagggacagtaagacgcatcctatctccccagctgatgaatgcctgctgatggctgctagattaccacgactgtgacgcccttgatttctgatagcttatcgtctagtacacctcgcggtgctctcttcgtcacgtggacggtgagagtgtgctgaagatgactgccattgtcattgccggtgtgttttaattacagcatacattctacgatgtcatcgtccgcatgctatgtgtacaactctcacaggtagatagaatcgatggctggatgcgtagcttatcatgctccacgcctgctgcttctttcatcgaacaaacatacctgcccttgttgcaccgatgttgtttacaatgacctatatttgactggaagaactcaacgaacgaaagctcctatgcg

SEQ ID NO: 62 - DNA, 362 bp, Zea mays
  unsure (1)..(362): unsure at all n locations
  Clone ID: TF_LIB143-057-Q1-E1-F11
caagcctctaatctgagtcgcattaacgtgaggaaaatgtgtacatggtgaagctcgctgaccangccgcgaggtacgatgagatggttgagttcatggacaatgtacccaaaactgttgactcggaggagctcactgtgcatgagcgaaacctcttgtctgttgcatacaggaacgtcattggagcccgccgcacctcatggcacatcatctcctccatcgagcagaaggaggatggccgaagcaattaggaccgagtaacactcatcaaggattaacgtggcaagattgagactgagctgaccaagatctgtgatggcatcctcaggctgcttgagagccatcttgtgccgtcttctact

SEQ ID NO: 63 - DNA, 272 bp, Zea mays
  Clone ID: TF_LIB3076-026-Q1-K1-B8
tttaaccttatcaatgaataccatgcgaagggcgaatctgaactgagcaatatctctgatggcatcctgaatctgcttgactcccacctagtgccttcttctactgctgcttaatcaaaagtcttctaccttaagattaatggtgactatcataggtatcttgctgaatttaatactgttcctgaaattaaggaatcttcttataactctattatttattactttgcttctcatgacattacccttacttatctattacctacccatcctat

SEQ ID NO: 64 - DNA, 352 bp, Zea mays
  Clone ID: TF_LIB3150-017-Q1-N1-B11
ctagagcgtgacttacgtgactatgatgtgtgatgtcgtcgtgaagctgcgggacacccatcttgtgccgggtttcactgctggcgtgtccaacgtcatgtatctcaagacgaatggtaattactctagataccgcgacgagtgcaagactggaccaggcataaaggtccttgatgataacatgctggtcgcatataatgatagcaatgacattgttcttgcgaaacttgggtgaccttaatttactataggatgaatgcccacttatctgttgagtgacctactatgagatcctgatgtaagctgaccgaacttgaagtcgtgaaaaagattgttgggacgacgccagctt

SEQ ID NO: 65 - DNA, 1235 bp, Zea mays
  Clone ID: TF_ZmC261_29
gtttgggacagcatgggacaaaagaaagaagttggttatagaaagcagaagtttcatggattcacggtaaactgaaactgtcgctacaacaattcttcttgtgatcgttgctccttgccaattcatcgatctgagatgcaaactgacatcatctatgagcactgggatattcttcccccctaagcaaattaaggacccagagactaagaagcctgaggactgggatgacaaggagtacattcctgaccctgaggacaagaagccagagggctatgatggtattcccaaggaaattactgaccctgatgctaagaagcctgaggaccgggacaatgaggaagatggtgaatggactacccatttgctcgtaccattcccaaccaaaatacaagggaccatggaaacaaaagaaaatcaagaactcgaactaccagggtaaatagaaggcccatatgattgacaacctagatttcaaggatgatccatatatttatgcttttgacagcctaaaatacattggcattgagatgtggcaggttaaatgaggcactttgtttgacaacaccatcatcactgatgatcttgcgttggccaagacttttgcagaggagacatggggcaagcacaaggagatattgtgttcttatgcttggagtgaagatggttgccactctgcattagcggtgtgctctttgcaaagccttggagctgcctctcctgcaaagtctgaacttgcagagatagtcccacaagagaaatcaccaaaagcttccattcaaccaatgccaccgagtccaaggtattctacctcaagatgaagggcgactaccacaggtgcatagaggaaggatgctgcggggagcaccatgaatccctacaaagctgctcaggtttcctctgactgttcaccattattggaagcagggcaggcagagagccttggaaccgaactcttggggatggtgcctagcagggaagaggagattaagttgaaagaatacagggaggatgttgtgtcgacttttgtagttgatgattatgtgatacttcagtttaagggctcaacttttaccggttcttggaagtcatttagtagccctaagatttcatcaacattcttagtagtaattgctatagtatcaaatgggattgtggtacgagttgctcgagtactaagtactaatgttgttgtacattgtgaagctaagtgggtaatatcaaaaggattaagattt

SEQ ID NO: 66 - DNA, 904 bp, Zea mays
  Clone ID: TF_ZmC2299_3
tgcctgccgtttccatctccatccagttctccgcacccacccacccacccactcctttccccaacccatggccgccgccgccgccggcacccgggaggagatggtctacatggccaagctagcggagcaggcggagcggtacgaggagatggtggagttcatggagaaggtcgcggccgccgccgagctcaccgtcgaggagcgcaacctgctctccgtcgcctacaagaacgtcatcggcgcgcgccgcgcctcctggcgcatcgtctcctccatcgagcacaaggaggagacgcggggcgcggcggccgtggacgccagggtcttctacctcaagatgaagggggactaccaccgctacctcgccgagttcaagaccggcgccgagcgcaaggacgccgcggactccacgctcgccgcctaccaggccgcgcaggacatcgccgtcaaggagctgccgcccacgcatcccatcaggctcggcctcgccctcaacttctccgtcttctactacgagatcctcagctcgccggaccgcgcctgctcgctggccaagcaggccttcgacgaagctatttcagagctggatagtcttggggaagagtcgtacaaggatagcaccctcatcatgcagcttcttcgtgacaacctcaccttgtggacttctgacatgcaggaggatggtggcgatgaaatgcgggatgcaaataagcctgacgaggagcagtagtagtcgtcatgccatgccatgccatgccatgcttgtacaaggaccattttcgtgtgtcctttccttcaatcgtcgacctttcgttttgttgttatactgctattgtggaaccctgttactgttactgttagtgtatcctattggcaataatcaaatgtggtatggttgactact

SEQ ID NO: 67 - DNA, 324 bp, Zea mays
  Clone ID: TF_jC-zmXLIB3526P040cf06b1
acgaagactgtatatgaggaagagctcactgttgaggagcgtaaccttctgtctggtgcatacaagaatgtgattggggctcgacgcgcttcatggcgcattggtaattccattgaacaaaaagaggagtcccttaagaacctattatcctgtggaccttatcaaggaatatagtggctagatcgaagcttaactgagcaatatctgtgatgagctcttgaaactgcttgactcccacctagagccttattgtaatgctgctgaatcaaacgtcttctacctcaagatgaaaggtgactatcacacgtctcttaccgaatttaa

SEQ ID NO: 68 - DNA, 213 bp, Zea mays
  Clone ID: TF_LIB3227-010-P1-K1-E12
ggcgtaaccagtgctttccctggaggaaaatgtttacttggcgaagctcgccgcgcaggcaaagaggttcgaggaaaagctcgagtttatggtgaatgctacgaaacctgtggactcgaaggacctcactgtgcaggaacgcaacctcttgtatgatgcatacacgaacgttattggggcccgccctgcctaatggcgcataatctcctccat

SEQ ID NO: 69 - DNA, 366 bp, Zea mays
  Clone ID: TF_LIB3227-010-P1-K1-E1
cccacgcgtccggatggtactacggcttaaagaggcgcaagtgctgcaagagggcggtgaagagcagacccaacccgaggaactactaccggtgctcggcggtgggatgcggcacgaagaagctcattgtgaggaacagtgaatacctgtgctacgtcttaacaacctactacggtatgcacaagcacgccaagtcgtgcgactgctacctatgcccgcctcctgctgcgcgcagcgcagatcactactcgtctcctactgcagaacgacgttggtgagccactatttacgcttgactggcgcatatgctaccgtaagctgatgatgcagttgaatgaggactgtcgcgctcttgcaatatcatta

SEQ ID NO: 70 - DNA, 655 bp, Zea mays
  Clone ID: TF_LIB4757-019-Q1-K1-A3
gatccaccgtctatccttccgtagcccatctgcaccccaccccacactcaactaccacaaccaccccatccactccctccagctactccttacaatggcgactgagcgtgagagcaagactttcctcgcccggctgtgcgaacaggctgagcgctacgatgagatggttacgtacatgaaggaagtcgctaaggtcgccggtgaactcaccggtgacgagcgcaaccttctgtccgtcgcctacaagaacgtcgttggtacccgacgcgcgtcgtggcgcatcatctcctcaatcgagcaaaaggaagagtccaagggcaccgagaagcacgttggcaccatccgtgactaccgccagaagatcgagaccgagctcgagcaggtttgccaggatgtcctaaacgtcctcgacgactccctcatccccaaggccgagtccggcgagtccaaggtcttctaccacaagatgaagggagactaccaccgttaccttgctgaatttgcttccggtgagaagcgcaaggttgccgccactgctgcacacgaggcctacaagacggccaccgatgttgcccagactgagctcacacccacgcaccccatccgtctcggacttgccctgaactttttggtcttttactacgagatcctgaac

SEQ ID NO: 71 - DNA, 334 bp, Zea mays
  unsure (1)..(334): unsure at all n locations
  Clone ID: TF_LIB4739-044-Q1-K1-D9
aaaccccccatctcgaacgccggagctcgacaaggtcgaccgacgacgcacgcggagatccggcgtactgcaaattttgaaaactgaactgtaagatggcatcagcagagctttcccgtgaggaaaatgtgtacatggcgaagctcgctgagcaggcggagaggtacgaggagatggttgagttcatggagaaggtagccaagactgttgaggggggggggctcactgtgnaggagcnaaacctcttgtctgttgcatacaagagcggaattggagcccgccgcgcgtcatggngcatcatcttcttcatcgggcgtanggtggatggccgagg

SEQ ID NO: 72 - DNA, 273 bp, Zea mays
  Clone ID: TF_700575123H1
gtcttctacctcaagatgaagggtgactaccacaggtaccttgctgagttcacttctggggcagagaggacggatgctgttgagatcaccatggatgcctacaaagctgctcaggacattgctctcgtagatttggctgtaaggcatcccatcagggttgtggtcgctcttaggttctcagtgctctacgacgtgattctggacttacctgatatcgtcttcatgcttgcaatacaggtcttctatgatgcgatccctgtggtaggcagtctg

SEQ ID NO: 73 - DNA, 323 bp, Zea mays
  Clone ID: TF_uC-zmflteosinte083a02b1
gcagttccccgaccacaccgttcctccgagcccaggagcagccccccgccaggaggaagattgatcttttaacaatatgtcgagggaggagaatgtttacatggccaagtgggctgctcaggctgaaaggtacgaggtgatggctgagtatatggagaaggtggctacgactgtagatgtggtagagctcactgtcgaggagcgtaaccttatgtatgtagcatacaagaatgtgattggggctcgacgcgcttcatggagcactgttccttgcatggaacaaattgaggagttccgtaggatcgaaaagcatgtgcacctta

SEQ ID NO: 74 - DNA, 277 bp, Zea mays
  Clone ID: TF_LIB3136-055-Q1-K1-A9
cccgaccacaccgttcctccgagcccaagagcagccccgcgccaggaggaagtttgttcttttaacaatatgtcgagggaggagaatgtttacatggccaacttggctgagcaggctgaaaggtatgaggagatggttgagtatatggagaaaggggcttaaactgtagatgtggaaaaacttactggtgaggaaccggaccttctgtctggtgcatacaaaaatgggaatggggcttgccgcgcttcatggggcattggttctttcattgaacaaa

SEQ ID NO: 75 - DNA, 596 bp, Zea mays
  Clone ID: TF_LIB4665-002-R1-N1-G12
cttttcttttttttttttttttttttttttttttttttttttttttttttttttttttttttttttttttttggacttcaaaactcaataaaacgctaaagcaacccctgacttgtttttaaaatccagggaataatcccagcccacacggacttaatgccaactaggggaaacacaaagcaagggggaactaattcgaaccctccccccctactaatataaaaaaagaagggggggaacgggaaatcagttccaatattagcccggcacagttttagtttcgacaggttaaagcatttaaaacaaggggctcaaacaatatgccctttcccaaaattattggccgtaaccagcctaacttttgggggtttttttgccctaataaacaccatcctccgggggggaaaaggtccaaagggtcaagttgcccctaaggagctgcatgatcaaagggctttttttgtatgacccctccccaagggggtttaactgggaaatagtttcataaaacccctgttttgcaaggttgaagctttgctggggagttcaaaatctcataataaaacactggagaagttaaaagcaagcccaaccct

SEQ ID NO: 76 - DNA, 844 bp, Zea mays
  unsure (1)..(844): unsure at all n locations
  Clone ID: TF_LIB4756-120-R1-K1-F6
cattgggaccctcgaggccggccggggccgctctctgaccaactccttcacctcgttttcttgtcctcaccacttcgccgtcttctgcaacccacgcttctgcaaacccaccccctctccacatctacttttctcttcacttcacaatgggttacgaagactccgtatacctagccaagctggccgagcaggccgagcgctatgaggagatggtcgagaacatgaaggccgttgcctccgcagaccaggaactctccgtcgaggagcgaaatctcctttctgttgcctacaagaacgtcatcggtgctcgccgcgcgtcctggagaatcgtcacctccattgagcagaaggaggagtccaagggcaacgaggcccaggttggtcttatcaaggagtaccgccagaagatcgaggccgagttggccaagatctgcgaggacattctcgagtgccttgatggccacttgatcccctctgctgagagcggcgagtccaaggtcttctaccacaagatgaagggtgactaccaccgctaccttgccgagttcgctgttggtgacaagcgcaagacctctgccgacaagtcgcttgaggcttacaaggccgccaccgaggttgccgcctccagcctggcccctactcaccccattcgcctcggacttgccctcaacttctccgttttctactacgagatcctcaactcgcccgaccaggcttgccaanttggccagcaggctttcgacgatgccattgctgagctcgacaccctgtctgaggagagctacaaggactctaccctcatcatgcagctcctcagggacaacctgaccctctggacatcgtc

SEQ ID NO: 77 - DNA, 658 bp, Zea mays
  Clone ID: TF_LIB4767-042-R1-K1-H10
cattgggtacctcgaggccggccgggagagcgcatacgacacccggagttgatacaggacgatcttccacgatctcgtcgatcttgcggactgcctgctctgattactgaactgctcgatgccatccgaccagctttcccgtgatgaaaacgagcacatgagcgaagctcgctgaccaggcgcaaaccgactacgatagggctagattcatggatcaacggagcctcgactgttgactcggaggagctcactgcgtacgatcgaaacctcttgtctgtcgcatacaataacgtcattggagcccgccgcacctcatggcgcatcatctcctccatcgagcagaaggaggaggggctaagccacgacgaccgagcaacactcatcaaggattatcgtggcaagattgacactgacctgaccaacatctgtgatggcatcctcaagctgcttgagacccatcttgtgccgtcttccactgcccccgagtccaagggcttctatctctagatgcatggtgcattactacacataccttgctgagttctagactggacctgagagaaaggacgccgctgacaacacgatggtggtatactacgctgcccaggacattgctctgagtgcaattgctccaactctccctattacggttggactg

SEQ ID NO: 78 - DNA, 265 bp, Zea mays
  Clone ID: TF_LIB3245-537-P1-K1-D7
cccacgcgtccggcacaaactcgtcttttccgctccacaggatcctgtgcgccggcgtaaccgtgtgaccgcccgtgccgccggccatcccgatccgccgacccgtaccagccccggtcgaagacatgtaaccgacggagcccacgcgggaggagagcgtgtacatggacaacctcgctgagcacgcggagcggtacgaggagatggttgagtacatggagcgcgtctagcgctacgccgggggctacggtggcggcgaccagtt

SEQ ID NO: 79 - DNA, 442 bp, Zea mays
  Clone ID: TF_LIB4171-051-R1-L1-B6
cgggcatgagccctaattcatacgactacgaaggcagcctcgtcaagcaaaattacacaaagaagaaaatacttgatgtatgaactttgtgtcagctatgtattcagtaatttatacgccgtcgcaccgcacgggcacataactattgataaattatgttggcaacaaaagcaatttggaattcattatttttgtggacatgcattaatgaaatcaacacagtatagaaagtgaagactaggaaaggtgcaccagaaactccagctgggtcatacctcaggaatctgaagatttgccgtactcaagccatgctgctccaatacccttggcggtttgacgaggctatctctcagttggatacacttggcgaggatttatacaaagatagcaccttaatcatgccagcttttgagggacaacttaacgcttatggtccgctgac

SEQ ID NO: 80 - DNA, 694 bp, Zea mays
  Clone ID: TF_LIB4738-097-Q1-K1-A9
atctattgatcgaacgaggagtcccgtaagaacgaagagcatgagaaccttatcaaggaataccgtgcgaagatcgaggctgaactgagcaatatctgtgatggcatcctgaagctgcttgactcccacctagagccttcttctactgctgctgaatcaaaggtcttctacctcaagatgaagggtgactatcacaggtatcttgcggaatttaagactggacctgagaggaaagaatctgctgacaccacgatgatggcctacaaggatgctcacgacattgcgctggatgagctggcacctacccatcccataaggcttgggcttgctcttaacttctcagtgttctattatgagattctgaactccccacacaaagattgcaaccttgcaaagcaagcgcttgatgagagctatctcccagctacacacccttgcagaggagtcataccaagatagcactctgatcatgcaactcctgagggacaacttgaccctttggacctctgacctcacggaggatggtgctgatgagggacaacaagccccgaaaggtgaggctggcgacgtacagaaaggcacagcaatcttgggagagcacatattgctcgagcccattgatttagatgctctatgctgacgaagctgaacctgtgccgcgctattattgtagctgatatcctgatccctcact

SEQ ID NO: 81 - DNA, 207 bp, Zea mays
  Clone ID: TF_LIB3069-008-Q1-K1-A8
accactcgtcctaagactgaacatttggttgagctcactgacgaggagcgtaacgtactggctgttgcatacaagaatgtgatcgctgctcgccgcgcttcatggcgcattgaaccttccattgaacaaaaggaggactcccataagaacaacaagcatgtgaaccttatcaaagaatatcgtgccaagatcgaagctttactgaac

SEQ ID NO: 82 - DNA, 636 bp, Zea mays
  Clone ID: TF_LIB3069-008-Q1-K1-A8.R2
acgactcgtgagaagactgagcatactgaagaggagagtgaccatgagcgtgacgtttacaataatgtatacgagaatgtgatgtgctgcttggcgcactgtatgttgcattgaatattacgttgaacacagggagaactaccagcataacaaacataatgtgaactttatcaaggaatatggtgctaagatgaacgctaaactgaacaatatctgggatcgtatcgacaaccagctagagtcccatctaacggcttcttatactgatgctgaatcacaggtcatgaacgtcaacattaacggtgattatgacaaatataatactgaatctaagactgatgcttataggaagaacactgttgagagctcaatggcggcctataacgttgctcaggatattgttgtgcctaaccatgcaactacgcatgcaataaggctgaaacttgctctgaattattaagagatttataatgagacagacaactccccacacaaggctaaccacctgtcaaatgaagctatctatgaatctaactgtcatttagacagcctatgcgaggatgtctatatggatatgcctctgctgatgcatctcctgacggataactacaacccttctgacatacgatctcactg

SEQ ID NO: 83 - DNA, 735 bp, Zea mays
  Clone ID: TF_LIB4742-110-Q1-K1-B10
tcgaggccggccggggccaccgtccctatccgcagctcccccgcgcccgagatcaaccccgcgccaggagcaaccttgctcttttatccatatgctcgacggacgagaatgtctacatggcccagctgtctgaccaggccgaaagcgtatgaagagatgattcagtatctgcataatcagcctgaaaactagtcatgatgcgtgaaggacctacacgtgttgcagcagacgtagacctcattcccatggctcatacaactagctgtagattagcgggcgtcgctcgatgctctcaccgacagcacttgtcatcttctagttagaacatacaacaggagtcccgtacgaaccaacagcatgtgcaccttatcacggaataccctgcgcaaatcgaggctgaactgcgcaatatctgcgctggcatcctgaagctgcttgactcccacctagagccttcttctactgctgctgaatcatagctcttctacctcaagatgaagggtgactatcacaggtatcttgcggaatttaagactggtcctgagaggaaggaatctgctgacagcaccatgatggcctacaacgctgctcaggacattgcgctggctgagctggcacctacccatccgataaggctcgcgcttgctcttaacttctcagggggccattatgagactctgaactccccccacaaactcgctaccttgcaaaacagcgccgtttgatgaagctatc

SEQ ID NO: 84 - DNA, 300 bp, Zea mays
  Clone ID: TF_LIB3159-007-Q1-K1-E7
acgctgacactttttcagtcacagaggtacgaggaaatggttgacttcatggacatcgtagcgggagctgttgactctgaagagctcactgtcaaggatcgcatccttctgtacgatgcatacaagaacgttattgtaaccattcgtgcctcatgacgcatcatttccttcatcgatcacatggaggaggatcatgccaatgttgaccatgtaacactcatcaataactacctcccaactattgaatctgacctcaacacatatctattataacatcctcaatctatatgaataatatct

SEQ ID NO: 85 - DNA, 328 bp, Zea mays
  Clone ID: TF_LIB3075-042-Q1-K1-C4
cagacgcgtacggaagccaggacatggaaataaaaccgtgatacctgcctactgatgcaagaaaaacaccgagataccacggtgctgaacggagtgatagacgtgctcgaataccaccttgttcaatgcaccgccaggggcaagtaccaggtcttataccttaaaatgaatgatgactaccacatggaccttgctgagttcaaaactagtgcaaagaggaaagatactttttacagcaccatgaatgcctacacaaatggtcacgacattggtcttggaaaaatgggtgtaaccacaccccatcaagcttggccttggtttcaactta

SEQ ID NO: 86 - DNA, 1353 bp, Zea mays
  Clone ID: TF_ZmC5000_11
gttctgttgaagatgcttctaaagcactggagtattgtagcactgatggaaggccttcgatgaaatgtttccctaaaagttgcatactacatcgctgaagcactacaatattgtaacactgagggaaggcctttgtatcatgacctaaattcatatagggccctctttgatgaggaggagcactaccttttgccagttgcttgcaagaatgtaattggaatccgatgtgcttcatggcgcatcgtatcctccattgagtatagggaagaaggttgtgtcaacatggactgtgccactctcatcgaggactaccataacaagattgaagttgaactcaacaagatctgtgttggaatcctcaagctcttttcccaccttcccccctcattaatagtttcaaagtccaaggtcttctacctcaagatgaagggtgattactatagttccttgcggagtttgaaacttgatctaggagaaaagatgcagccaagaataccatggtggcacgcaaagttgctcagatattgctttggagttggctcccctatcctattaggctttggctgatgcttaacctctcaactctcctgatcttgctcgtggtctccccaaacaggcaaagccaacgaatgaaagggactcactcgcagcaacaaccaaaaaattgacatggtggtaggaaaaagacaatggtcagcaacttactcggagcagaaaatttttaattgtggtacccgtggtgctgtggttggcaatgcagtgatgcttagtgaaatcataaactacgtgcagtccctacaatgacaagttgagtttgtgttcatgaaactggccaccgtgaatccccaggtggacttaaatagcctgcctaacgtcctccctaaagatgtacatcagtcttgtggcccgccacatttctcgctggagaccttaggcgctccgttgtcgtacctcagccagcctcaccatggaagccctcttggctgcatggacaaccagagttgtatgcacccacttgacacgacgttttgcttggcgataaatccgcagtatcatttcctcaacggtgttagcgatgcatcgtctcagctaatttgatgcttgtgtttgtggaaaccaagaggtggtgttgattcattggaaacatggttgtgtatgaatgagtttccagctacttctattgttggagatagaaaccaacatgtttggtttttgtttttattcgctttagaacaactcatttttgtacagaaagaggcatttagctataattgtttgttgtagtatgtttaccgcaggatagccggttccatgaaatacataaaaaattgatattgttgctgtatttggttt

SEQ ID NO: 87 - DNA, 424 bp, Zea mays
  Clone ID: TF_LIB3597-059-Q1-N6-A7
accttaaaaaacccagagcatattaccagagcacacggacttaatgccatctagcagattcacaaagcggtggggaattaattaagaacactaccagtctagttatataaaaaaagaagtttgggaaccggaacttagctgcaataatagcacggctcatattgagcttctacagacttgagcatctaaaacaatgggcttgaacactgtgcgctattccaagattactgcacgtcaacagaacttacctttccgggattttttgccctaatcactaccatcctacatgaggtcataagctcaaatggttaagttgtccctaatgggcctgtttatcagagggatatctttgtttgaatcctccccaagggattctaactcggacatagcttgatcaaacgcctgctttgcaacgatgcaagct

SEQ ID NO: 88 - DNA, 1773 bp, Zea mays
  Clone ID: TF_ZmC3397_8
cattgggtacctcgaggccggccgggccgcccttcacgcagaggggtccggtccgccgccctctcggcccatccgccgccggttcccgtccagccgcacgcgccttcttcctcccccggcgccttctcggtgaaccagacccgtccctcacccgtgcgactcccgcagcgcccgcccctccgtcacctccgcatcctccccgtccttgcggccatatccgtcgtctccgcatcctccttcctacgctctgtcggcgtggcctccccatcccggtgttctccgattttggggggcgtccctttgcccgctccggtctgctcctccagagtccggtccagcggagcgcactacgacacagatcggcagccgtccatccctttccagctctccagagcctccgccggcgcatccggcgactgatttgcagggcgtatgtgttggaaatgctcagctgctagtttttcctggtagatcatcaagtcttgagagcagttaaaacaaaccaatttttcctgcaagagctctacgtgctatggagacagcaaatacattttcctttggttcacttcaattttgacggagtgcttgaagatggctttgttgccgtcaagaagttatactcgtatattgcaattgaagacgaaccatttcatcgaaagtagaaaagggcaagcgacgagcacagcacagcacagcacaagcacgccttccgttttgggaaggcgaggagaggggaaccccggcccagggagagttgtggggaggggatcggcggcggaggagatggaggagcgggagaagctcgtgtgcctggccaagcttgccgagcaggcggagcggtacgacgatatggtggaattcatgaagaatcttgctaggatggacgtggatatgagtgctgaagaaaggcatttgttctcagttggtttcaagaacactattggagcaaagagggcatcatggagaatcatttgttcacatgagcaaaaggtcgcagctgatcgtcagactggtgtgatgatagatgcctataagaagaaagtagaagaggaactaaggaaggaaaggtgactactaccgttacttggctgaatttagcactggaactgaaaagaaagctgcctctgatcagtcacttatggcctatcagcatgccatggttgtcgcctccagtgagctctcacctgctcaccaaatccggcttggccttgccctcaatttgtcggtcttcttttatgagataatgaactctcatgagagagcttgccaagtggcaaaacaagcatttgatgaggctcttactgagataaattctggtgagggaggttacaaggatagcacacttatgatgcagcttctgaaggacaacttagcattgtggacatcagaactaactggaggtgaagcatccaagggtaacgacgatgtcgacatggagggttgatacattctccatgttttaaggaaacacagaaagcacgcaaaaatatccaggctgtgatgctagcgaacctgggtcctcaagttttttctgcatcggaactcagaggagccttgtgtatttttctgaagtttctgtccgtctcgggttttttttttgaggtctgtttgttcctctcttttggccatcgtttggtcctggagtcagtcactcactaccaagtgtttcagaggtctgaactggtgagcatctagatctgttgttgctttttttttcttcttctgtgcttcagaggcatctttgtacaccgatggaaaactgtttctcttatc

SEQ ID NO: 89 - DNA, 399 bp, Zea mays
  unsure (1)..(399): unsure at all n locations
  Clone ID: TF_LIB3076-006-Q1-K1-H5
acgcgttcgcgttattgtagcccgtcgtgcctcatgtctcatcatttcctccatcgagcanaaagagggggttttaggaagtgaggagggctttactctcatcaaggactaccgtggcatgattgaaactgagctcaccaagatctgtgatggcatcctcaagcttctttaatctcaccttgtgccgtcttccaccgatcctgagtccaaggtcttctatctcaagatgaagggtgactactacagataccttgctgagttcaagactggagcttagagaaaagacgctgctgagaacaccatggtgggttacaaggctgcccaatacattgatttggctgtgctttgttccaactcaccctactaggcttggactggcacttaactttctcagtgttt

SEQ ID NO: 90 - DNA, 256 bp, Zea mays
  Clone ID: TF_LIB3066-035-Q1-K1-A7.F24
aagggtgactatttcaggtatgttagcggaattgaagactggtcctgagaggaaggaatctgttgagagcacgatgatggcctacaaggctgctcaggacattgcgctgactgagctggcacctacccatccaataaggcttgggcttgctcttaacttgtcagtgtactattatgagatactgaactccccagacaaagcttgcaaccttgcaaagcatgcgttatgatgaaactgtatacgaggttaacaccct

SEQ ID NO: 91 - DNA, 565 bp, Zea mays
  Clone ID: TF_LIB4758-032-R1-K1-H2
accggccgagctggcggtgaccctgttccgccgagccgagccgtcccaccacatccctagcggcggtcgcagctatgtcgacgtagcagccgacgcgtgaggacagcgggaacatgggcaagctggcaaaccaggcgcgagcgctgacgaggtaggtggatcgagttcatgtgaacgagtggcgcgctccgccatgggaaacggcagaggggaggaactctcctaggaggagcgcaacctgctgaccatctcctacaataacgtcatcaggggccgcttggcctcgtggaggatcctgtcctccatctaacagaaggatgaggggcggggtaacgaggcacacgccgcctccatccgcacctaccgctccgagatcaaaatcgaagtcgaccacatctgtgacgggatcctcggcctgctcgactcccacgtcatcgcatccgacgacgctgacaagaccaaggtcttctacctcaagatgaagggggactaccgcaggtaccttggtgaaattaaatcgggtgaagagatgaaggatgctgcgtagagcaccatgaatggctac

SEQ ID NO: 92 - DNA, 320 bp, Zea mays
  unsure (1)..(320): unsure at all n locations
  Clone ID: TF_LIB4605-003-R1-N1-A4
ctaccttctatttgattgtctgtatctcgacacggacgacccgctgacgcgcgctaagctccggtgctctgccttttgtgtgaactgtactgtcctatggctctcccacagcttttctgtaaggaagatgtgtacatgaggacatctctgcttcgcnggctgcagaggtaccacgagatggttcacgtcttggagaaggtagccaagactgttgactcggtggagctctctgatgaggagcgaaacctcttgcacggtgcataccagaacgtcagtggagcccggctggcctcattgcgcatgatcttctccatccaaca

SEQ ID NO: 93 - DNA, 460 bp, Zea mays
  Clone ID: TF_LIB3632-045-Q6-K6-B10
ctccgcgcgctgcgccgctgcctccgccaacggacgacacgacgacacacgctggagatgccgcgtactgccgctcgtgaatactgagctcgcagatggcctcaggagagctcccccgcagaggaatatgtgtacatggacaacctcggtgagcaggcggagaggcacgaggagatggttctcctcatggataaggtagccactactgttgactctgaggagctcactgaggaggagcgaaacctcttgtctggtgcatacaggaacgtcattggagccagccgcgcctcatggcccataatctccttcatcgagcagaaagaggagggccgatgcaatgaggaccgagtaacactctttgaagatgttcgtggcaagattgagagttagctgacccagatctgtgatggcatccttaagctgcttgagacccatcttgagccgtcttccactgcccccg

SEQ ID NO: 94 - DNA, 387 bp, Zea mays
  unsure (1)..(387): unsure at all n locations
  Clone ID: TF_LIB4665-011-Q1-K1-H11
ccgggacacagcatccgcagttccccgacacaccgttcctccgagcccaggagcagccccgcgccaggaggaagtttgttcttttaacaatatgtcgagggaggagaatgtttacatggccaagttggctgagcaggctgaaaggtatgaggagatggttgagtatatggagaaggtggctaagactgtnnatgnggnagagnntattgtggtgggggggaggcttatattggtggtgtactggacgctcgatctggttccttgccgtgtttgatgtcgtaagtgtctcgcaggattctgacgtcttggctcctcttcatgccctggcctttagtggcgcggagagggggatgatgtgtgctgtgcgatatctttgggtgctgatcc

SEQ ID NO: 95 - DNA, 464 bp, Zea mays
  Clone ID: TF_LIB4701-005-R1-K1-G1
acgaggccatctggcaactggacaccctgagctgaggagtcctacaaggacagcactttgatcatgctgctccttcgcaatacattgaccctatggacttctgacatctcgcaggaccctgctgcatacattagggaggcacccaagctgcgacttgagtgacggccagtaaagccgcctttatgtgctctacaaactagatgctagagtttgctgctgtcgaatgacactatgcaatgcgatctggcacctgctttcttgggcgcgactcttgctatgactgtcaccactaaaatttggggtgctccccacatgagatgcttccgtacaaggcctcgctgacccacctcgcttgagacggggggcgctgcaacccggactggtagatatgcgaagccctttaaactgttgttacttgcattttaccttttccatcgctgtttattgcgaggggccctatatcg

SEQ ID NO: 96 - DNA, 464 bp, Zea mays
  Clone ID: TF_LIB3632-025-Q1-N6-H2
aacaaaaaaaagcgagggaaagagggaaaaggcaggggacaacagttaaagaggggttccaaaccaaaccagacggggctcaagggccccacgccaaaaacgagggggaacaccgaggccttgccagggagaatcctttacggggggcccccaaattttagggacaaaagtaaaaacacggttaaaagggtccaacccaaaaaaccaggttccaaaaaaaattgaataggggaattcgacagcagcaaacactagctactagtttttaggcacaaaaagccggtttaactgcccctaactcaagacccgttggggcccctccttaattttttaagaagggtcctccgaaagggaaaaggcccatagggccaagttataacaaaggagctgaataaaaaaagggctgcccttgtaggactccccgttaagggggtccagttccaaaagggcctaggaaaaagcct

SEQ ID NO: 97 - DNA, 2309 bp, Zea mays
  Clone ID: TF_ZmC19578_1
cattgggtacctcgaggccggccgggtctccacaaaccaagttccaccagacccacacgtttctttaccctaaccttttcgctgccgcggaagaacacagccaccgccgtttcttcgtcttcctcgcagcgccggcgcgccatctcggtacgaaggcgacggcggcggcgacggcggcgttcaggatcgggatctcagcgacgacgtcagaggcttcccatcccgacccccgccagtcgcctcgcgccctcgactccggactccggtcctccgcacaccggccggttaccctgcgtttgaacctgctatagaaatttataaaatggccgcggttgatgcgacaaccaaggagatggatgcactgcatgttggacaaaatgatgaaacaaaagagagactgattaaagaagacaaagctgcaaacagcaatcattctgttgttgcagctcagtccttgccaccagaggacgacgatgatgatgaagcacaagctgatggtccatctcaagatggagcagcagctgtaaagaagaaaaagaagaaaaacaaatccaaaaagaagaagggcccccttcaacagacagatcctccatcaatacctgttgatgagcttttcccctcaggagaatttccagagggcgaaatccaacaatacaaggatgacaatctgtggagaacaactagtgaggaaaagagggacctggaacgactgcaaaagccaatatacaactctgttcgccaagcagcagaagttcatagacaggtgcggaaatatatgaggagcatcataaaacctggaatgttaatggttgatctatgtgagacattggaaaacatggtccggaaacttatcaaggagaatggactgcaagctggcattgcttttccgactggatgctccttgaattgggttgcagctcactggactccaaatgcgggcgacaaaactgtgctacaatatgatgatgtgatgaagcttgattttggaacacatatagatggttacattgttgattgtgcatttactgttgcattcaatcctatgtttgatccattgcttcaagcaacgagagatgccacaaatactggaatcaaggaagctgggatagatgcacggcttggtgatgtcggtgctgcaatccaagaagttatggaatcctatgaggttgaaatcaatgggaaagttttccaagttaaaagtgttcggaacctcaatggacacagcatcgggccatatcaaatccatgctgggaaatcagttccaatagtgaaaggtggagaacaaacaaaaatggaggaaggggagttttatgccattgaaacttttggatctacgggaaagggatttgtcagggaggacttggaatgcagtcattacatgaagaactttgatgtcggacatgtgcctttaaggttagcaaaggccaagcaactgcttgggaccatcaaccacaacttcggaacgctcgccttttgccggcggtacttggaccgccttggtgagaccaagtacctcatggctctgaagaatctttgtgacaatggcatcgttcagccgtaccctcccctgtgcgatgtgagagggagctacgtctcacagtttgagcacacaatcttactccggccaacttgcaaagaggtcatttccagaggcgatgactactgattgcggctggaggaggctccttgtaccaggttgtgtgtgtggagcgccatccgtttatggatcacactcggataaatggtttggtcctccagagttcaggatgttgtatgagttttataataactcgctaaagattgtggatgtacaagtagcagtaatacgttttctgggaacatggacattgttaggctatttccagcggggatttcgtccgagtttcaatctcgattaaatgtgttgccacataagaaaatatgataatatggcaataatttaataagagagtgagttttattggaaaaaaaaaaaaagaaaaaaaaaaaaaaaaaagcggcccgaggtcatgatgatcgagcaacactcatcttggattatcatgacaagattgatactgagctgaccaagatctgtgatggtatcctcgagctgcttgagacccatcttgtgccgtcttccactgcccccgagtccaaggtcttctatctcaagatgaagggtgattactacagataccttgctgagttcaagactggagctgaaacaaaggacgccgctgagaacccgatggtggcatacaaggctgcccaggacattgctctggctgagcttgctccaactcaccctattagggttggactggcac

SEQ ID NO: 98 - DNA, 247 bp, Zea mays
  Clone ID: TF_700336508H1
cgccggagcacgacgcacgcagatccgcagagatcagtgacactgcaagtattgaaaactgcattgtaagatggcatcagcagagcttgtcccgtgatgaaaatgtgtacatggctgagctcgcagagcaggccgggatgtacgagcaaatggatgagttcatggataatgtacagagaactgttgaatctgaagaggtcactgtggatgaacgcaacctcctgtctgatggatacaagaacgttta

SEQ ID NO: 99 - DNA, 630 bp, Zea mays
  Clone ID: TF_LIB4977-003-R1-K1-F12
gagttccaccgctagcatccgcagtacccccgagccccagacgcaaccccgcgccaggagtaagtttgctcttttatcgatatggcgagggaggagaatgtctacatggccaagctggctgactaccgtcgaaaggtatcgaagagatggttgatcatatgcataatgtgcctaatactgtagatgtggaacagctcactgttgaggagcgtgacctctggtcgggcgcatacaaccaatgtgatcgggggtcgacgtgcttcatggacgcattgtgctccttctatctgagacagaactgacggagtccgcgtaacgaaccacagagcatcgacgaacctctatcaacggaataccgtgcgcagatcgaggctgaactgatcaatatccgcgatggcctcctgtaatgtgcttgactccctgctagtggcttcctctactggtgctgtccccaaggtcttctacctcaagatgaacgtcgactatcacagggatctcgcggaatccaccactgtgcctgacaggaaggaatctgctgacatcaccatgatggtctactacgctgctcacgacattgcgtcgactgagatgagacctacccatccgatatcgcttgcgattgctcctaac

SEQ ID NO: 100 - DNA, 828 bp, Zea mays
  unsure (1)..(828): unsure at all n locations
  Clone ID: TF_LIB4740-122-A1-K1-B7
gacaccttttctnccaacgccgcgagctcgactaggactaccgaccacgtccgctcgagatccgtgagtactagcagattttgataactgaactgtcggatggcagcagctcagctttcccgtgatgaaaatgcgcacatggggaaactcgccgagcacgcgcagaggtacgaggagatggttgatctcctgcataatgtacccaatactggtgactcggacgagctcgctgtgcaggagcgtaacctcctgtctgctgcataccacaacgtcattggagcccgccgcgcctcatggagcatcatctcctccatcgagcagaatgaggagggccgaggatatgaggaccgagcaacactcctcacggattatcgtggcaagattgagactgagctgaccaacatctgtgatggcatcctgcagtgtgcttgagacccttcttgtgccgtcttccactggccccgagctcaaggtcttctatctcgagatgaacggtgattactacagatacctcgctgagttcaagactgaagctgagagaaatgacgctgctgagaacactatggtggcatacaaggctgcccacgacattgctctggctgagcttgctccaactcaccctattaggcttggactggcacttaacttctcagtgttctactatgagattctgaactcacctgatcgcgcctgcagtcttgcaaagcaggcttttgacgaggccatctcggaactggacaccctgagcgaggagtcctacaaggacagcactttgatcatgcagctccttcgtgataacttgaccctatggacttctgacatctcgga

SEQ ID NO: 101 - DNA, 232 bp, Zea mays
  Clone ID: TF_700171261H1
atcgctggatctcgataaggacgaccgatgacgcacgctgagatccggcgtactgctaattttgataactgatctgttagatggcatcagctgagctttcccgttatgtaaatgtgtacttgtcgaactcgctgagcaggcggagaggtacgatgtgatggttgatttcatggagatggtagccaagactgttgactcggaggagctcactgtggaggagcgatacctcttg

SEQ ID NO: 102 - DNA, 856 bp, Zea mays
  unsure (1)..(856): unsure at all n locations
  Clone ID: TF_ZmC680455_1
tcgaggnnccggccgggaaaaaaaggaaaaaaaaaaaaccgttcaccaactatttttccttcaactgaaagcttcttctcagctgaatttcgttatttcccctttccttaacaacccttgaaatctaaaccgcacgacttcagtcgccaaacaccgccaaaatgggtcacgaagatgctgtctaccttgccaagctcgctgagcaggccgagcgatatgaggagatggttgagaacatgaagattgtcgccggtgaggaccgagatctcaccgtcgaggagcgaaaccttctctctgttgcctacaagaacgtcatcggcgcccgccgtgcctcctggcgcatagtcacctccatcgagcagaaggaggagtcaaagggcaactctagccaggttaccctcatcaaggagtaccgacagaagattgaggccgagcttgccaagatctgcgaagatatcctcgaggtccttgaccagcacctgatcccctctgccaagtctggcgagtccaaggttttctaccacaagatgaagggtgactaccaccgttacctcgccgagttcgccattggcgaccgtcgcaaggactctgccgacaagtccctcgaggcctacaaggctgctactgagttgccanaaaacccaagcttcctcccacccaccccaatccgccttggtctcgccctcaacttctccgttttctactacgagatcctcgacgctcctngaccagcttgccacctggctaagcaggccttcgatgatgccatcgctgagcttgacactctgagcgaggagagctacaaggactctacactgatcatgcaactgctccgagaccacctcactctctggac

SEQ ID NO: 103 - DNA, 446 bp, Zea mays
  unsure (1)..(446): unsure at all n locations
  Clone ID: TF_LIB3592-005-P1-K6-B2
ggnaaaactgtccatggtcgtagctcgctgagacagcggggagggacgggtgttggtcgagttcatggagatagttccaagatgttgactcggaggagctcatgtggagagcgaacctttgtctgttgcatacaaaaacgttattggagccctccgcgcctcatggcgcatcatctgctacatcgtgcatatagaggagggccgtggcaatgtggatccgctaacactcatcaaggattatcggggccagtattgagactgagctgaccaagatctgtgatggaatcctaatgctgtttgagaccactcttgagccagttctctatggctgcaaacgctaagccttctatataaggatggagggagatggctacatataccttgatgagttcaagactggggctgaaagaaaggacgccgattgaaaacaccatggtgaaattcaa

SEQ ID NO: 104 - DNA, 314 bp, Zea mays
  Clone ID: TF_700622808H1
tgatggcatcctcaagctgcttgagacccatcttgtaccgtcttaccccgcacccgagtccaaggtcttctatctcaggctgccgggtgattactacggataccttgctgagttcacgactggagctgagaaccaggacgccgctgagaccacgatggtggcatataaggctgcccaggacattgctctgctgagcttgctcgaactcaccctattaggcttggactggcacttgacttctcagtgttctactatgagattctgaactcacctgatcgcgcctgcagtcttgcatagcagcttttgacgaggcc

SEQ ID NO: 105 - DNA, 302 bp, Zea mays
  Clone ID: TF_LIB3075-002-Q1-K1-B12
atcctatcctaccacttctctaaccacacaccaactcttccctaacaactacagaatactcgcccaactttaataccacctcaacaccatcccacaactgtacacgaatcaaaatcttctacctcaacataaaaggtaactaccaccagtaccttgcttagatcaaatcttattcatacaccaaacattcttcatacagcaccatcaatccctacaaaaatgctcatgacatcgctctttcatactctactaccacccaccccattaagccttccccttctcttaacattctcaacttctac

SEQ ID NO: 106 - DNA, 648 bp, Zea mays
  Clone ID: TF_LIB4764-001-R1-M1-A2
ggccgcttttttttttttttttttctttggttttttggggtttttttttttttttttttttttttttttttttttttttttttttttggggggaaaagacttcaaaacccaaaaaaacgctaaaaaaaccccggacatgcttttaaaaaccagggaaaaaaaccagcccaaacggacttaggggggggggggggaaacaaaaaaaaagggggaacaaattcaaacactacccccctactaaaaaaaaaaaaaagggggggaacaggaaaacagctacaaaaaaaacacgggaaaatttaagctttgacaggaaaaaacatttaaaaaaaggggctcaaaaaaaaagccctctcccaaaaatactggcccttaatggccggcaccaacccaacctttgggggcttttttgcccctaaaaaaaccaacctccgggggggcaaaggcccaaaggggaaaggtggcccctaagagctgcatgaacaaagggcaatctttggaaaacccccccccaaggggggtaaaaggggaaaaaactttaaaaaacccccgttttgaaagggtgaaagctttgtctggggaggtcaaaacttcaataaaaaacattggaaagttaaaaaaaagcccaagccttaacgggaggggaggggg

SEQ ID NO: 107 - DNA, 537 bp, Zea mays
  Clone ID: TF_LIB4729-013-R1-K1-D2
aaaacgcgtcgcattcgctctcaaggatcctctgatgccaccgccaccgtgtgaccgaccgtgccgccggcgatccatatccggcgacccgtgccaggcccaatcgcaccatgtcacccccggagccgacgcggcaggagagcgtgaacatggccaaccttgcagagcaggcgcagcgaaacgaggagatggtcgagttcatggagcgcatgaagcgctacaccgcaggagccgcaagaagaagggcaagaatagcgtggagacctacaagatctacatcttcaaggcgctgaagcaggtgcacccggacattggcatctcctccaaggccatgtccatcatgaactccttcattaacgatatcttcgagaagctcgctgctgaggccgccaagctcgcgcgctataacaagaagcctaccatcacctcccgtgagatccagacctccgtgcgccttgtccttcccggggagctcgccaagcacgccgtctccgagggcaccaaggccgtcaccaagttcacctcggcctaggctgc

SEQ ID NO: 108 - DNA, 176 bp, Zea mays
  Clone ID: TF_LIB3137-033-Q1-K1-C6
aaatagctacatggcgaatctctcctaacaggcacagatgtactaggaaaatgatgacttcatggagaaggtaaccaaaactgttcactctgatgagctcactgtataagaacccaaccttctgtcttttgcatacaaaaacctcattggaaccctccgttcctcatgtcacatca

SEQ ID NO: 109 - DNA, 171 bp, Zea mays
  Clone ID: TF_LIB3150-039-Q1-N1-D12
ctctatcatacgcagataccccaacccctaggggtaaccacgcgcgaggagtgtgcttacttttttatccatattatctatatggctagagaagaaaatgtctacatcgccaatctagctgagcacgccgaaaggtctgaataaatggtcgaatacatgcaaaaaagactt

SEQ ID NO: 110 - DNA, 606 bp, Zea mays
  Clone ID: TF_LIB3689-247-Q1-N6-F5
aaatcttaatcccttttgatattacccacttagcttcacaatgtacaacaacgttagtactcgagcaactcgtaccacaatctcatttgatactatagcaattactaccaagaatgttgatgaaatcttagggctactaaatgacttccaagaaccggaaaaagttgagcccttaaactcaagtctcacataatcatcaactacaaaagtcgacacagcatcctccctgtattctttcaacttaatctcctcttccctgctaggcaccatctccaagagttcggttccaaggctctctgcctgtcctgtggtagtcgcccttcatcttgaggtagaagaccttggactcggcggcattggttgaatggaagcttttggtgatttctcttgtgggactatctctgcaagttcagactttgtaggagaggcagctccaaggctttgcaaagagcacaccgccgctgctcactgctgcttgcactttgtaggtcgttttccctgttgcccttcccctccagcagttcccttgttcttctttgtatcataatcatcatcatcctcgtcatcatcgtcttcatcatcgtcatcctcaccatccataacttc

SEQ ID NO: 111 - DNA, 1806 bp, Zea mays
  Clone ID: TF_ZmC3397_1
ccctccgaatttttatttttttattagcaagccccggtctttcttgctgccaaattgaagtttgtttgtggcatttttaaaatgggcgatgaggcttatacattcccatgttgggcaggatcagtcactatggccttcagcatatggtgtcgcctccaggagctctcacctgctcaccaaatccggctaattcggcacgaggagaaactgagccatccggtcccaaaagtagaaaagggcaagcgacgagcacagcacagcacagcacaagcacgccttccgttttgggaaggcgaggagaggggaaccccggcccagggagagttgtggggaggggatcggcggcggaggagatggaggagcgggagaagctcgtgtgcctggccaagcttgccgagcaggcggagcggtacgacgatatggtggaattcatgaagaatcttgctaggatggacgtggatatgagtgctgaagaaaggcatttgttctcagttggtttcaagaacactattggagcaaagagagcatcatggagaatcatttgttcacatgagcaaaaggtcgcagctgatcgtcagactggtgtgatgatagatgcctataagaagaaagtagaagaggaactaaggaaggtttgcaatgaagtattgtcagtcattgctattcactgccttcccttggccagtacgggtgaaaatatcgtattcttttataagatgaaaggtgactactaccgttacttggctgaatttagcactggaactgaaaagaaagctgcctctgatcagtcacttatggcctatcagcatgccatggttgtcgcctccagtgagctctcacctgctcaccaaatccggcttggccttgccctcaatttgtcggtcttcttttatgagataatgaactctcatgagagagcttgccaagtggcaaaacaagcatttgatgaggctcttactgagataaattctggtgagggagtttacaaggatagcacacttatgatgcagcttctgaaggacaacttagcattgtggacatcagaactaactggaggtgaagcatccaagggtaacgacgatgtcgacatggagggttgatacattctccatgttttaaggaaacacagaaagcacgcaaaaatatccaggctgtgatgctagcgaacctgggtcctcaagttttttctgcatcggaactcagaggagccttgtgtatttttctgaagtttctgtccgtctcgggttttttttttgaggtctgtttgttcctctcttttggccatcgtttggtcctggagtcagtcactcactaccaagtgtttcagaggtctgaactggtgagcatccagatctgttgttgctttttttttcttcttctgtgcttcagaggcatctttgtacaccgatggaaaactgtttctcttatcaaacgcatagactgtcagtgctgttactaatcatgttcggtgactgaagcgtctctgtaatgttgagatcgagcataaacttctccacgaaattatgtaactggtcggaagatgcttcgtcgatgcagcagttgcttccactaaaaaaaatattccccccccagcaccgtcgtaaaaataacttggccgtacgtgtattggctgctgcttctttcactttaccgtgactccgtgagtccgtgacccgcagcttcagcttctgagtaaaagataaaaaaaaaaaaaggtgacgacgctacaaaccgccccatctacaagcggccagggaggcgacgctaagccgacggcaacagcgacgccgcatgctctcgcgaccc

SEQ ID NO: 112 - DNA, 342 bp, Zea mays
  Clone ID: TF_LIB3117-032-P1-K1-E1
ttaacgcgttcgtgctggactcgcacctcgttccttctgacgacacgggggtgtcgaaggtgtttaccttaagatgaagggcgattatcacaggtacctggctggattcaagacgggagctgacaggaaggaggcggctgataattcgcttttagcgtataaatcagctcaggatattgcgatggcagatctggctcctactcatacaatttggctgtgattagcgcttaacttctttgtgttctattataagatcctgaactcgcctgatcgtgcttgtaacctaataaaacaggcttttgatgaggctatctttaatctgttttcttttatgcgaggagt

SEQ ID NO: 113 - DNA, 484 bp, Zea mays
  unsure (1)..(484): unsure at all n locations
  Clone ID: TF_LIB4668-011-R1-K1-A10
aaaacagccgccccgctagcatccgtagttcccccgggcccgtagacgcaaccccgcgcctggagcaagacggtccttttatcaatatcatgggtgtggcatgggaggagaatgtatacttggggaatcagaggacctgggccgggaggcttcaacagatggctgagcttatgctgaaggggagtgataactgtaaattgggaagagcccattgtgggggagcgtgncctctttatggtggcatgcgagaatgtaattggcgttcgtcgtgcttcgtggtgcattgtctcttctattgagacataaggtggagtcccgtgtgaacgatgcagctgtgaatccttatggagaaattccgtgcgaagatcgtggctgagctgggcaattttggtggtggttttctgaagctggttgacttctacttagggccttttttgatgctgctgggtcgttggtttttacctcgcgatgggatggtgtgttt

SEQ ID NO: 114 - DNA, 492 bp, Zea mays
  Clone ID: TF_LIB3606-053-Q1-N6-E11
aaggcccactgaccggggttaaaaaggttaaaatccaaccaccaccagttaaaggggtttccaaacaaaaccggaccaccctcaaacttcccccggggggggggggggggaatcccaaggttttccccggcagcttttaatttggggggcccccaaattttcccaacaaataataataaaacggttgttaaaagcgtgccccccaaaaaaccaggggccaaataaaattgcttagggtctttaaacagcaccaaacactaggtcctactttttaggccctaaaagccggttttattgcccctccttcaagtcgggcttgggcccctccctgattttttcccaaggggcctccgaaatgtcaaaagtccttagggtcaagttttaacaaaggacctgcataacaaaagggctgcccttgaaggactcctccttcagggggtccagttccaaaatggcctcttaaaaaccctgttttccaaaactgcaggccca

SEQ ID NO: 115 - DNA, 951 bp, Zea mays
  unsure (1)..(951): unsure at all n locations
  Clone ID: TF_ZmC7516_38
cccacgcgtccgcccacgcgtccgggtttccttcctcctccagtgctgtcatcgccgccgccgccgccccggtttccttcgtaagcccgtcgtcctccgtccgcgactctgcgcgagaagcgagagtatggacacccaagtgaagcttgctgttgtggtgaaggtgatgggaaggaccggctccaggggtcaggttacccaggtcagagtgaagttcttggatgaccagaaccgtctcatcatgaggaacgtcaagggaccggttcgcgagggagacatcctcacactgctcgagtctgagagggaggctaggaggctgcgttgaggcggaatagtgtcttggtagttttcgtatggagttggatgaccagaaccgtctcatcatgaggaacgtcaagggaccggttcgcgagggagacatcctcacactgctcgagtctgagagggaggctaggaggctgcgttgaggcgggatactgtcttggtagttttcgtatggagttggatgtcatctaattgtgctatgtttggcaaactttggtatgacctttaaaacacctgccttgtatgattatttgtgagcctggtggtaagattgcagtttggtttttaaaaaaaaaaaaaaaaaaaaaaaaaaagccgcaccccccattcgaacgccggagctcgacgaggacgaccgacgacgcacgcagagatccggcgtactgcaaattttgaaaactgaactgtaagatggcatcagcagagctttcccgtgaggaaaatgtgtacatggcgaagctcgccgagcaggcggagaggtacgaggagatggttgagttcatggagaaggtagccaagactgttgactcggaggagctcactgtggaggagcgaaacctcctgtctgttgcatacaagaacgtcattggagcccgncgcgcctcatggcgcatcatctccctcatc

SEQ ID NO: 116 - DNA, 487 bp, Zea mays
  Clone ID: TF_LIB3597-043-Q6-N6-F3
gttaaaaaagaagcgaggactttgaacgttcatgaaaccgctataccgagctcaggcacgcttgacacatactgcagaggagctgtaccaactcacacgcactaatttcaaaaccaagcgaccttaattcgaccagtaccaggctactaacaagaaaactgatgagagtggaaacaagaacagatacaataatgcctcggcccagattccacagcatacagcatataaaacattggacttcgaacaactttgctccccctgcgaagattactagacctcgcctgcatcacctttcggcgcatgtttaccctcttcagcgccattctccgagcggtccctggacccaagccacatgttattcttcaggagctgcatgaacatagggctatccttggatgactcctcaccactgctgactaactcagagagagcttaatcaaacgcctgttctgccacgttgcaagctttgtctggcgagttcagactc

SEQ ID NO: 117 - DNA, 293 bp, Zea mays
  unsure (1)..(293): unsure at all n locations
  Clone ID: TF_LIB3355-009-P1-K1-D8
gggggggggttctgntccncaattcccgggggggcgccacncgtccgagatattgttgaatatatccagaatgtggctattactgaanatatccaaaacggcacgggtgttgagcctaacgtggtgggggtcgcatacaggaatgtgattggggctcggcgggcttcatggcgcattggctcttctattgaacagaagggggaggcccgtaagaacgaataggatggtaaccttatcaagggataccgggcggagatcgaggcgtaactgagcaatatctgtgatggcattct

SEQ ID NO: 118 - DNA, 688 bp, Zea mays
  Clone ID: TF_LIB4740-105-A1-K1-H11
gcacatcctactcaaatggcgtagctctaggaggacgtccccccactcacccacacatccggcgcactgcaaattctaaagactcctactagccatatgccatcaacaaaatttttcccagaagaataggtctcctcggccacgctcgcctagcacacaaacatgcactaggagacgcgtgaaatcgtgtacacatcacgcactactgctgactcacctcagctcactgtgaaagagcgaaacctcctgtctgctgcatacaacacccccattgtagcccgccccacctcatggcctatcatctcctccttcaaaaacaacgaggaggcaccatgctctttttttctagtaacactcatcaaccgataatcttggcacagattgagactgacctgaccaagatctgtgatgtcatccatcgagctgcttgagacccatcttgcgccgtcttccactgctcccgagtccaaggacttctatctcaagatgaagggtgattactacagataccttgctgagttcaagactggagctgagagaaaggacgccgctgagaacacgatggtggcatacaaggctgtccaggacattgctctggctgagcttgctccaactcaccctattaggcttggactggcacttaacttctcagtgttctactatgagattctgaactcacctgatcgcg

SEQ ID NO: 119 - DNA, 393 bp, Zea mays
  unsure (1)..(393): unsure at all n locations
  Clone ID: TF_LIB4975-043-A1-K1-E3
ctcacaaacgcgtcgcatccgctccacaggatcctctgcgccaccgcaaccgtgtgaccgcccgtgccgccggcgatcccgatccgccgacccgtcccagccccgctcgcagccatgtcgccgtcggagccgacgcgggaggagagcgtgtacatggccaagcttgcggagcaggcggagcggtacgaggagatggtcgagttcatggagcgcgtcgcgcgctcgccgggggcgccggcgnngnnnannanntctcnnngnanganngnaancngntgnncgncgncnacaagaacgncancggcgcccgcagggccgcggggcggancancnccaccancgagcagaaggaggaaggccgcgggaacgaggcgcacgccgcagccagccgcg

SEQ ID NO: 120 - DNA, 606 bp, Zea mays
  Clone ID: TF_LIB4703-004-R1-M1-F4
cgcgaagtgagatgtatggtctatgtgtgacactggcaatctttttgaaatatgactttactgataatgtctcctccataacacatgcatgctgacatcataccactgtcgtacaatattttccttacctcttttagatttgactcctagactgttgcaggaaaggtgactactaccgttacttggctgaatttagcactggaactgaaaagaaagctgcctctgatcagtcacttatggcctatcaggtgctaaatcttccaaatgttgtacgtaggctcaaatgagccttttggtaaagcctatcccttcctgttaaaatgacaaacatttgctgcagcatgccatggttgtcgcctccagtgagctctcacctgctcaccaaatccggcttggccttgccctcaatttgtcggtcttcttttatgagataatgaactctcatgagaggtcactcatcttcaatgccttgtttctccctttttattgatgtttcaaattcatagatattcctatacaatcatatttcattttttgaaacgtgggctttcttgccaagtggtgactattttcaaataaacaattcacctgctgtagatgctttct

SEQ ID NO: 121 - DNA, 753 bp, Zea mays
  unsure (1)..(753): unsure at all n locations
  Clone ID: TF_ZmC2299_2
cctcgagtcctgccggggccgggactggcatccccctctggcctctaccctgcctgccgtttccatctccctccagttctccgcacccacccacgaacccacccacccagtcctttccccaacccacggcggccgtggacgccagggtcttctacctcaagatgaagggggactaccaccgctacctcgccgagttcaagaccggcgccgagcgcaaggacgccgcggactccacgctcgccgcctaccaggccgcgcaggacatcgccgtcaaggagctgccgcccacgcatcccatcaggctcggcctcgccctcaacttctccgtcttctactacgagatcctcagctcgccggaccgcgcctgctcgctggccaagcaggccttcgacgaagctatttcagagctggatagtcttggggaagagtcgtacaaggatagcaccctcatcatgcagcttcttcgtgacaacctcaccttgtggacttctgacatgcaggaggatggtggcgatgaaatgcgggatgcaaacaagcctgacgaggagcagtagtagtcgtcatgccatgccatgccatgcttgtacaaggaccattttcgtgtgtcctttccttcaatcgtcgacctttcgttttgttgttatactgctattgtggaaccctgttactgttactgttagtgtatcctattggcaataatcaaatgtggtatggttgactactgnaaataaaaaaaaaaaaaaaaaagcggcc

SEQ ID NO: 122 - DNA, 402 bp, Zea mays
  unsure (1)..(402): unsure at all n locations
  Clone ID: TF_LIB4740-080-R1-K1-A9
ccctcctccgcacatacgcgtcgcatccgctcccaggatcctctgcgccaccgcaaccgtgtgaccgcccgtgccgccggcgatcccgatccgccgacccgtcccagccccgctcgcagccatgtcgccgtcggagccgacgcgggggagcgcaacctgctgtccgtcgcctacaagaacgtcatcggcgcccgcagggcctcgtggcggatcatctcctccatcgagcagaaggaggaaggccgcgggaacgaggcgcacgccgcatccatccgcgcctaccgctccaagatcgaggccgagcttgcccgcatctgcgacggcatcctcgcgctcctcgactcccacctcgtcccatccgccgncggcgccgagnccaaggncttctacctcactatgaag

SEQ ID NO: 123 - DNA, 668 bp, Zea mays
  Clone ID: TF_LIB4666-010-Q1-K1-A7
acaccagatccgcagttccccgacacaccgttcctccgagcccaggagcagccccgcgccaggaggaagtttgttcttttaacaatatgtcgagggaggagaatgtttacatggccaagttggctgagcaggctgaaaggtatgaggagatggttgagtatatggagaaggtggctaaaactgtacatgagcaggacctctctgctggggggcgtacccatctcgtgtgtggttcaccatagacaccaacggcttcctgaacgtgcatggcgaggacaatactgcgtagcagcagaacaacatcaccgtcagcaccgacacgggcggcctgtgcagagaggaaaacgagggggtgggacacgacgcagtacaggtcgggggacgggacgctcagcacgaagggaagagcccaagacactagctggagaacataactccaccacactgcgctacacgatcaaggcacggtatgatcacgtccaagctgactgccgtcgaccagacgaagaactaggacgcgcccgactcggccatcagctgggctggacgccaaccagctccgcgaggcggaacgagttccgagacaagaatgaaggacctggaaagccttttgcaaccccatcatccccaatatgtacacagggcgcgggtgcccgcatggggaaggg

SEQ ID NO: 124 - DNA, 159 bp, Zea mays
  Clone ID: TF_LIB3279-037-P1-K1-D2
ggaggagctaattggggaggaccaaaacctcctgtttgtggaatacaaaaacgtaattggagccggccgcgcttaatggccaataatttcttcaatcaaccaaaaggaggagggccgaggcaatgaggaccgattaccactaataaaggataatcgggc

SEQ ID NO: 125 - DNA, 250 bp, Zea mays
  Clone ID: TF_LIB4667-011-R1-K1-E4
gccggaggccaccgctagatccgcagttccccgcgcccgaacgcaaccccgcgccagagaagtttgttctttatcgatattatcgatatggcagggaggagaatgtctacatgccaagctggctgagcaggccgaaaggtatgaagagatggttgagtatatggagaaggtggctaaaactgtagatgtggaagaactcactggtgaggagcggtgacctattttgggttccctgtctgatgtggtgggg

SEQ ID NO: 126 - DNA, 303 bp, Zea mays
  unsure (1)..(303): unsure at all n locations
  Clone ID: TF_LIB4740-011-R1-K1-C5
cggccaccgcaaccgtgtgaccgcccgtgccgccggcgatcccgatccgccgacccgtcccagccccgctcgcagccatgtcgccgtcggagccgacgcgggaggagagcgtgtacatggccaagcttgcggagcaggcggagcggtacgaggagatggtcgagttcatggagcgcgtcgcgcgctacgccgggggcgccggcggcgggggcgggctctcggtggnggagcgcancctgctgtccgtcgccttctnnngccgtctcggcgcccgcngggcctcgtggcggttcctctcctccc

SEQ ID NO: 127 - DNA, 391 bp, Zea mays
  Clone ID: TF_LIB3279-053-P1-K1-D2
cccacgcgtccggaaggaatctgcagagagcacaatggtagcttataaggcagctcaggatattgcattggctgaactgccacctattcatcccataaggcttggacttgcacttaacttctcagttttctattacgagattcagaactctccagacaaagcttgcaatcttgccaaggaggtaggtgtacatttatctttctattgctgtactgggtttctgagttataactatcttcggtgttgttagtttgaatctgggctgaaagaaaaggtgcaaattgcatatggattgatctttgaaaactcaagcacagtgattttaccattttcaccgtagatattgtttgatccttctattgcttggtactcatatggactttactttcag

SEQ ID NO: 128 - DNA, 525 bp, Zea mays
  unsure (1)..(525): unsure at all n locations
  Clone ID: TF_LIB4729-017-R1-K1-B5
gtaccctncgaggnnccggccggggacgcacgccaccatagttcgagatgagcgaactcttactgcggactaccggctacatcagtgcggagattacgacacacgtgcgcccacctgcaccctggactgccggcgggaatgaggcgctgtttctggtcctgaacgcgggggcatggcgaaagttggtcaccttgcggctaagagccaggataacgttccggatctacctgagagctgccacgtgctgcgtgtctccacccgagcttgctgcgcatgagcgagtccttcgtcgtgggctaccggacacgcgctggtacgacctgcgcttcatggtgcattatactgctgcttcccgcagagggcggactctcgaggcactgatgaccgaccaacattcataaaggattatcgaggcaagattgagactgagctgaccaagatctgcgatgggatcctctagctgcttgagaccccatcttgtgccgtcttccactgccaccgacgccgggccttctatctcaagat

SEQ ID NO: 129 - DNA, 326 bp, Zea mays
  Clone ID: TF_LIB3236-088-P1-N1-C9
gctacagggcgtctacccaataaaccatcctccaaatcacatttcataatttcattaaacaccagcaaacactaggtactagcttctaagcatctaaacccccctttacttcctccttcttaagtcttacttgggcccctcccttattttttccgcagggtcctccgagatttcaaaagtccatagggtcaatttatcacaaaggagcttcattatcaaaggtctttccttttaagactccttttttagggtttccatttcccaaatggcctcttaaaaatcctttttttcaaaacttaacccccaatttgttttattttaaattt

SEQ ID NO: 130 - DNA, 683 bp, Zea mays
  unsure (1)..(683): unsure at all n locations
  Clone ID: TF_LIB4979-021-A1-K1-B8
agattcgttcgaatgccggagctcgtcgaggacgaccgacgacgcacgcagcagatcgcggagcactgcaaattctgtcccctgaactgtcccatggcagcaccagagttttcccgacgaagacaatgtgacatggcagaagctcgcccagaaggcggacaggtaccatgagatgtctgagagtcatgacagaaggtacccaggactgctgactcgaaggagctcactggggaggagcgaaacctcctgtctggtgcatacaagaacgccattggagcccgccgtgcctcatggcgcatcatctcctccatccagcagaaagaggaaggccgacgctatgacgaccgaccaacactcctctaggattatcgcgccaagactgaaactgagcctggnccgatctgtgatggcatcctcaagctgcttgacacccatcttgtgccgtcttccactgcccccgagacaacggtcttctatctctggatgacgggcgattactacacatacctcgctgagttcacgactggaggtgagagatcggactctgctgaaaacacgatgatgcgatacccggttgcccatgacattgctctaggtgagcttgctccaactcaccctattaggattggactgcgacttaacttctcaatgtgctactatgagactctgaacgtccctgatca

SEQ ID NO: 131 - DNA, 1069 bp, Zea mays
  Clone ID: TF_ZmC290_20
ccgctccacaggatcctctgcgccaccgcaaccgtgtgaccgcccgtgccgccggcgatcccgatccgccgacccgtcccagccccgctcgcagccatgtcgccgtcggagccgacgcgggaggagagcgtgtacatggccaagcttgcggagcaggcggagcggtacgaggagatggtcgagttcatggagcgcgtcgcgcgctacgccgagtccaaggtcttctacctcaagatgaagggtgactaccacaggtaccttgctgagttcaagtcaggtgcagagaggaaggatgctgcggagagcaccatgaatgcctacaaagctgctcaggatattgctcttgctgatctggctccaacccaccccatcaggctcgggcttgctctcaacttctcagtgttctactacgagatcctcaactcccctgaccgtgcttgcaaccttgcaaagcaggcctttgatgaggcaatctccgagctagacagcctgggagaggagtcctacaaggacagcactctgatcatgcagctcctgcgtgacaacttgaccttatggacttccgacaccaacgaggacggcggggatgagatcaaggaagcagctgctgcccccaaagaatccgcccccgagggccagtaagacggatccgatctcccgacctgatgcgtgtctgctgatgtcggggagtttaccaggactgtgccgttcttgatttctgatagcttatcttctagtacacctcgtgttgttctcttcgtcacggcgccggtgcgcgtgcgctgaagctgcctgccattgccattgcctttgccgctgtttttaattaagcacacactctagatgttatgcccgcatgctatgtttcgattctcaagttgataaatgatggctggatgctggttttcgtgctccaagcctgctgcttcttccagggaaaaaaagacctgcccttgttgcagcgttgttgtttagaatgacctatatttgactggtattctgttacggtggctttgcaaagctgtttgtttggtttaaaaaaaagaaaaaaaaaaaaaaaaaagcggcc

SEQ ID NO: 132 - DNA, 583 bp, Zea mays
  Clone ID: TF_LIB3960-019-Q1-K6-F10
ctagcatccgcagttcccccgcccggacagcaaccgcgagccaggagtgagtgggttcttttatctgatattatcgatatggctagggcaggagtaatgtctacatggcacaactggctgagcacgcctgaaggtgtgaagagatgggtgtagtatataggagaaggtggctaatactgtctatggggaagagctcactgttgaggagcgcaacctgttgtgggccgcatacaagaatgtgattggggctcgccgagcttcatggagcatagcctcttctattgaacagaaggaggagtcccgtttgaacgaatagcatgttaaccttatgcaaggaataccgtgcgaacatcgtagctgaactgatcaatatctgcgatggcatcctgatgctgggtgactcccacctactgccttcttctactgctggtgaatcaaacgtcttctacctcaagatgaagggcgactatcacaggtatcttgcggaattcaagactggtcctgacaggaatgaatgtgctgggagcacgatgatggactacatggctgctccagacattgcgctggctgagctggcacctac

SEQ ID NO: 133 - DNA, 1248 bp, Zea mays
  Clone ID: TF_ZmC3397_4
gcgacgagttctccatccgcccctctctctatcctcttcttcctctcctcgccctcaccttggccgcgtcgtctcgtttttagaaaaggaacccgtgcgctggcccccgttcgccgctctccccgccgtggggtccggtccgccgccctcccggtccatccgccgcccaaaccgccgccggttccagtccagcagcacgcgccttcttcctcccccggcgccttctcggtgaaccagacccgtccggccgtccctcacccgtgcgactcccgcagcgccggcccctccgtcacctccgcatcctccccgtccttgcggccatatccgtcgtctccgcatcctccttcctacgctctgtcggcgtggcctccccatcccggtgttctccgattttggggggcgtccctttgcccgctccggtctgctcctccagagtccggtccagcggagcgcactacgacacagatcggcagctgtccatcccttccagctctccagagcctccgccggcgcatccggcgactgatttgcagcatttgatgaggctcttactgagataaattctggtgagggagtttacaaggatagcacacttatgatgcagcttctgaaggacaacttggcactgtggacatcacaacaaactggaggtgatgcatccaagggtaacgatgtcgacatggagatgggcgatcgaggctgatacattctccatgtttgggcacgaacctaggtcctcaagttttttctgcatcggaactcagaagagccttggtgtattttttttctgaagtttctgtccctctcgggttttttttgggtgttttgttcctctcttttccgcatcatttggtaggctgtacagtcactgactaccggtcttctggtttttttgaactgggaactatctagtagccttgtgtattttttttttcgtttctgcccgtcggggggtttttttttatgaggtctgtttgttcctctcttttgaccatcgtttggtcctggagtcagtcactcactaccaagtgttacagaggtctgaactggtgagcatccatatatgttgatgctttttttgtaagaagtgttttctcttatcaacgcacccactgtcagtgctgttactaatcatgttcggtgactgaagcgtctctgtaatgtagagatcgtgcataaacttctcgccgaaattatgtccctgctgagtgtcggtatgatcttccaatgctgatgctgacatgtgtt

SEQ ID NO: 134 - DNA, 1872 bp, Zea mays
  Clone ID: TF_ZmC290_29
ttttttttttttttttttcaattaaaaataagctgtatatttatagatcttcacagtacatcagcattctcaacgtaaaatacaaacaccggaaacaatatctacactacgtacatcgttagactacagatgtatatgagattatattttaaaattattctgttctaatttaaatggcagaagcatgggggaagcttcacctcccatcacatcctcagattgtgaccgctcaagcctctccgcctcacgttccccgcccacacctcgttcacgcagcaaacaccatttccacccaaccagaactcctcacgtgttccaccgtccatccgcctcccagccataacgccgaccacacatactccctcccgcaccgaactccccggcgcgcgccacgttcctttggtcgccacgtcatcccactgacatgcgggccccgcacccgctgcccagggttcgcgtcctcctcaaatgcccccacccggccacccatcgcctcccccacctccgcacaaactcgtcgcttccgctccacaggatcctctgcgccacccacaaccgtgcgaccgtccgtgctgccggcgaccccgatccgccgacccgtcccgtcccaccacaccctaccgccgctcgcagctatgtcgccgtcggagccgacgcgggaggagagcgtgtacatggccaagctggcagagcaggcggagcggtacgaggagatggtcgagttcatggagcgcgtcgcgcgctccgccggcggcgccggcggaggggaggagctatccgtggaggagcgcaacctgctgtccgtcgcctacaagaacgtcatcggcgcccgcagggcctcgtggcggatcatctcctccatcgagcagaaggaggagggccgcgggaacgaggcgcacgccgcctccatccgcgcctaccgctccaagatcgagaccgagctcgcccgcatctgcgatggcatcctcgccctgctcgactcccacctcgtcccatccgccggcggcgccgagtccaaggtcttctacctcaagatgaagggtgactaccacaggtaccttgctgagttcaagtctggtgcagagaggaaggatgctgcggagagcaccatgaatgcctacaaagctgctcaggacattgctcttgcagatctggctccaacccaccccatcaggcttggcctcgctctcaacttctcagtgttctactacgagatcctgaactcccctgatcgcgcctgcaaccttgcaaaacaggccttcgatgaggcgatctctgagctagacagcctgggagaggagtcctacaaggacagcactctgatcatgcagctcctgcgcgacaacttgaccctatggacttccgacaccaacgaggatggcggcgacgagatcaaggatgctgctgccccgaaagaatccgcggagggtcagtaagatggattcagtctcacgacctgctgctgctgatgttgaggagtgaccagaaccagaaccgccgtcctcgattctgatagattatcttctagtataccttgtgttgttgctgttgttgtcgtcgtcgcgccggtgtatgcgatgaagctgccattgctgctgttttaattaagcattctagatgttataccgcatgctttgtttcggtttctatgtcgataaatggtggccggatgctggttttcgtgctccgagccggccaccaggaagaagacctgcctgcccttgtgggtgcagcgttgttagaatgacctacggtgtatttgactttgacaggcctgctgcctagtggactgatattctgttatgcgcaaagctatttggcttgatgtctcaaaaaaaaaaaaaaaaaaaaaaaaactcgagggggggcccg

SEQ ID NO: 135 - DNA, 193 bp, Zea mays
  Clone ID: TF_LIB3150-026-Q1-N1-F5
gcaggtacctcgcgcccgagacgcagccccgcgccaggagtaagtttgctcttttatccatattatcgatatggcgagggaggagaatgtctacatggccaagctggctgagcatgccctaaggtttgaagaggtggttgagtatatggatgaggcggcttcaacttgcaaatttgcgagacgcttacagatt

SEQ ID NO: 136 - DNA, 331 bp, Zea mays
  Clone ID: TF_LIB3159-019-Q1-K1-C2
gcaagatctatgcttacctgagcattttttcgagagggatcttgaagctacttgagggcggcctaatggcttcgtctactgctactaaatcagacgccttctacctcatgatgaagggcgactatcacaggtgtggctcatgcatttaatactggcagctgacaggaaggaatctgctgagagcacagtggtagcctatactgctgctcatgacattgctctctctgatccgtcacctacccatccgattaggctcggacttgctctgaatttttcagtgttctattatgagatcatgtactccccagacaaagcttgcaacctggcaaag

SEQ ID NO: 137 - DNA, 406 bp, Zea mays
  Clone ID: TF_LIB3061-001-Q1-K2-D4
ggcgcatcatctgctgcatcgagcagaacgaggagggtcgaggcaatgatgaccgcgtaacactcatcaaggactaccgtggcgagattgaaactgagctcaccacgatctgtgatggcatcctcaagcttctcgaatctcaccttgaagccgatttcaccgctcccgagtccaatgtctactatctcaagatgaatggcgactactacagatactacgatgagttcaagactgaagctgagagaaaggacgctactgagaacaccatggtggcatacatggctgcacacgacattgctcaggatgatcttgctgcaactcacgctattacgcttggactgacactcaacttgtcagtgatctactatgagattctcaactaaaccgatcgctcatgcaatcttgc

SEQ ID NO: 138 - DNA, 779 bp, Zea mays
  unsure (1)..(779): unsure at all n locations
  Clone ID: TF_LIB4744-110-B1-K1-G10
cattgggtacctcgaggccggccgggaaccccctttccacttgcttagatcagacaggacgaccagacaaggcacgcgtgtatcgcgcctcctgcactttcctgagaactcgcaaccgcctacatcgcatccctcgaggtttccctggctcacgaatgtctccacggcgtccctcgctgagcagccgcacacatacgaagagatggaagtaccgcctggacatagtgacagacactgtagactcggaggagcatcactggggatgcgctgaacctctctgagctgttagtctaccagcaacgttcctcgctatccccgccgcgcctctagacttctcatctcctccatccaccagaaagagcaggtgcaacacgatgaagtaccaagctgcactcatccgggattatcaagacacgattgacatctgcatctgaccaatatctcgagatggcgttcctcaagctcgctcgagacccatcttgaggcgacttcctctgcccccgagtcccaggacttctatctcatgatgaagggtgattactacttataccttgctgagatcaagactggagctgagagacaggacgccgctgagaacacgatgatggcatacaaagctgcccacgacattgctctggctgagcttgctccaactcagcctattaggcttggactggcacntaacttctcagcggtctactatgagattctgaactcacctgatcgcgcctgcagtcttgcaaagcaggcttctgacgaggacatctcggaactggaca

SEQ ID NO: 139 - DNA, 565 bp, Zea mays
  Clone ID: TF_LIB4172-011-Q1-L1-B7
acgcctgcaggatccggtccggaattcccgggtcgacccacgcgtccgggagactagaaggaggactccggatccggctcggcgctcgccctcgctcgccatggagaagaccgagctgatccagaaggccaagctggccgagcaggccgagcgctacgacgacatggccacctgcatgaaagccgtgacggagcagggcgccgagctgtccaacgaggagcgcaacctgctgtcggtggcctacaaaaacgtggtagggggccgcaggtccgcctggagggtcatctcgagcattgagcagaagaccgacacctctgacaagaagttgcagctgatcaaggactatcgggagaaagtggagtcggagctgaggtccatctgcaccacggtcctggaattggtggataagtgtttaatagccaatgcaactaatccagagagtaaggtcttctatctgaaaatgaagggagattatttgcggtatcttgctgaaggagcttgtggcgatgatcgaaaacgtacaatggaaaattggcgaggggcctaccaagaggcgtttggtgtg

SEQ ID NO: 140 - DNA, 728 bp, Zea mays
  Clone ID: TF_LIB4979-042-A1-K1-B4
ttcactcatccgcagttccccgacccaccgctcctccgagtcctgcacagccccgcgccatagaggaagtttgatctttgaacatatgtgcgagggacgagaatgtttacatggacaaggtggctgagcaggctgaacaggatgaggagatggctgagtatatgcctgaatgcggctaagactgcacatgtgcaacacctcactcgctcaagatcgaaaccttctgtctcgctgcatacaaaaatgtgactgcggctcgccgcgcttcatggcgcattgcttctctccattgaaccacaggaggagccccgcactaaccaacagcatgagaaccttatcaaggaatatcgcggcaagatcgaggctgaactgagcgatatctgtgatggcatcttgaagctgcttgactcccacctagagccttcttctactgctgctgaatcaaaggtcttctacctcaagatgaatggcgactatcacaggtatcttgcgacaatttaagactggtgctgagaggaaggaatctgctgagagcacaatggaggcctatcacgctgctcacgacattgctctggctgagctggcacctacccatccgataaggatgcgacttgctcttaatatttcagtgttcgattacgacagtctgaactccccatacaaagctggcaacctggcaaagcaagcgctggacgaagctatctctgagttatacaggcttggtgacg

SEQ ID NO: 141 - DNA, 306 bp, Zea mays
  unsure (1)..(306): unsure at all n locations
  Clone ID: TF_LIB3354-052-P1-K1-C9
atccgctccacaggatcctctgcgccaccgcaaccgtgtgaccgcccgtgccgccggcgatcccgatccgccgacccgtcccagccccgctcgcagccatgtcgccgtcggagccgacgcgggaggagagcgtgtacatggccaagcttgcggagcaggcggagcggtacgaggagatggtcgagttcatggagcgcgtcgcgcgctacgccgggggcgccngnngnggggacaaactatattgggaggaacgcaacctgctggacgacgcgtcatgtacttcattcgcgcccacagggcctgggg

SEQ ID NO: 142 - DNA, 399 bp, Zea mays
  Clone ID: TF_LIB3062-057-Q1-K1-B12
cacaaggaggagacgcggagcgcggcggtgcacgccgacgtcgccagggggtaccgtgcgcgcgtggaggccgagctctccgggatctgcgcggggatgctgcgcctcctagacgagcgcctcgtgcctgcggcggcggccgtggacgccagggtcttctacctcaagatgaaaggggactaccaccggtaccttgccgagttcaagaccggcgccgagcgcaaggacgccgcggactctacgctcgccgtctaccatgccgcgcaggacatatccgtcaaggagctgccgaccacgcatccgatcaggctcgggctagcactgaacttctccgtgttctactacgagatcctcagctagccggaccgcgcctgctcgatggccaagcatgccttagac

SEQ ID NO: 143 - DNA, 354 bp, Zea mays
  Clone ID: TF_LIB3066-020-Q1-K1-G3
gcgcagctacacttcatgctaaccacgatcaagcgccaggaatgaagacgctgttttatcggtaatatcgatctggccagggacgagaatgaacacatggccaagctcgatgaacaggcctaaaggtattaagaactggttgaaactatggtgaaggtggctaaaactgtatacgttggtagacctatctgatgaacagcgcaagctgttgacagacgtataccagaatgcgatcggagctctcacaacttgatacgccattgcgtcttacattgtacaaaatgaagagctgcttgccaacgaatagcctgtgaaccttatgaacgagttctgaacgatgatcgatgctgaact

SEQ ID NO: 144 - DNA, 251 bp, Zea mays
  Clone ID: TF_LIB3180-012-P2-M1-C12
agcttctgtcacgcgtccgggagaaggtggctaagactgtatatgtggaagagcggacgtgttgttgagcgtaaccttctgtctgttgcatacaagaatgtgattggggctcgtcgcgcttcatggcgcattagtttcttccattgtacaaaaggaggtgtcctgttagaacgttgagcatgtgtaccttatcaaggaatatcttggcatgatcgtagtttgtacctgtctatatatgatataggcaattt

SEQ ID NO: 145 - DNA, 159 bp, Zea mays
  Clone ID: TF_700618362H1
attcggctcgagccgcagttcacccgcgcccgagacgcaaccccgcgccaggagtaagcctgctctttcatcgatattatcgatatggcgccggaggagaatgtctacatggccaagctggctgagcaggccgaaaggtctgaagagatggttgagtat

SEQ ID NO: 146 - DNA, 569 bp, Zea mays
  unsure (1)..(569): unsure at all n locations
  Clone ID: TF_LIB4742-006-R1-K1-G4
ccctcgaggctggccgggtcccctcctccgcacaaacgcgtcgcatccgctccacaggatcctctgcgccaccgcaaccgtgtgaccgcccgtgccgccggcgatcccgatccgccgacccgtcccagccccgctcgcagccatgtcgccgtcggagccgacgcgggaggagagcgtgtacatggccaagcttgcggagcaggcggagcggtacgaggagatggtcgagttcatggagcgcgtcgcgcgctacgccgggggcgccggcggcggntaggttctctcgatactggagcgcaacctgttgtccgtggactactacaagcgtctgaagaacgcggaggtcctggtggaggatcatgtcctcatcgtgcttcagatagaaggccagcgcaaacnagggggcagaggagatgactgacaccttgcacctcgtggagcggagcagcggtagattcctgcgcaggttgcgactgcccgataacgccaagacggggcagatcatgggccgccatgggagaacgggcgtgcttacagtcactgtgcccaaagaggacgcccagaagcct

SEQ ID NO: 147 - DNA, 701 bp, Zea mays
  Clone ID: TF_LIB4729-103-Q1-K1-F4
ctcgagccggccgggaaactccgcacaaacgcgtcgcatccgctccacaggatcccctgcgccaccgcaaccgtgtgaccgcccgtgccgccggcgatcccgatccgccgacccgtcccagccccgctcgcagccatgtcgccgtcggagccgacgcgggaggagagcgtgtacatggccaagcttgcggagcaggcgtagcggtacgaggagatggtcgagttcatggagcgcgtcgcgcgctacgccgggggcgacgccgcagcagagctcgtgtggccacgctgcagtcgctcgcggcgttggcgccgggcgacgcgatcaccgcggcgcgcatcctggtgctcgccagcgacggcgagtacctgatggagatggggatcggcacgccgacgcggtactactcggtcatcctcgacaccggcagcgacctcatctggacgcagtgcgcgccgtgcctgctctgcgtcgaccagcccacgccctacttcgacccggcgcggtccgccacgtacaggtcgctcggctgcgcgtccccggcgtgcaacgcgctctactacccgctctgctaccagaaggtgtgcgtctaccagtacttctacggcgacagcgccagcaccgccggtgtcctcgccaacgagacgttcacgttcggtaccaacgaagacccgggtcgtcctgccggtcatctcgtttcgggt

SEQ ID NO: 148 - DNA, 1114 bp, Zea mays
  Clone ID: TF_ZmC787_5
atcgaggccggccgggactgcaagttttgaaaactgaactgtaagatggcatcagcagagctttcccgtgaggaaaatgtgtacatggcgaagctcgccgagcaggcagagaggtacgaggaaatggttgagttcatggagaaggtagcgaaaactgttgactcggagaagcttctcgaatctcaccttgtgccgtcttccaccgctcccgagtccaaggtcttctatctcaagatgaagggtgactactacagataccttgctgagttcaagactggagctgagagaaaggacgctgctgagaacaccatggtggcatacaaggctgcccaggacattgctttggctgagcttgctccaactcaccctattaggcttggactggcactcaacttctcagtgttctactatgagattctcaactcacccgatcgcgcctgcagtcttgcaaagcaggcttttgacgaggccatctcggaactggacaccctgagcgaggagtcctacaaggacagcactttgatcatgcagctccttcgtgataacttgaccctatggacttctgacatctcggaggaccctgcggaagagatcagggaggcgcccaagcacgactcgagcgaggggcagtaaagccggctttacgtgcctagaagctagtacctagtgtttgctgctgtctaatgacactatgcaatgtgatctggaccctggtttcttgggtgcgacgcttgtagcagccgtgttatgattatttgtcgggaaaatttgggggctccccatatgagatgctgccgggcaagacctcggcatcccacctcgtttcaggcgggggacgctggagcgtggtccggttgtgttgggaagccccttaaactgttgtcgcttgcattttaaccttttcatcgccgttcagtggtcctaaatctatggctcgtctcagtggtctagtatatgttttcttggttctctcttgattcctcacacggtgagtgggaccgttcgcatttgtctgtcccatcccatcttaacggtgaatgtgttttgtttggtgtctcgttctgatgtgaatttgcagcatctcgatttcatcttcaataagatagtattgtat

SEQ ID NO: 149 - DNA, 259 bp, Zea mays
  Clone ID: TF_LIB3180-017-P2-M1-F3
gttggattctcctacagctgcagatatgcgtcacactggaaaggttgtaaactgaactgtaagatgggatgagcagatctttaccgtgaggaaaaatggtacatgccgatgcttgccgagcaggcatagatgtaccacgaaatggcagcttttatggagaaggcttcgaaaactgttgacatggctgagctcactgaggatgaccgcaacctacagtctgatgcatacaagaacgtcattggagcaccttctgcctgat

SEQ ID NO: 150 - DNA, 552 bp, Zea mays
  Clone ID: TF_LIB3069-008-Q1-K1-A8-TGA
cacgcttgtagtcgcagcaccgtacccgccttgccactataaatatatgggaacaaaacccatcctcatggactaatggtgacccaaagcaatgggggtctaattctaccactaccctcctacttacactaaaaaataaatgaatggtgactaaatccgctcaataataataccggccaccgttttaagcccacagcatataaaacattggggctcagaacaactttgcacccccctcccaagataactgcccctcgcctgcgttttcttttagagcatctttgacctcatcaaaaccatcctccttgaggggggtatgtgccaaaggccaagatatacctcatgagatgcatgatcaaagagcttttcttgtatgactccccacccagggtgtttaactccaagatagatccatcaaacgcccgattttccctgctgaaagctttttgtggggagctcagaatatcctattagatcactgggaaaatatcagcatgttccaccactatctgatggggaggagccctctcaaaccgatcaatgtcctcagca

SEQ ID NO: 151 - DNA, 212 bp, Zea mays
  Clone ID: TF_LIB189-013-Q1-E1-G10
gtcgaccgacgcgtccgggaaatgatcgagtacatggataaggtcacgaaaacggttgccacggaggagcacacggtggaggaccccatcgacgagtccgttgcctagacgatcgtcattggaaccctccgtgcatcatggcgtatcacatcgtccatcgagccgacggacgagggtcaaggcgatgatgaccgtattacagacattatgga

SEQ ID NO: 152 - DNA, 528 bp, Zea mays
  Clone ID: TF_LIB4764-052-R1-K1-H2
cctcgaggccggccggggaatacgccctagcgcattgtgccactcgatgtccagatcgagacgaccagagtccgccgcgcccgtgaaacaccgactgccgaactcccgatagacctctatttcttgatccacatcaacatgtcctgggaggacaatgcctacttgcacaagttggatgcccaagtagaacggcacgaggacaatggttgaccacatggagaacgtggctaagaccgtctatgtggaagagctcaccgttgacgagcacaacctcttatctgttgactaccacaacgtaattggggaccgccgtgcctcatggagcattatctcctccatctagcataaggaggactcccgtaacaatgaggaacctgttattcagatcaaggagtaccgtggcaagattggggctgaaatgagcaacatttgtgatggcatcctgaaggtgatcgactctcaccttgtgacttcctccactggtgcagaagcgaaggtggtttacctcctgatgaaaggagattatcc

SEQ ID NO: 153 - DNA, 249 bp, Zea mays
  Clone ID: TF_LIB3059-008-Q1-K1-C8
gcctgcagttccggtccggaattgccgggtcgactcactctttcgctagcattcgcagtttcccctctccttgatacgcatcttttttctaggagtaagtttgttcttttattgatatggcgaggtaggagaatgtctacatggccatgctggcatatttgtccgaaaggtatgaatagatggttgagtatatggagaatgtgtctaatactgtatatgtggaagtgctcactgttgaggagcgtaact

SEQ ID NO: 154 - DNA, 411 bp, Zea mays
  Clone ID: TF_LIB3206-083-P1-N1-C10
tcgcgggagccccaatcaccgccacctcaggcaagcccccgaatcccccgggcgcgcagcacaaccttgccgtcattcgattttggcgcgcgttgcgagccgggatggggttgcagcagtccaaagaggaactgctgtaccagcaggtcaactacggcaacgtcgacgggattcgcacgctccgggggcaaggcgctggtctcgagtggattgacaaggaagggaagacgcccctgatgcttgcctgtatgcgcccggatctgttcgacgtggccaaggtgctgatcgagttgggagctaatgtgaatgcctacaggcctgggtcacactgtgggacagcattgcaccatgctgccaagaaaggacttcagcagactgtccatttactactctcacatggaggtatatgat

SEQ ID NO: 155 - DNA, 639 bp, Zea mays
  Clone ID: TF_LIB4740-081-R1-K1-E4
atccccgctgccctcggcgctgcgtctggacccggcacctacctcccccctccccacctcgccgccggcgggtggagtcgggctggagcagccgctctcctctgttacccccctaaccccctataaagaaaaagaaaaaaaacagagagagagcgagcgaccggcggctcggcagccatggggcacggcgtcagctgcgcccgcaccggcgacgagcacgactacttccgcgcggcgcaggtcggggacctcgaggccctggacgcgctcctcgacgccgacccctctctcgcccgccgcgccacgctctacgaccgcctctccgcgctccacatcgccgccgcaaatggccgccccgaggtgctgtcaatggtcttggatcacggggtgccgccggacgtggtgaatcggcacaagcaggtgcggtgcgggatcccgtccccatcgacgctttttttctttctttcttcctttctttccatcctttgccgctcgcaaggatctctcgtgggctacccgcttcaaaaatctcacctatttttttcttaccctcttcaatcaaatcaacaaggtaaaaaatctcatctttctaccggcttactatgcttgtttttttctgtccagacgccgctgatgctc

SEQ ID NO: 156 - DNA, 681 bp, Zea mays
  Clone ID: TF_ZmC1188865_1
ctcggagccgaccctagccaggttgatgaagcgatgggcttgccctctttccattgcttctgtaatgcggtgcagtggtactttagtccgaatgaatggtggaccaagcagcagtttcccaagctgttgccgctcttcctcgccagtcctaagatagatgtcaaccagcaggataagaatggctggacgcccctgatgcacgcggcagcatgcggctggggagagatggccgaggcgctcctgaaggacaagcgcgtggacgtcactatcaagtccaaacgggatgaaaccgctcggtccctcgctgtgcgcagcgacgtcatgtggcttgccgccgccatcgaaaagagggagaaggaggcatccggcgcttcgccccaacccaacacagccactaatgcgggaagtgatctcagtgcacttcgagaagagctcgaggcgaccaagaagctgtgcgcctatctggccaggattgtgcaatctttggatgaagtgaaggacaaagagaatacagtaggcaatatccgggagttggcagccgcactccgcgtggatttctagtcactttgctcgatgtcccactgaatgaataagtgaaagggtccccgtactccttcattgttttctcagtgcactacaatgcgaactcagtttgtaaacggaaaaaaaaaaaaaaaaaaa

SEQ ID NO: 157 - DNA, 474 bp, Zea mays
  Clone ID: TF_uC-zmroteosinte086c03a1
taatctgataacagatgggagtgatttttcagttacaccagcaaacaatcaatgtgtggtgttgacatggtgtggaaacaaagagctgcatcttatgttatctttacaaccgatcaacacatggcacaaatctggatattaatattttcagtataataccacttgtctaattaacatgaaatatacaacttacatcactgcaggtgttagggtcagctccagcttctagtaggagtctgattacttcaatacttctactaggagtctgattacttcaatacttgcgctccctacggcaacatgtaatggggttgctccaccagctctcatatttgggtttgcacctgcctggattagaatcttcaagcatggaaaggaagaacctacaatgacggcaaacaacaatggcgtgatatcatcattggtttcagtaattggctcagactatgttgagctgatctttggggccctttg

SEQ ID NO: 158 - DNA, 949 bp, Zea mays
  Clone ID: TF_ZmC1339_1
cggctcgaggctggtaaaaggcaatctggaaaagatgctactggaaaagttgcacactcagcaggttcttctctacggcgctataatgaagcagcactgaaaaaggtgttgaatttgatgcttgttgacttttatgtgtgcagtaaaagcaaatgtctcagcttattttttaggtgtctttcgtttttgtttgccttattgcaggaagttcaagaattaattgtttcatggaagtcatactttgagacatgtgtttgtgccttcatttatgctccatctaggaaccgccagatgctcttcgacggggagaagactcagtcagtaattcagtcttgtgatgttcgtccagttccattgactgttcatcgccccaccatgaaggaagcgaaacgggtatattgtaacctaacacaactctactatgagatggaatgttcaaccacagatgaaacactacctgatgctggaagtgtgaaaaatgttgaacaaggtcaaggaaaaaagaatgaagtgactgcagaccctggggaatctatttctgacttgtctgcccgtttggaattgttgaataagaatgaagcagcaaccataccatcatcaaagaacgaaacaacacctcttcatgaggcagcaaagtgtggcaatgctcagctgaccctggagttacttgagcagggtttggatccttgcgtaaaagatgcaagaggaaagacatcttattcgctggcttcagataaggaagttaggaatacattcagaagatttatggcgctcaatcttgacaaatgggactggcatgctgcagatgtgcctagtgcactaacaaaagaaatggaagaatcacaagctgcaaaacaagcagacaaggacgccaaaaggaaagcacgtgcaaaggaattgaagaaattaaaaaaaaaaaaaaaaaagggcggccggctcgcgatctagg

SEQ ID NO: 159 - DNA, 456 bp, Zea mays
  Clone ID: TF_LIB3115-030-P1-K1-C7
cccacacccgtccggaaggggcacctgaggatttaggtaagtttttggcaccggggggggaagtcaacatgggggatcctgaaggtggaactccgttgaattgggttgttgaccggggccatttaagtgttgtgggggttttggcaaaactaaatgcggccctgattgccaaggccaccgaagggcaaacggaactccactccgctgttgttggggaaagagaaaacatttaaaaattgctggtgaagcatcatgcctcctttaaaatcagggatgaggttgggaccacggaacaggacttgtgccttccaagttgtgttttattgaaccggccaaattgacatccaaaatgctccttatcattagcgtgcctttaagttgtgcccgaccttggccaatggtgtttttatttatgggggacatatggtgtgccttgtgtgaatggccgttcttggt

SEQ ID NO: 160 - DNA, 1698 bp, Zea mays
  Clone ID: TF_ZmC503_2
cggacgcgtgggattaaatatcttttatggaagaaaaatatatatgcttatattcttttcttatgcagttaaccagaacttccagattgcaagtacaatctctggcatctcatgcatgttacccctgaatggctaaacaatcactcctctggacttcttgtcaataacatctgcatatttggtattgaattcatcaaagttgtcgctatcaaagccatcttgcatcctaaactactttcaattccttggagattatgctccatatgttatagcataggagcgagatgacgctatcgatctggatgaatggcgagctcaacgatctagagtcaaatctggtggggaagaagactggtcggtcgttacctgcgacaatgctggctgcagagctgatcgtgccaccagcacaagagatcaaggagttctttgccatcaccgaagcgtctaggacaaatgtttcgcttccacaaatgtttcgcttccaagtaagactctattgcccagattgtgacgaattgcttgacactagaggaagaaatttccttcatactgctattgagcataagaaatggaaagttgtctggcgtttctctggtactgcagatcttggaaggatggcaaatgtcatggattcagaaggcaacacacctctgcatcttgcaatcaagaatgcagaccagatgatagtgagccttcttatggcaacaaatagtgtgttgccgaatatagtgaacaaccagggcctcaccgccttagatcttgctgtactggcaactgacaaaggcataagttatacaatggtcatcatactccgctgtttggcatggactggagctgtccttagtcctcgtcgccttgatcatttcatcgatgattttggcattggcaaaacttcaggaaacgagctcaagaaattcaccaacattgcacagaaaaagcatggaattgtatttattttttaattaggctgaaggaaattataacaaacaaatgcatcgaaacatgattatttaaacaaagtttcttatgtatgcttgttgagtgttgacactgtttttattagattcatatgctaactttggtacaattcttctcactgttgagtccatttataattgtacctcagtccccaggttcatgtggtttatttgcatgctgattttcaaaacatcgagttggcttgatatttgcacccttttttccctctaacattgtttgtgtcatcttaatagaaatggattattaactttaatcagcggttgccttattatgcttcaatcttatttgttcaatttcacttatggtcctgcttcacctgcagatcgtggaaagtttatgaagttttgttggggttctggatgcataagatagtggtgtatgtgatttgcccatagtttctgcagcctcattgttttccatttgggatgaataaagcttcatgctcatggatagggctgatacatcaggttttgttagtggtggtatacattacatgaatatccatgtgtattttcattttgtgtatactatgtgcttcctcggtggtgaagttgtaaagctggagttctgatctctgttggttggattaagtatctggtctctagacaacatatcgtggtggtgaaacaactaaattaaaataacaaaatttatgtatggataggatcacaaatgtattaagaaaccttttctcataac

SEQ ID NO: 161 - DNA, 682 bp, Zea mays
  Clone ID: TF_LIB4829-021-R1-N1-F4
ccggccggggtttcccctctttcattcttattcttttttatacttcattcagcgttttatttcatcaaagcctttccctttgtactcgatctatactctcttttcttttgttcttttacagccaatctcgggtttttcgcgacggcaccatatgatcttgatccaatcgcaaccgtcatgaccagtcatcctccaccatgattgaaccatctatccgtgtccgtcgggcaatccacgccaacgatgcgacccttctgcgccgaatcctcaagacacaccccagctatctcctaaaccccgattcatccccttccggcctatccaactcgaatatgcacctggcagcttcactaggtcaccacgaagtctgcgcagtactgttaaaactcggccacgaggatccatgtcctgctctcaatgaaagccaccaaactgcattgatgctcgccgcagctggtgggcataccgaagtcgtccaaattctctgcgagcacgacaaaacatgcattcttcgtcgcgacgttcgaggccgcgatgccgtcatggaggccagtcttggaggacacgataccatactacaactcctccttaccctacgttcccggtgggctttatgatgcagtccgccgcgcagatgttgaaggggatacagcactgcattttgcgagtggaacggaaacct

SEQ ID NO: 162 - DNA, 2682 bp, Zea mays
  Clone ID: TF_ZmC912_1
acggcgcttccgtcttgttcacttttcaagctcccacgtcgccccatgggccatggcaaggctgcttcgggtgtccctcgctctctctctcgctttccctctctagacttcaatacttttcccctgtccgtgggcaagcccatcatgacgtgagggagggggaggcgatgcccagtctactctagcctgggtcttgagagagaggggagacgagggtgggagtaatacaacagagccaagccgagggaggagagagggagagagagggggagcagggaacccaaagagacaaggcaaggaagcagagagaaactccaagattgggggcgactggtaagcaaggggaggagtagaggcggcgtttgttctccttcgattccctagtcttcctggagggcgacgaagggagatttcgccgggcgcggacggacgccgcgatggccggtgtcgacgccgccaggtacgcgcacagcccagcacaccacgctgtggcggcccgggaccacgccgcgctgcgccgcgtgctggacgcgctcccgcgggcgcgccggcccgaggagatccggacggaagcggactccgtcgccgaggaggcccgcgccgaggccgtctcggcggtcatcgaccgccgcgacgtgcccgggcgggagacgccgctccacctcgccgtgcgcctctgtgaccccacggcggccgagatgctcatggcggccggcgccgactggagcctgcagaacgagcagggttggagcgccctccaggaggccatctgcacgcgcgaggaggccctggcgcgcgtcatcgtgcgccactaccagcccctcgcctgggccaagtggtgccgccgactgccccgcgtcgtcgccgccatgcgccggatgcgggacttctacatggagatcaccttccattttgagagctccgtcatcccattcatttcccgcatcgcgccctccgacacctacagggtctggaagcgtggctccaacctccgcgccgacatgaccctcgctggtttcgatggcttcaagatccaacgctccgaccagaccatactcttcctcggggaagggtcggaggatggcaaggtgccgccgggttcactgtgcatgatcaaccacaaggacaaggagattatgaacgcgctggagggggcaggcaccccagcctcagatgcagaagtccagcaggaggtcgctgcaatgtcacagaccaacatcttccgtccggggattgacgtcacccaagcgctgttgctcccacagctcacttggcggcggcaggaacggacagaggcggttggcccgtggaaggccaaggtgtatgaaatgaatcatgtggtggtcagtgtcaagtcaaggagggtcccgggggcgatgacggatgaagaattcttttcatcttgcaatgacaatgatatagagagtgaggggtttgatgatgttctgacagaggaggagaagaagcagttggaggctgcgctaaaaatggattctccggatgccggtggggaagaccaatctgactcatttgctggccctcgacatagttgctttgagccaagggagagggaggtacccattgaggacatgagtgtttctggaaatggggagggtaagcatgacaagaaaggttggttcagtaattggggaaagagaagtcaggttagcaagtcagagggggtgaagaagatggcatctccaaggaactcgctctgtgtagatgacaaggtgagtgacctcgtcattgaatcgccctcaaatgtacaaacaagaccgggaaggcattcggtagatgtagtcagaccagatgacaacagaaggatcagggaaagggatagtaggagacatgttgcttctgcagagaatgggcataggcgcaaagaaggttccaaagaaagtgagtacaaaaaaggcctaaggcctgttctctggctctctccaaatttccctcttcggactgaggagctgctgccattgcttgatattcttgcaaacaaagtgaaggcaattcgtcgtttgagggatctacttacaacaaaactccctccaggcacatttcctgtcaaggtcgctattccagtcgtgcctacaatcagagtgcttgtgacattcacaaaatttgaagagctacagccgctagatgagttcaccacaccaccctcaagtcctgacaacagcaagagcccagcagtgcagccttcttcaagttcctggattcagtggatcaaggcgccctacctccagaacttgtcgacggcacctggcccaagcagccgcgtggaggacatccaggacccattcgccattccttccaattacgtgtggacaacacctgaagagaagaaaaagaagacacaagaaaacaagaacaagtcgaagaaaggcaggagcggcgcatagatagtacgtaggtgatagcattggtgggggggggggggagttaaagttatgctgtgagtgggtgaaaagggctatactcttcaggatctaacaggagggatgattggaagatttggagatttcggctgctctgacgtcgaatattgagaagcgaccgcttgtcttctttcattgtgataacagatctgctgtcaacattctttcgtttaacccatcgtttgggtcctgattatcattgcaatctactgtattggtagattttgaggtgtggcgccttctg

SEQ ID NO: 163 - DNA, 3106 bp, Zea mays
  Clone ID: TF_ZmC489_1
tgattattgataggaagaggaactaacgcttcaaaagcacgaaaccagaagcgctcattagatgatgcagttttgggaataacgcacatcattgtggatgaaatccatgaaagggataggttttctgatttcatgctgactattctaagagacttgttgcctttgtatcctcatcttcgtatggtactcatgagtgcaacaattgatgctgagcgtttttcgcaatatttcaatggatgttcggtcatacaagtccctggttttacctatcctgtcaaatctttctatttggaggacgtgctttctattctgcagtctgcagagcagaacacagaagtctacaattaccagcattcagagactggtataactcctttaatggtttttgctatgaagggtcagcttggggacgtctgtatgcttttatcttttggtgtggattgttcagcacaggatcatgatggaaaatccgcattagattgggcacaacaagagaatcaacaagaggtctgtgaagtaataaagaaacatatggagtgtagttcagaaaaatcaactgaagataacgagctgcttaacaagtacttggcatctattaatccagagcacattgatactctgctaattgaacggctgcttcgaaaaatttgtgtggattccaatgaaggagccatcttggtattccttcctggctgggaagatatcagtcaaacacgtgaaagattatttgcttctccattctttcaggattcatcaagatttcttgtgttgtctcttcattctatgatcccgtcctcagagcagaaaaaggttttcaaacgtccaccagtgggggttcgtaaaattattctctcaactaatattgcagagactgctgtgacaattgatgatgttgtgtttgtcatagatagtgggagaatgaaagagaaaagttatgatccatacaataatgtgtccacacttcatgcttcttgggtttcaaaagccagtgcaagacaacgcgaagggcgtgctggccgatgtcagccaggaacttgctatcatctttactcaaggtttagagcttcatccttgccagactaccaaattcctgaaataaaaagaatgcccattgaggaactttgtttgcaggtcaaactgcttgattcaaactgcagaatagcagactttctgaagaaaaccttggaccctccaatcccagaaactgtaagaaatgctattgctgtgcttcaggatcttggtgctttaacacaagacgaacaactaacagaattaggagaaaagctgggttccctgccagtccatccatccaccaccaagatgctcctgtttgctatattaatgaactgcctggatccagcattgacattggcatgtgcagctgattatagagatccatttgtccttccagtagcgcctgatgagaggaaaagggcagctgcagcgaaagttgagcttgcttcgttgtatggtgggttcagcgaccaacttgctgttgtcgcggcatttgactgctggaggcatgccaaagatagaggccaagattctcaattttgtgcgaagtactttgtctcttcaaacatcatgaatatgctatcaagcatgaggaaacaacttcagaatgaactgtctcaaagagggtttgtccctgcagatgcatctgcctgcagcttaaactctaaagatccaggtatcatgcgtgctgttcttatggctggtgcttacccaatggtagggaaaatgctccctcctcgcaaaaatgctagaaaatcagttctggaaacagcgagtggtgccaaagttcgtctgcacccacactcctgcaactttaacctatctttcagtaaatcttctgggaatccactgctgatatacgatgagatcactcgaggtgatggtggaatgtatataaaaaattcttcagttgttgggtcatatcctttgcttctaatagctgcagaaatggttgttgctccacctgatgatgatagtgatgaagatgaggaagattctagtgaggatgaagctgaggaaagcacattggtacagcacaaagaagagattatgtcttcacctgacagcattgtttcagttgttgttgatcggtggctccggtttgacgctacggctctggatgttgctcaaatatactgcttaagagaacgtctagcatctgctattcttttcaaagtgaaacatccacaagatgttctacctcctgcgcttggagcgtcaatgtatgccatcacatgcatcctttcattcgatggtttgccttctatggttccacctaatgacctttcagcaaaccgaggttcaggccaggatttagcagaagctagcaagttctctcagggaagaagagcgggttatattccacctagtggttttctgatgtccttgttagctgataggacccataatgcaccttctttccagaactcatctaaccatccaggaggtggttcagcgcatactcggccatccagggctcctgttggtaggtttgatcgatctcggcgacctttccgcaattctggacctgggagttcagcaccacgttctttcaaaaggcagcgcgacgctccacggtgagcagggcataaaggcagccttttgcatgccagccatttcggatgtgctttgtcaacggtgcctagtctaagaaaaggacgtgctatagaatcacaagctttgctgtgttccgttgtagaaatgaagggaaaagaattatagcactgcatcggattcctttgtcgaagagtttttgtaggtatgcccctgagtgttttgtgtactttgctcagccgagctcatttgcaccgtagacctcagaggtgcctgtaatcttttggatggagttcggatgttaaaaagaagtgggatagaaaagcgaagacctgttatctgctcaaatgatgagccccataattgacggtatcactggaccatagatgaactttgtgctgtagtgccatagacaatatggtgtgacgggcgagtggaatttgccctgcatcgcaagcgttaaattttgtccttgtatgtacgtacttagtaaacttagtaataaccctttctttgaatttagttttatagtgagtcc

SEQ ID NO: 164 - DNA, 2658 bp, Zea mays
  Clone ID: TF_ZmC16049_1
ccggccgggaaaaaaaaaaataaaaaaaaaaaaaaaaaaaaaaaaaaaaaaaaaaaaaaaaaaaaaaaaaaaaaaaacccacgcgtccgcttccctcccctccgactccggccaacccgcccctccctcccaccgctcgtccgcccctcgcccgcaccaccggcgccggcaccggcgccggagcgcgacccggaggagcgtccgcacccgcgccgcgccagatctggccccgcccgcagctcccatgcccctccctccccagacccgcctgacctagccacgaccggccggccggacccgccccaccccccgccatggatgacgtgtccaagtatgcgcacagcccggcgcacctcgccgtcctgcggcgcgaccacgcggcgctgcgtcgactggtggcggccctcccgcgcctgccgcgcgccggggaggtggccaccgaggaggagtccgtcgcgggggaggccgtggcggacgcggtctcggccgtcatcgaccgccgcgacgtgccgcggagggagaccccgctccacctcgccgtgcgcctccgggaccccgtcgccgccgacatcctcatgtcggccggcgccgactggtcgctgcagaacgccgacggctggtccgcgctccaggaggccgtctgcacgcgcgaggaggccatcgccaccatcatcgcgcgccactaccagccgctcgcctgggccaagtggtgccgccgcctcccgcgcatcctcgcctccatctcccgcatccgcgacttctacatggagatctccttccacttcgagtcctccgtcatccccttcatcggccgcatcgcgccctccgacacctaccgcatctggaagcgcggcgccgcgctccgggccgacatgacactcgcggggttcgacggcttccgcatccagcgctccgaccagacgttcctcttcctcggggacggcgccaggcctgaggacgccgggggcaaggagctgcacccgggctcgctaatagtgctggcgcacaaggataaggagattacggatgcgctggagggggcgggcgtgcagcccacagagtctgaggtggcgcatgaggtagcgctcatgtccaagaccaacatgtaccgtccggggatcgacgtcacgcaggcagagctcgtgccgcacttgaattggcgccgccaggagaggacagaagccgtcgggcaatggaaagccaaggtgtatgacatgttgaatgtcctggtcaccgtgaagtctaggcgcgtgcctggggcgatgacagacgaggagctgtttgccatggatggggaggagaagaatgggaggggcgcagagcttgatgctgagttagacgaagtgttgacagccgaggagaggaagcaacttgattctgcgcttaggatggggaacaacgaagaggaatctgaggagaggggcgacgaaggtgatgctggtgctgatcatacggatgcgagtggcgtgaccaaagataagaagggatggtttggttggggcgccaagaaaggtgccaagggcgatgacaagccatcaaaggtggggagtaaggatgaaacaagtgacccagggaagcaaaaggagaagggcagtgggaagaagaaaaagggtggctcatctgctgagtctgtaaaacatgagagcgagtacaagaaggggttaagaccagtgttgtggttgacaccggatttccctctgaagacagatgaactcatccctctgcttgatgtcctagcaaacaaagtgaaggctatcaggaggcttagggaactcttgacaaccaaacttcctacaggcacatttccagtcaagatcgccatccctattgttccaacgatacgagtcatcatcacattcacaaagtttgaagaactacagcctctagacgagtttgccaccccaccttcaagcccgacacagtttcaagacgcgaaagccaaagaaccagaaggatcaggctcatggtattcatgggtaaagggtggccgaggtacgcagtccggtgacagtggtgatgggcggaactggaaagacgaggttgatccgttccacataccgtcggactacacctgggtcgatgccaccgagaagaagcggaggatgaaggcaaagaaagccaagagcaggcggaccacagcccgaaaacagtcctcgaagaacacttcttcggaaggaggccaccgccccatgatggatggcttcgaggagtaaaccgcgttctcacaagcatagtaagttgtatttgcattcttaaaatgttagttgttgatggcagctgcacgccagaggcagattgattgatgttgtgcctggagcaccccctcccttggcgtggcaatgaatcggagtcgaatctccttgagaacgtacaggatggcttatacccaccccactaatctgtaattcagccagcgctatttttttttgcccccctccgtgtttcatcttgctggatgtatcatgtatgtttgacagatgatgacgatgatacgaccctgttgttgaaaaaaaaatgtgtttgaggggactgtagtgttccctccccctgttgtaatggaagatttaccaatatgcagaagatttaccaatatgcagcgattttctcgcaaagaggaagctccaatgcacatgcttgtttgttcgcaaaaaaaaaaaa

SEQ ID NO: 165 - DNA, 2575 bp, Zea mays
  Clone ID: TF_ZmC16049_2
gacccggaggagcctccgcacccccgccgcgccagatctggccccgcccgcagcccccatgctccagatccgcctggcctagccacgaccggccgtccgctccccgcgcccccgcgtgccatggacgacgtgtccaggtacgcgcacagcccggcgcacctggccgtcctgcggcgcgaccacgcggcgctgcggcggctggtcgccgcgctcccgcgcctgccgcgcgccggggaggtggcgaccgaggaggagtccatcgcgggggaggccgtggcggacgccgtctcggccgtcgtcgaccgccgcgacgtgccgcggagggagaccccgctacacctcgccgtgcgcctccgggaccccgtcgccgccgacgtcctcatgtccgccggcgccgactggtcgctgcagaacgccgacggctggtccgcgctccaggaggccgtctgcacccgcgaggaggccatcgccaccatcatcgcgcgccactaccagccgctcgcctgggccaagtggtgccgccgcctcccgcgcatcctcgcctccatctcccgcatccgcgacttctacatggagatcaccttccacttcgagtcctccgtcatccccttcatcagccgcatcgcgccctccgacacctaccgcatctggaagcgcggcgccgcgctccgggccgacatgacactcgcggggttcgacggcttccgcatccagcgctccgaccagacgttcctcttcctcggggacggcgccaggcctgaggacgccgggggcaaggagctgcacccgggctcgctcatagtgctggcgcacaaggacaaggagatcacggatgcgctggagggggcgggcgtgcagcccaccgagtccgaggtggcgcatgaggtggcgttgatgtccaagaccaacatgtaccgtccggggattgacgtcacgcaggcggagctcgtgccacacttgaattggcgccgccaggagagggcagaagccgttgggcaatggaaagccaaggtgtatgacatgttgaatgtcctcgtcacagtgaagtctcggcgcgtacctggggcgatgacggacgaggagctgtttgccatggatggggaggagaagaacgggaggggcgcggagcttgatgctgagttagacgaagtgttgacagccgaggagaggaagcagcttgattctgcgcttaggatggggaacaatgaagaggaatctgagcagaggtgcgacgaaggtgacactggtgctggtcatatggatgagcatgccgccgccaaagataagaagggatggttcggttggggtggcaagaaaggtgccaagggcgatgacaagccatcaaagatggggagtaaggatgaaacgagtgacccagggaagcaaaaggagaagggcagcgggaagaagaagaagggtggctcacctgctgagtctctaaaacatgaaagcgagtacaagaaggggttaagaccagtgttgtgcacgagctgacaccggatttccctctgaagacagatgaactcatccctctgcttgatgtcctagcaaacaaagtcaaggctgtaaggaggcttagggaactcttgacaaccaaacttcctacaggcacatttccagtcaagattgccatccctattgttccaacgatacgagtcatcgtcacattcacaaagttcgaagaactacagcctctagatgagtttgccaccccaccttccagcccgacacagtttcaagacgcgaaaaccaaagaatcagaaggatcaggctcatggtattcatgggtaaagggtggccgaggcacgcagtccagcgacagcggtgatagccggagctggaaagatgaggtggatccgttccacataccgtcggactacacctgggttgatgccaccgagaagaagcggaggatgaaggcaaagaaagccaagagcaggcggggcccagcccgaaaacagtcctcgaagaacactgcggaaggagcccaccgcccaatgatggatggcttcgaggagtaaaccatgctctcaccggcgttgtaagttgcctctgcattcattcttaagatgttagttgttgatggcagcttcacgcccgaggcagattgaaagttgtgccttggagcaccccccgtggtgttggtgtggcaatggatcggagtcgaatctcattgagaacgtacagatggcttataccccactaatctgtaattcagtcagcgctatttttgtccccacctccgattttcatcttgctggatgtatgcttgacagatgatgatacggccctgttgttgttgttgttgttgaaaaagatgtgttgaggggactgtagtgttcctctcccccctgttgtatggaagattaccaatatgcagcgattttctcgcaaagaggaagctcaatgcacatgcttgtttgttcacattcctttttctgctctgagtttctgctgatgcatgtgtaacgacagtgtaatttgatgtttgtccacgctttaaaaaaaaaaaaaaagggcggcctcgagccgaattccgagcttaggctttaatctaaaatatcttctattgttt

SEQ ID NO: 166 - DNA, 1988 bp, Zea mays
  Clone ID: TF_ZmC119_1824
ggtcatatacttgcactttataataggtgcagctcttcattcttagatatagtacacgagaaggtcccaactgcggctcaccacagacctaaaaggttaaaacagctaaaccaaatatatacacgaaccatttgcactctcccaattgcctcttctcatgcaagagtaattactgttacaccttcctacagggcatatatcttcttctcatgatcagagaaggcttccagatctgaaaaaccatcatggagtgaccaggagaaggacttgctgccgcttgccctcttgatgcggcgctgtctgtcttcgccaaacttgaaccgtgggcgcaacaacagataggctaggaacaggagggttccaatcatgatcggacctccgatggctgatactgtgaaggccatccaggcatgctgcgggccaactacaacatatgccagtgagataaaagccgcacctgtgctaaggcatgcggtccacatgagcttatttacgatcttgataacttgcttctgggcaccagtttcccaggcaaccaaggtgatctgcacgacgaccaccgcgagggaaatgaagagagcagttgcattcagaaggcagaagacacgaaaaccagtaagcttggctatttgagcctcaccaatgtctcccccgctattcacatcttggaagtattgacctggcaaattgaatatggcaacgaaggcaatggaggcaatcagggttgctaccatggtgactgaattgatggtgttctgaatagcttctctatgcagtttctgcaattctttgcgaatcccagtcactcgtttattggtcttagcattctcgctaagctgtgcctgaacattgtgcttgatatcactcacagttctcctcagttctgatgcctcatcaattttccccacatttctggcattctttgcaccagcctctgtcaaccactctattatttccgttttagactcaccataaggaactttgtcagccaaatccatagctgtttcattttgaatattgatagcattaatttcaagtgattcgtagctaagaagaagctgtaccatctggggcctccatttccgtgtagctatgtgcaaagcagtatttcccttcttgtcccgcacattgagggctagtttggcaaccaaggttaattaacccggagataaattccactccatgtaggattcatctttgcaacttcaacaatgcattctcggcaggtaagctatgaaagtttcaacttttttatatcacagtcccaacaaaaattcctgacaactgtaatccattctaggactagtagatttagagtcacatgctcatagcacctcacacctgccaatcaaaccaaacgaattgaagcttacaacagagaaaacaacccattgaatcctacagtaaagtaaagagtgagggtccctctcgtcccaaatctgcagacacgtaaacaacccattgaatcctacagtagcaatgcaaacaaagagatgcctgaatcgtatatcctataataacactcttgctaggtttcacactcatcttctgttaatagaagaagcgtgtggtgcagccgtgcagggatctggaagcaagtaaagtacaaaagagaaagacgaagcagatctgatccgaatttggtgacgccatggtgcaggatggcgacagaagggggatcctagctagaggcggaggccgccaaggcgaggttgtccggcagggcgtcatcggtccacacccggtcgtccgtgtccttggttcacacgcagtgcaagcggctaggagcagcgccagaagtggcaaggcggatagatcaaacatcaagcagtgcccccgcgtggatttgtggggagaaggtgtcagcagtagcacgcaggtggggaagggagcggtcgagcaaagggtgggtgtcaccagcagcaacacaaggttgctggtgatgatgtcccgcggaaggcgatcggtggaggggccgcggcaatgag

SEQ ID NO: 167 - DNA, 392 bp, Zea mays
  Clone ID: TF_ZmC145468_1
cccacgcgtacgcctgcctccacatcgcctgcatctatggccacgagaggttctgcagggacgtcctggcgctgacgacgaacagccagcagtctccggcggcggcgcctcttctcgtgaccatcaacgcggatggcgagacgccgctgctcgccgccgtggccagcggccacgtctccgtggccttgtttatcctcgggcgctgtcgggaggagcggctgagcgaggcgatcctgacgcaggacaagcgcgggttcaacgcgctgcaccacgccatccgcaacgggcaccgggggctcgccctccagctggtcgacgcggagcccggcctgtcgaaagccgtgaacaaacacgacgagtcgcccttgttcatcgcggtgatgaggaactac

SEQ ID NO: 168 - DNA, 489 bp, Zea mays
  Clone ID: TF_ZM4878.C14.o1.fg
gtggccgggcgaaagcgcaccgccacggcggccgtggccggggacggcgtcgtggagaggacggtggagaccactacttcactcgctgctgtgaaagcctggcaggggtttcgcccggttcgccaacgtcagcgacgaccacagcgccacggcgctacacctcgccgccatatgcaaggccgccccgactacgtgcaggttccccggcagcacatcattgcatctggccgctcgcagtggggacctagattgcatccggaaaatgctcgcctagggtgtggatcatctctagagggactcaacaggccactcaccgactcacaggccagtgacgcggagctgtgctgcatctgcttcgagcaagcgtgcacgatcgaggtgcaggactacgggcaccagatgtgtgcggcgtgcacgctggcgctgtgctgccacagtaagtcgtacccagcgacgctgacgccgccgtcactagactgcccgttctaa

SEQ ID NO: 169 - DNA, 2598 bp, Zea mays
  Clone ID: TF_ZmC912_2
gagtgggagtaatacaacagagccaaaccgagggaggagagagagggccagagaacacaaagaggcaaggcaaggaagcagggacagactccaagattgggggcgactggtaggcaagaaaggaagctcttctttttcgagtatcactgggcgattgatttccgccgccatcctttccgctcaattcttagctgccgcagataagagcgaggagcagaggcgctgttttctctctccgattccctcagcttcctgtggcgtggtggggtgtgtggcgacgaagggaggctcgccggggcgcggacggacgcccgcgatggccggcgtcgacgttgccaggcacgcgcacagcccggcgcaccacgccgtggcggcgcgggaccacgtcgcgctgcgccgcgtgctggaagcgctcccgccggcccgccggcccgaggagatccggacggaggcggactccgtcgccgaggaggcccgcgccgaggccgtctcggcggtcatcgaccgccgcgacgtgccagggcgggagacgccgctccacctcgccgtgcgcctttgtgacgccacggcgaccgagatgctcatggcggccggcgccgactggagcctgcagaacgagcagggctggagcgcactgcaggaggccatctgcgcgcgcgaggaggctctggcgcgcgtcatcgtgcgccactaccagcccctcgcctgggccaagtggtgccgccgcctgccccgcgtcgtcgccgccatgcgccggatgcgggacttctacatggagatcaccttccacttcgagagctctgtcatcccattcatttcccgcgtcgccccctccgacacctacagggtatggaagcgcggcgccaacctccgcgccgacatgaccctcgccggtttcgatggcttcaagatccaacgctccgaccagaccatactcttcctcggggaagggtcggaggatggaaaggtgccgcctggttcactgtgcatgatcaaccacaaggacaaggagattatgaacgcgctcgagggggcaggcgccccggcctcggaggcagaggtccagcaggaggtcgctgcaatgtcacagaccaacatcttccgtccggggatcgacgtcacccaagcggtgctgctcccacagctcacatggcggcggcaggaacggacagaggccgttggcccgtggaaggccaaggtgtatgacatgaatcatgtgctggtcagtgtcaagtcaaggagggtcccgggagcgatgacggatgaggaattcttctcatctagcaacgacaatgatacagagagcgaggggtttgacgatgttctgacagaggaggagaagaaacagctggaggctgcgctaaaaatggattctccggatgccggtggagaagaccagtcggactcatttgctggccctcgacatagttgctttgagccaagggagagggagatacccatcgagggcatgagtgtttctggaaatgtggagagtaagcatgacaagaaaggttggttcagtaattggggaaagagagctcaagttagcaagccagaaagggtgaagaagatggcacctccaaggagctcgctctgtgtagatgagaaggtgagtgacctcctctttgaatcaccctcaaatgcacaaacaagaccaggaaggcattcagtagatgtagtcagagcagatgacaacagaaggatcagggaaagggatagtaggaggtatgttccttctgcagagaatgggcataggcgcaaagaaggttccaaagaaagtgagtataaaaaaggcctaaggccggttctctggctctctccaaatttccctctgcggactgaggaactgctgccgttgcttgatattcttgcaaacaaggtgaaggcaattcgtcgtttgagggatctacttacaacaaaactccctccagatacatttcctgtcaaggttgccatcccagtcgtgcctacgatcagagtgcttgtgacattcacgaaattcgaggagctacagccgctagaggagttcggcacaccaccttcaagccctgacaaaagcaagagcccagcagtgcagcctccttcgagctcctggattcaatggatcaaggcgccttattaccgccaaatgaacttgtttacggcgccaggcccgagcagccgcgtggaggacatccaccaccaggacccgttcgccatcccttcggattacgtgtggaccccacccgaggagaagaaaaagaagacccaggaaaacaagaacaggtccaagaaaggcaggaacgggtgatagagcattggtgggatgggatctaacaggagggacgagtggaagggaaggtttggagatttcggctgtgctggtctgagtctgacgtcgaatattgggaagcgaccgcttgtcttcttttttatttgtgttaacggatttgctgccaacattctttcgtttaacccaaatcgtttcggtcccgattactgttgcaatctgttggtagattttcaaatgtggtggcttctataaaaacaaaaaagcaaaaaaaaaaaaaaaaaaaaaaaaaaaaaaaaaaaaaaaaactcgaggggaggccccggtac

SEQ ID NO: 170 - DNA, 709 bp, Zea mays
  unsure (1)..(709): unsure at all n locations
  Clone ID: TF_ZmC605702_1
ggccgggntaagcggcggngggtggctaaccgcgatggcgcctctgtttgccgagtcgcttagggcaagaaacaacagaggggagaggggcctacacgaggcagtgaggcgaggcaacacggaagctgtcgagtccctgatctggatggatgagaatgtggatggcggcaggaccagcagaaccccatcgctggtgcagagagtagactatcaaggtgtctctcccctctacttggctaccactctacgccgtggtgacatcgtggggattcttacgcacccctcccaaaatcactactcaccatccttctctgggcctggaggaaagaccgccatgcatgccgccgttcttgccaagggagatgccaaagtgctaacgaagaagctcctcgagtggacgaccagcaagaattacccgggaggtgcacgggatcttatatgtatgggtgacaaatcagggagcactcctctccaccttttggcctcagagggaggcgcatctgtcgcagagctactgctctctcctgatgcgagagaactgtcgtgggcacgccgcttactctcaaagatatgtccatgtacatcaccagctgggaatgccgcctccgccgacgacgatgacgacgacacgagagaggggggctcttgtactgctgctgcgctgaagaagactccaatggctggtttcccatacatgtcgctgcggcga

SEQ ID NO: 171 - DNA, 259 bp, Zea mays
  Clone ID: TF_700102367H1
ctagaccaaacaactgaaaaagggaacacctgcctccacatcgccgctctctgcggccaccagaacttctgcagcgaggtcctggcgcaggagtcgcgtctccatcgtcccggcccgtcgtctctgctctccaccaccaacgacgacggcgagacgccgctgctcgtcgccgtgaagagcggccgtgtctctctgggccttcatctgctcgaccagcactactcgaggcacgagttgctggtggagcatcttcttaagc

SEQ ID NO: 172 - DNA, 794 bp, Zea mays
  unsure (1)..(794): unsure at all n locations
  Clone ID: TF_ZmC176290_1
aattcggcacgagggcccactctcgccaccgtgtggtccagacgtccagtcctctaaccgaaccaggaagcaccacaccaggcagcggaagctcgcgctgggatcggctaccaacaataatatcgttcctcgcctccctcacctctgaacgagaacgcgaacgcgccctgtgatcactaccccacagcatgtgctcaggacctcgcaagccgtccacaccccctctgccggcggcgacggccaaggactcctcggcgatggcggtgctgctggagctggcggcggcggacgacgtcgtggggttcaggcgcgccgtggagggcgacaaagccccagccttggacgacgcgggtcactggtacggcccgtccgccgcggccgccggccgcctccgcctgcgcctcgaggcgcgcactccggccatggtggccgcgctctacggcagcacggcggtgctggcgtacgtgctgtccgccgcgccggcggaggccgcgcgcgcctcgcccacggacggcgccacgccgctccacctcgccgcggccggcggcgcgccgggcgccgtcgcggccgcgcacctgctcctggccgctggcgcgtccgccgacgcgctcgctttctcgggcctccgcgccggcgacctcctcccgcgcgccaacgccgncgccgacagggaccgcgcgctccgcgtgctcctcaagtcccccgcggcgtcgccgtcgtcctcgcccaagaagtccgcctcgccgncaccgccgacggcgggagctgcggcgccggagccgaagaaggagtac

SEQ ID NO: 173 - DNA, 204 bp, Zea mays
  Clone ID: TF_701171021H1
cagcaaaaatctcacctatttttttcttaccctcttcaatcaaatcaacaaggtaaaaaatctcatctctctaccggcttgctatgcttgtttttctctgtccagacgccgctgatgctcgcggcgatgcacggcaagaccgactgcgtgctgaagctcctgcaggccggcgccaatgtgagcggaaatctcctcctcctcttc

SEQ ID NO: 174 - DNA, 819 bp, Zea mays
  unsure (1)..(819): unsure at all n locations
  Clone ID: TF_LIB4829-068-R1-N1-B10
ccggccggcaaactgaaattacaactcaaactttccaacaaacacacgtgaacagacaagaaaaaaaagatgtctttacaggacgaagaactcggacagcagctttatttgcaaatgcgacaacgacaacaaattgcactgagagcgcagcaaatggccgcatcgcaacgacaacaggcagtaaaccagatgggaggtcaaatggggaacacaatgaaccagatgaacgcaacgacgattcaccaaatgggcagtcctttcgacgatattccagtgcaggcgcccgaggataacaacatcctttaccagagaaatgtgtcaccggaagtcgcctctttcttctctgcctgcaaagccggcgacatgtccaccatccagtcaatcgttacctctcaacctcgctcgccagtcttccttcatcgaggtctaatcaacgccttggaaagcggaaatgtcgacgtcgcacgatacctacttcaatccggagcacccatctcacgacaaacaccaggaattgttctcaaagctccagctgaccggcaaatcgccctcttcgaagctctcgccgaacacggttggactgtcaatacaccatcctactacggcgaggttcttctcacacgactcatcaggtccaacaacgaacatctcatcgactggttcctcgcgcaaggcgcaaaccccaacctgggccgccagcacgatcaacgcgaccgtctaggcggaccagacacaaactcttgccaggcgctagaactggcagcctcgcatggcagtgtcaacttggtgcagaagcttctanatgccggcgctgaaatc

SEQ ID NO: 175 - DNA, 1107 bp, Zea mays
  Clone ID: TF_ZmC885_2
ctgaaggaaaagtgcctctatgggaggctttatgtgaaaagcacaatgcagtgatagagctgttagtagagagtggtgcagagctatcatctggagacacggccttgtatgcttgcatcgctgttgaggaaaatgatgctgagttgttgctggaacacggagctgacgtcgacaagcaggacagtaatggctggtcgccaagagatctagctgatcagcaaggccatgatgacattcaggctctcttcaaatcacgaaaagcacacaggaagcatgcctcaaatggcagagtggcacctatgctgatagggagattcaacagtgagccctcgatgccagatatgagccatgaaaacgccagagtacgcagcgaagttgttccgcagaagctcctccgaaagagggtgagtttccagaattctcttttcggcgtcatctcttcgtcccacgcccaccaggacaccggccgtctgctctcgaaaggcctcgctggaacagagggtccaaattgccgtcacgactccctcatcagggtgacaatcagctgccccgagaagggggggaacgccgcagggaagctcgtgcgcctaccgcggtcgatggccgagcttctcgaactaggtgcaaagaagttcggcatcaagcctggcaaggtcctgacagttgggggtgctgagattgatgaggtggagcttatcagagacggtgatcatattcttctcgtcagtgatgaatgggtgccagatgttgagcaaattaggccttaacaataagtgagccagctgtggtgctcttattgcaatttgacatgatatggggaaacatgcccctgtgaccctgtgtgcatcagtgcatgtcccccatttaaactgaagtgtagcttatgatggttttgaagctgtaggatgtatccagcttggaaatgaatttgtagtcagctggtctgtatgtagtttcgtcatctctttccatgggaagggattcacaaaatgtaattacatgatttcttttttttcctgtctttagatcaagctttctctggaagtgagaaatattcgtgagtcatgaattttgagatattgatcctatcagttcattttagttgct

SEQ ID NO: 176 - DNA, 1049 bp, Zea mays
  unsure (1)..(1049): unsure at all n locations
  Clone ID: TF_ZmC353_2
gcacgagtgaaactgacacatctctagctccctttaacatgtggagattcagaaatctcggtgtatttgccatggagcgggagtggtgtgccgtgatcaaaatgctgttagatttcttatttattggccttgttgatgtgggatctcggtctgcagaagagatggtgctttcagaaaatctgttgcatgctgctgtacggaggaagtctgttaacatggttagatttctgctgagatacaaaccaaataaaaactcgaagggaactgcacaggcatacttatttagacctgatgctctgggcccttcaaagattacccccctccatatagcagctgccactagtgatgcagaggatgtgttggacgcgcttacccatgatcctggactgattggaattagtgcttggagcaatgcacgggacgaaacaggttttaccccagaagactatgctcggcagagaggcaatggcgcttacctgaatctggtccaaaagaagattgataagcatcttggcgaaggccacgttgtcctcggtgttccgagcagtatatgccctgtaataaccgatggcgttaagcctggcgatgttagcctcgagatatgcagggcaatgtctgcatcagtgccaggttgcctcctctgcagccgtcaggcacggatgcatccaagttctacggcaaggaccttcctttataggccagcaatgttaactgtgatgggagtcgctgtggtttgtgtctgcgtgggcatactcctccacacctttcccagggtttatgccgcgcccacattcagatgggagctgctggagcgtggacccatgtaaattttaggatgaaataaacctagcagttttgtaacttgagagctctagcgcaaaggaacataattaccgtgtgaagaagttcctttgcatttgcagcaagatccggttgctgttgtaagcttatatatcgtcaatatcaactatatttacagcctaacatgcttcgattccattcaacctctttattgcaccatttgtttcttccttgcggttaaanngagg

SEQ ID NO: 177 - DNA, 331 bp, Zea mays
  Clone ID: TF_jC-zmX700157144b1
gacccccgcgcgggccccggcccggaatcccgggggcgacaccacgcgcgcgttctcgctccacatggggaagcaggaggcggagctgacactgcggggcaacagcgccgcctcctatggcgaactgaccagctgtaaagcctgatccgggcagtggctgatggcaaagacaccggctacaacgaccgttccgctctgcatttcgcgggttgctgaaggtacgagggcgtcgcgcaggttctgataaaccaaggcgtggacatggaccataccgaccagttatggaacacgccattgctggaggcggcgaagcaagggcaccaacgggggg

SEQ ID NO: 178 - DNA, 297 bp, Zea mays
  Clone ID: TF_700614359H1
ggaaatacccccctacaccttgcctgtgagcagggctgcctggccagcgtgggagtcctgactcagtcctgcaccaccccgcacctccactccatcctgaaggctaccaactacaatggccacacgtgtctacacttagcctctatccatggctacctgggcatcgtggagcttttggtgtccttgggtgctgatgtcaatgctcaggagccctgtaatggccggactgcccttcacctcgcagtggacctgcaaaatcctgacctggtgtcactcctgttgaagtgtggggctgat

SEQ ID NO: 179 - DNA, 507 bp, Zea mays
  Clone ID: TF_LIB4171-014-R1-L1-H4
aattcggcacgaggtttctccttgttttgggtcaccatcgactgcgcatgcagacggcgctgatgcaggcgtgccggttcggccactgggaggtggttcagacgctgctgctgttcagatgcaacgtgagtagctagctagcgccatcccttgttttcccagcgcagtgcaagtgcaaccgaccgacgggcgatggtggttatctgtttcgattcaaggtgtccaaggcggacagcctgagcggcaggacggcgctgcacgtggcggcggcgggcggccacgtcaggtgcgcgcgcctgctgctcgcgggcgccggcagcggcaggagcaagctcgtgaaccgggcggccagcggcggcggcggcggcgtgacggcgctgcacctggcggcgctgcacgggcacgccgactgcgtgcacctgctggtggacgagcgcgccgacgtcgccgcgcgcacgctgccctgcgccgcgccgtccatggcgtgcggcggcgccgggagcgcgc

SEQ ID NO: 180 - DNA, 1445 bp, Zea mays
  Clone ID: TF_ZmC17166_2
ggggtactcttgcggccgtccggattacattcattgggtacctcgaggccggccgggccggggacttcgacacgggccctaccagtttcggagtgccccagtctcccacccccagctccaccaagtcaccgcaccgccgcatctaggtcaccgcctcgccggcgtttcgccatggccggggactggcaggacctgggccaagcggcggccataggcctcctcttcgccttcctgctcgccaagctcatctccaccgtgatcgccttcaaggaggacaacctccgcatcacgcgctcccctccgtcctcccccacagccgccgccccagctcccgcgacgtctcccctcccctcccaacacgacgccgcaatcggaagcggcagtgacagcgattgggagggcgtggagagcaccgagctggacgaggagttcagcgccgcctccgccttcgtcgcggcctccgccgcctccggcaccagcgtccccgaggaggcgcagctgcgcctctacggcctctacaagatcgccaccgagggaccatgcaccgggccgcagccgtccgcgctcaagctcaaggcccgtgccaaatggaatgcttggcataagctgggtgctatgcctacggaagaagctatgcaagaatacatcacaattgttcaggagctattccctaactgggatgcaggtacaagtgcgaaaaggaaagatgaagaaagcattacttctgcatcagcttcgaaggggcccatgggacctgtgtttagcagtttgatgtatgaggaagacgaagggaatgattcagaacttgctgacatccatgttttagcgagggaaggagcaactgaggatatagtgaagtttctggcagcgggtgtgggaagtcaacatgagagatactgaaggtagaagtccgttgcactgggctgttgatcgtggccatcttagtgctgtcgaggttcttgcaaatgcaaatgcagatctgaatgctaaggacaatgaagggcaaacggcactccactatgctgctgtttgtgaaagagaagacattgcagagttgcttgtcaagcatcatgctgatcttcggatcacggacgaggacgggaacacggcacatgacttgtgcccttcgagagctggtcttttatgaaccaggcaaactgataacacgaatatacggatatgcttgaaggtgtcatctgccaagaaacatgctagctgtatcctaaagcccatacggcacatatggtgtatcttagtgtcatgtgtgacgtgtgggaaatcaggcaggttgtttgcgtacgtggtgccctctctgaaatcagatgagttgttttatcgtcctcatcgaaccagttgtcaaaggatagtattagtgttgggaagatacatgtattgctttaatcaaaagaatcatgctggacaccaaaaaaaaaaaaaaagcggcc

SEQ ID NO: 181 - DNA, 576 bp, Zea mays
  Clone ID: TF_ZmC2253_1
attggttgagcttttagtggaacaaggagcggcggttaatatgcaaaatttcgttggagagacggcactctttattgcttcttctttgggattaaatttgatttgcctcttcttgcttgagaatggaggtgacacaagaatatctaccttagaaggatcatcacctcttcacgctgcatcagcatgtggtcatctttctgtcattaaatcccttgtttcacatggtgcctttgtgaattctacggacgaagaaggagatacgcctcttcattatgctgttagagaagggaagaaagaagcagttggattacttgttcaattaggtgctcaattgatcaagaatgaggatttggaatctccattggatttggccgaagaattcgatgagacttggatggttgatttgctttcaaatcatttcccttcccttagatctgactccgaacatggcttctgtttctaaaaaaaatacgtttatataatgaggagagggggaacacgagttgtccgaaaggagtcctcgttgtgtagctttcagcaattcactattagctatattaaagttttccttcactc

SEQ ID NO: 182 - DNA, 1404 bp, Zea mays
  Clone ID: TF_ZmC54251_2
ccgggctgtacgtcgccgccgagaagggccacgcggaggtcgtgcgcgagatcctaaggtctgtggcgtgcagacggccggcatcaaggccagcaatagtttcgacgcgttccacatcgccgccaagcagggccaccttgaagttctgaaggagatgctgcaggctcttcctgctcttgctatgacaacaaattctgtaaacgctacggccctggacaccgccgcgattcagggccatgttgacatcgtcaatctcctgctggaaaccgatgctagcctcgccaggatcacgaggaacaacgggaaaacggttttacactcagcagcaagaatgggccacgtggaagttgtaagatcgttgctgaataaggatcccaggattggtttgaggacagacaagaaggggcaaactgcgctgcatatggcttcgaaagcgcagaatgctgagatcgtggtcgagttgttgaagccagatgtctcggtcatccatatcgaagacaacaaggggaacaggcccttgcatgttgctactcggaaggggaatatcattatagtgcagactctgttatcagttgaggggatcgatgtcaatgcagttaacaggtctggagagactgcatttgccattgccgagaaaatggacagtgtagaactcgtgaacatcctgaaagaggctggtggagaagccgcaaagcagcacaagtacatcctccgaattcggcgaagcagctgaaggaaacagtcagcgatatcagacacgacgtccagtcccagttcaagcaaacacgtcagaccaagatgcaagtcaaccagatcaagaagaggctggagaagctccacatcggcgggctgaacaacgccatcaactccaacaccgtcgtcgcggtgctcatcgccacggtcgccttcgccgccatattcacggtcccgggaaacttcgtggaggagctgagccaggcgcctccgggcatgtccctggggcaggcgtacgtggcgagcaacccggcgttcatcgtcttcctggtcttcgacgcgctggccctcttcatctcgctcgcggtggtcgtggtgcagacctcgctgatcgtggtggagcggggggcgaagaagcggatggtgttcgtgatgaacaagctcatgtggctggcgtgcctcttcatctcggtggccttcatcgcgctgacctacgtggtggtggggcgcgacgactggtggctggcctggtgcaccatgggcatcggcgccgcgatcatgctcaccaccctcggctccatgtgctactgcatcgtcgcgcacaggcagtgctttgtttcgccagaggctgctccatggcatgcggcaccacatcagtcttcttcaaccaaagggactggaggccctcccggccggcctcgaggtacccaa

SEQ ID NO: 183 - DNA, 1047 bp, Zea mays
  Clone ID: TF_ZmC36749_1
gcactaacctaacccaggaattctgtttctcgtatcacactttccatcggagaaccaaagcttagcttatgagatgttagtcacaatggttaaataaacccaacaagggcaaaattctagcagggtcaaatctgattctgtagagagcccctttgtttacacaccagaacaagctttaacacctcgactcagcacagtttctcgtatcacactttccatcgtctttgagcagagcaccagatcatccttcgagcattgccttggctgcatcgatgagtgcaggtctgaagctgttcgatgctcggccaagggcagtgtagccttccttgtcctcgacatcaacatcagcaccatgtctaattagcagaagagcaacccctttgttctcacatataacagcatgcgtaagaggtgtttgtcctgtcttgtcaacagcatcaacttcagcaccttcctcaatgaggaattcacacagctccgcgtttccagtgcttgcagctctatgcaaaggtgtgcagccaaacttgtctttcttgttgacattagcaccatgggctattagtttttcagctatgttaagcctccctttactcgcagcataatgaagagcagttcgaccaccatcagtaaccaggttaacatcagcacctcgctcaagcaggatgtcgacgatttgagagttgccggagctcgcggcggagtggatcggcgcccacccctcctcgtcctgcgcattcagcacgctagccgcggcgtcaccaccgcactgggcaagcgcgagcaccacctggggatgcccggcagcggcggcgacgtggaggagggagcggccgtcctcgttgcgcagggagaggtcggcgggggcgagggaggcgaacgcggcggcgtcgccggactcagcggcgcggaagagctccttctctgacggtcgcctctcctcgccgccggcttcgtcgacgtccatcgctgcagccatccggactccggaggtactcgtacttcgagttgtggctagagactagagttgacgcgtctttccccggccgg

SEQ ID NO: 184 - DNA, 787 bp, Zea mays
  Clone ID: TF_LIB4756-028-Q1-K1-G7
cggaccgaggctagccccagtgactgcgtctcctgcgtccgaatacggacaaatacggatatccagcacgcccgaaagccggccaccgtcagacaagcgcagcaaagccagccagcccaccatggcgctaccgccgccaaccattgacctgttgctcaacctcatcgacacccgcccgcagtccatcctcacgtcgctggcgcagcatccacaggtgtcctcggcgcgtgatgctcatggctactctctggtccatgctgccgcctcctacaaccaactcgccgtgctgcgcgacctgattcaaaaattcaatgccgacgtcaacattctagacgaggacggcgagacgcccctcttcgcagccgaaaaaatcgaagtcgcaaaatgcctggtcgaggagctgggtgcagacactagcatacgcaatggcgatggtcaaacggccgaagacaagattggcgaggaagaaggcgaggcacacggagtataccagtacctgaggagtcggagaactggttctgagccaataccagcgggtcttgtagaaactgagagtgtacaccccccgccaccattacccggtggtgtcaaggtcaatatgggcactatggaagaagatgccgctgaggcaccagatccggagatacggcggcggattgaagagttggcggcgagagacgactacaactctgaggaggtgcagagtcaactgagggagctggtgcaagacgttgtcagtggcattggaggtgaggatggaggaagaagcgtaaagagaagggtcgac

SEQ ID NO: 185 - DNA, 680 bp, Zea mays
  Clone ID: TF_LIB5117-063-A1-PF1-D9
acttttcaccacctcattctgcgccccaccccagtccaccaccgccgaacctctctccatctccgcggggctctccggcgcaccccctcgtgcctcggggaccccgatccgccgcccacaccacgatcgtttcatccatcacacccctctcccggacgcccctgctcgtgactcgcgcctgagcgaaagggaacaccagctagcttggcagctcgcttgatggaggaggagctgagtcagatggagcccggcgcgaaggtgacgctgcagcggcaggcgtcgtcggggtccctgacgcagggcccgtcgggggagctccggcggcagacgtcgctggagtcgtccccccgctcggggcgcggcgggaaccggcacctgttcgggcggcagtcgtccatggaccccaaccggcggcgcggccggagccagagccccgtgggctcccaggccgaccaggacctcgccgtgccggacaacctcgactccaccatgcagctgctcttcctcgcctgccagggcgacgcgcccggcgtcgaggcactgctccgcggcggcgtcgacgtcaacagcatcaacctcgacggccgcaccgcgctgcacgtcgccgcctgcgagggccaccgcgaggtcgtcagcgtgctgctcgactgggaggccaacatcgacgcccgcgaccgatg

SEQ ID NO: 186 - DNA, 2653 bp, Zea mays
  Clone ID: TF_LIB3689-243-D10_FLI
gcggcgaggcatgcatggcggcgacgacggctaaaccatagcgagacagctcggggtcacggtgttggaacctgtcgtgcgcgcgtgtcgcagatgtgcattgcagatgttcgttcaccagcgaacctgcagctgccgaatctacagagaccataggtgagcaacgacgtagggaaatagggctggcgggggcacgtgggtaacttggtcctggagcattggagaaggagcataccacaaggaaaccaacacggtcagtcaaaaccaaatctagataatcatcatgctacttctatgttttatgtctgtttttgtctgctatgaagtgttcatgcaagtgttatcaagtgttcatccatgccaagatggttactaagcgaacacacgcaacatgagtggtctccatctgatcttgcttcattttgatttattatctctgaggagtgtgtgagttttaatggctttgacggagaaggctattaattggccccttttttggagtgactgtagcaaccacttctaattcattttctaccgcgacaactggcgttgcaaggaatttatttcactagtatgcaacagatggccatgccatcgttcgccataacctcacctccgtcgcatggcactaccttatgggcgcctcatgcttgtcgtcctcaaagactgcacaagagacacgtgcgcagccaagtccgggcagtggcacaagcacagctgcagtaccagaagctaggggactcagacctcctcatcagtgaggtcactcttggaacgatgacttttggcgagcaaaacacggagaaggaagcacatgacattatcgcttattctttcgatcaagtgatcggatatacttctccattttcccttttggcctttagtacccagttccaatgaacaaggaaactcaagggagaactgatctttatattggcaggtggatgcaatcaaaaccacgagacaagggttatgttgtgtaccttgtctgtgtgaggcgtggtggtaggaagaggcctttgcccaagtgtattatctatggctagcccaagcaccagggtatcacccaactcaagttctagaggtacaagaggtctctcgctgatgagagagctagacgcaagcttggtggactgagggttcttaactcctactgggtgaacgaggtggagctgctatttatggagaggagcgttgatagccattgtcctgggatggtagtccgcatggctgaacgagcactctgccatcaataaactcattagcaaggtggtttggagagcctgtaagggctgctattctgcaaaccgaggcttttcttacaaatgcaaaaggatatccttgtttatcaaagcgccatcagagtctgctaactggattttttaaacattctgttcaggtgataatatatggaagatcaaatcacaatgttttcccagtatctgaatgagtgctctcaggtgatgagagctacgcagaagattcccgtgttcgacatgcattaactccttaccttgaatacattgcgtacctatatcagaagatggatccgcttcctgagcaggaacgcattgagattaattacagggactttttgcagtctcctctgcagcctctaatggacaatttggaagctcaaacttatgagacatttgagaaggatgttgtgaagtacactcagccggagaattttcaaagtaaaatgttcggtgaacaggatgcagaaaaagttaaaagctgcaacgataaggcaaaaaaaatgttcccaaaggtgccctcaaagatcagcttcaacatagttctgagccaattactgaaaacaatgatgatatcacgcaattgttgtttgccgtcattgtaggttcttcctttccatgcttgaagattctaatccagacaggtgcaaacccaaatatgagagctggtggagcaaccccattacatgttgccgtagggagcgcaagtattgaagtaatcagactcctactagaagctggagctgaccctaacacctgcagtgatgatggactaaagccaatacaggttgctgctttgagaaataaccgtgaagttgtggaacttcttttagcattaactatcccatttctaagtgtgtcaaattagagttttgatggaatcacagaatacatgttgtctaaagctgctgtgggagagtcacaagtaaatgaagttacatctctaaattcagccagtttagccggaccacaatctgctggggtgtcatatagcgcaaaaaagagattcgatggaagctaatttgagaggtcatgatgcctataaaaatgaaaattacattggagcggtggatgcttacacacaggccattgacttggattctagcaatgccacactctggtcaaacagaagtctttgctggttgctgcttgggatggctgaaactgccttggaggatgcaaagcaatctcgaacattgagacaagattcagtgatagcttgctacagggaagggatgctgttgaggagggaatgaagtcgcaagccaaacctaaccagtcttccaccgcagccaggagtcttttcgacccaaatttgatgtgatgatgatgtgacaaatgattgagtgttttgcaccagaatccaaaacagttgcaacacaatttgttttttaggg

SEQ ID NO: 187 - DNA, 2631 bp, Zea mays
  Clone ID: TF_ZmC14231_3
gcggcgaggcatgcatggcggcgtcgacggctaaactctagcgaggcctctcggggtcacggtgttggagcctgtcgagcgcgcgtgtcgcagatgtgcattgcagatgttcgttcaccagcgaacctgcagctgccgaatctacagagaccataggtgagcaacgacgtagggaaatagggctggcgggggcacgtgggtaacttggtcctggagcattggagaaggagcataccacaaggaaaccaacacggtcagtcaaaaccaaatccagataatcatcatgctacttctatgttttatgtctgtttttgtctgctatgaagtgttcatgcaagtgttatcaagtgttcatccatgccaagatggttactaagcgaacacacgcaacatgagtggtctccatctgatcttgcttcattttgatttattatctctgaggagtgtgtgagttttaatggctttgacggagaaggctattaattggccccttttttggagtgactgtagcaaccacttctaattcattttctaccgcgacaactggcgttgcaaggaatttatttcactagtatgaacagatggccatgccatcgttcgccataacctcacctccgtcgcatggcactaccttatgggcgcctcatgcttgtcgtcctcaaagactgcacaagagacacgtgcgcagccaagtccgggcagtggcacaagcacagctgcagtaccagaagctaggggactcagacctcctcatcagtgaggtcactcttggaacgatgacttttggcgagcaaaacacggagaaggaagcacatgacattatcgcttattctttcgatcaagtacccagttccaatgaacaaggaaactcaagggagaactgatctttatattggcaggtggatgcaatcaaaaccacgagacaaggtggagctgctatttatggagaggagcgttgatagccattgtcctgggatggtagtccgcatggctgaacgagcactctgccatcaataaactcattagcaaggtggtttggagagcctgtaagggctgctattctgcaaaccgaggcttttcttacaaatgcaaaaggatatccttgtttatcaaagcgccatcagagtctgctaactggattttttaaacattctgttcaggtgataatatatggaagatcaaatcacaatgttttcccagtatctgaatgagtgctctcaggtgatgagagctacgcagaagattcccgtgttcgacatgcattaactccttaccttgaatacattgcgtacctatatcagaagatggatccgcttcctgagcaggaacgcattgagattaattacagggactttttgcagtctcctctgcagcctctaatggacaatttggaagctcaaacttatgagacatttgagaaggatgttgtgaagtacactcaggacagccggagaattttcaaagtaaaatgttcggtgaacaggatgcagaaaaagttaaaagctgcaacgataaggcaaaaaaaatgttcccaaaggtgccctcaaagatcagcttcaacatagttctgagccaattactgaaaacaatgatgatatcacgcaattgttgtttgccgtcattgtaggttcttcctttccatgcttgaagattctaatccagacaggtgcaaacccaaatatgagagctggtggagcaaccccattacatgttgccgtagggagcgcaagtattgaagtaatcagactcctactagaagctggagctgaccctaacacctgcagtgatgatggactaaagccaatacaggttgctgctttgagaaataaccgtgaagttgtggaacttcttttagcattaactatcccatttctaagtgtgtcaaattagagttttgatggaatcacagaatacatgttgtctaaagctgctgtgggagagtcacaagtaaatgaagttacatctctaaattcagccagtttagccggaccacaatctgctggggtgtcatatagcgcaaaaaagagattcgatggaagctaatttgagaggtcatgatgcctataaaaatgaaaattacattggagcggtggatgcttacacacaggccattgacttggattctagcaatgccacactctggtcaaacagaagtctttgctggttgctgcttgggatggctgaaactgccttggaggatgcaaagcaatctcgaacattgagacaagattcagtgatagcttgctacagggaagggatgctgttgaggagggaatgaagtcgcaagccaaacctaaccagtcttccaccgcagccaggagtcttttcgacccaaatttgatgtgatgatgatgtgacaaatgattgagtgttttgcaccagaatccaaaacagttgcaacacaatttgttttttagggaaagtgctaaactgtaatttgataaattgtgatgttttgccacgtttgatgatataggtctggggcttcacgaccagtaggttaagcgcataggatagatgcactgtttggtgctggtttatcatatctactaatagcgaaatatctctgcaccatgagctctcgaacctggttccaaaggacgcgtgggtggatcttgagcttgatctccc

SEQ ID NO: 188 - DNA, 2785 bp, Zea mays
  Clone ID: TF_ZmC6144_2
tgggaccctcgaggccggccggtttcagtccaacggttctaaaaaaaaaattcaaggtttgtcttcggtgttgcagacgtgttcttcccacgcatgcttttaatctttttaaaatctccatttgcgtaagctcagtctgcagtttacaaatgctttgagtcctgcgctcctgtcctgctgttcttgtctagcagtaaacaagtcatttcctttgttgtcacatggtggctcgccgagtgctggtgcacacattctctcctcgttccaccttgctgctgctgctgcagttcttggcacggccttgtattgtatgaatatgattgtatcacatgccatgtgactatgtgagtagctgaccacggctcactgcgaggcgcacaggtacagcagcgcaggcgcagcggcagcccgccgctggatctctcccgaggctccggcgatggagcggtcctgctacttcccgctgcggtgggagagcacgggcgaccagtggtggtacgcgtcgccgatagactgggcggcggccgacggccactacgacatcgtccgccagctgctgcacctcgaccccaacctgctcatcaagctcacctccctccgccggatccgccgcctcgaggcgctgtgggacgacgacgcccgcttcgccgacgcggcccggaaccgcgcgtccgtcgctcgcagcctgctgctggagtgcgagtgcaggaaccaccgccccgccgcccccggcgccggggagaacacgctgctccgggccgggtacggcggctgggtgctctacgcggcggcgtcggccggggacgccgcgttcgtgcgggagctgctggagagggacccgctgctcgtgttcggcgagggcgagtacggcgtcacggacatgttctacgcggcagccaggggcgggagcgcggacgtgttcaggctgctgctcgaccacgccatgtcgccgaggtgctcgacgagttgccggaacggcgaagccagcgccaggcgcagctccgtgttccggcttgagatgatgagccgggccgtccacgccgcggcgaggggcgggagcgtggagatgctcagggagctgctcgaggagtccagcgtgtcgacgtatctcgacatccgtggatccaccgtgctgcatgccgccgctgggagagggcagctgcaggttgtcaagtaccttgtggcctctttcgacataatcaattcgactgataatcacgggaacacagcgctgcatgtagcggcctaccgagggcaccaacctgtcgtggaagccttggttgctgcgtctccatcaaccttgtcagttgtcaacaacgccggtgacacgtttctccactcggcagttacaggattcaggaccccaggattccgacggctcgaccgccagttggagctgatgaggtacctcatacgcgagagaaccgcggatatccagaagatcatcaacctgagaaacgacgcgggccttacagctcttcacctggctgtggttggctgcgcacacccggatctcgtcgagctactgatggccaccccgtccatcgacctgaacgctgaagacgctaatggcatgaccgcgctggcgctgctgaagcagcagctgcgctcagcgacgtccgaccggctcatcaagcagatcgtctctgccggaggggtcttgaactccagcatcctgagaacccggtcagccatcgcttctcagatcaagatgcagggcgggatcgcgagcagccccggcaccactttcaaggtatcggatgcggagatattcctgttctccggcatgggagcggcggagtctctgaggccaagctcctgctccagcaacgggaaggatgatgaccctactcacgcagacgcagactgcgccgagaaccgtggatcgtcggagaagaggctgagctccgcgagccgggccaaagaccgcctcaagatgatgctgagatggcctcgccacaaggacaagacgcccaagaagtcagaggacagcagcccgctggggtcgatcagcaggctgaacgagcacggggccgagacccctgctccgctgaggcagaagtttaccaagacgacggcgctcaacggcaagcggaccctagcggtgaagagctccaccccgagctcctcatccaccaagaagaagctcaacacgaagctcatccacggcatcatggaggccatgccacagctggcgccatctacggcgcggtccgcgtccccgacggacactttcctgaggtcctcggtatcgtccacgccgcagccgctggcgaagctgaaggacatctgcctcgacgacgagatctccatggtgacgccgcccgccggcaggctgaaggatagtgacgacgccatggaggacccctcgtgctccaacaactcgtccatggacgacggctgtggcgccgggacggcagagagcgcggcccggaagcacgggtgcggcaacgggaggctcatcaacatctgctttggcgcgcagggcctcaccgtggaggactcggcgagcgggcagcagacgagcaagatgttcaagcagcagtgcctcagggtgtcctgattgacggcgtggtgtctcgactacaacagcgtggtgtgattggtttggtgtctcgcgtgcagctatgtgtgcttgtttgctttgctccttgcacagccagcggtgaactggtgatccaatgaacttgtgcttgtgttaactgtgacgttgacgaatccacagctctttaacttcctcagtgtcaggtcgtgcattcttcaaacaaatccccgttgatcaatc

SEQ ID NO: 189 - DNA, 751 bp, Zea mays
  unsure (1)..(751): unsure at all n locations
  Clone ID: TF_ZmC621414_1
attcggctcgagcaagagcagcacgcatctttcttgtgattgattttaaaagcagcagacagaagagccttaactctcttcttccccaccggaaaccaccacccacctcccctcctcgatgggccacgtcctcagctgcagccgcgacggcgctgacttgttccgcgcggtgcagcacggcgacctggacgccctcctcgccgtcgacccggagctcgcccgccgcgccaccaccatatacgaccgtctgtccctgctccacatcgccgccgccaatggccagctgcaggtgctctccatgttgttgttcgatgacggtggcgccggcgggaacgtggacgtgctgaaccggaagaagcagaccccgttgatgctggcggccatgcacggcaggacggactgcgtgctcagcctgctagacgccggagcaaatatcctcatgttcgactcggtacacgcgcggacatgcctccaccacgcggcctactacggccatgcccactgcctccaagccatcctctcggccgccaagaccacgccggtggccgactcatggggcttcgcgcgcttcgtgaacgtgagggacgagcacggcgccacgccgctgcacctggcggcaaggcaggggcggncgcagtgcgtccgccacctgctccacgccggcgccatcgtctccgccccaacagcctcctacggcttccccggcagcacggcgttgcacctggctgcacgccgcggcaaactggactgc

SEQ ID NO: 190 - DNA, 1860 bp, Zea mays
  Clone ID: TF_ZmC35644_1
cattgggaccctcgaggccggccggggttttctaacgcaagcagcagtgacgccgcgctacccgaccaaaatccgccgccggtgcccagaactcgacgggaaaaccggggctttggtcgccggacgccggctgcctcgagatgctcgtgtgggcggccaccgcgtcaccacccagcactccatccgccgtgccatttgctcctccccaccgcgccgccgctccccgccctccaccgcctctctgccgctcgctcccggggctgctgtgcgcgggcctcatccctccgccgcgcgccgccgcttctgacggcgacgtcttctgggaggagccagacgacggctccgggagcgactacgaggacgacggcccggagcaaaggagggccttgcgtttcccatcttcctcgccgtcctccaggctcgaggcgtcggcgcagcaagaacaggacctccggagagagatcgagcttctcctaacgcctgaagaaaaggctactttggaccagcatgagacccctgacgtcactagaatatcatcacccaagtggcacccacttcatagctacgcgttggcactgcagatacccctcatggacaagcttctggacagcggtgttgacatcaacttagttgatagagatggcttcacctctcttcacaaggctgtcatagggaaaaaagaggctgtcattagccatctcctaagaaaaggggcaaatccccatgttagagatagggatggagccacaccattacattatgctgttcaagctggtgccctgcaaaccgtgaagttactgattaagtacaaggttgatgtcaatgttgccgataatgatggatggacaccactccatttagccatacagagtaggaatagagatatagctaaggtcttgcttgtcaatggtgcggataagacaagaagaaccaaggatgggaggactgcgctggatctaagtctatgctttggaagggatttcaagtcatatgatcttgcaaagcttgtcaagcttattccagcaaacagaggtgcgtgatttcgctctgccatgaatctgagggaaagaaagtccaaaagttagccaatgcagcagcctcatacgacccatgcatagcttatgaagaagggtccaggagccgcgtgccgccgtgccagtcatcattcattttttttttcttgaccgccaactcaaacgatctgacagattgctctacaattgtgccgttagatttcagtgtccatggtctgtagcctgttcgccgtgactcgaaaaatgatgatgtacatgcaacagtcctccagctgttgtgttcagttgttttgttcaatataggccagggccaccaaaacaagatctgaattgtgacagttagaacccttcaaaagaggactgcgctggatcgaagtctaggctttggaagggatttcaagtcatatgatcttgcaaagcttgtcaagcttattccagcaaatagaggagcgtgatttcgctctgccatgaatctgagggaaagaaagtccaaaatatacgacccatgcatagcttatgaagaagggtccaggagccgcgtgccgccgtgccgatcatcattcctccgttttcttcgccgccaactcgtatttcttgaccgtcagctcaaacaatctgacagattgctctacaattgcgccgttagatttcattgtccatggtctgtagcctgttcgacgtgactcgaaaaatgaacctatggatgtacatgcaacagtcttccagctgttgtgtgcatttgttttgttcaatatgggcctgggccaccaaaacaagatctgaattgtaactgttattatctgaattgtaactgttattaaccttc

SEQ ID NO: 191 - DNA, 630 bp, Zea mays
  unsure (1)..(630): unsure at all n locations
  Clone ID: TF_ZmC5306_3
acaccccttcatcactgcattctgaaaggaagacatcggcatgcanagcttctcctctccagaggtgctgattcacaagccatggatcgagatggtaggacagcattacagtatgcaatcaatggcggaacaagtgacgaagacattcttgcgttattacaggatcatagtagataatcttgcaaccaataccttcagtaaatcgaggcactcttggtgtggtcgactcaactaacaaggcaccagccccgccaggccccagcttgtcgtgcagacaatcctaaatttatggcatgaaagcaacctatgtacatgtcgttatagggcttcagtatcatgacgcgcctgttgtttcttcccccaccttgtgcttgtttaggataagtcatccatatttagtcatctggcaaacggtttggttttgtttgctgcaggtgatgcatagtaagcctgtaaatggagttatttctctttattttctagtcatcttccgtcacgaagtagatttggcattctgatgaaagatgattgtacatatcgagatgtgtgatgttggggacttgttctcaaatgctatgaattaagaacgaggcaacataaaatgttaaatgattttgtccttcgtccgtg

SEQ ID NO: 192 - DNA, 725 bp, Zea mays
  unsure (1)..(725): unsure at all n locations
  Clone ID: TF_ZmC154413_1
aattcggcacgagggccgaggctcggcagagcttgtggaagcgcctgtggcttaccaagagaatgtagatatattagataaggatgaagacccacctatagtatttgctttggctgctggctctccacgatgtgttcgtgcacttgtaggcaggtctgctagtatcaattctaggcttagagaaggcctgggtcctactcttgcccatgtctgtgctcatcatggtcaaccagagtgcatgcaagagctgctgatggctggagctgatcccaacgcagtagatggtgaaggtgaatctgtcctgcatattgccgtggccaggagatatactgattgtgctattgctatacttgaaaatggaggctgcagatcgatgggcatatcaaattctcaacataaaacgccattgcatttatgtgttgagacatggaacacagctgtggtaagaagatgggttgaagttgcatctctagaggatatagcagaagcaattgatgtacccagccctgttggtacagctttatgcatggcagcagctcttaaaaaggagcacgagaaagagggtcgagaggtagtaagaatattgcttgctgctggtgctgatcctacagcacaagatgatccacactgtagaactgcattacatactgcagncatgatcaatgacgtggagcttgntaagattatactggaaagcagagtcgatgttaatataagaaatgctc

SEQ ID NO: 193 - DNA, 2223 bp, Zea mays
  unsure (1)..(2223): unsure at all n locations
  Clone ID: TF_ZmC11952_1
cccgggtcgnacccacgncgtccgcgnaccattgcctcgaggccggccgggccgtccccgacccgaagcaccacgcattaaaatctgccccctcctgccactgccagcgaccaatccaatccctacctgcccgggaaccacccgtcgggctcctcccgccctcctcgccgcatctgcatgcggcggggatctccgggctcgctccgtcaccggagccccaatcaccgccacctcatccaagcccccgaatcccccgggcgcgcgcagcacaaccttgccgcgatcgcgcgcgggaaccgccgctgattgggtcgtgaaagctcgattttgggcgattttgattcggagaacccgccgtcattcgattttggcgcgcgttgcgagccgggatggggttgcagcagtccaaagaggaactgctgtaccagcaggtcaactacggcaacgtcgacgggattcgcacgctccgggggcaaggcgctggtctcgagtggattgacaaggaagggaagacgcccctgatgcttgcctgtatgcgtcccgatctgttcgacgtggccaaggtgctgatcgagttgggagctaatgtgaatgcctacaggcctgggtcacactgtgggacagcattgcaccatgctgccaagaaaggacttcagcagactgtccatttactactctcacatggagctaatccgttcataccaaacgatgattgcaatactgccctcgaattggcaagagaaaagggtcatgtgaatgttgtacgtgccatagagggacgactttgtcttttttgcggatggatgagagagaactatgctcctgcttttttggatgcaattgctccacagttcatgacaagaaaaattttgggcttgttgttttaccccgtgaagtgcgaactccaaccaggcctcttaagttagagatagctatatatcctgaattacaggcttctaaaccacgttctgtacttaaactatggaaatgtcaaattgagcaaccaaagcttaatcaggctgacccttccattatcatttttgacaaaggaacaaagactagatacaagatcttaccggcctatgaaggtgacaaacagcagcttcaatggttttataatgcatgttgtggcatggcacaggttttgaacacggctccagtagcaccagcaaatctccctatgccaaatccagcaccggcaatttcatctgtggcgccttcagaacaatctgcacccagcaaggaggatgttgaattagcaatggctatcaatgcctccattcaatcagctattgcagagggagtatcagtgcccaatgttcaaccaaatgcatccacccccaacaacaatggctgggctgcccctccaagtaattctcacaacggatggggaccaccagccactcctgcaccatcaaagacgagcggtcagtcccaggtccgggtagacgccccaagcagcagcacttacaatggatgggatgtgcccggaacaagctctagtcaaagttcatcgaaaccccaccaaacccaaaccaaccctcctccagtcttgattccacaggaagcacttcaggctctcccaaccccaaccgcgccaccatttgctgaagaaaccttctacaacggtcctgttcactatccatccatagactctacgcctgtcgatgtaaccatgccggctaccactggaggcggtagtacaacagtcatcgcaacggcagcacctacagaacagttagaaaatgaagctgatgcaagtgacagcggcaaaactccctctggtacttgcgttatatgtctggatgcccctgtggaaggcgcctgcatcccgtgcggccacatggctggttgcatgtcctgtttgaaggacatagaatccaagaagtggggatgccctatctgccgtgccacgattaaccaggttgttcgcctctatgctgtttgaggagttgaaacggtgggttcagaaagttggcaatggattggagggttctcgcaacaaatgttgatgggaacgtctctatctcaaaattgtgcaattatgctattttgcacttcgtactgcactacaaatatgacttccgtgtaatgtatgtgggctgacgcctttatgtacataggtagtactatacaagacaattttataaaaatctgggtattgttgcaagttgcaactcacgttcaaagttgcacgataaaaaaaaaagcggccacccccga

SEQ ID NO: 194 - DNA, 619 bp, Zea mays
  Clone ID: TF_ZmC16578_2
ggccggccgggagccccaggaggtacagtcccgttccagtcagagcgcagccagttcccccggcccctcccccctcccgctcgccggcggcgatggggcacggcgcgagctgcagccgcccaagcgaggaggtggacttcttcggcgcggcgcagtgcggggacacggcccgcctcgccgccgctcttcgctcccgccccaccttgctcgcccgcaccacgctcttcgaccgcctctccgcgctccacatcgccgccgcacacggccacctccaggtggtctccctagcattagatctttgcgtgcaccccgacgtcgttaaccgccacaagcagacggcattgatgctcgcggcgatgcacgggaagaccgactgcgtccggcggcttctcgacgccggcgccaatatcgtgatgttcgattcctcgcatcggcggacgtgcctgcactacgcggcctactacgggcacgcggactgcctccggaccatcctctcggcggccaagtccgcgccggtgtcggaatcctggttggcctttccgtcgccccggagacaccgccgtctcgccgccgccgctctttggccccttgctaatgcgttctcagctgtggaggtgca

SEQ ID NO: 195 - DNA, 1067 bp, Zea mays
  Clone ID: TF_ZmC1087_1
cattgggtacctcgaggccggccggggggccggttcaaagtccgttgctgtcgcagctacgtaccggaagcgctagaacaacgcgaccgccgccgccgccgccgacgactcagctactcgcctggtgatgggcgtcgaactggcgcaaccgaccgccgccgcggctgcggtgaccaccgctgagcaggctcaggatctcatcgacgccgctaggtacgacgacttggaggacgtcgtcgccctgttctccgctggtgtctcgctggactccacagattcgcaaggccgcacagctcttcacatggcttctgccaatggtcaccttgctgtggtggaatacttgattcaaaatggagcgaatgttaatgccaccaacatggagaagaacacaccactccactgggcatgccttaatggacgtatagaggtaatcagggctttgatctcagcgggggctagcgtgagtgctctgaacagccacgagaaaacgccaatggacgaagcggtgaccacaggcaagatggacgtgatcgacgcgatcggtgcggcagtagctcaagccgagctcgacgccgttactgtctcctaaaaggacctgatgagtacctggagctttgaatgacttgcagccttgttcttatctcccagcggttctgtctgtatcactcgcgaacctggatcccccgacgggccagtatccgggcaatatctatactgacggcaatcgcctgttagtgtcattggcacgaggacccgacctgtcgttgtaaaccagatgtgcagatgtcaaagatcaggattttctcctacaaaaaaaatagggccgttgcttgttctcccaggcaaccttcgttttagctttgggttcccttggctccctttgaatgacttgcagccttgttctcatctcccagcgtttctttctttatcactcgcaaacctggatcccccgactggccagtatccgggcaattacggcaaacgaagtagcagcgaaacgggatccgcacctccaccctctgtgtttttttttcttgttaaaaaaaaaaaaaggcaaccttcgtttc

SEQ ID NO: 196 - DNA, 886 bp, Zea mays
  Clone ID: TF_ZmC586314_1
atttcccgccctttttaccccccgcacattccagaagcttcttccctgccaccaccaccgccggcggcggcgaggatgggtacccgcgcccttccgctcccttgccaactcgagctcctcctcggcgaagaccgcggccggtggccgccggaggccaggttcatcgaggccgcccacctcggcgacgtccgccgcatcaaggagattgcgaaggagctggacgtgcgtgggcacgggatcccggtgacggtggccagcacgagctacatgggcatgaacgcactccacgccgccggcggccgcggcaggctgcccgcgtaccagtacctcgtcgaggaggtcaagatggacatcaacaagcccgacacctcccaggattattcacccgtggagcatgccgttacctatggcaaccttcctgccgtcaggtacctgcttgatcatggcgccgatctgcatcaacaacgttcaggaaacatcactcttcttcattcagctgcagctcgtgggcactctgaaatagtaaagtatcttctctctagaggagtggatattgatgcacaatcaattatagggacaccactcgcttttgctgctcagaaaggacatgctactgttgtgaagatacttttgcagcacaatgcagatcccaacaagggtactcttattcttggacctttagacatggcgttacacaaatctaatgtgtcttgtgcgaagctattgattcagggtggagctaatgtgagtggtgctggtccttgttataatcccttggtaacggctgcagagaagggcttaactgaagctatcaagtgcttgttagaagctggtgcaaatccaaatgttcttttgacaggtttggtagattgccaatagaattggc

SEQ ID NO: 197 - DNA, 815 bp, Zea mays
  Clone ID: TF_LIB4756-001-QB-K6-H8
gtcggccgggactactgcctcgacatcttatcgcagccttttgggcgccgccgtgaacaacagcatcgccctcttcaccgccctggggcctgtcaccttgtttccgttagcacttccgaaataccccgccaaacaagtcgacgaaacattcgcgcgtgtgccgtgtgcttgtgtgctgtgcccgacctgtcagccacccgcccttgtccagtcactgcaagcatccacgggattccttcaccatggctgaccaccacgacggagcctctcctcgagaacttgttctcgaagcctgccgacgcaacaacaccgagctcctcgaggaaacactggccgacctgaatgccgctgccaaaaagtcggacaagaagcctgccgactatgtcgcagacatactgaacaacgcgcgcgatggactcggcaacggctgccttcacattgctgccacctacggaagtttcgaggtcatcgacatgctgctcgaccaagaaggcctcgagattgacgaaatcgaccgcatggaacaggacacgcccctccacaaagccgtacgctacgtcaactcgctcgaaaaagacgtctggccccatggtcaatccattgtcgccatgctcctagacgcaggatgcgatcccagaatacggaataaggcgaagctcaagcccgtcgagctggttgacccacgaaacacggagctgaagagcatgctgcaaaagggcgagtttgccatccaggctggtggagacatcgtcgaggatgacgatgacggccatgcaggcagtgggagtgagagccgatgtagcaacaacattacg

SEQ ID NO: 198 - DNA, 363 bp, Zea mays
  Clone ID: TF_uC-zmrob73012e01b1
ttcgactgcgcatgcagacggcgctgatgggggcgtgtcggatcggccactgggaggtggctcagacgctgctgctgttcagatgcacacgtgtacaaggtggacagcctgagcggtaggacggtgctgcacgtggcggcggcgggcggccacgtcaggtgcgcgcgcctgctgctcgcgggcgccggcagcggcaggagcaagctcgggaaccgggcggccagcggcggaggcggcggtgtgacggctctgcacctggcggcgctgcacgggcactcctgctgagtgcacctgctggtggactagcgcgccttcgttgtctcgcgcacgctgtcctgtgccgtgccgaccatggcgttcgtc

SEQ ID NO: 199 - DNA, 4723 bp, Zea mays
  Clone ID: TF_ZmC6921_1
cttcatatagaggcactgcgatgcattttttatgtatttttaggcaacatgaaccttggacacatatttcatgttcttttttgcccttactaatattgtttacctggggatcaaatagaggcactgtgatgcattttaaatgtatttttaggcaacatgaaccttggacacatatttcatgttcttttttgcccttactaatattattttctccttagaagcagcctctccgcatttgtggggggatgcttgcctcggtttattccttccccagaccccactcatgtgggagctctggcactgggtctgcacttttatggtctataacaaagtcctctgaatgatgctaaagagagagtgaggtgcgtttgcgtttggaagcagtgccttcggccggggtcccaggacgtatgcctcgcccggagatcccgtacccgaccctcccctgataaacaaacgcaagcgtcagggagggagggagggacagagagaggtagagagggccggggcgaagggggcaaagatgcgttcttgaggagcctgtgcaggggaggtccaatccagaggccgccattccttttcttttccccccaacctctgcaggctcttcagatccagcaatccggcttgtttcttttgctggttgatttatactctatagtggttctctacttagcatcaagtcttggcatggcaatggcctcgtagctcgcggctctctaataggaataattttactcaaaatgaagctatagcgtcatgctatcttaggttgtttggacagttccttaggatactgaaactgtattagataatcaagatagtcttcattcaaacatttctccccagagctatacaattctaattacaaccgaactgtacttcccattaagaacaacaccaactgtaacgtgacgtatgcgactgagtccagatagcgtatggaagctcacctgttggcctgctatttcagatactgtgtgtgttcctgaaacttcatggagacttccatatctccaccaggcacatcaaagcagtcagctgtccgcaaaccttctcctggaggctctcttaaggatctgtgccttgtttccaaacaagggtcaatagctgaagtagaatctgctttggccttgttgaaaaaaagtggtgggaacattgatggtagaaatgcatttggtcttagtgccctccaccttgcaacatggagaaatcatctacccattgtgaggcgactcctagatgctggcgctgatccagatgcaagggatggagaatctggctggagtagcctgcatagagcacttcattttggtcacctatgtattgctggtgttcttttacagtttggtgcttccctcgctttggaggacactaagggccgtacacctgttgaccttatctcctgtccagtatcacaggccaatggagattttccagatgcagttgcaacggaagtcttcagttggggaagtgggacaaattatcagctgggaactggcaacgcccacatacaaaaactaccatgcaaagtagaagctttgcatggatcatatatcaaaacagttgctgcatcaaagtttcacagtgtagcagttagttctaatggtgaactatacacatggggatttggtcgaggtggtcgtcttggtcatccagatattcacagtggacagacaactgctgtgattacccctcgccaggtgacagtaggattaggccgtaaacgagttaatgctgtggctgcagccaaacatcatactgtgattgctacagagctgggggaattgtttacctggggatcaaatagagagggtcagcttgggtacccttctgttgatacccaaccaacaccaaggcgtgttggttcgctcaagcaaaggataatttcagtagctgctgcaaacaagcactccgctgcagttgctgatactggcgaagtattcacctggggttgcaataaggagggccaactaggatatggcacttcaaactcagcatcaaactgtatcccaagaatggtggagtacttgaaaggaaaagtacttagaggtgtttctgcagcaaagtatcatacaatagtgttaggagctgatggagaggtgttcacttggggccatcgccttgtcaccccacggcgtgtcgtagtagctcgatgccttaagaagggtggaaatacaaatctgaagtttcatcgtatggaacgacttcaagtgatttcagtggctgctggaacaacgcacaatactgctttaacagctgatggtgctcttttctactgggtttcatcagatcctgatctaaaatgccagcagatattttcaatgtgtggaaggaatattgtgaacatctcggctggaaagtactggaccgctgtggctacatcaactggtgatgttttcatgtgggatgcaaagaaacgtaaggacgaaacgccaattttcactcgggtgcatggtgttaagcgagcaacatttgtttgtgttggtgaaacgcacatgcttgtgctctcaagtatataccatcctgagtatccacccaagcctaaaagccaaggcttaaaatccatgttagaatggaacggtggaactcctccgctgggtgaagatatcctgtttgatgaggtatgaagcaacagtggtttatcaggaagcagtggtgaaatgagcaaaggtaggcctagcagcactagcggcggcgagaagcggccttggcgaatagtgactgatggcacacacacaccccctttaggctcacgctgattccttggaagctaaggagctcaagaagcattgtgaggatttagctattcgcaacctcgattacattttcacagtgggagcttcttcaattatgaatgcttcttctgaaattcttgtgaacttagagaaattgctagatgagaaatcctcagagccttggagtcagcaccgtcttcccacaatgacagctacctatcctgctgtcattgacagtgatgtagaggaagatgaagcaagagaattccccaagacccgtaaatgtgggaaatctgcatcaaggccatctgcgatgtctagtgatgacagcttccttcagaaagactgcaccgctgaacaagccgtctctaagcagatcagagcacttcgcaagaagctgcaacagattgagattctcgaggctaaacaacttgcaggtcatcagcttgacagtcagcaggtagcgaagctcgagtctagggctgcccttgaaggtgaacttgctgaacttggcattccctcagagatatactcaacttcctctgcttgtccagcagaaggtaggacaaacagaaaacctgaggtttctaagaaacagaagagaaagaacaagcagtcaacacagaccccgtcagtgaaaaatgagcctgggcaacaaatccccattacggaacttcaagttctacaagtcaatgtctctgctgaaaagggaggcgtatgccgctgatccaattaaacctatggaggctgccgcgttcagcaacacaaaggacaccgcttctccaccggagaagaaaccttcccaaccaactccatcaaagaagaagaacagaaaaggcggcctgtcgctgttcctgagcggcgctctcgacgacaccccaaaaccaagcctccctgcccccgctgtgcctgccacaccgaagcccgaaggacccgcctggggcggcgtgaagataaccaagggacccgcttcgcttcgagacatccagaccgagcagagcagaacaaacgagcccgcgtcggccaaggcgaaggaccgccacgagaactcgccggacagcgccggccgcgcgacaaggctctcctcgttcattcccgacgcgcgttccagcccagtagccgtcgtggcgcctgctcgcgcagcggcggcgccgccttcttccgaaggtgacaggagcacgccgccgtggtcgtcctctgccacctcgcccaacgtgtcgcagccttcgctcagggacatacaacagatgcagcagaagaggcaccatggcggcgtctcccacagccccaaaacccagacatcgggcttctctataccgccccacagcggagcgccagaggccgctggcggtggcggcgtgaaggacaacgtgcccaaccggtggttcaggccggagaccgacgccccgtcctccatccgctccatccagatcgaggagcaggctatgaaggacttcaggcgcttctacagcagcgtgaggatcgtcaagccgcaggtctagtagcactggcggcggcggcggtggcggccttggcggagagtgactgatggcacaacaaccccctttaggctcaccctcccatttgacactggctcgttgtacattcgagtgtacagttggttctgttcgccataggttccttgagctgaacaataaacaaacaccctttgctgctgttgctgctgctttcgcagtgagtggtctcgtttagttgtaacagaagattgtacaggccatgtgagatcaccaccccccggctttggcttaacagtttaacttgagccaatgcttcttttttttttttttggcgccaaaatgtctttggttgttccaagcagaggtcataaaaactgtgtggtgcgtctgcacccaggtacccaaaaaaaaaaaaaaaaaaaaaaaaaaaatttttagcttcgatcggacatgatctcactttggggctgtagcctagtgcttctatatgctctcgatctgcttgac

SEQ ID NO: 200 - DNA, 708 bp, Zea mays
  Clone ID: TF_LIB5116-047-A1-PF1-F2
ctctccgtctgcgtcgaccggaaacggcggggcagttcccgactgcgactgtcctcttctctctcctccgcgaccgctctctcttgaccggagtcagagtctcgagtgcagccgactcgccgtcttctccgcttgcccgtgccgccatggatggggtttcgacggagcctcgccacccgctcctgcaggccgttctggacggcgacctccgcctcctcaaagagatggcgggcgtcgtggcggcggacgtcggcgtctgggcgcgcgcgctgactgtggcggtcatggaagggcggctggacatctgtaggtgcctcgtcgaggaccacggcgtcgatgtcaaccagcgcaccttcacaggtgacactcctttggccatctctgcgacttatgggacgcctgccatcacgagatatcttctggatcgtggtgctgatccaactttagccggtgccctgtggccacctcttcatgctgctgcaagttttggacaatgtgaaatagtggaactgctgctttcaactggaattgatgtggatcatttcgattctgagtatgggaccgcattgcatgttgccgctactaatgctcaagatggttcaatgaatattttgttgcagcatcgtgcagatcctaataaggtttaccgccttgatagtaccccgttaaggctggccatgatttctgaatcgctggaatgtgtgaagc

SEQ ID NO: 201 - DNA, 1915 bp, Zea mays
  unsure (1)..(1915): unsure at all n locations
  Clone ID: TF_ZmC127800_1
aattccgactgttattccaagttccactcgcaaaccccctcgattcgtccatccctcgcacgcgctggccgcccgccccccatctccacttctcctcgccgctctcctgaatccttcgcccgaaagcctccgaccgcagaaccttagcgttgccgtccacctccatggaatcgaagcctcacgcgccggcgtctgggctggcaacgccgcggttcaggctgggtaaacagtcgtcgctggcgcccgagcgcggcggcgagggcggtggtgcggggtcggcagatgggtcggccgaggcgaacggcgtcatgagcttccagctcatgtacctggcccacgagggcagcgcggaggggatccgcgagctcctcgacggcggcgtcgaccccaatttccgcgactccgacggccgcacggcgctgcacatcgccgcctgcgagggccacgccgaggtcgtcgagctgctgctccagagcggcgcggaggccgccgtggaggaccagtggggcagcacgcctttggcggatgcaatgcattatcagaatcatgatgtgatcaagatctttgagaagcatggctccaagcataagattgctccgatgcatgtgaacaatgttcgtgaagttcctgaatatgagattgacccggctgagcttgatttcagtaatggcaatgatttatccaagggcacatttagaaaagcaacatggaggggcattccggttgctgttaagaagctggacgatgatctaattgcggacggcagcaaagtgcaggcattcagagacgagcttgatgtgctgcaacttatacgtcatccaaatgttgtgcaatttttgggcgctgtgacacaaagcaatccaatgatgattgtcatggaatttatgcgcaagggtgacttgcgcactcacttgagtaagaaaggagctctgccaccatcatatgctgtgaagttagctcttgatattgcaagaggaatgaattacttgcatgagcataaacctcaggctatcatccatcgtgatcttgagccttctaacatattgagggatgacactggacatctgaaggtggcagattttgatttgtgtaagatgctaaaatggagaagaaaagttagagaagataaagcagttacttctccaggcaatgcttgtaaatatgtggctccagaagtcctgcgaaatgaagagtatgataccaaagtggatgtcttctcattcgctctgatacttcaggagatgattgaaggatgccttccttattatgataagaaaaatgatgaaattgagaaggcacataattctaaagaaaggcctccttttcgagctcctccaaagcattatgcacatgggttaagagagttgattgaacagtgctggagcgaaaattctgcagacaggcctgattttagagtaattatcaaccggctgtctgctatccaaaatgagatagctcacagaaaccgttggaaggcgagacctctcaagtgtttcctgagcatcgaaggaatgtggaagaaagatcgcaatgagggcagcaccacccgttcatcacgctcatcgcgatcctatttttaaccaccagcacaagctattgatttcaatcgcaagatcatattggtgattgctagaaaatatactcaaatgtatatcatattttcgttttctaaaactatgaaaaaaaatggttctgcaactggttgattctcagctgatcatagttttgattgtatatcaggcatgccccttggccccaacccctgctttggcattcccctgggttgggacaatatggataatgctaacttaattatatttatataataatgtgttttgatgttnaaaaaaaaaaaaaaaaaaaaaaaaaaaaaaaaaaaaaaaaaaaaaaaaaaggggnnnnnnnannnnnnnaa

SEQ ID NO: 202 - DNA, 1329 bp, Zea mays
  Clone ID: TF_ZmC9440_1
ccgaaacaataaatttcactgtgggactgatggaacggcgtcccagaggctggggcggaggcggaaggggagcactgagcaggcgttggcgttgcgagaaagaagatcatcctctgcatagggccgcaaggtcttgtgatgcggcaacaatggagtcggtgtgtgagaccaaacctgtcgccatcaattcaagaggtcgcttctcacgcacaccattccacctagaagcatgagctgggcctggcaaaaataagagatttacctgaccgattggcgagactgatgggacggcgtcacagcggcggcggcggcggaagaggaagagggcgagggcgagggcgtgggcgagatgaggaagaagatcttcctctgcacaaggccgcaaggtctggtgatgcggcagcagtggagtcggtgtgcgagtccaaccctctcgccgtcaattcaagggatcgcctctcacgcacaccactccacctggctgcatgggctgggcatgttgatgttgtgagatgtctttgcaagcacaaagctgatgtgggagctgcagcaatggacgacactgcagcacttcattttgcttcccagaaaggccatgtagaagtggcccgtgagctgctggcatctggggcctctgtgaaagccaagaaccggaaaggcttcacggcgctgcactttgctgctcagaattctcacctggatcttgtgaagtaccttgtgaagaaaggtgttgacgtcacagcaaagaccaaaggtggtcagacagctctacatgtcgctgaggatgatgaagtgcgtgcgttcctgaaggagtgcgagcaatccttgaagaagggtgcagagctaccatcggagaaggatgattctgctgagaaagagggcgatagcaagtcttcaggtgaggttatgaaagatgaggaggatgcagagcagggcgagaagaggaaaagcgaattggttggtgcgtcgagtttgtcaggagtaaaaaaagccaaagtttctcttggtcatctagtttgtgaaaatgacatggacgaggaagaggagtgatttcgagcagccttgaccttgaggatgcaatagaagtgcacttagatggttccacttccacctgcacctgtgtgttttgttatgctagtcttagtctgtacggcgatcttgaatgtaaagacaagtacaaagttgaatgtcagttctcatgtgttgcatgaatgaaaattctaagggcttgtttggtaggacaaaagatccctataaaaaaaaaaaaaaaaaaagcggatttgtagctcctccccatgagcccccccaatttctataaatcggtttttt

SEQ ID NO: 203 - DNA, 2625 bp, Zea mays
  Clone ID: TF_ZmC19180_1
gaactatcgagattgggaacctcgaggccggccgggagtgagcttccaggccggggagagggactggccggcggaccgccgatggaaaactttggaggctcctaacttccaagataccaactagctcccagcctcccaccgtcttctttccacccttggctgatgctagggagatgggatttttggagctctaagacaaatagttctgctccttgcgccctgcgtgttcttgatctggcctctaagtttgttggctgttttctcgtgtttgaggtgatatctcgattctaaaaagctaccagatttcttctccctgtttgtatggacaaatttgggaatgaaccctagtctgtgtgcaaagcagccaaattggtgttcttgcggatcaaagctaaagctgcagcagttggtgaggatacaagagatgcagggagaaacaagagaagggcttgttagattctgcagagacactcttattggttgatattttttccatcaactccggccagatttgcggaacctcgcaattttaggagccatttgatcttggacatggagaagcaacccagcgtgcgacatggtgccctagagaaactgaagagcttccgggggatggagaagcagagaagcttcaagttcttgtccatggagaagcagcagagcttcaaaaggaacaaggacagccctgggaagcggggtgacaccgcgctccacctcgcggcgagagctggcagtgtcgcacatgttcagaagatccttgcggagtgtgatccagaactggtggtggagttagctggccgcacgaatcaagacggcgagactgcgttgtatgtgtctgctgagaaagggcatgttgaggttgtgtgtgagattttgaaggcttcggatgtgcagtcagccgggatcaaggccagtaacagcttcgatgcattccatattgcggcaaagcagggccatttggatgtcttgaaggagctgttacatgccttcccctcactagcaatgacaacaaattctgtaaatgccacagctttggacactgctgcaactcagggccacattgacattgttaatcttctgctagaaacagatgcaagccttgctaggattgcaaaaaataatggaaagacagttttgcattcagcagcaagaatgggtcatgtggaggtggtcactgcactgttaaataaggacccggggcttggtttcagaacagataagaagggacaaacagctctacacatggcttcaaaaggccaaaatgcagaaattctgcttgagttgttgaagcctgatgtctcagttatccatgtggaggacagcaaggggaatagaccattgcatgttgcaactcggaagggaaacaccattatggttcagaccctaatatcagttgaggggattgaaatcaatgcggttaatagagctggagagactgcttttgctattgcagataaacaaggtaatgaagagctcgtcaacatcctgagagaggtcggtggaggaactgcaaaagagcaagtaaatcctcctaatccagcaaagcagcttaagcagacagtcagcgatatcaggcatgatgttcaatcacagatgaagcaaacacgccagaccaagatgcaattccaaaaaatcaagaagaggattcagaagctccacattggtgggctaaacaatgccatcaactccaacactgttgttgcggtgcttattgccaccgttgcctttgctgccatattccaactccccggtaattttctggaggacatgactcaagcacctgacccagacatgaccttggggcaagcattgatagccagtgatccagcctttataatcttcttggttttcgacgctttggctctctttatctcgcttgctgtcgtagtagtccagacatctctaattgttgttgaacagaaggccaagaagaagatggtctttgtgataaacaagttgatgtggctcgcatgcctctgcatctcggcagccttcatagcgctaacctacgttgtcgtgggtcgagacgacgagtggctggcctggtgtactatggcaattggcactgttaccatggtggccactgtcggttccatgtgctactgcgttgtcgctcacaggatggaagagaagagcatgaggaagatcaggaggacctccatgagccagtcatggtccatatcaattgactcggaagcagagctgatgaacagtgagtacaagaagatgtatgccctttaggatgatgtccgtgcttgtcggctgagtcttgtatatattggtacccatttgcctgagaccagtccatggcattgagtgggattgactcaatcagaactatattttgtcctagaacatggcacctgtatgtaactgtagtcttgcagcctccagacatgaacctaggggtgaagtctaggtgataggtgtagtcacttttttgttggcaaaatacaaatattgccaagcatgatgtccctgtatcatgttttttgtgggtgtggatggcagtgaaaaatcaaaatcattagattgtatctgtatagtagaatagtatggaataagttgtctttatgtcaaaaaaaaaaaaaaaaaaaaaaaaaaaaaaccttatcgcgtgttttt

SEQ ID NO: 204 - DNA, 1768 bp, Zea mays
  Clone ID: TF_ZmC2241_1
ttgggaccctcgaggccggccgggccactcttcttctgccttcccgactctacctgacttcgcccgctctgagaaattcactctcaccaccaccgcgccgcctccactccccccaccccccggtctgaaacccaagcttccgcttctctcatggccgacgccaccgccgccctctcagctcggagcaaggtgcaggctttcctggaggctgcgcgcgccggcgacctccaatccctcaagaacctcgtcgcggcgctcgacgaggacggcacgggcgccgcctccgtcgccgccgccgtgcgcgacgccaacaagcgcaccgccctccacttcgcggcgatcggatgtcgcaccgacgtctgtgaattcctcatcggcgagctcggcctccctgtcgacccaaaggacgatgatggcgaaactccgctcatccatgcgacacgccagggccatctggacactgtcaagtatcttctcgaccatggagctgatccttcgctggccaccagcctaggagccacagcgctacaccatgctgcaggcatagggaacacggaactcatgaagcttctcctctccaagggagttgacgtcgagtcagaaagtgatgctggcactccccttgtgtgggctgctggtcatggcaaccaggatgctgtcaaacttctgcttcaacacaatgctaagttggagagctagtcgctggctaccgacatgtttgagtgcttcaagctaactgcatatgtttctctctcatgattgcaaccaaatactgaaaacgatgatggtgtcacagcattgttatctgctgttgctgcaggttccctcccatgcttggaggtcctaattgaggctggtgcaaacccaaatgtcaaggctggtggagcaaccccattgcatattgctgcagatagtggaaatatagaagtcatcaaatgtttgcttaaagctggagctgacccaaatacctgtgatgatgatgaattgaagccagttcaggttgctgcttggagaaataaccgtgaagctgttgaacttcttttaccgttaacatccccaattccaggtgtttcaaactggaacgtagatgggattatagaacacatgctccctaaagagtatgaggaaaagtctcaactgaaggaagcggcatctctgaaatcaggcctaacacaaactattgaggtgtcatctgaagcaaaaaagaggtccttggaagccaaatcaagaggtgatgatgccttcagaagaaaggactaccttgtagcggtggatgcttatacgcaggctacagagttggacccaactgatgcaacagtgctctcaaacagaagcctgtgctggctgcgggcagggcaagctgagcgtgctctggaggacgccaaagcatgccgtgcattgagaccagattgggcgaaagcctgctacagggaaggtgcggcgcatcgtctgttacagaggtttgaggaagccgcaaacgccttctatgagggggtgcagcttgagccggagaacacggagctcgtcaacgcattcagggaggccatcgaagccgggaggaagttccatggcgtcaacacgccaaactcaacacaatgagactttgctgtttggttggataggtagatgatgaagcggatggacatgaacgttgtcttagttggaagttggtgagatgatgaatgagatgataatgaaatttgaaagagcgaatttgcagatttattttgtgttttgtgattgttttcttaaacttgttttcttgcgt

SEQ ID NO: 205 - DNA, 1558 bp, Zea mays
  Clone ID: TF_ZmC32119_4
tgagaaacaggtgaaagaaaagctatattactggcttatccataagatacatgatgatggaaaaggtccaaatgtcctaggcaaggaaggacaaggtgccattcatttagtagccgcacttggttatgattgggctatcaaaccaatagttgcggcaggagtaaatataaacttcagggatattcgtggatggactgcgcttcactgggctgcatgttgtggaagggagcggacagttggtgccctgatagcaagcggagctgcatctggtgctttaacagatccaacgcagcagtatccatctggaagaactcctgctgatttagcatcagaaaatggtcacaaaggcattgctggttttcttgcagagtctgctttgacaagtcacctctcagctcttacattaaaagagtcgccaagtggcaatgtggaagaaatatgtggattaacagcagctgaaggttttgcagcatcaagttcttcccagcttgcttgtgttaattctcaggaagagtccttaaaagattcacttggtgcagttcgtaaatcaactcaagcagcagccagaatatttcaagcttttagggtggaatcattccacattcggctcgagattgaatatggagatgatgattgtggattgtctgatgaacgcacactttcacttgtttcccttagaaacccgaaatctggacacggtgattcacattctgctgctgttcgtattcaaaacaagttcagaggatggaaaggaagaaaagagtttatgcttatccggcagaaaattgtgaagatacaggcccatgtacgtggacatcaggtaaggaaaaactatcggaaggtagtctggtctgttggcatcgtggagaaagtcatactgaggtggaggagaaagggaaggggtctgcgaggtttccaacctgagaaacaacttgaaggtccatcatggcagatccaacctgcaaaggctgaggctgaggatgaatatgacttcttgaggatggcaggaaacaggctacaggcaggttggatagagcactggctcgtgtgcgttccatgaatcagtatcctgaagcaagagaccagttccgcaggctgcaagcctgtgtcaacagcctacgagagtcccaggcgatgcaggacaggatgatggctgattcacctggccccgatgggggtgatttcatgactgaattggaggagctatgccgggatgatggcgatgcccccatgtcgactatttcttgacatggagctttctatagatcagttaggcagtgacatgttctttcccagactagatgtaaattgttgttactaaatggtctctactccccgttgaaccccataatataatgatatatagcagctaatacatgggcttctccagattatgataattgatcagtataatttgtggaattattatattttaaagccaattaaggtttaacataataaaagtaagcgaaatccaattgattcaggtaaaaaaaaaaaaaaaaaaaaaaaaaaaaaaaaaaaaaagaaaagaaaaaaaaaaaaaaaaaaagcggcc

SEQ ID NO: 206 - DNA, 663 bp, Zea mays
  Clone ID: TF_LIB4171-023-R1-L1-H6
tattcggcacgagggctgaaacattcatgtccaccagctgaactagtttttgcatgcgcccctggccctctcatacctttcttgtactgacattagcttgaaagaaacgatcactgttcgatcagcagtttgcgaggcatggatggcgagggagagaggcgcatggtggatagcgagggacagatacacatggatccggcgttgtacatggcggcgacgcaggggaaagtgtcgatcctgaagcagctggcggatccggaggaacccagtgtcctcagcgccacgacgccccagctgaacacggcgctccacctcgccgcggtgcacggccacgccgagttcgctggcgaggtcctgggcatgaacgaggagctgctcgtcacccggaacggcgacggcgacaccccgctgcacctggcggccaaggcgggcaagctggaggtggccaggctgcttgtcaaccgcgccatagcgtggccggaggacaagaagagccctctcatcatgaccaacaaggcgggcaacaccgcgctgcacgaggcggtgcagtaccgcaagggcgccttgggcggtggtcctgctagacgccgaccccagcccgcggcacgacctcaacgagcagatggagtccccgctgcacatgggccgccgcgagggcctcgt

SEQ ID NO: 207 - DNA, 679 bp, Zea mays
  unsure (1)..(679): unsure at all n locations
  Clone ID: TF_LIB4704-004-R1-K1-A6
aaaaaaaaaaactcctctccccacntttccccatttttaccgcacatctctccttcctcggcgtctcgcacaccccagcaccttcgtctcccctcccctcccctcccctcccccaacaatcggaaccggatagaaagttcggcttcctcccggacgactcggcgcaagttcttccgacccgaggagcccctgttatgaacggcatgccgatctctgcgtcctctgcggcaagcgtcgacagtggcgcggtggcggccggcacacccatgaagaatgcaacggcggcggacgctctcgccgagatggcgagacatcttaccgtcgacacggaagacaccttcgcgggcctgctggagctcgccgctgacgacgacgcagaggggctgcgcctcgcgctggagcgcgcgccacctgccgccgcggacgaggctggcctctggtacggccgccggaaggtcctggagcaccgcaccccgctgatggtcgctgccacctatgggagccttgccgcgctccgcctgctagtgtccatctcgtatgtggacgtcaaccgccgctcgggcacggacggcaccactgccctccactgcgccgnctctggtggctcacggacggctgttgagtccgtcaagctgcttctgggagctggggcagacgctaacaccatggatgacgctgg

SEQ ID NO: 208 - DNA, 1192 bp, Zea mays
  Clone ID: TF_ZmC19180_3
aacctaataataagtgagcttccggtcggggagagggaccgccggtggaaaactttggaggcgcccaacttccaagatacccactagctcccagcctcccaccttgccctttccacccttcgctgatgctaggatgatgggatttttggagcgctaagacaatttgaggtgatatctcggttctaaaaatctgccagatttcttctccccgtttgtatggacaaatttgggaacgaaccctagtctgtgtgtggagcagccaaagtggcgtttatgcggagcaaagctaaagcggcagcagttggtgaggatacaggagaagatacagaagggcttgttagattctgtaaagacactcttattagctgataccttttccatcaactggggccggtttttcggaagtacgcccctcttggattaaagcctctcaatttcaggattcggcacaagcacaataccatcaagtgaacaagagccatttggtcttgggcatggagaagcaatccagcacccggcatggtgccctagagaaattgaagagcttccgggggatagagaagcagagaagcttcaagttcttgtccatggagaagcagcagagcttcaaaaggaacaaggacagcccggggaagcggggtgacaccgcactccaccttgcggcgagggctggcagtgttgcacatgtccagaggatccttgcggagtgtgatccagagctgctggtggagttagctgcccgccagaatcaggacggtgagactgctttgtatgtgtctgctgagaagggccatgtcgaagttgtgtgtgagattttgaaggcttctgatgtgcagtcagccgggatcaaggccagtaacagcttcgatgcattccatattgcggcaaagcagggccatttggctttggacactgctgcaactcagggccacgttgacattgttaatcttctgctagaaacagatgcaagccttgctaggattgcaagaaataatggcaagacagttttgcattcagcagcaagaatgggccatgtggaggtggtcactgcactgttaaataaggacccggggattgggtttagaacagataagaagggacaaacagctctacacatggcttcgaaaggccaaaatgcagaaattctgcttggagttgtgaagcctgatatctcagttatccatgtggagga

SEQ ID NO: 209 - DNA, 553 bp, Zea mays
  Clone ID: TF_LIB5116-069-A1-PF1-E4
cccacattcacgagttgagccgctgacactcgctcctcccactccctgtcctcctctccactccgacgaaaccctaccacctcgctccagtcccaccccgccgccatggtgcgccctcgccacgtattcgcctacgctgatgggacgccacaactggagctcctctgcgcggcgaccacgggcgacctcgctcacctcgagcgaatggtgaggaaactcgatggtggtcgcggccgccttgcggaggcggtggaagccgtcaaggatcacggcgctggggcactgcacctggccgcctcgggccaaaatttggaggtgtgcgagtatctggtcgaggatgtcggggtgaatgtggatgccgttgacgaagcaggaagaacacctctggtttgggcaattattgttaaaggtgggcaagtggatattgttaagtatcttcttgatcatggtgccaatccagataatgccgacagaacagggattactcctcttcacgaggccgtggaacgagggcactgtgaagtagtagaactcttgctctctagaggtcctt

SEQ ID NO: 210 - DNA, 2731 bp, Zea mays
  Clone ID: TF_ZmC13193_1
acatccttgagcatggagcagacataaatgctgtggatcacactggacaaacagcacttcactggagtgctgtacgtggtcatattcaagttgctgaactacttctgaaagaaggagctaaggtggatgctactgatttatacgggtatcaggccacgcatgttgcagcacagtatggtcagactgcattcatttaccacattgttgcaaaatggaatgctgatccagatatccctgataatgatggaaggagccctttacactgggctgcttataagggatttgcagactccatacggcttcttttgtttttggatgcttataggggacggcaagacaaagaaggttgtactccattacattgggctgctattcgggggaatcttgaggcatgcactgtcttagttcaggttggcaaaaaggatgatttgatggtgaaagacaaaactggcttaactccagcacagcttgctgccgataagaatcatcggcaagttgcatttttcctcgacaatgctagaagggtacacggcaaaggatgtggtgcgaacaccagatttgggaaattgtcaaaattagggctcgctcctcttctttggtgcaccattattggcatggttattacatacacacactctgttatatcaggacaatatgccatgactacgaaagcaccatttgggaaattcgcatggtcaggagtttttcttgcaactgctggcttggtcatgttctataaatgtagcaggaaagatccaggttacatcaacataaatgcaaggggctcgcaaaatcaaagggatgatgaaccgttgctgaagatggagttagaaaatcctgcacttctttctggcaactggtcacaactttgtataacctgcaaaatagtcagacctgttcgttcaaaacattgttctacatgtgatcgctgcgtggagcagtttgaccaccactgcccttgggtatctaattgcataggaaagaagaacaaatgggaattcttcatgttcctcactctagaagtttttgcaatgatcattactggctctgctgccattataagaattgtaagggatccaaattctccatcatcctttggtgcttggattcattattctgcgtttcagcatcctggggtggtttcatttctcgcattggattgttttcttttttttggtgttgcagttcttacagttgttcaagcatcacagatagcaaggaacattacaacaaatgagatggcaaactccatgagatatgcatacctcagaggcccaggtggcagattcaggaatccgtatgatcatgggattcgcaagaactgctctgacttcttgttaaatggatacaatgaggacactgaacggctagagcagacattgcccactgatgaggaaatgggaatgatacagatgacaagtgcagtttcgcagcagaacggtgacaatcatttacatcatggtaatggcactgaccatagttgcgctgtttcacaagcaaactcaaaacctcatagccaagtgggttcgtctcagtgttgtgaccacagtaagaggactgataggacaccgttgggcctaggattgggccttggacgaaacagtgcgtcccggcagtatgttcggtctcttatcccattgtgatccatcatttggcgatcatgtgtttgtttgactgtagattggatttgttcacttattctgttatacgtgctcttgacatggttcaccatggctgggcagggttaacgttgttgtgccatgagctccggaatactaagatatatctggtgttgtagtttagcgttgaactcagagaagttgaaggtaacgacctggtttgcgagtatcagctgatcagcagtctggaatcagagagcttgtgcagaaaatgtaagagttatggactcatggcagatgcagtagcatgagatgtcttcagaattgttgtgtacatcaggttctgtggtacccctattgtttagcgtgatacgagtttgggaaaaaaaagtagtcgtaaattgagaaaattgtaaattgattagtaagctcactgcaacactagctgttttcctagttttcattcatttttgggtctggttattgttatgaaccacggaaagaattttcggttttcgggtatgggtacctcagttatatttggtctggttatggtacttactggtggtgcatgtttgtgtgagtgcttagagtttaggctatggccatcagatcatgtatatgactatatgactgtgtaaaacactgttttttatctgattgtgtaaaacagtgtttttgtatcgtacactattgttttatagattgttattaagttttcttagtgcttcgtttttaaaaatccttccccatagatcaatgaagccccaacgaagcaacctttgtaacgttgtcacagtgactctatgtagggagaatgtgttgttcaagctgctgagtcatgatgataacattgtccctgtgacctttgtaaatcttgtatgtaatctttgagggtgatgaatgtaatatcgtacggattgtccgattgcttatgaatatatgctcgatgctgttccctgttgattgagtttgcatccacgctttggctttcaagcaagcccaatatgcacatgtaatgtacatcatgtatctctttgttaatatattagatgaatcttgatgttgtttcacccaccagcatggtatgacagggcggccgctcgcgatct

SEQ ID NO: 211 - DNA, 929 bp, Zea mays
  Clone ID: TF_ZmC10492_3
ccccccgggaaaacgccgctgcacgtcgccgccgagatggtgtgcccggacatggtcgccgtgctgctagaccaccacgccgaccccaacgtgcgcaccgtggagggcgtgacgccgctggacatcctccgcacgctcacctccgacttcctgttcaagggcgccgtgccggggctggcgcacgtggagcccaacaagctccggctctgcctcgagctggtgcagtcggcggccatggtcatgtcccgcgaggacgcgcacacggcggtcaaccccgcggccgcgcccatgtacggcgagccttccggaggcggcgccgtgtacagcgcgagcggcaccagctcgagcatggtgaacctcagcctggacaacaggatggtgtatctgaacctagggatggacgcgcagttcggcaagatggacgacggcggcgacggtgatgacggcgggggcagagggcaagggggcccgccttctttgttctccccgcatggctaccattgacacaagctggccggagcggctgctgctctacgactatctctccttgtaagctttagaactatttaattacatgttgttattcatatccccatttacaggagatgatgatgatggagataatccgttgccctctaaaaaaaaaaaaaaaaaaaaaaaaaaactcgagacacgctctcactctctctctctctatctatatatatatatatctatatatatatatatatagagagagagagagagagagagagagagagagagagagagagagagagagagagagagagagatcatgcatgcaaagtgatgcatcacaagagcttgggtcgatctttattggtgagttgtctagtctattggtggaggtgttgtttttggaaattgtaagaggtgttaagaggtaaaaaaatgtttttttggttggt

SEQ ID NO: 212 - DNA, 681 bp, Zea mays
  unsure (1)..(681): unsure at all n locations
  Clone ID: TF_LIB4171-052-R1-L1-H12
aattcggcacgagggtccaccccaccaggcaccagtccaccaccgacgcccgcacgcacgaggcacacgatggcctcgctggaggcggcggagacatcaccgccgtctacgcccaccaccagcgcgtccccctgcccgaccccgcgcccgctggctaccgcaccgccgaccatgggtgcggcgcttctccgcgccgcgcgcagcggcgacgagaggcagctcgtgaaagcgcttctggcggaccctgcggccccagaccttgagaccgccgccacagccggagggaacacgctcctccacgtggcggccgcgggcgggcacgtggacctcgcgttgctcctcctccgccgcgccccgcgcctcctcacggcgcgtaacgcggcgctcgacaccccgctccacctcgccgcacgcgcgggggcgcacaaggtcgtcgcgctcctcgccgcctcctcgtcctcgtcatcgtcctcaccagcttgctccctgcgcgccctgacccgggccacgaaccggcgcggggagacggcgctgcacgacgccgtgcggngcggccacgaggccgcggcgcgtgcgctggccaccgcggaccctggtctcggggggatgtgcggcggcgctgggagacgccgttttacatgcgtcggcggctgggtcctggnggatgctgcgcatgctctt

SEQ ID NO: 213 - DNA, 1387 bp, Zea mays
  Clone ID: TF_ZmC10492_1
cccacgactccgggcctttatatgctgcatgtgtgcttttgcaatgcgccgctgcttggtagttaccaaagcagctggccggcatggtggagaaggcgtcgatcgaggacgtgatgaaggtgctgatggcgtcgcggaagcaggacctgcaccagctgtggaccacgtgctcccacctcgtggccaagtccgggctgccgccggaggtgctcgccaagcacctccccatggacgtcgtgtccaagatcgacgagctccgcctcaagtcctcgctgtcccgccgctcgccgttcctcgcgcaccaccaccacccggcaccggggggcggcatggaggcctcgtccgcggccgacatcgacgaccaccacaagatccggcgcatgcggcgcgcgctcgactcctccgacgtggagctcgtgaagctcatggtgatgggcgaggggctgaacctggacgaggcgctggcgctgcactacgccgtggagaactgcagccgggaggtggtgaaggcgctgctggagctgggcgccgccgacgtgaaccacaccgcgggccccgccgggaagacgccgctccacgtggccgccgagatggtgtgccccgacatggtcgccgtgcttctcgaccaccacgccgaccccaacgtgcgcaccgtcgagggcgtgacgccgctggacatcctccgcacgctcacctccgacctcctcttcaagggcgccgtgccggggctcgcgcacatcgagcccaacaagctccggctctgcctcgagctcgtgcagtcggcggccatggtcatgtcccgcgaggacgcgcacacggcggtcaacgccgcgcccatgtacggcgagccttccggcggcggcggctgcggcgtgtacagtgcgagcggcaccagcagcacgagcttggtgaacctgaacctggacaacaggatggtgtacctgaacctagggatggacgcgcagttcggcaagatgggcgacggcgatgacggcgggggcagggggccgtcttctttgttctccccgcatggctaccattgacaagatggagcggccggctgctgctctactatctccttgtaagcttagaactaattaattacatgttgttaatcatatccacattacaggagatgaagaagatgatgattggaaagatggcgagacgatcctttaattttttgcactctatctatatatcatcatgtgactcttttagcagctagagacgattagagagagacagagagatcatgcatgcaaagtgatgcatcacaagagcttgggtcgatctttattggtgagttgtctagtctattgatggaggtgttgttttggaaattgtaagaggtgctaagaggtaaaaaaatgtttttttggttggt

SEQ ID NO: 214 - DNA, 1578 bp, Zea mays
  Clone ID: TF_ZmC12227_1
cattgggtccctcggggaaacccgggcatcctcctctcaagcctcgacgcagcacggcgcgccggcgcgggacgacggcatgacgccgccgtccatcttccaccaccatcgctgcctcgtctccctcccctccgcttccccgacctggacctcgtcccgtcgtctcatccatcaactcgcaaaacccacagtcctgtccctacatctgcgtccagtcttatcctcttccttcgcggttgccgccgtcggcgacgacgaggatgtcgtagtcggggattgcctcgtgttcgacgacgacgctttcgaggaaccggacctggacctcccctcgtccccgtggccgtcggctagcgcctcacgccacggccggaggtcggaggcaggcgagagcgacagcctggtgccggagaggtggaggcatgccgaggaggagatcaacctgacgaagaaggataagcgccgcatcgcgcacgggctgcggttcgggagccgcctcgagcggcgggcgcccccagctgttgctgctcctgatgaattccgcgcgtaccgcaaggggatgctgagcgctgagcgtgagcatgtttctcatgtataccgggggccgctggagaggactcctccgccggaagtgaaggaacatccaccgccggagccggagcctgggacgcgtgtggccccgaggaatccgaggatggggatgggcgttggcacccttgacgacattgatgagtttttcagaagtagggaatatgttcaggatgagatggaggacagcaagagtcctaagggccgtcagaagttgttctcaaatgaggagaagattcttctgaacaagcgagtgcctgatctggaaacagctacttctagtaaatggcttccacttcacacccttgctgcatctggtgatttctatctattgaatagccttttaaaacataacgtggacataaatgcgcttgataaggatggcttaccagcgatccacaaagcaattctttcaaagaaggctgctattatcaattatcttttaaggaactcagcaaatccattcatccaagataaagatggtgcgactctaatgcattatgcggtccaaacagcatgtagtcagaccataaagacacttttactgtacaatgttgacatcaaccgtccagatgattatggatggacacctttgcatcttgcggtacaaacacagaggactgacattgtgaagctgcttttaataaagggcgctgatagaactattagaacccaagatggattgaccccgttggagttgtgcctccggttgggtcatgatgtgcggacgtatgagcttatcaaactacttaaaagtttccgaggacaaaagcagcatgatttagtttagcaactggagggtgtgtgaccctctttgaaccagtgaggttaaccagtgtggtggccttctgggaggccagttttcaatgtaccattaatgattcatggaatcgctcctggtttgagataggtacatgccaacttcattgtatttgtatcatttatatatttcattggcctaaaccattggttgcaggaaatagtttaccccta

SEQ ID NO: 215 - DNA, 535 bp, Zea mays
  Clone ID: TF_LIB3958-013-Q1-N6-A12
gatggtggacaccctcgctctgctcatatgggatagtagagattctcaacagtatatatgctgcccctattacaaccggtcgcaggcccaatgattacaacaccagtcactgttgtgaatacgacaagaactgcgacgaggcccagcttgcggcgtagatggttggcccggtggtgtaacaatccccccgttgcgccgcagcttgaccccaaagagacgaacctgggaactcttggcaaagacgctcctcctcttcccacatagccatggagaccggccatccggaccacttgacgagcacctgatagcgtgggcgggtgccatgggagagtaaccgccgacgacgtaacaccttgcccatttttgctttcaacatttgccccatggtccatgagaataagagcaatttcagtttggttaaacaaagcagccaaatgcagcaaagtaaatccttgtttgtcgcagtagttagaatccactccctgtgtaagaagtttctttacacccttaacatccccgcctttaattgcttctc

SEQ ID NO: 216 - DNA, 285 bp, Zea mays
  Clone ID: TF_700344979H1
gcgctgcacagggctgccgcccgaggacacctgcttgccgtccagttgctggtcacccagggggccgaggtggatacgcgggacaccctgggcctcacacccctgcatcacgcctctcgggaaggccacgtggaggttgccggctgcctgctggacaggggtgcccaggtggatgctaccggctggctccgctagacccccctacacctggctgcagagcgagggcctgcggcgtaccgtggggcttctgctgagccgaggggccagccccaccctgcggacgca

SEQ ID NO: 217 - DNA, 796 bp, Zea mays
  Clone ID: TF_LIB5116-012-A1-PF1-A2
accctgcccctgtctcccgcggcgggggatctcatcccggccatcctctgcctcggagaccaccggatttccctatttggtttgatcatctttcagagtttttttgtgctatactttccttaattttcttcctggccgcggtccagtccaatccccatccacaaccgcagcccctcgctcttcgccgccgtggggattcccggcttgtcccccctagccggcgatcttccgtgctgcggctagttgggatttccttgctgtatcctcagctggagcaacccctaccgaaaccctctgttttgggcaagggaaccgctctcccacttcattccccaaatttgcaccgtccggcgagtccaaatggggatgcagcaatccaaggaggagctgctgtaccagcaggtgaactacggcaacatcgaggggattcggaacctccgggcgcagggcgcaggcgttgagtggattgacaaggaagggaagacgcccctgatggtcgccagcatgcgccctgatctgctgaatgtggctaaagctttgatcgaactgggtgcaaatgtgaatgcatatcggcctggatcacacgctgggactgcattgcaccatgctgccaaaaaaggacttgatccgactgtccatttacttctctcacatggagctaacccattcataacagatgatgactgcaataccgcacttgacctggctagagaaaagggtcatgtgaacgttgtaagggccatagagggacggatttctcttttttctggatggatgagggagaaatatggccctg

SEQ ID NO: 218 - DNA, 2927 bp, Zea mays
  Clone ID: TF_ZmC119_1900
cacaaatcaccaatttttatacacataatcacatagatatacaaatttaattagtattgcacaatgatagatccacatcacataaaccatcaacaagcaccacaacaaaatcattcacaaaacctacacatgttattatgttttgcacatatttacaaacactttacaaaatcattcacaaaagtactaacgcttcaagtgattcgcaaaagccttcattgagcaactcaacaggattttccatagatctttctctgcagcttttgccgcttcattgagcaactcaacaggattttccagataacttatgtattcagaagagagacgtggagaaatgtttatatccagctgaacatctttgtatggtactgggactaggcaaaactgatcaacacgagcaagtagttcagaataggaattatcttcttgaccatgtaagatgcatctcgcaatactgagaagtggtcaactctactgatgcaaccatcaggctcctgttattccagatcccatcgttattagtcgttcaggagaacgaataatgatcttccgtcgctatcagcccacgcgccgttttcttctgccgtccagagccgttcttctctcttcaaggttcttctctctcccgtcaagcctcttccttccatctcattttcttcaatctccatttccctcccctgctagtctcctcccctgctgcccggagatctgctgcccgtggtcccgcgccaaagcaggtggcggcggcgctgcacctccttctctccaaactccgcgtcttctcccttgctgctcgcggccccgcgccaaagcaggtggcggcggcgctgcgaccacaaccctagtccgcgccaaagcaggtggcttgtcgttgttgtagctggaaatgaagatgaagcaccaagccgtgaacttgtcgttgctgcaaatgaagatgaacacacgactgctactacgccacctgttttttgctcccagaaatgtgagcttgtgtgatagcttgtgaaactgctacctgtgtattgctcccagaaatgtgagcttgtgtaatagcttgtcaaactgctacctgtgtattgctccattgaaatgtgagcttgtgaactagcttgtgaactaaattgtggtacctgggaactaaattgtgaactagcttgtgaactgaaatgtgagctgcgaattttgttctgggatggcagtttattgctcccagattttgttctacctgttcaacctgtttattgctcccagattttgtgaactaaattgtgctcccagattttgtgaactaaattgtgctacctgttcactgggaaaatgagtttgttcccagatttttgtgttcagcgaatggacagtgaaatggacagcgaatgatatgggagcaataaactctggtagccaaaggcagattttgttcccagatttttgtgttcccagattttgttcccagattttgttcccggactctggtagccaatgacagtgaaaatgaaatgtgttcccagatttttgttcactgtccggaatactgcttcactgtccagaaacaacagcagcgaatggcagattcagcgaatggcagattcaagaacggcgcgattctctctgtacaaagactgggtgcgtctagtgcgggtaacggatgtgagacagcgtctgtttcagtgtaataaacatcatccttccctggtaatagaggattcatgtccattttagagtgtagtatcttctctggtttttcataatgtcgaatccctcgcctacgcctccgtttcgtcgaagccacgtctgcggtgtttcataatcccaaaattctcccatttccatgtagctatgtgcaaagcagtatttcccttcttgtcccgcacattgagaatggaaacatcagccatcagtaactcttccactacatctgtgttcttgcctttcacagccatgtgaagtgcagtttgtcccttcctatccttgatcggaacaattcctggatccctctctatgagtgccttgacaatacgatggtatccaatccttgcagcagtatgtagggatgtcttcccgttttttcgcacaatccttatgcagctatcatcagtgtccagtatagcatttaccacatccaagtgatccttgacaatatacaagtcacaaccccaggagagaagtgtacaggattccttgcttaagtgttatggtaggaacctcttctcgtcttctgttttgtctgacttgtcttccttcttctcttgctgtttaagaagagaaataaggaaaccttcatatttccacatacatatattactagactagtcaagattcgtaaatacaggatagcagttcatgtgaactgggttttgttgctttgggcatatttcattttcaccaaaccagtgtatccagaccacaaatgggtacacaacaatttgactcaatacctgctttgtataaggtatttgtgtgctctcaccaaggaatgttctactatttccattccataagatcaattgtgcttgtggaacataaagaactccatatgctatcctaaacagcaggggcagagctcagaaatcagatacttagacacaacaaccatggatacctataacttaaagtgacgaatagaaatactttaactagattttagagttactaatctagattatcgggcatagcacatcgactaaatcaagcaccacaccacttaatttaacaagtagagccttatcaaataacatagagttttgacaagtccacaatttttaaatctaaagacctaaaacactaatggatgatacttgctgattttaaatactaatcgacttccgttgtttaaaaaaaacttgttgtttatgacaagatttggtcaaacttaaaaactaaaacttgtttcgaagaccatgcacagtcaaataagtgtttttgaaaac

SEQ ID NO: 219 - DNA, 2891 bp, Zea mays
  Clone ID: TF_ZmC9687_1
cggacacgtgggctgaaagctgctaaggttggagatatgaatgttataaagatgctcctgatgggtaatgttgatgtcaatgaagccgactctgaaggaaacacagcacttcactggtgccttagtggtgcttcatgtaccaaggaaccaaggattgtgtggcttctgctcaagaatggcgcaagagttttccaggggaacaaattagggctcacaccagtacacagcgctgcagctaagggcaattacaaagctcttcagtcacttctgcttcatgcccaagattgtgttgatatacctaccaagaccaaagaaacgccattattttttgcagtgaagaatggttctgtggattgtgcaaaacttcttttgcgtttcggggctgataccaaagcccggaacctgagaaagcaaagacctattgatgtggcaacatcccaggacatgcgtttcatccttagctctgcaaatgtgttactattttcagggaaccataactcacctcaaaagaatcgtgtgatgagaaaggaaatttacaaagagcttggtgatgaatttgacgattttgacaaggattcctgtgatgaaagctacactgggcttaagacatcagtagggcaacgtgatttctgctccagtaatctttctgcacaagggcctaagagtaagagccaatatgttccaaaacaagcacaaggttcaaagtttgtgcctcggaataatcattggccgaagcatgattacactcgcaaaatttttgttggaggactcccaccttcagtagactcagaataccttattgaattcttcaatgctgagtttggtcctgtggaggaagcagtagtcatcggcataccaattggcaaccgagttcagtcccgaggttttggctttgtaaaatttgagagagaagaggatatgataagtgcaaaggaagctcatcatgtttacatgcttgggaagagagtggaggtaaaggatgctgttgctagagcatacttgcctttagaagaccaaagatatacttctttgaggcaattcatcaaggagcggccaaagatccacagggtgctggatggtgaactgactgaggaacacaacatccagaagcggcgaccattgccagaaaagtgtcttccatcctggttcgccggattcaggaagtggttacctggatttcttgaagatgaaacagcacgacttagaggagagaggtatccgttgagctccctgaagggtgatttcagagcgacttgcaggatggagcttgatcacaccgcacttggttatcctaagctaagtgactttatccgctccctccctggcatctgcagaatgtgtgtagttcctgttggaagtggacctgcaacgcacatggtcctccttccaccgctctcacgaccgaagtatgtacccctgctagagccttgttcctttgatcatgacgagcttgcagaatcagtatcagatcagcactccccacgatcaccacttaacactaacatcgcggatgactccccacgtaacactgacagccagcagggtgatgatgcatgcagtgagaccaatgttcagatccagcaagttgatgatgcatgcagtgagacttgtgttcagagtcagcatgactatgggaaaagccagcaggatggaagttcctccgacaatggtagcttactggacgatattcctgccagtactacaaagcttgatctgattgagtctgtaacttcagtaaagcctgctttgattgaacctgtacttccaagaaagcctgatctaattgactctgtacctccaagcaagcctgatttggttgagtgtgtacctccaaggcccaaattgattgagtccgggtttcttcctcaaaagaatgaatccgggcctgtacagaagcctaatttgcttggttttggaccttcaagaaatcttgagttgattgagtccaggccttcagcatgcttcattgatagtccttttgaaaggacagcagttactcctagcagctgcgaaggtgaaatgagattctctttcttccagtctcagtgggacaagtacctggcaccatatcccaggagtgactcctgcatcatatgtcgatcttgtgaagctgggatgcaacttgttccctgctttcataagatatgtgttgcgtgcatgatgaggtgcaatgtcagagcatgtatggtttgtggcacttctgtaagtggagttaagtcatcccctgcagtggatgcgacatacagatacatgggactcaccgagcgtgttttagatctgagatgccagttgatggtggtctgccgtggagctgaggcaatagtcagatgctcaccatgtatgcacaccatcgcttgccggggttgcttccttgcctcagtgacactactgaaatcctgcaccacctgtggctgcatggttgaacacttcaagatcgtttgacaagacttatctcccaatacacagtagtattactaagcaatctaaggtatagaataaagcaagcagtcctacgatctgaaggggagatctgattactctcgttcggttttgccacacttgtgggatgcgctaacaggctattttggtagtggtataggcaccctcgctcttgtgagcctgaggtgctctcttttgctccctttctgttcttccgtagaaacactttttcagtatcagacatgctcgatttatatgctattgctatttctgcttctatgagcttgttatggtatggcactagcaagttctcggtaatcttccatgtaaaacccctcatctctgttatatggcactttttctatgtaaacctgtgtaagtactactagtatcaaaaatggatcttttatgcatcaaaaaaaaaaaaaaaaaaactcgagagtacttctaga

SEQ ID NO: 220 - DNA, 1649 bp, Zea mays
  Clone ID: TF_ZmC16077_1
ttgggtacctcgaggcgggccgggatttttttccaacaatcagtcagtcacaagaaaggaacaacatgaaagtgatctccatgttggaaacctaaaaacaagggagagaaaaaaaaaactcgcatcgcgtccttggttcctcgcattagccacccactggattttcttgccaacgagcttcgactacaccaacgccgcttcgtcccagtgcttgctaatcatcggctcctcttaattgcagcaaccaccacgcttcgtgttttcagatcaaagaagtgggggaacaacacagatttggagcggcacgccagcaatacggaccgggggtgacctgaggcgtggagatttttggccgctgcctgcatctccacgtcgcggtcccaatcaagatcattatttctttctccttccttgtccccgcccaaatcgcaaggcttcgttgcgaatcgcccttggcgtggccccaggattcgacgccccagcgccctcgctggaatcgtgggcgctgtggaggaggactcgaggcggccgtcgcgcttgtctcgtctctcatcaatctcactctctctctggtctctctctttttttaactgcggggattcgccctgatttagaggagcgagttgctggtctcggcgccgtctagctcgtcccggaccgacgatttggggcagggcaggtccaaaggcagcagcatcatggaagattgagaaaatttggaggcatctactacaaggttttcctgtgtgccctcaagacagggcgctgtgccgtgtgggcctcctcttgggcatccatggggttcctcagccttgtgggcaactcctttgggtgctctgcttccggtgagcgtcttgtctcagctgcccgcgacggcgacctgcaggaggcacgcgcactcctccaatacaaccctcgccttgcccggtactccacgttcggcggccggaactcaccgctgcactatgccgcggcgcaaggccaccatgagattgtctctctgttgcttgaatccggtgttgagatcaaccttaggaattacagggggcagactgctttgatgcaagcatgccaatatggccactgggaggttgttcaaacactgatacttttcaatgcaaatgtgcacaggacagattatctgaacggtggaactgctctccattttgctgcactgcatggtcatgcccgatgcctccgtcttgtgcttgcagattatgttccaagcgtaccgaatttctgcaccctggtgaatcataagtcatctgaagaagattcagctgctgattttgatcatgagtatgcaggatagctagcatgttttctctgtactagtttattttagtgcacaaatcatgtgatagtatgtctttgttaccagtgctttggtcaagatggtgaatcagaaggcggatggaggtttaaccccacttcatatggcagcattaaacgggcatgtagagtgcgtgcaattgttgctggacttaggggcatctgtttctgaggtcactattgaggatggaacaactatagacttaataggtatcacttttgcctttttggtcgcatactcttgttgtaagtgcttaaccttggtgagaactttgtagtaagcaaatcaacaccaacctatatgattctttgtcttg

SEQ ID NO: 221 - DNA, 1629 bp, Zea mays
  Clone ID: TF_ZmC30397_1
ccggccgggtgctgatcggcagggccagtttgctgaaaacttgataaagggaaacgcatacagactggcttctaaataaagttggtatgggtggcaagggacccagtgtgttagatgatgaagggcagggcgtgcttcacttagcagctgcacttggatatgattgggctataaggccaacacttgctgctggcgtgaatattaatttcagagatattcatggctggactgcactccattgggctgccttttgtggccgagagagtactgtagttgcgcttattgcactgggagcagctcctggagctttgacagacccaactcccgatttccctggaagtacaccagcagatcttgcatcttctaatggtcaaaagggaatatctggtttcttggcagagtgttctctgaccagtcatcttcaggtccttaatctgaaggaagctaatatggctcaaatatctggtctacctggtattggagatgttaccgagagagattcactgcagcctccaagtggagattcattgggtcctgttcgaaatgctactcaagctgctgcgcggatatatcaagttttcagggtgcaatccttccagagaaagcaagcggctcaatatgaggataaaggtggcatgtctgatgagcgtgctctctcactcctttctgtcaagccacccaagtcagggcagcttgatcctctgcactctgctgcaactcgcatacaaaataagttcagaggatggaaggggagaaaggaatttcttcttattaggcagcgaattgtgaagatccaggctcatgtgcgaggtcaccaagtgaggaagcattatcggaaaatagtttggtctgttgggatcgtggagaaagttatattgcgttggaggcgtagaggggctgggttacgtgggtttcggtctcaagaaggatcagtggagagcagtagtggcggaacaagtagcagttcgatccaaaataagtcttctggagatgattacgattttctgcaagaaggacgaaaacagactgaagaacggctccagaaagctcttgcaagagtgaagtccatggctcagtacccggaagcaagagatcagtaccagaggattttcactgtcgtgtcaaaaatgcaggagtctcaggctatgcaagaaaagatgccggaggagtcagcagagatggacatgagtgaattcaaggaactgtgggatgacgatgcacctatcccgggttatttttagtgtggaaacctgttttgttggatttatttctctgtagattgctccgtttgtcttgagtgctactgaattgatggcacaaatggctgataacccaaagtagcgttgctggtgcatgatctgacatgtttggatttggacttaggtgtggtatttcttttgccttatgtacagtagaatattatctacatttgaaggagccttgtatttactgtgtgaaatcggtgtaaagagtttgatatcagagatcttacccagacttaacggttgcatgttactgcagtgcagcagttaggagtttgaggctttttgcacggaaaaaaaaaaaaaaaaaaaaaaaaaaaaaaaaaaaaaaaaaaaaagggcgccgcttaaggatcagctacgacgc

SEQ ID NO: 222 - DNA, 563 bp, Zea mays
  unsure (1)..(563): unsure at all n locations
  Clone ID: TF_LIB4073-023-Q1-K1-E8
gnaaatcgttaaattcctggtagagttaggttgcgacgtgaatgctcaggactcggacggctggacgccgctgcactgcgccgcgtcctgcaacaacctagctatggtgcgcttcctcgtcgataatggcgcgtgtatattcgcaaccacgctgtctgaccacgagacggcggccgagaagtgcgaagaggacgaggagggcttcgacggctgctccgagtatctttacagtgtacaagaaaaactaggcataatgaacagcggccttgtctacgcggtgttctcgtacacggcggcgcggagcgacgagctgacgttcgagacgggcgggcgcctgcacgtgctgcgcaagggcgacgacagcgagcgcgagtggtggtggtgccgcgacgacgccggcaacgagggatatgtgcctaggaacttgcttgggttatatccacgagtaaccacacagcaagattaagtcttgaatttatgacctgattaatttgtaaatatctattagttacttttattttgtatgtatttatatcactaaaagtaacgacgctgtatacaat

SEQ ID NO: 223 - DNA, 2986 bp, Zea mays
  Clone ID: TF_ZmC13638_1
cggtcccagctgctgttttttcttcgtcgaatccccgtccgcgagctgcagcgcaccacagtcccaaactcctgatcgatcctagctgctaggctggagcaggaattgaagcaggcagctagctagctagcattgcgtgatgaagaagaacaactcgagcattgagagcacgggcggcggcgtcggcggctccggcggcacggtgtcgggatccggctccggctccttcaacctccggaacctgtccaaggtcatcctcccgccgctcggcgggccgtccggcggccaaagccagtcgcatggcgggtcggacaagtgggtcgtctcgccgctcgactccagatacaggtggtgggatacgttcatggtggtcctggtggcgtactcggcgtgggtgtacccgttcgaggtggccttcatgaacgcgtcccccaagggcgggctggaggtggcggacatcgtcgtggacctcttcttcgccgtcgacatagtgctcaccttcttcgttgcctacatcgacggcaggacccagctcctcgtccgtgacaggaagaagataacactcaggtacctatcgacgttcttcatcatggacgtggcatcgacgatcccgttccagggccttgcctacctcatcaccggcgaggtcagggaaaacgccgtgtacagtatgctgggcgtcctacgcctttggcgtctgcgaagggtcaagcagttcttcaccaggctcgagaaggacatccgcttcagctacttctggatccgcagcgcgcgtctcgtcgcggtgaccttgttcctggtccactgcgccgggtgcctgtactacctgatcgccgaccggtacccggaccggcagaagacgtggatcggcgcggtgatccccaacttccggcaggccagcctgcggatccgctacatctcttccatctactggtccatcaccaccatgaccaccgtcggctacggcgacctgcacgcccagaacaacgtcgagatgatcttcaacattttctacatgctcttcaacctcgggctcaccgcctacctcatcggcaacatgaccaacctcgtcgtcgagggcacccgccgcaccatggagtttaggaacagcatcagggcggcgtcgagcttcgtgggccggaaccacctgcctccgcggctgaagcagcagatcctggcctacatgtgcctcaagttcagggcggagagcctgaaccagcagcagctcatggaccagctgcccaagtccatctgcaagagcatctgcgagcacctcttcgtgccggtcgtcaaggacgtctacctcttcaggggggtctcaagagaaatgctcctgtccctggtcaccaagatgaaaccggagtacatcccgcccaaggaggacgtgatagtgcagaacgaggccccggacgacgtgtacgtcgtcgtctccggcgaggtggaggtcatactgttcgacggcatctacgagcaggtgcaggccacgctgggggcgcgggacatcttcggcgaggtgagcgcgctgagcgaccgggcgcaggccttcacgttccggacgaggactctcagccagctgctgcggctgaagcaggctacgctcaaggaggccatgcagagcaggcccgaagacagcgtcgtcgtcatcaagaacttcctcaagcatcaggtcgagatgcatggcatgaaggtcgaggacttgctgggagacaacaccggcgagcacgacgacgacgcgaatgtgctgacggtcgccgcgatgggaaacagcggcttactcgaggacctcctcagggcaggcaaggccgccgacgtcggtgacgccaagggcagaacagcattgcacatcgcggcgtccaaggggtacgaggactgcgtgctggtgctactcaagcacgcgtgcaatgtgaacatcagggacgcgcagggcaacacggcgatgtggaacgccatcgcggcggggcaccacaagatcttcaacctcctgtaccaattcgggcgcgcgtcgaacccgcgcgccggcggagacgtgatgtgcctcgcggcgcgccgcggccacctcggcgcgctccaggagctcctcaagctcggcctggacgtggactcggaggaccacgacggcgccaccgcgctgcgcgtcgcgatggccgagggccacgcggatgcggccaggttcctgatcttgaacggggccagcgtggacaaggcgagcctcgacgacgacgacggctcaggttcaggctccggctctggcgccgcgcggctagcaatgtcgcccaccgagctgcgcgagctgctgcagaagcgggagctcggccactcgataacgatccacgactcgccagcggtggtcccgaacggcggctcgtcggggcacagccgtccaggcagattacagagcacaagttcggacagccagcgctggcctcgggtgagcgtatacaagggccaccctttcctcagaaaccgcacctctgaagctggcaagctgatcaacctaccaggcaccatggaagaattcaaagtcatcgtcggtgagaaactgaaagttgacgcggagaaggcgttgatcgtgagcgacgaaggagcggagatcgactcgatcgacgtgatccgggacaacgacaagctgttcatggtcaccgaagaagatctgaggcggctggcatcaatggactggctgtcgtgcgagtgatttggttcctcccaagataattggaggctaaatatagaatacagtacaagagtattgtgcttctactatgtctaggattgatagattgatgacaactactgagtggcatgagctctatccagcgactaatttgcatgcaatgtgtaccatgagatcggaccactgtccgttattaatgcagggtcattcttcttgtaaattcaaaaaaaaaaatcataggccctcatattgggtacacacagacggttcaaagatgtagttcaacaagctaaaaaaaaaaaaaaaaaagcggcc

SEQ ID NO: 224 - DNA, 1397 bp, Zea mays
  Clone ID: TF_ZmC35644_2
ccacgcgtccggctacgcgttggcactgcagatacccctcatggacaagcttctgaacagcggtgttgacgtcaacttagttgatagagtaagttacgtgcttatgattttcattcttcttttgtatcagaataaccccatctgcgaaggtatagttaactacataagtgttgctgatagagatggcttcacctctcttcacaaggctgtcatagggaaaaaagaggctgtcattagccatctcctaagaaaaggggcaaatccccatgttagagatagggatggagccacaccattacattatgctgttcaagctggtgccctgcaaaccgtgaagttactgattaagtacaaggttgatgtcaatgttgccgataatgatggatggacaccactccatttagccatacagagtaggaatagagatatagctaaggtcttgcttgtcaatggtgcggataagacaagaagaaccaaggatgggaggactgcgctggatctaagtctatgctttggaagggatttcaagtcatatgatcttgcaaagcttgtcaagcttattccagcaaacagaggtgcgtgatttcgctctgccatgaatctgagggaaagaaagtccaaaagttagccaatgcagcagcctcatacgacccatgcatagcttatgaagaagggtccaggagccgcgtgccgccgtgccggtcatcattcatttttttttcttgaccgccaactcaaacgatctgacagattgctctacaattgcgccgttagatttcagtgtccatggtctgtagcctgttcgacgtgactcgaaaaatgaacctatggatgtacatgcaacagtcttccggctgttgtgttcatttgttttgttcaaaaaaaaaaaaaaaaaaaaaaaaaaaaaaaaaaaaaagctcgggacctcgtgctctaagtctatgctttggaagggatttcaagtcatatgatcttgcaaagcttgtcaagcttattccagcaaatagaggagcatgatttcgctctgccatgaatctgagggaaagaaagtccaaaagttagccaatgcagcagccttatacgacccatgcatagcttatgaagaagggtccaggagccgcgtgccgccgtgccggtcatcattcattttttttcttggccgccaactcgaacgatctgacagattgctctacaattgcgccgttagatttcagtgtcatggtctgtagcctgttcgacgtgactccaaccaccccacctatggatgtacatgcaacagtcctaaagctgttgtgttcatttgttttgttcaatatgggccagggccaccaaaacaagatctgaattgtaactgttattaaccttcagcatatgtgtacacattatttttgatgtaa

SEQ ID NO: 225 - DNA, 1992 bp, Zea mays
  unsure (1)..(1992): unsure at all n locations
  Clone ID: TF_ZmC16578_1
tccgcccggaaaaaaaaaaaaaaaaaaaaaaaaaaaacccgtcccggccggccgccggccgggagcgctggactcccccctgctctctcccagtcccaggacagtcccgtcagcagccacttccccggcccctcccgctcctgctcgccggaggccgggccggcggcgatggggcacggcgctagctgcggccgaccaagcgaggaggtagacttcttcggcgcggcgcagtccggggacatggcccgcctcgccgccgctcttcgctcccgccccaccttgctcagccgcaccacgctcttcgaccgcctctccgcgctccacatcgccgccgcacacggccacctccaggtggtctccctggcattggatctttgcgtgcaccccgacgtcgttaaccgccacaagcagacggcgttgatgctctcggcgatgcacgggaagaccgactgcgtccgccggctgctcgacgccggcgccaatatcgtgatgttcgattcctcgcacgggcggacgtgcctgcactacgcggcgtactacgggcacgcggactgcctccggaccatcctctcggcggcggccaagtccgcgccggtctcggaatcctgggggttcgcgcgcttcgtgaacgtgcgggacgacaccggagcgacgccgctgcacctcgcggcgaggcagggctggcggcgctgcgtccacgtcctactcgagaacggcgccatcgtgtctgcttccagtggcgccttcggattcccgggcagcacgccgctgcatttggccgcgcgcggcggcaacctggactgcgtccggcaactgctgtcctggggcgccgaccgcctccagcgagactccgtcgggagaattccgtatgaggtcgccgcgaagcgagggcacgtcgcgtgcgcggcgctgctgaacccgtcatccgcggagccccttgtctggccgtccgctctcaagttcatcagcgagctggaacccgatgccaaatctttgctcgaagcagccctgatggaggccaacagagagagggagaggaggatcctgaaaggcgccaagaatgcattgccctcgccatcgcaccccgatgacggcgctcatgacaccgccatagctgaggctagcgacgcggaggtgtgcagcatctgcttcgagcaggcgtgcagcatcgaggtccgggagtgcgggcaccagatgtgctcggcgtgcacgctggcgctgtgctgccacgccaagcccaacccggcgacgcagtcccagccgctgccgacctgcccgttctgccgcggcggcatcgcccggctggtggtggccacgcggacgagggccggcgacgacgaggagcggtgcaagctggagtctcccaggcactgccggtcccgccggtccatgaacctcagcggcgacgcgggcagcaccagcaccctcatgggcagcatcgcctcctccatcggcaagatgggccgccggcgaacagagagcagcgagcaggtcgacgacaagccgtagcaaaatcattgtttcctttcatgcatccatccatgcgtaatccacatgaaatcggtgcgtatgataatcctgcaatgtcggcgtcgaacaaggcagcttttgtagattattttttggcaagtgagctattcacctgtgtaggttcattcaagagagagtctgtgcgctgacgtgctgtctaggctagatccgatcagcgatgatccgaataagcagctcgtccttgcctgtcagcccccatgcggccatgctccccgtggtccgtggatggagttcttgaaaggttgctgagaaaacatgcctgattcgcagaggcctggcccggcatggcaatgagaaacggtacaaatccatgaggctgattcatatatgatttgcccgaataggggcagcgccgctcaggttttggccagttgccgctctcagaatttagtcccaatcacatcttgattctggttctgaattnnnnaaaanaaaaanaaa

SEQ ID NO: 226 - DNA, 771 bp, Zea mays
  Clone ID: TF_ZmC3009_1
gacgtcgtcaaggcgctgctggagctcggcgccgccgacgtcaactgccgcgccggccccacggggaagaccgcgctgcacctggccgtcgagatggtgtcccccgacatggtgtccgtgctcctcgaccaccacgccgaccccagcgcccggacgctggacggcgtcaccccgctcgacgtgctccgcggcctcacctccgagttcctcttcaggggcgccgtgccggggctcacgcacatcgagcccaacaagctgaggctctgccttgagctcgtgcagtccgcggtgatggtgaccacgcgcgacgacgacgccggggcagggggaggaggaagcgatgccgccgacgacagcttggtgagcctcaccatgaactccacgctcatgtaccagggccaggagatagcgggggcgatggccggcgaggccaggaaagggagcggcggcggccgagggagcccgtccaacttgtacttccccactgccttcccataataagtatttagtttccttcatcaagcaagcaatgccttttgttttcatacatatatgcatccatccatccaaagatgatggatcttcaatttcgttgtattagatttttaatctgcattgtgatgtgaggatgcatgatggtggtgtggctagctagatactaatgcaagaatttcatggtatttgatgtggattaattgttccatgcatcttagtacatgtaaatgatccgtctattggtctgggcagcaactgttttactttactttgttc

SEQ ID NO: 227 - DNA, 1767 bp, Zea mays
  Clone ID: TF_ZmC26105_1
gtcgccgccctgcccaaggcggcctgcctctgcgtcgacgaggacgcctgcgcgcacgtcggctgccgccccgccgtcgccttcatggcgcaggtcctcttcgccgcgtccaccttcgacgtcgccgagctcaccaatctcttccagcggcggctccttgatgtccttgataaggttgaagtggacaacctcccattggtcttatctgttgccaacttatgcagcaaatcttgtgtgaaactgcttgagaggtgccttgatgtagtagttcggtcaaaccttgatatgatttctcttgaaaaaaagttgcctccagatgttgagaaagaaattgttgatgcaagggtaagccttggattagtttcaccggaagacaagggcttccctaacatacatgtaagaagaatacacagagcactggattctgatgacgtggagctagtccggatgctactcaaggaaggaaaaactaatctcgatgatgcatatgcattacactatgccgtcgaacattgcgactcaaagatcacaacagaacttctggatctcgcgcttgcagatgtcaatcataggaacccaagaggttatacggtccttcacattgctgctatgaggagggaacctaaaatcattgtctctcttttgaccaagggagctcggccatcagacctcacatttgatgacagaaaagcagtgcagatctccaaacgacttacaaagcatggggattactttgggcctactgaggacggaaagccttctcctaaagatagattatgtattgaggtactagagcaagctgaaagaagggacccgcaacttggagaagcatcagtttctcttgcgatagaaggagactctgcgcgtgggaggctactctaccttgaaaaccgagttgctctagcaagaatactgtttcctatggaggcaagggtagcaatggacattgctcaagtcgatggaacactggaattcacccttgtttctagtgtgaatctgcctgccgagatacaacggacagttgacctgaacgatactcctttcacaatgaaggaagaacacctggctcggatgagagccctatccaagacagtggaagtcgggaagcgtttcttcccgcggtgttcgaaggtacttgacacgatcatggacgacgaagccgagatggcttccctcgggcgagacacatccgcggagaagaagaggaggttccatgacctgcaagacctggtccagaaggcattcagcgaggacaaggaggagaacgacaggtccgcggcgcggtcaccttcctcctcgtcgacgacgacgacgtcgatcggggccgtccggcctcggaggtgaaagggaaaacatgcatgggttctgtttccgtcccgccattttggtagccgatgcggtggccacatagagaccgtaatcatgctcacttttgctggcgtatagcattaatgcagaacacgtatactaactaactatataatatacgagtaggtgtagatcggtactggaggttgtaatggcagtagcgaaacatagtgcattctggcgggcgtgtgtgtcgagcaggtagctggctgctcttgattgtaatggcgttttgagcagctaactaggatccctcttcacttcactcgaaaagggtctggcatggcttgtggaattgtggtgtgctggatagtgtcaggttcagtgtcgcaaaccctgaagaaatgcaaacatgtagtgttgccctatctaccaaaagccaaggggaagtgtttgtcc

SEQ ID NO: 228 - DNA, 830 bp, Zea mays
  unsure (1)..(830): unsure at all n locations
  Clone ID: TF_LIB4980-056-A1-K1-B8
aggccggccgggccgggttccaaaatggggtcgccacgaaggaaaaattcagtctcgtctcgccttcaatttcccatccatttctcccttccccgacccgaaccaccacgtattaaaatctgccccctcctgccactgccagcgaccaatccaatccctacctgcccgggaaccacccgtcgggctcctcccgccctcctcgccgcatctgcatgcggcggggatctccgggttcgctccgtcaccggagccccaatcaccgccacctcatccaagcccccgaatcccccgggcgcgcgcagcacaaccttgccgcgatcgcgcgcgggaaccgccgctgattgggtcgtgaaagctcgattttgggcgattttgattcggagaacccgccgtcattcgattttggcgcgcgttgcgagccgggatggggttgcagcagtccaaagaggaactgctgtaccagcaggtcaactacggcaacgtcgacgggattcggacgctccgggggcaaggcgctggtctcgagtggatagacaaggaagggaagacgcccctgatgcttgcctgtatgcgtcccgatctgttcgacgtggccaaggtgctgatcgagttgggagctaatgtgaatgcctacaggcctgggtcacactgtgggacagcattgcaccatgctgccaaganaggacttcagcagactgtccatttactactctcacatggagctaatccgtccataccnaacgatgattgcaatactgccctcgaattggcaagagaaaagggtcatgtgaatggtgtacgtgccatagagggacgactttgtctttttt

SEQ ID NO: 229 - DNA, 493 bp, Zea mays
  Clone ID: TF_LIB4729-023-R1-K1-C10
ccctcgcaggccttccgggtgagcaagaaatggagcaatcggaaggaagcgctagaacaacccgaccgccgccgccgccgcctcagctactcgcctggtgatgggcgtcgaactggcgcaaccgaccgccgccgcggctgcggtgaccaccgctgagcaggctcaggatctcatcgacgccgctaggtatgacgacttggaggacgtcgtcgccctgttctccgctggtgtctcgctggactccacagattcgcaaggccgcacagctcttcacatggcttctgccaatggtcaccttgctatggtggaatacttgattcaaaatggagcgaatgttaatgccaccaacatggagaagaacacaccactccactgggcatgccttaatggacgtatagaggtaatcagggctttgatctcagcgggggctagcgtgagtgctctgaacagccacgagaaaacgccaatggacgaagcggtgaccacaggcaag

SEQ ID NO: 230 - DNA, 788 bp, Zea mays
  Clone ID: TF_LIB4764-089-A1-K1-G1
gggtacctcgaggccggccgggagacaaagtgtggcaattggagtaactcgcctggtgatgggcgtcgaactggcgcaaccgaccgccgccgcggctgcggtgaccaccgctgagcaggctcaggatctcatcgacgccgctaggtatgacgacttggaggacgtcgtcgccctgttctccgctggtgtctcgctggactccacagattcgcaaggccgcacagctcttcacatggcttctgccaatggtcaccttgctatggtggaatacttgattcaaaatggagcgaatgttaatgccaccaacatggagaagaacacaccactccactgggcatgccttaatggacgtatagaggtaatcagggctttgatctcagcgggggccagcgtgagtgctctgaacagccacgagaaaacgccaatggacgaagcggtgaccacaggcaagatgcacgtgatcgacgcgatcggtgcggcagtagctcaagccgagctcgacggcgttactgtctcctaaaaggacctgatgagtacctggagctttgaatgacttgcagccttgttcttatctcacagcggttctgtctgtatcactcgcgaaacctgaatcccccgacgggccagtatccgggcaatatctatactgacggcaatcgcctgttagtgtcattggcacgaggacccgacctgtcgttgtaaaccagatgtgcagatgtcaaagatcaggattttctcctacaaatgttgtagggcccgttgcttgttctccctggccaccttcgttt

SEQ ID NO: 231 - DNA, 2639 bp, Zea mays
  Clone ID: TF_ZmC6144_1
ccggaaccaaaacccccggtcgacccagcgtccgacgacatggcacctttgcaccacgctactgccctgcctactactagtactgtctctttgaaccactttggtggcctaatcccgggcccctctgatgatggcttatgagccccagctttgcgcttgcaggcactgcacggtctggttcttgttcctgagcagttgagctgcgcacaccgacttcttttgcacaaggtacagcagcgcaggcgcagcggcagcccgccgctggatctctcccgaggctccggcgatggagcggtcctgctacttcccgctgcggtgggagagcacgggcgaccagtggtggtacgcgtcgccgatagactgggcggcggccgacggccactacgacatcgtccgccagctgctgcacctcgaccccaacctgctcatcaagctcacctccctccgccggatccgccgcctcgaggcgctgtgggacgacgacgcccgcttcgccgacgcggcccggaaccgcgcgtccgtcgcccgcagcctgctgctggagtgcgagtgcaggaaccaccgccccggcgccggggagaacacgctgctccgggccgggtacggcggctgggtgctctacgcggcggcgtcggccggggacgccgcgttcgtgcgggagctgctggagagggacccgctgctcgtgttcggcgagggcgagtacggcgtcacggacatgttctacgcggcagccaggggcgggagcgcggacgtgttcaggctgctgctcgaccacgccatgtcgccgaggtgctcgacgagttgccggaacggcgaagccagcgccaggcgcagctccgtgttccggcttgagatgatgagccgggccgtccacgccgcggcgaggggcgggagcgtggagatgctcagggagctgctcgacgagtccagcgtgtcgacgtatctcgacatccgtggatccaccgtgctgcatgccgccgctgggagagggcagctgcaggttgtcaagtaccttgtggcctctttcgacataatcaattcgactgataatcacgggaacacagcgctgcatgtagcggcctaccgagggcaccaacctgtcgtggaagccttggttgctgcgtctccatcaaccttgtcagttgtcaacaacgccggtgacacgtttctccactcggcagttacaggattcaggaccccaggattccgacggctcgaccgccagttggagctgatgaggtacctcatacgcgagagaaccgcggatatccagaagatcatcaacctgagaaacgacgcgggccttacagctcttcacctggctgtggttggctgcgcacacccggatctcgtcgagctactgatggccaccccgtccatcgacctgaacgctgaagacgctaatggcatgaccgcgctggcgctgctgaagcagcagctgcgctcagcgacgtccgaccggctcatcaagcagatcgtctctgccggaggggtcttgaactccagcatcctgagaacccggtcagccatcgcttctcagatcaagatgcagggcgggatcgcgagcagccccggcaccactttcaaggtatcggatgcggagatattcctgttctccggcatgggagcggcggagtctctgaggccaagctcctgctccagcaacgggaaggatgatgaccctactcacgcagacgcagactgcgccgagaaccgtggatcgtcggagaagaggctgagctccgcgagccgggccaaagaccgcctcaagatgatgctgagatggcctcgccacaaggacaagacgcccaagaagtcagaggacagcagcccgctggggtcgatcagcaggctgaacgagcacggggccgagacccctgctccgctgaggcagaagtttaccaagacgacggcgctcaacggcaagcggaccctagcggtgaagagctccaccccgagctcctcatccaccaagaagaagctcaacacgaagctcatccacggcatcatggaggccatgccacagctggcgccatctacggcgcggtccgcgtccccgacggacactttcctgaggtcctcggtatcgtccacgccgcagccgctggcgaagctgaaggacatctgcctcgacgacgagatctccatggtgacgccgcccgccggcaggctgaaggatagtgacgacgccatggaggacccctcgtgctccaacaactcgtccatggacgacggctgtggcgccgggacggcagagagcgcggcccggaagcacgggtgcggcaacgggaggctcatcaacatctgctttggcgcgcagggcctcaccgtggaggactcggcgagcgggcagcagacgagcaagatgttcaagcagcagtgcctcagggtgtcctgattgacggcgtggtgtctcgactacaacagcgtggtgtgattggtttggtgtctcgcgtgcagctatgtgtgcttgtttgctttgctccttgcacagccagcggtgaactggtgatccaatgaacttgtgcttgtgttaactgtgacgttgacgaatccacagctctttaacttcctcaaaaaaaaaaaaaaaaaaaaaaaaaaaaaaaaaaaaaaaaaaaaaaaaaaaaaaaaaaaaa

SEQ ID NO: 232 - DNA, 1403 bp, Zea mays
  Clone ID: TF_ZmC1084_1
attgggtccctcgaggccggccggagcgatggagctaccgatgcagtcagtctccagcttgctgctcgccggtccttcgcctagctcgccggaagccgcggagacgacgccgccaccgatgcagccgctacaatgtcaacatgagcgattggtgggcaacatgtgcccttctctctatctcgccgtctacagagggcggatagcggacgtcacggcgctgcttctggaacaacccgccgttgcaatagattgtcaagccactaccacgccgggtattaagggcactgctattatgcacggacagtgcgacatacttgagttgacagcggagaggaacaccgctctacatgtggctgcggagcaagggcaccacgagctgatccgggagctctacttcaggttctcagaccagggcctcctcaatcgcctgaactcggcgctggacacgccgctgcattccgcggcgagggcagggcacgtcagggcagtcgctgttctcttcgagctggcgagggatcgtggcgtgaacattctgggatgcaaaaatgaggcaggggacacggccctgcacctggcggcgaggcacgggcacggtgcagcggtggaggtcctgatctcggcggcggcagaaccggcggccgagctgaacaacgccggcgtgtcgcctctgtacctggcagtaatcagcggctcggtgcaagcagtcagagcgattaccacgtgcaaggacgcatcatcgctggggccaggcgcacagaatgctctgcacgctgccgtcttccagagctcagaaatggttcacctgctattggaatggaggccagctctggccgaccaagtcgacagcggcggcagcagcccgctccatttcgcttcgtccgacggcgaccgcacaatcgtgaaggcgatcctgcgtgcctcaccaccaagcacagtttacaagaaggactcggacggcctgtcggcccttcacgtcgcggcgcggatgggacatcgccgcgtcgtgaaggacatgctacggagctatcccgacgccgccgagctccgcgacggtaacggcggtaccttcgtccacgcagcagccagggagaggcgctcctcggtggtgtcgctcgctatcagcaactccatgctgcgcggcgtcctggacgcgcaggacagggacgggaacacgccgctccacctcgcggtggcggtgggatcgaccggcgacgtggaggccctgctacgggagggcaaggtgcgtgccgacgttctgaacaacgacggtcacacggcgttggatctcgccgccagatcgaacgccggtttcttcgccacgatcaacctggtggtggcgttagtcgccttcggggcacggctccggccgcagaggcaggaccgcctggagcagtggggcggcc

SEQ ID NO: 233 - DNA, 729 bp, Zea mays
  Clone ID: TF_LIB5116-067-A1-PF1-D8
cagaaaaaacttaccatcttattatgtaataagtaccttcatattgcttcttttatgaaggagattgtgaaatgatagaactgttgcttgcaaagggagcttatgtagacccgatagctgaggagattgggacaccactgcatcttgctactaaggaacaacaagtcggtgctatgaagactttattggagcataatgcagattgcaacaagacgtacatgagctatggactttatcctatgacacccctcttccaggctgtaaatgtatcatcactacaatgcgtgaagctcctggttgaggctggcgctgttatcaacccagattgtattgaaactgtttcacttgattctgcaatgggaaatgacagctcaacagagtgcttaaatttcttactgaaggctggtgccaagcgtaatgcctctaatgatgctgctgtccacgccagcgccagaggacgagtcgctggcaccgctcggcgatctggcagaggacgaggacgtgaccaggggccgcgacaacaacaggagcagcacgttgcctgtggggaagaggtcgaggtcaaagtcaatcctaaggtgcttattggatagttattcagtcagttttatcatctttagggcctatttagtttgtggctgcagtttgccacatcttaggtagccaagtttggcctagcacgccaaacttctcttcagcaggactcaaatctcagttactatctttata

SEQ ID NO: 234 - DNA, 2096 bp, Zea mays
  Clone ID: TF_ZmC13193_2
gtgcttataggggacggcaagacaaagaaggttgtactcctttacactgggctgctattcgggggaaccttgaggcatgcactgtgctagttcaggttggcaaaaaggatgatttgatggtgaaagacaaaactggcttaactccagcacagcttgctgccgataagaatcatcggcaaattgcgtttttcctcgacaacgctagaagggtacatgacagaggatgtggtgcgaacaccagatttgggaaattgtcaaaattaggccttgcaccttttctttggtgcaccattattggcatgcttattacatacgtacactctgttatattaggacaatatgtcatgactatgacagcaccatttgggatgttcgcatggtcaggagtttttcttgcaactgctgggttggtcatgttctataaatgtagcaggaaagatccgggttacatcagcataaatacaaggggctcgcaaaatcaaagggacgatgaaccactgctgaagatggagttagaaaatcctgcgcttctttttggcaactggtcacaactttgtataacctgcaaaatagtcagacctgttcgttcgaaacattgttctacatgtgatcgttgcgtggagcagtttgatcaccattgcccttgggtatctaattgcataggaaagaagaacaaatgggaattcttcatgttcctcaccttagaagtttttgcaatgatcattactggctctgctgccattataagacttgtaagggatccagattctccatcatcttttggtgcttggattcattattctgcgtttcagcatcctggggttgtttcatttctcgcattggattgtttccttttctttggagttgcagttcttacagtttctcaagcatcacagatagcaaggaacattacaacaaatgagatggcaaattccatgagatatgcatatctcagaggcccaggtggcagattcaggaacccgtatgatcatgggattcgcaagaactgctctgacttcttgttaaatggatacaatgaggacactgaacggctagaccagacattgcacactgatgaggagatgggaatgatacagatgacaagagcggtttcgcagaatggtgacaatcatttacatcatggtaatggcacggaacatagttgcgctgattcacaggcaagcccaaaacctcatagccaagtgggttcgcctcagtgttgtgatcacagtaagaggactgataggacactgttgggcctaggtttgggccttgggcgaaacagtgcatcccggcagtatgttcggtctcttatcccattgtgatctatcatttggatatcatgtgttcgtttcagtgtagattggatttgttcactgctccggccccatcttttatacgtgcccttgacatggttcaccatgtaccattggctggtcagggacattgttgggccattagcacaggaatactgagatatatctagtgtttgtagttttggggtgaactcagagaagttgaaggtaacgacttggcttgcgaatatcagctgatctgcactcgggaaatatcagagagcttgtgcagaaaaggtaacagttatgggcttatggcagatgcagtagcatgagatgtcttcataattgttgtgtacatcaggttcagtggtcttgggggcctccttcttctgaaggtcttaaaaacacggttaaccatttattttcagtatgttattaagtattacaggagcttcgttactagaaaaacttcgacatagatcaatgaaagcacgacgaagcaagctttgttacgttgtcacagtaagtcgatgtagggagaatgtgttgttcaagctgctgagtgcaaatgataatattgtccctgtgacatttgtaaatcttgtatgtaatctttgagggtatgaatgtaatatcgtacgaattgtacgattgcttataaatagatgaacaatactgttcacactgaattgagattgcattcacgctttcgctttcaagcaagccgaatatacaaatgtaatgtacatcatgtatctctttgttaatatatgagatgtatcttgatgttgtttggcc

SEQ ID NO: 235 - DNA, 2727 bp, Zea mays
  unsure (1)..(2727): unsure at all n locations
  Clone ID: TF_ZmC12604_6
cctcgagggcctggccgggaaaaaaaaaaaaaaaaaaaaaaaaaaaaaaaaaaagaaaggattccacgctgccctcggcgctgcgcctggccccggcacctacctcccccctccccacctcgccgccggcgggtggagtcgggctggagcagccgctctcctctgttaccccctaaccccctataaagaaaaagaaaaaaacagagagagagcgagcgaccggcggctcggcagccatggggcacggcgtcagctgcgcccgcaccggtgacgagcacgactacttccgcgcggcgcaggtcggggacctcgaggccctggaagcgctcctcgacgctgacccctcccttgcccgccgcgccacgctctacgaccgcctctccgcgctccacatcgccgccgcgaatggccgcctcgaggtgctgtcaatggtcttggatcacggggtgccgccggacgtggtgaatcggcacaagcagacgccgctgatgctcgcggcgatgcacggcaagaccgactgcgtgctgaagctcctgcaggccggcgccaatatcctcatgttcgactcccagcacgggcggacctgcctgcaccacgcgtcctacttcggccacgtcggctgcctgcaggccatcctcacggcggcgcggaccacgccggtggccaactcatggtttcctggtagcacgtcgctgcacctcgccgctcgcagcgggagcctggattgcacccggaagctgctcgcctggggagcggatcgtctccggagggatgttgccaggaggatcccttacgccgtggcgctgaagcgcaaccacgaggcgtgcgcggcgctgctgaacccgtcggcggcggagcccatggtgtggccgtccccgttcaagttcatcagcgagctggagccggaggccaaggcgctccttgaagcggcgctgacggaagccaacagggagagggaggagaagatcctcaggggcaccaagcactctccgcatcctcccacctgggaccacgcgagcgacgccgccgacgccgacgccatcgacgacgcgtcctcagatgtatgctttgtgaccgctgacaaatgtgggacctgatgcatcatcgcccattttgcgctcacttgacttcactcacagcccagcgccagcgacgcggagctgtgctgcatctgcttcgagcaggcgtccaccatcaaagtgcagnactccgggcaccaaatgtgcccggcgtgcacactggcnctgtnctcccacagcaacccaaacccgacaactctnacgccgccgtcnccggcctgcccgttctgccgcggcagcatctcgaggctgctggtggcccgggcgagcccccaccccgatgacggcgacggcgtggacaagcccgagcacgacctgtgatcggcatttgatgctgtgcgtggctgagcagacagcagagcacgaccattttaaaagctgaagcaggcattgccactggctttccaagatgagagacatcacatccaagcgtgattatctactacttgtaatgcatcctcttcttctcccccatgtctggtctatttttgggcatgcagctgcgcgatacggttgagctgagcttgagccaccgatgtgcactggactccgaaggaggcattgcatgttgtaggacagcacagcagcaacagtggtaccggtcggcaggcaggcaggcaggctccgtgagcggtgctccggccatggccgtccggaggtggcagccagccaatggtccgtgaccgtgatgcacgcaggagcggtgcatggagcgaggctcagagcagccgcagttattgtgtgccagtgtcgtacaagcgctgctcacaccacaggcagcagatgcatgccgtcactgaccagctgctttcctgcaagatcttctcgggagctatggtcggtcaggcatgctgcaaaagcttgaccccttgccaggaaggaagcagagataacccatccctacctccctcgacgtcgacgagatggctatccgtttggacatgaccaagagtaatgctcccagtttcgagcccaacgccgccattactccgacatcacccaagccttacctccgctccaagcgtgtagcccggctacaggctcaaaccctccaggcctccaccagcaaaatcgtgatgcttttctaaaatagccaaatatttaccagcaaaataaacataaacaatcaagattaccttcgagcaggcgtgcagcatcgaggtgcaggactgcgggcaccagatgtgcgcggcgtgcacactggcgctgtgctgccacagcaagccgaacccggcgacgctgacgccgccgtcgccggcctgcccgttttgccgcggcagcatctcgaggctgctggtggcccgggcgagccccgacgccgatgacgacgacaaggccgccgccgcctggtccccgcagctcgtccggcggcggtcgcccaacctcaaatgggcggcggcgacggcgtggacaagcccgagcccgacctgtgatcggcatttgatgctgggggtggctgagcagacagcagagcccgcccattttaaaagctgaagcaggcattgcccctggctttccaagatgagagacatcccatccaagggggattatttactggagtacttgtaaggcatcctctttttctccccaaaaaaaaaaaaaaaaaaaaaaaaaaaaaaaaaaaaaaaaaaaaaaactcgagaagggg

SEQ ID NO: 236 - DNA, 1950 bp, Zea mays
  Clone ID: TF_ZmC4298_1
gggaaaagaactcaggaagtggttatttcgagcattctccgcggcttgcacagcatcaccggacaagcatgatgaaacctgacaagccaattgacttgcttaggaaggtggctggcaataattgctgtgctgattgtggtgcttcggagcctgattgggcatccctgaaccttggaattcttttatgcatagagtgttcgggggtacacagaaatatgggtgtgcatatatctaaggtaagatccctgacgcttgatgtcagggtttgggagcaatctgtaatcaatctctttcagtcaataggcaacacttttgccaattctgtctgggaagaaatgttaccttcatcaagctgtgttgaccatggtgatatttcaagggctgttggattagaaaacatgttgtttggttttgttcccaagtagcctaataaatcccgttagggcattgttcttttagtcccctggaggggcggcttgctagtattcatggcgtacacatgtcgcaaaaggaagttgctgttttgaaaggcgtccgccctcttttgggagaaatttattcatgccaagtatgctgagaaggatttcgtgcggaaacatggtatggatgggattcaacttgcagaacagatgtgggacaatgtaagttcgaacaacaagaagggggtgtacagcttgatcgtggggtcaaatgccgacgtagatttttcctatggtcatacatcattcaattcggctttgactctggcgaaaagctctcctcctacaagagcaatcagcctctcacatctaacggaagctctagatgttttgaccgcaatccactcgacacagggataatcggggattctatttgtcccgcccgtctagccgggcgcacattggcgccgtactgcaagagcagctcaaccatgcccaggtccgcggcgcggcatgctagatggagcaaagataatccttcaacagattcaagagggcggacgccgcttcatcacagcatcatgaaagggcgacatgtgtacgccaagctactgctttccaggggcgccgattctcaagccgcggatcgagatggtaggacagcgttacagtatgcaatcgacagcggaaccatagaggacgaagagatccttgttttgctagaggacccaagtagataaatcacgtaggtgtagtagtccaagtctcgagttcctgccgtcctgcggtggtgcattgtggctgccttttgcagtcacctggcacacacagggtccgaggatgccttgctagtattcagtctctgcctttgtggcaagaggaagttatagtttttctaggtctgtctgcggttttggtcgcgcttagggtaaaagtggcctgtttgtcgtggatgcagtttgcaagttgttggtttgcctttgtttgcagatgtcgcagtgtacacttgggaagtggctgccattgttgcgactgatgtacatatagcgatgtctgatacaggttatttatgcaagaatttagatcggtgaaacagaatccccggtacaacccttctcgagtggattgcggtcaaaacatctagagcttccgttagatggagaggctgattgctcttgtaggaggagagcttttctcagagtcaaagccgaattgaatgatgtatgaccataggaaaaatttacgtcggcatttgaccccgcgatcaagctgtacacccccttcttgttgttcgaactctacattgtcccacatctgttctgcaagttgaatcccatccatgttatgtttccgcgcgaaatccttctcagcatacttggcatgaataaatttctccttcgctgcaatagaatcagactgtttaggcttccttgggtgcaaatgccatggcacatgttttgataatccaccagccctgcagaaagtagaccttgcaagtggcaataaaaggaccatccattctacagcatct

SEQ ID NO: 237 - DNA, 2164 bp, Zea mays
  Clone ID: TF_ZmC2014_1
cacgattcgtgcccgccggccatcaggtccgcggtcgagctcatgtacgcggcgtgtaccttcaagatccccgagctcacctcgctcttccaggcgaacctggtggcttgaagtctatgaattgaaatggaatcattattcattaggctgctcaacatttgaatattacatttatggctgtatagtttatcaatcagtttaacatcaattgagctttgctttgtctttacggaaggcaaatggttaacatggtcttcttctacagcggcggcttcttaattttgtagacaagactctagtggaggatgttattcctattctggaagttgcttcccactcagggctgactcaagtgatcgacaaatgtattcaaaggattgctagatcagatctcgacgatatatctttggataaggagctccctccagaagcagttgatgagataaaaaatttgcgcaagaagtcacaaactgctgatggtgatacgttcatttcggaccctgtgcatgagaaaagagtcagaagaatccacagggcacttgactctgatgatgttgagcttgtgaagttgcttcttaatgagtccgacatcacattagatgatgccaacgcattacactatgctgcttcttactgtgatcctaaagttgtctcagagctgttagatttggcaatggctaacttaaatttgaagaatagccgtgggtacacagcactccacttggctgctatgaggagagaaccagctataatcatgtgtctccttaacaaaggggcaaatgtgtcacaactgacagctgatggcaggagcgcaattggtatttgtcggaggttaacaagagcaaaagactacaatacaaagatggagcagggtcaagaatcaaataaagataggctgtgtatagatattctagagagggagatgatgcggaatcctatggcggtggaagatgccgtcacctcgcctttgttggcagatgatcttcacatgaagcttctctacctggaaaacagagttgcatttgctagattgttctttcctgctgaagccaaggtcgccatgcaaatcgcacaagcagacaccacagaagaattcggcggtatagttgcagttgcagcaagcacttctggtaaactgagggaggtggaccttaatgagacgccagtgacacaaaacaaaaggctccgttcaagggtagatgcactgatgaaaacagtggagctgggccgtcggtacttcccgaactgctcgcaggtgctggacaagttcctggaggacgatctgccggaaggtctggaccagttctacctccagaggggcacagccgatgagcagaaggtgaagaggatgcgcttctgcgagctgaaagaggacgtgctgaaggcgtttagcaaggacaaggcggagggcagcgtgttctcgggcctgtcctcgtcgtcgtcgtgctcgccgccccagaagtatgcccagaggtgatcaaggcaccagtttttgccgtatagtttgttatcatggtcttcgagacttggacccggacagcatatagggacatgtacacctgtgtatgtatagtgcttacaattggcgtaagtagaactatatgtatggaacataaggaaacatggcaggaacaccgtgcaaaaagatgaaaagatggccgaagtgctctatgcgagtgcccacctgattcgatggccctattcaacggcgccctgtcagcatgctgcatgcccactgagaccttcggttgcatagggataggaggagatttctgttcaattttggctagcaagtgatataggggtgtttaggactgtttcactttatgaaaatcaacttagctcataaacacttttaacttcaataacttaggtcctgtttggagtggctgtatttttctagtcccaagaaaataatgtggtatctgagaataccatggtctagaaaccaaaatgtgtttggcagactcttttaaaccatggtatttaaaatcttggttttgacaagaccacattatttctgggtatagaatactgtcagccgagttcggctcggctcggtgcggctcgttgactgaacgagctcgactcggctcgtccattccacgagctggtgaaagaggctcggctcggctcgaccttagctcgcgagccatattcttgt

SEQ ID NO: 238 - DNA, 1525 bp, Zea mays
  Clone ID: TF_ZmC2014_3
tcgagccggcgggtccttcagaccccgagctccctcgctcttccagcgccggcttcttaattttgtagacaagactctagtggaggatgttattcctattctggaagttgcttcccactcagggctgactgaagtgatcgacaaatgtattcaaaggattgctagatcagatctcgacgatatatctttggataaggagctccctccagaagcagttgatgagataaaaaatttgcgcaagaattcacaaactgctgatggtgatacgttcatttcggaccctgtgcatgagaaaagagtcagaagaatccacagggcacttgactctgatgatgttgagcttgtgaagttgcttcttaatgagtccgacatcacattagatgatgccaacgcattacactatgctgcttcttactgtgatcctaaagttgtctcagagctgttagatttggcaatggctaacttaaatttgaagaatagccgtgggtacacagcactccacttggctgctatgaggagagaaccagctataatcatgtgtctccttaacaaaggggcaaatgtgtcacaactgacagctgatggcaggagcgcaattggtatttgtcggaggttaacaagagcaaaagactacaatacaaagatggagcagggtcaagaatcaaataaagataggttgtgtatagatattctagagagggagatgatgcggaatcctatggcggtggaagatgccgtcacctcgcctttgttggcagatgatcttcacatgaagcttctctacctgggaaacagagtgcatttgctagattgttctttcctgctgaagccaaggtcgccatgcaaatcgcacaagcagacaccacggaagaattcggcggtatagttgcagttgcagcaagcacttctggtaaactgagggaggtagaccttaatgagacgccagtgacacaaaacaaaaggctccgttcaagggtagatgcactgatgaaaacagtggagctgggccgtcggtacttcccgaactgctcgcaggtgctggacaagttcctggaggacgatctgccggaaggtctggaccagttctacctccagaggggcacagccgatgagcagaaggtgaagaggatgcgcttctgcgagctgaaagaggacgtgctgaaggcgtttagcaaggacaaggcggagggcagcgtgttctcgggcctgtcctcgtcgtcgtcgtgctcgccgccccagaagtatgcccagaggtgatcaaggcaccagtttttgccgtatagtttgttatcatggtcttcgagacttggacccggacagcatatagggacatgtacacctgtgtatgtatagtgcttacaattggcgtaagtagaactatatgtatggaacataaggaaacatggcaggaacaccgtgcaaaaagatgaaaagatggccgaagtgctctatgcgagtgcccacctgattcgatggccctatccaaaaaaaaaaaaaaaaagcggcagcttctatagttcaccta

SEQ ID NO: 239 - DNA, 2260 bp, Zea mays
  Clone ID: TF_ZmC1587_1
ctgtgcggcgctcaggcgccggccgggaaccaagcaaaaactacacgtcttgcccaaacccaaagccgaagcccctttcccctcccccgcttgccctcttctgccattttgtcgaacacctcccccgatcgcgcgactccggccatggcggaaaactccgacgcggctgcggccgtaactgcgcggctactggagcttgcggccgacaacgactccacggcgctcggggacctcctcgcggtacacccgtcgcttgccgacgagcccgcgccgtggtactccccggcgcgcggcgcggagcctatgaccccgctcatggtcgcggcggcgtacgggtccgtggcctgcatcgatgtcctactctcgccgccccacctgaccgatcccaaccgcgcctcaccgtcgtccctctccaccgcgctccacctcgcagccgccggcggcgcctccgctgcgccggctgcggtatcccgtctcctagctgctggcgccgaccccacgctgctcgaccatctccatcgccggccgtccgacctcgtcgccctcccacccaactcgctcccgcttaagaaccacctcctctccctcctcggagggcgcaaggagtggccgccggatccctccctccccgacatcaagaacggtgcctacgcctccgacgacttccgtatgtactccttcaaggtgcgcgcgtgctcgcgcgcctactcccacgactggacggagtgccccttcgtccatcccggcgagaacgcgcggcggcgggacccgcgcaagtaccactacagctgcgtgccctgcccggagttcaagaagggggctggatgccggaggggcgacatgtgcgagtacgcgcacggcgtgttcgagagctggctccacccggcgcagtacaggacgcggctgtgcaaggacggcctcgcctgcgcgcggcgcgtctgcttcttcgcgcacacgcctgaggagctccgtccactgtacgtgtcgtctgcggggtcgcgcagcgcgatgggaatggggctgccgtcgccgggtgcgtcgttcacgccgccgctctcgccttctggcgggggaagcggtgtggccggcgcgtggccgcagcccaacgtgcccgcgctgtgcctccccgggagcgcggggaaccttcagctgagccggctgcgcactttgatgagcgcgcgcagcatggcagtggacgagctgctcgcctcggcggattacgacgggctcgtcgggtcgccagcctctctgcggtcggcgaggggaaagacgctcgtgccgtccaatcttgacgatctgttctcggcggagatggcgggcgccgcggcatctcactcgcctcggtacgcagaccagggcggctctgctttctcgccgacgcgtaaggccgccatgctgaaccagttccagcagcagcagagcttgctgtctcctcgggccacggttgtccctgagccggtgtctccgatgagctccaggttgctctcggcccttgcgcaacgggagaagatgcagcagcaaacgctgagaagtatgagctctcgtgacctgggctccggcgcctccgtcctggttggctcaccggttacctctagctggtccaaatggggaatccccccgagcacaccagattggggtgctgacgccgaggagcttggccgcctcaagcgatcctcgtcctttgagctccggagtggtgccaacggtgatgagccggacctctcatgggtcaatacccttgtgaaggagccaacgccggagaagccatccatcaacgggacagccgcaaaggagtctattgcttctttgagccaggctgcaagtcatgagggtatcggcggtgaggacgacactgccggggtcatcggtggctggcttgaacagctccagctggatgagatggtagtctagaacaaacacaaacataaatcaaataagaaaggtgccattttttccctgtgatccaccatttgcttcaccaacttactacatctaccaaccttcataccttgctggtaattactggtgatacattcttttggagttggttagtgtaggtgttgagatttccatcaccatttagggtccaccacaagtgagaaattaaggaatggaaacctagccaattttatggaatttccacatcccatgcttcatgtgaaggagcagtagggtgacttgtcgttgcttcaaactcttctaaggcctgcaatggtattgtactacgtaggattgtgtctgatgtaaaatccaatggtcc

SEQ ID NO: 240 - DNA, 2218 bp, Zea mays
  Clone ID: TF_ZmC11259_1
acggattctattaccatgcaagaccagttctcagggctctcaaataacggagttggctatccatgggcattttgaacccttctccagagaagatacaacaatttccttaggacagacaaacaagtttaccattcgtgaggtctctccagaatgggcattttcctatgagatcaccaaggtcatcattacgggagattttctgtctgatccatcgaatttgtgttgggctgtgatgtttggtgacaatgaggtacccgttgaaatagttcagccaggtgttctccgctgtcacacaccactgcacagcaatgggaatctcagaatctgcattacttcgggaaacagagaagtttgtagtgaattcaaagactttgagttccgctcaaaaccaacctcttctagtttcacagacattgcaccatcttctagacatctgaaatccagtgaagagttattacttcttgcaaaatttgctagaatgcttttgtctgggaatggaaaccgtgaagttccagatggtgatccccaatctggacagtgtccaaaacttaagacgaacgaagagctctgggataggttgattaacgaacttaaagtagggtgtgaaaatccattaagctcggttgattggattgtggagcaactgctgaaaagtaatctacaacagtggttatcagtgaagctcagaggattcaatggaacggattttttatccaagcaagagcagggtattatacacttaatctctgccctaggctatgagtgggcattgtctccagttctcagtgctggtgttggtctaaattttcgtgattcaaatggatggactgctcttcattgggctgcttattttggaagggaaaagatggttgctgcacttcttgctgctggtgcatcggcaacagcagttactgatcccactgcacaagacccagtgggtaaaacagcagctttcctggcttctgaacgagggcatacgggacttgcaggttatctttctgaagtgtcgctaactagctatcttgcatcactcactatagaagaaagtgatgtctcaaaaggatcagctgaagttgaagcagagagagctgtggaaggcatatctcagaggaatgcccaacggcatggtggcacagaagatgagctatcaatgaaggattctttggcggcagtgaggaatgcagctcaagcagcagctcgcatccagaatgctttccgtgccttctctttcaggaagagacagcagaagactgctcgacttagggatgtgtatggaatgacccaagaggatatagatgaacttgcagctgcatcaaggttgtaccaccaagctcatgcttcaagtggtcagttttatgatagagcagctgtttcgattcagaagaaatacaaaggatggaaaggtcgcaaacattttctcaacatgagaagaaatgcagttaaaatacaggctcatgtaagaggccatcaagtgagaaagaaatacagaacaattgtaagcactgtcagtgtgctagagaaagtaatacttcggtggcgccggaaaggtcatggcctacgtggcttccgagctgagcagcaaccaatggtcgaagcaatagaggaagatgatgaggaagacgacgatttcgatgatgatgaagcagtcaaggtcttccgtcggcagaaggtcgatcaagctgtaaaagaggctgtgtcaagggtgctgtccatggtagactctaccgaagcgaggatgcaatatcgacgaatgcttgaggagtttcgccaggcaactgcagaattggaaggatcaaatgaagtgacatcaatatttgacagtgacttagagttattagggatcaacaatttcatgtaaagagcatttcggtttcaagatctgagcaatgacataaattaagtatctacggaatgggtttcacctgctactaactaggacctgataatggtcgtcagtttatacagtgtttacgaaatggaaagtagattattgctgctatgatgtattgccactctatatttaggtgtattttcccagtggcagttcaatgaacactacattgtggtgtttgtaacttttaataccccgtttggatgtagatattagagtacaaaattgaaaattagaatcagctttccaaaaaaaaaaaaaaaaaaaaaaaaaaaaaaaaaaaaaaaaaaaaaactcgaaaaggggaaaaatttatgtaaaatcctt

SEQ ID NO: 241 - DNA, 824 bp, Zea mays
  unsure (1)..(824): unsure at all n locations
  Clone ID: TF_LIB4765-073-R1-K2-C9
cattgggtacctcgaggccggccgggtactactgatagtgacactgaccgtgttgtctcatcactagctagtatcatgcctgcttccgttctctatacttcttttatatacacacaaaaaaaaactggactactgatatgtgttcatagatatcgtgaaggtacttctggaccatgatccatcccttgggaaaacgtttggccaatcgaatgtgactcctctcataactgcggcgatcagaggccacatcgaggtggtgaacctactgctggagcgagtttctgggttggtcgagttatcaaaagcgaacggaaagaatgccctgcacttcgctgcccggcaggggcatgtggaaatcgtggaggctttgctacatgccgatacccagcttgctcggaggactgacaagaaaggccagaccgctctacacatggcagtaaaaggaactagccctgaagtcgttcaagcgcttgtgaacgccgatccggccatagtcatgctgcctgacagaaacggcaacctagctttgcacgttgcaaccagaaagaaaagatcagagattgtaaatgtgcttctgctccttccggatatgaacgtgaatgcgttgaccagngatcggaagaccgcgttcgacatagccgagggccttcccctgtcagaggagtctcaagaaatcaaggagtgcctgtcccgtgccggtgcggtcagagcaaacgatctgaaccagcctcgggacgagctgaggaaaacagtgacagagataaagaaggacgtgcatacccagctggagcaggcgaggaaaccaacaagaacgtgtacggcat

SEQ ID NO: 242 - DNA, 829 bp, Zea mays
  Clone ID: TF_ZmC49809_1
cggacgcgtgggtgacggtggactcctccaacaccacggcgctgaacacggcggcgacgcaggggcacatggacgtggtgaggctcctgctggaggtggacgggagcctggcgctgatcgcgcgcagcaacggcaagacggcgctgcactcggcggcgcgcaacggccacgtggaggtggtgcgcgcgctgctggaggcggagcccagcatcgcgctgcgcacggacaagaagggccagaccgcgctgcacatggccgccaagggcaccaggctggacctcgtcgacgcgctcctggccgccgagccggcgctgctcaaccagacggacagcaagggcaacaccgcgctgcacatcgcggcgcgcaaggcgcggcacgagatcatcaggcggctggtcacgatgcccgacacggacgtcagggcgatcaaccggtcccgcgagaccccgctggacacggcggagaagatgggcaacacggacgcggcggaactcttggcggagcacggcgtgcagtcggcgcgcgccatcagccccggcggcggcggcgggggcggcaacaagcaggcgcgcgagctgaagcagcaggtgagcgacatcaagcacgaggtgcactcgcagctggagcagacgcggcagacgcgcgtgcgcatgcagggcatcgccaagcgcatcaacaagctgcacgaggaagggctcaacaacgccatcaactccacgacggtggtggccgtgctgatcgccacggtggcgttcgcggccatcttcacggtgcccggggagtacgtgcaggacccgggcagcctggcgcccgggcacgatctgggcga

SEQ ID NO: 243 - DNA, 1844 bp, Zea mays
  unsure (1)..(1844): unsure at all n locations
  Clone ID: TF_ZmC2160_1
cgggacgtaccgaaccgtctacagtccaccgtattgttctaatttgaaatgggcgtggggggggtgcttctaaaatgcttcccatgggatgctgtctacaggggttgtgggagtaaagaagaagtaagatacctgctgtggattcgcttgacacgggttaccaagggcacagaattcttctggggtgtagagaaggacatacgtatgaggggggggcttcactangatagtgaanctcatagttgtggagctctactgtgcgcacacaggagcctgtgtcttctattacctgggtacaacgcttcctgaatcaatggaaggatacacgtggattgggagtctgcagttgggggactacaagtgggcacatttcagggggatcgatcttgccaagcgctatataacatgcggtatacttcgccattgtgaccatgggaacaggtggttacggtgacattcatgctgtgaacatcaggggaatgatattcatcatgatctacggttcctttgacatgattctaggagcttacctgattgggaacatgactgccggcatcgggaaattcggctcgagtttagacaagatgaaggaggtgatcaggtacatgaacagaaacaaacttgggaaggaaataagggagcagatcaagggacacctgaggttgcagtatgagagcagctacaccgaagcatccgtccttcaggatatcccgatttctatccgtgcaaagatttctcaaacgctgtataagccatatatcgaaagcattccactgttcaagggatgttccgcagagttcattcaacagattgtgatcaggttgcaagaggagttcttcctaccaggagaagttatattggagcagggaagtgcagtcgatcagctgtacttcgtctgccacggtgcactggaaggtgtaggcatcggtgaagatgggcaagaggagactctgctaatgctggagccagagagctccttcggcgagatctcaatcctctgcaacatcccgcagccctacacggtccgcgtctgcgagctctgccggctcctgcgtctcgacaagcagtccttcaccaatatcctggagatctacttcgtcgacgggaggaggatcctgagcaatctctccgagagcgagtatggcggacgggtgaagcagctggaatcggacatcacgttccacatcgggaagcaggaggcggagctcacactgcgggtcaacagcgccgccttctatggcgacctgcaccagctgaaaagcctgatccgggcaggtgctgatcccaagaacaccgactacgacgaccgctcccctctgcatctcgcggcttccagagggtacgaggacgtcgtgcagttcctcatcaacgaaggcgtcgacatcgaccttaccgaccagttcgggaacacgccgttgctggaggcggtgaagcaggggcacgaacgggtggcagcgctgctgttcgccaagggtgcgaagctgagcctcaagaacgccggcagccacctgtgcacggcggttgccaagggggactcggacttcatccggcgcgccctggcctacggcgccgacccaaactgcagggactacgaccaccgcacgccgctccacatcgccgccgccgagggcctctacctcatcgccaagatgctcgtcgaggccggcgccagcgtgttcaccacggacagatggggcaccactccgctcgacgaagcgcgcaagtgcggcggccgctctagaggagcgctgctggaggaggcgcgggccagcgagctgtccatgttcccggagcgcggcgaggaagtcagggacaaggtgcacccgcgacggtgctcggtgttc

SEQ ID NO: 244 - DNA, 471 bp, Zea mays
  Clone ID: TF_LIB3069-022-Q1-K1-C8-3Aa
cgctgcaactaaaggccataacgagatcgtcggattgttgctcgagaacggagctgatgtgaattccttaaattattgcggccagacagcattgatgcaagcttgtagatacggacattgggaagttgtgcaaactcttctgctttttcgatgcaatgttacaagagctgattatttatctggaagaacagcgcttcatttcgctgctgtgaatggtcacgccaggtgtattagacttgtcttggctgattttttacctagggataaacttaactctctttctgaaactggtgttgtcactgcaaagaacaaatctgagcaaagcgcattgtctaaatttgtgaataaagcggctgatggggggataaacagctattcacaaggctggcttggatggattatttgattgtgtgcagcttttgcttgatcttgaggccaatgttttcgatgggacattttattttggaacat

SEQ ID NO: 245 - DNA, 1000 bp, Zea mays
  Clone ID: TF_ZmC1087_2
aaaaaaaaaaaaaagaaaaaaaaaaatgatgatgctgaccgaaggggaaacagcggccggggggaagcgctagacaacgcgaccgccgccgcctcagctactcgcctggtgatgggcgtcgaactggcgcaaccgaccgccgccgcggctgcggtgaccaccgctgagcaggctcaggatctcatcgacgccgctaggtacgacgacttggaggacgtcgtcgccctgttctccgctggtgtctcgctggactccacagattcgcaaggccgcacagctcttcacatggcttctgccaatggtcaccttgctgtggtggaatacttgattcaaaatggagcgaatgttaacgccaccaacatggagaagaacacaccactccactgggcatgccttaatggacgtatagaggtaatcagggctttgatctcagcgggggctagcgtgagtgctctgaacagccacgagaaaacgccaatggacgaagcggtgaccacaggcaagatgcacgtgatcgacgcgatcggtgcggcagtagctcaagccgagctcgacggcgttactgtctcctaaaaggacctgatgagtacctggagctttgaatgacttgcagccttgttcttatctcacagcggttctgtctgtatcactcgcgaacctgaatcccccgacgggccagtatccgggcaatatctatactgacggcaatcgcctgttagtgtcattggcacgaggacccgacctgtcgttgtaaaccagatgtgcagatgtcaaagatcaggattttctcctacaaatgttgtagggccgttgcttgttctccctggcaaccttcgttttccaaattcagcgaaatgggacccgcacctccaccctctgtttttttcttctccaaattcagcttttgttgcctttaaaattggaatgcaatgtcgtgtccttgtttgagggttgtttttattgatgaaacgctgcaatcaaggattctctccacttggtt

SEQ ID NO: 246 - DNA, 849 bp, Zea mays
  unsure (1)..(849): unsure at all n locations
  Clone ID: TF_ZmC518296_1
gtagtcagaagccaaaattggattctttttcgatttctagggtttgctcatcctcatccccatcccctccgccgtcgccttccccgcctccgaccaaattcgtggtttttgattgctttccggacggaagatatgatccccaactccttcgacaccttcctctgatctcatctgtccccggatccagccaccaaaagaagccatactatggtgcgccgccgcccgtcaccgccgtcttcctcctcctcctcctcctcgtcgccgatgctccacaagaacctccgcgcgctcggccctggcctcaatccgtttgcccccttcggcatgggcaactactcccgctaatccctattccccccctccctcatcccctctgctcaatttctgatttgcttttctccggacccgatttgcttctcccccccttctcgttcttgattggattggattggattggattgctcctctctctgcttgcttggtcggcttcgtttggatctgcttgcgagattaggcaagggggccatggtgcagctccgcagctcgctcagcatgacccgggcgcgtacccgcagcgactcggacgacgccgacgaccgcggctggagccagctccacgtcgccgcccgcaagggcaacctcaaggaggtgagacgtctcctgaatgaaggcatgaatgtcaatgcacccacatggggaccaaagtctcctggcgctactccgctgcaccttgctgcccagggcgggcatgtgaaaatcatggatgaactantngnagcgcggtgcaaacattgatgcccgaaacaaaggagcttgcggctggactcccctgcacatttgctgcaagga

SEQ ID NO: 247 - DNA, 1635 bp, Zea mays
  unsure (1)..(1635): unsure at all n locations
  Clone ID: TF_ZmC9395_1
acatcggccgcgacgccctcgtgcccgtcctcggctatctctacaccggccgcctcaagcccccggcgcaggacgccaccgtctgcatggacgacgcgtgcggccacgggacttgccgcccggccatagatttcgtcgtcgagtccatgtacgcggcgtctggcttccagatctcggagcttgcctccctcttccagcgtcgcctctctgacttcgtttgcgaagcgctggacgaggacgtggtgccgattattcatgtcgcttccacctgcgatctccaggacctgctcaatctgtgtattcagagggtcgcagtctccgctctcgatagccgctacctggacaaggagcttccggctgacatatacaacaagatcaaggagatccgccgccaaccagagaacgccattattctggaccctgagcatgacaagagggtcaggaacatcctcaaggccttggattccgacgacgtcgatctcgtcggcttgctgttgaaggaatcgacggtgaccttggacgatgcattcgcgatacactatgctgcagcctactgtgagcccaaggtgtttgcagagctgctcaaactggactctgctaacgtgaacctgaagaacagcggtgggtatacgccgctgcacatagcttgcatgaggagagagccggacatcattctttcgctggtggagaggggagcctgtgtgctggagaggaccctggatgggcgcgatgctcttactatctgcaagagactgacaagagagaaagactgcaataggaagttggacaagtacgaggagaaaagtaaggcttacttgtgtatcgacattttggagcaagaactcaagaggaaatccttcgttttggaccccatctctatctctatagaggagtcgattgccacgcctttgctggtcgataattttcacatgaggctcataaacttggaaaacagagttgcgtttgctcggatattcttcccttctgaagccaagcttgtcatgcgcatcgcacaagccgattcaacccaagagtttgccggcatcaccaacttcagcagactcaaggaagttgatctaaacgaaaccccaacgatgcagaataggaggcttcgcgaacgccttgatgccttaacaaagacagttgagctagggagacgatacttcccacactgttcggacgttctggataagttcctcaacgaagaatccactgatccgatcttccttgagactgggaccccggaggatcagcaagtcaagaggatgcgtttctctgagctcagagaggacgtgcgcaaggcgttcacgaaagataaggcagcagtggctgcaatagcttcctcggcgtcctcgtcttcgtctccgaggtgcagacgacccaataggaaatcacggtgatgtcagtctgttcaggacacctgcactgggttgtgtgtgttttgacatgtaacactgtttcagtagataatgctgattgtcagatttgctgccgctctacagaagattaagcgaccgtctgtttcaagaattattcagacagttacttgtgattctttcaagcagcagttacaaaaaaaaaaaaaaaaaaaaaaaaaaaaaaaaaaaaaaaaaaaaaaaaaaaaaaaannnnnna

SEQ ID NO: 248 - DNA, 691 bp, Zea mays
  Clone ID: TF_ZmC119_798
gcagctcttgccaagggattataagatccaaaacccaatcaccattagctccagcttgaaccagaagtttcaaacaaggcacagaagagtgttttaatgccatgcttaatggtgtaactttatcattcaaacgctcgttgggatctgcaccgtgctccaataaaatcttcacgatactaggatatcctctaaaggtagcaataatcagtggggtcaagacacttgattccacatcaacacgaactcctttagaaagcaagaatttggctatttcaggacgcccgctctctgcagctgaatgcaaaagactcattcctttatgctgatgatgaagatcagcgccgtgatcaacaagaaaccgcagggctggaaggttcccatatagcacggcatgcatgacgggagtgaagcctcgcatggtgtcagccttgttgacgtcgattttgagatcctcgaccagatactggagagcaggcatgcagccactgtcacaagtggcgtggagggcgtacatgccgaggaagtgggtgttggccaaggtgtcctgaagcccttttccctcaatgtcaatgatctttgcgatctccttgaggcggcggatgtcgccgtagtaggcggccacgaggaggcccgctgcgggaggccagttgtcccgagctttccgaggacgagattcccggccggctcgagg

SEQ ID NO: 249 - DNA, 485 bp, Zea mays
  Clone ID: TF_ZmC1239_2
tttcgcggacgcgtgggctcgcgcggcgagctcctcgagctcgctccccgttccaagctagctagaaaatggccgcggcggaagcagcctcctccgcgccggcgccgtggagctgctgctcgacatgggcgccgacgccaacgcccggaccaggcgcggcgccacgccgctccagatggcggaggccatggggtacgaggccatcgctcagctcctgtgcgcgagaggtgcggaggtggccgccgcgtcggcgttgtgcgccgcgtcgtcgtcttcatcgtccatatcgtgcgcctgatttgctgccggttatcggttgggagagactgttggacggacacgaaggcttgtttgtttccgctgctgctcctgctgtgcgtgagccgagagatgcctacagccgccgtggctggctttaaagtaagaagaagcgaacccgttcgaaattgtactgtactggatagggggtttggtctgctttgttg

SEQ ID NO: 250 - DNA, 1049 bp, Zea mays
  Clone ID: TF_ZmC36749_2
aaccaaatccaaattcaagtttgaattcaaaaagatgagatgtatgagatgcacctggctttgttccttaaagccgggtgtgacagtcaccgatctgttagctgatagcctgatacgccatcatgaacagacataaaagaaagagagaagggagaaccaaagcttagcttatgagatgttagtcacaatggttaaataaacccaacaagggcaaaattctagcagggtcaaatctgattctgtagagcccctttgtttacacaccagaacaagctttaacacctcgactcagcacagtttctcgtatcacactttccatcgtctttgagcagagcaccagatcatccttcgagcattgccttggctgcatcgatgagtgcaggtctgaagctgttcgatgctcggccaagggcagtgtagccttccttgtcctcgacatcaacatcagcaccatgtctaattagcagaagagcagcccctttgttctcacatataacagcatgcgtaagaggtgtttgtcctgtcttgtcaacagcatcaacttcagcaccttcctcaatgaggaattcacacagctccgcgtttccagtgcttgcagctctatgcaaaggtgtgcagccaaacttgtctttcttgttgacattagcaccatgggctattagtttttcagctatgttaagcctccctcgctcaagcaggatgtcgacgatttgagagttgccggagctcgcggcggagtggatcggcgcccacccctcctcgtcctgcgcattcagcacgctagccgcggcgtcaccaccgcactgggcaagcgcgagcaccacctggggatgcccggcagcggcggcgacgtggaggagggagcggccgtcctcgttgcgcagggagaggtcggcgggggcgagggaggcgaacgcggcggcgtcgccggactcagcggcgcggaagagctccttctctgacggtcgcctctcctcgccgccggcttcgtcgacgtccatcgctgcagccatccggactccggaggtactcgtacttcgagttcgaga

SEQ ID NO: 251 - DNA, 2157 bp, Zea mays
  Clone ID: TF_ZmC853_1
gagacagtgaaggtgcctgatggttctaatgttctgactaatgaacagctggatgcttatgtagtgaacccttcactttctcaagaccaactattcagcattctcgatgtttcaccaagttgtgcatatattggtacaaatacaaaggtttcagttactggtacattcttggtgaataaagaacatgtggaaagtcacaggtggtcatgtatgtttggggatgttgaagtaccagctgaggttttgaccgatggcaccctacgctgctatgcaccagcacaccaatcaggaagagttccattttatgtgacctgttcaaacagggtggcttgtagtgaagtgcgagaatttgagtatcgtgattctgaagctcattacatggagacttctcgttcccaagccaatggtgtaaatgaaatgcatctacacattcgtcttgagaagctactcactttggggccagatgaccatcaaatgcttgttataagcagtggtaatgagaaatatgagataatgaatgctataaattccttaatgcttgatgggaaatggtcaaatcaagaatcttctgtcaaggaagtagtttccactgctagggtccaaagtttaaagaaactggtgaaagagaagctgcatcaatggctcatctgcaaagtaaacgatgatggaaagggtcccaatgttctgtgcaaggaaggacagggtgtgattcatttagtagcagcactgggttatgattgggctataagaccgataatgattgctggtgtcaatgtgaacttccgggatgctcatggatggactgcactccactgggctgcatctttgggaagagagcggacagttagtgtcctcatagcaaatggagctgcagcaggagcactaactgatccaacttctgagttcccttctggaagaagtccagctgatttagcttcagtaaatggacacaaggggattgctggttttctcgcagaatctgctttgacaagccatctgtcagcacttactattagggaatcaaatgatagcactgtagaagcgtgtgggctaccatttgctgaagatctcactggcattgattctgtccatctcgctggagagggtcctgatgctgaatcacttgaaggttctttaagtgccgtgcggaaatccactcaagctgcagctcgtatatttcaagccttcagggtggagtcattccacagaaagaaagtcgtggaatacggagatgacacctgtggattatctgatgaatgcacactttcacttgtttctcttaaaaatgtcaaaccaggacaacatgatacacatctgcattctgctgctgttcgcatacagaacaagtttcgcggatggaagggaagaaaggaatttatgatcattcgccagagaattgtcaagctacaggctcatgtacgaggacatcaagtgaggaagaactatcggaaggtagtctggtcagtcggtatcgtcgagaaagtcatactgagatggaggagaaagaggcctgggttacgcgggtttcggccccagaaacaactagaaggtccatcgcaaatccaacctgcaaaggctgaagacgaatacgatttcttgcacgacggcagaaggcaggccgaagccaggctacagagagcacttgcccgggtgcactctatgtcacagtacccagaagcgagagagcagtaccacaggcttacaacctgcgttgctgaaatgaaacagtccagggtatgctttcgaagcttgctgcaggacgtgttttattttccctcggggtttgatcatgatttgatgctggctactttggaacagatgatgcaggatgagatgctaagccaggcggctggtggtgcggacgatttcatggctggactggaggacttgatctgcatagatgatgccccgccccgatgtctgccattcggtgaagctgagcctttttacatcagataggcagggaggcggtttccttgctccccttttgtcagactagccctgtaaatattcttcagctagttgttcaccccgactgtttactcgctttctgctagtgtacaactataacatagtttcaatgcactgattatcggtagaataatcgcctcttatttgatatatagtttatattaattcaacgtattttatggtttt

SEQ ID NO: 252 - DNA, 942 bp, Zea mays
  Clone ID: TF_ZmC2138_1
accgcggcgcacttcgccgcggggctggggtccgaggagtgcctgcgcgcgctcggcgcggctggagcggacgtgggccgtcgggagcgcgcggggggcgggctcacgccgctacacatggcggtcgggtacggccgcgcgggcgccgtgcgcgcgctgctggagctgggcgccgacccggaggcccccgacgggcagggccgcacgccgctggagctggtccaggaggtgctcgccagggcgcccaagggcaacccggcgacgttccagcttcggcaggggctggaggcggcgcagaaggagctggagaaggccgtgtacgagtgggccgaggtggagaaggtgatcgacggccgcggcgaaggcaagtggcgggagtacctggtggagtggcgcgacggcggcgagagggagtgggtgaaggcggcgtgggtggcggaggacctggtgagcgacttcgaggccgggctggagtacgccgtggccgaggccgtgctcgacaagaggcaggcggcgacagcgacggcggaaggggaggacagctgggagtaccttgtcaaatgggtcgacattgaggaggccacgtgggagcccgccgagaacgtggacaccgagctcgtgcagaagttcgagcagcagcagtcggggtctgcaggcggtgattgatggcggcagcactgcgccaccgtcgccgcaggtgatagagattacttgatgaaggtgattgcgttttattcgtcgggtattcaaagcactgcccgggttgtattttaggatgaaacttttgtgagtatcatattttcaccggaattgcagtttcagccttcccgcttggaaactttttattcgtcgggtattcaaagcactgcccgggttgtattttaggatgaaacttttgtgagtatcatattttcactcaaaaaaaaaaaaaaaaaagcggcc

SEQ ID NO: 253 - DNA, 1994 bp, Zea mays
  Clone ID: TF_ZmC16856_1
ggccagcagctagctaggcaggtagctcttgccaacgccccggccggccggcacctcacattttgtagcgtgatcgcgcgccgccgccacgcctccccatgcaagctactccgatcctagctactggctagctagttgcaactactcgagctaccagctagctaactggccagcagcaggtagtctgctcagggtcggagggtcggccggcgcggcggcggggcgcgcgcgcgcgggaaggcgggaaggcgggaacgcatgggcaacgccctggggtgcgcggggctcggcgagcggctggcggccagcgcgaggaacggcgacgcggcggaggtgcgccgcctgctggaggaaaacccggggctcgcgcgctgcgccgccgtcggcagcagcctcaactcgccgctccacctcgccgccgccaaaggccaccacgaggtgagcaacgacgacgacgattggtaatcgtttatttgagtcacgcgtcatgcgttttcgtccttgcaaagctggtctgccgcctcgtctacagtggcacgcgcaattaatcacctggacagtgacacaaaatctactactaccggcttccggcacacgtattattttccgggggattttcagaggatcgccgcgttgctgctggagaacggagcagaggtgaatgctaggaacctttccggcgagacggcgttgatgcaggcgtgccggttcggccactgggaggtggttcagacgctgctggttttcggatgcaacgtgtccaaggtggacagcctgagcggccagacggcgctgcacctggcggcagcgggaggccacgccacgtgcgtgcgcctgctgctggccggcgccggcgccggcaggaacaagctcgtgaacagggcggccagcggcggcgtgacggcgctgcacctggcggcgctgcacgggcacgcggactgcgtgcacctgctggtggacgagcgcgccgacgtcgccgcgccgacgctgccctgcacggcggcccccatggcggccatcggcgccgggagcgcgccgctgcactacgccgccgcgggcggcgaggtcaggtgctgccagatcctcgtggcgcgcggggccgacagggccgccgccaactgcaacgggtaagggatgatatgggatcctcttttgttttctggtccgtcgaccgctccatgtcgttacgtgtcctcttctgctaggcaggtggatcccggtggacgtggccaggacgtggggctgccagtggctggagcacgtcctgtcccccgagtctcacctgcgcatccccaggttcccgccctccgcctacctctcgtcgccgctcgccagcgcgctcgccctcgcaagggactgccgcctgcttctcaacacggcgcagctggacagcggcggcgccgacgcctgcgcggtctgcctggaaagaccctgtgacgtcgcagccgaagtgtgcgggcacgagctgtgcgccaagtgcgcgctggacctgtgctcggtggtcaagtcctacgacgtgcccgggatcgccggcaccatcccctgcccgctgtgccggagcgccatcgcctcgttcaggatgcgggccgcggcggacgagtccgagcctgacgtgaacgacgccggcggtggccgccgcggtgccggcgatcgccaggcggcggcgtccagcccggagaagaaacggagcacggactcggaacaggatgtcgtcctccccttctactgcgcgcctctcgccgtcccgtcttgaccggccggcgatgcaggcagcctgcatttgctggacgcagaggagctactgcctactgcatcatcagtggaaacgtaaaatgtgcatacacagcagaggcagacagattgtttgctgatgcttgccgacggcattgctggattttattttttttttattatggttctgcacatggcactagctggtgtaatgtaacatgttggtttattgtggaaagaaaggaggaacattcttttgctgt

SEQ ID NO: 254 - DNA, 1129 bp, Zea mays
  Clone ID: TF_ZmC1087_4
ccggaccgccattcccgggctcagctactcgcctggtgatgggggtcgactggcgcaaccgagcgccggcgcggctgcggtgaccaccgctgagcaggctcaggatctcatcgacgccgctaggtacgacgacttggaggacgtcgtcgccctgttctccgctggtgtctcgctggactccacagattcgcaaggccgcacagctcttgagagtgggttctgccaatggtcaccttgctgtggtggaatacttgattcaaaatggagcggtataaagctaccttttcttgtacaataatttaacatgtcggacaagattagatgtcatcgtttcataatttcaactacttctaggccctgtcgcaatatgttttttttccttatcagagaaaggacaatccgatttctattggaagtcaattgaggtccttttcattttgattggactaccagctatgaaaaagatccactaatcaatctaacctgaatagaaatatctctactacagacagtcagacaccatgcaagttaaccacaagcaaagcctgaaccctttgaagtttcattttgttttttttggactagtctcataagttcggtttgtgactgcataacttcaaattcagaatgttaatgccaccaacatggagaagaacacaccactccagtgggcatgccttaatggacgtatagaggtaatcagggctttgatctcagcgggggctagcgtgagtgctctgaacagccacgagaaaacgccaatggacgaagcggtgaccacaggcaagatggacgtgatcgacgcgatcggtgcggcagtagctcaagccgagctcaacgccgttactgtctcctaaaaggacctgatgagtacctggagctttgaatgacttgcagccttgttcttatctcccagcggttctgtctgtatcactcgcgaacctgaatcccccgacggcccagtatccgggcaatatctatactgacggcaatcgcctgttagtgtcattggcttgaggacatcacccgacctgtcgttgtaaaccagatgtgcagatgtcaaagatcaggattttctcctacaaatgttgtagggccaaaaaaaaaaaaaaaaaaggcccctagggcc

SEQ ID NO: 255 - DNA, 1092 bp, Zea mays
  Clone ID: TF_ZmC4298_2
aatatgggtgtgcatatatctaaggtaagatccctgacgcttgatgtcagggtttgggagcaatctgtaatcaatctctttcagtcaataggcaacacttttgccaattctgtctgggaagaaatgttaccttcatcaagctgtgttgaccatggtgatatttcaagggctgatggattagaaaacatgtcgcatggctttgcacccaagaagcctaaacaatctgattctattgcagtgaaggagaaatttattcatgccaagtatgctgagaaggatttcgtgcggaaacataacatggatgggattcaacttgcagaacagatgtgggacaatgtaagttcgaacaacaagaagggggtgtacagcttgatcgtggggtcaaatgccgacgtaaatttttcctatggtcatacatcattcaattcggctttgactctgggaaaagctctcctcctacaagagcaatcagcctctccatctaacggaagctctagatgttttgaccgcaatccactcgagaagggttgtaccggggattctgtttctcctgccagcacaagcgcccgtacagacgggccggacgattatgttgaaggattatctttgctccatctagcatgccgcgccgcggacctgggcatggttgagctgctcttgcagtacggcgccaatgtaaactccacagattcaagagggcggacgccgcttcatcacagcatcatgaaagggcgacatgtgtacgcccaagctactgctttccaggggcgccgatctcaagccgcggatcgagatggtaggacagcgttacagtatgcaatcgacagcggaaccatagaggacgaagagatccttgttttgctagaggacccaagtagataaatcacgtaggtgtagtagtccaagtctcgagttcctgccgtcctgcggtggtgcattgtggctgccttttgcagtcacctggcacacacagggtccgaggatgccttgctagtattcagtctctgcctttgtggcaagaggaagttatagtttttctaggtctgtctgcggttttggtcgcgcttagggtaaaagtggcctgtttgtcgt

SEQ ID NO: 256 - DNA, 2163 bp, Zea mays
  Clone ID: TF_ZmC37480_1
aacggccgcttttttttttcaagaactctagcaaatgtgctggagtgaattatcacaaaagcaagacgtataatggttgtacgtagcggtactgccaaggaaaaaacatcaaataaagaaaaaaaaacaaatggtgcctgcaatccacctggatttatagtcaggtgaaattattatcagcatttacaaccttattcgtactcgcgtccgtccatacaaatcaaacctaataaagcacaatgccgttttcgcccaactaaaacccagccaaatacacaccacagaagaagcctaacggcagttggcagactgactacgagcgtcagatgttcctagaatgtacgtcatccgcaagctacgcctgttccttcggatatacaaagaactagaagaactagccaaccccctacaaggaacaacaagtcacttcagatcttgaatctatgcccgtcttaactactttcgaccgaactccaccttggcctcctcatgagcaaccttcatcctccggtactcctgctgcgcccgatgagaacggaacaaagcttggacacgtaccactgatctattgaacctgtcctcggcttgttgccgaccaacctggtagtagtcctcctctgcagtgcttgctgcttctgcgtctgtggccattgctactggcattccagttgcaatgccacgcaggccttttctcttcttcctccaccgcaagatagctttttccactactccaacggaccataataccttgcggtactgccttctcacttggtgacctctgtatgcagcttgtattttgatagcttgtcttcgcatgttcatgaagttcctcctaatctgccatgttcggaaatgactctgtattcttgcagcagctctcatcattttctttctgttgtagttccggtatgcgtgctgaatcctcatagcagcaactattgcagatgcatcattctcgggattggccaactgaattgcttttgtttgaagcttaagagttcgctccctgagtgcggcttgtatgttgctagcagcatcagcagcattgcggtaggctgctaaagattctcgtaagcacaattcttgttcactaaggttttcaaattccttggtattccgttttagtgactctgtccttgatgttgatcgcttacccttggacagtgacatagcctcaaaatgagcagtcagccctttctcagaaagatatgcagctaagccatgataaccttgtccagcagccagatcaccagcagtttgtccaccagggacatcatgagtaggatctgtaaccaagcttggatttgctccagcagacaaaagagcagcaaccattttttcccttccacagtatgcggcccaatgcaaagctgtccaaccagaagaatcacggaaatccaaggagaatcctgacaaagaaaataagtgaatggcccaagtatagcccaagcaagaacacagatggataggcccttgtcctagatcatcgcggccagtcgacttgtggccttcaattaatttttcaacaagccactcttgcaatctattacgcagtactagttcaagcaatccctcagtggccggaacataagtgcctttagaatcagtaacaaattttgacagatccatccattccttctctgtcgatgctgataagagattggaaaccttgcttccttctacaagtaacttgggtgctatctttttcttgtttgtggtgaacaacaatcgagctagtctcatctgcatctgaagctttgacttttggggctcatcctcagccaagttttgactgtcaggcaccatacgatagtgaaaactcaaaacctcactgattggtgttttcccatccaaagtcaaataaagattgactcgtccaggagcatgtggtctagcaatgaaacggtaaacgccagtttgaacaatatttgcatcaacacactggtcaccaatgacacagaagagattggtcccagccagatgtctgtagttctcatggaaacatccaaccacaaggacctttgtgtcctcagtacaataagcccattctgaggatatctcagtgatctgaaagggtatttcgccagtcacctgttcagtggggagtatgcccgagcttggaatatcatctaaactaatatcatcatccaagtatttcccccg

SEQ ID NO: 257 - DNA, 1690 bp, Zea mays
  Clone ID: TF_ZmC805_1
ccacgcgtccggccattaactctgcaacctattctcttcctcgcgaaaccgcttccttcgattcattccccctctcccctctccaagacccaaaaccctaacccctacgacccccgtgaccgccgccgccgtcgatgcctgcgctctccgacgtcgcgcttcaggctgccatcgccggcaacctccgcctcctgaagctggtggcgagcaagatgaatctgcgcgaagcgaaggacgccgctgggcggaacgcgctccacctggccgcggagatgggccgtcttgaggtttgcaggttcctggtggaggaatcgggcttcgaggtgaacttcgcctgcgccgaaggcgggtcgccggtccactgcgccgcggccgggggcagcgagagcgtcttgggctaccttctcgaccacggtggcgaccctgtgatgccggactccatgggctccactccactgcatgatgcggcagaggaagggcattgtgcggctgtgaggatgctgctgtccaagggtgtcgatgtggatccacacggctgtcgtgggacgccgctgcacttggcctgctccaatgaccgggatcaggttgttaggatcctgctggaacatggcgcagatcccaacaaagttgtcggtcatgtcctcccaccactcatgatggcatactgtggcggttctttgagatgcatgaagctactgattgaggctggtgcggatgtgaacttgattgctccttctggagtaattttggctcaggcagtttgtgatgggtcaactgagattgtcaagtttttgctagaggttggagctgatcctaacattcctgatgaggatgggaaaatcccgatcatgtacccagcatttaatgggcatcgggagcttgttgaaattctatttcctaagacaagaccagtttcatctttgccagactggagcgttgatgggattattagaagtatgaaagatctgtttttcaagcctcaggatgcagctgtggtggaaaaaaagatagctgatgcgaagtcacaagggaaggaagctttcgcaaggggagagtaccctgcagcagtatacttctataccatggtactagagaacgaccttgatgctactgcgtttgccaaccggagcctgtgctggttgcggctgagggagggggccaaggctctgttagatgctcaacagtgcaaaatgatacggcctcgttggtcgaaggcatggtatcgcgagggcgcggctctcagcttgctgaaggactaccaaggggcagtcaacgcgttcacggaagcattgaaactggatcctgcaagtttagagatcaagaaagccttaagggaggccaccgattccctggcgaacgttggccgctccggagaacagaacccatgagctgctgctgcatccatgtgctttatctcacgttaagaatcctctaacactatgtggctcagcctcatattatatgttgatatatgtcgccttaacgcactgctggagatactagtttcgatctcagcctatatgttttgctccttcgggatgcagcctaagatacatgtggcaaccaagtgaggttgggcagggtagcatatctatggactggttgaactattatatgtatctggatatctaagtgcacctgttgctcctagtaaagttgcagttctaatgaaaaaaaaaaaaaaaaaaaa

SEQ ID NO: 258 - DNA, 1977 bp, Zea mays
  Clone ID: TF_ZmC5707_4
ccctcccctcatcaagggttttcctcctctcctctcctagccttcgccgcttcaccgctgctgccttccctccctcgcaagcctcctccgcgtcgccgccgcccgcccgcccggatccgccatggcttccgacccgaacaaagattccaaatcggaggggctgtctgaggcaaaaaagggggcttccccaacagctggtgcaggccttcccagtccttttgatttttccaacatgagcagcttgctcaatgatccatctataagggagatggctgagcaaatcgccagcgaccctgtattcaaccagatggctgagcagcttcagaaaagtgcgcagggtgcaggggaacagggtgttccaaatttggatcctcaagcatacatggaaaccatgacacaagttatgcagaatcctcagtttatgtcaatggcggagcgtcttgggaatactcttatgcaggatcctgcaatgtccagtatgcttgagaacttgactagtccagctcacaaagagcagcttgaagagcgaatggcccgtatcaaggatgatccgtctttgaagccaattcttgatgagatagagcgtggtggtccatctgcaatggtgaagtactggaatgaccctgagattcttcaaaagattggccaggctatgtcattgaacttcccagtagatgctgctacttccactgtactatctggacctcaagaaactgatgaagaaggcgaggatgatgatgagtccattgtccataacaccgccagtgtcggtgatgcacagggtctgaagaaagcattagatggtggagcaaacaaggatgaagaagatgccgagggaagacgggctttacattttgcatgtggctatggtgaggtaagtgaatctgttaaactttgttaaacggaaatggattacacaacatgcagctaatgtgaatatcctgatgcagcaggacgtccaccatttgttatgtttttttgtcactactatttgtatgttccatgactaaaaatattgtttggttgaaaatttatttttaccaggtcttcttgttgctgctcaattctattaatctgtgttatgcaatttcttcatttaaacaaatattttattgcaaggaatttgctgcattttttaatcctttgttgtggtatttctgtgttgttgtatagttgtagatatatgtagtgttctgatttagtggccagtgccacatgtggttatatcgtgacatactgacatgtctaatagaattaggtttcaatgttctttcgggttttgtctccactagaatgactaaattcaacgttatctagtcaagtctatcacaatcctcctttacttagtgtttgggacctgctatgttaacataggtggagttaattaggtttcaatgtgtgatcacaaatacagtcgagagcatgcggtgtagtgatgcgtctgtttgtttatttgcatatttagatatctatattagtggcaactaattgagtggtgttctgtatatttagttgaagtgtgcagaaattctccttgaggcgggggccgcagttgatgccctagataagaacaagaacactccgttgcactatgctgctgggtatggtcggaaggaatgtgtggatcttctgttgaagtatggtgctgctgtcacgctccagaatctggacgggaaaacccccatcgaggttgccaaactcaacagtcaagatgaggttctcaagttgctagagaaggacgctttcctatagagaagagaaccgccgaataaagtgtatcaagccgtcaaactattggttttgcattggtttatttatctcggtctggtatggttgtctgtagcttgtgaatttgatgttcttttcatagcgaatgccgtttttgaaccagtacttgtgtaagaagtacctaggcttgttcttgtcctccatatatgaatctttcacacttgtcaagaattgattacagttattttc

SEQ ID NO: 259 - DNA, 972 bp, Zea mays
  Clone ID: TF_ZmC1239_1
aggggggactgcggggagctgaggcggctggggcccgaggcgctggccgcgcgtgaccgcgaggggaggacggtcctgcacgcggtcgccgcggccggcgaggccgaggcggtggcggtgctggtggacatgggcgccgacacgtcggcggtcgacgcgcgcgggaggactccgctggacgtcgcgcgcgacaagggataccaagaagtggtggacgtcctggaacggtgggagctggtgatgacggcggcgaggcgaggcgacctcgggagcctcgagtccctgctcagcaagcgcgccggcgtccgcgggcgcgaccagtacggcctcacggcgctgcacctggccgcgatcaagggacacggcgacgcgatcgcgctgctcgccgggccgggatgcatggacgtcgagtgcgaggacgtggaagggcacaggccgctccacctcgccgtcgagggaggccacgcggaggccgtggagctgctgctcgacatgggcgccgacgccaacgcccggaccaggcgcggcgccacgccgctccagatggcggaggccatggggtacgaggccatcgctcagctcctgtgcgcgagaggtgcggaggtggccgccgcgtcggcgttgtgcgccgcgtcgtcgtcttcatcgtccatatcgtgcgcctgatttgctgccggttatcggttgggagagactgttggacggacacgaaggcttgtttgtttccgctgctgctcctgctgtgcgtgagccgagagatgcctacagccgccgtggctggctttaaagtaagaagaagcgaacccgtccgaaattgtactgtactgtatagtggtttgttctgctttgttgggagagtagctcattgttgagacggtcgattgctatacgcggcgtgctggtggaaaaaaaacattcgctatgcaattgcagtgctttacatgttcctcaaaaaaaaaaaaaaaagggcgg

SEQ ID NO: 260 - DNA, 796 bp, Zea mays
  unsure (1)..(796): unsure at all n locations
  Clone ID: TF_ZmC791614_1
gaccccgttccaccctctccctcgcgtcgcctcgaaggaagcgcggctgatcccgctccaagcctccaaccctagcttccccgctccccaccttcctccgtccggggctcatggcggagatcgaggtggtatccgaaggcggcaggcgggacgaggacgaggagcggcggcggcagcagcagcaaggcgcgggggagccggaccccgtggtggacgtgtactctgcggcggcgtatggggacctggagcggctccgcggtttcgtggagcaggggggagccgccaccgcgctcagggagcccgacggcaacggctaccacgcgctccagtgggccgcgctcaacgactacccccacgtcgcgctctacatcgtcgagcacggtggcgacgttaatgcgacggaccacgcgcggcagacggcgctgcactgggcggccgtgcgtgggtccacttccgtggctgacgtgctgatggagcacggagcgagggtcgaggccgccgacgtcaatggcttccgggcagtccacgttgcatctcagtatggccaaacagcattcttgcatcacatcatctcaaagtacggtgcagattttgatgctttggacattgatgggaggagcgctttgcactgggctgcctacaaaggaaatgcagatacaatcagattactgctatttatggatgctaatcaagtaaggcaagacaaaaatggttgtacccctttacattgggctgccataagaggaaatttggaggtttgcacagttcttgtacatactggtactaangaagagct

SEQ ID NO: 261 - DNA, 648 bp, Zea mays
  unsure (1)..(648): unsure at all n locations
  Clone ID: TF_LIB4740-025-R1-K1-G6
ggtggtaccctncnagtccggccgggttttgcctgttacgagattggaggttgaccccactgattattgctacctttagaggatatcctagtatcgtgaagattttattggagcacggtgcagatgctggagctaatgtgaatggttttggatcttataatcccttggcaagagctgcagagaaaggtttgactgaagctatcaagtgcttgttggaagctggtgcaaatccaaacgttcctgacacatttggcaggctgccaatagaattggctgctgagtatggtacatgggaagatgttgaacttctattccctgtcacttccaaaattccaacagtggcagattggagtgttaatggagtaattagtcatgtacacatggaagtcacgcaactagagactagcgtgaggtcacgagtcatctgaaaagcaagctggtacctagaatctcaagtcccaggtcaagaacaagaacaggtaccacaggatgaggcgcgtggaggatgatgtgacgtgttcgtgagaggtctaggccgtcgtctcccagtcaactttgggttgctggaccgttgtctccttataatgtaattatttatttattttgtacataactcctattatatagtaaagatgtgacattcgatcc

SEQ ID NO: 262 - DNA, 927 bp, Zea mays
  unsure (1)..(927): unsure at all n locations
  Clone ID: TF_LIB4748-002-R1-M1-F5
ggccgtcgcactttcgcgcttcatccagcggagtggtgccccatctgtcggtggtgaacacgctggcgccggcctcgacaagcatcttggcgatgaggtacaggccctcggcggcggcgatgtggagcggtgtgcggtggtcgtagtccctgcagtttgggtcggcgccgtaggccagggtgcgccgaatgaagtccgagtcccccttggcgactgccgtgcacaggtggctgccggcgttcttgaggctcagcttggcgcccttggcgaagagcagcgctgccacccgttcttgcccctgcttcactgcctccagcaacggcgtgttcccaaattggtctggtgaatcgagaacaccaacatgacatgatcagagtggtagcaatagtcctagaaaggaaacaggaagacagcagggatgtcatgacaatggcagtggatcgcgtgtggcggcgtaccggtaaggtccatgtcgacgccttcgttgacgaggaattgcacgacgtcctcgtaccctctggaagccgccagatgcagaggggagcggccgtcgtagtcggtgttcttgggatcagcccctgcccggatcaggcttttcagctggtgcaggtcgccgtagaaagcggcgctgttgacccgcagggtgagctccgcctcctgcttcccgatgtggagcgtgatgtccgattccagctgcttcacccgtccgccatactcgctctcggagagattgctcaggatcctcctgccgtcgacgaagtagatctccaggatgttggtgaaggactgcttgtcgagacgcaggagccggcagagctcacagacgcggaccgtgtagggctgcggnatgttgcagaggattgagatctcgccaaaggagctctctggctccagcattagcagagtctttttttgccgtcttcaccg

SEQ ID NO: 263 - DNA, 1608 bp, Zea mays
  Clone ID: TF_ZmC21063_1
tcggtcgctttccctcctcagcttcagccttcagctcctctcctctcctttcctctcctctgctctcctctccacagctgcagccagagccacccaccttatcgtcatcctcgctcgctcctcatcgccagcgcctcctcctcctcttcttccccaccgctgccgacatggctgcgcaagaggagaagaccgctgttgctgctgctgctgatgtcgccgcagaggagcctgcgccggcgccggagcagcagcctcagccggctggggcggcgcgcagggcagggccatcggcacccggcggggctccgcccaaccccttcgacttctccaccatgatgaaccttctcaatgaccctagcatcaaggagatggcggagcagatcgccaaggacccggcgttcacggagatggcggagcagctgcagaagacggtggtgtccccgcggcagcaacagcagcagcaggcgcggcagcagcagcagcagctggacccgcagaagtacgtggcgacgatgcagcagctgatgcagaacccgcagttcgtggccatggcggagcggctaggcagcgcgctgatgcaggaccccgccatgtccgccatgctggggggcctcaccaacccggcgcacaaggagcagctggaggcccgcgtcgcgcgcatgaaggaggaccccacgctcaagcccatcctcgacgagatcgagtccggcggccccgccgccatgatgaagtactggaacgaccctgaggctctgcagaagttcggccgcgcgatgggcgtcggcgtcggcccgtccggcgaggccggcggcgcagagcacgccgaggcggaggacgacgctggggaggaaggcgagtacgaggacgagtccatcgtccaccacaccgccagtgttggcgacgtcgagggcctcaagaaagcgctggagaacggcgcggacaaggacgaggaggactcggaagggcggcgtggcctccacttcgcgtgcggctatggcgagctccagtgcgcgcaggcgctcctggaggccggcgccgccgtggacgccgtcgacaagaacaagaacaccgcgctgcactacgccgccggatacggccgcaaggactgcgtcgcgctccttctcgagagcggcgccgccgtgacgctgcagaacctggacgggaagacgcccatcgacgtggccaagctcaacaaccaggatgacgtcctcaagctgctggagaagcacgccttcgtatagacgtcccacgccgccggccggcccgtcttgctcgtctgctcctgtcgccgccgctgccacgtcgcttgcctctgctactgctgccgccgccgccgccattaatgctttgttgatttctctcctggtctagacaacgcaggttccttcatcacttcactgttgagtatttgcattgggtgtgtatgtatcggattttgctttgcgtgatcacggtatcatatttatttatcggactcctcgttcatcaggaggttttcgtaatgaataaggaagaaatttccatttcaccgtccaaaaaaaaaaaaaaaaaactcgagactagttctctcctcgtgcaaaaaaaaaaaaaaaaaaaaaaccccaaccc

SEQ ID NO: 264 - DNA, 1887 bp, Zea mays
  Clone ID: TF_ZmC13122_1
tattttgcctgaagccctggtcccgtcctcttcagggcctcgccgtcgcctcctcttttttcccccctcgtcgacggctcctcctcacaggctcacagcctcacactcacgcggagagcgctcgcgcgggcgcacacgcggaggggacgttcacaggagggggagggaggagatgccggggagccagaacggggggccgaggcctcggccggtcaaagccgagaccatccacgatcttgcgcgcgccggcgacctcgccggcgtccagaggaagctgctggagaacccctccctcctcaatgacaaaaatcccgtgatgtgtcaaacaccacttcatgttgctgctggctacaataatacagaaatagtcaagttcttgcttaaccagcaaggtacagaaacagttgatctggaggcaaagaacatgtatggggagactcctctgcatatggcagtgaagaacagttcttgtggatcaacaaatctactccttgaacatggtgcacacatagaagccaaagccaataatggcatgacaccattgcatttagctgtctggcatgcaattcaagctggagacttcagcacagttagcgtgttactaagctacaaccctgattgctttgtgaaagatgatgaaggcaaaatgcccttaaatcatattccaggaggagctggtagtgagaagctgctgaaactcctcactcatcatatggaagagcaaagaaaacggaaagctctcatgtcatgcctcgaagggaaagcaatgtcagagtttgaagaggcaatgtcacaaattgttggattgcaggagctaaaaatgcaattgcgccgatgggcacggggaatgttttttgatgagaagcgacgggctatgggcttggggattgctaaaaggagagctccccatatggcatttcttggcaatccgggaactggcaaaactatggttgctcgaattcttggaaagctcctccacatggttggaattctccctactgacaaagtaactgaagttcagcgaactgatcttgttggagaatttgtggggcataccggaccaaagactaggaggaagatacatgatgcagagggaggtattctcttcgtggatgaagcttacaggttgataccaatgcaaaaatccgatgacaaggattatggtttagaagccttggaggagataatgtctgtaatggacagtggcaagatagttgtcgtatttgcggggtactgtgagccaatgaagcgagtcatcgcctcgaatgatggcttctgcaggcgggtcacgaaattcttctatttcgatgatttcagtacgacagaactagcagagatcctacatatgaagatgaagatcccaagtgactgtagcttgctttacgggtttaagctgcacccaagctgcagcattgaagccattggagagctgattgccagggagatcactgaagagcagaggaagcagatgaatggaggccttgtagacacgctgctcatcaatgcccgcgagaacctggattcgcggcttgatttcagctgcaacgatgccgatactatgatcacgatcacgttggaagacctggaggcagggcttcgtcagatttccagacaacgtcagctgcagtgacatgtaaatttaggagaattttttctcgatgatctcatgcttgtctccaagggcgaagttatggctgtatcgtctcatccaacgtttttggctattctgactgtctgttgtatgtagtcgttgctaaattgatgccgtccaacatatagcagtaaaatgcatgtggtatatacaattatacatcatgcccatgtttggtttcaatagtcttaggactaaactttagtcctagactaaactttaaaaaaaggaagacc

SEQ ID NO: 265 - DNA, 1854 bp, Zea mays
  Clone ID: TF_ZmC13122_2
cctcgaggccggccgggctatagatggtaaagtgaaaaaaaaaaaaaaaaaaaaaggctcacagcctcacactcgcgcggagagcgctcgcgcgggcgcacacgcggaggggacgttcacagggggggagggaggagatgccggggagccagaacggggggccgaggcctcggccggtcaaagccgagaccatccacgatcttgcgcgcgccggcgacctcgccggcgtccagaggaagctgctggagaacccctccctcctcaatgacaaaaatcccgatgtgtcaaacaccacttcatgttgctgctggctacaataatacagaaatagtcaagttcttgcttaaccagcaaggtacagaaacagttgatctggaggcaaagaacatgtatggggagactcctctgcatatggcagtgaagaacagttcttgtggatcaacaaatctactccttgaacatggtgcacacatagaagccaaagccaataatggcatgacaccattgcatttagctgtctggcatgcaattcaagctggagacttcagcacagttagcgtgttactaagctacaaccctgattgctttgtgaaagatgatgaaggcaaaatgcccttaaatcatattccaggaggagctggtagcgagaagctgctgaaactcctcactcatcatatggaagagcaaagaaaacggaaagctctcatgtcatgcctcgaagggaaagcaatgtcagagtttgaagaggcaatgtcacaaattgttggattgcaggagctaaaaatgcaattgcgccgatgggcacgaggaatgttttttgatgagaagcgacgggctatgggcttggggattgctaaaaggagagctccccatatggcatttcttggcaatccaggaactggcaaaactatggttgctcgaattcttggaaagctcctccacatggttggaattctccctactgacaaagtaactgaagttcagcgaactgatcttgttggagaatttgtggggcatactggaccaaagactaggaggaagatacatgatgcagagggaggtattctcttcgtggatgaagcttacaggttgataccaatgcaaaaatccgatgacaaggattatggtttagaagccttggaggagataatgtctgtaatggacagtggcaagatagttgtcgtatttgctgggtactgcgagccaatgaagcgagtcattgcctcgaatgatggcttctgcaggcgggtcacgaaattcttctatttcgatgatttcagtacgacagaactagcagagatcctacatatgaagatgaagagtccaagtgactgtagcttgctttacgggtttaagctgcacccaagctgcagcattgaagccattggagagctgattgccagggagatcactgaagagcagaggaagcagatgaatggaggccttgtagacacgctgctcatcaatgcccgcgagaacctggattcgcggcttgatttcagctgcaacgatgccgatactatgatcacgatcacgttggaagacctggaggcagggcttcgtcagatttccagacaacgtcacctgcagtgacatgtaaatttaggagaattttttctcgatgatctcatgcttgtctccaagggcgaagttatggctgtatcgtctcatccaacgtttttggctattctgactgtgttgtatctagtcgttgctatatagcagtaaaatgcatgtggtatatacaattatacatcatgccctaacattatttgacatctgtggaatagccagtaccacatacggatttcagtacgtgcataaaaaattcagatttgacggttgaagtgattg

SEQ ID NO: 266 - DNA, 1012 bp, Zea mays
  Clone ID: TF_ZmC23227_1
ttccgttttttttcttttttcacaagccagaccgccaggcgccagtagccattgagtccttgacccgaagtcccacagccgccgccaaaagggttcctcaccatcttgaacgctcgccggaccaatcccaagcagtcctcgcagcagatggcagttcccggcggccgcaacggactcagggacgaggacgacgacatggcccagcacgccgaggccttcggcggcgtctctgacgacgaggacgtgcccccccaccttcgcgccctcgccaacgccgcccagtccggcgacgtcaccgcccttgtggctgccctcgataatcatgatggcagtattgatgttccagttgaagatggtgatactttgctccatctggcatgcttatatggtcatcttccttgtgtgcagctattgctggaacgtggagctagcttggaatgccaagacgaagaaggtgctattcctcttcacgatgcttgtgctggaggcttcactgagctggtccaatatattctcaactttgctgccaacaaggatggttgcgtagtgagaatgctcaacactattgattctgaaggcgatacgccgctccatcatgctgctagaggagaacatttggatgttgtcaagcttcttctccaggctggggcgtcccccaagaaggagaacacttacgggcagacacccgctgatatggctgaccaagacaccgaagttcgaaccctgttgactgccaagcaaattgaggcaagcacacacatgagtgatgattaagcggcattggaatccttagttgcaactggtaatgttgagaaatagccgtaacatcttatctgccatccaaacttcatttgaactgaagtaatattgtaatcagactagtatggaggggttagcttagctacatgatcatgctccttttccttatcgctgcattatactaaagatgaagtggaacacccatcggtctttcttgttctttcgcggaaaatctgatgcttgatcaccgaac

SEQ ID NO: 267 - DNA, 1804 bp, Zea mays
  Clone ID: TF_ZmC13153_1
gcgcggggaccctcgagccgtgcgccagatcatcgccgagattgacgcccaaatgaccggcaccggcgaggagttcgacagcgacgtcgccgagatccgcgccgcgatagtgaacgaggccaacgagatggaggcgaccgcgctgctcatcgccgccgagaaggggtttcttgacatcgtcgtcgagctgctcaagcactccgacaaggacagcctcaccaggaagaacaagtccggattcgatgctctgcacgtcgctgcaaaggagggccacagagatatcgtgaaggtacttctggaccatgatccatcccttgggaaaacgtttggccaatcgaatgtgactcctctcataactgcggcgatcagaggccacatcgaggtggtgaacctactgctggagcgagtttctgggttggtcgagttatcaaaagcgaacggaaagaatgccttgcacttcgctgcccggcaggggcatgtggaaatcgtggaggctttgctacatgctgatacccagcttgctcggaggactgataagaaaggccagactgctctacacatggcagtaaaaggaactaaccctgaagtcgttcaagcgcttgtgaacgccgatccggccatagtcatgctacctgacagaaacggcaacctagctctgcatgttgcaaccagaaagaaaagatcagagattgtaaatgtgcttctgctccttccggatatgaacgtgaatgcgttgaccagggatcggaagaccgcgttcgacatagccgagggccttcccctatcagaggagtctcaagaaatcaaggagtgcttgtcccgcgctggcgcggtcagagcaaacgagctgaatcagcctcgggatgagctcagaaaaacagttacagagatcaagaaggacgtgcatacccagcttgagcaggcgagaaaaaccaacaagaatgtctacggcatcgcgaaggagctaaggaaactccacagggaaggcatcaacaacgcgacgaactcggtgaccgtcgtggcggtgctgttcgcgacggtggcgttcgcggcgatcttcacggtgcccggcggcaacgccaacgacggcgtggcggtggccgtgcacgcgacggccttcaaggtgttcttcatcttcaacgccgtcgcgctgttcacgtcgctggcggtggtggtggtccagataacgctggtccggggcgagaccaaggcggagcggcgggtggtggagatcatcaacaagctcatgtggctggcgtcggtgtgcacgacggtcgcgttcatctcgtcgtcctacatcgtggtggggcgccacttcaggtgggcggcgctcctggtgaccctgatcggcggggtgatcatggccggcgtgctcggcaccatgacgtactacgtggtgaagtccaagcgcacgcgcaagatcaggaagaaggtgaagtcgacgaggaggagcggctccagctcgtggcagcacaactcggagttctcggactcggagatcgaccgtatctacgccatatgaagccggcgcagtgcagctggttcctccagacagacagacccttttggcagcggcacgaaaaggtagacatggatcacgacccttgagatgctagtgggggctggttgactttgtacattccaataagctgggtgtaaaaactgccattccctttgttcgtgaatcggcgggaggcgacggttgtatactgctacagatagatttctcatcagattatatagtatggagtatactattattgtcgttgttatatatatgcagcatgtgctgtgctccttgtgc

SEQ ID NO: 268 - DNA, 775 bp, Zea mays
  unsure (1)..(775): unsure at all n locations
  Clone ID: TF_LIB4721-017-R1-K1-F5
cgggtgttgttccgatctgtgtcccctttgttgacaatatggttttgttcttcttaatcgtatgtttttacttcactagtaaaacattgcatttttaattctctttgggttagttttggtggatgacgattcttggtttttaatttggacagcatggtgccaatgtaaatgctatagaccacacaggccaaacagcacttcactggagtgctgtgcgtggccatgttcaagttgcagaattacttttgaaggaaggagctaaagtggatgccactgatttatatggatatcaggtcacccgtggcacttcctgttatcattgtatcttctattcgtccagtatattttcataatttctcctgatggttcacttcttctgatgcaaaatattaatggagtttattgggttgcacacagattaataaataatgcaccattatcactgtagatcttatattttctttctggctgtaatgatggtttggatgggataactaagatgtgtatatacaatggatttctgttcttctgctctgcaaattccgccattcttgcaatcacaccagcatgttatctagtgtcagatgagttattaatagggtatttggtttgagtaataagctagaccatcatcttctcactcctcactgnttttgtttggtttgtggaatggaatgagttgatccatcaccacctcattcctaatacttagttagttagtattaacatgaggaatgggatcatcccaccaaatttgaggaatgaactaatgata

SEQ ID NO: 269 - DNA, 817 bp, Zea mays
  Clone ID: TF_ZmC518296_2
agggattcgagttggatttctagggtttgctcatcctcatccccatcccctcctcgtcgccgtccgtcgccttccccacctccggtcgatcgaaatttgcgatttttgattgatttccggacggaagacatgatccccaactccgtcgacgccttcctctgatctcatccgtctccccccgaaaaaaccaacccagattcgacatactatggtgcgccgccgcccgtcttcctcctctacctcctcgtcgccgatgctccacaagaacctccgcgcgctcggccccggcctcaatccgtttgcccccttcggcatgggcaactactcccgctaatctcccccctcccctcccctatcctctgctcaatttctccccggatccgatttgcttcttccccccttctcgttcttgatttgattggattgctcctctctctgcttgattgcttggttggtttggatctgcttgcaagattggacaaggggccaccatggtgcagctccgcagctcgctcagcatgacccgggcgcgcgctcgcggcggtgactcggacgacgccgacgaccgcggctggaaccagctccacgtcgccgcccgcaagggcaacctcaaggaggtgagacgtctcctgaatgaagggatggatgtcaatgcacccgcatggggaccaaagtctcctggcgctactccgctgcaccttgctgctcagggcgggcatgtgaaaatcatggatgaactactggagcgcggtgcgaatatcgatgccccgacaaaaggagcttgtggctggactcccctgcacattgctgccaggaa

SEQ ID NO: 270 - DNA, 2368 bp, Zea mays
  unsure (1)..(2368): unsure at all n locations
  Clone ID: TF_ZmC12604_2
gggtacctcgaggccggccggggaaaaaaatccnnaaaaaaaaaaaaaaaaaaaaaaaaaaaaagggacacccccgggcccggccgggattcacgctgcctcggccggcacctacctcccccacttcgccgccggcgggtggagtcgggccggagcagccgctagctcgcctctgttaccccaaaaaagacaaaaaaaaataaagagagagtaccaagcaagccgccggcagctcgggcagccatggggcacggcgtcagctgcgctcgcacgggcgacgagcacaactacttccgcgcggcgcaggtcggggacctcgacgccctggacgcgctcctcgccgccgacccctccctcgcccgccgcgccacgctctacgaccgcctctccgcgctgcacatcaccgccgcgaatggccacctcgaggtgatgtccatgatcttggatcacggggtgccgccggacgccgtgaaccggcacaagcagacgccgctgatgctcgcggcgatgcacggcaagatcgactgcgcgcggaagctcctggaggccggcgccaatatcctgatgttcgactccctgcacgggcggacctgcctgcaccacgcgtcctacttcggccacgtcgactgcctgcgggccatcctcgcggcggcgcggaccacgccggtggccgactcatggggtttcgcccggttcgtcaacgtcagggacgaccgcggcgccacgccgctgcacctcgccgccaggcagggccgctccgcctgcgtgcaggtgctgctggagaacggcgccattgtctccgccctcaccggctcctacgggttccccggcagcacgtcgctgcatctggccgctcgaagcgggaacctggactgcatccggaaactgctcgcctggggcgcggatcgtctccagagggactcagcagggaggattccttacgccgtggcgctgaagcgcaaccacgcggcgtgcgcggcgctgctgaacccgtcggcggcggagcccatggtgtggccttccccgctcaagttcatcagcgagctggacccggaggcgaaggctctcctggaagcggcactgatggacgccaatagggagagggaggagaagatcctcaagggcatcaccaagtattcgcagccatcgcctacttcgccttgcgagcacgatgccattgacgaagcgtcctcggaggccagcgacgcggagctgtgctgcatctgcttcgagcaggcgtgcagcatcgaggtgcaggactgcgggcaccagatgtgcgcggcgtgcacgctggcgctgtgctgccacagcaagccgaacccggcgacgctgacgccgccgtcgccggcctgcccgttctgccgcggcagcatctcgaggctgctggtggcccgggcgagccccgacgccgatgacgacgacaaggccgccgccgcctcgtccccgcagctcgtccggcggcggtcgcacaacctcagatgggcggcggcgacggcgtggacaagcccgagcacgacctgtgatcggcatttgatgctgtgcgtggctgagcagacagcagagcacgaccattttaaaagctgaagcaggcattgccactggctttccaagatgagagacatcacatccaagcgtgattatctactggagtacttgtaatgcatcctcttcttctcccccatgtctggtctatttttgggcgtgctaggatggacctggccggcgcgatatggttgagctgagcttgagccaccgacatgtgtgtaaaactgtcggtcgagagaacacgcagagtggaaccggcgatgtgcagtggacttacttgtaaaaaaaaaaaaaaagggcggccgnnnnnnnnnnnnnnnnnnnnnnnnnnnnnnnnnnnnnnnnnnnnnnntccgtgagcggtgctccggccatggccgaaagaccggtggcagccagccaatggtccgtgnnccgtgatgcacgcaggagcggtgcatggagcaaggctcagagcagccgcagttattgtgtgccagtgtcgtccgagcgctgctcaccccacaggcagcagatgcatgccgtcactgaccagctgctgtcctgcaagatcttcactgtgctagagctatggtcggtcaggcatgctgcaaaagcttgaccccttgccaggaaggaaccagagatagccaatccctacctccctngacgtcgacgagatggctatccgtttggacatgaccaagagtaatgctcccagtttcgagcccaacgccgccattactccgacatcacccaagccttacctccgctccaagcgtgtagcccggctacaggctcaaaccctccaggcctccaccagcaaaatcgtgatgcttttcta

SEQ ID NO: 271 - DNA, 635 bp, Zea mays
  Clone ID: TF_ZmC36749_3
aacgaaactattctacgatggttcaaaaatcaatccttggtctagcacttctgtctgaagactgtaggagctgaccaatacagacgcacgcttttatttttacagctccgcgtttccagtgcttgcagctctatgcaaaggtgtgcagccaaacttgtctttcttgttgacattagcaccatgggctattagtttttcagctatgttaagcctccctttactcgcagcataatgaagagcagttcgaccaccatcagtaaccaggttaacatcagcacctcgctcaagcaggatgtcgacgatttgagagttgccggagctcgcggcggagtggatcggcgcccacccctcctcgtcctgcgcattcagcacgctagccgcggcgtcaccaccgcactgggcaagcgcgagcaccacctggggatgcccggcagcggcggcgacgtggaggagggagcggccgtcctcgttgcgcagggagaggtcggcgggggcgagggaggcgaacgcggcggcgtcgccggactcagcggcgcggaagagctccttctctgacggtcgcctctcctcgccgccggcttcgtcgacgtccatcgctgcagccatccggactccggagttactcgtactcgagg

SEQ ID NO: 272 - DNA, 855 bp, Zea mays
  Clone ID: TF_ZmC515903_1
atcaattcctcactccactcgccccgcccagccagatcttcctagaaccttcagcaaccctagggccccagcgagaggcctctgccgctgccgccgccatggcccccaaccccgccgcaatcgccctcctggctgccctcgacggcaatctccgcctcctcaagaaaatgtccaaaaagatggatttgcgggaaacaaaggaccccaaagggctcaacgcactccatttcgctgcaaataaggggtccctggagatttgcaagttcctgttggaggacgtgggggtcgatgtcaactcggtatcaagcgtaggtgcgacaccgatgttttatgctgcactcaagggaaatcttcaggttgccagatatcttctcgatcatggtagcgatccggcgaaacctagtgagaggggcttaacgccgctgcacaatgcagcagagcatgggcattgtgagattgtaagactgttgctgtccaaaggagttgacgtggatgttatcaattaccgagggacaccattacatatgactgctgcaaagggtcagcatcaggccatgaaaattctgctggagcatggtgctgatcccaacagagtagtcatcatatcttctcaccactaatgatggcatgctgtgggaactccttggaatgcatgaagctactgattgaggctggtgctgatgtgaatggtaatagtagctctggaccaactcctttaacgggggcagttgatgatggctcaactgaattcgtcaagttcttgctggaggctggagctgaccctaacattcctaacagcacggggatattccatcaagagagcagcagtccgtggtcagcgtgaacttgttgagc

SEQ ID NO: 273 - DNA, 691 bp, Zea mays
  Clone ID: TF_LIB4757-035-Q1-K1-C3
gtaggatttccaggagacagaaaccaaacggagacgcagagaaaccctttccacccagattcgttcggttcggttccgaccacgcgggagcgggggcgggcgcgggagagaggggggagatgagcgcggctgcagaggacgcggctgcggccgatgggggatccggaggcgggagcagcggcgcggggtcgtcggaagggggcgcgcggcgccggttcgacgacaagggcctcgtcgcccgcacctcgctcatcctgtggcacacgcaccagaacgacgtcggcgccgtgcggaagctgctggaggaggacgccgcgctcgtcaacgcccgggactacgacagccgcacgccgctccacgtcgccgcgctccacggctggcacgacgtcgccgagtgcctcgtcgccaacggcgccgacgtcaacgcccaggaccgctggcagaacacgccactagctgatgcggagggcgcaaagcggcagcccatgattgagctgctcaaggagcacggtggattgacatatgggaaaactggaagccattttgaaccaaagacgattccaccacctctaacaaataaggctgactgggagattaacccacttgaattggacttcacaaaagcaactgttatcggaaagggctctttcggtgaaatttctgaagcaaattggcgaggaacacctattgc

SEQ ID NO: 274 - DNA, 783 bp, Zea mays
  Clone ID: TF_ZmC34704_1
ggggcgcgtccgggatttccagagagacagaaacaaacggagacgcagagaaaccctttccacccagattcgttcggttcggttccgaccacgcgggagcgggggcgggcgcgggagagaggggggagatgagcgcggctgcggaggacgcggctgcggccgatgggggatccggaggcgggagcagcggcgcggggtcgtcggaagggggcgcgcggcgccggttcgacgacaagggcctcgtcgcccgcacctcgctcatcctgtggcacacgcaccagaacgacgtcggcgccgtgcggaagctgctggaggaggacgccgcgctcgtcaacgcccgggactacgacagccgcacgccgctccacgtcgccgcgctccacggctggcacgacgtcgccgagtgcctcgtcgccaacggcgccgacgtcaacgcccaggaccgctggcagaacacgccactagctgatgcggagggcgcaaagaggcagcccatgattgagctgctcaaggagcacggtggattgacatatgggaaaactggaagccattttgaaccaaagacgattccaccacctctaacaaataaggctgactggacccacttgaattggacttcacaaaagcaactgttatcggaaagggctctttcggtgaaattctgaaagcaaattggcgaggaacacctattgctgtcaagcgcattcttccatccttatctgatgacaggctggtgatccaagattttaagcatgaagtcaacttgctaataaagctgagaca

SEQ ID NO: 275 - DNA, 2059 bp, Zea mays
  unsure (1)..(2059): unsure at all n locations
  Clone ID: TF_ZmC139143_1
cctcgacggcggggggaaaccctttcacgccacggggccccaactgcgcctctcgcaatgtcgctcgagatccacgaggaggatggtggggcgtctggtgcacgtccggcgacgaaggtgatgtctgtttccgggagcgggaagcgggggcggtacgtgcggcaggtgacggggcggcacaacgacaccgacctccacgtggccgcgcggggcggggacgccgcggcgctgcggcgcgcgctgttggacgccgctgcggccgtggccgccacgggggaggcgccagaggacctcgaggcggcgcggcgtgcggtggccgcggagcccaacgaggccggggagaccccgctcgtcgccgcggcggagaggggccacctcggggtggttgtggagctgctccggcacctcgacgcggagggactggccgccaagaacaggtcgggctacgacgcgctgcacgtcgccgccagagaagggcgtcatgctgttgtgcaggaaatgttacatcatgataggatgcttgccaaaacatttggccctgcaaatactactccacttatatcagcagctatgagaggccatattgaagttgttgaacttttgctggaacaagatgactttggattggtggaaatggccagagataatggaaagaatgccttacattttgctgctcgacagggacatactggaatcgtcaaagcgctacttgagaaggatcctcagttagcaagaagaaatgacaagaaaggtcaaacagctcttcatatggccgtaaagggaacaagctgtgatgttcttagagccctagtggatgctgatccagcaattgtaatgctgccagataaaaatggcaacacggctttgcatgttgcaacaagaaaaaagagagcagagatagttagtgttcttttgcggctaccagatactcatgtcaatgcactaaccagagaccacaagactgcctttgatatagctgaagggttaccagtatgtgaggagtcttgcgaaattaaggatattttatctcaacatggtgcgctcagatccagggagctcaatcagccacgagatgagctacggaagacagtgacagagataaagaaagatgtccacacacagctggaacaaacaagaaaaaccaacaaaaatgttcatggcattgctaaagaactcaggaagttgcacagagaaggcatcaacaacgctacaaactctgtaactgttgttgctgtgctgttcgcaacagttgcttttgcagctatattcaccgtacctggtggaaatgacaataatggacttgcagttgttgtccagactacgtcctttaagatattcttcatcttcaatgctgtggctctatttacatcattggcagtggtcgtagttcaaataacagttgtcaggggagaaaccaagtctgagcgaagggttgttgaggtgatcaacaagcttatgtggatagcatcggtttgtactacaatatctttcattgcctcgtgctatattgtgctaggccgccatttccagtgggcagcaatattggtatctttgataggtggtgtcacaatggccggtgtacttggtactatgacatactatgtggtgaaatcaaagcgccaaaggaagattagaaaaaaggagaagatgtcaagaagaagtggctcaagttcttggtatgacaataccgagctctcagatactgaacttaatccagtatatgccttgtaaagagtgtttgtctcaggaatcgagtatgtactaacagatacaatagcttacattatttgttgattgttcaatttctccagttccagtaacaacaaaaccacacagaactttcccaaaaaaaaaaaaaaaaaagcggcctgaatttgatggnagcccatgtgctcaatctgttgtacatgtgagttacaattttttttttctttctgagagtcacttctgtgctttatcttcaggattgctcgtattgtaaagctcaagccaagggctgattttagatacttaatccttaaagtacttcaagtttatgtgcaaaaaaacccccccccgc

SEQ ID NO: 276 - DNA, 814 bp, Zea mays
  unsure (1)..(814): unsure at all n locations
  Clone ID: TF_LIB4828-028-A1-N1-C10
ccggccgggaatccaatccctacctgctcgggaaccacccgtcgggctcctcccgcccccctcgccgcatctgcatgcggcggggatctccgggctcgctccgtcaccggagccccaatcaccgccacctcatccaagcccccgaatcccccgggcgcgcagcacaaccttgccgcgatcgcgcgcgggaaccgccgctgattgggtcgtgaaagctcgattttgggcgattttgattcggagaacccgccgtcattcgattttggcgcgcgttgcgagccgggatggggttgcagcagtccaaagaggaactgctgtaccagcaggtcaactacggcaacgtcgacgggattcgcacgctccgggggcaaggcgctggtctcgagtggattgacaaggaagggaagacgcccctgatgcttgcctgtatgcgcccggatctgttcgacgtggccaaggtgctgatcgagttgggagctaatgtgaatgcctacaggcctgggtcacactgtgggacagcattgcaccatgctgccaagaaaggacttcagcagactgtccatttactactctcacatggagagggacggctttgtcttttttgtggatggatgagagagaactatgctcctgcttttttggatgcaattgctccacagttcatgacaagaaaaatttgngctgttgttttaccccgtgaagtgcgaactccaacccaggcctctaaagtagagatagctatatatccctgaatacaggcttctaaaccacgttctgtacttaaactatggaaatgtccaattgagcaaccaag

SEQ ID NO: 277 - DNA, 1852 bp, Zea mays
  Clone ID: TF_ZmC20337_1
tccgcggggctctccgtcgcactttctcgtgcctcggggaccccgatccgccaccgcgcgaccgatcgtcccggatgcacgggccgtacccgacggctgctgctgctgctgcttcttcttcggacgacatggcggcgaacggcatgaaggtggctctgcaccggcaggtctcggggggctcgatgaagcagaacgcggagctccggcgccaggcgtcgctcgagtccccgcggacggggcgggccaccagccggttcctgttcgggcggcagtcgtccatggacccgaaccggaggcgcggccggagccagagccccgtgcgcgcgccggaggacctgggcgtgccggacaacctggacgccaccatgcagctgctcttcttcgcgtgccagggcgacgcgctggggatcgagggcctgctgcgcagcggcgtcgacgtcaacagcatcaacctcgacggccgcaccgcgctgcacatcgccgcgtgcgagggccaccgcgacgtcgtcagggtgctgatcagctggaaggccaacatcgacgcgcgcgaccgctggggaagcacggcagtagctgatgccaagttctacggccactccagggtctacgatctcttgaaattccatggcgcaaaggttccgagaaccaagaggacgccaatgatggtgtcggccccagccgagataccggagtacgagctgaaccccggagaggtccagttccggcgaggctgtgacgttacaccgggtgtgtaccacatcgcgaaatggaatggcacaaaggtttccgtaaaaatacttgacagagacggttgctccgatcaagaagccgcaaactctttcaggcatgaattgactgtgctggagaaggtccgacaccctaacgtcgttcagttcgtcggagccgtcactcagagcatacctatgatgattgtgtctgaactccatgaagagaaagacttatcagtctgtatccagaagaaaggaaagttaaagcctcagaaggtgctaagatacggccttgatattgccaggggcatgacctacctccaccagtgcaagccggaccccatcatccactgcgacctaaagccaaaacatatcttcctggatagcggaggccagctgaagatcgcggggttcggagtgacaaggatgtccaaggtcgggaccgacaaggtgaggttgatctaccatggcgctctcgtcgacagcttcagctaccacaccgcgcctgagctgtacaggaacgacgcgttcgactcgagtgtggactcctactccttcggcttcatcctctacgagatggtcgaagggtcggtaagagcgccggaggattcagggcactcgatccggttcgagggactgcggccatccctcaagggcaggctcaagggctatcctcccgacttcaaagcgctggtggaggaatgctggcacccgcaagccatggcgcggccgacgttctcggagatcatcatccggctcgacaagatctacgcccacttcgacaagcatgggagctggaaggactcgctcaagctttggaaatgatcgatggcatggcctgcactgcacgccgccttctttgtgtacatacataccgcgctgcaaacgcgtctctttccggggaagattgagtactggttgtaccttgtaaaaggtggagactggagaatcatgtggcatggtgattgttttttttttttgctacgaattgtaacagattgtgagtaaaattgggcagaacaacacgtatacgtccccccccgcagtgtcaaaaaagaaagcacatttgctgttgttttttctgctggagtcgtacatacaaaagcaatactgtaagagatatc

SEQ ID NO: 278 - DNA, 1941 bp, Zea mays
  Clone ID: TF_ZmC14450_1
ttttcacgccggcggccgttattctcccaggccggagagacatggactcggaacccgatgtcgagcttcggggccttgacatcgacgtagaacttgacccggaggaccttcagccgtcggtgcccctcaaaaaggtccccggcggcgacctcttcgaggcggcgcgggccggggattgcgaccgcctcgccctcctcctcgacgccggcgccaacgtcaacgcgcgtgaccgttgggactccgtcgcgctctattacgcctgcctggcgggacacgccgaggccgcgcggatgttgctcgaggccggcgccgtctgcgccgagcgcaccttcgacggcgaccgttgccactacgcggccctcaacctgcgcttacgctggctgctcaagtcgttcgaggccaggccgccaccgctcgcgccgctccccaccgcgctgcgggcgacgttccttgcctgccctgccaaccgcaccgctttcctcgagatgctccaggggagcgccggcgccgaatccgccgccctcgccgcggccgccggatttggcccaaaggatgatccatcaagtgcttgccttttccctccagatatcacattctatgtggacagaaagcctgttgaagcgcatcgggtcatcctttgtgcccgatctcctttcttcgaaaagaagttcaagacagactggaaagacaggaaggaagtgagattttctaaccaaaagttgtattttggcgccttatacagcctcatccatttcttctattctgatagactcgaggtagctgttgacgacatggaaaatttggcgcgtgcatgcaaagtttgcaagtgcgaggagttgcaaaaagttttggataaagaagttgtgcatcagaagtatgcggagtacaagtcagcaagagaactggatatggacagctcacagaaacgattcatcttacaagcgcaatccttgcctgaggaagatcgccttccatcagccttgcagcgtattctgcagacttgtctagcaaactcaagagaaggttactgtagtgaggaatcaaatgagatgataaggaactcagaggatgatgatcttgcagatctttatattaaagtaggtgataaggttttccattgtcatcaggtgattttggcctcaaggtcagagtactttagagccaggctatctcgaactgttgattttcttgaaggtaactgtggctttgaagctgctcagaatgttccgcttcttgaggagcatgacataagtgcagaagcatttgaaaagatgctcgaatacatgtatactgataagctagagcatttggaccctggccaggctgaagaactatttgatgttgcatcaaggtacctgctgtttccccttaagcgggttgtagctgatatgctgctgccatatctcgaacatgtttcgcctgcagaactgtgccactggttgatgatgtcagacatatacggtgtcatgaaaataagggagtatatcttggatatcattgcttgcaactttgagatgtttgcagccacccgggagttccgggccttgctcttgactcttccaccaccatccggagatgactcactacggacaacacgtcccagtgcacctgggactggaggcaacaccgaccaaggcaacattcttgatgatttgcgtgagaagtggctagaagcagagggtgccgagctcgacgagagggatgagagtgcagctctgttcgacaagcgactggagatgcttatgctagttgcagagaaagaagccgatgatgaagacgcttgagtttcgaagagtacgtgtgctagggtagcattgtttttgcattcttcactgcgcagttgtttaggtttgtgagttacaagttcatcttttgttgtatgaacttcaaacagatcagttttgacccatcaagtatccagtgagcaagtatttatgaacg

SEQ ID NO: 279 - DNA, 757 bp, Zea mays
  Clone ID: TF_ZmC12604_4
tgggtaccctgggccggcgggcctccacgctgcctcggccggcacctacctcccccacttcgccgccggcgggtggagtcgggccggagcagccgctacctcgcctctgttacacccccccccccccccccaaaaaaagacaaaaaaaagaaagagtaccaagcaagccgccggcagctcggccagccatggggcacggcgtcagctgcgctcgcacgggcgacgagcacaactacttccgcgcggcgcaggtcggggacctcgacgccctggacgcgctcctcgccgccgacccctccctcgcccgccgcgccacgctttacgaccgcctctccgcgctgcacatcaccgccgcgaatggccacctcgaggtgatgtccatgatcttggatcacggggtgccgccggacgccgtgaaccggcacaagcagacgccgctgatgctcgcggcgatgcacggcaagatcgactgcgcgcggaagctcctgcaggccggcgccaatatcctgatgttcgactccctgcacgggcggacctgcctgcaccacgcgtcctacttcggccacgtcgactgcctgcgggccatcctcgcggcggcgcggaccacgccggtggccgactcatggggtttcgcccggttcgtcaacgtcagggacgaccgcggcgccacgccgctgcacctcgccgccaggaagggccgccccgcctgcgtgcaggtgctgctggaaaacggcgccattgtctccgccctccccgg

SEQ ID NO: 280 - DNA, 644 bp, Zea mays
  Clone ID: TF_ZmC36749_4
ggggggcatccgatgtcacggcacgttgattattcgtctccactccacaatggttaaataaacccaacaagggcaacgtaaagttaaaattctagcggggtcaaatctgattctgtagagagccccgttgtttacacaccagaacaagctttaacacctcgactcagcccggtttctcgtaccacactttccatcgtctttgagcagagcaccagatcatccttcgagcattgccttcgctgcatcgatcagtgcaggtctgaagctgttcgatgctcggccaagggcagggtagccttccttgtcctcaacatcaacatcagcaccatgtctaattagcagaagagcagcccctttattctcacatataacagcatgcgtaagaggtgtttgtcctgtcctgtcaacagcatcaacttcagcaccttcctcaatgaggaattcacacagctccgcgtttccagtgcttgcagctctatgcaaaggtgtgcagccaaactcgctcaagcaggatgtcgacgatttgagagttgccggagctcgcggcggagtggatcggcgcccacccctcctcgtcctgcgcattcagcacgctagccgcggcgtcaccaccgcactgggcaagcgcgagcaccacctgggga

SEQ ID NO: 281 - DNA, 1050 bp, Zea mays
  unsure (1)..(1050): unsure at all n locations
  Clone ID: TF_ZmC2241_2
ctctcttcttctgccttcccgactctacctgacttcgcccgctctgagaaattcactctcaccaccaccgcgccgcctccactccccccacacccccggtctgaaacccaagcttccgcttctctcatggccgacgccaccgccgccctctcagctcggagcaaggtgcaggctttcctggaggctgcgcgcgccggcgacctccaatccctcaagaacctcgtcgcggcgctcgacgaggacggcacgggcgccgcctccgtcgccgccgccgtgcgtgacgccaacaagcgcaccgccctccacttcgcggcgatcggatgtcgcaccgacgtctgtgaattcctcatcggcgagctcggcctccctgtcgacccaaaggacgatgatggcgaaactccgctcatccatgcgacacgccagggccatctggacactgtcaagtatcttctcgaccatggagctgatccttcgctggccaccagcctaggagccacagcgctacaccatgctgcaggcatagggaacacggaactcatgaagcttctcctctccaagggagttgacgtcgagtcagaaagtgatgctggcactccccttgtgtgggctgctggtcatggcaaccaggatgctgtcaaacttctgcttcaacacaatgctaagccaaatactgaaaacgatgatggtgtcacagcattgttatctgctgttgctgcaggttccctcccatgcttggaggtcctaattgaggctggtgcaaacccaaatgtcaaggctggtggagcaaccccattgcatattgctgcagatagtggaaatatagaagtcatcaaatgtttgcttaaagctggagctgacccaaatacctgtgatgatgatgaattgaagccagttcaggttgctgcttggagaaataaccatgaagctgttgaacttcttttaccgttaacatccncaattccaggtgtttcaaactggaacgtagatgggattatagaacacatgctccctaaagagtttgaggaaaagtctcaactgaaggaagcgaca

SEQ ID NO: 282 - DNA, 625 bp, Zea mays
  unsure (1)..(625): unsure at all n locations
  Clone ID: TF_ZmC12604_7
aagaaagacaggacagacagagagaggcggagaggagtgcgtgcgcgtcgataaaaagccgtaaagccgtcgccactctttccccattccacgctgcctcggccggcacctacctcccccacttcgccgccggcgggtggagtcgggccggagcagccgctagctcgcctctgttaccccaaaaaagacaaaaaaaaataaagagagagtaccaagcaagccgccggcagctcgggcagccatggggcacggcgtcagctgcgctcgcacgggcgacgagcacaactacttccgcgcggcgcaggtcggggacctcgacgccctggacgcgctcctcgccgccgacccctccctcgcccgccgcgccacgctctacgaccgcctctccgcgctgcacatcaacgccgcgaatggccacctcgaggtgatgtccatgatcttggatcacggggtgccgccggcagacgccgctgatgctcgcggcgatgcacggcaagatcgactgcgcgcggaagctcctggaggccggcgccaatatcctgatgttcgactccctgcacgggcggacctgcctgcaccacgcgtcctacttcggccacgtcgactgcctgcgggncatcctcgc

SEQ ID NO: 283 - DNA, 710 bp, Zea mays
  Clone ID: TF_LIB4766-003-R1-M1-C3
ggccgcttttttttttttttttttagaaactcatacctcaataaccatactcaaagaatcgaatactgtgattgcctataattgttgtacaaaccaacgatgtggtcatgtcgaccagtggaattttaaaacacagccaagcgcagcagtcccataagttatatcgtggtacagtaaaaggcatttgtcttcaggtgtagaaatcatgttctttccagaagctaaattaggtgggtacaatacaatgctatcaggtacaaacagctagttgccaaaggcctgtattgcaagtttgcaacatcacctcacaaatagtatgaataagtcttcatcagttatcgctccaagttccattcttctctccagagcagtcagacctccgccatctctaattgtcgttctcgcacccctcttcagcagatgcttggtgagctcatcatttttcttttggacacaatgatgcaatggtgttcggccatggaaatcctgcatattaatatccgcgccaaaaagtagaagaagctccaccattataggataaccgtattcgcatgcaaagtgcaataaagaacaaccttgtagacagccttctggttttcagagtcctgaattatctcacaagaaatcggatcaagtaacatcttgtctgtcactggctgaacatgatggacatctttgctcaagcatcatatgtcatgttagcactgact

SEQ ID NO: 284 - DNA, 762 bp, Zea mays
  Clone ID: TF_LIB4738-092-Q1-K1-A8
cccaactccgcctcggcttctcttctctggacggggggcggctgccggcgtcgaccttcgcgaggaaggagaggaggccgttggatcccgctggattcgattggattaggacgggataaccgcgggcagatgcgctgaactattgccgtgtgcagtgagcgatgggcgaccttgctgatctcgcgggtgcgggcgaggcggcgcgttcgcatctcgccgccggcggccagcgggacaggctggcggctctgctggagctcgcggcggccgacgacgtcgcgggtttccgcgaggcgctcgcggggggaggcggcgagggcgacacggcggagctggcggacggagtggggatgtggtacggccgaagcaaggcgtatgagccgcgcacgccgctgatggtcgccgcgacttacggcagcgtggaggtggtgtcgcttctgctcgcccttggttgtgtcgacgtcaaccggcgccccggcgtcgacggcgccactccgcttcactgcgccgcctccggcggctcgcggaacgctgtggccgtcgtcaagctgctcctgggtgccggcgccgacccggtaactcccgactccgccggtcgcttgcctgccgacgtcatcttgtctccacctgcttcgcccgacgccttgggcgatctggagatgctccttggccgccgccgagggctcgctgtcgcgacctcggtgccatcgctctcgtcgtccccgccgctctcgtcctcgccggatgagagcacaggtcgcc

SEQ ID NO: 285 - DNA, 1881 bp, Zea mays
  Clone ID: TF_ZmC5707_1
ggagagggagtgttttgttagagaagcgctagcccgcgcgcccgggattttttatcatactattggtttcattccattgtgatagcttttttttcgctcgctcccggcgggcatggtgttttgcggcaagcccacaagcgttttcctctccgagtcctccctggcctctcaaccactcatcatcgccttcgcaggcatcgccctctcgccgggccgtccgattccgccatggcttccgatgagagcaaaaattcaaaaccagagaagccatcttcagcagctggtgcaggcctccccaatccgtttgatttttcttctatgagcaacttgctcaatgacccatcgataagagagatggctgagcaaattgcaagtgaccctgtgttcaaccagatggctgaacagcttcagaaaagtgctcagggtgctggagaacagggtattcctgcattggatcctcaacagtatatggaaacaatgcaacaagtcatgcaaaaccctcagtttgtgtcaatggcagagcgtcttgggaatgcccttatgcaggatcctgctatgtccagtatgcttgagaacttgaccagtccagctcataaggagcagcttgaggagaggatggcccgtatcaaggaagatccatccttgaagccaattcttgatgagatagagaatgggggtccatctgcaatggtgaagtattggaatgaccctgaggttcttcaaaagattggccaggcaatgggtgttaaccttcccggagattctagtgtgtccactgtgctctctggacccgaagagactgaggaggaaggaggggatgacgatgagtccattgttcatcacactgcaagtgttggtgatgaagagggtttgaagaaagctttagaaggtggagcagacaaggatgaagaagatgccgagggaagacgggctttacattttgcatgtggctatggtgagttgaagtgtgcagaaattctccttgaggcgggggccgcagttgatgccctagataagaacaagaacactccgttgcactatgctgctgggtatggtcggaaggaatgtgtggatcttctgttgaagtatggtgctgctgtcacgctccagaatctggacgggaaaacccccatcgaggttgccaaactcaacagtcaagatgaggttctcaagttgctagagaaggacgctttcctatagagaagagaaccgccgaataaagtgtatcaagccgtcaaactattggttttgcattggtttatttatctcggtctggtatggttgtctgtagcttgtgaatttgatgttcttttcatagcgaatgccgtttttgaaccagtacttgtgtaagaagtacctaggcttgttcttgtcctccatatatgaatctttcacacttgtcaagaattgattacagttattttcaaggctatttcctccgttccaaaaaactcgagactagtcaaaaaaaatgttttccaaaacatttctcccgaagctagatacagtttgctatatccacaatttcaagggagctaaaggggaacgccttttcaggtgctaccctgagccttggaaggtcatgagtaaaggcatcgtcctacagctacatctgcctgcatcaacaagaggagatgccttcgttgaaggaagtgtccctcgacatccttccttctgtttagctaggacctctcgagagttgttgtgtcaataagagagtttacgcgactagatcttcatttctcacttctttggtttatacctatgctgaccggtgactgctaagttgcatattgccgctatcagaagttttccatgcagctttgttatctatgcaggggtttgtcagtttggaattctaaataataaaagggtgagagc

SEQ ID NO: 286 - DNA, 1648 bp, Zea mays
  Clone ID: TF_ZmC33803_1
gggttcgaggccggccggggatatgcgcctcggcccgttgctccgttctgagttgcccccgatccggcccacctacatctcccagctcacctcccgagtcccgacgaccgcttcgtgccttcgtttcgtccgtcccctagtccctacgaccctactccctaccgcacgccaccgcccaccagcgccgccgaggggcaaggccgaaccctcctccgttcgccgaggcggagcacgcccttccaggccagcttccaccggagcaagagctaagtcgcctcgaattcttcccagctagtagcgtgtgccgtaccccgtcgctcaaccgggatggcgtcgagtggggatccgcccggatctgctgatgagaagaaaactccaatatccgaagggtcttccgacgaacgtcaagggcttcctccagcaggcttttcaaatccttttgattttggttctatgcaaagtttgctcaatgatccatctattaaggagatggcagatcaaattgcaagggatcctgcattcaaccggatggctgagcagctacagaaaagtgctcaaagcacaggagaacagggcacacctccattaaatcctcaacaatacatggaaacaatgcaaaaggtcatggaaaacccccagtttatgaccatggcagagcgtctggggaatgctcttatgcaggatcctgctatgtccagtatgctggaaacctttagtagtccatcacataaggagcagctggaagagcgtatgtctcgcattaaggaagatccagctatgaagtcaattcttgatgagttagagaatgggggcccttctgcaatgatgaagtactggaacgaccctgatactcttcaaaagattggtgaggcaatgggagctagcttcccatttggtgcaggttcttctgctgaaccttctggtactgaagaaactgaggaagaaggtggggatgatgatgaatccatcgttcatcacactgccagtgttggtgatgaagagggtctcaagaaagcactagatggtggagccgacaaggatgaagaagactctgagggaagaagggccttacattttgcatgtgggtacggtgagttgaagtgtgcccagatccttcttgaagctggtgctgcagtggacgctcttgacaagaacaagaacaccccgttgcattacgctgctggctacggccgcaaggagtgtgtggatcttcttttgaagcacggtgctgctgtaactctccaaaacctggacgggaagacacctatcgatgtcgccaagctgaataaccaggacgaggttctgaagttgctcgagaaggacgccttcctttgaataccatgcctttcgtatacacttggactcttggtgtcatgtttttttttcataccggttgtttttgtctggatagccacatgtcatggtccttaaatctgttatgcctaaatgctattagcatgtgggtgttcgaactggcctgtaatggtctaccgttcgtgacttgtgttttcccactccatttctgatacttaagcacatatgaaaaagttgtttccggatcaaattcaatggtggtgtatcatggttatcaaaaaaaaaaaaaaaacagccaaaaaaaaaaaaaaaaaaaaaactcgagacctcgtgc

SEQ ID NO: 287 - DNA, 826 bp, Zea mays
  Clone ID: TF_ZmC1115_1
cccgggtcttcgaagggcccatgggacctgtgtttagcagctcgctgtacggggaagacgaagggaatgattcagaacttgctgacatccatgttttagcgagggaaggagcaactgaggatatagtgaagtttctggcagcgggtgtggaagtcaacatgagagatactgaaggtagaactccgctgcactgggctgttgaccgtggccatcttagtgctgttgaggttcttgcaaaagcaaatgcggacctgaatgccaaggacaacgaagggcaaacggcactccactacgctgctgtttgtgaaagagaagacatcgcagaattgctcgtgaagcatcatgccgaccttcagatcaaggatgaggatgggaacacggcacaggacctgtgccctccgagctggtcttttatgaaccgggcgaactgacaaccaacatgctaccttacattagctgtactctaagctggtaccgcacttggtcaatgtgttttttatttatgggggacatatggtgtgccctgtgtgaagtgccgtgcgtggcgcccgctatgacgattgggaaatcagatgagctgttttattttatccacctcatctaactagttgtcaaaactcaaaagtcgagtggttgaagtgttagtgctgggagatacatgtgttgccttacaccaatggtctgttactgttagtgaaaaggaactacaatcatacatgtccttgttgtaccttgtttcctttgtatttattggaccgccgtttgtgtgtttcgatggggttggaggcgacagagttccaaaattgatacaagtttttctttttgg

SEQ ID NO: 288 - DNA, 965 bp, Zea mays
  Clone ID: TF_ZmC9440_2
aaccgattggcgagactgatgggacggcgtcacagcggcggcggcggcggcggaagaggaagagggcgagggcgtgggcgagatgaggaagaagatcttcctctgcacaaggccgcaaggtctggtgatgcggcagcagtggagtcggtgtgcgagtccaaccctctcgccgtcaattcaagggatcgcctctcacgcacaccactccacctggctgcatgggctgggcatgttgatgttgtgagatgcctttgcaagcacaaagctgatgtgggagctgcagcaatggacgacactgcagcacttcattttgcttcccagaaaggccatgtagaagtggcccgtgagctgctggcatctggggcctctgtgaaagccaagaaccggaaaggcttcacggcgctgcactttgctgctcagaattctcacctggatcttgtgaagtgccttgtgaagaaaggtgttgacgtcacagcaaagaccaaaggtggccagacagctctacatgtcgctgaggatgatgaagtgcgtgcgttcctgaaggagtgcgagcaatccttgaagaagggtgccgagctaccatcggagaaggatgattctgccgagaaagagggcgatagcaagtcttcaggtgaggttatgaaagatgaggaggatgcagagcagggcgagaagaggaaaagcgaattggttggtgcgtcgagtttgtcaggagtaaaaaaagccaaagtttctcttggtcatctagtttgtgaaaatgacatggacgaggaagaggagtgatttcgagcagccttgaccttgaggatgcaatagaagtgcacttagatagttccacctgcacctgtgtgttgtgttatgctagtcttagtctgtacggcgatgcttgaatgtaaaggcaagtacaaagttgaatctcagttctcctgggtggcctgaatgaaaattctaagggcttgtttggt

SEQ ID NO: 289 - DNA, 2712 bp, Zea mays
  Clone ID: TF_ZmC9798_1
aatttcccctacccgagggaggaacacacaccgaggaggccgcagcagggcagagtacacccccgcgtttcgggaatggcagtgctgctgcgccccgcggcgatcgcaggcggccggcaggtgtggccggtggcggaggacgaggagggggcccgcgaggcggaggcgtcgtcgcagcggctggtggaggcggtggcgcgcggcgacgcgagggaggccggcgagctgctcgcggctgggcgcgcggacgtgaactacgccggagtggtgtggctcagggcgcgtcgcgtcgcggaggcggagccccgggaggacgccgccgccgaggcgcgggccgtgcacgaggagatccgcgccgacgtctcgccgctcttcctcgcggccggcaacggggacgtcgcgctcgtccgcgccttgctcgcaaagggagcggacgtgaacggcaaggtgttccggggctacccgacgacggccgcggtacgggaagggtgcgcggaggtggcggagcgcgttgagggagggaggtgctcttcgtgtgccaacgaagtagaggaggccgcggagctgtgggtgaggggcatcagggtcgctaccagggcggcgtttggcaagagaggcaaggagtgagtaacgcatggctgcgctctctccggttagagtctgtaggttgcagcgagcgcgtgcttgtaaagagttgtagcgggcgtagagccgtaggggtgctatgtggttcggtgtggggtgcagctgcgctggtcttcagctcgagggctttggcttgccatgatggtttttggttcaggggcatggtgttgtgttgtgttgtgtgtatataggctggctgttgtctcatcgacgtaggtgaggctagcgagcgtgttgctgggtcgcgtccaccggcgaggagctgcgcgtcggcgccggactcgccgaaccttacgacgcggtatggtgcgccgtggagtactacgagtccacgggctccatcctgcgcatgctcctccgtagcgggttcacgtcgactgccgctcacctcggccggacgctcctccaccacgccatcctatgcggcagcgctggtgccgtccagaccttgctggcgtccggtgcagactcggaagctcccgtgaagacgaccaggagcaacaggtccaggccggttcacctggccgcgcgcctcggccagccggagatcctgcggatgctggctgacaggggctgcgacctgaacgcgagggcggaggctggcgacactgccgccatcatctgctcgcgccacaaacgcgaggactgcctccgagttctcgtgtccgccggtgcagatgtcgcgctgttaaactcggctggcgactcgtcggcctccgtcgcttcctctgggggatggaagaccggcttcgaacgggctgttattggcgcgattcggtgcggggccgtcccacgctccagcgaacggagcgtgttctccccgctgatgttcggcgcgctgtgcggcgacgcgaccgcgatggaagtgctgctctctcagccagacgtggacgtggacgagcaggattcggacggatgctcgcccataatggctgctgccaagatgggaaacgtcgaggccttccgcgccctcgtattcgccggcgccaacgtgaagctgagcaacaagcgcggggagacggccatcgggctggcgcagcagagcaagaagagagacctcttcgagcaggtcatgctcgagctcgcgctggagaagggcatgcctggaggcttctacgcgcttcactgcgcctcccggcgcggcgacaccgcggcggtgcgccacctcgccagcacgggctgcgacgtcaatatccccgacggtgacggctacaccccgctgatgctcgcggccagggaaggccacgcgggcgtgtgcgagcttctcatctcctacggcgctcgctgcgacctccggacgccgcgcggcgagacggcgctctccctggcgcgagcagcgctggctacggcggcgttcaacaaggccgaagacgtgatcatggacgagatgggccggcaggcggtccttcagggcgcgcgcgtcaggaagcacaccaagggcggacgcgcgaggcctcacggcaagtcgctgcgcatggtcgctgcggcgggcgtgctccggtggggcgggtcaagccggcgcaacgtgatctgccgggaggccgaggtcggtggcagctcggcgttccagcggcacaggcagaggaagggggacgcgtatgagccggggctgttccgcgtggtgactgcgacagggagggaggtgcacttcgtgtgccagggcggtaaggaggccgcggagctgtgggtgaggggcatcagggccgtcaccagggcggcgtttggcaagagaggcaaggagtgagtgacgcatggctgctctctctccgttaggctctgtaggttgcagcgagcgcgtgcttgtaaagagttgtagcgggcgtagagccgtaggggtgctatgtggttcggtgtggggtgcagctgcgctggtcttcagctcgaaggctttggcttgccatgatggtttttggttcaggggcatggtgttgtgttgtgtgtatatagactggctgttgtctcatcgaagttgctttagctaactggtttgtagtgcgtttctatctgaattatcagtctcctatgcgaaacttctccatttgagttactaattacgatttctgatgt

SEQ ID NO: 290 - DNA, 776 bp, Zea mays
  Clone ID: TF_LIB5117-070-A1-PF1-H3
atctctcggctcagcccctctgtgataagaggcgccgggcgagagatgctcccatgggcggccacggcctcctcctcctccgccgccgccgccgccgccgccgctcttctccatgcctctccactccccgcttcccaccgcgctgcactacctcgctaccgtccgtctccctctcttccgccgccgctctcagttgccttccgttccccggcacgtgccctccctcgcggcggcgacgccttctgggaggagccagacgacggctccgggggcgactacgaggatgacggaaagcaagcgaccggacaaagaagctctcctttccctccccccttccctctctccaggctcgttgcaacgcggcagcaggagcgtcaagagcaggatctccggagagaaatcgagcttctcttaacgccggaagaagaggctatcttggatcagaatgagaccgctgatgtcaccaaaatatcatcaccgaaatggcatccgcttcatacatatgcgttggcgctgcagatacctctcatggacaagctgctggacaatggtgttgatatcgatttagttgataaagatggtttcactcctcttcacaaggtgataataggcaaaaaggaggctgtcattagccatctcctaagaaaaggagcgaatcctcatgtcacagatagggatggagccacaccattacattatgcaggtcaagttggggccctgcaaacgtaaagctgttgattaagtacagggttgatgttaacgttgttgatgttgat

SEQ ID NO: 291 - DNA, 761 bp, Zea mays
  Clone ID: TF_ZmC178914_1
ttggtaccctcgaggccgcgggcgcgtggtcgtgttcgctccacacgcgccaccaccagagacctcccgctggttacaccaatggaggccgtcctacggcatccatcgctctcgcgcaccaggcctccgaacctgaaccctcccacaacgccatctccatcccttcatgcaccatctcttctccgcctccgcgcgcgccggctcatcgccgccgcggtgttccaggaccagaagccgaaggagccagcaagcaagggaggtgatgacgaggaggaggcgtacggcgaggtggaccgcatcgtctccagccgcacagtcagcagcccggtgttcgcggaggacggctcggccaccgccgccgtcgccacggagttcctggtggagtggaaggacgggcacgagccgtcgtgggtgcccgcggaggccatagccgcggacgtggtggccgagtacgagacgccgtggtggacggcggccaagaaggcggactcggaggcgctggcggcgctgctcgcggacgagacgttgcggcgggaccccgacgcggaggacgcgcaggggcgcaccgcggcgcacttcgccgctgggctggggtccgaggagtgcctgcgcgcgctcggcgcggctggagcggacgtgggccgtcgggagcgcgcggggggcgggctcacgccgctacacatggcggtcgggtacggccgcgcgtgcgccgtgcgcgcgctgctggagctgggcgccgacccggaggcccccgacgggca

SEQ ID NO: 292 - DNA, 1133 bp, Zea mays
  Clone ID: TF_701167176_FLI
agtccatatttataattagttttataattaaactatatttaatactctaactagtttacaaacattcgattcgataagactgactaaaagttctcgaccccctgatttcgtctgattcccaaacacagtgtggagctgatccaaacgcgaccgcccgggtgctcctgcggtcgctgaagccatccctgcacgccaacgtcgactgcacggcgctctttgcagcaatcgtgagccgtcaagtcgctgtggtccgccatctgcttcaggtgcgcgcatcatttgtgaaaagcagccgcaaaaatacactcatgttcaggaatggacgcttgacaccatctgcccactccatgtccaggccggcgtgaagagggacacgaaggtgaggctgggagcgtggtcctgggacgcgtccaccggcgaggagctgcgcgtcggcgccggactcgccgaaccttacgacgcggtatggtgcgccgtggagtactacgagtccacgggctccatcctacgcatgctcctccgtagcgggttcacgtcgactgccgctcacctcggccggacgctcctccaccacgccatcctatgcggcagcgctggtgccgtccagaccttgctggcgtccggtgcagactcggaagctcccgtgaagacgaccaggagcaacaggtccaggccggttcacctggccgcgcgcctcggccagccggagatcctgcggatgctggctgacaggggctgcgacctgaacgcgagggcggaggctggcgacactgccgccatcatctgctcgcgccacaaacgcgaggactgcctccgagttctcgtgtccgccggtgcagatgtcgcgctgttaaactcggctggcgactcgtcggcctccgtcgcttcctctgggggatggaagaccggcttcgaacgggctgttattggcgcgattcggtgcggggccgtcccacgctccagcgaacggagcgtgttctccccgctgatgttcggcgcgctgtgcggcgacgcgaccgcgatggaagtgctgctttctcaaccagacgtggacgtggacgagcaggattcggacggatgctcgcccataatggctgctgccaagatgggaaacgtcgaggccttccgcgccc

SEQ ID NO: 293 - DNA, 249 bp, Zea mays
  Clone ID: TF_LIB3245-435-P1-N1-A8
ggcggctctctgttagagcagctctaccatacgcaggtccgcggcgcgtgatgctagatggagcaaaaataatcctctaacaaattcaagagggcggacaccgcttcatcacagcgtactgaaggggcgacacgtgttcgcccagctactggtatccaggggcgcggatcctcaagccgcggatcgagatggttggacagcgtgacagtatgcggtcgacagcagctccatattgggcggacagatcct

SEQ ID NO: 294 - DNA, 1130 bp, Zea mays
  Clone ID: TF_ZmC5707_8
attgggaccctcgaggccggccgggaacactcttatcgccttcgcaggcatcgccctctcgccgggccgtccgattccgccatggcttccgatgagagcaaaaattcaaaaccagagaagccatcttcagcagctggtgcaggcctccccaatccgtttgatttttcttctatgagcaacttgctcaatgtatctctcttgctattgccttaatatgttttgattaagaatttaagatgcttatgttgtacatagttttttctgtcggctgaaccacattcagattcatttggaattgttaattttactatagtgttgtatgctcgtcatgtgcaggacccatcgataagagagatggctgagcaaattgcaagtgaccctgtgttcaaccagatggctgaacagcttcagaaaagtgctcagggtgctggagaacagggtattcctgcattggatcctcaacagtatatggaaacaatgcaacaagtcatgcaaaaccctcagtttgtgtcaatggcagagcgtcttgggaatgcccttatgcaggatcctgctatgtccagtatgcttgagaacttgaccagtccagctcataaggagcagcttgaggagaggatggcccgtatcaaggaagatccatccttgaagccaattcttgatgagatagagaatgggggtccatctgcaatggtgaagtattggaatgaccctgaggttcttcaaaagattggccaggcaatgggtgttaacctttccggagattctagtgtgtccactgtgctctctgggcccgaagagactgattctccttgaggcgggggccgcagttgatgccctagataagaacaagaacactccgttgcactatgctgctgggtatggtcggaaggaatgtgtggatcttctgttgaagtatggtgctgctgtcacgctccagaatctggacgggaaaacccccatcgaggttgccaaactcaacagtcaagatgaggttctcaagttgctagagaaggacgctttcctatagagaagagaaccgccgattaagtgtattaaggccgtcacactattggttttgcattggtttatatctcgtcgtctggtatggttgtctgtagcttgtgaatttg

SEQ ID NO: 295 - DNA, 3132 bp, Zea mays
  Clone ID: TF_ZmC885_1
aattcggcacgaggttgaactctcctccctcgcccgcgcgtctccgccgccccaccggccaccgcccgcgcctccgccgcggcagctgtccaaaagctgaaaatagatagaatcacgagggggggattgcctagacaacgatccttagttaatcaaacacgggctgccagattcgggggggcgttcgcgttcctaccctctcatcactctccccgtaaaaccccggctgggtttatctcatcgccgccgggcggcgagcggtgggaggcaatggcagggtgggggccctccaggctgccgacgtgcgggccgtggggccgcggcgtggcgctggagagggagctgtcgcgggacggcagccactacagcatctccagcggcatcctgccgtcgctcggcgcgcgcagcaaccgccgcgccaagctcaggcccttcatcgtctcgccctacgaccgccgatacagatgctgggagacttttctcataattcttgtgatatactctgcatgggtttccccatttgagtttggcttcattcggaaaccgacgggcgccctagctgcagtggacaatgtcgtgaatgctttcttcgcagtggacatcatcctgaccttctttgtagcttacttggatagaatgacatacttgcttgaagatgatccaaaaaggatagcttggcggtatactaccagttggtttgttcttgacgtagcctccaccatccccagtgaatttgctcggaagatactgccaccaaacctcaggtcatatggatttttcaacatgcttcgactatgtcgtctccgtagcaatcagcttctcttagcaaggggggagcaacatagacatttccattacttctgggtggtcgatgtccagcccatatgtgtcacgctttttgaggtccactgttcggcatgcttctactatcttctcgctgacaggtatcctaactcaacggatacgtggattggtaattcgatgcctgattttcgtcagcggggtatgtgtattcgatatgtagtgtcagtgtatttgtcaatcactacgcttacaactgtgggttatgtgcatttgcacgtggagaacacaagggatgcccctgtgaccctgtgtgcatcagtgcatgtcccccatttaaactgaagtgtagcttatgatggttttgaagctgtaggatgtatccagcttggaaatgaatttgtagtcagctggtctgtatgtagtttcgtcatctctttccatgggaagggattcacaaaatgtaattacatgatttcttttttttcctgtctttagatcaagctttctctggaagtgagaaatattcgtgagtcatgaattttgagccctaaggctataagatccagcatttctcagtatctatttttcaatcttgtccaaaaggtttacttgtttgaaggggtgtccaatgacctcatttttcactggtttctgagatgaaagctgaatattttccacctagggaagacgtgattttgcagaatgaagcacccacagacttctatattttagttaccggtagcgcggagttgatagagttgcgaaatggcggggaacagatggctggagtggctaaggcaggagatgttgttggagaaattggggttctttgctataggccccaactattcacagttcgaacaaaatcattatgccagcttctgcgtatgaatcgcactgcatttctcagccttgttcaatccaatgttgcagatggaacaataataatgaacaaccttatgcagttactaaaacagcagaaagacaacagtgtaatggtgggtgttcttaaggagattgagaacatgctagcgcggggtcgtctggacttgccagttaccctctgttttgcggtaaataaaggagatgattttatgttacaccaacttttgaagcgtggtttggatccaaatgaatcggataacaatgggcatacagcactgcatatagctgcttccaaaggagacgaacaatgtgtcaagcttcttctagagcacggagctgatccaaatgctagagactccgaaggaaaggtgcctctatgggaggctttatgtgaaaagcagaatccagtggtagagctgctagtacagagcggtgcggggctatcatctggagacgtggccttgtactcttgcgtcgctgttgaggaaaatgaccctgagctgcttgagaacattatccgttacggcggcaacgtaaacagctcaatgaaagacggaaccacgccgctgcaccgcgcggtctgtgacgggaacgtccagatggttgagttgttgctggaacacggagctgacgtcgacaagcaggacaacaatggctggtcggcgagagatctagctgatcagcaaggccatgatgacattcaggctctcttcaaatcacgaaaagcacacaggaagcatgcctcaaatggcagagtggcacctatgctgatagggagattcaacagtgagccctcgatgccagatatgagccatgaaaacgccagagtacgcagcgaagttgttccgcagaagctcctccgaaagagggtgagtttccagaattctcttttcggcgtcatctcttcgtcccacgcccaccaggacaccggccgtctgctctcgaaaggcctcgctggaacagagggtccaaattgccgtcacgactccctcatcagggtgacaatcagctgccccgagaagggggggaacgccgcagggaagctcgtgcgcctaccgcggtcgatggccgagcttctcgaactaggtgcaaagaagttcggcatcaagcctggcaaggtcctgacagttgggggtgctgagattgatgaggtggagcttatcagagacggtgatcatattcttctcgtcagtgatgaatgggtgccagatgttgagcaaattaggccttaacaataagtgagccagctgtggtgctcttattgcaatttgacatgatatggggaaacatgcccctgtgaccctgtgtgcatcagtgcatgtcccccatttaaactgaagtgtagcttatgatggttttgaagctgtaggatgtatccagcttggaaatgaatttgtagtcaaaaaaaaaaaaaaaaaaaaaaaaaactcgagggggggcccg

SEQ ID NO: 296 - DNA, 959 bp, Zea mays
  unsure (1)..(959): unsure at all n locations
  Clone ID: TF_ZmC29_2
ctcgaggccggccgggtcagcgaagcacgactccctcaccccgcatgcccgctcttcccccagtctactctcttttcagtttctctctccccactttccccatttttaccgcacatctctccttcctcggcgtctcgcacaccccagcaccttcgtctcccctcccctcccccaacaatcggaaccggatagaaagttcggcttcctcccggacgactcggcgcaaggtcgcagcttttctctcgatttttcgcgcttccccgttttgacgcttgcttcgcatggggattctggagatctttggggcggttcgctgctgagatggttcgcctcatcacgcgctgctgtgactcccaacagttcttccgatccgaggagcccctgttatgaacggcatgccgatctctgcgtcctctgcggcaagtgtcgacagtggcgcggtggcggccggcacgcccatgaagaatgcaacggcggcggacgctctcgccgagatggcgagacatcttaccgtcgacacggaagacaccttcgcgggcctgctggagctcgccgctgacgacgacgcagaggggctgcgcctcgcgctggagcgcgcgccacctgccgccgcggacgaggctggcctctggtacggccgccggaaggtcctggagcaccgcaccccgctgatggtcgctgccacctatgggagccttgccgcgctccgcctgctagtgtccatctcgtatgtggacgtcaaccgccgctcgggcacggacggcaccactgccctccactgcgccgcctctggtggctcacggacggctgttgagtcggtcaagctgcttctgggagctgnggcagacgctaacacatggatgacgctgngcgtcgtcgggctgatgtgatctctgtggcaccggagatgtttgatgccaagttcngcccttcagatcttcttggattcccccagtctg

SEQ ID NO: 297 - DNA, 725 bp, Zea mays
  Clone ID: TF_LIB5116-066-A1-PF1-E11
gaacctaaaatacagcgtgctataagcacctccgacgcacgcgccgtcgcctcgcctccttccagatccgcggcgagccgggaacgaggaaaacaaaaggatggaattgaaatttgatgcactgtggaaaagggacttacttgccctgagcaaatacaacgttaatggtaaagttaaagcaattacagtaagaaatgattatccggactaccctgtcccttattttcaagttactgagggttttgatttgaaaaaggttaagaagcttatgctagaaagggatgttgagatcgccaagtccatagcaaacgacataatcatcccagaccctgctccccaatgggtggctgataacttcttggacaaatatgccgaattggagcccatccttgtaaaggatagtgcctggtgcttcctccgactcttccaaaactgtagaggccggggcatgtcatcggatcttaccatcaccgcacaaaccttaaccttcatggtcagtttcaatgccctgcgatgtgcaaaagttgtattggagggcatggcacctgagctctatgggatgcacgccaatcccaactgcataaacaaatttggatactttgcgctccacgaagctgctgaaaggttctctgtggacatgatcaagctgcttttacgccatggtgcatcgcccaatgtgcgcacagttcgcaatgatgtcatttttgatgtcattgagaatctac

SEQ ID NO: 298 - DNA, 781 bp, Zea mays
  Clone ID: TF_LIB4738-112-A1-K1-G12
aaaaatacgagattaccggcaccaatcaatcaggctggcagtggagtgacagcggcggcaacaccacgcccacgcggcgccggagccgaagccgatcccccgatggatctcccgccgctctcccaccaggccctcttcgccgccgtccgatccgccgacgcgcccgccgtccgcgcgctcctggtcgacgccgaggcgtcgggcacctcgttggccgcgctcgccgccgctcagacggacgccggggaaaccgcgctgtacgttgccgcggaggccggaagcgaggaggtcgtgcgcctcctcctcccgctctacgacttcgaggcagccaccgtccgctcacgccttgacctcgacgccttccatgtcgccgccaagcagggccacaccggggttgtgaaagagttcttggggcggtggccagggctttgctcagtctgtgactcttccaacactagtcccctctactctgctgctgtcaaggatcacttggatgtggtaaatgctatactggacactgatgatagctgcataaagattgtgcggaagaatgggaaaacatccctacatactgctgcaagaattggataccatcgtattgtcaaagcactcatagagagagatccaggaattgttccgatcaatgataggaagggacaaactgtacttcacatggctgtgaagggcaaaaatacagatgtaatggaagagttattgatggatgatgctttcattcgccatgtgagggacaagaaaagaaatactgcttttgccatagcta

SEQ ID NO: 299 - DNA, 587 bp, Zea mays
  unsure (1)..(587): unsure at all n locations
  Clone ID: TF_LIB3279-176-Q1-K6-B3
ccacgcgnccgccagccgctcctccaggcggcctggagccggcgcgacgggatggggggcgggaactacgccaggcagatggcgatgtgcttgagcatgattgcctccggcatcgggatggagaccggcggaattagttccgagatggtggaccagatgaagcgcaacgtagcgtcgtccgattgtgacgggagcaacgttatggagttgctcgatagaatgactgaagactctgacaaggaggagcacctggggccactgcatgatgcggcaagggcaggtaaaatggatgtttgcaaacacctggtggagaatcttgggtttgatgtcgatgttcgtgctaatgatgnttcggggaagactcctttgacttgtgcagtgtcatgtggcaaagtaattgctgtgaggtatcttattgccatgggtgcagatcttgaaaaacaagatgctatttgctttactcctctgcactatgctgccaaacgagggtacagtgnacttagcatgtngttgctctctagaggagctaatgttgnatgtggattcttctggagggacaccactacatggtttctgctgcttgtgga

SEQ ID NO: 300 - DNA, 1401 bp, Zea mays
  Clone ID: TF_ZM5008.C1.o2.fg
atgggcaactcactggggtgctcggcttccggcgagcggctcgtctcggcggcgcgcgacggggacgccatcgaggcgcggatgctgctggagctcagccccgcgctcgcgcgctactccaccttcggcggcctcaacactccgctacacttcgccgccgccaagggccatctcgacattgtcacgatgctgctggagaaaggcgctgacgttaacgcgcgcaactactgcggccaggttactagggcagattacttgagtggtcgaacagcactgcattttgctgcacatgatggatttgttcggtgtattaggcttttagttgcagactttgtcccgagtgtggccttggaggatattgcttcttctgtggtggatggtggtgattgccagacaaacagtgggagcagtcctaattcatcgtcggggcagaagtttaatgaatcggcccgtgtgaggtacatcaacaaacctgcagatggtggtgttacagcacttcacatggcagcattgaacggagctggcagtacaccgttgcattatgcagcaggtggggggaaacaagaatgctgtgagctactaatatcaaaaggcgctagcaggttgacactcaattgcaatgggtggcttcccgttgatgttgctagaatatttggacggcgctctttggagccattactttctccaaattcacactcgaatgtccctgtatttcaactgtccagttatcttgccttgccactcatgagtatacttaatatagccagagaatttgggttgcagcataccacaccctcgattgatgataatgatctatgttcagtttgtctagaaaggtcttgttctgttactgctgaaggttgcagtcatgaattctgcatcaaatgtgctctctacctctgctcaaccagcaacatccgtgtcgagttcacaggcccacctgggtccatcccgtgccctctttgtcggaacggcataatgtctttcaccaagttaccaagcacaccaacagaagggcttaaatcaggttcagcgctcacattctgcaacccatgcatactgaacgcccggtccatggactcgccagccactttctccagagctgaaatcagacggaaccgtgtggcagctgtctcttcggagctggtctgtccaatcacctgcagcccattcccgtcgtccgccctcccaacctgcaggtgcagcgacgacgatccatgcggcgatacagacgtgcaggatggtcccgagttccagtctccccggccctcgcacagcgcaagcatggagctggacaagaggggggagggggatctagaccgggccagttgctcaggcatgttctggagccgaagaagctgtcacagggagcagcagtgtgatgcggagatcaacgcttga

SEQ ID NO: 301 - DNA, 1240 bp, Zea mays
  Clone ID: TF_ZmC5306_1
gttgtattctctgccaaggagaagtttattcatgcggagtatgtaaacaaagaattcttacggaaccgtagcatggatgagaatcagctagctcagcagatgtggaatagtgtagctgcaaatgacaagaaaacagcatacagtctcattgtgagatcacgtgccaatgtaaatttagtttacggagagataccttctagcccatttttgactctcggaaaggcacttcagcaagagcaaccggtttcaccgcctgttggaagccctagatttttcgattgcaattcacatgacaagatttctcctcgggagcccctttcccctgctagcacgagttcacgcacagatgacatggaggacggttgcgaaggtctctccttgctccatcttgcatgccgtgttgcagacgttgggatggttgaattacttttgcagtatggtgctagtgtaaatatgaatgattctaggggtcggacacccccatcactgcattttgaaaggaagacatcggcatgcaaagcttctcctctccagaggggctgattcacaagccatggatcgagatggtaggacagcattacagtatgcaatcgatggtggaacaagcgacgaagacattcttgcattgttagaggatcatagtagatgatcttgcaaccgcaccttcagtaaattgaggctctcttggtgtggtcgactcaactaagttagctcggaattcggattgagtgtgattgggtgggttcaaatctcaaacaagtcaaagttcttctaaattttttccaatcctatccaatccatgtataatgggaataaccgaacaagacctaacagggatccagccccgctcggtcctagcttgtcgtgcagacaatccgaattcatggcatgaaagcaacctatgtacatgtcgttctagggcttcagtatcatgatgcgcatgttgtttctttccccgccgtttgcttgtttagcatcagtggtccttatttagtcatctggcaaacggtttggttttgtttgctgcaggtgatgcatagtaagcttgtaaatggagttgcttctctttattttctagtcatcttttatcatgaagtagatgtggcattctgatgaaagatggttgtacatattgagatgtgctgttgtggcatatatgaaatattggcatggtgtggatggtatatacgaaagttgtgcttgcttaatcaggaacgaggcaacataaaatgttccatgt

SEQ ID NO: 302 - DNA, 165 bp, Zea mays
  Clone ID: TF_700165611H1
gaagggcacaggccgctccacctcgccgtcgagggaggccacgcggaggccgtggagctgctgctcgacatgggcgccgaagccaacgcacggacaaggcgcagcgccacgcagctccagatagcgaaagccatagagtacgaggcaatcgatcagctcctgtgc

SEQ ID NO: 303 - DNA, 555 bp, Zea mays
  unsure (1)..(555): unsure at all n locations
  Clone ID: TF_LIB3608-040-Q1-K6-A3
ngagtgatcaggttgcaagaagagttcttcctaccaggagaggttatattggagcaaggaagtgcagtcgatcaattgtactttgtctgccacggtgcactggaaggtgttggcatcggtgaagacgggcaagaagagactctgctgatgctggagccagagagctcctttggcgagatcttctccgagagcgagtatggcggtcaatcctctgcaacatcccgcagccctacacggtccgcgtctgtgagctctgccggctcctgcgtctcgacaagcagtccttcaccaacatcctggagatctacttcgtcgacggcaggaggatcctgagcaatacgggtgaagcagctggaatcggacatcacgttccacatcgggaagcaggaggcggagctcaccctgcgggtcaacagcgccgctttctacggcgacctgcaccagttgaaaagcctgatccgggcaggggctgatcccaagaacaccgactacgacggccgctcccctctgcatctggcggcttccagagggtacgaggacgtcgtgcaattcctc

SEQ ID NO: 304 - DNA, 2273 bp, Zea mays
  Clone ID: TF_ZmC15603_1
ccggccgggccgggattacaaaaaagctaataaaggccttccatttccactccccgtcgtgtcccttcctccctcttcctccggagctgcgaaattttgagacccagccgggaaagcggaggcggagactacccaccccaccaccagccccctggaattcgcgcaaatcacagaagctccctagccgccggcgagcactcgcgggcgcgcgcgcccccggcggcggcggcggagccctcctctctgccggcgccggcgatgggcaactcgctggggtgctcggcctccggcgagcggctcgtctcggcggcgcgcgacggggacgccatcgaggcgcggatgctgctggagctcagccccgcgctcgcgcgctactccaccttcggcggcctcaacactccgctacacttcgccgccgccaagggccatctcgacattgtcacgatgctgctggagaaaggcgctgacgttaacgcccgcaactactgcggccagactgcgctgatgcatgcttgtcggcatgggcactgggaggtggtgcagatgcttcttctatttagatgcaatgttactagggcagattacttgagtggtcgaacagcactgcattttgctgcacatgatggatttgttcggtgtattagacttttagttgcagactttgtcccgagtgtggccttggaggatattgcttcttctgtggtggatggtggtgattgccagacaaacagtgggagcagtcctaattcatcgtcggggcagaagtttaatgaatcggcccgtgtgaggtacatcaacaaacctgcagatggtggtgttacagcacttcacatggcagcattgaacggtcacttagattgcatgcagttgttgattgacttgggcgctaatgtctcagctgtctcattcccctatggcactactgcaaatttgataggagctggcagtacaccgttgcattatgcagcaggtggggggaaacaagaatgctgtgagctactaatatcaaaaggcgctagcaggttgacactcaattgcaatgggtggcttcccgttgatgttgctagaatatttggacggcgctctttggagccattactttctccaaattcacactcgaatgtccctgtatttcaaccgtccagttatcttgccttgccactcatgagtatacttaatatagccagagaatttgggttgcagcataccacaccctcgattgatgataatgatctatgttcagtttgtctagaaaggtcttgttctgttgctgctgaaggttgcagtcatgaattctgcatcaaatgtgctctctacctctgctcaaccagcaacatccgtgtcgagttcacaggcccacctgggtccatcccgtgccctctttgtcggaacggcataatgtctttcaccaagttaccaagcacaccaacagaagggcttaaatcaggttcagcgctcacattctgcaacccatgcatactgaacacccggtccatggactcgccagccactttctccaaagccgaaatcagacggaaccgtgtggcagctgtctcttcggagctggtctgtccaatcacctgcagcccattcccgtcgtccgccctcccaacctgcaggtgcagcgacgacgatccatgcggcgatacagacgtgcaggatggtcccgagttccagtctccccggccctcgcacagcgcaagcatggagctggacaagaggggggagggggatctagaccgggccagctgctcaggcatgttctggagccgaagaagctgccacagggagcagcagtgtgatgcggagatcaacgcttgattctttatctgtggttctgaattacgttgggattcgtagcagctccaacgcgggagatgagcagcggttgttttttccgccccagctatgttccttcctcctatctacagccaatgttttcttgattggtgaaatgctgctgcgtcctttgcagccgtagagtgtgtgttgtaacagttttgttactatggttcatgtgtacctgtgaatctagatagccttcgaagttgctagccagttacggttctttgtagctgtatgtaaattgcagatctggatggaattactttctgtccctgatgataaatatttatatacaacgagtgaagtaccctctaaggccatctccagcggagctggatgtgagcttgtaaaatattgctttgaattgtagactctgtttatagactagtttaaaataagaaatgagatattgagtatgatttagagct

SEQ ID NO: 305 - DNA, 568 bp, Zea mays
  Clone ID: TF_LIB5116-047-A1-PF1-C5
tatagaaggtcgctcgccaccgaggggaatggcggcgccgccggacagcaagtctgataaatccccagaggagctcctgtgcgcggcggcggaggccggtaacgacgatgctatcgccgagatcatttcctctggcgccgaccccacctacttcgacgcctccggcatgacgccactcatgcgcgcggcctccggcggccacgccgctgccgcgcggctcctgctcgatgccggcgcgccctggaacgcgctctcccccgaaggtctctccgcgggtgaccttacctccgaccccgccacatacgacctgctcctcgaccacgccctgcgctccgagctcatcctcggcaccgtcgcccgccgccaggcggcctccgcgaactcctccgacggcgtccccgccgagacctacctcgactcgaggatttcgttcagcgaggaccgggtgatggatgcggagagcaaggcggtgatgatggagtgggagcgtccgctgatggaggcgcacgcgcgggcggtgtgcgccgccggcggcggcaaggtgctcaacgtggggttcgggatgggg

SEQ ID NO: 306 - DNA, 1487 bp, Zea mays
  Clone ID: TF_ZmC11431_1
cattgtttttctcgtttctgaacagagctttcctcgataagaaaagaaaaaaaaaaaaggccggccaggggttgttcttcttcctaaataataaattctagggtttgcctcttccctctcggctctcgctcccaccaccaccaccaggcagacgcagatcggcggcgggataggctagcaatgatccccaattccgacttcctctagactgcctggcggtcgaattccgattcgattggagtagggaacgagaagggaacaaatacaccggcaccaccaccagaccagacagcacgtgcctccatactatggtttacgccccgtgccgctcatcgacgccgccgtcttcctcgccgatgctccacaagaacctccgcgccctcggacccggcttgaatcccttggctcccttcggcatgggcaactactcccgctagccgtttcctcctatccctctttctccgattccgatctctgagtgcttccgcctccgcccccggccgcttcctccatcggaaccgatccccgctattttactcccgttcgtttcattgttccgttgctttggatctgagtctcgagatcctcccctgtcctgctgctcgaggagccgccaaggataccaaaataccatggtgcaggtgcgcaggtcgctcagcatgagccgccttcggagctgccacgacgcggacgaccgtggctggaacccgctccatgttgctgctcgcaagggagacctcaaggaggtccgacgtctcctggatgagggggggatggatgtgaatgcacctgcatggggaccaaaatgtcctggtgctaccccactccatctggctgctcagggtgggcatgttaaaatcatggatgaactactggagcgtggtgccaatattgatgctcgaacaaaaggggcatgcggctggactcctctacacattgctgccaaggaaaggaacaagaaggctgtgagattcctgattgagaatggagcattccttcctcctgagatgaatgaccataggttcaatccccccctccattactgctctgggttagaatgggcgtatgagatgaagcgcatgcaggatgaaagcgattcgcctggcgaaacttcgttgagctcggataactagagagaaagcagcaggtgcatgcagcttgagaacgatgaagttaagtcaagtcattgagtacatttgcttgatgtctggatgatggagatgttctgttctgtgactttagaataattgttgagtggtacctgtaatatacgacgagtgatttgttgaataataatcatacactagtgtatagcgcgcacatgcgcgcatgccgttctgtggtgtaaaatcttgttataagcatgtataacttgatattgtatcgtgaacatgcatatatgcagagtagtcattattgagacaagaaaaaaaaaaaaaaaaaagcggccaaaaaaaaaaaaaaaaatcgaagcaatagcgtccagc

SEQ ID NO: 307 - DNA, 2286 bp, Zea mays
  Clone ID: TF_ZmC15603_2
cattgggacctcgagccggcgggccttttcctccccgtcgtgtcgcttcctccctcttcctccggagctgcgaaattttgagacccagccgggaaagcggaggcggagactacccaccccaccaccagccccccggaattcgcgcaaatcacagaagctccctagccgccggcgagcactcgtgcgctcccctggaagcggcggaggcggcggcggagcccgcctctctgccggcgccggcgatgggcaactcactggggtgctcggcttccggcgagcggctcgtctcggcggcgcgcgacggggacgccatcgaggcgcggatgctgctggagctcagccccgcgctcgcgcgctactccaccttcggcggcctcaacactccgctacacttcgccgccgccaagggccatctcgacattgtcacgatgctgctggagaaaggcgctgacgttaacgcccgcaactactgcggccagactgcgctgatgcatgcttgtcggcatgggcactgggaggtggtgcagatgcttcttctatttagatgcaatgttactagggcagattacttgagtggtcgaacagcactgcattttgctgcacatgatgggtttgttcggtgtattaggcttttagttgcagactttgtcccgagtgtggccttggaggatattgcttcttctgtggtggatggtggtgattgccagacaaacaatgggagcagtcctaattcatcgtcggggcagaagtttaatgaatcggcccgtgtgaggtacatcaacaaacctgcagatggtggtgttacagcacttcacatggcagcattgaacggtcacttagattgcatgcagttgttgattgacttgggcgctaatgtctcagctgtctcattcccctatggcactactgcaaatttgataggagctggcagtacaccgttgcattatgcagcaggtggggggaaacaagaatgctgtgaggtaagtcaatgtcataaagaatcatcacctttttgacaagaatcctgcttcagttgtacctatcagagaaatttatttattttggtatgtgatgatgctgttcttgcagctactaatatcaaaaggctctagcaggttgacactcaattgcaatgggtggcttcccgttgatgttgctagaatatttggacggcgctctttggagccattactttctccaaattcacactcgaatgtccctgtatttcaaccatccagttatcttgccttgccactcatgagtatacttaatatagccagagaatttgggttgcagcataccacaccctcaattgatgataatgatctatgttcagtttgtctagaaaggtcttgttctgttgctgctgaaggttgcagtcatgaattctgcatcaaatgtgctctctacctctgctcaaccagcaacatccgtgtcgagttcacaggcccacctgggtccatcccgtgccctctttgtcggaacggcataatgtctttcaccaagttaccaagcacaccaacagaagggcttaaatcaggttcagcgctcacattctgcaacccatgcatactgaacacccggtccatggactcgccagccactttctccaaagccgaaatcagacggaaccgtgtggcagctgtctcttcggagctggtctgtccaatcacctgcagcccattcccgtcgtccgccctcccaacctgcaggtgcagcgacgacgatccatgcggcgatacagacgtgcaggatggtcccgagttccagtctccccggccctcgcacagcgcaagcatggagctggacaagaggggggagggggatctagaccgggccagctgctcaggcatgttctggagccgaagaagctgccacagggagcagcagtgtgatgcggagatcaacgcttgattctttatctgtggttctgaattacgtttggattcgtagcagctccaacgcgggagatgagcagcggttgttttttccgccccagctatgttccttcctcctatctacagccaatgttttcttgattggtgaaatgctgctgcgtcctttgcagccgtagagtgtgtgttgtaacagttttgttactatggttcatgtgtacctgtgaatctagatagccttcgaagttgctagccagttacggttctttgtagctctatgtaaattgcagaactggatggaattactttctgtccctgatgataaatatttatatacaacgagtgaagtaccctctaaggccatctccagcggagctggatgtgagcttgt

SEQ ID NO: 308 - DNA, 1803 bp, Zea mays
  Clone ID: TF_ZmC11797_1
tcattccaattaccagacactaacgcgcccggtattgctatttattgacactacctccccgtgtcaggattggataattagcgcgcctgctgccttccttggatgtggtagccgcttctcaggctcccgtctgggaatgggcccctaagggtgcttgggccctaaccctgctggcccccgtcgaaactactatgggaataaaggaaaatcgcaaggagtgtcatcacaacaaacaactgaagattgatgcagatgaaaatgatttaagattttgcttcagaataatctcacctgttaaggcatacacattacaggcagaatcaggggctgatcaaaaggactggatccagaaaattactggagttatcgcatcgctactaaattcaccattcccacagcagttgtcatatggtaatgtagcagcagagagtaacagatccacaagttctgttgattctttgtctattgaagataacaagagttcagagggacatgatgatatattcaaccttctgaggaatatccctggaaatgacagttgtgcagaatgtcgttcccctgatcctgattgggcatctctaaacttgggtattctgatttgcattgagtgctctggggctcataggaatcttggagtgcacatttcaaaggttcgatccttgagactagatgtgaaagtctgggagccagtaattatggatctcttccatgcactaggaaatgattacgctaattccatttgggaagccctgcttccaaaagaagatcaaggaatgaacgactcaaatggagctattctttttattgaaaagcctaaacctagtgatgctttctcaataaaggagaggtacatacaaacgaagtatgtggacaaactgctttttgccagagatcccgatcagaataccattaatattttggaagccataaggaaaaatgatgtgagagcagcatatcgaattcttgcaatagctgaagtcagtgctaacatgacatatgatgctttgagcaaagatgtccatcatgttcagccagtgacagacaagatgttacttgatccgatttcttgtgagataattcaggactctggaaaaccagaaggctgtctacaaggatttccatggccgaacaccattgcatcattgtgtccaaaagaaaaatgatgagctcaccaagcatctgctgaagaggggtgcgagaacgacaattaaagatggcggaggtctgactgctctggagagaagaatggaacttggagcgataactgatgaagacttattcatactatttgtgaggtgatgttgcaaacttgcaatacaggcctttggcaactagctgtttgtacctgatagcattgtattgtacccacctaatttagcttctggaaagaacatgatttctacacctgaagacaaatgccttttactgtaccacgatataacttatgggactgctgcgcttggctgtgttttaaaattccactggtcgacatgaccacatcgttggtttgtacaacaattataggcaatcacagtattcgattctttgagtatggttattgaggtatgagaaaaagatgtcaagcaagtaaggaaagaacacccgataatcgtgcatgcatattaccgttgggcaattttcttttttttattgcaattttacaactgtactgcatatggtcgacctgtaacaattattgaatttatgggtacgtgtatcctgcaagatatgaatcaacttgtaacagcatctccaagtatcgcttcaataaaaaagtgcaaatgcagcatagtttttcccgtg

SEQ ID NO: 309 - DNA, 416 bp, Zea mays
  Clone ID: TF_LIB3150-064-P1-N1-E1
tccaaatcgcgaaaccccagccgctcctcgatggcggcctggagccggcgcgacgggatggggggcgggaactacgccaggcagatggcgatgtgcttgagcatgattgcctccggcatcgggatggagaccggcggaattaagttgctcgatagaatgactgaagactctgacaaggaggagcacctggggccactgcatgatgcggcaagggcaggtaaaatggatgtttgcaaacacctggtggagaatcttgggtttgatgtcgatgttcgtgctaatgatggttcggggaagactcctttgacttgtgcagtgtcatgtggcaaagtaattgctgtgaggtatcttattgccatgggtgcagatcttgaaaaacaagatgctattggctttactcctctgcactatgctgg

SEQ ID NO: 310 - DNA, 1487 bp, Zea mays
  Clone ID: TF_ZmC17166_1
cgtagttctcaacactccttcgtggggcgtgctcgctcctagaatcctagggtccgcttctgcgtcaccgatcggtagtaagcctctcggaactttcctcttttttaccgacgtcaactttctcacctttcttccttcccccagtctcccacaccccaactccaacacagagtcaccgcaccgccgcgtctaggtcaccgccatggccggggactggcaggagctgggccaagcggcggccatcggcctcctcttcgccttcctggtcgccaagctcatctccaccgtgatcgccttcaaggaggacaacctccgcatcacgcgctcccctccgacctcccccactgccgccgccgccagccgcgcctcccgtcccctcccactacggctccaccgacggaggcagcggcagcgacagcgactgggagggcgtggagagcaccgagctcgatgaggagttcagcgccgcctccgccttcatcgcggcctccgccgcctccggcaccagcgtccccgaggaagcgcagctgcgcctctacggcctctacaagatcgccaccgaggggccctgcaccgcgccccagccgtccgcgctcaagctcaaggcccgtgccaaatggaatgcttggcataagctgggtgctatgcctacagaagaagctatgcaagggtacatcacaattgttcaggacctattccctaactgggatgcaggtgcaagtgcgaaaaggaaagatgaagatagcattgcttccgcatcagcttcaaaggggcccatgggacctgtgtttagcagtttaatgtatgaggaagacgaaggaaatgaatcagaacttggtgacatccatgtttcagcaagggaaggggcgactgatgacatagtgaagcttctggcagctggtgttgaggtcaacgtgagagataccgaaggtagaagtccgttgcactgggctgttgatcgtggccatcttagtgctgtcgaggttcttgcaaatgcaaatgcagatctgaatgctaaggacaatgaagggcaaacggcactccactatgctgctgtttgtgaaagagaagacattgcagagttgcttgtcaagcatcatgctgatcttcggatcaaggacgaggacgggaacacggcacatgacttgtgcccttcgagctggtcttttatgaaccaggcaaactgataacacgaatatacggatatgcttgaaggtgtcatctgccaagaaacatgctagctgtatcctaaagcccatacggcacatatggtgtatcttagtgtcatgtgtgacgtgtgggaaatcaggcaggttgtttgcgtacgtggtgccctctctgaaatcagatgagttgttttatcgtcctcatcgaaccagttgtcaaaggatagtattagtgttgggaagatacatgtattgctttaatcaaaagaatcatgctggacaccaatgcaagcccaaatgggaagaaaaggatgtgcggac

SEQ ID NO: 311 - DNA, 1006 bp, Zea mays
  Clone ID: TF_ZmC59910_2
acgacggcgagtttaggcgcgagatgatgaaccgcgccgtgcacgccgcggcgaggggaggcagccttgccgtgctcagggacctcctgcgcggctgctccgacgccgcggcatacagggacgcgcagggatcaacgatcttgcacgccgcggctgcaaagggccaagttgaggttgtgaaggatctgattgcatctttcgaggccgggaactgtgtagatgaccaaggggacacggcgctgcatatagcagccttccgaggccatgtccaagtggtcgaggctctcatcaccgcatctccgtctcttatatcagcaacaaacgaagccggcgacacgttccttcacatggcactgactggcttcgggactcccgagttccaaaggcttgatcgccagacggagctcattaggcaattagcgagtggagcaatcgtggatatcagcagcagcagcactattatcaacgcgcagaatgatgacgggaagacagctcttcacttggccgtggtttgcaacctgcattcggacgtcgttaagctcctgatgagtctgccttgtattgacctcaacatctgcgacaaggacggcatgactcctctggatctactcaggaaacagccacggacgacggcgtcagaggtactgatcaaacaactgatcctggccggtgggttcacaagctcaagggaccacgagactaggtcggctatcgcttctcagctgaagatgcactccattgtaggaagcccggggacatcgttcaagataccagacggcgagatcttcttcctccacgctgctggagtcgacgtgtcgggcggcatcggcatcggcgaaggaggagctggagcagtaccgttttcctccgttattgctagggctgatgccgctgacgtcctgctgggacccaaactgaagaggctcaactctttccaagacgcggcgaagcatatcaaggtactattcagatggcctcgccgcggatggaagaaccaggcagcggc

SEQ ID NO: 312 - DNA, 732 bp, Zea mays
  Clone ID: TF_ZmC263942_1
caaatacattcccagccgtcagatacagtgtgccgccgcgaggcgagtggccgacgtacgcgccgtcgcctccttccttccagatccgcggcgagccgccaacgaggaaaacagaaggatgaacttgaaatttaaagcaccgtggaaaaaagagttagttgccctgggcaaagctaacgtcaatggtgaagataaaacaattactataagaaatgattatccggattaccctgtcccttattttcaagttactgagggttttaatttgagaaaggtcaaggagcttatgctagaaaggaatgttaagatcgccaagtccatagcaaatgacataatcatcccagaccctgctccccagtgggtggctgataacttcttggacaaatatgccgaattggagcccatccttgtaaaggacagtgcccggtgcttcctccaactcttccagaactgtagaggccggggcatgtcatcggatcttaccatcaccgcacaaaccttaaccttcattgtcagtttcaatgccctgcgttgtgcaaaagtcgtattggagggcatggcacctgagctctatgggatgcacgccaatcccaactgcataaacaaatatggatacttcccgctccacgaagctgctgaaaggttctctcttgacatgatcaagctgcttttacgccatggtgcatcacccaatgtgcgcacagttggcaatgatgtcatcaagaatctact

SEQ ID NO: 313 - DNA, 1162 bp, Zea mays
  Clone ID: TF_ZmC26160_2
gccggccgggccggcttcacaaatcctccagccaaggacacgctgataatccggtgtcagctggtagcatttctggagcagctgactctttttcagggctgagtttgggtaaggaggatgattcgtcgcctatgaagaattcaacggttcagagcacggcagcccttattgagtgcaaatgtgggatccggttgtgtatatgtgaagcaccaaaaccagaaccttctcctacacctgtaaagaatatcaacaccgttcccccaaccacacagtcaaatccaaggccaaagaagcctgctaacactcaacagaaggcttcagctacttccagtagcaactcaagcccattcttaaatattggattaatgaacaacgatagcaatgataagggcattgttgactatgaagttagtggggagggactgagagaagcaattaaaggcggggatgttaagggtgtaaagaaacttcttacacagggagtggattctaactactgcgacaaacaaggatttactttgctgcatttggctgctttgtttaaccaaactgaaattgctcttattctcatggaccatggggcaaatgttgaaagcaaaaatgggcaaggggaaactcctttggactgtgctccggcaatgctgcaatacaaaatgcgccaacgggtggaagaactcgcggcttcggcttcgaagggaccactagggtgaactgtgctcgtgctagtttctgctgagttcctcctattccagtttgtgtcaaatgtggtgtcaagaataaaatagttaagtcagctgaaagcttcttgctggtgggacagtgtttggtccgccagtgtataccatctagaaacgttgaatgccagtcacggctcacgcgtgtgaaataatatatattcagcttcatcctacattcctactcatgtactctgtagccggtgaatacttccaaacatttaccacgtacaatatgttttcttttactgaaaaaaaaaagggcggccgccaccgcggtggaaagatttgccccatggtttgtggggataagagcaatttcagtttggttaaacaaagcagccaccgggccgaaaccagagctgatgtaagcgtgcttgagcagtttgcgcacgtcgatagcgacacctgaatgggactaactggcc

SEQ ID NO: 314 - DNA, 1656 bp, Zea mays
  Clone ID: TF_ZmC1327136_1
atggatcggctggtcatacctgagccgtcgaacgaggtggtggtccgggtggagcccgggaggcaggcgaggggggagctgacgctgcggaacgcgatgcacaccatgccggtggcgttcaggctgcagccggcggtgcgcgggcgcttcgcggttcgcccgcacacggggatcctggcgccgctcgcggcggtcaccgtggacgtgctgtacctggcctccgcgcctccggaggggcccagcggctcaggaagccgtggcgaggacgcgttcctgctgcacagcgtggtcgcgcccggcgccgcggtgaaggagcccgtcacggcgctcgactcggtcaacccggagtggttctcggcgaggagcaagcaggtgttcgtggacagcgggatcagggcgagcttcgtgggagcgtccgtggccgcgcggctcgtcgaggccggcgcggtcgaggcgctcagggaggtgctcgaccgcagcgagcccgagtggcgcgctgcggacgccacggacgagtctggccgcacgctgctcgacctcgccgtcggcctggcccgcgccgacatcgtccaggtgctgctcgagtacggcgccgacgctgacaagccgagccgaggccggacgcccctcgagaccgccgccgccgctggcgagtgcctcatcgccgagctcctcctcgccaacggcgccacgcccgccggctccgacgccatccacgtggccgccgccgccggccacaacgacgtcctcaagctgctccttgccaggcccgcctccgcttctcccgcctcgtcctcgtccttctcgtcttctttgacatctatcgacgcggcggggagggacggcaagactcctctacggttagcggcggaggcggggcggcgagacgcggtcaaggcgcttctcgcggcgggcgcgagggccgacgcgaggtgcggcgcggacggtgccaccgcgctccacgccgcggcgaggcgcggcgacgaggcggtcgcgcgtctcctcctgtcgcacggcgtctccggcacggcctcggtgcgcgacgtggccgggaagaccgcattcgagatcgccgccgaggagggccacggcggccggatcctggacttcttgggactcggcgaggccatcctcgccgccgcgcgcaagggcgaagtgagatcggtcaggcgcgcggccgatggcggcgcgtccgtcgaggggcgggatgcgcatgggtggacgccgctcatacgagctgccttcaaagggcgggccgacacggtccgcgaccttatcgaccgcggtgcggacatcgacgcggccgatgccgacggttacacggcgctgcactgcgcagccgaggcgggccgcgccgacgtggtcgacctcctcttaaagaacggcgccaacgttaaggccatgaccgtgaagggaagaaccgctgccgatgccgccacagcctcggggaagtccaaggtggttcggcttcttgacaaggccaccatcatggggaggaagcaggatgttagcgagaaggtggcgccggcggtggcgaagggcggtagcatggacaggaaacggagagcgcggaaagggagcagtggcgccatacggtttggtggtgggaaggaggggttcgaagccgccgcggttaccgttgggtggtcacactag

SEQ ID NO: 315 - DNA, 2077 bp, Zea mays
  Clone ID: TF_ZmC12604_1
cattggctcactcgaggccggccgggctggcgggggaaagtgatggctccccgcgggccgggccggatcccacgctgccctcggcgctgcgtctggacccggcacctacctcccccctccccacctcgccgccggcgggtggagtcgggctggagcagccgctctcctctgttacccccctaaccccctataaagaaaaagaaaaaaaacagagagagagcgagcgaccggcggctcggcagccatggggcacggcgtcagctgcgcccgcaccggcgacgagcacgactacttccgcgcggcgcaggtcggggacctcgaggccctggacgcgctcctcgacgccgacccctctctcgcccgccgcgccacgctctacgaccgcctctccgcgctccacatcgccgccgcaaatggccgcctcgaggtgctgtcaatggtcttggatcacggggtgccgccggacgtggtgaatcggcacaagcagacgccgctgatgctcgcggcgatgcacggcaagaccgactgcgtgctgaagctccttcaggccggcgccaatatcctcatgttcgactcccagcacgggcggacctgcctgcaccacgcgtcctacttcggccacgtcggctgcctgcaggccatcctcacggcggcgcggaccacgccggtggccaactcatggggtttcgctcggttcgtcaacgtgagagacgaccacggcgccacgccgctccacctcgccgccaggcagggccgccccggctgcgtgcaggcgctgctggagaacggtgccatcgtctccgctttgaccggctcatacgggtttcctggtagcacgtcgctgcacctcgccgctcgcagcgggagcctggattgcacccggaagctgctcgcctggggagcggatcgtctccggagggattcagcagggaggatcccttacgccgtggcgctgaagcgcaaccacgaggcgtgcgcggcgctgctgaacccgtcggcggcggagcccatggtgtggccgtccccgttcaagttcatcagcgagctggagccggaggccaaggcgctccttgaagcggcgctgacggaagccaacagggagagggaggagaagatcctcaggggcaccaagcactctccgcatcctcccacctgggaccacgcgagcgacgccgccgacgccgacgccatcgacgacgcgtcctcagatgccagcgccagcgacgcggagctgtgctgcatctgcttcgaccaggcgtgcacgatggaggtgcaggactgcgggcaccagatgtgcgcgccgtgcacgctcgcgctgtgctgccacagcaagcccgacccggtgacgctagcgctgccgtcgccagcctgcccgttctgccgcggcagcatctcgcggctgctgctggtggcccgggcaagcagcgacgacgcagacaccgagaagtcggcggcagcggctgcggcagcggctgcctcctccccgcagctcgtccggcggcggtcccggcggtcgcacaacctcagcgacggcggcagcagcagcttcaaggggctgtcgtccgccgtggccggttccttctccaagatcgggcgcgggtcgagccggacgatggccgacagcgacggctgcggcgtggacaagcccgagcacgacccgtgatcggcattggatcctgcgcatgtggagccgagcgcggggccatttgcggacatccaatcgaatccaagccaagcgtgactgcttgctgcgaaaataaccgcatccttttcttcttcttctccccatgtccctgtctgtcaatcctattcttgggcgtgccaggatttgttcacctggccattgccgtattccattgtcaccgaccggctatagtatatagtactagattccatttccataaaaaaaaaaaaaaaagcggcctaaaaaaaaaaaaaagcggccgtggccaacagcaagactactgctacctccaacagcttcaggggactcacctcggccatcaagtccttgtccttgtccaggattgctcgtggctccgggagggtagccgacagctcattaccccaatcattc

SEQ ID NO: 316 - DNA, 238 bp, Zea mays
  Clone ID: TF_LIB3067-045-B5-F3A
gagcttccttcgccggagccgacgaggtttggcttcgccaccgcggtcaaggcagcagttgatggcgtgatgaccaccactccaaaggatgtgcaaggagatagagcagtaaaaaagcgcggtcggaagaaccagtacaggggaattaggcagcgccctttgggcaaatgggcagctgagatcaaggaccccaacaagggcgttcgcgtctgggtcggaacctacaacaccggcgagg

SEQ ID NO: 317 - DNA, 3741 bp, Zea mays
  Clone ID: TF_ZmC660_4
ccccgcgtccgattttttttcttcaatctttggcgatggtggtccccttggcgccggtgatctgcatgtgcctgtgatctactgctggctgcatcacctcaatagtctacctgggggcgtatgacagcgaggaggcagctgctcgtgcctatgacctcgcagctctcaagtactggggtcctgagactctgctcaacttccctgtggaggattactccagcgagatgccggagatggaggccgtgtcccgggaggagtacctggcctccctccgccgcaggagcagcggcttctccaggggcgtctccaagtacagaggcgtcgccagacactcaagaagaggcagccaaggcctatgaccttgcggccattgaataccgtggcgtcaatgctgtaaccaacttcgacatcagctgctacctggaccacccgctgttcctggcacagctccaacaggagccacaggtggtgccggcactcaaccaagaacctcaacctgatcagagcgaaaccggaactacagagcaagagccggagtcaagcgaagccaagacaccggatggcagtgcagaatctcctttgttcgcttcaatctttggcgatggtggtccccttggcgccggtgatctgcatgtgcctgtgatctactgctggctgcatcacctcaatagtctacctgggggcgtatgacagcgaggaggcagctgctcgtgcctatgacctcgcagctctcaagtactggggtcctgagactctgctcaacttccctgtggaggattactccagcgagatgccggagatggaggccgtgtcccgggaggagtacctggcctccctccgccgcaggagcagcggcttctccaggggcgtctccaagtacagaggcgtcgccaggtgcttatactgcttatattattctactgtgttactatgtgctaatcttgattccagcacctacatctcgattgatcacctagtagcaaatggtagggtgtataaatctgctagctcaatcagcacatgcactgaccatggaatgatggaacacacctggcatggcaagaggctgtgcagctcccaagtgcaaaaaaatggatgtcacactggattgtgaaatggggtccaggctgcaggcacactaactcacaccggcgttctctagttgcattgggtgacagacacggcacaagatgaggtccaactgtaacctagaacgtcagaggcacacgcatcacctgggcgggcctgtggcacgtcacacacgccagccatgtcatgcatgactcatcacccacctggcattgtgcttctgtgcacctagaaaatgccagctctgaactgcatgcatcacagactactactaaaattgtttgtgaaaccagtgagtgcatcattcttcaaggatcaggatgcacgccttcaataagctaaaagaatgaatgttttttttcttcatgttcttgttgctttgatggtctaggcatcaccacaacgggaggtgggaggcacggattgggcgagtctttgggaacaagtacctctacttgggaacatttggtatggatggacagtcggcgtactaggtacatcccgcaatgatagtcgtcaagcgaatccaagacaccggatggcagtgcagaacccgatgagaacgcggagcctgacgacaccgcggagcccctcaccacagtcgacgacagcatcgaagagggcttgtggagcccttgcatggattacgagctagacaccatgtcgagaccaaactttggcagctcaatcaatctgagcgagtggttcgctgacgcagacttcgactgcaacatcggatgcctgttcgatgggtgttctgcggctgacgaaggaagcaaggatggtgtaggtctggcagatttcagtctgtttgaggcaggtgatgtccagctgaaggatgttctttcggatatggaagaggggatacaacctccagcgatgatcagtgtgtgcaactaattctggaacccgaggaggttttcgctttccaggtgtcctgtcttgggtaatccttgatctgtctaatgccacagtgccactgcaccagagcagctgagaactttcttgtagaaagcccatggcagtttggcgttagacaagtgtgtcgatgttctttaattctttgaatttgcccctaggctgcttggctaacgttaagggtttgtcattgtctcacttagcctagattcaactaatcacatcctgaatctgaagtggttgtgcttgtgcagtttatcactgagtttacatggcatgatcatggtaacgactagatcaagattcaagatccagaccacagatttgctttcacccccctattaccatcataaaagcctagtgacagaggaaaacacaaaggtttaactagttgcactgagactggatatgtccggtggctggcacatgtgcaagcaagcagcccaccgtccattcagattagttgagcagcctttgtctgcaattcagtatctcacattaagcataatctatgtgcatgctttttttttctttctttctaaaaccaacaaattatatacatttaccagaatctgtgtcaccaaacattttgtcttactttcgagaggcactactgtactctgagaacaagggcacttggacaaattttgcacttggacaaattagccaagcgtcatgtctgaacatctgtttttatccacccattcagacagactacttaaccattcgtccgcttctgcagacactcaagaagaggcagccaaggcctatgaccttgcggccattgaataccgtggcgtcaatgctgtaaccaacttcgacatcagctgctacctggaccacccgctgttcctggcacagctccaacaggagccacaggtggtgccggcactcaaccaagaacctcaacctgatcagagcgaaaccggaactacagagcaagagccggagtcaagcgaagccaagacaccggatggcagtgcagaacccgatgagaacgcggtgcctgacgacaccgcggagcccctcaccacagtcgacgacagcatcgaagagggcttatggagcccttgcatggattacgagctagacaccatgtcgagaccaaactttggcagctcaatcaatctgagcgagtggttcgctgacgcagacttcgactgcaacatcggatgcctgttcgatgggtgttctgcggctgacgaaggaagcaaggatggtgtaggtctggcagatttcagtctgtttgaggcaggtgatgtccagctgaaggatgttctttcggatatggaagaggggatacaacctccagcgatgatcagtgtgtgcaactaattctggaacccgaggaggttttcgctttccaggtgtcctgtcttgggtaatccttgatctgtctaatgccacagtgccactgcaccagagcagctgagaactttcttgtagaaagcccatggcagtttggcgttagacaagtgtgtcgatgttctttaattctttgaatttgcccctaggctgcttggctaacgttaagggtttgtcattgtctcacttagcctagattcaactaatcacatcctgaatctgaagtggttgtgcttgtgcagtatatcactgagtttacatggcatgatcatggcaacgcagccagtgcagcatagatttgttcgtttgaacagtttacaaggctgtaaccctagtaagctccagattaacgaaccctttgttttcccc

SEQ ID NO: 318 - DNA, 437 bp, Zea mays
  Clone ID: TF_jC-zmX700221106a1
tttctattaggactcaaaggccgacaagggggactatggagtccattccggtgatattgatcttggagcttaccgatgggcatggctactatgggatgaagacaatcccttgtgcgaaagagtcctaatttcagagatggcttaagcacacatgactactgctggttctgatgcccatgcagcatgggtggccaaagggaagaggtagaatgaatacaggggtatactccagcgggcttggggtaagtgggctcttatgatcagagattcacaccagggcgctcgtgtacggcttggtactttcaatcgtccgaacgtagacgaaagatcttatgatgctgaaatgcgctagattggtcgcaagaacgtcaaggttcactataccgacgcaccatcaagtggtcagacgcgtccatctaggtcaactgctcctcaag

SEQ ID NO: 319 - DNA, 538 bp, Zea mays
  Clone ID: TF_LIB3732-034-Q1-N6-A3
tacgacgtggcggcccgcgcgctccgcggcgccgacgccgtgctcaacttccccggcgcgatcgcctcgcgcgcggccccagcgtccgcgtcccccgaggacatacgcgccgcggcggccgccgcgcagctcgagtactcgcatcagggtcgtaccgccaatcctccccctcctcctgcttctcctccttctcctgctgctgcagcggcacaggactggcatcaacagcacgacgcggcgagctacacgccgcagcaggaggccggcactgacgagttcatggacgaagaggccatcttctagatgccgcagctcctgcggaacatggcggcggggatgatgatgagcccgccgaggctcagccccgacacctccgacgagtcgcccgacccgtccgaggccggggagagcctctggagctaccgtgacccgtagattgttgcacacctatagctaggccatggcaccagcagtgtggtaataacacaaaccatcaccggcaggtagcaaaccagagaagttgattattatggcgaca

SEQ ID NO: 320 - DNA, 471 bp, Zea mays
  Clone ID: TF_ZmC1903_6
cccacgcgtccgcccacgcctccgcgcaagcgcaacagaagcatactacgccgctacgcgctgggcggtgccgcacagctatagatagctagcagtgttgcatagaaatggacagcgccagcagcctcgtggacgacaccagcggcagcggcggcggcgcgtgcacggacaagctaagggctttggccgccgccgccgcctccgcctcggggccaccgccggagcgcatgggcagcggagccagcgcggtcgtggacgcggccgagccgggcgccgaggcggactccggctccgccccggcctccgtcgccgccgtcgcggcgggcgtgggcgggaagctgccgtcgtccaggtacaagggcgtggtgccgcagcccaacgggcggtggggcgcgcagatctacgagcgccacctgcgcgtgtggctcggcaccttcgcgggcgaggccgacgcggcgcgcgcctacgacg

SEQ ID NO: 321 - DNA, 571 bp, Zea mays
  unsure (1)..(571): unsure at all n locations
  Clone ID: TF_LIB4767-002-R1-N1-D7
ccggccgggnaaaaaaaaaaatatttgtcttaagatgtatgtctatcgaactgcttgcttcagccttcaatctctgcgctgtgctgtgccccgcgaattgtttacgctcgctctcgagatctctctctagattctctcggcttccctcttctctctgtctcctgcaagaacccatggcggctacgacgatagattggcacgcccgcaacaacgccgcgcttcccgccgccatgtatggcgtggccgtgccggacagcaaggagctcgtgcgcgcgcttgctccgcccacgcagcaggcaccgaccatctcgttcgcgtacccccgctccggcgtggagcagcagagcgcggcgggctcgtttctgggtgccggcggtagtggcctgaccccggcacagatcctccaggtgcagtcgcggctccagttcctgcgccggccggcgggggccgcggtcgccacccagccgatgaagcggcagggcgtgccgctgccgcangcgccggcggtgtccaagctgtaccgnggcgtccggcagcggcattgggggaagggggtcgnggagatccgcct

SEQ ID NO: 322 - DNA, 490 bp, Zea mays
  Clone ID: TF_LIB3136-018-G10.R6A
accactaaggaaacttgccttcctttcttgtttgcccttcctttctgcaactattatcccacaaattgttctcatatcttccagtccatctatgccttgtaacaccacgatattgagatgctctttgcccaaaagtgtcaatagatttgcgaggaactggttctctagcatgagatttcgccatgacccgtttcctactatcctcattcacttgaacagaggaaattgcacccaccccattttgcacactggggctcatagtgagggacaaagattggaaattgcacccattagcctcatttgaaggttttccatcagaagaatactgggtttgcgccaaccaggacttgtacatgccattggtggggataagagcatgtgagttatcattatatgcatggaaagaatggagcaaggaagaaggttttgtgagactttccccagtttcaatctttgaattgttggtgcaaaagcttgttgccacattaac

SEQ ID NO: 323 - DNA, 527 bp, Zea mays
  unsure (1)..(527): unsure at all n locations
  Clone ID: TF_LIB4730-052-R1-K1-B8
cctcgaggtcctgtcncgggaaaaaaaagaaaaaaaaaaaaaaaaaaaaaaaaaaaaaaaaaaaaaaaaaaaaaaaaaaaaaaaaaaaaaaaaaaaaaaaaaaaaaaaaaaaaaaaaaaaaaaaccggcccttgcggggggccgtttccagaccggggccttgaacttgaagccttcatccgagagagtggagctgaaaagggaaaaccttctgagtctaattaggacaacgctggggggggggcccccccttgttagttaggaggctcgaggcccaaaaaaaaaaagcttaacgatgaggcgcgcggagccggtcgggaagcaggcggacccggagcgggggataaccggttacaagggcgtgcgggggccccgggggggcaagggggtgtcgaaaatccgggtgcccggttcgggggagcgcctggggctcggttcctaccccacgcccgaggccgccgccgtcgcccacaaaacggccgtttacttcttccggggnggngggggcggcccgggcaacttccggg

SEQ ID NO: 324 - DNA, 520 bp, Zea mays
  Clone ID: TF_ZmC421638_1
atacaacctccactccctgtccactcccccccaccacctttgcctctcctagcttttccttggcatcctagctcttcctcctcagccgcagcagatcgactaggaaacatgtgcggcggcgcgatcatctccgagttcatcccgcagcgcggcgccaagcggggtctctgcgccgaggacatctggccgcacgcggccgccgacttcgacgacctcctccacgcgcacgcgcacgcgcacggccacgacgacgacgacttcgccgccgccgcctccttccatcccgaccaagagccgccggcccggaagcgggagcgcaagaccatgtaccgcggcatccggcgccgcccctggggcaagtgggcggtggagatacgggacccggccaaaggctcgtgagcgtgcagcagatgctggctcaccgatgaggctgcctattgctgacaataggaagctgctgagcccgtccaggtatagcggtgcagtgaaacatcatggacgaaggacatgaccgtcacct

SEQ ID NO: 325 - DNA, 698 bp, Zea mays
  Clone ID: TF_ZmC2171_1
ggcaagtgggcggcgccgtccacgccgtcgtccacgaccacgaggcggcgctgcggttcaagggcaccaaggccaagctcaacttcccggagcgcgtgcagggccgaaccgacctcggcttcgtcgtcacccgcggcatcccggaccaccaccggcacccgcgggcggcggcggtgaacctggcagtgcatggccgtacggtggggagcaccacaggaataaaaaggacgcgtgatcgtccagctggccggccgatcgaggatatggatatgcatgcatgcaacttgcagtgcgaggggatcagatcaagaagtagctgtgcggaggaatggaatatgcatgcacgcatgcaatatgggcggggtaagtggcagcgacgatttttggtccaagcataaccatttcttggccctttagtttccacgtcgatttcttcttctttttttttctcacgagatgatcttcttttgttcatttcttggaggatcttgatcactttggttaattagagagctagctcgctatagctgcttgcttaggtgcttttactactaccttccttttgtataatggcctgctctaggtgctcatatctttaatttgttcaagtgtcaactgagattaactacctgtgtgcaaactaatccaaagcaaagaagagtggaaccttatgtatatggggcatgttctccctctct

SEQ ID NO: 326 - DNA, 204 bp, Zea mays
  Clone ID: TF_LIB3062-027-Q1-K1-B1
acgcgatctgcgacgcgcagcctacgtacaccgtctcgcggaagctgacgtcatgccggttcggggctgacatccggtacccggcgaagcgcgcgcgcgtctggctcggcaccttcgactagacgcccataccttggcccgctcctacaacgtgagcactcggaccgtgcgccggcctatcaccaggaccaactttcccgggct

SEQ ID NO: 327 - DNA, 1476 bp, Zea mays
  Clone ID: TF_ZmC4345_1
ccttcacaaaaaataaaataaaataaatgaataaacgcaacggatggaaggatatcttcgagtaattaacgggaggagatgtagggagagagagaaaccaccagaggcgagcgagcaggtgtgggcgtggcgtgggggaggcgccgaggcggtcgggcccgtagataagagtcgtctcacctcgtcgtcgcacccgggcatcgcacgagaggagaaggagaggggaagggctagagagagaaacaaaggtggtagtagatgtgagccaccctctttgtatccctcgtcaacttctcctaccaacttctttttcctcccccaccccttccttaccgtctcgcgcccgctccgcagcctcgcaccacccgccgccgccggccgaccggccggcaccgccggtggcatttgaagtatggttagcttgaggcgacgccgactattgggtctttgttctgggaaagactcattgccagttgatcttcctaagccgattgaaaatgaaaaaactgtggaagttgcacactccaatgtgaagccattcagtgtgcatccactacccttggcaaagacttctgatgtgctcataaaatcctcaaatggttctgatgattcaaaggaagagaaaacccagtactatccaggcaaggaaatcaagtgcagaaaacggcatagaagaaagcagtatgtggatcaagagccatgcattatgaggggggtttatttcaaaaatatgaaatggcaggctgccataaaagttgacaagaaacagattcacttgggtactgttgggacacaggacgaagcagcccggctttatgatagggctgcttttatgtgtggaagggagccaaacttcgtgctttctgaggaagagaagcaggagctacggaggtacacctgggaggacttcttagcagtgactcgcaacacgataaccagcaaaaaacaaaggaaagtcggatcactaaggcgtagcaaggcagacctgttcatgggacagagtgacggcgacaccgagatggccaatggtggcggttcatcgaattccgacaatggcgacgcggggacgtcggcgtcatagatcgctcccaggggttctgccgttgtggcaactcaaagtggagtcctccagcacattcatcccggtcatgcatgatacgagctccgtctaggattttgttctctcaataattaatttccatgtgcataaggccccgttggtctaatcaaatcaaaggttagggaaaccatgccatctcagacgagaattagaggtggtccattgttagaaaacagttcatctgaatagtaatgtataccggttctgaaaactgtgtatatctaccgataggttcaccttacattttgcccagtgtaattagtttaccttataatttaccaaaaaggaataatttttccctttccgttaataccatctctatactagtgggaagaaaaaaaaaaaaaaaagcggcc

SEQ ID NO: 328 - DNA, 445 bp, Zea mays
  Clone ID: TF_LIB3076-043-Q1-K1-H9
gcgaaaaaaacagaaaaaaacaaaaattaaaaattaaaaaaaaaaaaaaaaagggcgtggtctcgggatctagaaccgagcctcaagcgggcaggccacccagcactcaggctagatagctcatcacagccacagcagctagaccctagtagctcactcgcgctcgtgccatgatgaatacccgagcctgtggcagcggcagtggcggcaggaacgaccagaccatgatgggcttctccgagcatccgaagccggcggcgtcggggcaggcgcagccgtccccgccgtcgtcgccgagcgagcgtccgccagcaggccgcgggcgccggcgcgcgcaggagcccgggcggttcctcggcgtgcggcgccggccgtggggccggtacgcggcggagatacgcgaccccacgaccaaggagcggcattggctgggcacgttcgacac

SEQ ID NO: 329 - DNA, 354 bp, Zea mays
  unsure (1)..(354): unsure at all n locations
  Clone ID: TF_LIB3245-182-P1-N1-H5
cggcttggttttctgaaacaaggacctttactggggcgctttcagtactcgggaagaggcggcngatgcgtaccacatcgctgcgatcaaatttcgcgggctcaacgccgttaccaacttctacatgagccgcttccccgtggaaagcattcttttgaacgaccttcccgtttggggcggagacaccttgcgcgccggcaaattcccgttggacttggtgcaaaccgcgagcgctggtgagatgattctcgaccgggctgctgccgctttgcaggccaccatgcccccttgcgagaaggactactggggtttggtcaccctgcactaccaacagcagcaggagcacgggccgca

SEQ ID NO: 330 - DNA, 346 bp, Zea mays
  Clone ID: TF_cC-zmle189002g10d1
acccgtccgccgacttctagctaatgccttacacacttataggctctttgttttgttcagcccacatatcgccctatggggagggggcgcatttcagctccggagagagctctacttcttgtggtctgtaacaactcaactactacagctggcggtttataatggcctgcgaagtgcgattcagtgccattgtacaggggcgtgcagaagcatgtgtggggacggttcgcggagaatattcggtacctgaccaagcgcgcactcgtttgactcggcaccttcgactcgaacgatgtcgctgagctcgcctatgacgtggaccaacgtgacctgttcggtccgtttg

SEQ ID NO: 331 - DNA, 356 bp, Zea mays
  unsure (1)..(356): unsure at all n locations
  Clone ID: TF_LIB3355-042-Q1-K1-C6
ctgctctaggcggctatgacagggaggagaaggctgcgagggcttatgacctggcagctctcgagtactggggcccctcgactcacataaatttcccggaacagcagcggcttctcgaggggagcatccatgtacagaggagtgacaaggtgccgtgctgcaagtctgctcgcccatttttgcaccccacctgctgccttttccaacaccccaaaacttctagccatctcacatccgagtctgggcacagctctgtgcctctctctgttgggagttctgagttttctgaactcacacgcacgcacacgcatncgnctgctgcttgtgtataaagtataaaccttttcttgtcctct

SEQ ID NO: 332 - DNA, 311 bp, Zea mays
  Clone ID: TF_LIB4705-003-R1-K1-A4
cggaaatccagccgccggcgtgcgcgcgcgtctgtgccgcgggacagcgaccgagcaactgcctgcccaaccgccccgcccagcggacgccgagcagtgcgccgcgttctacgcccgtccacctgtcaactgcgctgcattccattgcacgccgttagtcccggctatgccgcggcgtccgctattttcactggcccaagtggttgtcgggggtccggttgcccaataaccgcacgcggctgttgctcggctccttcgacaccggcgcggacgcgtttctcgcttacttcttggcggccttgcttctccgc

SEQ ID NO: 333 - DNA, 333 bp, Zea mays
  Clone ID: TF_LIB3150-014-Q1-N1-B11-F2B
cttcgctctgaactatatcgggctacaactaatatggcgaggaagcgcaaggccggcgactcctccaagggtatcgacggcgcccactctctgccaccaccgctggctatggatcaacagtacgcgtgtgcatgggcatctgaccgacggaactagcatggccgcggcggctgaagcggcggcggcgcagcatcagcggcggagaaggaagcggttcgtgggtgtgcagaagcagccgtcggggcggtgggtggcggagataaaggacaccatccacaagatccgcgcgtggataagcacctttgacacggtcgaagaagccggccgcgccta

SEQ ID NO: 334 - DNA, 692 bp, Zea mays
  unsure (1)..(692): unsure at all n locations
  Clone ID: TF_ZmC5367_25
acctcggtaaatcgatgcaccacgagaaaatccactgcttttcctgaaatcttgattttgaccgcgcgttccttctaagtgacgcaacatattcttgtcgtcacatattattcatctcttccaggtccttctcatagttgctgatctaagcatgaaaaataaatcgtataatatccaaaggaagcagtgataaaggaaaaaaagtataattcttgagaagtgaactgaaatatatgcaaatactggaaaacttgtagtcgttgtggttccccagtacttgagagcagctaaattgtaagccctggtagctttctcttctttatcatgtccacctagatacacagaacccgatcttgaaatcgtcccaggtgatcccgacgagccgtagaggcgccggcccgaagcgaaggccctgcagaatcgatgggtcgcgcacgaagcagagcaccagcccgagcgcgaacacgatgagcgccgccgagatgcggctgcaggaccggcgaggggagatctcgggcgagggcacatcgggcgtagatccgcgatctcggacgcagccccacgcccacatcgggtgtagatccgcgatcttggacgagggtacgggaatgaggggtgggcgctcggcgacgatctcgggcgagggctgggggacggggccggacaatgcncgggggcggaggcgagggcac

SEQ ID NO: 335 - DNA, 372 bp, Zea mays
  unsure (1)..(372): unsure at all n locations
  Clone ID: TF_LIB3608-011-Q1-N6-A11
gtccagcgacggggccgccagcggcagggagcacgacgacgccgacgccgacgccgacgacgactcgtacaccacggcgctcccgctcccgctcgcctttggagcctccgccaacgcctccttgggggggggggggggtttttatttggtggcggcacctnacccacggagcttgagcgcggtggcnttntacgcccgctccgtctgctccggtgtgtagaaggtgcccaggcaaactcgcgcctttcgtaccgggtcgcggatctacgtcgtgtaccgggacataggggggtttcgcactgcgtgcagtcttggttgntacgtcgntggtgttggttaaaatggtttattgggggctatggagggattgag

SEQ ID NO: 336 - DNA, 353 bp, Zea mays
  Clone ID: TF_LIB3245-310-P1-N1-B6
ggccaaacaccaaactgaacttcaatgtaagaatcacatgttgcttagcacttactgatgcactaggaactggtgtttcttgttcaagaacagaagtaaattgcattaatatctgttacgtgttatcagatttctgattatgagaaagaaattgaggttatgaagaccatgtcccaagatgaatttgtggcctacataaggagacaaagcagttgtttctcaagaggtacttcatcataccggggtgtaaccagacggaaggatggtaaatggcaagcaagaattggtaggattggtgagagtagagacaccaaagacatttaccttgggacctttgaaactgaagaagaggc

SEQ ID NO: 337 - DNA, 496 bp, Zea mays
  unsure (1)..(496): unsure at all n locations
  Clone ID: TF_LIB3633-001-P1-K6-G1
cgtccggcatcccggtcgaccccgcgtccgcgcctcacccccccacagacaccaagccactccctcctctcccggtgaggcttgagcgatccgagcaaaaaaatcatccgcgacgcagcgacgcagctacgccacctcgcctcttcccactcccgccgccgcctcctcctcgcagcttccgccgctctactcgtcgccttatgcggcgccgtgcatggccggccagatgggcctgaaccagctcggcccggcccagatccagcagatccaggcccagttcatgttccagcagcagcagcagcagcagaggggcctgcacgcggcgttcctgggcccgcgggcgcagccgatgaagcagtcagggtcgccgtcgccgccgccgccgctggcgccggcgcagtcgaagctgtaccgcggcgtgcggcagcgccactggggcaagtgggtggcggagatccggctcccgaagaaccgnacgcggcnggggctcgtcacc

SEQ ID NO: 338 - DNA, 675 bp, Zea mays
  unsure (1)..(675): unsure at all n locations
  Clone ID: TF_LIB4730-104-Q1-K1-E6
agcgagcgcacgaaagttggttcggaggtttcttgaggggtttagctttggcggcaagtcaaatgcgagcggagtgatgtggcccatggaggaagaggaggtgttcgtgacggtgaggcggacggagcacgtcgacgtcacctcccgggcggtggtcgtggctgcggggcgcgccgccgtcgcggggcccaggacggtgcgggtcttctgcgacgactacgacgcgaccgactcgtccggcgacgaagcggaggaggaggaaaagaaggccgcgcgcaggagggtgaagcgctacgtgcaggagatccgcctggagcgggcggcgaaggaggagganggaggaggaggaggcgacggccgcggcgtctctgggggcggtgctcccggggcggaagcggaagcggaagcccgacggtgaggcctcggagccccggttccgcggcgtgcggcagcggccgtggggcaagntacgcggcggagatccgcgacccgtggcgccgggnttggcgggtgtgggctcggcaccttcgacnaccgccgaggaggccgccaaggtgtacgactcggccgccgccaaggctccgcgggcgcgacgccaccaccaacttccaggcagcaggtggaccccgagcgctctcacagggccgggcggggtccaagagcgccgcgacatcg

SEQ ID NO: 339 - DNA, 624 bp, Zea mays
  Clone ID: TF_LIB3912-059-Q6-K6-H4
ccatgatcaagacctggctacggaacaaccaggtggcccagccccagccgccagctccacatcagccgcagcctgaggaaatgagcaccgacgccagcggcagcagctttggatgctcggattcgatgggaaggaacagcatggtggcggctggtgggagctcgcagagcctggcgctctcgatgagcacgggctcgcacctgcccatggttgtgcccagcggcgccgccagcggagcggcctcggagagcacatcgtcggagaacaagcgagcgagcggtgccatggattcgcccggcagcgcggtagaagccgtaccgaggaagtccatcgacacgttcgggcaaaggacctctatatatcgaggtgtaacaaggcatagatggacagggcggtatgaggctcatctatgggataatagttgtagaagggaagggcagagtcgcaagggtaggcaaggtaatgaaacatatatccataacaaccactgcttatatcgtcatagaaaaaacatatatggtttgtacaacttgagctactgataaagtattgtgtcttttggttccattgcacacacccctggcttcaaacattgcctaccggaatgacaccaacaatatgcag

SEQ ID NO: 340 - DNA, 560 bp, Zea mays
  Clone ID: TF_ZmC167604_1
ggccatcttcgccatcgggtacgtgccgagccatatgcgccgcgccttgcggggctgcgggatctccgacacccacttgccgctccggcaccggatgcctgggtagaatgcgtgcttgccggacgaccgcggcgacggctcccccgagctcgtcgcggtcgtcgtccccatcggcggagccgtgatggcagctgcccgcgccgacgacgtcccgtcgccctgctgcaccaccggagaaggggaatgaggcgaggctgggcccgaagccgaagcagaagccgcctggtggtggctgtggccgccggctgccggcccggccggttgcacctgcaccgccggggaaggagaatggggtgccggcggctgcttctcagccatgaaccgttagggcacgcccatctgtttgggcacctgctgacatgtgccaaattcagctcctgcagcagtggagtcagtgcacctacctatctatggcgcgtgcacgcgcacaggtatatccctccctccctccccaggagctgtcagctagctattccagtgttgcgcgtttgcagctcgtg

SEQ ID NO: 341 - DNA, 709 bp, Zea mays
  Clone ID: TF_ZmC485_4
cagtaaaagtatatgcttgcttgatcagtggttgtttcaatcagaagattaaaaaaacggaattaatattaaaaaaaaggggaagtggctagggaattcctcagtcctagctagctagctcaccggtgggaacgccatgcttggcttgggtgcaggtacatatatcttgggctattcgacagcgaagtagaggctgcaaggttgttcacctcggacgattctgccatttgttcatacacaccatgccttttgatttctctcttgcaatttctcttcttcttttatcatggcttttgattcccaaagggttgagtaccgactcgatattcgattctccctgccgtttcgtgaccccagggcgtacgacaaggccgcgatcaaatgcaacggcagagaggccgtgacgaacttcgagcccagcacgtacgacggggagctgctgctgactgaagctagcgctgaaggtaattaagtagctgctcgctgccatgtaatcttcagatgacgccgctgttaattattagctcatcagctttctgacgatcagcccttgtttttgtttctgcttctgcagttgctgacgacgttgatctgaacttgagcatctcgcaaccggcctcgacccagagccccaaaagagacaagaactgccttggtccgcagctccaccaccaccatgggcggccgtttgacggctccgccgttctcc

SEQ ID NO: 342 - DNA, 294 bp, Zea mays
  Clone ID: TF_ZM4997.C1.o1.fg
atgtggcggctggagaatgcctcggaggttccgccgatcgagttccctcaagaattactacagaaggaagtcgaccggccgccgacccagcagttctttccgcccactactacggccgcgcagcaggcgacttctaccgcctaccgcggcgtcaccttctaccgccgcaccggccgctgggagtcccacatctgggactgtgggaaacaggttggatttatttcgtttgagacatgtaaggacttctccggagagattggaaatgtgcttgtattcttccgctcttccgtctaa

SEQ ID NO: 343 - DNA, 1912 bp, Zea mays
  Clone ID: TF_ZmC141723_1
gggtaccctcgggctggccgggacttcgtctccctgcaccgctcctcctcatcgtcgtctccccacctgacctgacccgaccgaaccgacccgaccactcctcccctgctcttccgccccaagcaagacccattaaaccccctcgccctctcctttcggggcggatctcgcctctcccccgtcccctgcctggaccctcccgatccgcctctcctcggattccgggtggttcccattccatcgacgtaccccctagtattcactgcttcggtgttgtgggctccgtagatcgacgtggcaccagaactatccgcgctagctgttgatttatgtcgcctgctctgctgccgctccatggttctgagctcacgtcgtcagcatcctcttcttgctcctttctccagcctgggcaggggggcgccagagactgcgggtttcgcttcaggatctcaggatttggatttggggtgaagtactctgggtttctacatttaggccctcgcttcctactttgccgcacctgagatagtaaaagagttcaagaatcccccccaaatcacagtcagtcttgggtctggtttgggtggatttcattacgtttcctccaagttcaaacagccagcaggatttccgagttgagtctgaagatcttcgcttttccggtttccatcagaagttagagagaacccctattctgatttgccagattccatctgtgctgcagttcttgcgcagttcaagagactgccccaactttatccaaaaagtttcctccgtctcatttgtggtcaatctggaagcggtgtgtcaagatgcggccctcggtgcagaaggtccgcattttctgttctgatcctgatgctactgactcatctgatgatgaagatggccagatcatcgcagtgaagaaaatggttatggagatactagtcccagtgacaaactcgaagacatctaatagtctgaagacccttgtgccgtgtggagcaaaggacctggaggtttcagagaagaagggtgaatcaagcaggttccgtggcgtgcgcaagcgacgctggggtcgatcggaagccgagattcgtgatcctgtagagaaaaaccaggaagtggattggctcgtatgactctgaggaggctgctgctggggcatatcaggcgtatgcaaaacagatccgtgaagagttgctagccatcaagaaccaacggtctgtatcagaacgtgcagctctatcaagttcatcctcggtttcttgcgtatcttcgtctcccccatgtgagcagacagggcatgaaccgcagactagagtgctcgtggagaaagatcctgagcctgtagatgaagtctttctgaacttctctctcacacccaaggggatttcaatggacgatttgttaggacggatagatgagattcctgtttgtgacgaccctgtcagcccaactgatgagcttccacttgacaatttcacgagcctggaagatgcattcccgatcagcgatttcatcggttcaagagatgagcatctgtatgagcactatattggcctggctgacattagccacctgcctcttccaatggatgatccagctttcaatctggatgcagagcttgattggagtgggtttgacttcgctgcgattgaaggtgaacttgatgtcctttgaggctgcaatcagtgatgtgttatactgaaacctgcacttgcttatgttgtattcagctgaaagctcctctctatgttttttatatttgtcagaatacaacaatgaatacggattcaggtttcagtccatctatgtcagaatacatgagcacagtttccttcattttgttcttagaaaaactgatgcacatatgggtgcagtctatctctaacaaggagttcgcatttttaatacattttcagtagat

SEQ ID NO: 344 - DNA, 613 bp, Zea mays
  unsure (1)..(613): unsure at all n locations
  Clone ID: TF_LIB4073-004-Q1-K1-D9
gtcgacccagcgtccggcatctagtagtcctcatggccgcagctatcgacatgtacaagtactacaacgcacaccagatcgcctcctcctccccctcggatgaggagctcgcgaaagcactcgagccttttataacgagtgcttcctcctcctctccctaccatcgctactcgtcttctccatccatgtcccaagattcttacatgcctacaccctcctacaccagcttcgccacctcgcctcttcccacccccgccgccaccacctcctcctccacgcctttctcgcagcttccgccactctactcgtcgccttacgcggcgccgagcatggttgggcagatgggcctgaaccagctcggcccggcccagatccagcagatccaggcccagttcatgttccagcagcagcagcagcagcagcagaggggtctgcacgcggcgttcctgggcccgcgggcgcagccgatgaagcagtccggatcgccgccgctggcgccggcgcagtcgaagctgtaccgcggcgtccgccagcgccactggggcaagtgggtggcagagatccgcctncccaagaaccgcacccggctgtggctcggcaccttcgacaccgc

SEQ ID NO: 345 - DNA, 591 bp, Zea mays
  Clone ID: TF_9952793
cccgacgtaactgctccccacagtggtctccatattcttcagccttcagtccctgaccttgcggaaagaccaccacaccacacgcacgttgctgtacctgtacccaacaagccctacacctctcagctctcggtcacacatggatcccacgccacgggcagtgctgatctctatcagcagtggcggggcgaagggaggaggaggaggaagccacgcgcactacaggggcgtgaggaagcggccgtggggcaggtacgcggccgagatccgcgacccgtggaagaagacgcgggtgtggctgggcacgttcgacacccccctggaggccgccctcgcgtacgaccgtgccgcgcgcacgctccgcggcgccaaggccaggaccaacttccctgacgaccacgccgggcagcagctgcagcagcacctccgtcggcgccaacacccgccgccgcagcacgtctcgttcggaggcgtcggcgtcggcgtcgacgtcgactgcgctcctccgtggcatttcgtctgcttccagacaccgacgacggccccggcaaccgagacaccgtcaacggcgctggagctgggcacgggccg

SEQ ID NO: 346 - DNA, 1545 bp, Zea mays
  Clone ID: TF_ZmC6700_2
acctcgcctcccccactccttccctccctccctcgctcacccagtggggcagccaaagccgagccgcaaccgcaaagatcttgcgcggcctcctttccccagctcgtcactgtgccgctcgtgccatccaccctcggttcacccaaccaacaatccatccgccaccacaccccgctgcggcgatgtgcggcggcgccatcctctcgggtttcatcccgccgtccggggtgccggcggcggcagcggcggccaagaagaaacagcagcggcgaggctcgccttcgccgccgcggttggggcgccgcgcactgcagttgacggcgtgatgactccaaaggatggtgaaggagacatgcctactaccgctaacaactcagcagcaaataagcgcaggcggaagaaccagtacaggggaatccggcggcggccctggggcaagtgggcggccgagatcagagaccccagcaagggcgtccgcgtctggctcggcacatacagcaccgccgaggaggcggccagggcgtacgacgccgaggctcgcaggatacgcgggaagaaagccaaggtcaatttccgggacgaagcggcggcggcaggtgctcagaagccaccagccgcaactactccaactgcttgtgccagcgcagcgaggctagctcctccacctccaccgccgaagttccgtgctgacgaggttttcgggaacatggacggtggcagcaacgatctgttcgcgatgctggcgttcagtgacagtagtagtaaggtcgttcgtgtggagccaggtgagggcgccgccggtttcctccccgcagatctgttgcccggcagtaagaggtctgcggctaacatgctgctgctctccgaccagagcagcgactcgtatggctcttgtgacttggggtgggagtgggactgggacgatgacaccatgacctcagactacgcctcagtctttgctccagctgctcccagtaacgttgtgccagcatggtacacgcaaggtggaccggtgtcgaagagaacgaggagcagctacggctacggtgcggccatgccgggcggctttgaccctgagacgaactaccagtaccagccgttgccttatgtcgtcgagagcagcccgtcagacggcgcgtcgacggacgacatggactgccttcaaatgatgcgggctggtgatgttccacaggatggggcgagcagtggtggtggtggcggcgacggcggcgatatctggagccttgacgagctgctcatggccgctggcgcttactgagaaaagctatgtgcatcgcattcgcatgtgctagacggctacttgctgtgccgtgaatggagtgtttctcagcttcgttttgcttttaattttttgttatgccaggtctcctgcttgtgcttgtggtgatgatgcaggagagccatggtgggtactatgcttttgctgccagtggaactgtaagacaatgtttatatagtatctatactatgttggtgcgtcgatggttcatggttggttggaagcgagtttgagactgattcagt

SEQ ID NO: 347 - DNA, 912 bp, Zea mays
  Clone ID: TF_ZmC11704_1
cttcgctcactcgtcagctccctgtcgcgcacacaacggacgcagaggccagagccagagcagctgcccccctccgatcggagcaagcaacggcgccaccgtctgtccgtctccaatggcgcggccacagcaacggtaccgcggcgtgcggcagcgccactggggctcctgggtctcggagatccgccaccccctcctgaagacgaggatctggctgggcaccttcgagacggccgaggacgcggcgcgcgcctacgacgaggcggcgcgcatcatgtgcggctcccgcgtgcgcaccaacttccccgaggacgcaggcggcggcggcggcggcgacgggcagcagcagcagcaggccgcgccgtcgctcctctcccccgcgctcgtcgccaagcttcaccgctccaacctcgcgtccgctcaggcggcgcagggcaaggccgacgcctcggcagccgccgccgccgcgctcccgcgcgtcgcggcggcagtgcctgccggcatgggggtctccgcctcgccgtcggcgtcggcgtcggcggcgggggactggagcggcgggctgcttgaggagcagtacgtggaccagatgatcgaggagcttctggactccaacttctccatggagatctcctactagctgcgcgcctgcgcgcacgacgcgtcatcccgcgccccccgcctcctctgctccgtcacatctcaattctcatctcatctctctgtttggtttcgtcggtcaggtagggaagtgcagtgcagtgagttacttagtattagcagtatcattagccatgccaggagtgactcgaggttactttggcctgttggccagacgagttggttcttgagcaacctgatgtgtagtatacggtagtgtcgccagagcataaaagagttggattggactcc

SEQ ID NO: 348 - DNA, 1085 bp, Zea mays
  unsure (1)..(1085): unsure at all n locations
  Clone ID: TF_ZmC8439_2
cgggccgggntataagtccctcctccgctctcctctcccacctcaaatcccagacgccacgccacccaacacatacaaacacacgcacgcgcgcgcgcgcgcctcccgctgttccgcaaaacaaaggaaacgaaggagaggaggccatggcgccgagaacgtcagagaaaaccatggcaccggcggcggccgctgccacggggctcgcgcgtggcgccggcccgcactacagaggcgtcaggaagcggccgtggggccggtacgccgcggagatccgcgacccggccaagaagagccgcgtgtggctcggcacgttcgacacgcccgaggacgccgcgcgggcctacgacgccgccgcgcgcgagtaccgcggcgccaaggccaagaccaacttctccttcccttcgtgcctgccgctcgccgccgcggacgtcggcggcgcctgccggagcggcaacagcagcagcaccaccaccaccgtcgactccttcggcggcgacgtgcaggcgactctgatctttagagtgaaactacgaacatgtggtttaaatggttcaaagttaactctatatggtttatactcatgagaaacggctaaaaaatattgcaagctgttgcagatattcggacggctaacagaaactatttatttcctgttctcataaactgaagtgagatctacgagctgcaaagatcagtaaggcgtttccttcatgtatggcttgcttgcgatctatgcaacgtcgcctttattggtcgattaaagatgtacttaccaaacggagtcgtctcatcccgcgtagacaggctcgcagctcgctcggtcatgtacgttgtccacttcagaacaacgagcagtgctacgggtagttggcacgaccagtggacggaggcggcgaataatataatttcgccgctacagtcgccgtgccgacggagaataatataaactagtgaatggggcgcgcccttgggcgcgcttgagttagtttgtaagtattgtcgatggtagtagtggtaggtattgtaataaattgtattattaacttatgcttaaagtaaaaaaaacttaacctgtgggagtt

SEQ ID NO: 349 - DNA, 571 bp, Zea mays
  unsure (1)..(571): unsure at all n locations
  Clone ID: TF_LIB4742-037-R1-K1-F10
cattgggacctcgagccggccgggtcgccaccgatgtcctcgaactcgatcaccgctcctggatcgctgaccgagcgttcttgcgccatcaacggcgtcatgacctggtcatctttcttcgcacaagcgaacgacaccatggtcgtcgtcggatcacgggcagttgccgccgccacactcccatcgcttctcgtatcatcaccaccagcagcgtcgtcgtgattggctctccttctcttccggcgcagcacgcggggcgtcgtctcggctcggccgccgccgtccgccagcgcgcgctgcaccacgtcgagcgggaagttgaggcacgcgcgcgggccgcgcatgcgcagcgccgccttgtcgtaggccagcgcggcgtcgtcggcggtcgcgaacgtgcccagccacacccgcgcgcctctcctccgcgtgtcccgtatctccgccgcgaacttgccccacggccgccgcctcacgcccctgtagctcttgcacgccgccgccgccgacgacgncttggagctgctgcaccgatgatggcggagccggcctgcttcttggttcgacggcg

SEQ ID NO: 350 - DNA, 649 bp, Zea mays
  Clone ID: TF_LIB3354-089-Q6-K6-E1
gtttaacatgaatgctcatgatagttaggatagggaaatacatatggttaattgcaatattatataaatataggcctccactttgtgttttgcaccaggccaaaataaactcaggtacgggcctggctacgctacgctacgcgcgccgcccctgttcctcacctcgcatcgtcccgggcggggagctgaccgcgcccggctggggctgttgatttgcatgcaggaaggcgcggatatggctgggcaccttcgagacggcggaggacgcggcgcgcgcctacgacgaggcggcgcggatcatgtgcgggccccgcgcgcgcaccaacttccccgcggacgccaacggcccgccgccgtcgttcctctccgcggcgctcgtcgacaagctgcaccggttcaacctggcgtccgtgcaggccgcgcagcggcagagagaggcggcggcggcggcggcggcagcagcagcaacctccgcgcccgcgacgcctccgacgccgccggccacgcagtggggcggcggcggtaggtccctggaggagcagcacgtggagcagatgatcgaggaactgctggactccgacttctccatggagatttgctgctagtgctaggctagccgcgacgcgacctgcctagcgattagctagcg

SEQ ID NO: 351 - DNA, 2310 bp, Zea mays
  Clone ID: TF_ZmC485_1
ggatctttcgctttccttaccccgtgcacgtgcctgcttgatacactacgaccacagattctttggcagaccgctaccaagtgcaagtgtgcaacccacacacatcactcacagtctcacggtgtctctgtgcgcgcgcgtgggacacaggagggagagagacacagagaagggggcgggacgatcaactctagctcagctgggatagctgaaattgctgataggtggaccggatacagggtgcaatgatgcgtgccggcgcatagatagggagagggacgggagagagagccccgactcgggggcgcggaccgccgggtgttgtgtttgtgtgcatgtagcgccgtacacgctcgcgcgtgtgcagcataaaggtagcccgccaacgactcggcacgctcatgcttctacctctgcgtcgtctagttcattcttcgtgacagtccggggcagcaggtggcgaggtcggcaccgccccaggttgcgagtgcggatcgatgcgccggtagcatttgcgtgggcttcgccgtgccgcggcccacgatgccggaccgccggccggccgccgtcacccagcagttctttccgcccactactacggccgcgcagcaggcgacgatggaggagcaatgccacgtgcccgccggtagcgcggcggagcagtgggtccggtcgtcggcgtccaggaagagccggcgcggcccgcggtcacggagctcgcagtaccgcggcgtcaccttctaccgccgcaccggccgctgggagtcccacatctgggactgtgggaaacaggtgtacttgggtggattcgacacggcgcgggccgctgcgagggcctacggccgatccgcgctctagtcccgcggcctgaccgcgtacgctaacttctctcttgactacgactacgacggcatggagaaggtgaaggacttgaccatggtggagttcgtcatgccggcagatgagtgcagcagcggctctccccagggcagctccaggtgccgtggcgtcaccggcaacgcaggcggcagcagcagggcctcctcctgccggcccgccggcgaccgctgcgtcatcatcgggattttccacaccggccacgacgctgcccacgcctaccacatcgccgccatcccgtccgtcgggcccgccgccgccaccgacgtcgtcgacccatcccacgaccagcatgtgaggatcaagaagcgcgcactgtagcaggagctgggactcggcctgggcagtttcccccccggtccgctccccctctccggccgttgctactttttcggttttgccccccggggcgggatgctggttacttgtagccgatcgattggattcctggaggaggagctgacgagagtcgcctaccatcaacctgctgccggcatgttcggccgaccggctgataaaaacgtccacgtagcaccgccgccacaccggcaatggcagcagcagcagcaggggaaccgctcctgtctggatacgctgccgcagcaactggcggcgacgctgagctgcacttgagagtcgggcagccgcgctcgccggcccatccccaacgacagcggcattaactgggcctgcgcgccgccgtacgccaccgccggcgctggcacggatgacgaggacgccagcagcgccgccgctgcggcatcactaggatttccactgtgggccctgcgtgcggcgccttcctcgcccagctggcccagccgctgcgcctttcctgtcgtcccgcgccaccaacagtgacgctgctgggccacgtactgacggcgactggtgacctgctggaaccgccgccggcctgtttcccttttctaggtaaaagcagtggcagaggggcgagctagcgacagcgtgcctcgtcatccatcgtccctgcgccgtggctggcggggtgggaaaaaggtctgagcagttttgagcgtccggaggagctcgacgatttcctgccctcgaatagtcacttggggtggccactagttattatttctttccttccccctcgttgattctgctacccattatcgcctccgtctcccgctgcatgcataatacggctctcgcgcagttggacgttaatggcccggtgtccggcggccggctcctccccccgggaccccctgcccactgcgaggcctttttccacatcgagtatttctgctagtcgatcgcttggattattcacgactgtattagcctatagcttacacgacacaagtcaaatcgcaaatggcgccttcctcccgcatgatgaacaccacgttatatatttttctttgcgccgcctgggacgggttg

SEQ ID NO: 352 - DNA, 1134 bp, Zea mays
  unsure (1)..(1134): unsure at all n locations
  Clone ID: TF_ZmC278_2
ccgctcgcgaatctagnnaactagcccagnaaggagnaaacaactaggataccaccgccaccggcccccggcaggcggcaggcgggcgggagagacgaaatctagggaggactgactggacggaggaggaggaggagcggggagatctctcgctcttccgcccatggaggagctgggagacgccggccagggaccgcaaggcgacgcctccggggcccttgtcaggaagaagaggatgcggaggaagagcactggccccgactccattgccgagacgatcaggtggtggaaagagcagaaccagaggctccaggacgagagcggctccaggaaggcgccggccaagggttccaagaaagggtgcatgatgggcaaaggagggcctgagaacgtcaactgcgtgtaccgcggcgtgaggcagcggacatggggcaagtgggtggcggagatccgcgagcccaaccgtggccggcggctatggctgggctccttccctaccgccgtggaggccgcccatgcatacgacgaggcggcgaaggcgatgcacggccccctgccacgcgtcaacttctctgctggctctgctgatgccggctgccgcgttgcaacggttttattagaaagtggagaccgaggtggaatccgtggagactgaggaggtggtacattaggtgaagacggaagcgaagaatggtgccttgggaagcgtcaaggtcacctgggtcattcagtccgcggaggagactgtgctacccaaggaaggggacgtgagttatgattacttcaacgttgaaaaccccgtcgagatgataattgtagaactgaatgctgataaaaaatttgaggcccccgaagaatcccttgatggagatgatgggtttagcctttttgcatattaaaaagcccggtcatggggggggggggggagtagtaggaatagcttcattctacatcatgctgatgagacatagctttatactatgagccacccggtccaccaagttgtcctgtgtgttgagttcctgtactatagtagggatgagttcgtgtttaaaaaaaaaaaaaaaaaaaaaaaaaaaaaaaaaaaaaaaaaaaaaaaaacggacgctgggcggacgctgggcggacgcgggg

SEQ ID NO: 353 - DNA, 1006 bp, Zea mays
  unsure (1)..(1006): unsure at all n locations
  Clone ID: TF_ZmC218929_1
cccgggtcgnaccagcgttcgggcactctcatgcgtgtcgtctctgctctggccancgaccaggtctgcctgtgtgcgtgcgtaagatgaacacgtacatgtctctctccttggagcgaagcagcagcgtggtccgcgacgtcgccacgcccgcgcctccggcgaccagtggcgccagtgcgccgtatccacgcgcgggcgcgggcgcgtcgctctccctgcccggcgcagcggcggcgcacgggcacagccagtacctgcccctcaacgaggacgactccctggacatggtcctcttcgacgtgctccgagaggcatccggccccggctccgcctccgccgcggcgcccgacacctaccagccgccctcgtcgctgcctacgctcaaggcgctcgcttccggcgccgcgcgcaggggcagcaggaccgcgtacgcaccgaaggcggccacggcgggccaccactaccgcggggtgaggcggcggccgtggggcaagtacgccgcggagatccgtgacccggcgcggcacggggcgcggctctggctcggcaccttcgccacggccgaggaggcagccgccgcgtacgaccgcgccgcggtccgcatgcgcggagccaaggcgctgctcaacttcccgccgggggtcgcgggctgcgggagcgccgcaaccgctacggcgaagcaggctgggctgacggaagccaagtgaacagcgaatgcgatctcaaaggaaccagctgcgaaactgtgtaatgtaattgtgtggaatagtagtatataatgtaaatgtggatgaactagagagagatttccattcatcattgaacggaccacgacaaggattccaaggcgccgattcccaagatctgcacgcagctggtaggatgagatcatcccattacagttctgccacccatttattttaactcatggggataaaacaatttaaaaaacatgtttggtgaattcatagtatcaacgcaccatggtttatgttgttgtttt

SEQ ID NO: 354 - DNA, 723 bp, Zea mays
  Clone ID: TF_LIB4979-098-A1-K1-H5
ccgtttcgtgaccccagggcgtacgacaaggccgcgatcaaatgcaacggtagagaggccgtgacgaacttcgagcccagcacgtacgacggggagctgctgctgactgctgaagctagcgcagaaggtaattaagtagctgctcgctgccatgtaatcttcagatgacgccgctgttaattattagctcatcagctttcggacgatgcccttgtttttcggttgaaccggggtgaactttctgaatttgagatttgattttttttgtttctgcttctgcagttgctgacgacgttgatctgaacttgagcatctcgcaaccggcatcgtcccagagccccaaaagagacaagaactgccttggtccgcagctccaccaccaccatgggcggccgtttgacggctccgccgttctgaagaaaaccaagatcgatgctccgtctgagctgtcgtcggcgggccgccctcaccggtcgttcctccctcatctcgtggctgccgagcatctaccgcctcggtctcaccccttcttcatcacacaccatgagagtgatgcatcaagaagagatcctagctgggcagcagcagcagcatggaaggtgaccgcagctgcacctcctcctcctaccaccaccctgttgccgttgccgctgccgtcgacgtcgtccgctgcagcatcatcaggattctccaataccgccacgacagctgccgccgccccat

SEQ ID NO: 355 - DNA, 590 bp, Zea mays
  unsure (1)..(590): unsure at all n locations
  Clone ID: TF_ZmC109013_1
gcgacccgcgccgcgccgcgcgcagtggctcggcacgttcgacaccgccgaggacgccgcccgcgcctacgacgccgccgcggtcagttaccggggccgccgcgccaagctcaacttcccggacgccgccgccgccgctgcggcgcgggatgtgcagccgcgccgcccgttgcccggtcagagcctccgcgagaactgtgggtccaacgccgcgtcgccgctgcacgtggcggtggcgcgggcgccgaccacgctgcagggaacagggccggcgccgcccaaggaccaggacatctgggacggcttgaacgagatcatgacgatggatgaccgcagcttctggtccatgccgtgatcctgctacttcggccgtccatctccggatcttcctcttgttgttgtgcgtttatttttatgatgaccagattctacggttgttttttaggggaagagaatcctacgcttagctcagacgatcgtaaattgaattttggagccatgtggccaccagctcactggctgtgctgtaaatctgtaactcgtcagtcagccatggctntcgtacgagttttacaccaccgtcatccctc

SEQ ID NO: 356 - DNA, 428 bp, Zea mays
  unsure (1)..(428): unsure at all n locations
  Clone ID: TF_LIB3137-013-Q1-K1-H10
aaacaccacgccgaagataaaggggagatagagtacacggttatcagaccagtgcagagagcaatagatgctgtggtggggtgccgatcctcgtccgagtctcatctccgatccacgctcggctgcgtccgnggctggtcgcgtgcgtggtcccgtccggcacagtgtcaagcggtcggaagtgcgaacgatcttcgagggccgccgttccgggagtgtcgacgaggacctccgaggagtgaggaggaggacgacgtagggggtggttggagagcaagcccgccttcgtcgtccgcgcctcgtccgcggcgacgcatcccagggcgcgccatgagcagcggagccggcgccgggcgcccgaccagcagtacatgggcgttcggcgccgcccgtggggcaagtgggccggcgagatccgcgaccccgtc

SEQ ID NO: 357 - DNA, 789 bp, Zea mays
  unsure (1)..(789): unsure at all n locations
  Clone ID: TF_LIB4730-087-Q1-K1-C5
acaccgttcatgcatgaccatgggagagatctcaaccgcagcaccagcagtctcctccgtcgccgtcgtcctcctcgtcctgcgtctccgcggacaccgtcctcgtccctccgggaaagaggcggcggagggcggcgacagccaaggccaataagagggcccgcaaggacccctctgatcctcctcccgccgccgggaagaggagctccgtatacagaggagtcaccaggcacaggtggacgggcaggttcgaggcgcatctctgggacaagcactgcctcgccgcgctccacaacaagaagaaaggcaggcaagtctatctgggcaagtctgcgtccctttgatggcttgtcgccagatcctgctgcgatctgcgtccttgtcttaatgcggggcggaaccgggattaattcggtcaattatgcatgcgtgcgtgtgcatgatctgcaggggcgtacgacggcgaggaggcagcggctcgtgcctatgaccttgcagctctcaagtactggggtcctgaggctctgctcaacttccctgtggaggattactccagcgagatgccggagatggaggcagcgttccgggaggagtacctggcctccctccgccgcaggagcagcggcttctccaggggggtctccaagtacagaggcgtcgccaggtggntactgctcattaatctactcattatactaaaacctttgatttgacacctacgcctcgatctgatcacctatgttagtttaaccctctcctagtcactagaatttacttacagtaggatct

SEQ ID NO: 358 - DNA, 746 bp, Zea mays
  unsure (1)..(746): unsure at all n locations
  Clone ID: TF_LIB4727-004-R1-K1-H3
ggcagcggccgtcgggccggtacgcggcggagatccgcgacccggcgaagaagagccgggtgtggctcggcacctacgacacggccgaggacgccgcgcgggcctacgacgccgccgcgcgcgagtaccgcggcgccaaggccaagaccaacttcccttacccctcgtgcgtgcccctctccgcagccggttgccggagcagcaacagcagcaccgtcgagtccttcagcagcgacgcgcaggcgcccatgcaggccatgccgctcccgccgtcgctcgagctggacctgttccgccgtacgcttccctttcggcagcatccccgttacgcacccgtactacttcttcgggcaggccgcagccgcagccgcggaagcagggtgccgtgtgctcaagctggcgccggcggtcaccgtggcgcagagcgactccgactgttcgtcggtagtggatctgtcgccgtcgccaccggccgctgtgtcggcgaggaagcccgccgcgttcgatctcgacctgaactgctcaccgccgacggaggcggaagcctagtcgtcgaagcttttaatgactgtctgtcttcttagttctttcttctcctttttctcgaggaaaattcggtactactaagctgagagacgctctcctccgacanacgacgtcgacgacgggcatttttgtaaatagtttttgcgccgggacctttttagtttatgatgaaagctgtattgtcaccgaagacaggtcct

SEQ ID NO: 359 - DNA, 1476 bp, Zea mays
  Clone ID: TF_ZmC455_1
cctcgaggccggccaaaaaaaaaaaaaaaaaaaaaaaaaaaagggcttttggattctggtttctctcgtctttctcctccctctcctgacttttcttctagacatctcgcgggtcttatcgactccaacaagaacacactacacaccagccagcgagatagcgaacgctaggaacccagtggccatctttggagcggccatgacgctggatcagaaccatgccatgccgatgcagcccccggccctgcagcccggaagagcatatggagcagagggcagtgctgtggtgcatggttccatcagaacagtaggaagaagcgacctcgcagatcacgagatgggcctacgtcagtggcagctgtcatccagcggtgggctgagcgcaacaagcatttggagtatgaggaatctgaggaggcaaagcgaccaagaaaagcacctgcaaagggttcaaagaagggctgtatgaagggaaaaggggggcctgacaatactcaatgtggataccgtggagtgaggcagcgtacttgggggaagtgggttgctgaaataagagagccaaatcgtgtcgacagactctggctgggtaccttcccaaccgcggaggatgcagctagggcctatgatgaggcagccagagcgatgtatggagacttggcacggactaacttccccggacaggatgcaacaacctctgcccaagctgctctagcatcgacctctgcccaggctgctccaacagctgtcgaagctcttcagactggcacgtcatgcgagtcgacaacgacatcaaatcactcggacatcgcatccacctcacacaagcttgaagcctctgacatctcgagctacctaaaggaaaaatgtccagctggatcatgtggtatccaagacggcacacccattgtagctgacaaggaggtctttgggccgttggagcctatcacaaatcttccagatggtggtgatggttttgatatcggtgagatgctgaggatgatggaaagcgatccacataatgcaggtggagccgacgctggcatgggacagccctggtatcttgatgagctggattcgagtgtcttagagagcatgctccagccggagccggagccagagccagagccattcctgatgtctgaagaaccggacatgtttcttgctggcttcgaaagcgctggtttcgtcgagggtctggagcggctaaactgaatttctgatgtttgaccgttgatcctcatcccacttcatgtctgagcttgtgaattcggaggcaaacattggcagaacttataagctctagcaattctaggctttacattcctctgtgatagttctctatgcatgggaactgggtttgcttcacaatttttgtaagaccagaagtgatgtaaatagttcccaccttgtggaaggacaagaaaaaaataaataaaaagagtgcttgctttcgttcctaaaaaaaaaaaaaaaaaa

SEQ ID NO: 360 - DNA, 1202 bp, Zea mays
  Clone ID: TF_ZmC455_3
gcaggaggccctactcttgccttgaatgagtgccagattttggtacagcagaaaccccagggagattcacgactgctggcctctaatctgtgcaggaagaagcgacctcgcagatcacgagatgggcctacgtcagtggcagctgtcatccagcggtgggctgagcgcaacaagcatttggagtatgaggaatctgaggaggcaaagcgaccaagaaaagcacctgcaaagggttcaaagaagggctgtatgaagggaaaaggggggcctgacaatactcaatgtggataccgtggagtgaggcagcgtacttgggggaagtgggttgctgaaataagagagccaaatcgtgtcgacagactctggctgggtaccttcccaaccgcggaggatgcagctagggcctatgatgaggcagccagagcgatgtatggagacttggcacggactaacttccccggacaggatgcaacaacctctgcccaagctgctctatcatcgacctctgcccaggctgctccaacagctgttgaagctcttcagactggcacgtcatgcgagtcgacaacgacatcaaatcactcggacatcgcatccacctcacacaagcttgaagccgacatctcgagctacctaaaggaaaaatgtccagctggatcatgtggtatccaagacggcacacccattgtagctgacaaggaggtctttgggccgttggagcctatcacaaatcttccagatggtggtgatggttttgatatcggtgagatgctgaggatgatggaaagtgatccacataatgcaggtggagccgacgctggcatgggacagccctggtatcttgatgagctggattcgagtgtcttagagagcatgctccagccggagccggagccagagccagagccattcctgatgtctgaagaaccggacatgtttcttgctggcttcgaaagcgctggtttcgtcgagggtctggagcggctaaactgaatttctgatgtttgaccgttgatcctcatcccacttcatgtctgagcttgtgaattcggaggcaaacattggcagaacttataagctctagcaattctaggctttacattcctctgtgatagttctctatgcatgggaactgggtttgcttcacaatttttgtaagaccagaagtgatgtaaatagttcccaccttgtggaaggacaag

SEQ ID NO: 361 - DNA, 894 bp, Zea mays
  Clone ID: TF_ZmC7732_2
acaacacactcccctgccgctgtgccgcacccgcacccctccagcgcgcgcgggcacgagcacgagtacgaggctccatcgccggacgaccaggtagttgcactgccgccaccgtcgacgacgaccgaaggcgacgatggccaggccgcagcaacggtaccgcggcgtgcggcagcgccactggggctcctgggtctccgagatccgccaccctctcctgaaggcgcggatatggctgggcaccttcgagacggcggaggacgcggcgcgcgcctacgacgaggcggcgcggatcatgtgcgggccccgcgcgcgcaccaacttccccgccgacgccaacggcccgccgccgtcgttcctctccgcggcgctcgtcgacaagctgcaccggttcaacctggcgtccgtgcaggccgcgcagcggcagagagaggcggcggcggcggcggcggcagcagcagcaacctccgcgcccgcgacgcctccgacgccgccggccacgcagtggggcggcggcggtaggtccctggaggagcagcacgtggagcagatgatcgaggaactgctggactccgacttctccatggagatttgctgctagtgctaggctagccgcgacgcgacctgcctagcgactggctagcgcccccggccggcccgtcaccgccgcgctccgctccacctctcctctgttcttgttcttgcacttgcaccatgcgtcgcgctcgcgctcttctttgtactcgtgccgacgtgcgtagtatcgctcagccgctgcagcgtgcgtaggagcctgatttgtgtacgccacgtgtatagctgtagctgtacgtataagtatatatatgtaatcgagcattctcattcttgcaaatttaaaggccgcgtgcgtgc

SEQ ID NO: 362 - DNA, 1744 bp, Zea mays
  unsure (1)..(1744): unsure at all n locations
  Clone ID: TF_ZmC118_2
tcgagggccggcnncgggaaaaaaaaaaaaaaaaaaaaaaaaaggtacacccgcgggcgggctggaaagtttcgtccaccatttggctcccgcaagcaccgatttgtttactgctctctccgacgcgcggcggcggagctccctacgacgactgaaccatgtgcggcggcgcgatccttgccaaccttcgcgagccggcgccgcgccggctcacagagcgggacatctggcagcagaaaaagaagctcaagaggggcggcggcggcgggaggcgctcgttcgcggcggaggacgatgaggacttcgaggccgactttgaggtcttcgaggccgactccagtgattcagatttggagctcagggaggggactgacgacgacgtcgtcgagatcaagcccttcactgccaagaggactttctccagcgatggcttaagcaccatgactagtgctgtagcaaggtcagccaagaggaagagaaagaatctatacaggggtatccgccagcggccttggggcaagtgggctgctgagatcagagatcctcagaagggtgttcgtgtttggcttggtactttcaatagtcctgaggaagctgcaagagcttatgatgctgaagcgcgcaggattcgtggcaagaaggccaaggttaactttcctgatgcaccagcagttggtcagaagcgccgttctggctcagcttctgctaaagcatccaagtcaagttttggacagaagcctatcgtcaaagtagctatgaacaaccttgccaacacaaatgcatccttcttccaatctgctagctacccctccaattcatttgttcagcatggcaatataccatttgttccagcaatgaactctactgcttctgttgatgatcctatcatgaatctgcactctgaccagggaagtaactcctttggctgctcagacttgggctgggagaatgataccaagacaccagacatcacttccattgctcccatttccactattgcggaaggagacgagtctgcatttgttgacagcaattcaaacaactcatttgtgcttcctgccctggagaacagtgctgttgatctcactgatgggctgacagatttagaatcctatatgaggtttgttctggatggtggtccaagtgattcagttgatagccttctgaaccttgatggatcgcaggatgttggtagcgacatggacctctggagcttcgacgacatgcccatcgtcggcgatttcttttgaggattttgaagcttggtcataggagtatgtacatagggactaggggaataaagaccgggggagattgggaagcacctgcttggcaccttgggggtagcatttgctcgtgtctagctcagagatgcagaagttgcattctgaaactacttggttatcgacctgttccctattttagctatctctttatgagagccatttatgagactgaaccattttgttttgctttcttttcgttgttacaatatatggtttaacattatgatttatggatatgtgccaaatatggtgctcaacagtggtcaaacatgccttttagatgctcttgtttctcgtattgttgtgtaccttgtgatatttcattcgttgaaattgagttaaactagttatctgctgaaacttttcttgtacaagcaaaagtattcaagatttaatcttattggcatttggcaagatgctagacttttggtgccgaaaaaaaaaaaaaaaaagcggcc

SEQ ID NO: 363 - DNA, 1175 bp, Zea mays
  Clone ID: TF_ZmC118_4
aaagtttcgtccccatttcgctctcgcaagtcgccaagccaccgatttgttacaggcgccggagctcccgacgacgactgagccatgtgcggcggcgcgatccttgccgagctccgcgagccggcgccgcgccggctcacggagcgggacatctggcagcagaagaagaagcccaagagtactttctccagcccacgcgtccgcaccatgactagtgctgtagcaaggtcagccaagaggaagagaaagaatctatacaggggtatccgccagcggccttggggcaagtgggctgctgagatcagagatcctcagaagggtgttcgtgtttggcttggtactttcaatagtcctgaggaagctgcaagagcttatgatgccgaagcgcgcaggattcgtggcaagaaggccaaggttaactttcctgatgcaccagcagttggtcagaagcaccgttctggctcagcttctgctaaagcatccaagtcaagttttggacagaagcctatcgtcaaaggaagtaactcctttggctgctcagacttgggctgggagaatgataccaagacaccagacatcacttccattgctcccatttccactattgcggaaggcgacgagtctgcatttgtcgacagcaattcaaacagctcatttgtgcttcctgccctggagaacagtgctgttgatctcactgatgggctgacagatttagaatcctatatgaggtttcttctggatggtggtccaagtgattcagttgatagccttctgaaccttgatggatcgcaggatgttggtagcgacatggacctctggagcttcgacgacatgcccatcgtcggcgatttcttttgaggattttgaagcttggtcataggagtatgtacatagggactaggggaataaagaccgggggagattgggaagcacctgcttggcaccttgggggtagcatttgctcgtgtctagctcagagatgcagaagttgcattctgaaactacttggttatcgacctgttccctattttagctatctctttatgagagccatttatgagactgaaccattttgttttgctttcttttcgttgttacaatatatggtttaacattatgatttatggatatgtgccaaatatggtgctcgaaaaaaaaaaaaaaaaaagcggcca

SEQ ID NO: 364 - DNA, 1176 bp, Zea mays
  Clone ID: TF_ZmC11610_1
cggacgcgtgggcttcggctcgagcttcaaacacactccaaactccaagcctcaataatctcgacctctgtaatgaccaagaagctcatctccatctccaccatggccgggaagcaaggttgcaaggagcagtccaatgatcggaggatccaggcttcgatccaaggagacgccaagagcgtggtggtggggttcggcggcaggctggtcacccgtgagcaggagcaggaggacgccatcatcgtcgcggcgctgcggcacgtggtgtccgggtacagcacgccgccgccggaggtcgtcgtcacggtggcgggcggggaggcgtgcgggacctgcggcatcgacgggtgcctcggctgcgacttcttcggggcgccggagctggcgcaggaggcagtgtcctgcggcacagggcaggtggcgacgacggcgtcggtcgggggcggggcagcggcggcggcgctgaggccccggcggcgtaggaacaggaacatgtaccgcggcgtgcggcagcggccgtggggcaagtgggcggcggagatccgcgacccgcggcgcgcggcgcgcgtgtggctgggcacgttcgacaccgcggaggaggccgccagggcctacgactgcgccgcggtcgagttccgcggcccgcgcgcgaagctcaacttcccgggccacgaggcgctgttccagggccacggcgacaccgcggcggcggcggacaccgagacactgacgccgtcgccgggagagtggcagctgggcggcggagcaggagacgagctgtgggaaggtctacaggacctcatgaagcaggacgaggtggaccgctggctcgcgccggttttcggcgccgcgtctagtttttgagctgttgtactgtgcacacacaagcgtggttactgacaggatcacagctagactgaccaccattcttttgctgtctattgaactagttggttcttttgtagcgtatttttttagggaaacatgattcttttttttttttttgccgtgtgttgattgggatatagagagtttttttcctctcttgatggaagtacttgggaagctatgttgatagactgaacatttttttgtactctggctgctgagattctttgacgaattatacggtgaacaaagcatcgttttttatataaataaaaaaacagttgaccg

SEQ ID NO: 365 - DNA, 625 bp, Zea mays
  Clone ID: TF_LIB4865-004-R1-K1-D8
gacttctggcctggttctgaagcagacgccgaggacattcatgcctcgcactcccctgacccacagagaggtaagccctgctttcgtctcttgctctgctatcccggcgacaacacgccatccaggcagcaagctgcaaacggtcaaatcaatggtgtgacgccgtgctgccgactgttcccatgcagcgccgcgcgcgaaggcgaagcctgggcgccgcaagaaccagtaccgcggcatccggcagcggccgtggggcaagtgggcggcggagatccgcgaccccgtgaagggcgtccgcgtctggctcggcacctaccccaccgccgaggccgccgcgcgcgcgtacgaccgcgccgcgaggcgcatcaggggagccaaagccaaggtgaacttccccagcgacacctcctccagcgtcaccgtgccgacggcggtgtcgaggtctgctgctgctgctgcacaggccccggccgttctcccgccgcccaaggtggaggcacagactcaggtgtccgacgaggtcaaggagttgtccgaagagctgatggcctacgagaactacatgaacttcctcggcattccttacatggagggagggactacagctgcaagtgccaccaca

SEQ ID NO: 366 - DNA, 1140 bp, Zea mays
  Clone ID: TF_ZmC28357_1
aaatccaacgtccacagaaaagaaaacacgcacgagaccaaatccaacgtccgcagaaaccacactcccgtcgaggaggaggcgtcgacttcccatagtttccactccacttcgatcctatcctatcctccccaaacactccaccaagaacctttccccctccaatagtccgagttactcggaggaatccatgtgcggcggtgcaatcatcttggactacatcccggcgcggcgccgggtgtccgccgccgacttctggcctgactccgaagccgacgccgaggactccgactcgcacgcccctgaccctgagagagcgccgcgcccgcgcgggaaggcgaagcgtgggcgcaagaaccagtaccgcggcatccggcagcggccgtggggcaagtgggcggcggagatccgcgaccccgtgaagggcgtgcgcgtctggctcggcacctaccccaccgccgaggccgccgcgcgcgcgtacgaccgcgctgccaggcgcatcaggggcgccaaagccaaggtcaacttccccaacgacgcctcctcctccagcgtcaccgcgccgacggcggcatctggggtggcggcacaggccccggccgtttttctcccggcgcccaaggtagaggcgcgcgcacaggtgtccgacgaggtcaagggagctgtccgaggacctaatggcctacaagaactacgtgaacctccacggcgtcccctagatggcggccggaaatgcagcctgcgagtgccaccaccgctgcccgtcccgacgagaagcgcaggtgccggcgccagcgccagccgggctgtggagcttcgaggactactactacccgccgtcactgtcgctcttcactgaataatgaacgcggtttgccgtgcctgtgttgttatctcttttgtatctgtggctcgcgagttgaggcatgtaaacaagctttgcagttttttttttaactccggtctgtgcttctcagcagctcgctgcggtgcagaggaatctgtttcattctgttcgtgattgaaactagttttacggttacaacgcgcagatggaggatcgtcggacactcggaccattgtaacaaggcttgcataccatttggaagattttaccatactgaattggcgacacgcatc

SEQ ID NO: 367 - DNA, 1033 bp, Zea mays
  Clone ID: TF_ZmC28357_2
attggtacccccgggccggccgggataccgccgaaccaaatccaacgtccacagaaaagaaaacacattcccgtcgactcccctagtttcatcctattcatttctccccccaaacactccagctactagttactcgaggaatccatgtgcggcggcgcaatcatcttcgactacatcccggcgcggcgccgggtgtcgacagccgacttctggcctggttctgaagcagacgccgaggacattcatgcctcgcactccactgacccacagagagcgccgccgccgcgcgcgaaggcgaagcctgggcgccgcaagaaccagtaccgcgggatccggcagcggccgtggggcaagtgggcggcggagatccgcgaccccgtgaagggcgtccgcgtctggctcggcacctaccccaccgctgaggccgccgcgcgcgcgtacgaccgcgccgcgaggcgcatcaggggagccaaagccaaggtgaacttccccagcgacacctcctccagcgtcaccgtgccgacggcggtgtcgaggtctgctgctgctgctgctgcacaggccccggccgttctcccgctgcccaaggtggaggcacagactcaggtgtccgacgaggtcaaggagttgtccgaggagctgatggcctacgagaactacatgaacttcctcggcatcccttacatggagggagggactacagctgcaagtgccaccacagctgccgcctccgcctccgccgccgccggtcgccgaagaatcgcaggtcccggctccggccgggctgtggagcttcgaagattactactacccgccgtctctgtcgctctttactgaatgatgaacgtgctttgaccgtgcctgttttggtaacacctttgtgaacagatttcctgctcgtcgtagtcggtgtgatgtgatggcatcaatcgagctcctgtcctgtaattttgttgaacccatccattgtttcgtgactaatgtgtgtccctgtaactcgcaagttgaggcatcaaagtttccagtttaactc

SEQ ID NO: 368 - DNA, 2331 bp, Zea mays
  Clone ID: TF_ZmC485_3
cctcgaggcggccgggcccaattcggcaccctccttcctcagctccgttgcgcaccgccaccgccggccggccagccgccggagcaccgaaagacccccgttctttcctgtaaaaaaaaacccgccgcctttagctagctaaccggtcgtcctcttcaccccctagctttgctagctctagctaggaacgaaagaaattaaaggataactgagattgctgattggtggtccgggtacggtgttcttgagtcgtgaagcgacagtacagtggctagggtcgtgccgcccctgcagtctccggggttgcgtgcaggatggtcgtcagggatcgggagtgaggaggcatcagctctcgcggtcgtggagcctaaatgtaccgcaacaacgactcggcactctcctgcttctacctcttcctcctctggttcttcttcttgaagtagacaccaccagttcgccaggtagttagcagcccagttgcgactggggatcggtggcgggctgccgcttgcgagttgtaagcttggaggggaggggagcaggagcaggagatgcagctggatctgaacgtggccgaggcgccgccgccggtggagatggaggcgagcgactcggggtcgtcggtgctgaacgcgtcggaagcggcgtcggcgggcggcgcgcccgcgccggcggaggagggatctagctcaacgccggccgtgctggagttcagcatcctcatccggagcgatagcgacgcggccggcgcggacgaggacgaggacgccacgccatcgcctcctcctcgccaccgccaccagcaccagcagcagctcgtgacccgcgagctgttcccggccggcgccggtccgccggccccgacgccgcggcattgggccgagctcggcttcttccgcgccgacctgcagcagcaacaggcgccgggccccaggatcgtgccgcacccacacgccgcgccgccgccggccaagaagagccgccgcggcccgcgctcccgcagctcgcagtaccgcggcgtcaccttctaccgccgcacaggccgctgggagtcccacatctgggattgcggcaagcaggtgtacctaggtggattcgacaccgctcacgccgctgcaagggcgtacgaccgggcggcgatcaagttccgcggcgtcgacgccgacatcaacttcaacctcagcgactacgaggacgacatgaagcagatggggagcctgtccaaggaggagttcgtgcacgtcctgcgccgtcagagcaccggcttctcgagaggcagctccaggtacagaggcgtcaccctgcacaagtgcggccgctgggaggcgcgcatggggcagttcctcggcaagaagtacatataccttgggctattcgacagcgaagtagaggctgcaagagcctacgacaaggccgccatcaaatgcaatggcagagaggccgtgacgaacttcgagccgagcacgtatcacggggagctgccgactgaagttgctgatgtcgatctgaacctgagcatatctcagccgagcccccaaagagacaagaacagctgcctaggtctgcagctccaccacggaccattcgagggctccgaactgaagaaaaccaagatcgacgatgctccctctgagctaccgggccgccctcgtcagctgtctcctctcgtggctgagcatccgccggcctggcctgcgcagccgcctcaccccttcttcgtcttcacaaaccatgagatgagtgcatcaggagatctccacaggaggcctgcaggggctgttcccagctgggcatggcaggtggcagcagcagctcctcctcctgccgccctgccgtcgtccgctgcagcatcatcaggattctccaacaccgccacgacagctgccaccaccgccccatcggcctcctccctccggtactgcccgccgccgccgccgccgtcgagccatcaccatccccgctgagagaatcaagaagccgcactgtaaatctgccgggaagctagcattttccccccggcccctccccctctccgggcgttgcgactttttcagttttgcgccgccggccggggtggtggtttcttgtagccgatcgattggattcctcgtattactgctgcttacactcccaattaagtgcttgttcggctattgatattacatgtgtattggagtgtattgagtgggattgtgatgtattttgacttgttatggatttaaaccggctcaataccacccgatacatgtggattatcccccaaaaatatggtgcaaaaaaaaaaaatatattcaaaaatcaataaaacaagaggggaccgctcgcgatcgc

SEQ ID NO: 369 - DNA, 1327 bp, Zea mays
  Clone ID: TF_700281859_FLI
gtgtcactgcaggtacgtctacttgggcctgttcgacaccgaggaggaagccgccaggtaaaataattggaccgcactgtgtgcccgcgaggcgtttctcggagcaccgccacccccctctgggccgcgaaactgactgatggatggatgccccgtgtctgtgggattgtcgggtcgtgtgtgtgtgtgtgtgtgtgcagggcgtacgaccgcgcggccatcaagtgcaacggcaaggacgcggtgacaaacttcgatcccagcatttacgccgaggagctcgagccggcggcgtcgacgggcggcggtggcgatgaccacaatcacaacctggacctgtcgctggggagctcggcggggaacaaaaggggcagccttgacgacggcggcggcggaggaggcggcggcgacgacgagacctcggaccagcgcgtccccatggcgttcgacgtcgactggcagacggccgcgccccggagcacgaaagcaaagctggacgcgagctccaagcaaccccagacccagatgctgcctcctccgcctcctgctgtcttgcgagtcgcccaccagctgccgttgccgttcggtcccaggcatccgcaatcgcagttcctgagcaacggcggcgatccggggacctcgggaggcctgtccctcgcgatcggcggcgcgggcggcgggcactggcctccccagctgcagcacctgcagcagcagaggctgcacggcgcctgggccaacggcggcggcacgagctggccgcctccgccgcacccgcacccgcacccgcacccgccgccaccgagcaccgccgcgaccgcagctgcagcatcatcacgattccctccctacgttgttactacgacgcaaggcccggcaggctgggctcagaagaatgggttccattcgctggccaggccaacctagtatgccaagaaccacgactggccggagcgttcattcgtcgtcgatcgtcgacccagggcaaacgacacctccaaccactgcacgacgacgttttaatttaccggatgccattctctctctcccctccccccttcccttctcccttctcccttctcccttctctgtgttcttgattgggtgagacatggatccgaggatggatggacggcctgtacctgaggagttcccgggaagaagacgagtgagtgagtgagtgattggtagggtaggcgactaggcgtcgcgtcaggcagtacgtccttttggcgccttttttcttctttcactcaccattggcgaccaccaatgaatgatgacactgactggggtgtcaacatcgcagctggttttgtttggtcta

SEQ ID NO: 370 - DNA, 1093 bp, Zea mays
  Clone ID: TF_ZmC485_12
aattcggcacgagggcgacgcagggattgcggcaagcaggtgtacctaggtggattcgacaccgctcacgccgctgcaaggcacgcactggactggacgcccagaattcttcgtcatgtgagtctctgaccgaattgattgattaacgagtctctggctcctggaactcgcagggcgtacgaccgggcggcgatcaagttccgcggcgtcgacgccgacatcaacttcaacctcagcgactacgaggacgacatgaagcagatggggagcctgtccaaggaggagttcgtgcacgtcctgcgccgtcagagcaccggcttctcgagaggcagctccaggtacagaggcgtcaccctgcacaagtgcggccgctgggaggcgcgcatggggcagttcctcggcaagaagtccacgcgtccgaacgcttcttttctttttcttttttttatagcatgcagtgatgattcaaccttagttgtgcctttcctcctaatcctatatatgtaggatttagtactggttgactatataagtatatatgtattgttcagtaaaagtatacataggttagctgcatgtttatgtatgtagctggttgtttcaatcagaagataaaaaaaaagggaagtagtggctagggaattcctccggtgggaacgccgtgcttgggtgcaggtacatataccttgggctattcgacagcgaagtagaggctgcaagagcctacgacaaggccgccatcaaatgcaatggcagagaggccgtgacgaacttcgagccgagcacgtatcacggggagctgccgactgaagttgctgatgtcgatctgaacctgagcatatctcagccgagcccccaaagagacaagaacagctgcctaggtctgcagctccaccacggaccattcgagggctccgaactgaagaaaaccaagatcgacgatgctccctctgagctaccgggccgccctcgtcagctgtctcctctcgtggctgagcatccgccggcctggcctgcgcagccgcctcaccccttcttcgtcttcacaaaccatgagatgagtgcatcaggagatctccacaggaggcctgca

SEQ ID NO: 371 - DNA, 404 bp, Zea mays
  Clone ID: TF_LIB3357-055-P1-K1-F1
gcggacgccgacgcatggcgggtcaaacgcacgacgccgccgacgcactatatatccgtcgcactgcttaccctacgctacgtcgtgtccgtgtgtgccgtgtccgtgtgcgcgactagctagctagtgctgtgcacagtgtactcatctcatctctatctatccgcgcacgcacgaagagagcaggcggcccacgacgtgcacggcgcggaggccatggagggccactactcgcccacggactccgccgacgaggcgggcggcgagcgaaggttccgcggcgtgcggcagcggccgtggggcaagtgggcggtggagatccgcgacccgcacaaggcggcccgggtttggctcggcacgttcgacaccgcggaggccgcggcgcgcgcctacgacgaggccgc

SEQ ID NO: 372 - DNA, 517 bp, Zea mays
  unsure (1)..(517): unsure at all n locations
  Clone ID: TF_LIB3591-110-Q1-K6-H5
ggcgcggcggccatgggggggcactactcgcccacgggctccgccgccgaggcgggcggggagcggggggtccgcggcgtgcgggagcggccgtggggcaagtgggcgggggagatccgcgaccctcacaaggggggcgtcgtgggggtcngcacgttcaacaccgcggaggccgcggggcgcgcctactacgaggccgcgctccgcttccgcgggagccgcgccaagctcaacttccccgaggacgcgcgcctcaccacggggccatccgctgcgggcgctccggcgggggggggatccacgaggacgatggccgtggcgggctctgggggcgggtcgtaccagcaggaggccagcgccgncgtcntctttgcagactacctgcagtaccagatgatgcttctgcaggggggcaccagcgggcaagggagcagcagtcatgggggggatcctntgtactactactatggggggcaccggggggctggcgctggcgctggtggtggggccatgagca

SEQ ID NO: 373 - DNA, 1408 bp, Zea mays
  Clone ID: TF_ZmC4595_1
ctcgatcacctttctcccctgcttccattcccatttccacacacacacgtctcagctcactccctcctccagtttcgtcagctcgtcatcataaaccgaacacagagctctcgattccattccaggatgctgctgaacccggcgtcagagacgtcggtgctagacaccatccggcagcacctcctcgaggagccagcggcggcggaggcgcggccggccgacgagagcttcgggagcctggtggcggaccagtggagcggctcgctcccgttccgcaccgacgacgccgacgacatggtggtgttcggggggctgcaggacgccttcgcctacggctggctgcccgacggctcattcgggcacgtgaagcccgagccagtgcggtcccccgactcgtcctcctggcacccctgctcctacgacggctcaacctgcttcggcctccgggacccggagcagccactgacgcccggcacgaccacgcccgggagggggccggagggggcgccggccgcaaaggcccggggcaagcactacaggggggggaggcagcgcccgtggggcaagttcgcggcgtagatcagggaccccgccaggaacggcgcgcgcgtctggctcggcacgtacgacaccgccgaggacgccgcgctcgcttacgaccgcgccgcctaccgcatgcgcggctcgcgcgcgctcctcaacttcccgctccgcatcggctccggggacaagcgcccgtcgccggcgccgcccgagcccgccacctcctcggactcctcctcgtcttcggccagcggctcgcacaagaggcggaagcgaggcgaggccgcggctgccaacatggccatggcgctggtgcccccgccctcccagcttaaccggccggcccagccgtggttccctgccgcgccggtcgagcaggcggcgatggctccgcgcgtggagcagatcgtcgtctagtctagccatgcgccggcgaaagcgggggcaaggccctgcgctgcacttgcgtgacagctccaccggatggaatgcgaatatgcgataaagctcgggatgccgctgttgctccttgcaactggcgcaagtggaagaagctgtctctgtgtgtaatcaagtgtcttgtctgcggacgaattttcggtatgtgcgtcgttgtaaaaaaaaaaaaaaaagctgctgctgataagttcggaaaactgtacaaagacgtagggagagagacgatgcgtgatcaagaacagcccgctttgttctttctctgataaaaaaaatatccagcggccaaacaggcgcgcaagtcaacagaacagcgacctgagctcgtgacacgagatcgagatcgaaatcgcccccactgaaaccagaactgcagagccgagcggtaatccaacgctgacgacgtaac

SEQ ID NO: 374 - DNA, 1146 bp, Zea mays
  Clone ID: TF_ZmC8128_1
gcgcccccggccgaggcagctgcaggcagcggcccggccggcggagaagggcggaagggcaaggcgcccaagggcgggcccgagaacggcaagttccggtaccgcggcgtgcggcagcggagctggggcaagtgggtggcggagatccgcgagccgcggaagcgctcccgcaagtggctcggcaccttcgccaccgccgaggacgccgcgcgcgcctacgaccgcgccgcgctcctcctctacggcccccgcgcgcacctcaacctcacctccccaccgccgcctacgctcgccgcgccgcgctcgcacccgcactcctcctccgccacgtcgtctgccccgccagcgctccgcccgctcctgccgcgcccgccactgcaccagctctccagcgacggtgctcctgcaccggatttccactaccacaaccagttccagcgccgtctcttgccgcagccgacacccacactatactacgccaacacggctacggcgtccacagtgaccaccagtgtgccgacacgggtggcggttccgcaggagccggccatcgcgcccgcagtaggctccttgacgtcaccgggggagccgcaggtgggtagaaaggaggaggcgcgcggggaggcagggtgggactacaacggcggcgaggaggaggattatgcggcggcgctgctgtgggacgagccggagcctttcttctggtttgatgtcttcctcaagtgatgaccagcacggcgctgcatgccagcaattcgaatcctgcatggttggtttggagtttcggagtgacggcagctcatgctcctgcatctgcatgcatgtgttgggcagtaagcaagcaagaaaggtagataggcttgctagctagggtttctgactcctttgtactaaattatctttatattttttatcttatccttcttttttccctgagggtgtgattgaggtatagtaatgtgaggtggtattactggtgggaggatttagggttctctgtcttgatttaaagattcaattttgaatcacatcgagtcgatttcttgcatggggatgcaatctatttaactgtggcatgtataaaaattagcgatgcaacaatttttaattctgtgttttcttctatcgaatgttgaactttagtcc

SEQ ID NO: 375 - DNA, 1114 bp, Zea mays
  Clone ID: TF_ZmC25962_1
ggcggtgaagatggaggcggagcaagcggcgatggcggcgccgcagctgggggcggcgcaccagcagacgcagccgcggcggcagtaccgcggcgtgcgcatgcgcaagtggggcaagtgggtggcggagatccgggagccgcacaagcgcacgcgcatctggctggggtcctacgccacggccgtggcggcggcgcgcgcctacgacacggccgtgttctacctgcgcggacggtcggcgcggctcaacttccccgaggagatcccctcgttcgggctggcggatggcgtggacgtgggggagcacgcgcgcgacccggccgccgccgccgccggcggcggcggcggctgcacgctgtccgcggcgtccatacggaagaaggccatcgaggtggggtcccgcgtggacgcgctccagaccggcatggtggtcccgccgccgcaccaccgcgagcgccataggcaccacaaccacctgccgcagctgcgggtgcacgcggaggagcagcaggaggaagaggagcagaagccgcagcggcctgcgtggagcgggcgcgtcaagaacccggatctgaaccgtgcgccgagccccgagagctccgacgccgagtgacaagcgagcgagagctgagcagcagccaccgcaaggcgaggttcaacgacgacgtccgttatcggttattcccaatcccacgacgcagcatgccgttgtcgtctccgtccgaccgtccccacgtacgtacgtacgtacgtacacgacgatccagctgaccctgccgcctgcctatcctatccgtcctcgacgacgaccggatggtcggcgggcgggagggagggcggtgcggcgagggttttgggtacgttgtggataagcacgagggcagcagcagcaggggcggcgtgcgcgggcaggcaggcgaagacggagggaggcggccacaagcggcggtctttccaaacgtcaaaaaggacagctgtaacagcgataagaaaaaacaagtcatcatcaccctcgtctcactactagttctactactgttcccgagagtagtagtaacgattagcactccactagcagtatgattattcgaatcggccttgcttgacagcgatt

SEQ ID NO: 376 - DNA, 2342 bp, Zea mays
  Clone ID: TF_ZmC485_2
aattcggcacgaggtccttctcctattctatctatatatcacccgcctcttttttctcggcccaattcggcacgaggcttccctcttcttcctcagctccgtcgcccaccgccggagctccgaaaggccccgcgctcgccgcctttcctgtaaaaaacccaacctttagctagctaaccgctcctcttctccccctacgtactccccttgcccaaatcagagaagatatttaacggaggaggggaaggagaggatatttagctgattgttgattggtggtccggggtacggtgttcttgagtcgtgaagcgaccgtacggtggctagggccgtctccgggttgcgtgcaggatggtcgtcagagatcgggagtgaggaggcagctcgtggtcgtggaggctaaatgtaccgcaagaacgactcggcactctcctgtttctacctcttcctcctctggttcttcttcttgaaatagaccagcgccagccaccaggtagctacctactagctagcagcccagttgcgactggggacgggctgctgcttgcaagttggaatcttggagcaggagcagaggagcgggagatggagctggatctgaacgtggccgaggtggcgccggagaagccagcggcggcgctggaggcgagcgactcggggtcctcgggctcgtcggtgctgaacgcggaggcggcgtcggcgggcggcggggggcccgcgccgggggaggaggggtccagctcgacgccggccgtgctcgagttcagcatcctcaggagcgacagcgacgcggccggcgcggacgccgacgacggcgacgccacgccgtcgcctcctcgccaccaccaccagcagctcgtcacccgggagctcttcccggcgccgcagcattgggccgagctcggcttcttccgcgccggcccgcagcagcagccggacatcagggtcctgccgcacccgcacccgcacccgcccccgccgccgcccgcgcagccgcagccggccaagaagagccgccgcggcccgcgctcccgcagctcgcagtaccgcggcgtcaccttctaccgccgcaccggccgctgggagtcccacatctgggattgcgggaagcaggtgtacttaggtggattcgacactgctcatgccgctgcaagggcgtacgaccgagcggcgatcaagttccgcggcgtcgacgccgacataaacttcaacctcagcgactacgacgacgatatgaagcagatgaagagcctgtccaaggaggagttcgttcacgccctgcggcggcagagcaccggcttctcccgcggcagctccaagtacaggggcgtcaccctgcacaagtgcggccgctgggaggcgcgcatggggcagttcctcggcaagaagtacatatatcttgggctattcgacagcgaagtagaggctgcaagggcgtacgacaaggccgcgatcaaatgcaacggtagagaggccgtgacgaacttcgagcccagcacgtacgacggggagctgctgctgactgctgaagctagcgcagaagttgctgacgacgttgatctgaacttgagcatctcgcaaccggcatcgtcccagagccccaaaagagacaagaactgccttggtccgcagctccaccaccaccatgggcggccgtttgacggctccgccgttctgaagaaaaccaagatcgatgctccgtctgagctgtcgtcggcgggccgccctcaccggtcgttcctccctcatctcgtggctgccgagcatctaccgcctcggtctcaccccttcttcatcacacaccatgagagtgatgcatcaagaagagatcccagctgggcagcagcagcagcatggaaggtgaccgcagctgcacctcctcctcctaccaccaccctgttgccgttgccgctgccgtcgacgtcgtccgctgcagcatcatcaggattctccaataccgccacgacagctgccgccgccccatcggccgcctcctcccgccggttcgacccgccgccaccgtcgtcgtcctcctcctcgagccatcaccaccaccaccaccgccgctgagaatcgaagaagccacactgtaaatctgccgggaagcggctggtggcatccggcccgctcctccctccggggcgccgcaacttttttcgatcggttttgcgccgcctgggacgggttgtagttgatcgattggattcttcataactgtatttgcgtactgcttacactacgacccaagtgaaatcgaaaatggtgccttctctctgaaaaaaaaaaaaaaaaaaaaaaaaaaaaaaaaaaaaaaaaaaactcgagaaggggcgccggtaccc

SEQ ID NO: 377 - DNA, 1135 bp, Zea mays
  Clone ID: TF_700262211_FLI
cttttttttcttcaatctttggcgatggtggtccccttggcgccggtgatctgcatgtgcctgtgatctactgctggctgcatcacctcaatagtctacctgggggcgtatgacagcgaggaggcagctgctcgtgcctatgacctcgcagctctcaagtactggggtcctgagactctgctcaacttccctgcatcaccacaacgggaggtgggaggcacggattgggcgagtctttgggaacaagtacctctacttgggaacatttgacactcaagaagaggcagccaaggcctatgaccttgcggccattgaataccgtggcgtcaatgctgtaaccaacttcgacatcagctgctacctggaccacccgctgttcctggcacagctccaacaggagccacaggtggtgccggcactcaaccaagaacctcaacctgatcagagcgaaaccggaactacagagcaagagccggagtcaagcgaagccaagacaccggatggcagtgcagaacccgatgagaacgcggtgcctgacgacaccgcggagcccctcaccacagtcgacgacagcatcgaagagggcttatggagcccttgcatggattacgagctagacaccatgtcgagaccaaactttggcagctcaatcaatctgagcgagtggttcgctgacgcagacttcgactgcaacatcggatgcctgttcgatgggtgttctgcggctgacgaaggaagcaaggatggtgtaggtctggcagatttcagtctgtttgaggcaggtgatgtccagctgaaggatgttctttcggatatggaagaggggatacaacctccagcgatgatcagtgtgtgcaactaattctggaacccgaggaggttttcgctttccaggtgtcctgtcttgggtaatccttgatctgtctaatgccacagtgccactgcaccagagcagctgagaactttcttgtagaaagcccatggcagtttggcgttagacaagtgtgtcgatgttctttaattctttgaatttgcccctaggctgcttggctaacgttaagggtttgtcattgtctcacttagcctagattcaactaatcacatcctgaatctgaagtggttgtgcttgtgcagt

SEQ ID NO: 378 - DNA, 651 bp, Zea mays
  Clone ID: TF_LIB3066-048-Q1-K1-F2-120a
aggataactttggcgacacatagctctcggaattcgattcagatcaagtaaggcggacaggcttatctgggagcatatgacagtgaagaagcagcagcacatacgtacgatctggctgctctcaagtactggggacccgacaccatcttgaattttccggcagagacgtacacaaaggaattggaagaaatgcattttgtgtctgtggaagaatctttggcttctctccgccgccagagcagtggtttctccagaggcgtctctaaatatcgcggcgtcgctaggcatcaccacaacggaagatgggaggctcggatcggaagagtgtttgggaacaagtacttgtacctcggcacctataatacgcaggaggaagctgctgcagcatatgtcatttctgcgattgagtatcgaggcgcaaacgcggttactaatttcgacattaggtaattacattgaccggttaaagaagaaaggtgttttcccgttccctgtgaaccaagctaaccatcaagagggtattcttgttgaagccaaacaagaagttgaaacgagagatgcgaaggaagagcctagagaagaagtgaaacaacagtacgtggaagaaccaccgcaagaagaaagaggagacggaagaagagaaagcagagc

SEQ ID NO: 379 - DNA, 723 bp, Zea mays
  unsure (1)..(723): unsure at all n locations
  Clone ID: TF_LIB4729-131-A1-K1-D11
cacaaaaccacgcgctactacaccagcctagctagccctttcgccgtcgctgcggctcctgcccactgactcgtaggtttcgttgtttcgacaatgtgcggcggagccatcatcgccgacttcgtccccgccggcgcccggcgcccggcaacagacgacaccatgtccgcctccatcctctccggtagcgaggaccatccggagctgccgctgccgctgccggcgccggcgccggggcgcaagacggcgtaccgcgggatccggcgccgcccgtggggccggtgggcggcggagatccgcgacccgcggaagggcgcccgcgtgtggctcggcacctacgccaccccggaggacgcggcgcgcgcctacgacgtggcggcgcgcgagatccgcgggcccaaggccaagctcgaggcgttcctggggctgcaggacaccgacgagggtggcggcgtcgaggcgtgggatgccgtggacctcatgttggcgtaggccgtacgccngtagcaggggggcccagccccagccccagcgcgcgcgtgccgtcgctgtgaacggccgccgcagctgttttggatcgagtaataatgctattagtagtataatgtttctccaagcagctaagataattgcaagccttgctgggtggtattactagcactactatctaggaggagtatgtactagcaggatgggtttatctagcttgttgctaaaacagat

SEQ ID NO: 380 - DNA, 803 bp, Zea mays
  unsure (1)..(803): unsure at all n locations
  Clone ID: TF_ZmC145170_1
gtctgtgtgaccctttgcttgcgcgcgctgtgggcaacagcgcagacggcctctcgccctctcctatatatataccagtcgacttgctcacgcatcagcgtcactctcccatccccgcccccaaggcacggacagagaaagatctaagcgccgcggcgaacggcaacatatatgatggtgaagaacccaagcagcaatggagttctcacggcgaccgccttctccgacagcaaaaccaggccggagcgcggcgtaggtggcgaggcggcggggaggccgtacaggggggtgcggatgcggagctgggggtcgtgggtgtcggagatcagggcgcccaaccagaagcgccggatctggctcggctcctacgccacgcccgaggccgcggcgcgcgcctacgacgccgctctgctctgcctcaagggctccaacgccgtcctcaacttccccgccgcatcctcctcctcctcctcatcctcctccacatccgcttcctcgtcccaccagcgtgctgacagccgcggccacccggacgacgacccagctgctgccggcggcgacatgtcaccgaggtccatccagcgcgccgcggcggcggctgccgcggcaatcgacgacgacgccggcatgggcgccagcgccgctgacgacaggtgctcctccagcgccggcgcgacgaccccgacgtctgcctctctgtcgacgcagggcagcaccgccgatcacgtcggccaggagcagcacgcgacgacaacatncgccgcggccagcaccggctcgccgcccgaggggaaggaggagct

SEQ ID NO: 381 - DNA, 1989 bp, Zea mays
  Clone ID: TF_ZmC3465_2
aagtgggcacctcgagcggccaaacagacacgcctcacccccaccacaagaacaccaaagccacatcccatccatctccacggtgaggcttgagcgacccgagcaaaaaaaaatcatccgcgacgcagcgacgcaggtttgttctctgatctctctggttcttcttttagcagcagggacgcacagcacaagaaaaggtccggttcaagaggctcttctgttgggtttttttagaatcctcaagagaagcgtgttcttgggttaggatttttttctcacctcatcacacctctcctaggaggaacagagatccagagaaccttttttctcttctggatccttgccgccttttggccttcgaaagggggttgttttgcaataccctctctctgtttttttttttcttcgcacaaacccacctcgtttctctacttttattgaggaacagagctggttttccaaaaaaaaaaaaatctactttgattttccataaagaaaacctctcagcctctttcttctagctccatccaagctttagtcctaatggccgcagccatcgacatgtacaagtactacaataccagcgcacaccagatcgcctcctcctcctccccctcggatcaggagctcgcgaaagcactcgagccttttataacgagtgcttcctcctcttcgtcctcctccccctaccatggctactcgtcctctccatccatgtcccaagattcttacatgcctacaccttcttacaccagctacgccacctcgcctcttcccactcccgccgctgcctcctcgcagcttccgccactctactcgtcgccttatgcggcgccgtgcatgaccggccagatgggcctgaaccagctcggcccggcccagatccagcagatccaggcccagttcatgttccagcagcagcagcagcagaggggcctgcacgcggcgttcctgggcccgcgggcgcagccgatgaagcagtccgggtcgccgccgccgctggcgccggcgccggcgcagtcgaagctgtaccgcggcgtgcggcagcgccactggggcaagtgggtggcggagatccgtctcccgaagaaccgcacgcggctgtggctcggcaccttcgacaccgccgaggacgcggcgctcgcctacgacaaggcggccttccgcctccgcggcgacacggcgcgcctcaacttcccggccctccggcgcggcggcgcgcacctcgccggcccgctccacgcgtccgtggacgccaagctgaccgccatctgccagtccctgtcggagtccaagtccaagagcggctcgtcgggcgacgagtcggccgcgtccccgccggactcccccaagtgctcggcgtcgacgacggagggggagggggaggaggagtcgggctccgccggctcccctcctcctcctcctcccccgacgctggcgccgcccgtgccggtgccggagatggcgaagctggacttcacggaggcgccgtgggacgagacggaggccttccacctgcgcaagtacccgtcctgggagatcgactgggattccatcctgtcatgagcaataatagctccgtgtaatttttttctactgtttggtttttgcggctgcgttggcccgatggcattttagacgtcggccatggcggctgcaagtagcaagtgagtaactagctagctagtacatcgtcgtcgactcgtcgtgtccagtgttgtgaagcagcgttaagtacatgcgtgctaatctcctggttgagctgccggttgttttttttctcacggcacggccagtcgagaagagtcagtagtgtaatctcgtggttttatgatcatctgttgcagcttatgtatggaactttgtctagttttattggtctagtactatttattggtctaaaaaaaaaaaaaaaaaaaaaaaaaaaaaaaaaaaaaaaaaaaaaaaaaaaaaaacttattatttttaatattttattaattttatatt

SEQ ID NO: 382 - DNA, 636 bp, Zea mays
  Clone ID: TF_ZmC966436_1
ccgccgtcggcggtggtttcgcgagcgtggcggactccgggaagttgaggttagcgcggctgccgcggaacctgagcgccgccacgtcgtacgcccgggcggcggcctccgcggtgtcgaaggtgcctagccacacgcgcgccgccttgtgaggatcccggatctccgccgcccacttaccccacggccgctgccgcacaccgcggtaccgcctccgcggcgtgccggagccggtggaggacggcgagggggcctgcgagctagagctgggtgacgccgtcgtcgcgggaatccgtgccgctccgtgctcgtgagcggccggtgcagaaagagagggcggcggcggcggcggcgttacatctccggcgtagtagtcgctccaccactggccctcaggcgacacctgatgctgacgggcaccggccgttgccccgccagcgacgaccgtggccagcgcgtcgaccatcatgaacgcctcccggctccgctcgtaccccgatagcattcgccacgccgctgccgggtgttggcggtcctagtcgtcctcctcacccccggcgccccaacgacagggccctcgtccaaccgcgaaaaccaccttgggcgcgcagcacatgaatgtagtatgtatgggcc

SEQ ID NO: 383 - DNA, 126 bp, Zea mays
  Clone ID: TF_700610879H1
atcagatctggggtaaccgtcggatcccgttgggcagatgagctgctgagatcaaagagtctcgcaagtgcgtgcgcgtctggctcggtacattcaactctcccgaagagcctgtgagggcttacg

SEQ ID NO: 384 - DNA, 533 bp, Zea mays
  Clone ID: TF_jC-zmshLIB3587P021g01a1
cttggcacgaccggacggtcttggttttcgcctcctccgtactcgttctcgttctagtgctcgggctcgttcacgcgcggcgccgccttggcgactgcggagcggcgcttggagttggacgggaagttgagcctggtggtggcgccgcggaggtcgcgcgcggagtggtcttaggcgcgcgccaagtcctcggcggtggcgaaggtgccgagccaaacgcggacgccccggacggggacgggcacctcggccgcccacttgccccacggacggcagcgcacgctttaatacgggctgatggaccttctgctgccagaaccggcgaacccgaacgccttctataaaataaaccacaccggctgtttctcggagtcctcacacaagtcccggaacgcggcctcgaagtcgtcatcatcgttggccgcggtcagacgaaccttgacgcccctaccgtggcctggcgtgacgcctcgccgaaccagcacgctgggtatgaactcaagaaggatcgcaccgtcgcacaatgttggtaa

SEQ ID NO: 385 - DNA, 408 bp, Zea mays
  Clone ID: TF_ZmC8692_2
agcatttccgttgcccgcgcgcgcacacactgcaggcctcacttcttggtggcactggcagtggcactggcggcaatgccggactcggatgtccccagcccagcatcgtcgccgcttggcagcgtgcagaagattgccaggggtcggaaaagcaggcgcggcggcgggcggagcccggcgtaccgcggcgtgcggatgcgggcgtgggggaagtgggtgtccgagatccgcgagccgcgcaagaagtcccgcatctggctcggcaccttcccgacggccgagatggcggcgcgcgcccacgacgccgccgcgctagtggtcaagggccgcggcgcggtgctcaacttccctgagatggcggcgtccctgccgcgcccggcttccgccgcgccgcgcgacgtgcaggcc

SEQ ID NO: 386 - DNA, 2197 bp, Zea mays
  Clone ID: TF_ZmC1979_1
ctctgcttgtgcttgtgcaatgcagggattgcggcaagcaggtctatttgggcgggtttgacaccgctcatgcggcggctcgggcgtacgatcgggcggcgatcaagttccgcggcgtggaggccgacatcaatttcagtctggaggattaccaggacgacatgaagcaggtgatttatactcctatacggagcatgtagcgagaaagatacatgtaattttttctttccttcgtctaccagcagatgggccacctgagcaaggaggagttcgttcacgtgctccggcggcagagcacggggttcccccggggcagctccaagtacagaggcgtgacgctccacaagtgcgggaggtgggaggcgcgcatgggccagttcctcggcaagaagtacgtctacttgggcctgttcgacaccgaggaggaagccgccaggtaaaataattggaccgcactgtgtgcccgcgaggcgtttctcggagcaccgccacccccctctgggccgcgaaactgactgatggatggatgccccgtgtctgtgggattgtcgggtcgtgtgtgtgtgtgtgtgtgtgcagggcgtacgaccgcgcggccatcaagtgcaacggcaaggacgcggtgacaaacttcgatcccagcatttacgccgaggagctcgagccggcgggttcgtctatcccccgcccgcgatctccgccacgatcgcgccccctcgtcgctgtgcggcgatttcgctacaggctacagcctatacaggcaagctctgacggtccgctgtttcgccgtgcagcgtcgacgggcggcggtggcgatgaccacaatcacaacctggacctgtcgctggggagctcggcggggaacaaaaggggcagccttgacgacggcggcggcggaggaggcggcggcgacgacgagacctcggaccagcgcgtccccatggcgttcgacgtcgactggcagacggccgcgccccggagcacgaaagcaaagctggacgcgagctccaagcaaccccagacccagatgctgcctcctacgcgtccggtcgcccaccagctgccgttgccgttcggacccaggcatccgcagtcgcagttcctgagcaacggcgatccggggacctcgggaggcctgtccctcgcgatcggcggcgcgggcggcgggcactggcctccccagctgcagcacctgcagcagcagaggctgcacggcgcctgggccaacggcggcggcacgagctggccgcctccgccgcacccgcacccgcacccgccgccaccgagcaccgccgcagctgcagcatcatcacgattccctccctacgttgttactacgacgcaaggcccggcaggctgggctcagaagaatgggttccattcgctggccaggccaacctagtatgccaagaaccacgactggccggagcgttcattcgtcgtcgatcgtcgacccagggcaaacgacacctccaaccactgcacgacgacgttttaatttaccggatgccattctctctctcccctccccccttcccttctcccttctcccttctcccttctctgtgttcttgattgggtgagacatggatccgaggatggatggacggcctgtacctgaggagttcccgggaagaagacgagtgagtgagtgagtgattggtagggtaggcgactaggcgtcgcgtcaggcagtacgtccttttggcgccttttttcttctttcactcaccattggcgaccaccaatgaatgatgacactgactggggtgtcaacatcgcagctggttttgtttggtctcatgttgcatcactcgctgctccacgatgccttgctatggttggggggagatttgctccatccaccccacgccggtcaggcgacagagcctccgctgcgtcgtctcatccgtctggtgagttgccactgtcttagaatctgagtggtacggtacgtgtggatctcgcgcgcgtgtaaacctagtattatgtactacaaactgtcatcatcggagatcactcgaataagatatcgatcttgagattacgggcggcggctcctgtcatgtgcttactacagcaaagctgataaactgtccgagtctgaacagctcatgtaatggaacgccgcatagatatttccttcttgttaggggtactttggaaccccaattttttaagagatttttatttttcc

SEQ ID NO: 387 - DNA, 619 bp, Zea mays
  Clone ID: TF_LIB5116-043-A1-PF1-B9
attctctcgacccgatccgggtcgggtcggccatgacggtagatcggaaggacgctgaggcggcggcggcggcggccgcacccttcgagatcccggcgctccagcctggaagaacttgtggagcagaggaaagtacccggagtcatgttctcgtcaaaccaataggaaaaagcgacctcggagatcacgtgatgggcctaattcagtctctgaaacgatcaggcgatggaaagaagtgaaccaacaactggagcatgatccacagggtgcaaagagggcgaggaagccacctgcaaagggttcaaagaagggctgtatgcaggggaaaggaggacctgagaatacacaatgtggattccgtggtgtaaggcaacgtacttgggggaagtgggttgctgaaattcgggagccaaatcgggtgagcaggctctggttgggaacgttccccactgctgaggatgctgcccgtgcttatgacgaggcagccagagcaatgtatggcgcactggctcgtaccaacttccctgtgcatcctgcacaagctcctgctgtggctgtagcagcggcaattgaaggtgttgtacgtggtgcttcagcatcatgtgagtctactacaaca

SEQ ID NO: 388 - DNA, 677 bp, Zea mays
  Clone ID: TF_ZmC8271_1
ccgggcacgcgtccggccaccggacgaacacacagatcgctacagcccgcatgaccaacctctccgccatggcagcgagccaatcctacgtgatccgattcgacggccacttcgacgagccgtcgccgagctccgcgggcgccgagccgccgggcccgcagccgccgttcgcagggaggatgatctcgctcgagcgggagcaccaagtcattgtcgccgccctgctgcacgtcgtctccgggtacgccacgccgccgccgcaggtcttcacgccgccgccggcagcggcgcgctgccaggtgtgcgggatggagcggtgcctcggctgcgagttcttcgccgccggggagggcgcattgggcggcggcgcggagaaggcagccgcgacaggaggcgcggcggcgctggcggcggggcaaaggaggcggaggaagaagaagaacaagtaccgcggcgtgcggcagcggccgtgggggaagtgggcggcggagatccgcgacccgcgccgcgcggtgcgcaagtggctgggcacgttcgacaccgccgaggaggccgccagggcctacgaccaggccgccatcgagttccgcggcccgcgcgccaagctcaacttcccgttccccgagcagccgccgacggggcacgacgagcccatcagcagcaacggcgacgcgagc

SEQ ID NO: 389 - DNA, 1879 bp, Zea mays
  Clone ID: TF_ZmC5960_1
attcttcccctaagcacgcacacatcaacatcggtagctctcacattccctcccacggctgcactagcgcctggaattctatcgtacagtatagcttcattcttaactggtgaacaaggcagcagctagcagatcgatctccatggacatggacatgagctcagcttatccccaccattggctctccttctccctctccaacaactaccaccatggcctactcgaagccttctctaactcctccggtactcctcttggagacgagcagggcgcagtggaggagtccccgaggacggtggaggacttcctcggcggcgtcggttgcgtcggcgccccgccgcagccggcggctgcagatcaggatcaccagcttgtgtgcggcgagctgggcagcatcacagccaggttcttgcgccactacccggcggcgccagctgggacgacggtggagaaccccggcgcggtgaccgtggcggccatgtcgtcgacggacgtggcgggggcggagtccgaccaggcgaggcggcccgccgagacgttcggccagcgcacatccatctaccgtggcgtcaccaggcaccggtggacggggagatatgaggcgcacctgtgggacaacagctgccgccgggagggccaaagccgcaaaggacgccaagtctacctaggaggctatgacaaggaggagaaggcggctagagcttacgacctcgccgcgctcaagtactgggggcctacaaccacgaccaacttccaggtgtccaactacgagaaggagctggaggagatgaaatccatgacgcggcaggagttcatcgcgtcgttgcgcaggaagagcagcggcttctcacgaggcgcctccatctacagaggagtcacaaggcatcatcagcacggccggtggcaggcgaggatcggcagggtggccggaaacaaggacctgtacttgggcactttcagtactcaggaagaggcggcggaggcgtacgacatcgctgcgatcaagttccgcgggctcaacgccgtcaccaacttcgacatgagccgctacgacgtggagagcatcctcagcagcgacctccccgtcgggggcggagctagcggtcgcgcccccgccaagttcccgttggactcgctgcagccggggagcgctgccgccatgatgctcgccggggctgctgccgcttcgcaggccaccatgccgccgtccgagaaggactactggtctctgctcgccctgcactaccagcagcagcaggagcaggagcggcagttcccggcttctgcttacgaggcttacggctccggcggcgtgaacgtggacttcacgatgggcaccagtagcggcaacaacaacaacaacaccggcagcggcgtcatgtggggcgccaccactggtgcagtagtagtgggacagcaagacagcagcagcaagcagggcaacggctatgccagcaacattccttatgctgctgctatggtttctggatctgctggctacgagggctccaccggcgacaatggaacctgggttactacgactaccagcagcaacaccggcacggctccccactactacaactatctcttcgggatggagtaggtgcatgcgctgacaagctagctagctgaaatcaggtggtaggcctaggaagaagctaggactgacatggaactgatcacaattttggctgctacatataccatgcatgccccatgtatggatgggggtgcgtgtccgtccttctgcttgctattcacgacacttgctgacttactgtggcagagccgcagagggctcgtgtaccatcagcatttctaaattctaattatcaagctcgtttcaagctatattatgctaaaaaaaaaaaaaaaaaaa

SEQ ID NO: 390 - DNA, 2913 bp, Zea mays
  Clone ID: TF_ZmC484_102
tgaagtcccggccgcagcagccggcgcctgccccggcccagccgaggcgccgcgtccgggttctcttcgaggatcctgacgccacggactcggactccgacgacgaggaggccggcgcctctacgtgcccggcgaaggccaagcgcttctccttcgagacgttcgtcggcaaggtcccagccaggccggtccttccggcggccgctgtcgccgcgtgcgccagtggcggggccccggagagctaccgcggagtgaggctccgcaagtggggcaagtgggcggcggagatccgcaacccgttcacgggcaagaggcagtggcttggcaccttcgacacggccggcgcggcctccgcagcctacctatccgcttcccggagcttcgccgacgagaagcgccgccgccgcgggcagcctgtgccctcttcctcaccagttccttcggcaagcgccaccccgacggcctcctcttcgtcgtccacctcgactgctccgttcgcgcacccgtcgccgtcgtctgttcttggacccgccaccaaggaggcgccgctgaacccgcagtccccggagctggtcgcgacaccaacgctcgtcctgccgtccgatgagtccgcggagctgccggacgacccggagttctaccaggaccttctccgcggcctgcagctgccagacatcagcccgatggacttccgtgccgggcttgacgctctggacgtctccgatgcgcccttctgcctggacgatgagcaggacctgctgcttggggacttcggggacgaggaactggagatcgacctcgacctcgacgatatcaacgacgtcttcccggagatgcctggctgcgacctcggccgcggcatggacgatttcctgcaaaccgttgatttctgcgtgtgaattaagtcagtgccttaatatgttagggttgatggtttgataagcgtgcttggaaggggggattgtcttgggtttttccctcgggcatttcagtctgctcgggcccaagatttctcttcttcccaaacagcacattagcttccggagaggtaattttgataggttacattatgttaagttatagtggttgtgttttttctgttatttggtaatgcttgtcaagacattatgaacaagtcattgagctgttactattggcgacgactacaaagaattcggcgaccacgccgtctgccttctgcgcctccatttcggcctctgtcccttgcaagttcaatctcacctccaaccatgggtaaagagaagtcccacatcaacattgtggttattggccacgttgactctggcaagtcgaccaccacaggacacctgatctacaagcttggaggcattgacaagcgtgtgatcgagaggtttgagaaggaggctgctgaaatgaacaagcggtccttcaagtacgcatgggtgctcgacaagctcaaggctgagcgtgagagaggtatcaccattgatatcgctctgtggaagtttgagaccaccaagtactactgcacggtcattgatgcccctggacaccgtgacttcatcaagaacatgatcactggtacctcccaggctgactgtgctgtccttatcattgactccaccactggtggttttgaggctggtatctccaaggatggccagacccgtgaacatgctctccttgcgttcacccttggagtgaagcagatgatttgctgctgcaacaagatggatgcaaccactccgaaatactccaaggcacgttatgatgagattgtgaaggaagtctcatcctacctcaagaaagttgggtacaaccctgataagattgccttcgttcccatttctggttttgagggcgacaacatgattgagaggtccaccaaccttgactggtacaaaggcccaaccctgcttgaggctcttgaccagatcaccgagcccaagaggccttcggacaagcccctgcgtctgcccctccaggatgtgtacaagattggtggtattggaactgtaccggttggtcgtgtggagactggtgtcatcaagcctggtatggtagtcacctttggtccaactggcctgactactgaggtgaagtctgttgagatgcaccatgaggcgcttcaggaggctcttccgggcgacaatgttggcttcaacgtgaagaacgttgctgtcaaggatctcaagcgtgggttcgtggcctccaactccaaggatgaccctgccaaggaggctgccagcttcacctcccaggtcatcatcatgaaccaccctgggcagattggcaacggctatgccccagtgctggactgccacacctcccacatcgccgtcaagtttgctgagctcattaccaagatcgacaggcgatctggcaaggagctcgagaaggagcccaagttcctgaagaacggtgatgctggtatggtgaagatgattcccaccaagcctatggtggtggagacattctccgcgtatcctcccctgggtaggtttgccgtccgcgacatgaggcagacggttgctgttggagtcatcaagagtgtggagaagaaggacccaaccggcgccaaggtgaccaaggcggccgccaagaagaaatgatgcgatcccgtgtctgcttttgcagtgcctggataacttgccactaaagttgtgtatgcggttgttgctgttattgcgtggactgtttgctgcggtgtctcctgtttgtttgggtagcgcagcgtcggcctcttcaggtgtctgttgtctgttgtctttactatcagtaatgctcctgagacttgtatttctccttttggcgccgctaaatggaattttcgaacaatgattttcgtgttattattttacaaccttttcgaacaatatttacacgtctgatgtgttttgctgaaaaaaaaaaaaaaaacccacgcgtccg

SEQ ID NO: 391 - DNA, 2130 bp, Zea mays
  unsure (1)..(2130): unsure at all n locations
  Clone ID: TF_ZmC2282_1
cattgggtacctcgaggccggccgggacctaccaatctaccacctccccaactccgcctcccgcctcccaagtcccacccccactccctcgctcaccagaggaactagcggaccaggcaaagccgagccgcaaccgcgaagatcttgcgtggcctccttttcccagctcgtcactgtgccgctcgtgtcctccactcccggtccgcccaaccaataatccatcgatccatccaccaccaccaccccgctgcggcgatgtgcggcggcgccatcctctcgggtttcatcccgccgtccggggtggcggcggcggcggcggcggcgaagaagaagaagcagcagcagcggtgccgtgtgactgcggacctgctatggccggggcccggcagtaagggagctccccaggaccaggaggaggacttcgaggccgacttccgcgagttcgagcgcggcctcggcgaggatgacgtggacagcgccggcgaaggcggcgaccccgaggtccaggagcttcctccgccggagccgacgaggtttgccttcgccaccgcggccaaggcggcagttgatggcgtgatgacgacgactccaaaggatgtcaaaggagatagagcagtaaaaaagcgcggccggaagaaccagtacaggggaatccggcagcgcccttggggcaaatgggcagctgagatcagggaccctaacaagggcgtccgcgtctggctcggaacctacaacaccgccgaggaggcagctagggcatacgacgccgaagctcgcaagatccgcggcaagaaagcgaaggtgaatttccccgatgacgacgcgccaggcactcgtcacaggccaacgaacgcagcgaacgcagcgaggctagtagctccacccccacccccgaaggcctgcgccgatgagatctttaacaacctgaagaacgacgacggcgacaacaacaacaacgatgatctgtttgcgatgtttgcgttcggtgacaataagaaggaggccgttcctgcagcgaagccagccgccgccgagggtggcagtggcagtggcagtggcagcttcctcgtccctgcgcctgcgatggcggcggcggtgcccggtaataagaggaggtcgtccgcgaccaacattatggtctccgtctccgacgaccagagcagcaactcctacggctccggctcctccgacttggtggggtcgtggtcgtgggacgacgccgccgccgccgccgccatgacctcggactacacctcctcggtcttcgctccggcgtcttactcttacatgcaaggcggagcgccgaagagaatgaggagcagctacggcggcgcgccgcccagcctcgcacatgacgcggccatgcctggctttggccttgataaagtgagctaccaccactaccaggcgttgcctccttattacgtcgggagcagcaacgcgtcggtgggcaacctcggtcttctgcagcaggctgatgatgctccagctccacaggatggggcgagcgccggggatatctggagcctcgacgagctgctcatgctggcagcagctggtgcttattgagaaccgcaagaaaaaaaaatgtgttggcgctgctagctggagacgagacgagggcgagaggcagttgcatcatccgccatccgctatcgttttgtctctcctatatctagtatatatatgcttctggcagtcgaactctatggcaatgcgtgtgtatagtgtgttgctgccgtctatgattggaagcgagctcgagactggttcaataattcacctttgcctaccgtcgtaccgccggcctgctggactgtagtgtgcgtactgcatatatatgccataattatgtatgcactcctcctatataaactatattattatgatgtgcttatactagtactgggcaaaaaaaaaaaaaaaaaaaaancgtgcggctccccttttttcccgtttcgtccctttttctcgttgtttcctgtttgctctataaaaagggggggccgtttttggggttcccgtttttcttccccgggttttgggcgttttggtttttttttgggggcccctcgttccctttctttggccgcgtttttccccgggggcctggaaaacccttggggtccc

SEQ ID NO: 392 - DNA, 1953 bp, Zea mays
  Clone ID: TF_ZmC2282_3
gggtaaccctggccggggccgggccgggctccccaactcggcaactccgcctcccaagtcacacccgcactccctcgctcaccagaggaactagcggaccaggcaaagccgagccgcaaccgcgaagatcttgcgtggcctccttttcccagctcgtcactgtgccgctcgtgccctccactcccggtccgcccaaccaataatccatccatccatccaccaccaccaccccgctgcggcgatgtgcggcggcgccatcctctcgggtttcatcccgccgtccggggtggcggcggcggcggcggcggccaagaagaagcagcagcagcggtgccgtgtgactgcggacctgctatggccggggcccggcagtaaggaagctccccaggaccaggaggaggacttcgaggccgacttccgcgagttcgagcgcggcctcggcgaggatgacgtggacagcgccggcgaaggcggcgaccccgaggtccaggagcttcctccgccggagccgacgaggtttgccttcgccaccgcggccaaggcagcagttgatggcgtgatgacgacgactccaaaggatgtcaaaggagatagaccagtaaagcgcggccggaagaaccagtacaggggaatccggcagcgcccttggggcaaatgggcagctgagatcagggaccctaacaagggcgtccgcgtctggctcggaacctacaacaccgccgaggaggcagctagggcatacgacgccgaagctcgcaagatccgcggcaagaaagcgaaggtgaatttccccgatgacgacgcgccaggcactggtcacaggccagcgaacgcagcgcctaggctagtagctccacccccaccccccaaggcctgcgccgatgagatctttaacaacctgaagaacgacgacgacgacaacaacaacaacaacgatgatctgtttgcgatgtttgcgttcggtgacaataagaagaaggttcctgcagcgaagccagccgccgccgagggtggcagtggcagtggcagcttcctcgtccctgcgcctgcggtggcggtggtgcccggtaataagaggaggtcgtccgcgaccaacactatgctctccgtctccgacgaccagcgcagcaactcctacggctccggctcctccgacttggtggggtcgtggtcgtgggacgacgacgcggcggccgccgccatgacctcggactacacctcctcggtcttcgctcccgataacgccgtgctgccggcggcgtcttacacgcaaggcggagcgccgaagagaatgaggagcagctacggcggcgcgccgcccagcctcgcacatgacgcggccatgcctggctttggccttgataaagtgagctaccaccactaccaggcgttgcctccttattacgtcgggagcagcaacgcgtcggtgggcaacctcggtcttctgcagcaggctgatgatgctccagctccacaggatggggcgagcggccggggatatctggagcctcgacgagctgctcatgctggcagcagctggtgcttattgagaaccgcaagaaaaaaaaaatgtgttggcgctgctagctggagacgagacgagagggcgagaggcagttgcatccgccatccgctatcgttttgtctctcctatatctagtatatatatgcttctggcagtcgaactctatggcaatgcgtgtgtatagtgtgttgctgccgtctatgattggaagcgagctcgagactggttcaataattcacctttgcctaccgtcgtaccgccggcctgctggactgtagtgtgcgtactgcatatatatgccatagttatgtatgcactcctcctatatatactatatattattatgatgtgcttatactaaaaaaaaaaaaaaaaaaaaaaagaaaaaaaaaagggcggcgctcgcgatctagaaccccacgcgtccg

SEQ ID NO: 393 - DNA, 1668 bp, Zea mays
  unsure (1)..(1668): unsure at all n locations
  Clone ID: TF_ZmC2282_5
ttgggtacctcgaggccggattggatacctcgaggccggccgggctcccgaactcggcaactccgcctcccaagtcacacccccactccctcgctcaccagaggaactagcggaccaggcaaagccgagccgcaaccgcgaagatcttgcgtggcctccttttcccagatcgtcactgtgccgctcgtgccctccactcccggtccgcccaaccaataatccatccatccatccaccaccaccaccccgctgcggcgatgtgcggcggcgccatcctctcgggtttcatcccgccgtccggggtggcggcggcggcggcggcggccaagaagaagcagcagcagcggtgccgtgtgactgcggacctgctatggccggggcccggcagtaaggaagctccccaggaccaggaggaggacttcgaggccgacttccgcgagttcgagcgcggcctcggcgaggatgacgtggacagcgccggcgaaggcggcgaccccgaggtccaggagcttcctccgccggagccgacgaggtttgccttcgccaccgcggccaaggcagcagttgatggcgtgatgacgactcctccaaaggatgtccaaggagatagagcagtaaaaaagcgcggccggaagaaccagtacaggggaatccggcagcgcccttggggcaaatgggcagctgagatcagggaccccaacaagggcgtccgcgtctggctcggaacctacaacaccgccgaggaggcagctagggcatacgacgccgaagctcgcaagatccgcggcaagaaagccaaggtgaatttccccgatgacgacgcgccgccaggcactcgtcacaggccagcgccgaaggcctgcgccgatgagatgtttaacaacctgaagaacgacgatgacaacaacgatgatctgtttgcgatgtttgcgttcggtgacaataagaagaaggttcctgcagcgaagccagcagccgccgagggtgacagtggcagtggcagcttcctcgtccctgcgcctgcggtggcggcggtgcccggtaataagaggaggtcgtccgcgaccaacattatgctctccgtctccgacgaccagagcagcaactcctacggctccggctcctccgacttggtggggtcgtggtcgtgggacgacgacgccgccgcagccgccatgacctcggactacacctcctcggtcttcgctcccgataacgccgtgctgccggcggcgtcttactcttacatgcaaggcggagcgccgaagagaatgaggagcagctacggcggcgcgccgcccagcctcgcacatgacgcggccatgcctggctttggccttgataaagtgagctaccactaccaggcgttgcctccttattacgtcgggagcagcaacgcgtcggtgggcaacctcggtcttctgcagcaggctgatgatgctccagctccacaggatggggcgagcgccggggatatctggagcctcgacgagctgctcatgctggcagcagctggtgcttattgagaacgcaagaaaaaaaatgtgttggcgctgctagctggagacgagacgagggcgagaggcagttgcatcatccgncatccgctatcggtntgtctctcctatatctagnatatatatggcttctggcagtcgaactctatgg

SEQ ID NO: 394 - DNA, 2053 bp, Zea mays
  Clone ID: TF_ZmC1995_1
aattcggcacgaggatttcttccctggctgaaggcgtgggtctcgagagctgcttaaaaagctttgcacaaaaatggcttcgttggcgatctcgaggccgcccgggacgtcccatcgcgccgctcccttcgtcctggggtgtcctcctccatggccaccgccaccgccgcctgccgctcgcccacggccgccgccgccgcgccctgacgctgctgctgctgctagactgctagaggaggaggccggggcaggcagctcgcgagctcgatcgcctggcgggcccgagctggagtcgatggtgctggatctcaatgccgagtcgccgacgcccggctcggcctcggccgcctcgagctccagcgtcgtagtgggcgggggcttcttccggttcgacctgctcggagggacacccgacgaggagggttgctcgccctcgccacccatcgtgacgcgccagctcttccccttgccgtacccggacgctgcaggtagcaccgccgcctcgacggcgtcgaacgggtcgccgccgccggaggtggcggtggcatgggcgcgccgcccagcggatctcggggcgccggcgctggcacaggggaaggtggtgtctgcgccttcgtcgcccgcggttgtgtctcctgccgccgggaagaagagccggcgggggcccaggtcgcggagctcgcaataccggggcgtcaccttctacaggaggaccggccgctgggagtcacacatctgggactgcgggaagcaggtctacctgggtggatttgatactgcgcacgccgcagcaagggcctatgatcgcgctgccatcaagttcagaggccttgacgccgacatcaacttccagttgaaggactatgaagatgacttgaagcagatgaggaattggactaaggaggagtttgttcacatactccgacgtcaaagcactgggtttgccagggggagctcaaagtaccgtggtgtgacactacacaagtgtggtcggtgggaagctcggatgggtcagcttctcggaaagaagtacatctaccttggtctatttgacagtgaaatcgaagcagcaagagcatatggtagggcagctattcgcttcaatggaccggatgctgttacgaactttgattctgtttcctatgatggagatgtcccacttccacctgcaattgagaaagatgtggttgatggggacatccttgatctgaatttgaggatttcacaacctaacgtgcatgatctcagaagtgatggtaccctgactggttttggattaagttgtaattctcctgaagcttcaagctccattgtttctcagccaatgggcccccagtggcctgtccatcctcacagcagatcgatgcggccccagcatccacatctgtatgcatctccttgtccaggcttctttgtgaacctcagggaggcgcctatgcaggaagaggagaaccggtccgagccggcgtgtccccagccgttcccctcctgggcatggcaaacgcagggctcccgtgccccagttctccctgccaccactgcagcatcatcaggattctctaccgccgctgccaccggcgtggacgcggccacagccggccacagcgtgccgccgccgtctggtagcctccggcagttctcgggctaccaccagctccgcttccccccaaccgcctgacggagacagaccacctcctgttgagttggcggcggcggcggcgtctcatagctggccggtggttggctggctgcccatgcaacgccacgccggtgggtgcgggtcggtattcggtaacagtcgccactgttgggtatggttttgtgggactacagaggatgcagtgatctctcgctgctgctgtgtgctgtctctctcgctccctctacccacccacacctgtttgtaatatgaatttatcgccctctcgcgctcgtgattcgtccatcttcgtttcgttttgatggccaccggatgggatcatgagcgtgttgcgagaaattgtgtaataaaccatgcgtatttttatttatatttatttattgtgacgatggt

SEQ ID NO: 395 - DNA, 364 bp, Zea mays
  Clone ID: TF_LIB3156-001-Q1-K1-H9
cccacgcgtccgcccacgcgtccgcccacgcgtccgcccacgcgtccgggggaaagcgtcggctgagataagagatcctcacaaaggtgtccgagtctggctcggtacatacaacacggctgaagaagcggctcgagcctacgatgaagccgccaagcgcatccgtggggagaaagccaagctcaacttccctcaaactccacacctaactcagcctcctgctaagaaaaggtgtatgatggctcctgagttgactccgccgagttctgaaacaaagagcccaccaaccccacaactttttatgggttttggttacgagaatggcgtttacagaccgagtgaagcaatggaaagcgagatggag

SEQ ID NO: 396 - DNA, 1046 bp, Zea mays
  Clone ID: TF_ZmC234991_1
ctcccgagtcccgacctcttgtttctctcgctcgcctccctcgtccgcggtccgtcgccgctccagatccagcctccagcccgccggtgtcttctgcgccgtagtcggcggtcaggtcgtcgggtatggtgaggtcgtccatgagagcggacatgtcctcgacaccatagccatagcctgccgcgccgttcgcggccgggagcgccggtggtaaagacgcggcggctgggtcgacggcgtagaatggctggaggagctgcgtggcgttgtcgcccgaggtgaggtccggggagaggtagggcgtgacggaggagcccggcgggaggtccgggtaggcgaagttggtgcgcgcgtgggagccgcggagggagcgcgcgacgcggtcgtgtccttggtggccgggtcccggatctccgccgcgtaccggtcccacgaccggcgccgcacgcccaggtaccgcgtcgtgttggcgtccgcctggggctgcgccacgagcggacgagcccacgaccgcagaacgcaccgtcgctgctcgcctgcgctgcgctgctccgatccaaatccaccccaagggaacatctaccgccggccgactcctgtgtctggcgtgtattggaccacgaccagcaggcagcagccccgcgcacgagccaagatgcgcacgcctagcgcgacggcggccgagatgtgcgtttatcaggaactgaggaggcgtgtcgtgcctggaccagcacggcccgacggaagcccgtcgtgctttagggtcatactagaccttacttctactcgctaggtccggtaagacatgacctgactctattttgtgctagctaggcccgactaaccgaggcccgaagcacggcgggctcgtgccgggccggcacggcacgacccaacttgcagcactaatggtaacgatcatttctcaagcgctgtgagccgcagtaaatttgaaatgagcaaggacaacagaaagggcaggaggagagccaacggacaatgtacttctgtacctttataaaattcgataagcgagcccacggggc

SEQ ID NO: 397 - DNA, 670 bp, Zea mays
  Clone ID: TF_LIB3607-014-Q6-K6-G12
cgcatggttcctcttccgctgctgccgtcctgcgatcgaccgggttggcgggcggtccggcgcgtgcctgcagtttatctcggcgcgtacgacgacgaggacgcggaggagcgcgcgcacgacctggcggagctcaagtactggggccccgccggcaccgtcctcaacttcccgctgagcggctacgacgaggagcggagggagatggaggggcagccccgggaggagtacgtcgcgtcgctgcggcggcggatcagcggcttcgcgcgaggggtgtccaagtacaggggcgttgccaggcatcatcacaacgggagatgggaggcgaggatcgggcgcgtgttaggcaacaagtacctctatctcggcacttacgcaacacaagaggaggcggcagtggcgtatgacatggcggctatagaacaccgcggcttcaacgcggtcaccaacttcgacatcagccattacatcaaccactggcatcgacattgccatggcccctgcgacggcagcctcggcgcgatggacgtcgcaccgaacgtctcgctcgaactagacctactcgagtgcccagtcaccgtccggctcagcctcgaggagaccacgggcgacgatgaattccacaaccgcgaggactacctggggcaccttttcggcgtgcagcagcttc

SEQ ID NO: 398 - DNA, 1007 bp, Zea mays
  unsure (1)..(1007): unsure at all n locations
  Clone ID: TF_ZmC21315_4
tcgcgatctgatcacaggaagcacacacatcactgatcgagaacttactacatagtacaccaagaaagcaagcgacgacgacgtctgggaacgacgaagccgaagctggagagctatactatacctgtcatccaaccagccagccagccaagccatcatatcatggtgaagacggcggcgagcagcagcagcgacgacgccgccgccgccaagaggaggacgtacaagggcgtgcggatgcggagctggggctcgtgggtgtcggaggtgcgagcgcccggccagaagacgcggatatggctcggctcccacgccaccgccgaggccgcggcgcgcgcgcacgacgccgcgctgctctgcctccggggctcggcggccgacctcaacttcccgctccgcctcccgttcgacctgccccccgcggccaccatgtcgcccaaagccatccagcgcgtggccgccgccgccgccagcgcctcctcctcctcctcctgcggcggtggcggcggcttgcgcgcgccgccgcccttcgcgccacgcgccgagaacaacggcaccagtgcctgcagcgacggcgacggcgacgccaccccggcgtcgagcaccaccagctcgcccaccagccacgccgacgacgtctcctccccggactccaccgtcagcagcgccggcgacgtcgactactacacctcgctcgcggacatcgacgccttcttccagtcgcccaagtgcgtggtggactacgccctcatggacccctgcagcgccttcttcgcgccggactcgacggcggccgacgacgacggcggctgctgctgggcctgggaggaggacggcggcggcattgcgctctggagcttctccgctacactggactgctgaagtgtgggcgtcaggggaagcggaagcgattcgagtcagtcactgactatagtcgccgatcgatcaagtgacagaattccatatatatatatacacgtgataattattcaattnccgnagaaagc

SEQ ID NO: 399 - DNA, 1569 bp, Zea mays
  Clone ID: TF_ZmC7961_3
aacccaaattcggcacgaggcacaatccccttcaacaaacgcaccgcactccacggcagccagaaaacacaatccacagagtctccgtgaggtctgagcgaggtaggactagctctgagcgagttcttccgtcttccaggtataatccttgcaactctcactatcctcttcgcatcgctcgtctctttttgagactagttggatttctcttctttttccttggatcctactacctactagaacagagctccggagccttttagtttctggtctctgatctactcattttcttttcttccccttttggtgacataggtaggtctagttaagatctgtcgtgcctgttctttgattttagctaagaaccaggcgatttagtcttcttcttccttacaaaaaaaaaaaatccccagaaaaaaaaagttgtgagtagtatattcttgtaccatttgatggccgctgctataaatctccccgggcccagcgaggatctgatgcgagcgatggagtccttcatgcaagacgacacgacccatccccttcaacaaacgcaccgcactccacggcagccagaaaacacagcccacggggcccagtacccggcgacccacctgagcccggcgcagatgcagttcatccaggcccagctccacctgcagcggaacccggggctgggcccgcgggcgcagcccatgaagcccgccgtcccagtgccgccggcgccggcgccgcagcggcctgtgaagctgtaccgcggcgtgcggcagcgtcactggggcaagtgggtggccgagatccggctcccccggaaccgcacccgcctgtggctcgggaccttcgacaccgccgagcaggcagcgctggcctacgaccaggcggcgtaccgcctccgcggggacgcggcgcggctcaacttccccgacaacgcggagtccagggcgccgctcgaccccgccgtggacgccaagctgcaggccatctgcgccaccatcgccgccgcgtcgtcgtcatccaagaattccaaggccaagagcaaggcgatgccaatcaacgcgtccgttctggaagcggcagcggcgtctccgagcaacagctcctccgacgaaggttccggctccgggttcgggtcggacgacgagatgtcctcgtcttccccgacgccggtggtggcgccgccggtggcggacatgggacagttggatttcagcgaggttccgtgggacgaggacgagagcttcgtgctccgcaagtacccgtcctacgagatcgactgggacgcgctgctctccaactagtcgcccttcgccgacagatgtgctgttgtagttcagtagtggcagtatctctggccgccgcagatgaggttttaggcaatctgcaggccgccggcccatgtgtattaagtaggttttgctcagttgttggccccggacttcgccggcgtttttgtgaccggcgtccccgagtgcactgcattggtgtactggtctgtctgtaaaaaaaaatggatctgtgtacttctatagtgtgtattcaaccattgttcttaaaaaaaaaaaaaaaaaaaaa

SEQ ID NO: 400 - DNA, 1426 bp, Zea mays
  Clone ID: TF_ZmC983_2
ataaaaccagtcgtgaactatattattaaacttgctctaaagttacatcaacaaaaatgatatcacacacccatagtcccacaccaacacatgttcttgatttcccaagccgcaagtaaactttttcttgcatccccactcgtgataaaaaaggtcctcccaccacatacagacagaggcagcagcaagcaagcagctaccaaccaacctctgcatcacttgatcctcctgcacaccactgcccgtcagtgcacagagctagctatcttccatggctcaagagctccaagaaacgtcctcttcctctgccaccaccaccacctcgtcgtgtaccacctcttgctgctcgtccactgtcacggactcgtcctcgtcgcccccgtcaccggcggcggccaatgccgcgcccgcgccacggaaggcggaggccgagactggcggggacgaggacggttgtgctggtaaggcggcgccggcgaagaagcgggagcggagcagcgaggggaagcacccgacgtaccgcggcgtgcggatgcgggcgtggggcaagtgggtgtcagagatccgcgagccgcgcaagaagtcgcgcatatggctcggcacgttcccgaccgccgagatggccgcgcgcgcccacgacgccgccgcgctcgccatcaagggccgcgccacgcgaagtgcccgccacaagagcggcagctgttcgacttgccggacctgctcctcgacgtccgggacgggttcgggcgcttcccgccgatgtgggccccgttccatgacgtgttggaggtcaatgcggaggaggagccgctgctttgggaatagcagtcttgcaattacaaagagggtctaaacaatagtaccagtggtatcccatttcctcatctttgttctccccctctctttctttcttttttctttggaaaagcagctagttttttttcttcttatctttaatttggttaaataagtataaacatatataaacaagagagatataagctgtgtacttataagtgtaagacgagtaagtaccgaacagttaattattaaaaaaaaaaaaaaaaaaaaaaaaaaaaaaaaaaaaaaaaaaaaccaaaaaaaaaaaaaaaaaaaaaaaaaaaaaaaaaaaaaaaaaaaagggggcgcccctttaaaggaaccaaacttacctaccccgtccttccaactaaaaactttttttatggggcccctaaattaaattcaatggcccgcgttttaaaacctccgaactggaaaaaccctggggttacccaaattaaatcccttggaaaaaaacccccttttccccagtggggtaaaaacaaaaaagccccacccgaatcccctttccaaaaattggccaaccctaatgggaaatgggaccccccctttaacgggccaataaaccccgcgggtggggggg

SEQ ID NO: 401 - DNA, 1419 bp, Zea mays
  Clone ID: TF_ZmC484_48
gtcgccgcgtgcaccagcggcggggcgccggagcgctaccgcggagtgaggctccgcaagtggggcaagtgggcggcggagatccgcaacccgttcaccggcaagaggcagtggcttggcaccttcgacaccgctggcgcggcctccgcggcctacctgtccgcctcccggagcttcgccgacgagaagcggcgccgccgcgggctgcccgtggccgcgtcctcagcagacactccggcaagcggcagcaccccgacggcttcctcctcgtcgtccgcctcgaccgctccattcgcgcacccgtcgccgtcgtccgtgcttgaaccgagcaaggaagcgcggaacacgcagtccccagaggcgacgcccgcccggccgtcgaccgactcagcgcagctgccggaggacccagagttctaccaggaccttctgcgcggcctgcagctgcccgacatcgacccgctggacttccgcgccgggctggacgctctggatctctccgatgcggacttcggcctggacgacgaacatgacctcctgctcggggacttcggggacgaggagatggagatcgacctcgacctcgacgacatcaacgacgtcttcccggagatgcccggctgcgacctcggccgcggcatggacgacttcctgcaaaccgttgatttctgcgtgtgaattaaaagggagtgtgcccttgatatgttagggttgtttggtttcataaacgagcccctgagagtgtgcttggaaaggggagatgagatatcttgggttttttccccgggcaagttggatctgctcgtgcccaggagatttcctctttgccctcatttaccccatcaggtaacacagagaaatcagtgatcactctagtgtatttacccatggccttagtgacaaagacgaaggggcagacggtcttgcagatgcaacacttgttgtcgcccatcacgaaacggaggcggacgatgcatgtggagcacacgtcgcggtgcccgcacgacccataggccacccactccagcgtatctgcgcacaccgcacaaaagtcttccatggctatctgcgcagctctaatctccgaagtccgaatatatcttcaaatctggtaagatagggatcgattcttttgggatcggattccactgttaattcgaactcgagtaggggaaggcgccgccgcggcgccggcagccgcgcctgcgcgggtttcggccggtacatcggcggagggggcacgcggccgcccggcagcatggacggcggcgcgtacgggaaccggcttcgcggccgccgcgtacgcccggtcccccattacgcgctttctattctctctctctcgttcggttcttggctggctgctcggggaagggaagggttcggttcttggctggtcgacagcaacggaattcgagc

SEQ ID NO: 402 - DNA, 1042 bp, Zea mays
  Clone ID: TF_ZmC484_74
tgtcgccgcgtgcaccatcggcggggcgccggagcgctaccgcggagtgaggctccgcaagtggggcaagtgggcggcggagatccgcaacccgttcaccggcaagaggcagtggcttggcaccttcgacaccgctggtgcggcctccgcggcctacctgtccgcctcccgtagcttcgccgacgagaagcgccgccgccgcgggctgcccgtggccgcgtccacaccagacactccggcaagcggcagcaccccgacggcttcctcctcgtcgtccgcctcgaccgctccgttcgcgcacccgtcgccgtcgtccgtgcttgaaccgagcaaggaagcgcggaacacgcagtccccagaggcgacgcccgccccgccgtcggccgaatcagcgcagctgccggaggacccagagttctaccaggaccttctgcgcggcctgcagctgcccgacatcgaccctctggacttccgcgccgggctggacgccctggatctctccgatgcggacttcggcctggacgacgaacatgacctcctgctcggggacttcggggacgaggagatggagatcgacctcgacctcgacgacatcaacgacgtcttcccggagatgcccggctgtgacctcggccgcggcatggacgacttcctgcaaaccgttgatttctgcgtgtgaattgaaagggagtgtgcccttgatatgttagggttgtttggtttcataaacgagcccctgagagtgtgcttggaaaggggagatgagatatcttgggttttttccccgggcaagttggatctgctcgtgcccaggagatttcctctttgccgaacacaccaccattagcggccggagagaggtaattttggtaggttatattatgtttaaggtatagtgcctaagtgtttgctttgttatttggtaatgcttgtcaaagacattgtagtggacaagttcattgagctgttactgttaagcaatgaaaggggaaaaaataagtttcgtggtaaaaaaaaaaaaaaaaactcgaagagggggggc

SEQ ID NO: 403 - DNA, 1063 bp, Zea mays
  Clone ID: TF_ZmC484_77
tgtcgccgcgtgcaccagcggcggggcgccggagcgctaccgcggagtgaggctccgcaagtggggcaagtgggcggcggagatccgcaacccgttcaccggcaagaggcagtggcttggcaccttcgacaccgctggcgcggcctccgcggcctacctgtccgcctcccggagcttcgccgacgagaagcggcgccgccgcgggctgcccgtggccgcgtcctcagcagacactccggcaagcggcagcaccccgacggcttcctcctcgtcgtccgcctcgaccgctccattcgcgcacccgtcgccgtcgtccgtgcttgaaccgagcaaggaagcgcggaacacgcagtccccagaggcgacgcccgcccggccgtcgaccgactcagcgcagctgccggaggacccagagttctaccaggaccttctgcgcggcctgcagctgcccgacatcgacccgctggacttccgcgccgggctggacgctctggatctctccgatgcggacttcggcctggacgacgaacatgacctcctgctcggggacttcggggacgaggagatggagatcgacctcgacctcgacgacatcaacgacgtcttcccggagatgcccggctgcgacctcggccgcggcatggacgacttcctgcaaaccgttgatttctgcgtgtgaattaaaagggagtgtgcccttgatatgttagggttgtttggtttcataaacgagcccctgagagtgtgcttggaaaggggagatgagatatcttgggttttttccccgggcaagttggatctgctcgtgcccaggagatttcctctttgccgaacacaccaccattagcggccggagagaagaggtaattttggtaggttatattatgtttaaggtttaaggtatagtgcctaagtgtttgctttgttatttggtaattggtaatgcttgtcaaagacattgtagtggacaagttcattgagctgttactattaagcaatgaaagggaaaaaaataagtttcgtggtaaaaaaaaaaaaaaaaaaaaaaaaactcgaggggggg

SEQ ID NO: 404 - DNA, 399 bp, Zea mays
  Clone ID: TF_ZmC214275_2
gtcgtgcgcgcgcgccgccatctccgggcacgggaaggtgcccagccagatgcgcgacttcttgcggggctccctgatctccgacacccatttgccccacgcgcgcatgcggacgccgcggtacgccggggcggagctggagctggacccgccgtcgtctgagcgcggacgtttcttgccgccgcccgatgcggcggcggcggcggcggagggcgccgcgcgcgggctggtggacgtggagggtccggacgagcaggaggacgtgcacgaggtgtcggagctcggctcgctcattgccatatacactactatacgacaccgagctggaggctggagcagtcgatcgggtatgtgtgtatgatgatcgagcaagagatggagacagcccgggaattccgg

SEQ ID NO: 405 - DNA, 375 bp, Zea mays
  Clone ID: TF_LIB3117-035-P1-K1-G4
accagccatgcacgcagcgtagctagagctgacatgcatgcatactgcaccgcagagccgccggcccggaagcgggagcgcaagaccatgtaccgcggcatccggcgccgcccctggggcaagtgggcggcggagatccgggacccggccaagggcgcgcgcgtctggctcggcaccttcgccaccgccgaggccgccgagcgagcctacgaccgagccgcgcgccgtatacacggggacaaggccaaggtcaacttccccaacgaggacccgacggccgagtacgactacgactacgacggacactcccacgcccacgcccacgccggcggggaacaggggatgctcgccatgtacaacagcggaggcagggac

SEQ ID NO: 406 - DNA, 1111 bp, Zea mays
  Clone ID: TF_ZmC15341_1
aattcggcacgggccggcaccaaaaccacgcgctactacaccagcctagctagccctttcgccgtcgctgcggctcctgcccactgactcgtaggtttcgttgtttcgacaatgtgcggcggagccatcatcgccgacttcgtccccgccggcgcccggcgcccggcaacagacgacaccatgtccgcctccatcctctccggcgaggaccatccggagctgccgctgccgctgccggcgccggcgccggggcgcaagacggcgtaccgcgggatccggcgccgcccgtggggccggtgggcggcggagatccgcgacccgcggaagggcgcccgcgtgtggctcggcacctacgccaccccggaggacgcggcgcgcgcctacgacgtggcggcgcgcgagatccgcgggcccaaggccaagctcaacttcccgcccgccgtgggcggcggcggcggcgcgcgcgcgccggcgccggctgcggccaagaggcgccgcaagtccgcggcggccgaggagagctcggcctcgtctcctccggcggccgtcgtcgtggcgggcggcggggaggaggcgctgcgcgactgcatgtccgggctcgaggcgttcctggggctgcaggacgccgatgagggtggcggcgtcgaggcgtgggacgccgtgaggctcatgttggcgtaggccggagtacgccgtagcagggctgcaggggggcccagccccagccccagcgcgcgcgtgccgtcgctgtgaacggccgccgcagctgttttggatcgagtaataatattattagtagtataatgtttctccaagcagctaagataattgcaagccttgctgggtggtattactagcactgctatctaggagtatgtactagcaggatgggtttatctagcttgttgctaaacagaaaattaatctaagaaaacagagatatggtctgttaattgccggctctaactaatgcccggcgataatctgttaggctacctcagattgaccatctccatttcttattttaaactcattttcctcgtttattattttgaactccattatataaatgcagtctacatattgtacaaaaaaaaaaaaaaaaaaaaaa

SEQ ID NO: 407 - DNA, 1082 bp, Zea mays
  Clone ID: TF_ZmC15341_2
caaaaccacgcgctactacaccagcctagctagccctttcgccgtcgctgcggctcctgtctagtgactcgtagatttcgttgtttccgacaatgtgcggcggagccatcatcgccgacttcgtccccgccggcgcccggcgcccggcaacagacgacaccatgtccgcctccatcctctccggtactacgttgcgaggaccatccggagctgccgctgccggccccggggcgcaagacggcgtaccgcgggatccggcgccgcccctggggccggtgggcggcggagatccgcgacccgcggaagggcgcccgcgtgtggctcggcacctacgccaccccggaggacgcggcgcgcgcctacgacgtggcggcgcgcgagatccgcgggcccaaggccaagctcaacttcccgcccgccgtgggcggcggcggcggcggcgcgcgcgcgccggcgccggctgctgccaagaggcgccgcaagtccgcggcggccgaggcacgagggagagctcggcctcgtctcctccggcggcggcggcggcggccgtcgtggcgggcggcggggaggaggcgctgcgcgactgcatgtccgggctcgaggcgttcctggggctgcaggacgccgacgagggtggcggcgtcgaggcgtgggacgccgtggacctcatgttggcgtaggccgtacgccgtagcaggggggctctgggccccagccccagccccagcgcgcgcgtgccgtcgctgtgaacggccgccgcagctgttttggatcgagtaataatattattagtagtataatgtttctccaagcagctaagataattgcaagccttgctgggtggtattactagcactgctatctaggagtatgtactagcaggatgggtttatctagcttgttgctaaacagaaaattaatctaagaaaacagagatatggtctgttaattgccgggtctaactaatggctggcgataatctgttaggctacctcagattgaccatctctatttcttattataaactcattttcctcgtttattattttgaactccattatataaatgcagtcacatattgt

SEQ ID NO: 408 - DNA, 690 bp, Zea mays
  unsure (1)..(690): unsure at all n locations
  Clone ID: TF_LIB4767-027-Q2-K1-E2
ggaccctcgaggccggccgggcccgcctcgccgccagtcagattcaccaccggctcccctgacaaccgcgtccgcgctgcaccaccaccgttcatcgaggaggaggggggacggagaccacggacatggagagatctcaacggcagcagcagccgtctcctccgccaccgtcgccgtcctcctcctcgtcctccgtctccgcggacaccgtcctcgtcccgcccggnaaagaggcggagggcggcgacggccaaggccggcgccgagcctaataagaggatccgcaaggaccccgccgccgccgcggggaagagaagctccgtctacaggggagtcaccagtctacctgggggcgtatgacagcgaggaggcagctgctcgtgcctatgacctcgcagctctcaagtactggggtcctgagactctgctcaacttccctgtggaggattactccagcgagatgccggagatggaggccgtttcccgggaggagtacctggcctccctccgccgcaggagcagcggcttctccaggggcgtctccaagtacagaggcgtcgccaggcatcccacaacgggaggtgggaggcacggattgggcgagtctttgggaacaagtacctctacttgggaacatttgacactcaagaagaggcagccaaggccaatgaccttgcggccattgaatac

SEQ ID NO: 409 - DNA, 1434 bp, Zea mays
  Clone ID: TF_ZmC21952_1
cctcgaggccggccgggcacaaaaagacataagccagttgtagggaagggccaagggaaacttcaagatagtatggcgaagaactatcgagagcgccgcttaaagagggcgatgaagatagatgagggagaggacgactttgaagctgattaccaagcattctctaagaagtacgatgagaaggatgagtgccactataagttcatggctttattaccattcaagaatggtcttcctaatgtctcaccgccaacaaaagagaaagttggacttcattttgccatgaaagatgttgtgattagtcaaaaaccaaccaccaccaatgaaggtatcattgtaaggccgaagtgcaagcgaaagaccccatataggggcatccgccgacgcccttggggaaaatgggctgctgaaatccgcgatcctacaaagggtgttcgtgtttggttaggcacgtataaaacaccagaagatgcagctagagcatatgacgctgaggcccgcaagattaggggcaataaagcaaaggtgaatttccctaatgaaccaccaaacatggtgagcaatgcaccaaaactaattgttactgcaatgactacaatggctatcccagcagacaagttgaatgccaatgaattgatgtgccataaaaactactcaaatgaggattttttctcaatggtgaactttagtggaaacaatggtaactttatttctactgcggcctttggcttacaatgtatcaaaaagcctcgtgttccttatgacatcccaaggatgggtgagtgttcaaatcaaaacagaatgacatatggtttaagtaatggattgggcaatgaagctagtaggaacctgaatggatgctctttcttaccacaagctggcatgccaattttcattcaacctacttttgatggtccttcaaggatgataggaagaaatgatggcgtgattgttcctactttgactaatgcaacacccatggctggtgttgatgctgcgaaaaagatgaatcaacaacctattttccaagagatggaaagtgaagatattccttctattttgcaaggtgatgtcagtgaggacgtggcagctgagattagtatgtgggagttttatgacaacctattagataataaggaaaattgatggatcttgacatcatgcatggtccatatggcttctgtcttgatgatactagcaagtggttcgaagcatgcatgatggggatgtagtcgcaaatgacatattcgttttataatgtcaagtaaaatgcagccatttgttatccatgtgtatcagtttggactgtttatttatgctttgttgtaagcttacaggcaacggaacctgattgacattgtgggtgttattgtaatgtattgataattttcaaaaaaaaaaaaaaaaagggcgccgctcgcgttctagaactag

SEQ ID NO: 410 - DNA, 1228 bp, Zea mays
  Clone ID: TF_ZmC172_1
gtatcatacacaaccgtaagacaaggacgagagttcaagcgttcccacgcgtacggccaaacacacgcgaagaaaaggagatagagtacaggttacagacaggcagagagcaaagatgtgtggtggtgcgatcctcgccgagctcatcccgaccacgccggcgcgccgcggcggcgcggcgtggcccgccggcaagtgcaagcggcggaaggcgaacgacttcgaggccgcgttccgggagttcgacgaggactccgaggaggaggaggaggacgacgagggggtggtggagagcaagcccgccttcgtcgtccgcgcctcgtccgcggcgacgcagcccagggcgcgccaggagcagcggagccggcgccgggcgcccgaccagcagtacaggggcgtccggcgccgcccgtggggcaagtgggccgccgagatccgcgaccccgtcaagggcgtccgcgtctggctcggcaccttcccttccgccgaggccgccgcgcgcgcctacgaccacgccgcgcgccacatccgcgggcccagggccaagctcaacttcccctcctcctcctccgcctccgctgccggggcccccgccagccgcaagcgcgcccgcaccgccgacgccgacgccgtcatcgacctcgaggaacaagagcagcgtccggccgcggcggccctgaagcacgaggccgccgagtgctccggatccgacgcgctcccggacttctcgtggcaaggcgtgtcggcggcgtacgacgaggcctccgcgccgcgcccggccttcgacttcgaggcgcgcccggagagcgccgcggacgaggcgtcgccccgggcctccgactccgagtcggacgcgatgttcgactcgctcctcttcggcgaccagttcgccttcttcgacgccggcgcgtacgagtcgctggacagcctgttcagcgccgacgccgtgcagagcaacgccgccgccgcggcggaccaggacatgccgctgtggagcttcgacgacggctgcctcgtcgaggacaacctctcgttttaagcttcggcgactgttgctgtgtcttgagttttgtaaattacgatctgtttttttttttttgagtttctgctcatgtatatctgtatcgatggtgagctgaatgaaatcatccttctcaggaagtaaaacaaaaaaaaaaaaaaaaaaaaaaaaatgttctcgaggtcgacggtatcggcgagtcttgat

SEQ ID NO: 411 - DNA, 1565 bp, Zea mays
  unsure (1)..(1565): unsure at all n locations
  Clone ID: TF_ZmC8601_1
ccgggctggccgcttttttttttttttttttttggggaacagccgaacacagattgtttatacaacaataaaccatacaatagtagcaccaacagtagcagttcatcaaattacaactcctggacacagctagctagctgattttacaacatacatcatacggagcactactgcttgacaagcatctcctcacatcacaccgtgctgctctttacaacctgtagagcacagcacaccatctagcacaacaaaaacagctaccaggacaacggacacctgaacggccgggggggtggggtcactgaccagtgtgacacgtaccggccaccaccggagaacgccggacacaaaaacgccggcttcccgtcggttgtggttctctcctcctccggagaaccaaaccctaaataacccgagatctacaactgactcaccagtgacaaggaccaaacgaatcggacggacatctacacagaaccaaccaacgaacggacggacggggattagcactaatgatccaactagtgcccgcgcaggatgtctaaaatcccatctgcgcgacggccgttaaccttctttaaccctcctcctgctgcacgacggcagtgtgggtaggatgggagccagccagccagccagccaacaaggggcgacgattaattggcgaggagggagtcccagtcgatctcgtacgacgggtacttggtgagcgcgaagccggcggcctcgtcccacggcgcctcgctgaagtccagctgctgcatctccggcaccgtcggcccgggcgaggcggacggcgacggggaccgggacgggcacgaggactcggtggcggactcgaggcaggacgaggtcgcgtcgtcggacgacggcgaggagcagcagttgctggtgggggcggacgacgacgcagcagctgcggcggaggctggcttcttggcgcccttcttggacgcggcgatgctctggcacaggctctggagcttggcgtcgacggaggcgtggagcgggccgcgggaggcggcgttgtcggggaagttgaggcgcgccgcgtcgccgcggaggcggtaggcggcctggtcgtaggccagcgccgcctcctcggcggtgtcgaaggtgccgagccagagccgggtgcggttgcgcgggagccggatctccgccacccacttgccccagtgccgctgccgcacgccgcggtacagcttctggccggcctcgaggtaccccatctgggaagggctcagctggcccgcctcgtcggccgcggcgaacgggtagttccctccgtaggaggaggcggcggcgacggcttggtggaaggagaacggcgacgaggggctaagtggctggtgcgggtggaggagcggactggatccgtgagcagaggcatcccggataaaaggctcgacgtgctctcatcagctcctcccctgacagatctatagtagcagccatctagactgtttttttttgttttttttgttttttttcctctctctctagcaaaccaagaacaaacgaaganactggcggaacccnacagccacagtaaaaaacagatc

SEQ ID NO: 412 - DNA, 1187 bp, Zea mays
  unsure (1)..(1187): unsure at all n locations
  Clone ID: TF_ZmC3662_1
caagccgcacgagaaggcaggcaggcaggcagagaggaaggaagaggaggaagaggaggagaagcgcgtggaggagcgggatgcggcgggcgaggctgccgccggtcccggtcccgacggcgccgggggacgcggggccggaggtgaagtaccgcggggtgaggcggcggccgtcggggcggtacgcggccgagatccgggacccggctaggaagaccccgatctggctgggcaccttcgactcggccgaggccgcggcccgcgcctacgacgccgcagccaggaccatccgcggcgccgccgcgcggaccaacttcccctccgcgcccacctccgccgcggtcgcgccgccgctgccactccccgcctcaaccgccgccgcggcgggtgcggcgacgtccagcctcagcagcgccgttgccgttcgatctgaacgtgccggacccggcggccgacgacatggactggcgctgcgacacgctgctccgcctctagccgccgcagggccgcaaccactcctccccagactggtgcccccaggatactcgctcgcttcgtgtggccgacgctgatccggcggaacggagcggagcaatgcgtgcgtgcgtaccccaccgccatgaagtgctatcgtgctattttgctattctctccatagaaattgataattttagtctctctcttttttttttaccactgccaagactcggtaattactctgtgataatgtgaataactcattatgtaatccgtggggagtggagggagcctggtctcgcgaaaccttcctgtctcctcctgctgtgtgtgtatctgtagcagcagcagcagcagcacgatgtaatactgtctgtcttgctgtaattctcaagagataatggaattaagagtgatttacagaaaaaaaaaaaaaaaaaaaaaaaaaaaaaaaaaaaaaaaaaaaaaaaaaaaaaaaaaaaaaaaaaaaggccgctcggaaaaaaaaacttccgtcgttcaatggggaaaaggggggttgaacctttaattgaaatttttttgctgggtttccgggcnaaaaaaaaaaaaaaaaaaanaccnnnaaccccggcggggaaaaaaatcttccctttttcattggccaaatgggggaaaaaacttttatagaaatttttttgtcgggttaccccccccgttcaaaattaaaa

SEQ ID NO: 413 - DNA, 537 bp, Zea mays
  unsure (1)..(537): unsure at all n locations
  Clone ID: TF_ZmC3662_2
agtggttggagtaggtcgccgaggaggaggaggaggacaaggcacaacaagccgcacgagaaggcaggcagggcagggcagggcagggcagaggggaattcgaaagaggggaggaggagaagaagcgcgtggaggagcgggatgcggcgggcgaggctgccgccggtcccagtcccgacggcgccgggggacgcggggccggaggtgaagtaccgcggggtgaggcggcggccgtcggggcggtacgcggccgagatccgggacccggccaggaagaccccgatctggctgggcacgttcgactcggccgaggccgcggcccgcgcctacgacgccgcagccaggaccatccgcggcgccgccgcgcggaccaacttcccctccgcgcccacctccgccgcggtcgcgccgccgccgccgctgccactccccgcgtcaaccgccgccgcggcgggcgcggcgacgtccagcctcagcagcaccgtggagtcctggagcggcggcggcggcggcggcgcgcccgccgggatccnccgc

SEQ ID NO: 414 - DNA, 1889 bp, Zea mays
  Clone ID: TF_21208780
gcacgagccgcctcccaactcccaagtcccacccccactccctcgctcaccagaggaactagcggccaggcaaagccgagccgcaaccgcgaagatcttgcgtggcctccttttcccagctcgtcactgtgccgctcgtgtccttcactcccggtccgcccaaccaataatccatcgatccatccaccaccaccaccccgctgcggcgatgtgcggcggcgccatcctctcgggtttcatcccgccgtccggggtggcggcggcggcggcggcggccaagaagcagcagcagcagcagcagcggtgccgtgtgactgcggacctgctatggccggggcccggcagtaagggagctccccaggacaaggaggaggacttcgaggccgacttccgcgagttcgagcgcggcctcggcgaggatgacgtggacagcgccggcgaaggcggcgaccccgaggtccaggagcttcctccgccggagccgacgaggtttgccttcgccaccgcggccaaggcagcagttgatggcgtgatgacgacgactccaaaggatgtgcaaggagatagagcagtaaaaaagcgcggccggaagaaccagtacaggggaatcaggcagcggccttggggcaaatgggcagctgagatcagggaccccaacaagggcgtccgcgtctggctcggaacctacaacaccgccgaggaggcagctagggcatacgacgccgaagctcgcaagatccgcggcaagaaagcgaaggtgaatttccccgatgacgacgcgacaggcactcgtcacaggccaacgaacgccgcgaacgcagcgaggctagtagctccacccccacccccgaaggcctgcgccgatgagatgtttaacaacctgaagaacgacgacggcgacaacaacaacaacgatgatctgtttgcgatgtttgcgttcggtgacaataagaagaaggttcctgcagcgaagccagccgccgacgaggttggcagtggcagtggcagcttcctcgtccctgcgcctgcggtggcggcggtgcccggtaacaagaggaggtcgtccgcgaccaacattatgctctccgtctccgacgaccagagcagcaactcctacggctccggctcctccgccgacttggtggggtcgtggtcgtgggacgacgacgacgccgccgccgccgccgccgccgccgccatgacctcggtcttcgctcccgataacgccgtgctgccggcggcgtcttactcttacatgcaaggcggagcgccgaagagaatgaggaggagctacggcggcgcgccgcccagcctcgcacatgacgcggccatgcctggctttggccttgataaagtgagctaccactaccaggcgttgcctccttattacgtcgggagcagcaacgcgtcggtgggcaacctcggtcttctgcagcaggctgatgatgctccagctccacaggatggggcgagcgccggggatatctggagcctcgacgagctgctcatgctggcagcagctggtgcttattgagaaccgcaagaaaaaaaaaatgtgttggcgctgctagctggagacgagacgagagggcgagaggcagttgcatccgccatccgctatcgttttgtctctcctatatctagtatatatatgcttctggcagtcgaactctatggcaatgcgtgtgtatagtgtgttgctgccgtctatgattggaagcgagctcgagactggttcaataattcacctttgcctaccgtcgtaccgccggcctgctggactgtagtgtgcgtactgcatatatatgccatagttatgtatgcactcctcctatatatactatatattattatgaaaaaaaaaaaaaaaaaaactcgagacctcgtgc

SEQ ID NO: 415 - DNA, 663 bp, Zea mays
  unsure (1)..(663): unsure at all n locations
  Clone ID: TF_LIB5023-004-R1-XP1-G5
gccggccgggccgggatcgaactgcttgcttcagccttcaatctctgcgctgtgctgtgccccgcgaattgtttacgctcgctctcgagatctctctctagattctctcggctaccctcttctctctgtctcctgcaagaacccatggcggctacgacgatagattggcacgcccgcaacaacgccgcgcttcccgccgccatgtatggcgtggccgtgccggacagcaaggagctcgtgcgcgcgcttattgctccgccgatgcagcaggccccgaccatctcgttcgcgtacccctgctccggcgtggagcagcagagcgcggcgggctcgtttctgggtgccggcggtggtggcctgacccccgcgcagatcctccaggtgcagtcgcggctccagttcctgcgccggccggcgggggccgcggtcgccacccagccgatgaagcggcagggcgtgccgctgccgcaggcgccggcggtgtccaagctgtaccgcggcgtccggcagcggcattgggggaagtggggtggcgnagatccgcctgccgcgaaaccgcacccgcctctggctcggcaccttcgacaccgccgaggaagctgcgctcgcctacgacagcgccgcgttccgcctccgcgggggactcgccaggctcaacttccc

SEQ ID NO: 416 - DNA, 543 bp, Zea mays
  Clone ID: TF_ZmC27868_1
gacccacgcgtccgcccacgcgtccgagcagcgaaggtagccacaacatccactcgactgactactcgagagctaagaaactgttcaacaggtgatccagaacaagatgtgtccaaccaagaaggagatgagtgccgagtcgtcgggctcggcgagcagctggacttcggcctcgacctcgacctcgccggagcaccagaccgtgtggacgtcgccgccgaagcggcccgcggggcggaccaagttccgcgagacgcggcaccccgtgttccgtggcgtccggcgccgcggcagcgccgggcggtgggtgtgcgaggtgcgcgtgcccgggaggcgcgggtgcaggctctggctcggcacgttcgacgccgccgaggccgccgcgcgcgcgcacgacgccgccatgctcgccatcgccggcgcgagcgcgtgcctcaacttcgccgactccgcgtggctgctcgcggtccccgcctcgtacgccagccttgccgaggtccgccgtgcggtcgccgaggccgtggaggactttcagcgccgcga

SEQ ID NO: 417 - DNA, 523 bp, Zea mays
  Clone ID: TF_ZmC28357_4
ataccgccgaaccaatccaacgtccgcagaaccacactcccgtcgagggggaggcgtcgacttcccatagtttccattccacttcgatcctaatcctatcctccccaaacactccaccaagaaccttttcccccctccaatagtccaagttactcggaggaatccatgtgcggcggtgcaatcatcttggactacatcccggcgcggcgccgggtgtccgccgccgacttctggcctgactccgaagccgacgccgaggactccgactcgcacgcccctgaccctgagagagccccgcgcccgcgcgggaaggcgaagcgtgggcgcaagaaccagtaccgcggcatccggcagcggccgtggggcaagtgggcggcggagatccgcgaccccgtgaagggcgtgcgcgtctggctcggtacctaccccaccgccgtggccgccgcgcgcgcgtacgaccgcgctgtcaggcgcatctggggcgcctatgctgaggtcttcttccccgtcgggacctcctcct

SEQ ID NO: 418 - DNA, 740 bp, Zea mays
  unsure (1)..(740): unsure at all n locations
  Clone ID: TF_LIB4763-018-R1-K2-F11
taccaatctaccacctccccaactccgcctcccaactcccaagtcccacccccactccctcgctcaccagaggaactagcggccaggcaaagccgagccgcaaccgcgaagatcttgcgtggcctccttttcccagctcgtcactgtgccgctcgtgtccttcactcccggtccgcccaaccaataatccatcgatccatccaccaccaccaccccgctgcggcgatgtgcggcggcgccatcctctcgggtttcatcccgccgtccggggtggcggcggcggcggcggcggcggccaagaagaagcagcagcagcggtgccgtgtgactgcggacctgctatggccggggcccggcagtaagggagctccccaggacaaggaggaggacttcgaggccgacttccgcgagttcgagcgcggcctcggcgaggatgacgtggacagcgccggcgaaggcggcgaccccgaggtccaggagcttcctccgccggagccgacgaggtttgccttcgccaccgcggccaaggcagcagttgatggcgtgatgacgacgactccaaaggatgtgcaaggagatagagcagtaaaaaagcgcggccggaaggggaccccaacaagggcgtncgcgtctggctcggaacctacaacaccgccgaggaggcagctagggcatacgacgccgaagctcgcaagatccgcgggaagaaagcgaaggggaatttccccgatgacgacgcg

SEQ ID NO: 419 - DNA, 346 bp, Zea mays
  Clone ID: TF_LIB3356-035-Q5-K1-A6
ccaagttccgcggcgtccggaggcggccgtggggcaagttcgccgcggagatccgtgacccgtggcgcggcgtgcgcgtgtggctcggcaccttcgacaccgcggaggaggccgcccgcgtctacgacaccgccgccatccagctccgcggggccaacgccaccaccaacttctccgccgccgctaactccggctccagggccggccagcgggacccggcgacccccggctacgagtccggcacggagtcctcgccggcggcgtcgtcgccgacgtccgtgctccgcaaggtcccctccctgtcctccctcgccgaggacgactcctgcgcggccccgtgcgagcc

SEQ ID NO: 420 - DNA, 515 bp, Zea mays
  Clone ID: TF_ZmC103_1
ccggccgggaccggaagcggggcaagacagggctacagcctacacgagcacggggaccggggaggagaggaggaaccgaagcggaaaagaagatcaaaaaatcggggagaaaccagaactggagagaagaaaataaataaatttatggccaaaccctagccgagacccgccccgcttgcgctctccgccgagcgccccaccccctctccgtccgcgatgcgccgggcgaagccgccgccgcagcagccctcgccgtcgccggagattcggtaccgcggcgtgcggaggcggccgtcggggcgctacgccgccgagatccgggacccggccaagaagaccccgatctggctcggcacctacgactgcgccgaggccgccgcgcacgcctacgacgccgctgcccgatctctccgcgggcccaccgcccgcaccaacttccccagcgctgcggtccgtgcgccgcggcacagggctccctccgcctccgccgcagctcccacggcgccggcggccgc

SEQ ID NO: 421 - DNA, 730 bp, Zea mays
  Clone ID: TF_LIB4978-024-A1-K1-G5
atcttctcttgctgtttgcctgtgcccctctccctccccccagcatgatgcccgtagcccccctcccccggtgccatggtgccctcgcctccgcccccgagcattgtccggtcccgtcccccggccctcgcccgagatcgtcgccgagcgcccacccctcattcccgtaccctcgcccaagatcgcggatctacgcccgatgtgggcgtggggctgcgtccgagatcgcggatctacgcccgatgtgccctcgcccgagatctcccctcgccggtcccgcagccgcgtcccggcggcgctcatcgtgttcgcgctcgggctggtgctctgcttcgtgcgtgacccatcgattctgtagggccttcgcttcgggccgacgcctctacagctcgtcgggatcacctgggacgatttcaagatcgggttctgtgtatctaggtggacatgataaagaagagaaagctgccagggcttacgatttagctgctctcaagtactggggaactacaacgactacaaattttccaatcagcaactatgagaaggacctagaagagatgaataatatgtcacgacaagaatatgttgtgtcacttagaaggcacgcgcggtcaaaatcaagatttcatgaaaagcagtggattttctcgtggtgcatcgatttaccaaggtgttaccagattagcagcctcattgccttatggtggaatgaactctgggtcgctctctc

SEQ ID NO: 422 - DNA, 532 bp, Zea mays
  Clone ID: TF_LIB3060-069-Q1-N6-H3
gtgcagggtgacgcctctgtacctggagctgcctctcgagaagccggtgctctgacggcgcaggacgtgcacgaactcctccttggacaggctccccatctgcttcatgtcgtcctcgtagtcgctgaggttgaagttgatgtcggcgtcgacgccgcggaacttgatcgccgcccggtcgtacgccctgcgagttccaggagccagagactcgttaatcaatcaattcggtcagagactcacatgacgaagaattctgggcgtccagtccagtgcgtgccttgcagcggcgtgagcggtgtcgaatccacctaggtacacctgcttgccgcaatcccagatgtgggactcccagcggcctgtgcggcggtagaaggtgacgccgcggtactgcgagctgcgggagcgcgggccgcggcggctcttcttggccggcggcggcgcggcgtgtgggtgcggcacgatcctggggcccggcgcctgttgctgctgcaggtcggcgcggaagaagccgagctcggcccaatgccgc

SEQ ID NO: 423 - DNA, 506 bp, Zea mays
  Clone ID: TF_18649690
cgttgctgtcgggtgaagaacccaagcagcaatggcgttctcacggcggcggccgccttttccgacagcaaggccatgcgggagagcggcaaggcggcggcggcgaggccgtacaagggggtgcggatgcggagctgggggtcgtgggtgtcggagatcagggcgcccaaccagaagcgccggatctggctcggctcctacgccactcccgaggccgcggcgcgcgcctacgacgccgcgctgctgtgcctcaagggctccgacgccgtcctcaacttcccttcctcgtccgcgtcctcgactcaccggcgtgctgatgacagcagcggcggccgcccggacgacgacgacccgggtgccagcggcggcatgtcgccgaggtccatccagcgcgccgcggccgcggctgccgcggcgttcggcgacgccgccggcatcggcgccagcgcgacgacgacgccgacgcctgcctcgctgtcgacgcagggcagcaccgatcacgccca

SEQ ID NO: 424 - DNA, 933 bp, Zea mays
  Clone ID: TF_ZmC653806_1
ctcgagatggagctccacttccaagcgcagccaccagtgttccagctcgagaactacagcagcagcagcagctactactactaccagcagcaagaggcggcggctcaggccaagccgtccaagccacggggccggaagaagggcagcaacaaccacagcaagttcgtcggcgtccggcagcgcccgtcgggccggtgggtggcggagatcaaggacaccacgcagaagatccgcatgtggctcggcaccttcgagaccgccgaggccgcggccaaggcctacgacgaggccgcccgcctcctccgcggcaccgacgcccgcaccaacttcgcgccgcgcatctctcccgactgcccgctcgccgtccgcatccgcggactcctccaccacaagaagatcaagaaggccaaggccgccgccgcagccgccaagcagcaggcgtcgtcgagctcccctgcatccaccacaagcaacagcaacagcaatagtcatagcacgaatagtgctcgtggtggtggctctagcatcaccaccaccaccaccagcagcagcagcagctccagctccagcagcgcagtcagctgcgacgacgacatggccacgcagggcggcggcaccggcgcactggacgccggcgaggtgtaccggccggggttcgccaccgcgggcaccgaggaggagttcgactcttggatgttcgactcggcgttcccggcgctggacagcttcgcggccgtcgacagcgccgtcccagctgctggcaccacggaggaaccgggcgccgagatggccgagttcgagcggatcaaggtggagcggcgcatctcggcgtcgctgtacgccatgaacggcctgcaggagtacttcgaccgggtgctcgacgcctccgcctgcgactcgctctgggacctgtctccgctctgccaccattag

SEQ ID NO: 425 - DNA, 406 bp, Zea mays
  Clone ID: TF_ZmC25962_2
gagctactagtcggcggccgcagcagtgaagatggaggcggagcaggcggcgatggcgagcgcggctgcgccgcagctggggtcggcgcaccagcaccagcaccagcaccagcagatgcagccgcggcggcagtaccgcggcgtgcgcatgcgcaagtggggcaagtgggtggcggagatccgggagccgcacaagcgcacgcgcatctggctggggtcctacgccacggccgtggcggcggcgcgcgcctacgacacggccgtgttctacctgcgcggccggtcggcgcggctcaactttcccgacgagatcccgtcgctggcgccgtcggagggcgagggcgacggcgacggcggagagcccgcgcgcgaccccgtcgacagcggcggctgtggcacgcttgcc

SEQ ID NO: 426 - DNA, 936 bp, Zea mays
  Clone ID: TF_ZmC3836_1
tcgcgggacgacgcacgcgtccggcgagatcgaggcagtgcgcacgccgtgcagccgtgcaggcctctcctccactcaaccgcgcgtcatggccatgttgcgcgagcatctcgacctcatccgcgctcacctcctcgacgacaaccacgacgccgtcagctccgatgactcggcgccatcgccatccccatcgccgccggggcgtaggccgctgccagcgctttccgtctcgctgcccccgaggccggcagtcgtcctgcagcagcagcacctgagggcggcggcgccgccgttgcagattcctcagcaggagcagcactgctgcccggaacccgaggaggacgatttccggcggtaccgcggcgtgcggcagcggccgtggggcaagtacgcggccgagattcgggacccggcgcggaagggcgcgcgcgtgtggctgggcacctacgacaccgccgtggaggccgctcgtgcctacgaccgcgccgcgttccgcctgcgcgggtccaaggccatcctcaacttccctaacgaggtcgcgttaagcaccgctgcatggtgggcgacgcctgctcctcctcctcagcccagcgcgaccgtggccggtaacaagagggcgaggtcgccgcaggagcaggacgctaggtgcatggttagggaggtgaagaaggagcggattcaggagcccgcaagcggaggggcggactacttctgggaggatgagtcgctgaagggggcgatctgcagcctgccgccgctctcaccgttgtcgccgcacccgcacctggccgtgccgcagctctacgtcagctgactgcctgacttgatgtcgtagcaagacagggacggtggtcttactcttacctgatgatagtcttctgagttctttgatatgctagaggagtatagctccaaatattctttcgttctttattt

SEQ ID NO: 427 - DNA, 1357 bp, Zea mays
  Clone ID: TF_ZmC5658_1
gttgatacatactaccttccctttccagcctcggctccgtccgtccccaatctcccctttcgtcttctcttcccgctcccgtcccgaaattagcccaccgattagcttgcttgccctagcagatcgaagccgtagccctagccgaggagcgcccatggccgctgcgatcgtggcctgaggcggcggggctcttcccatggggtgaggggatggaccctagcctgaaggaggaggtgatgaaggcggtggaggaggcgaggtccgcggcggcgccgcggtgccgggtggtgcggatcatcgtgcacgacgaggacgccaccgactcgtcttccagcgacgacgagggagaggaggcgggggagcgcgccgcggcgcacccggccgcggcgccggcggggagcgtgaagcgcagccgcgtgctgctccagtccgctgggtgcggggcggaggaggacggcgagggggccaggttcacgggcgtgcggcggcggccgtggggccggtgggcggcggagattcgcgacccgctgctccgccgccgcgtctggctcggcactttcgacaccgccgaggaggccgcggcggcctacgtcgcagcgcgcctccgcatccgcgggcccagcaactcgctccctccgcccgagcaccgcccggccttgcccccacgtcccccgccgccacctcagcagcgggagaagaagctgccgctgccgccgccgccgccgcctctccttccgcttccgccgaagaagcagcagtatccgccaccgcctctgcttccgccgaagaagcagctgtatccgccaccgcttcccctcctcccaccaaagaagcagcagcagcatcaccatcacccgtcaccgcctctgcccacgcttccgccgaagaagcggctgccgtcgccgcctctgctgcgcgaaagcaagaagcagtgcgtcgcctcctccccagcggagccgcgtttcatgccgctgccggtgtgggcgctgatgtccggctccgggaagcgcaagaagcggtcgggctgtggcgggcgcgtccccgccctccacacccccgccgccgaggagacggggcgcgcctgagaaggctgagacgactgggacctccctgcttctggtatccatcccctaccgcttcttgatcatgccatgccaatctgaattgccgctcaatcggtgctgatgtgaagagcctgtaacctctctgattcatgaactgatgaatttgtgtacatatgctgctgctgctgctgctggaaccgcagcgggtgatgaactgatctgtaaaacccgacgtattattcatatgtaataaataagtatctgttgacaatttcaaaaaaaaaaaagcggcc

SEQ ID NO: 428 - DNA, 1042 bp, Zea mays
  Clone ID: TF_ZmC8439_3
ccggccgggccgggtgtcttccttcccctgaaaacccacacgctcgcgcctccgcgaagaaaaacaccgaggcccatggcgccgagaacgtcagagagagcgatgacatcggcggccgcggggctcgcgcgtggcgccggcccgcactacagaggcgtcaggaagcggccgtggggccggtacgccgcggagatccgcgacccggccaagaagagccgcgtgtggctcggcacgttcgacacgcccgaggacgccgcgcgggcctacgacgccgccgcgcgcgagtaccgcggcgccaaggccaagaccaacttctccttccctgcgtgcctgccgctcgccgccgcggacgtggccggcgcctgccggagcggcaacagcagcagcaccaccaccaccaccaccgtcgactccttcggcggcgacgtgcaggcgccgcccatgcaggccatgccgctcccaccgtccttctgcgccagcggcgccgtacgcttccctttcagcagctaccccgtgacgcacccgtattacttcttcgggcaggccgcagcagggtgccatatgctgaagctgccaccgacgacggtgactgtggctcagagcgactcacactcctcgtcggtcgcctctctgtcggcgtcgccgtcgccgtcgccgccggccggcgtgtcagcgacgagatccgccgcgtttgatctcgacctaaactgcccaccgccggccgaggcggaggcatagtcgccggagttttgctgaatgactgcctgtagtttctttcgtcttttacccgtagagagaaaatcggtaggcttagggcccctttgtattcacacggtgtcacgggcacacccacctccgaactctggtactctgatctttagagtgaaactacgaacatgtggtttaaatagttcaaagttaactctatgatttatggttcaaagttaactctatgatttatagccgtttctcgctgttgcagatgttcgtacttgtacaactataatctataaatacaaaatactatagaagcattagttgg

SEQ ID NO: 429 - DNA, 1524 bp, Zea mays
  Clone ID: TF_ZmC3465_6
aaaaggtccggttcaagaggctcttctgttgggtttttttattatccttaagagaagcttgttcttgggttagggagtttgggttctcacctcataacacctctcctaggaggaacagagatccagagaaccttttttctcttctggatccttgccgccttttggccttcgaaagggttgttttgcaataccctctctctgtttttttcttcttcgcacaaacccacctcgtttctctacttttattgaggaacagagctggttttccaaaacaaattctgctttgattttctataaagaaaacctctcagcctctttcttctagctccatccaagctttagtcctaatggccgcagccatcgacatgcacaagaacaccaataccaccgcacatccatctccacggtgaggcttgagcgatccgagcaaaaaaaatcatgcgcgacgcagcgacgcagctacgccacctcgcctcttcccactcccgccgccgcctcctcctcgcagcttccgccgctctactcgtcgccttatgcggcgccgtgcatggccggtcagatgggcctgaaccagctcggcccggcccagatccagcagatccaggcccagttcatgttccagcagcagcagcagcagcagaggggcctgcacgcggcgttcctgggcccgcgggcgcagccgatgaagcagtcagggtcgccgtcgccgccgccgccgctggcgccggcgcagtcgaagctgtaccgcggcgtgcggcagcgccactggggcaagtgggtggcggagatccggctcccgaagaaccgcacgcggctgtggctcggcaccttcgacaccgtggaggacgcggcgctcgcctacgacaaggcggtcttccgtctccgcggcgacacggtgcgcctcaacttcccggtcctccggcgcggcggcgcgcacctcgccggcccgttgcacgcctccgtggacgccaagctgaccggcatctgccagtccctggcggagtccaagtaacggcggctcctccggcgacgagtcggccgggtcccccccggactcccccaagtgctcggcgtcggcgtcgacggagggggaggaggagtcgggctccgccggctcccctccttccccgacgctggcgccgcccgtgccggagatggcgaagctggacttcaccgaggcgccgtgggacgagacggagaccttccacctgcgcaagtacccgtcctgggagatcgactgggattccatcctctcgtgaacgatcaactacaactgctatagtagtagcagcagcaagattcagtcagtgtcagctcaatggtagctctgtgtaattttcgatttggggtttgcagtggcggtggctcgatggcattttagacatcggccatggcggctgcgagtagcaatgagtaaactagtagctagtacatcgtcgtccagtgttgtgatgcagcagtaagtatgtgctaatctcctggttgagctgccggttgttttttctcacggcacggccagtcgag

SEQ ID NO: 430 - DNA, 1598 bp, Zea mays
  Clone ID: TF_ZmC660_2
ggtaccctcgggttcggccgggagtccactccaccaccgttcatgcatgaccatggagagatctcaaccgcagcaccagcagtctcctccgtcgccgtcgtcctcctcgtcctgcgtctccgcggacaccgtcctcgtccctccgggaaagaggcggcggagggcggcgacagccaaggccaataagagggcccgcaaggacccctctgatcctcctcccgccgccggggagaggagctccgtatacagaggagtcaccaggcacaggtggacgggcaggttcgaggcgcatctctgggacaagcactacctcgccgcgctccacaacaagaagaaaggcaggcaagtctatctgggggcgtacgacggcgaggaggcagcggctcgtgcctatgaccttgcagctctcaagtactggggtcctgaggctctgctcaacttccctgtggaggattactccagcgagatgccggagatggaggcagcgtcccgggaggagtacctggcctccctccgccgcaggagcagcggcttctccaggggggtctccaagtacagaggcgtcgccaggcatcaccacgacgggagatgggaggcacggatcgggcgagttttagggaacaagtacctctacttgggaacattcgacactcaagaagaggcagccaaggcctatgatcttgcggccatcgaataccgaggtgccaatgctgtaaccaacttcgacatcagctgctacctggaccacccactgttcctggcgcagctccagcaggagcagccacaggtggtgccagcgctcgaccaagaacctcaggctgatcagagagaacctgaaaccacagcccaagagcctgtgtcaagccaagccaagacaccggcggatgacaatgcagagcctgatgacatcgcggagcccctcatcacggtcgacaacagcgtcgaggagagcttatggagtccttgcatggattatgagctagacaccatgtcgagatctaactttggcagctcgatcaacctgagcgagtggttcactgacgcagacttcgacagcgacttgggatgcctgttcgacgggcgctctgcagttgatggaggaagcaagggtggcgtaggtgtggcggatttcagtttgtttgaagcaggtgatggtcagctgaaggatgttctttcggatatggaagaggggatacaacctccaacgataatcagtgtgtgcaattgattctgagacctatgcgtggcgtgcgacaagtgtcctgtctttgggtatacttggtttgtccaatgccacggtgccactgctgcgagtcagctgaacttcttgtagaaagcacatggcagcttggcattagacaagtgtgttggtgttccttaattctttggatatgctttaggcattgactaaccttaagggttcgtcactgtctcgcttagcttagattagactaatcacatccttgaatctgaagtagttgtgcagtatcacagtttcacatggcaattctgccaatgcagcatagatttgttcgtttgaacagctgtaactgtaaccctatagctccagattaaggaacagtttgtttttcatccat

SEQ ID NO: 431 - DNA, 1933 bp, Zea mays
  unsure (1)..(1933): unsure at all n locations
  Clone ID: TF_ZmC3465_1
nnnnnnnnnnnnnnnnnnnnnnnnnnnnnnnnnnnnnnntttaacaacctaccaattgggtacctcgaggccggccgggagagaggcgcctcaactcaaccccacccccccacaagaacaacaagccacatcccatcccaactccacggtgaggtttgagcgatccgagcaaaaaaaatcaaccgaggcgcagcaacgcaggttcgttctctgaactctctggttcttttagcagcagggacgcgcagcacaagaaaggtccggttcaagaggctcttcttttgggtttattagaatcctcaaaggaagcgtgttcttgggttaggattttttttttctcacctcatcacacctctcctaggaggagcagagatccagagaaccttttttctcttctggattctcaccgcttcttttttttttctctgcacaaacacaccctcgtttctctacttttattgaggaacagggctgatttccaaactttttcctacccctgttttcataaacaagctccttttatttcttcccgttttaagttctgcccagcctcttcttctagctccatccaagctttctccatctagtagttccaatggccgcagccatagacatgtacaagtactgcaataccagcgcacaccttatcgcctcctcgtccccctcggatcaggagctcgcgaaagcactcgagccttttataacgagtgcttcctccccctaccatcgctactcgttggccccagattcttacatgcctacaccctcctcctacaccacctcgcctcttcccacccccacctcctcgcctttctcgcagcttccgccactctactcgtcgccttacgcggcttcgacggcgtcgggcgtggctgggccgatgggcctgaaccagctcggcccggcccagatccagcagatccaggcccagctcatgttccagcaccagcagcagaggggcctgcacgcggcgttcctgggcccgcgggcgcagccgatgaagcagtccgggtcgccgccggcgcagtcgaagctgtaccgcggcgtgcgccagcgccactggggcaagtgggtggcggagatccgcctccccaagaaccgcacgcggctgtggctcggcaccttcgacaccgccgagggcgcggcgctggcctacgacgaggcggccttccgcctccgcggcgacacggcgcgcctcaacttcccgtccctccgccgcggcggcggcgcgcgcctcgccggcccgctccacgcctccgtggacgccaagctcaccgccatctgccagtccctggcggggtccaagaacagctcgtccagcgacgagtcggccgcgtccctgccggactcccccaagtgctcagcgtcgacggagggggatgaggactcggcctccgccggctcccctccttccccgacgcaggcgccgcccgtgccggagatggcgaagctggacttcaccgaggcgccgtgggacgaaacggaggccttccacctgcgcaagtacccgtcctgggagatcgactgggattccatcctctcatgaacgatcaactacaactagtattttagtagtagtagcagcagcagcagcaaggttcagtcagtgatagctctgtgtaattttcgatttggggtttgcagctgcggtggatcgatggcattttagacatcggccatggcggctgtgttgtgatgcagaagtaaacgtacgtgctaatctcctggttgagctgccggttgttttttctcacggcacggccagtcgagaaagtcagtgtaatcccctgtcatgatctctctgttgcaacttaattaactcttctggcgtatgtatgtaaccatgtgtgttcatcttgaacgtatcgtgatgatgtgcgtctttttggtcaaaaaaaaaaaaaaaagtgtgcgcacttgtgatttgtgatct

SEQ ID NO: 432 - DNA, 1291 bp, Zea mays
  Clone ID: TF_ZmC74396_1
ctccagggaccagaactagggtttgcgaaatcgtgacgcgagcacttgaagattcgcgaaagacagcgcgaccgacccacggcgatggccaccgtccaccctcaatccccggcgggtcccacccatctcccgcaggaggagcgacacggggacgccccggtaccgcccgccgtctccggcgaacccgccgccgcagcggaggcgggcggcgagatcgccgcgctcgacaagcagctcgccgtcgtcggcggcggcgaggagaggaggccggccggggccggggccggggccccagcgcaggcgggggagggaagctggtggcggaggccatgcgcaagtacgctgccccgcggtcgtcgcgcttccacggcgtcaccaggctcaagtggagcggcaagtacgaggcgcacctttgggacaacaccagccaggtcgaaggccggaagcgcatgtggtcgcacgtgtacttaggcagctatgtcgatgaagagcaggctgcaaaggcacatgatttggctgcccttaaatattggggcacagggccaaacaccaaactgaacttcaatatttctgattatgagaaagaaattgaggttatgaagaccatgtcccaagatgaatttgtggcctacataaggagacaaagcagttgtttctcaagaggtacttcatcataccggggtgtaaccagacggaaggatggtaaatggcaagcaagaattggtaggatcggtgagagtagagacaccaaagacatttaccttgggacctttgaaactgaagaagaggcagcagaagcttatgacatcgcagcgatcgagcttcggggtgttcatgcagtcaccaactttgacattagtaattactgtgaagatggtttgagaaaattagaaggcccatcagaggtggctaagcttggaagtccgtcggaggttgtgaagctcgctgggcaatagatactagattagcaacgtgtaaattagtttctatttcgtttcttttgtcttcatattctctcccttttgtattcctggttttttttgccgttttgtgatttcctccttgccttattggcaagccagtatttacccgattcgaaaggacaatgtgatgttgtattttagcctcacagaaaggtattactaacctttgatgtcactgcagaagtcgacaccatgttagaaatttagttcattcgtcgatgagcatgtctagtgttattatataattgtaagctactgtttctaatgggggaggaatgaaaacagaacatgaacataagttgcattgt

SEQ ID NO: 433 - DNA, 933 bp, Zea mays
  Clone ID: TF_ZmC2532_1
tcgtccacctcgaacacaaactcaggcaaggcaaaaggaacccgcaccatccgaggctcaagcagggaagtgatcatcatcatcatcagaagaagatgtgcccaaccaagaaggggatgaccggagagccgagctcgccatgcagctcggcatcagcctcgaccttaccggagcaccaccagacggtgtggacgtcgccgccgaagcggccagcggggcggaccaagttccgggagacgcggcacccggtgttccgcggcgtccggcgccggggcagcgccgggcggtgggtgtgcgaggtgcgcgtgccggggaggcgcggctgcaggctctggctcggcaccttcgacacggccgaggcggcggcccgcgcgcacgacgccgccatgctcgccctcgccggcgcgggcgcctgctgcctcaacttcgccgactcggcctggctcctcgcggtcccggcctcgtgcgccagcctcgccgaggtccgccacgcggtcgcggacgccgtggacgacttcctgcgccatcagctggtcccggaggacgacgccctcgcggccacgccgtcgtcgccttccagcgaagacggcaacacctctgatggcggggagtcatcctctgattcctctccgcccaccggggcctcgccgttcgaatttgatgtgttcaacgacatgagctgggacctgcactacgcgagcttggcgcagggattgcttgtggagccaccgtccgcggtcacggcgttcatggacgaaggcttcgccgatgtgccgctctggagctactagagactgaaaatttccgtttctttccttggcctctggcgcctaattttggcagtgtaaaacggttacttattttggtaatgagatcgatcaagtttgcgaaacatgaaaacagaaaaaaaaaaaaaaaaaacccacgcggccg

SEQ ID NO: 434 - DNA, 1954 bp, Zea mays
  Clone ID: TF_ZmC6700_6
acctcgcctcctccgggctccggcccactccttccctccctcgctcaccgagagccagagccagtggggcagccaaagccgagccgcaaccgcaaagatctcgcgcggcctcctttccccagctcgcgtcactcactgtgccgctcgtgccatccaccctcggttcacccgacccaaccaacaatccatccgccaccagcaccccgctgcggcgatgtgcggcggcgccatcctctcgggtctcatcccgccgtccggggtgccggcggcggcagcggcggccaagaagaaacagcagcggcgtgcgacggcggacctgctgtggccggggcccggcaagaagggagcgccccgggaggaggacttcgaggccgacttccgcgagttcgagcgcggcctcggagaggatgacgtagacggggccggcgacgaggtccaggagcttgctctgccggagccggcgaggcttgccttcgccgccgcggttggggcgccgcgcactgcagttgacggcgtgatgactccaaaggatggtgaaggagacatgcctactaccgctaacaactcagcagcaaataagcgcaggcggaagaaccagtacaggggaatccggcggcggccctggggcaagtgggcggccgagatcagagaccccagcaagggcgtccgcgtctggctcggcacatacagcaccgccgaggaggcggccagggcgtacgacgccgaggctcgcaggatacgcgggatccatgtcaaggtcaatttcgccgtctgacgggctgctctcgacgacataaggcaacggctggtactggtagttcgtctcagggtcaaagccgcccggcatggccgcaccgtagccgtagctgctcctcgttctcttcgacaccggtccaccttgcgtgtaccatgctggctcttgtgacttggggtgggagtgggactgggacgatgacaccatgacctcagactacgcctcagtctttgctccagctgctcccagtaacgttgtgccagcatggtacacgcaaggtggaccggtgtcgaagagaacgaggagcagctacggctacggtgcggccatgccgggcggctttgaccctgagacgaactaccagtaccagccgttgccttatgtcgtcgagagcagcccgtcagacggcgcgtcgacggacgacatggactgccttcaaatgatgcgggctggtgatgttccacaggatggggcgagcagtggtggtggtggcggcgacggcggcgatatctggagccttgacgagctgctcatggccgctggcgcttactgagaaaagctatgtgcatcgcattcgcatgtgctagacggctacttgctgtgccgtgaatggagtgtttctcagcttcgttttgcttttaattttttgttatgccaggtctcctgcttgtgcttgtggtgatgatgcaggagagccatggtgggtactatgcttttgctgccagtggaactgtaagacaatgtttatatagtatctatactatgttggtgcgtcgatggttcatggttggttggaagcgagtttgagactgattcagtaatttaccttgtctaaaaaaaaaaaaaaaaaactcgagactagttctctcctcgtgcggagcaagcatgtgtatagggcatgcctgtgcagtggataatattgacacacctgtatttctctgcagcttgtttactgtgtaggtcttcggctattctcctagattgtgtgcctagaaggcattggccccattattagtactgatttgggtgtatatgtgactatgtcagctgttcacttattgctgtcctaattgttaagaagctatcatgcactagtgatttttcttagtttgtcataaaacaaaaaaaaaaaaaaaaagggcggccgccgactagtgagctcgtcgacccgggaattaattccggaccggtacctgcagg

SEQ ID NO: 435 - DNA, 1069 bp, Zea mays
  unsure (1)..(1069): unsure at all n locations
  Clone ID: TF_ZmC28197_2
cgggnccagcccttcttctacccccaaccctcccccaacaccacaccagcgcagcgcccgccctcacgtggccgactcccagctagcccctcacgcgctcgtcggcgccctgtcgagtcgagcccgcatctcgcccgatcgagagcgagcgcatccgcgcgccggggagagctttgctttcggtggtctgtaacgactcaacgacgacggcaggcggtagataaaggcgcgcgatgtgcgacgcggcgccgaggtacaggggcgtgcggaagcggccgtggggccggttcgcggcggagatccgggacccggcgaagcgcgcgcgcgtctggctcggcaccttcgactcggccgaggccgcggcgcgcgcctacgacgtggccgcgcgggccctgcgcggcccgctcgccaggaccaacttccccgcgctcgccaccacctcccgccgccccgcgcccacgtgcagctccggctccaccgtcgagtcctccagcgggccccgcgccggggaccccagggcaggcggcgcatcgcggccgtgctgctgcgaagccgcggcggcccccacggcaggcgccaccgccgtccaccgacgccgactgccacagcgactgcgcgtcgtcggcctccgtcgtggacgacggcgacgacgcgtccacggtccggtcgcgcgcgcgcccgtcgctcgatctcaacctcccggcgccgctcgacttggacggtggccacgacctcgggttctgcacggacctgcggctctgtctctgagcgatcggaatcggatccacggacgaggcggattctgctttgacttgtcgtgaacttgtagcagtagtgccatgtactacgcgatacgaatggcaatagaattggatgatggttccttttctttaacgctctccggattcattcagaggtcagtcagatcgtcgagagtttcagcctttttctcatgtcttgatctgatttgtatcttgctatcattctgtatgtactttgtacaccagaaaacatctaaaagggagatgttgacgaactaacacgaatctctaccgcaattctgagtttt

SEQ ID NO: 436 - DNA, 1719 bp, Zea mays
  unsure (1)..(1719): unsure at all n locations
  Clone ID: TF_ZmC660_3
cggccgggcccgccttgccgccagtcagattcaccaccggttcccctgacaaccgcgtccgcgctgcaccaccaccgttcatcgaggaggaggggggacggagaccacggacatggagagatctcaacggcagtctcctccgccaccgtcgccgtcctcctcctcgtcctccgtctccgcggacaccgtcctcgttcctcccggaaagaggcggagggcggcgacggccaaggccggcgccgagcctaataagaggatccgcaaggaccccgccgccgccgccgcggggaagaggagctccgtctacaggggagtcaccaggttcgtccatctgcaaacaagcatccaatcaggtgctgctgagcagtcaacgcacgcacacagcctggctgccgagcagcaggcatccaatcacgtagttcgtcgaagaacggttggttggtgcggntcctccatctccttttttttcttcaatctttggcgatggtggtccccttggcgccggtgatctgcatgtgcctgtgatctactgctggctgcatcacctcaatagtctacctgggggcgtatgacagcgaggaggcagctgctcgtgcctatgacctcgcagctctcaagtactggggtcctgagactctgctcaacttccctgtggaggattactccagcgagatgccggagatggaggccgtgtcccgggaggagtacctggcctccctccgccgcaggagcagcggcttctccaggggcgtctccaagtacagaggcgtcgccaggcatcaccacaacgggaggtgggaggcacggattgggcgagtctttgggaacaagtacctctacttgggaacatttgacactcaagaagaggcagccaaggcctatgaccttgcggccattgaataccgtggcgtcaatgctgtaaccaacttcgacatcagctgctacctggaccacccgctgttcctggcacagctccaacaggagccacaggtggtgccggcactcaaccaagaacctcaacctgatcagagcgaaaccggaactacagagcaagagccggagtcaagcgaagccaagacaccggatggcagtgcagaacccgatgagaacgcggtgcctgacgacaccgcggagcccctcaccacagtcgacgacagcatcgaagagggcttatggagcccttgcatggattacgagctagacaccatgtcgagaccaaactttggcagctcaatcaatctgagcgagtggttcgctgacgcagacttcgactgcaacatcggatgcctgttcgatgggtgttctgcggctgacgaaggaagcaaggatggtgtaggtctggcagatttcagtctgtttgaggcaggtgatgtccagctgaaggatgttctttcggatatggaagaggggatacaacctccagcgatgatcagtgtgtgcaactaattctggaacccgaggaggttttcgctttccaggtgtcctgtcttgggtaatccttgatctgtctaatgccacagtgccactgcaccagagcagctgagaactttcttgtagaaagcccatggcagtttggcgttagacaagtgtgtcgatgttctttaattctttgaatttgcccctaggctgcttggctaacgttaagggtttgtcattgtctcacttagcctagattcaactaatcacatcctgaatctgaagtggttgtgcttgtgcagt

SEQ ID NO: 437 - DNA, 1433 bp, Zea mays
  Clone ID: TF_ZmC8413_1
cgctgagctcgatcgggctactacatccatggcgaggaagcgcaaggcctccgactccgccgcgggtatcgacggcgtccactcgctgccaccaccgctggctctggcttcaacagacgcgtgtgcatgggcatcgtcgggcggtactagcatggccgcggtggctgaggcggcggcggcgcagcagcagcggcggggaaggaagcggttcgtgggtgtgcggcagcggccgtcggggcggtgggtggcggagataaaggacaccatccagaagatccgcgtgtggctaggcaccttcgacacggccgaggaagccgcccgcgcctacgacgaggccgcgtgcctcctccgcggcgccaacacgcgcaccaacttctggccgcgcccctcgccggcttcctccgtcgcagtagccgccgccgcgcatcccgcgccgcctcctccgacgccgccgccgctgccggggctgatggggtctccaacgcagccgccggctcttccgtccaaggtcaccaacctcctgctcctgcggctcagggcccgcaacaaccagcagcagctcctcctcaacgccaccccagctcggcagcaggaggccgcggcggcggcgctgctgcaggggccgctgtgcgcggaaccgtacggcggcggcgaggagtgcgccttccaagtcgacgacttcttgagctacgactgcggcagcgacgagaacagctcacaagaaatagaggacgaggaagaagaggaggaagaggaggaggaggaggaggaggagctggacttccagttcatggaccagcagaccgcgtcgccgggcgcggggtgcgagggcgggctctgctcgccgttcgaggtggtggcggcagagctcggcggcgcggtggaggccggcggcggcgagccggccacggccgttcaggagctgatgatgagcaggatggactacgagaggaagatctcggcgtcgctctacgcgctcagcggcgtctcggagtgcatcaagatgcgcctcggcgccgccgccggtggccacgccgtgcgtgatcagctctccgggctgagggaggcgtgccggaagaagcagcgagagatagttcagcagcagcacgagcaggaaccatcaatggatacagcagaggatgtcaagccgcctcgtgaggagcgttcacccggtgacggcgccccggaggcgacaagctcgtcgtctgaggcgagccatggtgacagtgacggcgacatgctgctgtggagctccctggacttggctcccatctgttgaatgagacatggttgatcagcttagagattggttgagtttgttattcgtgtacttcgttacgttcatggcagatcactaagatcagaaagccctggtgataacgtgcttacccatttgttttatctaaggaattcctagtaaattatagttcatc

SEQ ID NO: 438 - DNA, 876 bp, Zea mays
  Clone ID: TF_ZmC313467_1
ccggccgggataaatccttcttgacctccgccctgctacaactacagtctgttctgttgaaatggaacagggcgatcctactcccgccgcctctgcctgcaactgcgaccctgccgccgcaccacccgcgtggatcccgctccacgaccacgacgacacgctactacagcagctcgacgcaattctcctcggcatggacgacgacgacgttgccaccgccgacgaccgctgctgctccggctggctctcctcctcgccctcgccctcgccctcgtcctcctccgaggcgacgacaacggcgtcaccaccgccaagcacgcgggagcagcacaggcggcacccggcgaaagacgacaccgccttggcgggaggaggcgacgagaagcgggcggtgacgacggcggccttcatcggggtgcggaagcggccgtggggtaagttcgcggccgagatccgcgactcgacgcgcaagggcgcccgcgtgtggctcggcaccttcgacacccccgaggccgccgcgctggcctacgaccaggccgccctggccgcgcgcggcgccgccgccgtgctcaacttccccgtggagcgcgtggtggagtcgctgggcgcgctcgcgctcgccggcgccggctcccccgtcctcgcgctgaagcgccggcactccaagcgcacgcgcaggcgcaagccctccgccgtggcgacgaccgacggcgacggcaaagacacgatgatgaagcagccgcgacggcgacagcctgctgcggcgccgcgccaatgctctgggctgcccggcgccgtgccttcgtacaccaccgtggcggcggtgccgccgccaccgcagcagcatgcgacggcgcgcggccagagccacacgcg

SEQ ID NO: 439 - DNA, 1200 bp, Zea mays
  Clone ID: TF_ZmC2464_1
cattgggtacctcgaggccggccggggcactcaagccctgcccatcagcacaaccaccaccaccgcctggccgtcgtcacacgctcgcctccttccatggcgcccaggaacgctctccccgccgccagcgccgtggccaacggcatggtgatggagccgaggttccgcggcgtccggaagcgcccgtggggcaggttcgcggcggagatccgggacccggccaggaaggcgcgcgtgtggctcggcaccttcgacaccgccgaggccgcggcgcgcgcctacgacgccgccgcgctccacttccgcgggcccaaggccaagaccaacttccccgtcgcgttcgccgcgcttccgccgccgccgccgcccaagaagccggccgccgtgaccgtgagccccagcagcagcagcaccgtggagtcctcctcctcctcctcctcccgggactcgcccgccacgccgcccagggccgcgtctccgtcccagcaggccccgtcgctcgacctcagcctaggcggcacaccggccatggtggccgcccagccgttcctcttcctggacccgaggctcgcggtgaccgtggccgtgccggcgcccgtgccctaccggccgaccgcggtcgccgccggtgccaacaagcatgctgcggcatcctgccgtgaagaggagcagagcgacaccgggtcgtcgtcatccgtggtggacgcctccccggcggtcggcgtggggttcgacctcaacatgccgccgccggccgaggtggcgtaggtggagcgcccggtgacacgtatagatgtccaaacgggccacccggcacggacccggcccgaacccgtttcggcccggtacgaatagggccgggccaggcacggcccgttgatgcttcgggccgggtcgggctggcccacgtgcctagagacatgcccaaacccggcacgcacagggaaaaatcgtgccgggccggcccgttggcccggtgggcctcaacggaccgggccggacactggcccgaaccaacagtagaacggtatataaatacatatatttaacataattaatcatatataataacatattatttatatatattaagacaacaaaatatttatgtatgcattttatatttatgtatgcattttatatatgtttggccgcgtatttagtatttacatactatgagagaattaaatgtatttacat

SEQ ID NO: 440 - DNA, 1409 bp, Zea mays
  Clone ID: TF_ZmC28197_1
gacgtagagatcgacgctaacatatagctcaagtttacagtacaatgatgataacatggggtcttttttcgacgctgttacttgtcttctccctcgactcactgcgctgcagctaatatcatatcactgcttatctggcaccatctacagttctacacgtagtagcgcggggactccgttccggccaaaaaaaatcctaaggaaacgcggccgaggacgagagtgggccagcggggtcgaggaggtaaagaaaactaatggcagcgaaggagggaggcagtggggaaggtgggaagcggctgcccaaagccacctccaccaccaggccttcttctacccccatcccaacgcccaggccacaccagcgctgcgagctctctcctcgtagtcgtagcggagtcccagcccctcacgccctcccgatcgcgctcgtcggcgccctgtcgactcgagcccgcttctgggccgatcgacagcgagaggagcgagcgcagcggcgcgccgaggagagctctttcggtgctgtataacgacgacgacagcaggcggcagataacacataaaggcgcgcgatgtgcgacgcggcggccgtggcggctccgcggtacaggggcgtgcggaagcggccgtggggccggttcgcggcggagatccgggacccggcgaagcgcgcgcgcgtctggctcggcaccttcgactccgccgaggccgcggcgcgcgcctacgacgtggccgcgcgggccctgcgcggcccgctcgccaggaccaacttccccgcgctcacctcccgccctcccgccgccccgcgcccacgtgcagctccggctccaccgtcgagtcctccagcgggccccgcgccggggaccccagggccagggcggcgcatcgcggccgtgctgctgcgaagccgcggcccccacggcaggcgccaccgccgcccaccgacgccgactgccacagcgactgcgcgtcgtcggcctccgtcgtggacgacggcgacgacgcgtccacggtccggtcgcgcgcgcgcccgtcgctcgatctcaacctcccggcgccgctcgacttggacggtggccacgacctcgggttctgctcggacctgcggctctgtctctgagcgatcggatccacggacgaggcggattctgctttgacttgtcgtgagcttgtagcagtagtgccatgtactacgcgatacgaatgacaaattggcaatagaattgaatgatggttcctttttgttatcgtcgagagtttccgtccttttttcctcatgtcttgatctgatttgtatctttgctctcattctgtatgtactttgtaccccagaaaacatctaaaagggagttgttgacgaaaaaacatctaaagagagatgttggcgaactaacacgaatctctaccgc

SEQ ID NO: 441 - DNA, 642 bp, Zea mays
  unsure (1)..(642): unsure at all n locations
  Clone ID: TF_ZmC7732_3
ntagtataggccacggccacctacgctacgctcaggcccgtatatggcccagtgcaactgggccgacggaaccaggccaccaatatcagtaggtctccaattatgaaatctccatatacacgtggtccatatatgctggtccaggatatacttggcctccaaatttgtgcattacgattggaattctaggctttgtttcttccttccgtagttccgccaatctcgctagctgaaacgacgccgatctgggagtgcgccgccaccacaaacgctccatcgccagtcatcacgccatcgatgccgagctactatggggccgtgatctcgccgttgccgacgctttgacctttgccgcacctggacgttgcaaggtcgacgcaacaagccaatcgagactgcaggaaggcgcggatatggctgggcaccttcgagacggcggaggacgcggcgcgcgcctacgacgaggcggcgcggatcatgtgcgggccccgcgcgcgcaccaacttccccgcggacgccaacggcccgccgccgtcgttcctctccgcggcgctcgtcgacaagctgcaccggttcaacctggcgtccgtgcaggccgcgcagcggcagaaagaggcggcggcggcggcggcggcagcagca

SEQ ID NO: 442 - DNA, 833 bp, Zea mays
  Clone ID: TF_LIB5116-007-A1-PF1-B3
ctccctcccccactccgcccgcaaagctcccccgcctcctccttcactgtgccgcccgtgcttcccctccgctccccgcgccgatccaaagcccagaccctcgccttgatccgcatctcgccatgtgcggcggagccatcctcgcgggcttcatcccgccgtcggcggccgccgcggcggccaaggcggcggcagccaagaagcagcagcagcagcagcagcagcagcagcgcagcgtgacggcggactcgctctggccgggcctgcggaagaagccggccgaagaggaggacttcgaggccgacttccgcgacttcgagcgggactccaacgacgacgacgacgcggtcgaggaggtccccccaccgccggccacggcgggcttcgccttcgccgccgcggccgaggtcgcgctcccggctccgacccgcctagatgctattcaacatgatggacctgctgccaaatcagtgaagcgcgttcggaagaatcagtacagagggatccgccagcgtccctgggggaaatgggcagctgaaatccgtgaccctagcaagggtgtccgggtttggctcgggacatacgacactgctgaggaggcagccagggcatatgacgctgaagcccgcaagatccgtggcaagaaggccaaggtcaattttcctgaggaggctccaactgttcagaagtccaccctgaagccaactgctgtgaaatcagcaaagctggctccacctccgaagacctgcgaggatgagcccttcaatcacctgagcagaggagacaatgatttgttcgcgatgtttgcccttcatgacaagaagggttctgca

SEQ ID NO: 443 - DNA, 708 bp, Zea mays
  Clone ID: TF_LIB4767-056-R1-K1-D10
cattgggacctcgagccggcgggagctaccatctacacctccccactccgcctcccaactcccaagtcccacccccactccctcgctcaccagaggaactagcggccaggcaaagccgagccgcaaccgcgaagatcttgcgtggcctccttttcccagctcgtcactgtgccgctcgtgtccttcactcccggtccgcccaaccaataatccatcgatccatccaccaccaccaccccgctgcggcgatgtgcggcggcggcggccaagaagaagcagcagcagcggtgccgtgtgactgcggacctgctatggccggggcccggcagtaagggagctccccaggacaaggaggaggacttcgaggccgacttccgcgagttcgagcgcggcctcggcgaggatgacgtggacagcgccggcgaaggcggcgaccccgaggtccaggagcttcctccgccggagccgacgaggtttgccttcgccaccgcggccaaggcagcagttgatggcgtgatgacgacgactccaaaggatgtgcaaggagatagagcagtaaaaaagcgcggccggaagaaccagtacaggggaatcaggcagcgcccttggggcaaatgggcagctgagatcagggaccccaacaagggcgtccgcgtctggctcggaacctacaacaccgcccgaggaagcagctagggcatacgacgc

SEQ ID NO: 444 - DNA, 685 bp, Zea mays
  unsure (1)..(685): unsure at all n locations
  Clone ID: TF_LIB4977-007-R1-K1-C8
gcttcgcacagcaccgcttccacggcccccgggtgcagtgtgcccccctgccttgtctcgtagctctctaagaaagagccatggaagctgacgcactactccatgcgcccatgacttcctcttcctcctcttcttcctcctcctccgactccgtcggcggctcgtgcgtcgtcaatggcgcgcaggagctaccgtccaataccggcaagccgcacaagaacgtgaaacggaagagaaccgcgtccccgtccgctgctccaggtggcggcgtggcgccggcgccgcccgaggccgccatagcggacgacgactgcggcggccggcggcgcaagagggggagcgccggcaccaggcacccgacgttccgcggcgtgcgcatgcgcgtctggggcaagtgggtgtccgagatcagggagccgcgcaagaagtcgcgcatctggctcggcacgttcccgaccgccgagatggccgcgcgcgcccacgacgtggcggcgcttgccatcaagggccgcggcgcgcacctcaacttcccgcacctcgcgcacgacctccctcgcccggngtccacctcgcccgncgacatccaggnncgcgcagccaaggctgctgccgccgccgccgatgccgacgtanaggtagagcaatgcgagtcctcccatgcggtcgagacgccatcgtcgtcagc

SEQ ID NO: 445 - DNA, 1714 bp, Zea mays
  Clone ID: TF_ZmC203909_1
gcgcgcgccgcgccgcgccgccctcttcccccggctcctcgtgtttgtttctcttctcttcttatccgccgaaggagaaaaacacccaccagaaacccaggacgaggaagagtctgcggccgatcgtggatgtcgccaccgacgaacggcgccatctcgctcgcctacgcgccgtccatgatgctgggggcgggcgccctgacgaacccgccgctcctccccttcgacggcttcacggatgaggacttcctcgcctccgccgacgccgctctccttggcggggctgacaccgaccagaccctcctcctgctgccctcgtgccccggggcgaactgctgcggcggcagtagctccgaccagggtctcggagccctagcgtgtgaggtcacaaccgccggatccttctcgctcttgggccagcctgcgcctgggcaggtttcgtgggaggtgacgactgccgtcgctgcggaccgcaacaccttctcgcgcacgcgcgaccctgcgccctcaccaccaccgtccccggcgctgccgctcgtgcaaaccacctcccagtcccagaggacctccatctaccgcggggtgaccaggcacaggtggacagggcggtacgaggcgcacctgtgggacaacacgtgccgtaaggaaggtcagaagcgcaaggggcgccaagtgtttctgcacattccatcttttgcactttactcgattttggtgtatgcatctttcttcgacgccaagggtggctacgacaaagaagataaggctgcaagggcatatgacattgccgctctgaagtattggggtgataatgctactactaacttccctagagagaactacatcagagagattcaggatatgcagaacatgaacaggcgtgatgttgtagcatcactgaggaggaagagcagtggcttttctagaggagcatcaatctacagaggagtaacaaagcaccaccaacatggacgctggcaggcaagaatcggccgtgttgcagggaacaaggatctgtatcttggaactttcgcaaccgagcaagaggctgcagaggcgtacgacatcgcggcactgaagttcaggggcgagaatgccgtgaccaacttcgagcccagccggtacaacctgctagcaatcgctcaacgagacatccccatcctggggaggaagttgattcagaagccagctccggaggcagaagaccaggccgctctgagcgctcgttcgttctcccagtcccagcagtcgagcaacagcttgccaccgtatttcctcaccaacctcctgcagccgctgccgtcgcagcactcactagctcaggctctgccgagctacaacaacttggggttcggggagcccagcttgtactggccctgcccctgcggtgacccgggggagcagaaggtgcagcttggcagcaagctggaaatcgtggacggtctcgtgcagctggccaactctgctgcgaactgacagtgctatctgaaatgctggttgttttgcttgtgtggctcggggtcgggggtacgttcatgaaactgatagcctgagccctgaagatagcggggtataacatacattgtgccgtttgtttgtcgtattttggtgtatcgtattttggtgtacaaaggcatccaagagtctagtcaagctaactagatgatattatcgggtgtatgatctctctaccggaatggcttaaggcattcac

SEQ ID NO: 446 - DNA, 1218 bp, Zea mays
  Clone ID: TF_ZmC441_1
cgggcgcgtgggcacccacgccatcagccatcgcgttccgcatcgaaccagcacatcgcaagacaagcagcagcagccaccactgccatcacatggagtacgccgccgtcggctacggctacgggtacgggtacgacgagcgccaggagccggcggagtccgcggacggcggcggcggcggcgacgacgagtacgcgacggtgctgtcggcgccacccaagcggccggcggggcggaccaagttccgggagacgcggcaccccgtgtaccgcggcgtgcggcggcgcgggcccgcggggcgctgggtgtgcgaggtccgcgagcccaacaagaagtcgcgcatctggctcggcaccttcgccacccccgaggccgccgcgcgcgcgcacgacgtggccgcgctggccctgcggggccgcgccgcgtgcctcaacttcgccgactcggcgcgcctgctccaggtcgaccccgccacgctcgccacccccgacgacatccgccgcgccgccatccagctcgccgacgccgcctcgcagcaggatgagactgccgccgttgccgctgacgtggtcgcgccctcgcaggcggacgacgtcgccgccgccgccgccgccgccgcggcgatgtacggcggcggcatggagttcgaccactcgtattgctacgacgacgggatggtgagcgggagcagcgactgctggcaaagcggcgccggcgccggcggatggcatagcatcgtggacggcgacgacgacgacggcgccagcgacatgacgctctggagctactgagctgtagagtctgtctccagcgcaggaggttgggagaggagaccacgctctggagctactactggacagggaagaaagtgggggtgccgggagcgagttcgaatttgaattcagaaactctgtactggcactggcacacgcggggaacgcgccacgcaagggcgagcgctatttccctccctttttgggtgctgggagaataataaaaagaccaacaatgaaggcattagtactacactttgtgcgaacttgaattaggccttgttcgtttgtgccggtttggtgggtcggaacgatttctagtctgattaatttaggtcttattcgtttgtgtcggattggtgggtcggaacgatttctaaccggattacttctctaatttatataaactttattaccggaaaaaaaaaaaaaaaaactatatcat

SEQ ID NO: 447 - DNA, 496 bp, Zea mays
  Clone ID: TF_ZmC8692_1
cgcccatctccgggtccaagtcttctagctaagtctctagctcttacgggaccaagcggcaggcccgcccagcatccgcgtcgaccgcgcgcgcacactgcagtacgccggccgcgcgcacttgacgctgacaatgccggcggactccgacgacgtcgccagcccggcgtcgacgctgggcagcgtgcacaagaggggcgggggcgggggcgggggtgggaaaagcggcgggcacggaggcgggcggcggcgtccgggcccggcgtaccgcggcgtgcggatgcgggcgtgggggaagtgggtgtcggagatccgcgagccgcgcaagaagtcgcgcatctggctcggcaccttcccgacggccgagatggcggcgcgcgcccacgacgccgccgcgctggtcgtcaagggccgcggtgcggtgctcaacttccccgagatggcggcgcgcctgccgcgcccggcctccgccgcgccgcgggacgtgcaggccgcg

SEQ ID NO: 448 - DNA, 1043 bp, Zea mays
  Clone ID: TF_ZmC9628_2
gccgtgtccgtgtgcgcgacttgctagctagtgctgtgcacagtgtactcatctcatctctatctatccgcgcacgcaggaggagagcaggcggcccacgacgtgcagggcgcggcggccatggagggccactactcgcccacggcctccgccgccgaggcggccggagagcggcggttccgcggggtgcggcagcggccgtggggcaagtgggccgccgagatccgggacccgcacaaggcggcccgcgtctggctcggcacgttcgacaccgcggaggccgcggcgcgcgcctacgacgaggccgcgctccgcttccgcggcagccgcgccaagctcaacttccccgaggacgcgcgcctcaccacggcgccatccactgcgggcgcgggcggcggcgggatccacgacgacgatggccgtggcggcctcggcgggcggacgtcgacccagcaggaggccagcgccgccgtcgtctctgctgactacctgcagtaccagatgatgcttctgcagggggccgccaccagcggccaaggcagcagcagcagtcatggcggatatcctctgtactacgactatggcggccacggcggggctggcgctggcgctggcggtggtgccatgagcagtttttcgggctcctactcttttccggcctccacggttaccgtggcttttgtgccctcctctgctccgagatacgacgaggcggcgcagtggacaagctggccggagagtagtgctagtgcgtggagctatccggcgagcacgggttcttggtctgcttcaagccagtatccaccgtcaactcgtccacctcagtagtccatgctcaatgttttatttcataacacgttcgtggcctccctaagaagacatatagattgatgattttgttcaagatgcatgcttccgtgcaagatccaatagaaggttgcaatattgtgtttcttcttcgcttggtggtgttgaatcctgtatttgatcatgggataatgattttggttgcaacttccaaaaaaaaaaaaaaaaaggaaggt

SEQ ID NO: 449 - DNA, 326 bp, Zea mays
  Clone ID: TF_LIB3279-008-P1-K1-H11
gcgcaggctgaagaaccagtacagggcaatctctgctgcggccctggggcaagtgggcggccgggatcagagacccctgcaagggcgtccacttctggctcgccacatacaggacggttcattttggacgccgacggccggaggcacacggtcgcggtactcgtgagatgaaagccaacctaagtgctcgacacgatgctgcggcccaaagtgctcaaaatccaccttttgaatctactacatctgatatcaccatcgcatacaggctagctcctccaccttcaccacctaatttccgtgctgacgaggttgtcggtaacatggac

SEQ ID NO: 450 - DNA, 2047 bp, Zea mays
  Clone ID: TF_ZmC2239_1
gatacccttcaccctcctcgacgtcgcatctccctggcacgagctcccactgcactgctgctccgctgccgctaccctttccctctcccttctcgtcctcggtcctccccaacccatggccacggccaccaccacccactgccccttctcccaccacgctatttatcgcggctgcacgactcctgcccatcaggcgccatagagacgcgtgggaccgaagccgccgatcaagcgctgctcggggcggagcagcggccggcggtggtgagtgctggcagacaggccggcaggtcaggcagagtgaccagctggtgagtcgaagcttgagcggggagctggactttggcgggttccggcgggctccggagcggagatggtgctggatctcaatgtagcgtcgccggcggactcgggcacgtcgagctcgtccgtcctcaactccgcggacggcggcttccggttcggcctgctcgggagccccgtcgacgacgacgactgctccggtgagatggcgcctggcgcgtccacggggttcatgacgcggcagctcttcccgtccccgaccccgccggccgagccggagccggagccggtggcggcgccggtgccggtgtggcagccgcagcgcgccgaggatctcggcatggcccagaggccggtggcgccagcgaagaagaccaggcgcgggcctaggtcgcggagctcgcagtacaggggcgtcaccttctacaggaggacgggccgctgggaatcgcacatctgggattgcgggaagcaagtctacctaggtggttttgacactgcgcacgcagccgcgagggcatacgatcgagctgcgatcaagttccgcggcctcgacgctgacatcaacttcagtctgagcgactacgaggatgatttgaagcagatgaggaattggaccaaggaggagttcgtgcacatactccggcgccagagcacggggttcgcgaggggaagctccaagtaccgtggcgtgacgctgcacaagtgcggccgctgggaagctaggatggggcaacttcttggcaagaagtacatctatcttgggctctttgacagcgaagttgaggcggcaagggcttatgacagggctgcccttcgcttcaatgggagggaagctgttactaactttgagcctagctcctacaatgcaggagataataacctgcgtgacaccgaaaccgaggcaattgatgatggtgatgccattgatttggatttgcggatttcacagcctaatgtgcaagaccccaaaagggacaataccttagctggcctccagccaacatgtgattcccctgaatcttcaaatacgatggcttctcagccaatgagctcatcatccccttggcccgggtatcaccaaaacccagcagtgtcatttcaccatcagcgcttgtactcgtcagcttgtcatggcttctttccgaaccaccaggtccaggaaaggccggtggagcgaaggcctgagctgggcgcccagccattcccctcatgggcatggcaagcgcagggctcccctcacgtgccgttgcaccactctgcagcatcatcaggattctctaccgccgccggggccaacggcggcatgcccctgccgtctcacccgccggcgcagttcccgactactacaaacccgttcttcttcccctagaccgcttttgacatgacagcttgctgttccggctcagctctcggcgtctgggatggcagctggtcttgcgtgtggcgtctagcagctctggtgatggaagaaagtgattgtgttttgtgtgtgtgtgtgtgagagagagagagagccataataagaagcgacatggctggtctccctctggtatgtgcctgttaggatatgggatatctccatgcatggattgtttccgagacagtagtagtattttgttgtagtcgaccatgcgtgtacatcagtataactggatctttgaagagctgagattttatgactcaacaagcattgacataatggcatgcactccaggaccactaagcaaaaaaaaaaaaaaaa

SEQ ID NO: 451 - DNA, 663 bp, Zea mays
  Clone ID: TF_LIB4605-003-R1-N1-G8
aaagtttcgtccccatttcgctctcgcaagtcgccaagccaccgatttgtttacaggcgccggagctcccgacgacgactgagccatgtgcggcggcgcgatccttgccgagctccgcgagccggcgccgcgccggctcacggagcgggacatctggcagcagaagaagaagcccaagagtactttctccagagatggcttaagcaccatgactactgctggttatgatgcccctgcagcaaggttggccaaaaggaagaggaagaatcaatacaggggtatccgccagcgcccttggggtaagtgggctgctgagatcagagatccccagaagggcgttcgtgtttggcttggtactttcaatagtcccgaggaagctgcaagagcttatgatgctgaagcgcgcaggattcgtggcaagaaggccaaggttaactttcctgatgcaccagcagttggtcagaagtgccgttctagttcagcttctgctaaagcactcaagtcatgtgttgaacagaagccaattgtcaaaacagatatgaacacccttgccaacacaaatgcacccttctaccaatctgttaactacgcatccaacaatccatttgttccagcaatgaactctactgtttcttttgaggatcctatcatgaatctgcactc

SEQ ID NO: 452 - DNA, 805 bp, Zea mays
  Clone ID: TF_LIB5117-065-A1-PF1-F12
acctccgtagagtactactactcaactactccgtcactattagcctcgatcgatctccttcctctcttgctcagttaccttcttgtggtcgtcggtctgccgatatcgatccatccgcccgttgtgctgatgcgtatgtgtgtgcatgtgcaggtgagatggaggaggaggagcggggagcggccgccgagctggccgccatcgccggggccgggccgccgcccaagctcgaggacttcctcgggggcggcgccaacggcaaccacaacgggaggaataatagtgacgccggtagcggcgaccaggttgtgtctgcagcgaccgccgagatgtacgactcggagctcaagttcttggccgccggattcctgagcggcgctactggaaccacggcacccactatctccccggcggccgctcctcaggagcaggccgacccgaagatgccggtcccggcgccggagcagaagaaggccgtcgactccttcggccagaggacctccatctaccgtggcgtcacgcggtaccgttggacgggtagatacgaggcgcatctgtgggacaacagctgccggcgtgaaggccagagccgcaagggccgccaagtctacctcggtggctatgataaggaggagaaggcggcaagggcgtacgatctcgccgcgctgaagtactgggggtctagcaccaccaccaacttcccggttgccgactatgaaaaggaggtggaggagatgaagcacatgacacgccaggaggttgtagcttcactttagaggaagagcagtggattctctcgtggcgc

SEQ ID NO: 453 - DNA, 503 bp, Zea mays
  Clone ID: TF_LIB4738-100-Q1-K1-H9
ctagacgccacacaccacatcgcttctccacacgacctcgctgaaccggaagacccgcgcacacacgccacttgtgcaccatggcgccccgggtggcggacaagacgccattgccgctggccaccggcctgaagctgggcgtaggcggaggcatgggcctgggtccacactaccgaggcgtgaggaagcggccgtggggacgttacgccgcggagatccgcgacccagccaagaagagtcgcgtgtggctgggcacgtacgacacggccgaggaggccgccaaggcctacgacgtcgccgcccgcgagttccgcggcgccaaggccaagactaacttcccgttccccctcgccgtcgccgtcgccggcggtgctggtagccccagcagcgacagcaccaccgtggaatcgagctgcggcggcagcgggtgtggcgtcgaagcgccggctgtgcaggcggccatgccgctgacgccggccctcgacctcgatctcttccaccgg

SEQ ID NO: 454 - DNA, 561 bp, Zea mays
  unsure (1)..(561): unsure at all n locations
  Clone ID: TF_LIB3732-049-Q1-K6-F2
cccagcgtccgcggacgcgtgggcagcaacatcactgatcgccgtgcagcctggtacgtaccacacacacacacacatacagaagaagaagaacgtaccttgcgctacaaccccgtcgccgccgactacgccgatcgtgtccacgggaaccaagcaaagcaaagcaagcgacgcatcggaagaagccggagaccgaccgaccgaccgaccgagctagctacagctcatcagcccatggtgaagacggcgacggccacggcgacggcggcggcgaggcacggcggcgctaataagaggacgtacaagggcgtgcggatgcggagctggggctcctgggtgtggagggtgtccggncgccgggccagaagacgaggatctggctcggctcgcactccaccgccgaggccgcggcgcgcgcctacgacgccgcgctgctctgcctcaggggctgggccgccgcgccggacctcaacttgccgccccgccgcccgctcgcccacgggctncacccgctgccccccgccgacatgtcgaccaaggccatacagcgcgtggccgtcg

SEQ ID NO: 455 - DNA, 722 bp, Zea mays
  Clone ID: TF_LIB4740-070-R1-K1-H6
gccgggactgatccagagcttactacatagtacaccaagaaagttgcgttgcaaaccatcgtgtcgtcgatcgtgtctccaagagcaagcgacgacgacgtctgggaacgacgaagccgaagccggagagctatactatacttgtcatccagccagccaagccatcatggtgaagacggcggcgagcagcagcagcgacgacgccgccgccgccaagaggaggacgtacaagggcgtgcggatgcggagctggggctcgtgggtgtcggaggtgcgggcgcccggccagaagacgcggatatggctcggctcccacgccaccgccgaggccgcggtgcgcgcgcacgacgccgcgctgctctgcctccggggctcggcggccgacctcaacttcccgctccgcctcccgttcgacctgccccccgcggccaccatgtcgcccaaggccatccagcgcgtggccgccgccgctgccgccgctgccagcggcagcgcctcctcctgcggcggcttgcgcgcgccgcccttcgcgccaccagacgagaacagcggcaccagtgcctgcagcgacggcgacgccaccccggcgtcgagcaccaccagctcgcccaccagcgacttcaccccggcctggagcaccaccagcttgcccaccagccacgccgacgacgtctgctccccggagtgcaccgtcagcagtgccggcgacgaggactactaca

SEQ ID NO: 456 - DNA, 2006 bp, Zea mays
  Clone ID: TF_ZmC3711_1
gattgttgacctcgaggccggccgggacgtcccccgggagcagtagccccagcccccagtgccgcagttgcgctcagctatctctgctgagccgattagataaatccggcggaggaagagggaagaattatcgtgcgatatttcccccctcccactccctctctctctctctcgatttgcccgagaaatttttttggttgtttcccgcatcactctccactaggccgccgtctcccccgctggtgctcgtcgcttcctgcccaattcggcgccattcgcccggcgcactccctattaattccctgcctcggtagtcactggccgattgccacgtgaaatttcctgttccgttgcctttcgggtgcgcctgaagtacccacacgctactagggttcaatcgtcgtcagcaggcttacctctcaatcactgcggggcggcggctcgagagtttgtggacagttggcgaagagatagttaggtttttttttttgtctcccgtgtccgatggaggaatcggacttgggaggtaatctgggtaagcaaacggaagaggataaggctgcgggagaatcaggggatgagggtaagatcgagaggagccaatctatcaatctgaatagagtgccagcagttgctgtagaggcgatgagcacccagggaaactgtgagacgcacggtgcagcagtgccaggaactaaggatgcaggcacaggaaaggcagggcaatccagtggcgatcgacaggaggagaagttacccaagtgtgagcaggtcgactatggaagtgaagttgaaggctgcgcagatgatgagaaccctggcaagagggctgctttagttactttggttggaaatgaatactgcggcgacgaggatgagagagttcaagtgctcaccattgtcaagaaggacgagcatgcagatgacattgtcgaccgtattaatcctggcacagttgcagggtacagtgaagtgaagggtgctgtaggtgcttctgccgccacttctgcggtgcgacctgctggctcccgatcgtcaagtttccatggtgtgactaggcatagatggagtgggaaatatgaagctcatttgtgggacagttcttgcagagtagagggacgtagaaggaaagggaaacaagtttatctaggaagttatgataccgaggaaaaagcggccagggcttatgatgttgctgctattaaatactggggcgaaaataccagactgaactttccgatttcacaatacggcaaggagttggaggacataagggatttgtctcgagaggaatgtgtgacatacttgagaaggaggagcagctgcttttcaagaggagcttctatttatagaggagtgacaagaaggcagaaagacgggagatggcaagcacgcataggactggttgctggaactagagacatttacctgggaacattcaaaacagaggaagaagctgcagaggcttatgatattgctgccattgagatacgtggcaaaaacgctgtgaccaattttgaccgaagcaactatgtcgataagggtatgcactgtatagaaggcgaaggcttgaggctgcttgcatccaagccagaagaatgacttccaagttcaatgcagtgattgtcgatcgagcagatttggccagacgtatatgcagcttagttggtacatatacagataggagaaccggttgcagtttgtcaatattcctgctttacatgacttgggattacagttaaatcgacccgctagcaaaaaaaagtgtgcaaatgttagtagatttggccagacatatatgaagattttggggttgtatcataaggcctcgtaggatagatctttctgcaaatgttagcgaagccagtgtttatgttctgtttgctagattagcgttatcagtttgcacgttccccttttttttctgaataattgtccttgtatgatcttgagggaatgcgtttacctggtcgtttgccattcttttaaaaaaaaaaaaaaaaaac

SEQ ID NO: 457 - DNA, 1066 bp, Zea mays
  Clone ID: TF_ZmC184128_1
aattcccatccatcagtaacttggcgggactgcgggacatcgacgcatcccatatctataggcataatggagcactacgactcctatctatgcagcggcagcatgcatagctacggcggcgttggcggagccacggacgcggcgttggacgccggcggtgacgacatgcagcgcctgctcaacgcgctcatggacgacatggctgccgagtccgactccttctccgacgacatggaggcagcctcctccgagtcctcgtcctccgcctgctcggccaacagccagcaggaggccacccggcggccacagcagcaaccggacggtggccacagcaacggtagcaacaagagctccaagaagcagcatcagcagcagccgccggctccctacatcggcgtgcgcaagcgtccctggggcaagttcgcggccgagatccgcgactccacgcgcaagggcgcccgcgtctggctgggcaccttcgacagcccggaggccgccgcgatggcctacgaccaggccgccttctccgtgcgcggcgccgccgccgtgctcaactttcccgtggagcgcgtgcaggagtcgctgcgcgcgctggcgctctcttccgcctcctctgccgcgggctcccctgtcctggcgctcaagtgccgccactccatacgcaagcgctccccgaacaagaacaagaacaagaagaagcaggagcggcagcaacaggtggccgtggccgccgccgcaccacagcagccgccgtgccccaccagcgttgtggagctggaggacctgggcgccgattatctggacgagctcctccgggtgtcatccgagttccattggcaataacccatagcgaatggcggtcctgcgaggtgcaagcgatagcgaggttgatgggttggggatcgagttcagttgtcatcacaaatacagaatgcctgcagattgttgctctgctctgtccttgctcgccaattgcgaatcgacgacgagttgcaactcttctttaaaaaaaaaaaataaaaaaaaaaaaaaaaaaaaaaataaaaaaaaaaaaaaaaaataaaaa

SEQ ID NO: 458 - DNA, 566 bp, Zea mays
  Clone ID: TF_LIB3597-065-Q1-K6-E10
acttcgcactactcttacattaattttcaaaacgtactggttggtggtggtagtagctactagctactataaacgatggaccagatgctgggcaagcacctgcagatgccttccgtgactacgagcgccgcctgccagcagccgcagtcgccgccgccgtcgccgcagcagcagtaccggggcgtgcggaagcgcaagtggggcaagtgggtgtcggagatccggcagccgggcaccaagacgcgcatctggctcggcagcttcgagtcggccgagatggccgcggtggcgcacgacgtggcggcgctgcgcctgcggggccgcgacgcgcagctcaacttcccgggctgcgtcgcctggctgccgcgcccggcgacctcgcacgcgcgcgacgtccgcgccgcggcggccgaggccgcagaccgcgtgcgctgcgacccggcgctgctgctgctccagcaggcggcggcagcgcggtgccacgactacgaccacgaccacgagttcggggccgggccggcgccggtggtcgagctcgggagcgacgaggagttcgagctggacct

SEQ ID NO: 459 - DNA, 968 bp, Zea mays
  unsure (1)..(968): unsure at all n locations
  Clone ID: TF_ZmC220222_1
tttngcatgcagactgctagtgtaatgtaatttcaccaaaacaatacagatgagtgagacatgtgtcctggcaatgccgttaaaaaaccaagcagagcagggttgatgctagacatgatcaaacccgagacctaaacaaacaagtacctaaaaaccaagacagtgcaccactttaatcctttgatctgtgaagtacagagcaagcaagaacaggttgatcgagggagacaagacgagcagagccatcgcattatgaaatcagtatcgagtcccagtcgatctccagggaggggtacttgcgaaggtggaagctgtctgactcgtcccatggcgcttccgagaagtcgagcagctgcatctccggcaccacgtcggaagacccagtggaggacacgtcgccgtctgcagagaacgagctctctgagacggagcagcccggctcactcttgacgtgtgggctcaccgaggagaaggggctcggggtggctgtagtcgccgccgccggggcgtggctctggctctggccctgcggcagcggcgcgccgacgtccgcgccgctgcagatggcgtggagcttggcgtcgaccgcggcgtggagcggcgggccgaggtgctgcccgccgcgcctgagctcggggaagttgagcttggcggagtccccgcggaggcggaacgcggcgccgtcgtaggcgagcgcgatctcctcggcggtgtcgaaggtgccgagccagaggcgggtgcggttgcgcggcaggcggatctccgccacccacttgccccaatgccgctgccggacgccgcggtacagcttggacacccccgcccgcgcgggaaccggagcctgctgcggcacgccctgccgcttcatcggctgcgcggcgccgcccgctgccgccggccggcgcaggaaccggagccgcgactgcaccggaaaagctgcgccggggnccggacgctgggtcgaccgg

SEQ ID NO: 460 - DNA, 400 bp, Zea mays
  unsure (1)..(400): unsure at all n locations
  Clone ID: TF_LIB3062-015-Q1-K1-F11
gagctcgcacgcttggggcccggcggccgtgccgctggaggcacctggcgcggcggtgctggacgcgaacgacttccgcaagtaccgcggcgtgcggcagcggccctggggcaagttcgcggcggagatccgcgaccccaagaagcgggggtcccgcgtgtggctcggcacctacgacaccgccatcgaggccgcgcgcgcctacgaccgcgccgcgttccgcatgcgcggcgccaaggccatcctgaacttccccaacgaggtgggcacccgcggcgcggacttcctcgcgccgccgccgccgccgccgcatgccgcggcaacgtcccagaacaaacggaagctgatgcacgacgccgaggccacggncacggccggggccggagccggagccgagcca

SEQ ID NO: 461 - DNA, 767 bp, Zea mays
  Clone ID: TF_LIB4740-108-A1-K1-A6
ctcccacgatcaacagcagtccgcatcacgcaccccactccaccgcccgcaaccgcaagctcagattccctcccaccccaccccaccgtcccgctcactccagcccagcccgcgtccccacagcccagcgacagcgagcaccggctgcatccagccgccgcggcgggtcacggcgggccacctctggcccgagagcaagaagccgaggagggctgcagccggcaggaggagagcccccgtggagcaggagcaggaggaggatttcgaggccgacttcgaggagttcgaggtggagtccggcgagtcggagctcgagtccgaggacgagcccaagcccaagtccttcgccgcccccagcagcgcgctcgccagaggtggactaaacactggtgcagctggtgtcgatggccctgctgcaaattcagttaaaaggaagaggaagaaccagttcaggggtatccgccggcgcccgtggggcaaatgggctgctgagatcagagatcctcgcaagggcgtgcgcgtctggctcggtacattcaactctcccgaagaagctgccagagcttacgacgccgaggcacgcaggatccgcggcaagaaggctaaagtcaacttcccggatgaggttcctacggcggtttctcagaagcgccgtgctgctgagcttgcctctctgaaagcgcctaagatggacgttgaggaggagaagccgatcatcaagccggcagtgaacaatatgaccaactcaaacgcatatctctaccctg

SEQ ID NO: 462 - DNA, 2594 bp, Zea mays
  Clone ID: TF_ZmC1960_1
aggatatgatgaccctttccccagatgatcgacatgaacatactgagcgctataatttcgcatggagacagtggggccctcgcgtcgggccgggcgggacaccagggcacgacgtgcgttgcgtcgtgagtgtttgtgtttcagagctgagagtctgagactgagagagatagaggtgatgatggctctgcaggcgcaggggacgcgggtgccgctggtcctggcgctcttcctcctcctggccggttgcggcagcgaggcgcagccgctggtgccggcgctgtttacgttcggtgactcgtcggtggacgtcgggaacaacgactacctccacaccatcatcaaggccaacttcccgccatacggcagggacttcgccaaccacgtcgccaccgggaggttctgcaatggcaagctggcgaccgacatcaccgccgacacgctggggttcactacctaccctgccgcgtacctcagcccacaggcgtcggggcagaacctcctcatcggcgccaacttcgcgtccgcggggtctgggtactacgaccacacggcacttatgtatcacgcgatcccgctgtcccagcagctggagtacttcagggagtaccagacgaagctggcgggcggtggccggcgccgggcaggcgcgctccatcctcagcggcgcgctgtacatcgtcagtgccggcgccagcgacttcgtgcagaactactacataaacccgctgctgttcaagacgcagacggccgaccagttctccgaccgcctcgtggccatcttcggccgcaccgtgcaggagctctacggcatggggggcgcccccgcggacgggcgggctctcccacgcactccgcaattccgcatcacgcagaggcagagcgaccaacccagaaccccaccccaccgcccgcaaccgcaagctcagattccctccccaccccaccccaccccaccgtcccgctcactccagcccagcccgcgtccccacagcccagcgacagcgggcaccggcggcatccagccatgtgcggcggcgccatcctgtcggacatcatcccgccgccgccaccgcggcgggtcacggctggccacctctggcccgagagcaagaagccgaggagggctgcatccggcaggaggggagcccccgtggagcagcatgagcaggaggaggatttcgaggccgacttcgaggagttcgaggtggagtccggcgagtcggagctcgagtccgaggacgagcccaagcccttcgccgcccccaggagcgcgctcgccagaggtggactaaacactggtgcagctggtgtcgatggccctgctgcaaattcagttaaaaggaagaggaagaaccagttcaggggtatccgccggcgcccgtggggcaaatgggctgctgagatcagagatcctcgcaagggcgtgcgcgtctggctcggtactttcaactcccccgaagaagctgccagagcttacgacgccgaggcacgcaggatccgcggcaagaaggctaaagtcaacttcccggatgaggttcctacggcggtttctcagaagcgccgtgctgctgggcctgcctctctgaaagcgcctaagatggacgttgaggaggagaagccgatcatcaagctcgcagtgaacaatatgaccaactcaaacgcatatcactaccctgccgtcgtcggccacaacatcatacccgagccattcatgcagactcagaacatgccattcgctcctctggtgaattatgctgccctagtgaacctgtcttcagaccaaggcagcaactcgttcggttgctcggacttcagcctcgagaacgactccaggacccctgacataacttcggtgcctgcgcccgttgccaccttggccgccgttggcgagtctgtgttcgtccagaacaccgccggccatgctgtggcgcctcctgcgacggggaacactggtgttgatctcgccgagttggagccgtatatgaatttcctgatggacggtggttcagacgactcgatcagcactctcttgagctgtgatggatcccaggacgtggtcagcaacatggacctttggagcttcgaggacatgcccatgtctgctggtttctactgaggctgaggcccagcgactggtgcttgtgtacatagggggggacaaagggtaagagcctgcagtaacagagattggctctttctggtacttgcaatttctatcccttcaactctttcttccgcccccgtgtttcaggaataatgttctggagatgaagaaacgcttgcgtgggcgtgcctgcaggcacgcgtgtagtagctgcggtattagtatatatgcttagatgttcagtcactttctttaagtacaatttggcgctggacatgtaccttattttactatgtatccgtgacaacagctatgtgtctgctccttttattttcttgtctttgcttcaaaaaaatggctctgaacattgcgagtttgtactttgtagacaatatatatatatgattgtgtgtatgtgcttggtttgcttcaaaaaaaaaaaaaaaaaagcggcctcatccttctatgcaaaaaacccacgcgtccg

SEQ ID NO: 463 - DNA, 3025 bp, Zea mays
  Clone ID: TF_ZmC1960_2
cggacgcgtgggttcttacacaccaatgcaaacaaacaaacacacacacacagcacgcgatcccgctgtcccagcagctggagtacttcagggagtaccagacgaagctggcggcggtggccggcgccgggcaggcgcgctccatcctcagcggcgcgctgtacatcgtcagtgccggcgccagcgacttcgtgcagaactactacataaacccgctgctgttcaagacgcagacggccgaccagttctccgaccgcctcgtggccatcttcggccgcaccgtgcaggagctctacggcatgggggccgattgggtacctcgccggccgggactacttcgcgcccgtgccatccgcccactcctctcccacgcagtccgcaattccgcatcacgcagaggcagagcgaccaacccagaaccccaccccaccgcccgcaaccgcaagctcagattccctccccaccccaccccaccccaccgtcccgctcactccagcccagcccgcgtccccacagcccagcgacagcgggcaccggcggcatccagccatgtgcggcggcgccatcctgtcggacatcatcccgccgccgccaccgcggcgggtcacggctggccacctctggcccgagagcaagaagccgaggagggctgcatccggcaggaggggagcccccgtggagcagcatgagcaggaggaggatttcgaggccgacttcgaggagttcgaggtggagtccggcgagtcggagctcgagtccgaggccgagcccaagcccttcgccgcccccaggagcgcgctcgccagaggtggactaaacactggtgcagctggtgtcgatggccctgctgcaaattcagttaaaaggaagaggaagaaccagttcaggggtatccgccggcgcccgtggggcaaatgggctgctgagatcagagatcctcgcaagggcgtgcgcgtctggctcggtactttcaactcccccgaagaagctgccagagcttacgacgccgaggcacgcaggatccgcggcaagaaggctaaagtcaacttcccggatgaggttcctacggcggtttctcagaagcgccgtgctgctgggcctgcctctctgaaagcgcctaagatggacgttgaggaggagaagccgatcatcaagctcgcagtgaacaatatgaccaactcaaacgcatatcactaccctgccgtcgtcggccacaacatcatacccgagccattcatgcagactcagaacatgccattcgctcctctggtgaattatgctgccctagtgaacctgtcttcagaccaaggcagcaactcgttcggttgctcggacttcagcctcgagaacgactccaggacccctgacataacttcggtgcctgcgcccgttgccaccttggccgccgttggcgagtctgtgttcgtccagaacaccgccggccatgctgtggcgtctcctgcgacggggaacactggtgttgatctcgccgagttggagccgtatatgaatttcctgatggacggtggttcagacgactcgatcagcactctcttgagctgtgatggatcccaggacgtggtcagcaacatggacctttggagcttcgaggacatgcccatgtctgctggtttctactgaggctgaggcccagcgactggtgcttgtgtacatagggggggacaaagggtaagagcctgcagtaacagagattggctctttctggtacttgcaatttctatcccttcaactctttcttccgcccccgtgtttcaggaataatgttctggagatgaagaaacgcttgcgtgggcgtgcctgcaggcacgcgtgtagtagctgcggtattagtatatatgcttagatgttcagtcacttcctttaagtacaatttggcgctggacatgtaccttattttactatgtatccgtgacaacagctatgtgtctgcgtccgcccggtctgggtactaccaccacacggcacttatgtatcacgcgatcccgctgtcccagcagctggagtacttcagggagtaccagacgaagctggcggcggtggccggcgccgggcaggcgcgctccatcctcagcggcgcgctgtacatcgtcagtgccggcgccagcgacttcgtgcagaactactacataaacccgctgctgttcaagacgcagacggccgaccagttctccgaccgcctcgtggccatcttcggccgcaccgtgcaggagctctacggcatgggggcgcgccgcgtcggcgtcacgtcgctgccgccgctgggctgcctgccggcgtccatcacgctgttcgggcacggcgccgccgggtgcgtgtccaggctcaacagcgacgcgcagagcttcaaccggaagatgaacggcaccgtggacgcgctggcgcggcggtacccggacctcaagatcgccgtcttcgacatctacacgccgctgtacgacctggccacggacccccagtcgcagggcttcgcggaggcccggcggggatgctgcgggacgggcacggtggagaccaccgtgctcctctgcaaccccaagtccgtcgggacgtgccccaacgccacgtcctacgtcttctgggacgccgtccacccgtccgaggcggccaaccaggtcatcgctgactcgctcatcaccgagggcctcatcctcgtcacgtaatcatgcttttgttttggcttcaaatcgatcagactacacaaaagtcgtcgttcctaaacgtatactatgcctgtaaatttattcctcttgtttttcttatttgcgttgattaatgttttcggaagtataagcaacaacatgaatgaatgaatgaatgaatgaatggactcctattgttgtcaagttcaacgtcacataaaaaaaaaaaaaaagcccgacgcaacacacgtacaagaggcagattttactcaagtcaaatgtagaaaaagttcatcgactgatgttttggtatcatccgagaaaagtaagacaggtttgtcgtggtcatctcaccacaccgtatt

SEQ ID NO: 464 - DNA, 1503 bp, Zea mays
  unsure (1)..(1503): unsure at all n locations
  Clone ID: TF_ZmC1960_3
ttggggtacccctcgagggcancggcacaagggggaactcgaggccggccgggctctcccacgcactccgcaattccgcatcacgcaccccaccccaccgcccgcaaccgcaagctcagattccctcccaccccaccccaccgtcccgctcactccagcccagcccgcgtccccacagcccagcgacagcgagcaccggcggcatccagccatgtgcggcggcgccatcctgtcggacatcatcccgccgccgccgccgcggcgggtcacggcgggccacctctggcccgagagcaagaagccgaggagggctgcagccggcaggaggagagcccccgtggagcaggagcaggaggaggatttcgaggccgacttcgaggagttcgaggtggagtccggcgagtcggagctcgagtccgaggacgagcccaagcccaagcccttcgccgcccccagcagcgcgctcgccagaggtggactaaacactggtgcagctggtgtcgatggccctgctgcaaattcagttaaaaggaagaggaagaaccagttcaggggtatccgccggcgcccgtggggcaaatgggctgctgagatcagagatcctcgcaagggcgtgcgcgtctggctcggtacattcaactctcccgaagaagctgccagagcttacgacgccgaggcacgcaggatccgcggcaagaaggctaaagtcaacttcccggatgaggttcctacggcggtttctcagaagcgccgtgctgctgggcttgcctctctgaaagcgcctaagatggacgttgaggaggagaagccgatcatcaagccggcagtgaacaatatgaccaactcaaacgcatatcactaccctgccgtcgtcggccacaacatcatacccgagccattcatgcagactcagaacatgccattcgctcctctggtgaattatgctgccctcgtgaacctgtcttcagaccaaggcagcaactcgttcggttgctcggacttcagcctcgagaacgactccaggacccctgacataacttcggtgcctgcacccgttgctaccttggccgccgttggtgagtctgcgttcgtccagaacaccgccggccatgctgtggcgcctcctgcgacggggaacgctggtgttgatctcgccgagttggagccgtatatgaatttcctgatggacggtggttcagacggctcgatcagcactctcttgagctgtgatggatcccaggacgtggtcagcaacatggacctttggagcttcgacgacatgcccatgtctgctggtttctactgaggctgaggcccagcgactggtgcttgtgtacatagggggggacaaagggtaagagcctgcagtaacagagattggctctttctggtacttgcaatttctatcccttcaactctttcttccgcccccgtgtttcaggaataatgttctggagatgaagaaacgcttgcgtgggcgtgcctgcaggcacgcgtgtagtt

SEQ ID NO: 465 - DNA, 1874 bp, Zea mays
  Clone ID: TF_ZmC1960_6
ccggccgggggacaggctccgccacgctccatcgcccacccaatcatccacgagcccgttgtcggcttgtcgccgcgcccgcacctcagcgtctactctactacttaacacgcgcccgtgccatccgcccactcctctcccacgcactccgcaattccgcccacgcaccccaccccaccgcccgcaaccgcaagctcagattccctcccaccccaccgtcccgctcactccagcccagcccgcgtccccacagcccagcgacagcgagcaccggcggcatccagccatgtgcggcggcgccatcctgtcggacatcatcccgccgccgccgccgcggcgggtcacggcgggccacctctggcccgagagcaagaagccgaggagggctgcagccggcaggaggagagcccccgtggagcaggagcaggaggaggatttcgaggccgacttcgaggagttcgaggtggagtccggcgagtcggagctcgagtccgaggacgagcccaaacccaagcccttcgccgcccccagcagcgcgctcgccagaggtggactaaacactggtgcagctggtgtcgatggccctgctgcaaattcagttaaaaggaagaggaagaaccagttcaggggtatccgccggcgcccgtggggcaaatgggctgctgagatcagagatcctcgcaagggcgtgcgcgtctggctcggtactttcaactcccccgaagaagctgccagagcttacgacgccgaggcacgcaggatccgcggcaagaaggctaaagtcaacttcccggatgaggttcctacggcggtttctcagaagcgccgtgctgctgggcttgcctctctgaaagcgcctaagatggacgttgaggaggagaagccgatcatcaagctcgcagtgaacaatatgaccaactcaaacgcatatcactaccctgccgtcgtcggccaccacaacatcatacccgagccattcatgcagactcagaacatgccattcgctcctctggtgaattatgctgccctcgtgaacctgtcttcagaccaaggcagcaactcgttcggttgctcggacttcagcctcgagaacgactccaggacccctgacataacttcggtgcctgcgcccgttgccaccttggccgccgttggagagtctgcgttcgtccagaacacggccggccatgctgtggcgcctcctgcgacggggaacactggtgttgatctcgctgagttggagccgtatatggatttcctgatggacggtggttcagacgactcgatcagcactctcttgagctgtgatggatcccaggacgtggtcagcaacatggacctttggagcttcgacgacatgcccatgtctgctggtttctactgaggctgaggcccagcgactggtgcttgactgcttgtgtacatagggggggacaaagggaataatgttctggagatgaagaatcgcttgcgtgggcgtgcctgcaggcacgcgtgtagtagctgcggtattagtatatatgcttagatgttcagtcactttctttaagtacaatttggcgctggacatgtaccttattttactatgtatccgtgacaacagctatgtgtctgctccttttattttcttgtctttgcttcaaaaaaatggctctgaacattgcgagtttgtactttgtagacaatatatatatatgtgtgtgttgcttggtttgcttcatccttcgatgcaatgtgagtagtgttctgtatgcaggcttgcatgtgctgatatgcgtgcagcacacgtctatgaaaaagcattcatgcgaagtagatggataatagcaaacaaattttcttcataatggatgcataatccacttctttttgag

SEQ ID NO: 466 - DNA, 2039 bp, Zea mays
  unsure (1)..(2039): unsure at all n locations
  Clone ID: TF_ZmC660_1
gtgaggcgccacgcaacaacaatggcagttggcacagaggcgcaacgcaaaaaccccccaccgccaccgctctataaaaaccccgtcctcctcctcctcctcctcctcccccgcctcgccgccagtcagattcaccaccggctcccctgcacaaccgcgtccgcgctgcaccaccaccgttcatcgaggaggaggggggacggagaccacggacatggagagatctcaacggcagtctcctccgccaccgtcgccgtcctcctcctcgtcctccgtctccgcggacaccgtcctcgtccctcccggaaagaggcggagggcggcgacggccaaggccggcgccgagcctaataagaggatccgcaaggaccccgccgccgccgccgcggggaagaggagctccgtctacaggggagtcaccaggcacaggtggacgggcaggttcgaggcgcatctctgggacaagcactgcctcgccgcgctccacaacaagaagaaaggcaggcaagtctacctgggggcgtatgacagcgaggaggcagctgctcgtgcctatgacctcgcagctctcaagtactggggtcctgagactctgctcaacttccctgtggaggattactccagcgagatgccggagatggaggccgtgtcccgggaggagtacctggcctccctccgccgcaggagcagcggcttctccaggggcgtctccaagtacagaggcgtcgccaggcatcaccacaacgggaggtgggaggcacggattgggcgagtctttgggaacaagtacctctacttgggaacatttgacactcaagaagaggcagccaaggcctatgaccttgcggccattgaataccgtggcgtcaatgctgtaaccaacttcgacatcagctgctacctggaccacccgctgttcctggcacagctccaacaggagccacaggtggtgccggcactcaaccaagaacctcaacctgatcagagcgaaaccggaactacagagcaagagccggagtcaagcgaagccaagacaccggatggcagtgcagaacccgatgagaacgcggtgcctgacgacaccgcggagcccctcaccacagtcgacgacagcatcgaagagggcttgtggagcccttgcatggattacgagctagacaccatgtcgagaccaaactttggcagctcaatcaatctgagcgagtggttcgctgacgcagacttcgactgcaacatcggatgcctgttcgatgggtgttctgcggctgacgaaggaagcaaggatggtgtaggtctggcagatttcagtctgtttgaggcaggtgatgtccagctgaaggatgttctttcggatatggaagaggggatacaacctccagcgatgatcagtgtgtgcaactaattctggaacccgaggaggttttcgctttccaggtgtcctgtcttgggtaatccttgatctgtctaatgccacagtgccactgcaccagagcagctgagaactttcttgtagaaagcccatggcagtttggcgttagacaagtgtgtcgatgttctttaattctttgaatttgcccctaggctgcttggctaacgttaagggtttgtcattgtctcacttagcctagattcaactaatcacatcctgaatctgaagtggttgtgcttgtgcagtttatcactgagtttacatggcatgatcatggtaacgcagccagtgcagcatagatttgttcgtttgaacagtttaccaaggctgtaaccctagtaagctccagattaaggaacctttgttttcaccattctatatttactagatgaatgcccgtatgttgcaacgggaatatataatattagtatactacaataacttatatacaaaatgtgtgttataccattatgagaaaaaaaaaaaaatgggcaaattctgagattgggcaaattttgagcggattactaaaattattacctgcatcaccattccctgcatcatctgaacttgttgagatagttgttgancttgttgttgttgttgtctt

SEQ ID NO: 467 - DNA, 1286 bp, Zea mays
  Clone ID: TF_ZmC118_3
caccatttcgctcccgcaagcaccgatttgtttactgctctctccgacgcgcggcggcggagctccctacgacgactgaaccatgtgcggcggcgcgatccttgccaaccttcgcgagccggcgccgcgccggctcacagagcgggacatctggcagcagaaaaagaagctcaagaggggcggcggcggcgggaggcgctcgttcgcggcggaggacgatgaggacttcgaggccgactttgaggtcttcgaggccgactccagtgattcagatttggagctcagggagcggactgacgacgacgtcgtcgagatcaagcccttcactgccaagaggactttctccagcgatggcttaagcaccatgactagtgctgtagcaaggtcagccaagaggaagagaaagaatctatacaggggtatccgccagcggccttggggcaagtgggctgctgagatcagagatcctcagaagggtgttcgtgtttggcttggtactttcaatagtcctgaggaagctgcaagagcttatgatgccgaagcgcgcaggattcgtggcaagaaggccaagggaagtaactcctttggctgctcagacttgggctgggagaatgataccaagacaccagacatcacttccattgctcccatttccactattgcggaaggcgacgagtctgcatttgtcgacagcaattcaaacagctcatttgtgcttcctgccctggagaacagtgctgttgatctcactgatgggctgacagatttagaatcctatatgaggtttcttctggatggtggtccaagtgattcagttgatagccttctgaaccttgatggatcgcaggatgttggtagcaatatggacctctggagcttcgacgacatgcccatcgccggcgatttcttttgaggaatttgaagcttggccataggactatgtacatagggactagggaataaagactgggagattgggaagcacctgcttggcaccttggggtagcatatgctcgtgtctagctcagatgcagaagtcgcattctgaaactctttggttatcgacctgttccctattttaactatctctgtatgagagccatttatgagactgaaccattttgttttgttttcccccttctttcgttgttacagtatatggtttaacattatgatttatggatatgtgccaaatatggtgctcaacagtggtcaaacatgccttttatatgcgctttgtgcttggttgaaattgagttaactagttatctgctgaagcttttgcg

SEQ ID NO: 468 - DNA, 458 bp, Zea mays
  Clone ID: TF_ZmC840720_1
ccactccccgcggccggctcctctgcagccccagtcccaacagcagctccaccaccgccgctccgtaggcagtcaaaagctgccatggacacggacgacgcgcaggagccggcctccccaacctccgtccccgtcttcctcctcctcctcctcctcttcctcgtcggtccccgaagaagcgggcgcgcagggacggcgggcggcacccgacgtaccgcggcgtgcgcatgcggagctggggcaagtgggtgtcggagatcagggagccacgcaagaagtcccgcatctggctgggcaccttcgccaccgcggagatggccgcgcgcgcgcacgacgtggccgcgctggccatcaagggcgcccgcgacgcgcacctcaacttcccgggcctcgcgcgcctgctcccgcgcccggccaccgccgcgcccagggacgtgcaggccgcggcggcgctcgcc

SEQ ID NO: 469 - DNA, 1419 bp, Zea mays
  Clone ID: TF_ZmC19431_1
cggaagcgtgggcggacgcgtgggcggaggcgtcggcgtcggcgtgaggaaaaacttggggaaaaatacacagggcacaatgtgcggaggcgccatcctcgcggagctgatcccgccgacgcggcgcgtggcgtcgaagccggtgacagaaggccacctctggtcggcgagctccaagaaagccggcagcggcagggacaagaggcaccagcacgaatacgccgacgatgacttcgaggccgccttcgaggacttcgacgacgactttgacgtgcatgaagacgacgaggacggccacttcgtattctcgtccaaatccgccttgtccccagccctgcacgacgggcgcgcggcgagccagaagaagcagcgcgggcgccagttccgcggcatccggcagcggccctggggcaagtgggcggcggagatccgcgacccgcacaagggcacccgcgtctggctcggcaccttcagcaccgccgaggacgccgcccgggcctacgacgtggaggcgcgccgcctccgcggcagcaaggccaaggtcaacttccccgcagccagcggtcgcgctcgcggtcgcgcgcgcccacgccgcggcgacgacggcaacccacgaaccgcgccggaaacgcagcacccagcacagcccgctctgctgcctcgaggagagagagagacgcagaggaaggaagggatcgccgccgtgaagccagaagctacggagtcgttcgacgtgggcggcggtctcttcttcgacatggccttccccaccttcccagcctcgccgccgccgcaggccgtggatacgtccttcgccggcagcaccgccacgtcggagaccgggagccccgcgaagaggccgagatgcgacgaagactcgtccgagggcggcagcggctccgcgctggagctcgctgacgagctggcgttcgacccgtttgtgctgctgcagatgccctactcgggtgggtacgacgacgactcactggacggccttttcgccgcagatgaggccgtgcagcaggacgtgggcaacggcatggacggcgtccgcctgtggagcttcgacgagttccccgccgtcgacggttctgttttctgacgtttgcttactacgtactactactattttctgcctggtggaatcatatgtgatagtgctgcatgtgtctgcctgatcgtcagattgtactccactctggatatttgtgctacgtactcgtctggtatttcctactgtgggtcaatggttcctatgaatttgttcacgtcggcgaaactctgtattgtacggtcgtgattgatgtgccaaattaaataagcctgtgaacctggttctatgtatatatggtatcttgattatgagtcaccggcctcctaaccttcccctgccatgtttgggttggagcatcctcgtgc

SEQ ID NO: 470 - DNA, 990 bp, Zea mays
  Clone ID: TF_ZmC19431_2
ccggccgggattggtatcaagaaaaacttgtcgaaaaatacacagggcacaatgtgcggaggcgccatcctcgcggagctgatcccgccgacgcggcgcgtggcgtcgaagccggtgacagaaggccacctctggtcggcgagctccaagaaagccggcagcggcagggacaagaggcaccagcacgaatacgccgacgatgacttcgaggccgccttcgaggacttcgacgacgactttgacgtgcatgaagacgacgaggacggccacttcgtattctcgtccaaatccgccttgtccccaggtaatccgttcgttcgagggtgcaagtgcaataatctgcacgggcagaatgttattcacgtacgcgcgtccatgggtttgggtttgggtctggccatgacgacgttggcaagaactgcatgctagactgctagtgtaatctcaagggaaagagcccgtcttgtgtatagccctgcacgacgggcgcgcggcgagccagaagaagcagcgcgggcgccagttccgaggcatccggcagcggccctggggcaagtgggcggcggagatccgcgacccgcacaagggcacccgcgtctggctcggcaccttcagcaccgccgaggacgccgcccgggcctacgacgtggaggcgcgccgcctccgcggcagcaaggccaaggtcaacttccccgcagccagcggtcgcgctcgcgcgcgcccacgccgcggcgacgacggcaacccacgaaccgcgccggaaccgtagcaccctgctgctgctgctgctgctgcagcacagcccgctctgctgcctcgaggggggagagtcagagagacgcagaggaaggaagggaacgccgccgtgaagcctgaagctacgcagtcgttcgacgtgggcgctctcttcttcaacatggccttccccaccttcccagcctcgtcgccgccgcaggacgtggaggcgtcctttctcggcagtaccgccac

SEQ ID NO: 471 - DNA, 1645 bp, Zea mays
  Clone ID: TF_ZmC7298_1
ccgtagcctatatagcttgctcgcataaacgtcaaaaaggagactttgtcggccctcttccggcaccggcaccggcaccagcgccaatctagctagtcagtttagcttcgctccttcgcttgcttgcaagtaacagcctctctcgtgtccaaaaagaaagtctttctctggaaaggagagaaggatcatcatcaccaggatcaagaaagaactcgtcgattccttaccccttccgtcttcttctgatctcagctctatccactagctaggagatggacatgaacaacgggtggcttggcttctccttgtctccttcggcagcgagcaggggcggctacggctacggcgacggaggcggcggagcgagcgcgagcgcgtgcggggatggagagggctcttgcccctcgcctgccgcggctgcctcgcctctccctctcgtggccatgccgctcgatgactctctgcactatagctctgctccagattggaggcacggcgcagcagaagccaaagggcccaagctcgaggacttcatgagcatcacttgcagcaacaagagcagtggccgcagcctctacgacagctgcggccaccacgacgacgagcaggccagcaagtaccacgaggtccacggcatccaccccctctcgtgcgggtcgtactaccacggctgcatcagcagcggcggcggcggcggaggcggcattggcctggggatcaacatgaacgcgccgccctgcaccggcgggttcccggaccaccagcaccaccagttcgtgccgtcgtcgcaccacggccagtacttcctgggcgccccagccgcaagcgcgggcccgccagcaggcgcagcaatgccgatgtacaacgccggcggcggcagcgttgtcggcggctccatgtccatctccggcatcaagtcctggctccgggaggccatgtacgtgcctccggagcgaccggcggcggctgcgctgtcgctcgccgtgacggatgacgtcccgccggccgagccgccgcagctgctgccggcgccgttgccggtgcaccgcaagcccgcgcagacgttcgggcagcggacgtcgcagttccgtggcgtcaccaggcacagatggaccgggcggtacgaggctcacctgtgggacaacacttgcaggaaggaaggccagactaggaaagggaggcaagtctacctaggcggctatgacagggaggagaaggctgcgagggcttatgacctggcagctctcaagtactggggcccctcgactcacataaatttcccgctgagccactacgagaaggagctggaggagatgaagcacatgtcgaggcaggagttcattgcacacctgagaaggaacagcagcggcttctcgaggggagcatccatgtacagaggagtgacaaggcatcaccagcacgggagatggcaggccaggattgggagggtcgctggcaataaggacctgtaccttggcacattcagcacgcaggaggaagcggcggaggcgtacgacatcgcggcgatcaagttccgtggcctcaacgcggtgaccaacttcgacatcagcaagtacgacgtgaagcgcatctgcgccagcacccacctcatcggcggcggcgacgcgtgcaggcgctccccgac

SEQ ID NO: 472 - DNA, 257 bp, Zea mays
  Clone ID: TF_LIB3066-002-Q1-K1-D7
cggacgcgtgggcgagggggtggtggagagcaagcccgccttcgtcgtcgtcgcctcgtccgcggcgacgcagtccagggcgcgccaggaagcaccggacccggcgccggcggcccgaccagaaccaatccaggggcgtccgcggccgcccgtggggcaggtgggccgccaggatccgggacccggtcaagggcgtccgcgtttggttgggaactttcccttcggccgaggccgcgcggcgcgcttacaaccacgcg

SEQ ID NO: 473 - DNA, 1262 bp, Zea mays
  unsure (1)..(1262): unsure at all n locations
  Clone ID: TF_ZmC74396_2
cccacgcgtccgcccacgcgtccgcccacgcgtccgcccacgcgtccgcccacgcgtccgcggacgcgtgggtgcgcaagtacgctgccccgcggtcgtcgcgcttccacggcgtcaccaggctcaagtggagcggcaagtacgaggcgcacctttgggacaacaccagccaggtcgaaggccgcaagcgcaagggcaagcacgtgtacttaggcagctatgtcgatgaagagcaggctgcaaaggcacatgatttggctgcccttaaatattggggcacagggccaaacaccaaactgaacttcaatatttctgattatgagaaagaaattgaggttatgaagaccatgtcccaagatgaatttgtggcctacataaggagacaaagcagttgtttctcaagaggtacttcatcataccggggtgtaaccagaggcaaggatggcaaatggcaagcaagaattggtaggatcggtgagagtagagacaccaaagacatttaccttgggacctttggtgagtgaagttctgtaatataccatgtcgaccttgtgggacttccaaaggttttctatcaactagaaagcaactgtcagctgatgcagttatctttaattgaaattgactatcggtttgcagaaactgaagaagaggcagcagaagcttatgacattgcagcgatcgagcttcggggtgttcatgcagtcaccaactttgacattagtaattactgtgaagatggtttgagaaaattagaaggcccatcagaggtggctaagcttggaagtccgtcggaggttgtgaagctcgctgggcaatagatactagattagcaacgtgtaaattagtttctatttcgtttcttttgtcttcatattctctcccttttgtattcctgattttttttgccgttttgtgagttccctccttgccttattggcaagccagtatttacccgattcgaaaggacaatgtgatgttgtattttagcctcacagaaaggtattacttgtcttcanattctctcccttttggattcctggttttttttgccgttttgtgatttcccccctgccttattggcaagccagtatttacccgattcgaaaggacaatgtgatgttgtattttagcctcccagaaaggtattactaacctttgatgtccctgcagaagtcgaccccatgttagaaatttagttccttccaaaaaaaaaaaaaaaaaaaaaaaaaaaaaaaaaaaaaaaaaaaaaagggcggccg

SEQ ID NO: 474 - DNA, 353 bp, Zea mays
  Clone ID: TF_ZmC390422_1
agatttggaaacccttctgctgaaagagaactattattatgtatttattgtggtggtggaagagaagaagagcatgtgtagtaggagctgatgaagaagtggaattattgttatttgtttgtggttgtattggcataacaacacgttcaggaaaattgagtttggctttgtttcctttgaacctcaatgcagcagcatcataagccatagctgcagcctctgccgtgtcaaaggtgccaagccacactctagctgctttcttagggtctcttatttctgctgcccatttgccccatggtctctgcctaactcctctatagtgctttttcctaatatcatcactcgagccgaat

SEQ ID NO: 475 - DNA, 798 bp, Zea mays
  Clone ID: TF_ZmC5960_3
atcgacacgttcgggcaaaggacctctatatatcgaggtgtaacaaggcatagatggacagggcggtatgaggctcatctatgggataatagttgtagaagggaagggcagagtcgcaagggtaggcaagtttaccttggtggctatgacaaggaggacaaggcagcaagggcttacgatttggcagctctcaagtattggggcactacgacaacaacaaatttccctataagcaactacgaaaaagagctagaagaaatgaaacatatgactagacaggagtacattgcatacctaagaagaaatagcagtggattttctcgtggggcatcaaagtatcgtggagtaactagacatcatcagcatgggagatggcaagcaaggatagggagagttgcaggaaacaaggatctttacttgggcacattcagcaccgaggaggaggcggcggaggcctacgacatcgccgcgatcaagttccgcggtctcaacgccgtcaccaacttcgacatgagccgctacgacgtgaagagcatcctcgagagcagcacactgcctgtcggcggtgcggccaggcgcctcaaggacgccgtggaccacgtggaggccggcgccaccatctggcgcgccgacatggacggcgccgtgatctcccagctggccgaagccgggatgggcggctacgcctcgtacggccaccacggctggccgaccatcgcgttccagcagccgtcgccgctctccgtccactacccgtacggccagccgtcccgcgggtggtgcaaacccgagcaggac

SEQ ID NO: 476 - DNA, 397 bp, Zea mays
  Clone ID: TF_LIB3279-060-P1-K1-B7
cagctctggtatgtatccatcaatggcgtagcgtgttgctcaccatcgtctccctccatggtctccatgcaggcgcgtacgacgacgaggacgcagcggcgcgcgcgtatgacttggcggcattgaagtactggggccccgacaccatcctcaacttcccggcgtctgcatatgaagcggagttgaaagaaatggaggggcagtccagggaagagtatattgggtccttaaggaggaaaagcagtgggttctcgagaggtgtttccaaatatcgaggtgtcgcgaggcatcaccacaacgggagatgggaagcgaggattggtcgcgtctttggaaacaagtatctctacctcgggacttacgggacgcaggaggaggcggcgatggcgtacgacat

SEQ ID NO: 477 - DNA, 461 bp, Zea mays
  Clone ID: TF_ZmC214275_1
agaccggacgcaggagtcgacacgcgagggccgagaaattgagcagggcgcgcgcgcccttgacgctgagcgcggcggcgtcgtgcgcgcgcgccgccatctccgggcgcgggaaggtgcccagccagatgcgcgacttcttgcggggctccctgatctccgacacccacttgccccacgcgcgcatgcggacgccgcggtacgccggggcggcggcggcgtgcgggcgcgggcgcttcttgccgctggtggtggacgacgtggaggaggggtcggacgagtaggaggacgtggacgaggtgtcggagctgtgctggctcattgccatatccatacagatacagggttgttagtcgatcgtgtgcgtgtgtgtgtggtcgagcaagagagatcgaggacagaggtggtgcaatgcaatggcgggtagatactagctaggtagctgtcggaacccggccggc

SEQ ID NO: 478 - DNA, 4594 bp, Zea mays
  Clone ID: TF_ZmC6822_1
gccggccgggttcccaattgggttcgccggccgggagcgcatacacccagagccgcggctctataaagccgcacgcgcgcggagggggggcggggagagcaaaattcactgctccctgcccgtcgaaccagccgagcaagccgcaaacccagcgagccgcggcgcctcgtcgcgcgcgccttgcttgtccgcttcttcgtccgaccgtccgccggtccggtccgagccgagccccccgaaggatggcggagcccgcggcggcggggaggaagacgcgggtggggccgtacgaggtcggcaagaccatcggggagggcagcttcgccaaggtgaagcacgcccacgactcccgcacgggcgccgtccgcgccatcaaggtgctcgaccgcaaccacgttctccgccacaagatggtcgagcagatcaaacgggagatttcgactttgaagctaatcaaacatcccaacgtggttcagctgcatgaggttatggcgagtaggacgaagatatacatggttcttgaatttgttgatggaggcgagttattcgataagatcgtcaattctggaaggctaggagaggatgaagctaggatatactttcatcaacttataaatgcggttgattattgtcatagccgaggagtgtaccatagagatctgaagccagagaatctacttctggactcacatggaacccttaaagtttcagactttggcctaagtgcatttgcaccacaaacaaaagaggatgggcttctgcatactacctgtggaactccaaactatgtagcacctgaggtgcttgctgataaaggttatgatggtatggctgcagatgtatggtcctgtggcataatcttatttgttcttatggctggatacttaccctttgatgatcggcacatgtggggggttccgcggccccacgcgcccggcagcggtgactgttgcggtgttgccgcatccacgccctagtcgaccacgccgcccccagcagcccgctgctgccgcggctcgcgcccccaggagcccccgccgtcgcggctcgcgcctcgtatccgtaacagctacaccgcgccgcctacccccgcttcctgctggctgcatcgtcctcaggtcttccgaaggcgagctccaatccccaaccactattcacaagatgactacaaaacttgagcaatcttctgcggagcatcgcccagcaaaattcgcagcaccatcgtctttgacccccaagatctcaatgtttggggcaaaagctggattcatcatacctaagaacaagctggccggctcactcgtaatccggagcaccagtgacaagaatgaaacaccaactgcatccaacgaagatagcagcaggcatgttcacagaaagacaaagtgggggcctgaccttgctttggaccctgtcgtgtgcaaaggaagggctttggcctaccagactcgagtggagcaaatttccaagcagctgaagtctggagctttggacacgtccgaaattgatggttcagtgtctgctggaaatgaattgaattctattggtcctgacatcttgaaagagaacgagctgggaaatgttgaactattggaacttgaaagacgagagcttatcggtgaaatactccgtttgaatccgggatataagacacctgagaactacaaaccagtacttagggagacaaaaatccctgttccggcagaagcacacccaggaaataatattattggagttcttctaggatctgagagcaatacccagaagagactacatgaagaaactggtgctgtcattcgagtgtatgggactaagaaaatcaatggagagaagagtgagattcgtcatcaagacataaatgaaacacaagatgcttatgaagacctatacatcaatgtatcggctgactcttatgataaagtagatgctgcagttgtgttgattgagctgcttcttgctcctgtttccgtaaagtcgacagctacttcaacagctgctactgtttcttcagcagatacatccaaggatgcagtttcagctaatgtgcaactggagcagaataccacgtcacagccagatctacttcattaccaatcacacaacgcaccttggctgcccacaccccagaccaatgctccatcaattccttccacggggcctgttttgagtacattacctaacaatccatcgcagccacaaccgcctgctggttctttcagtatgcctccatatactggtcaacctcctcacatgaatagcatgccagcaaatccatttcctgttcctgggcctcagcaaccagtaccaagcaatcaacaacatccacctcaatttcgagctaactcctcgattgggccttttttcggtcaaccacctggtattgtaagccaacaaatgccaccatcttcctcaatgccaccgccagttagaccccttcaaataccccatgcctctggtggctggccccctttctctcctgttacatcacaatctcataggcctctgcaagctccaccgacttttatggcagtgagacctcctatttccgtctctcctcttggtgcaactccaccgcaaggtcccattgcattgacaccaccaaatatgcccaccatgtaccgcggccagcatccaccagtaccaaatttcactggttcagcgccattggtttccaggcctcctggtggtggggctcagtcttttcctacagctgcgcctcaaggcccttcctcagtagcatttcccggtggaccatcgctgcggccaccttaccctccggcgcctgatcaagcgagggggccacctccagctttctctccagttggatcaactcctggcatggtgcctccacctattgcatcttccggcctgcctgccccgcgtcctgcgaacacgagctgcatccagacacaagtagtagcccctttgagacctccgctcccagccgcgggcgattttactttccggcctgccataccaccggcgcatgctccagagttcgcagcaccaggcagtcaaatgggagcaatacatggcagaactcaccaccctggaccattctcctcccatcctggtgaccagaagaaccccagccaaggtttccaagggccgtttgatggcagcaggcccatgtacacgacgaatcaggctcggatgcacgctccacctcctccacacttccacggagccttccccaggaacgcatctcctcttgagttcccagcggggttccggggagcctggccgtccgtgcaggcacctccgatgccggcaccgtcacatccatcgtctttcccgccgtttcagttgaggccaccgccaccgccgcagcaggatatgtctggcgcaggcggcaccaggtggcccggtggcaatcaaatctacaacccttttgcaccaacggctgcggcggcggctcagagagcggaggctgaccctgagtacgaggatctcatggcatcagttggcatgaagtagcgaagactgctggctggcccctgatctgtctgtggcacaaacacagaggcttcttcctattgcttgccaagatgtgcgggttactaatctcctccaatgtatctctagatggtactgaattccgttccatcatagacaggtgccatgcttgaacgaaaaacaaaaataaaaaataaactagtggaccttgtttgagacatgctgttgggtgccgaggttgtgctctgatgacatccctctcctcgctccgtgcctggaatcctttccccctttctctccccttcgctgaccgctggaatcaatttagtcgggggaatttaaaaatcctggagctgccacaggaagatctcttaatttataatttgttcgcattcgaaaaaaaaaaaaaactagccgcgggctcttgagatgcttgactacgacgaagagttcgaggccgagttccagcttttcgacgacgatgacgagtgcgaggccgagttccagcttctcgacgaccaccaaccatctcccgcagcttcgcctgaggccagcggctgcaagcggaagcctgcccttgctcctcctgctggtgcccccgcttccacggatccggcgaccccgtgctccaggaagtacaggggcgtccggtaccgccggtcaggcaggtgggccgcggagatcagggacccgcggcaggggcgccgcgcctggctcggcacgtaccgcaccgccgaggaggccgccctggcgtacgaccgcgaggcccgccggatccgcgggaagagcgcgcggctcaacttcccgctgctcatcccgcacgagggtcccggccgtcacgcgcgcacgccggtggccatcgacctcaacttgccgcccgtctccgacggtctcggcgtcccggctccggctggcgtcggcgacgacggcacggcgaatgccgacggagatgcagatatggccagtactaagactcagagcacgctagcgcgggtcaaggaactgatcgcgcagggacctcacgacgagcggctggcggcgaggatcgtgcctgagctgatgatgcacgggagcagggacgaggctgcggcgttgatcgccgagttcagccgtcagatggaggagatcgctgcgttgc

SEQ ID NO: 479 - DNA, 872 bp, Zea mays
  Clone ID: TF_ZmC6822_4
atccggttcatctatttttagagttgccacgcgcgagacttcccgcctccctgtcctatccctctctagtctctacccccatctgtagtgcggtctgcggccaagagcccggggaaacgatcgagacgatatgtgcgggggagcaatccttgccgaactcatcccagcacgggtgcaccggccgctgaccgccgccacgctctgggcggcggccctgagtgggaccactaccgtcggcaagtggaaggccgatgcagccgccgctaccgacgacgacgacgacgaagagttcgaggccgagttccagcttttcgacgacgatgacgagtgcgaggccgagttccagcttctcgacgaccaccaaccatctcccgcagcttcgcctgaggccagcggctgcaagcggaagcctgcccttgctcctcctgctggtgcccccgcttccacggatccggcgaccccgtgctccaggaagtacaggggcgtccggtaccgccggtcaggcaggtgggccgcggagatcagggacccgcggcaggggcgccgcgcctggctcggcacgtaccgcaccgccgaggaggccgccctggcgtacgaccgcgaggcccgccggatccgcgggaagagcgcgcggctcaacttcccgctgctcatcccgcacgagggtcccggccgtcacgcgcgcacgccggtggccatcgacctcaacttgccgcccgtctccgacgggtctcggcgtccgggctcccggctggcgtccggcgacgacggcacggcgaatgcccgacggaggatgcagatatggccagtactaagactcagaagcacgctagtgcgggtcaaggaactgatcgcgcagggacctcacgaca

SEQ ID NO: 480 - DNA, 777 bp, Zea mays
  Clone ID: TF_ZmC2464_2
cactccagccctgcccagcgcaccaccaacacctggcaccgtcctcctccgccgtcgtcactcgctcgatcgctcctccatccatggcgcccaagaacgctctccccgccgccagcggcatgacgctggagccgaggtaccgcggcgtccggaagcgcccctggggacgctacgcggcggagatccgggacccggccaggaaggcccgcgtgtggctcggcaccttcgacaccgccgaggccgcggcgcgcgcctacgacgccgccgcgctccacttccgcgggcccaaggccaagaccaacttccccgtcgcgttcgccacggccacggccacggacacgcgcgcgctcccgctcccgctccggctcccgctgccgccgccgccgcccaagaagctgtccgtgagcccgagcggcagcaccgtggagtcgtcgtcccgggactcgcccgccgcgccggcccccgcgccgtcgctcgacctgagcctcggcatgccgcccatggtggccgcccagccgttcctgttcctggacccgaggctcgcggtgaccgtggccgtggcggcgcccgtgcctcgccggccgaccgctgctgccgcgggcgcgggcgccagcaagcaggcagcatactcctgctgccgtgaagacgagcagagcgacaccgggtcgtcgtcatccgtggtggacgcctccccggcggtcggcgtggggttcgacctcaacatgccgccgccgggcgaggtggcgtagctggaccgcgcggccgctttaaaggatc

SEQ ID NO: 481 - DNA, 517 bp, Zea mays
  Clone ID: TF_LIB4827-035-A1-N1-F3
ccggccggcaccaaaactataccagcctagctagccctttcgacgtcgctccggctcctgcctagtgactcgtacgtttcggtgtttcgacaatgtgcggtggagccatcatcgccgacttcgtccccgccggctcccggcgtccggcgacagacgacaccatgtccgcctccatcctctccggcgaggaccatccggagctgccgctgccgctgccggcgccggcgccggggcgcaagacggcggaccgcgggatccggcgccgtccgtggggccggtgggcggcggatatccgcgacccgcggaagggcgcccgcgagtggctcggtacctacgccaccccggaggacgctgagcgcgcctactacgaggcggagcgcgagatccgcgtgcccaaagtcaagctcaacttcacgtccgccggctggggacggtacgcgcgcgccggcggcggcgcggccaagacgcgccgcaagtccgcggcggacgatgagagctcagtctcgtctcctccggc

SEQ ID NO: 482 - DNA, 810 bp, Zea mays
  unsure (1)..(810): unsure at all n locations
  Clone ID: TF_LIB4746-091-R1-K1-F6
ttgggtacctcgaggccggccgggatccttatttccgtcaccgattgcttccgactctattaatttctgacacaaactctgcgtcctcctcctcttctcccgcgacgcagggattgcggcaggtgtacctagccgatacatgcaggtggattcgaccccgctcacgccgctgcaagggcgtacgaccgcccgaccgggaggtgatcaagttccacggcgtggacgccgacatcaacttcaacctcagcgactacgaggacgacatgaagcagatggggagcctgtccaaggaagagttcgtgcatgtcctgcgccgccagagcaccggcttctcgagagacagctccaggtacatatacattggactattcgacagcgaagtagaggctgcaagagcttacgacaaggccgtcatcaaatgcaatggcagagaggccgtgacgaacttcgagccgagcacgtatcacggggagctgccgactgaagttgctgatgtcgatctgaacctgagcatatctcagccgagcccccaaagagacaagaacagctacctaggtctgcagctccaccacggaccattcgagggctccgaactgaagaaaaccaaggcaagcgctaacgatagatataccttgacaagctaggcagctgaagggccccttgaatgaagggccgtcgcaacgcactttagtaatgataaaaaataaaaaacattatatggacatacgttactggggtaagtttgtttgcaatcaataatatattaatatattgtatctatacatataanaaaaaaaaaaaaaagcggcc

SEQ ID NO: 483 - DNA, 700 bp, Zea mays
  Clone ID: TF_ZmC3711_3
ggaggacataagggatttgtctcgagaggaatgtgtgacatacttgagaaggaggagcagctgcttttcaagaggagcttctatttatagaggagtgacaagaaggcagaaagacgggagatggcaagcacgcataggactggttgctggaactagagacatttacctgggaacattcaaaacagaggaagaagctgcagaggcttatgatattgctgccattgagatacgtggcaaaaacgctgtgaccaattttgaccgaagcaactatgtcgataagggtatgcactgtatagaaggcgaaggcttgaggctgcttgcatccaagccagaagaatgacttccaagttcaatgcagtgattgtcgatcgagcagatttggccagacgtatatgcagcttagttggtacatatacagataggagaaccggttgcagtttgtcaatattcctgctttacatgacttgggattacagttaaatcgacccgctagcaaaaaaaagtgtgcaaatgttagtagatttggccagacatatatgaagattggcctcgtaggatagatctttctgcaaatgttagcgaagccagtgtttatgttctgtttgctagattagcgttatcagtttgcacgttccccttttttttctgaataattgtccttgtatgatcttgagggaatgcgtttacctggtcgtttgcc

SEQ ID NO: 484 - DNA, 113 bp, Zea mays
  Clone ID: TF_LIB3592-083-Q1-K6-H12
tgctacgcgtgccaggtgccgagccacatgcgcgtacgggtactgggcaggcggatctccagcacccacttgccccagtgccactgccgaacgccggggctcagctacgtggt

SEQ ID NO: 485 - DNA, 1029 bp, Zea mays
  Clone ID: TF_ZmC25015_1
gaaactagggtgggggagccctgagcaggggaggaaaaataaactagtggccaaaccctagcccgccgagctcccgcgtgcgctctccgccgcccgcctactcctctctgtccgcgatgcgccgggcgaagccgcagcagccctcgccgtcgcccgagatccggtaccgcggcgtgcggaggcggccgtcggggcgctacgccgccgagatccgggacccggccaagaagaccccgatctggctcggcaccttcgactccgccgaggccgccgcgcgcgcctacgacgccgccgcccgatccctccgtgggcccaccgcccgcaccaacttccccggcgccgcggcttccgcgccgcggcacagggcccgctccgcctccgcctccgccgccgccgcagcccccgcggcggtgccggccacgtctagccacagcagcaccgtcgagtcgtggagcggcggcgcgccccgcgtcgccgccccgccgcggagcgccgccgcgcccatggaggaggacgacgacgaggactgccacagctactgcggatcctcgtcgtccgtgctctgcgaagacgcccgcggggacgacgacgacgacgcggcggcgtcccacgcgcccctgccgttcgatctgaacctgccgccgccgatcgacgcggctgctgaggccgatcagatgggtgcccgctacgacacgctactccacctctagctcgcgacgacggccaggaattagaggaaggaatcgagaccgtctgtccttcttcggctgctgatccggtggtgttctatcgctagatggataattcttgcctttttcccccttcttttcttctgctactttttttgttttcttctcttaccaccacgatgatgatgattcgatattatgtgaataattcagttatgtccatgtaagctgtgaggaaggaaatctgagcttttccttatcttcctatggtgtttctgctggtgctgctctttcatttgttggaaagataatggaagaaatcaagagaaattatttacac

SEQ ID NO: 486 - DNA, 1459 bp, Zea mays
  Clone ID: TF_ZmC983_1
cccaccctcatttgacgctgatgataaaaaggccctcgcggtcgcaccacatacaggcaaccagcctcttgatcacttgatcctcctgcacaccagagtaccagacaccactgcgcatcagtgcaaaagaggtagctaccctatctgccatggctcaagagctccacgaaacgtcctcttgctctgccaccaccacctcgtcgtgcaccacatcctgctgctcgtccactgtcacagactcgtcctcttcgcccccgtcaccggcggcggccaatgccgcgcccgcgacacggaagcggcaggcgttggaggccgaggccgaggccgaggcgggcggtgaggaggaggaggaggaggaggaaggctgtgctggtaataaggcggcgccggccaagaagcgaccgcggggcagcgaggggaagcacccgacgttccgcggcgtgcggatgcgggcgtggggcaagtgggtgtcggagatccgcgagccgcgcaagaagtcgcgcatatggctcggcacgttccccaccgccgagatggccgcgcgcgcccacgacgtcgcggcgctcgccatcaagggccgcgccgcgcacctcaacttcccggacctcgccggcgcgctcccgcgcgccgcgtccgcggcgcccaaggacgtccaggcagccgccgcattggccgctgcgttcacgtcgccgtcatcggagcccggcgccggcgcgcacgaggagcccgctgccaaggacggcgccgcgcccgaggaggcagccgccgacgcacaggcaccagtaccagtagcactaccaccgccggcggcctctcggccagggacgccgtcgagcggcgtggaggacgagcggcagctgttcgacctgccggacctgctcctcgacatccgggacgggttcgggcgcttcccgccgatgtgggccccgctcactgacgtggaggaggtggtcaatgcggagctgcgcctcgaggagccgctgctttgggagtagcggtcagagatgctcgttgcctgcattgcaaacgaggtctaaacaatagtagcagtggtatcccatttcttcttcgttttgcttctcgccctctcctttttttctctctttcttgcttactttggggggaaaacagctagttctttttttcttcttcttcttcttcttttattaaattgagttttaataagtataaacatatataaacgagagagagatataagctgtgtacttaaaagtgtaagacgagtacctatcagttcattattacgtatctactagtggtaccagtagtgatcatgttgtcccggccgtgtgtgaattccagcggtagttgttgaccttgctagatttttatagttgcttgtgttgtgtgctgtaccaaaattccccagggaaaaagggcaggaagcaaacgaatgtaacgggaacacaagcagcatctaatctctattactgctgac

SEQ ID NO: 487 - DNA, 1069 bp, Zea mays
  Clone ID: TF_ZmC3831_1
ctgggtacctcgaggccggccggggccggagacgcaacacacatacagcccctcttgcccacaccacctcgctgaaccggaagacccgcacacacacgccacttgtagaccatggcgccccgggtggcggacaagtcgcctctaccgccggccaccggcctggggctgggcgttggcggaggagtcggaggcgtgggcatgggcccgcactacagaggcgtgaggaagcgtccatggggacgctacgccgccgagatccgcgaccctgccaagaaaagccgcgtgtggctcggcacgtacgacacggccgaggaggccgccaaggcgtacgattccgccgcccgcgagttccgaggcgccaaggccaagacgaacttcccgttcccctcccagtgctccgtcgcctccggtgctgccggtagcgccagtagcaacagcaccgtggattcgagcggtggcggtagcggctgtggcatccaggcgcctatgcaggccatgccgcttcctccggctctcgatctcgacctcttccatcgggcggccgccgtgaacgcagtctccaccggcatgcggtttccgttcaagggctatcctgtcgcctgcccgacgccacagcagtactttttctacgagcaggcggctgccgcggcatccggataccggatgctcaaggtcgctccaccggccgtgactgtggccgcggttgcgcagagcgactccgactcgtcgtctgtggttgatcactccccttcgcctcccgcggtgacggcaaacaaggtgggcttcgaactggatctgaactggcccccgccggcagagaactaggcaggccggagtttttggctgacgacttagtagcttccttttcccttttgccttcatcaggaatgttacttgtggttgttttggtcctgtatggctgtattcttgttctgtagactaagagatggggagtcttgtaaatattttttttccgtcgagacggaaatgaactgagatctgttcgtctgtctgatcaagccggcgttgatatgggcttaagctatggggtattgattagtaattgcca

SEQ ID NO: 488 - DNA, 1703 bp, Zea mays
  Clone ID: TF_ZmC21463_1
cccagcgtccggttctacgcttggcttggctgcgctgcgcacaccgaacccctcgccgtcgcggctcgcctcggctccgccccgaccgaccgatcgatccggccggcggtgggcgccatggcctcccccaaccccgaggccgcggggctgcaggccgtggctgtggcgggggcaggggagggcggctcgtcctcgtcgctcagcgccgttgcgggagcggctgcgttgtccggggagctggtgcccaggagggcgttggcgctgcgcaaggagcgcgtgtgcacggccaaggagcgcatcagccgcatgcctccctgtgcggcggggaagcggagctccatctaccgcggggtcacccggcataggtggacaggtcgatatgaggctcacctttgggacaaaagcacgtggaatcagaatcagaacaaaaagggcaaacaggtatatctaggtgcatatgatgatgaagaggctgcagcaagggcctatgaccttgctgcattaaaatactggggagctggaacacaaataaatttcccagtatctgactatgcaagagaccttgaagagatgcagatgatatccaaggaggattatctcgtgtctcttaggagaaagagcagtgccttctacagggggttaccaaaatatcgtgggcttcttaggcaacttcataattccagatgggatacatctttgggactcggtaatgactacatgagccttagttgtggcaaggatatcatgttggatgggaaatttgcaggaagctttggtctagagaggaaaattgatcttacaaattacatccggtggtggctaccaaagaagacaaggcagtcagatacatctaaaacagaagaaattgctgatgaaattcgagctattgaaagttcaatgcaacagactgaaccctataagttgccttctcttggcttcagttctccatcaaagccctcttcaatgggcttatcagcatgcagcatattatctcagtctgatgcctttaaaagcttcttggagaagtctacaaaattatctgaagaatgtagtcttagcaaagaaattgttgaaggaaagactgttgcctcggtacctgctactggatatgatacaggggcaattaatattaacatgaatgagttgctagtacaaagatctacttactcaatggcccctgttatgcctacaccaatgaagagtacctggagccctgctgatccttccgtggatccacttttttggagcaactttgttttgccatcgagtcaacctgttacaatggcgacaataacaacaacaacgtttgcaaagaatgaggtaagttcaagtgatccattccagagccaagagtgactgcacgagcttactgaagcaggatattttagattgttaataaagctttggacatttcaatcgatgaacaacaggtcaaagacagcatcccgtgcgtcaactagattctttttgtcaagcttttgatgtcgcaacttgtgagcaatactccttgtttatccatacttcataggacatgaatagaaggtatgacaagtgcaagcatagttatgtaatatacagtggctagttgccagaaaatgagatttagttgtgtagagctgtttgtacatattgagatggttgtttcagttcaatctcaacaggtttgaggaaaatatccaacgaaatgatacagttttaatgct

SEQ ID NO: 489 - DNA, 490 bp, Zea mays
  Clone ID: TF_ZmC8688_1
gccgggcttccttcacggattcccaaatactcgcttccaataccaattctccgatccacgttcgttcccgcaccctcgcgctccgctgatccggcggcatgcggcgccgcggcgtggcggcggctgatgcggacggtgacgtggagttgcggttccgcggggtgcggaagaggccgtggggccggtacgcagcggagatccgggacccggcgaagaaggcgcgcgtctggctcggcacattcgactccgccgaggacgccgcccgcgcctacgacgccgcagcgcggatgctgcgcgggcccaaggccaggaccaacttcccgctccccgccgcagccgccctccaccacccccacatgcccgctgctgccgccgcagcagctccaccatacacaacatatcccaccgccacgggcgtcgtctcgacgccgccggtcgccagaccggcttgcagcagcctcagctccaccgtggagtccttcagcggcgc

SEQ ID NO: 490 - DNA, 1173 bp, Zea mays
  Clone ID: TF_ZmC8439_1
cgggtcaacccacggatcaagtgagatccgccgcttgggcggacgcatgggccgaggccggccgggccgggaaaatcccagacgccacgccacccaacacatacaaacacacgcacgcgcgcgcgcgcgcctcccgctgttccgcaaaacaaaggaaacgaaggagaggaggccatggcgccgagaacgtcagagaaaaccatggcaccggcggcggccgctgccacggggctcgcgctcagcgtcggcggcggcggcggggccggcggcccgcactacagaggcgtgaggaagcggccgtggggccggtacgcggcggagatccgcgacccggcgaagaagagccgggtgtggctcggcacctacgacacggccgaggacgccgcgcgggcctacgacgccgccgcgcgcgagtaccgcggcgccaaggccaagaccaacttcccttacccctcgtgcgtgcccctctccgcagccggttgccggagcagcaacagcagcaccgtcgagtccttcagcagcgacgcgcaggcgcccatgcaggccatgccgctcccgccgtcgctcgagctggacctgttccaccgcgcggcggccgcggccacgggcacgggcgctgccgccgtacgcttccctttcggcagcatccccgttacgcacccgtactacttcttcgggcaggccgcagccgcagccgcggaagcagggtgccgtgtgctcaagctggcgccggcggtcaccgtggcgcagagcgactccgactgttcgtcggtagtggatctgtcgccgtcgccaccggccgctgtgtcggcgaggaagcccgccgcgttcgatctcgacctgaactgctcaccgccgacggaggcggaagcctagtcgtcgaagcttttaatgactgtctgtcttcttagttctttcttctcctttttctcgaggaaaattcggtactactaagctgagagacgctctcctccgacagacgacgtcgacgacgggcatttttgtaaatagtttttgcgccgggacctttttagtttatgatgaaagctgtattgtcaccgaagacaggtcctgccggcgttgttatggaccggattactatattatattatgcactactagtattttgatagccaaaaaaaaaaaaaaaaaaaaaaaaaactcgactcgtgc

SEQ ID NO: 491 - DNA, 165 bp, Zea mays
  unsure (1)..(165): unsure at all n locations
  Clone ID: TF_LIB3607-059-Q6-K6-A10
ggcgtccggnaacccccgtggggacgtacgggggggnagaccaaanacccngccaggaaggcccgcgtgtggctcggcaccttcgacaccgccgaggccgcggcgcgcgcctacnacgccgccgcgctccacttccgcgggcccaaggcggaagaccaacttccc

SEQ ID NO: 492 - DNA, 1175 bp, Zea mays
  Clone ID: TF_ZmC278_1
ttggtggagaattttgtaagataaacatctcgggctgaattgggcgagacggctcaaaattatttcatactggaattgccttggagaaatcagcagggctcgtttttaactctttcctcttgacgcggattagatatatgaccttgtatatatcttatgacgatggattgccttgttgggtcaggaagaagaggatgcggaggaagagcactggccctgactccattgccgagacgatcaagtggtggaaagagcagaaccagaagctccaggacgagagcggctccaggaaggcgccggccaagggttccaagaaagggtgcatgatgggcaaaggagggcctgagaacgtcaactgcgtgtaccgcggcgtgaggcagcggacatggggcaagtgggtggcggagatccgcgagcccaaccgtggccggcggctatggctgggctccttccctaccgccgtggaggccgcccatgcatacgacgaggcggcgaaggcgatgtacggccccaaggcacgcgtcaacttctcggagagctctgctgatgccaactccggctgcacgtcggcgctttcgctgctggcgtctagtgtgccggctgccgcgttgcaacggtctgatgagaaagtggagaccgaggtggaatccgtggagactgaggaggtggtacatgaggtgaagacggaagcgaagaatggtgacttgggaagcgtcaaggtcacctgcgtcattcagtccgcggaggagactgtgctacacaaggaaggggacgtaagttatgattacttcaacgtggaagacgtcgttgagatgataattgtagaattgaacgctgataaaaaatttgaggcacatgaagaataccttgatggagatgatgggtttagcctttttgcatattagaaagcacggtcatggggggggggggggagtagtaggaatagcttcattctagatgatgctgatgagacatagctttatactatgagccaaccggtacaacaagttgtcctgtgtgttgagttcctgtactatagtagggatgagttcgtgtttaatgagctctcttggctgttaatattgcacatttgttcgggtggggtgaaccctaaattagctcaaggaaaaaggaatggttacactgtacaccgaataaatttttaggattgcatt

SEQ ID NO: 493 - DNA, 301 bp, Zea mays
  unsure (1)..(301): unsure at all n locations
  Clone ID: TF_LIB5116-044-A1-PF1-F11
aagtgggccgccgagatccgcgaccccgtcaagggcgtccgcgtctggctcggcaccttcccctccgccgaggccgccgcgctcgcctacgacgaagccgcgcgcgccatccgcgggcccagggccaagctcaacttctcctcctcctctgccgtcgccgccgcggccccgggagcgcgcaagcgcggncgcgccgcgccccccgctgccaagccagcgccggtcatcaccctcgtcgacgatgaggaggagcacgcgacgagccttcgtcaagcacgaggacgaggcgagcgagggctcc

SEQ ID NO: 494 - DNA, 540 bp, Zea mays
  unsure (1)..(540): unsure at all n locations
  Clone ID: TF_LIB3606-042-Q1-N6-C4
gcgncggccatggcgagctgggtggcggcggcgcgcgccgagagcggcgtgctgtccgcagccgcggggcaccaccacgcgctggccctgtccatgagctccgggtcgctgtcgagctgcgtgaccgcgcaccccgcggcgcccgagtacggcgcggcggcggcggcgctggacggcgggcgcaagcgcggcggcgcggcggggcagaagcagcccgtgcaccaccgcaagtccatcgacacgttcgggcagaggacgtcgcagtaccgcggcgtgaccaggcataggtggacggggaggtacgaggcgcacctgtgggacaacagctgcaagaaggaaggccagactaggaagggcaggcaagtctatctcggcgggtacgacgtggaggagaaggcggcgagagcctacgacctggcggcgctcaagtactggggcccttccacgcacatcaacttcccgctggaggactaccaggaggagctggaggagatgaagaacatgacgcggcaggagtacgtggcgcacctcaggaggaag

SEQ ID NO: 495 - DNA, 1305 bp, Zea mays
  unsure (1)..(1305): unsure at all n locations
  Clone ID: TF_ZmC16163_2
ttgggtacctcgaggccggccgggctcctcagcccgttctcttttcccccaccctatcaacacaatttacccttcgtcttcccgcttccagcgcacccccatcttgagtctcgccgccgcaagcttgtgtaaggtgtaaccctaaccctaaaacacttaccttcgcctccagcaccacacttccatggaggggcgcggaggctaagtatagccaacctctacaccatatccccatggattgagcggattcccaaggcatgggtacaaaccctcacctgcaagagctggccgcttcggcggtggcggcttctgaaccaccaccgcgggcgcgcgtggtgcggatcctagtgcacgatgctgacgccaccgattcgtcctccagcgaggatgaggcaccgccacttcttcctcggcggaggtcgaggggtggtagcagcagcctgagcgtgaggcgccgtgttatggaaccggctggggcaagctcggccgttcggttccgtggcgtccgtcgtaggccgtgggggcgctgggctgcggagatccgcgacccgcacaaccgccgcagactgtggctcggcaccttcgacaccgctgaggaggctgccaacgcctacgacgctgcgaacatccgctctcgcggccggagcggcactaccaacttccctgcggcccgctactcgccccctccaaagccagcgaagcctatcatctcgctgactcctgaacccggaaaggtgatcaccttgccaccggtacctgtgaagccaaccttccctgttcaggtgaaggaagtgggtgggagctggggcggcctggtcaagggagctaggtcggaggtcaaggcgtttgcaccgaagccagtatggaagatgatccccagggtgcaccagaagtttccgggttgtgccgatggctctggcctgcgtgccgtccatgctgcctccatctacgtggaggaggttggcggtggctgatggtccaagtatctgcaattactatcgctagaggttttattgtctatctccatggcatcattataacctggtactgtattattttggttagtgttaaactgttgatgtggaaacctatgactcttgctgtgttatgatcggtggtaatataatgtgtatatggtgacatttggtaatatgttcctgatctatgtgatgcaatgtgctgtgctttgattgtgggatcaaacctgtcatatagtagtacaatctagatcctttcacatgaacagtgatacctagatgtatttgatggttatttcagttgaattaaacaaaattgctcnccnnc

SEQ ID NO: 496 - DNA, 550 bp, Zea mays
  Clone ID: TF_ZmC7298_2
gcttagcatccaattccattttctagcctcctcaatgtttggctgaatgcattcgattcgaacgttaactcaccttcttgttcttgcaatgccaatgcaatgtcaacaacgacgagcagtctacctaggcggctatgacagggaggagaaggctgcgagggcttatgacctggcagctctcaagtactggggcccctcgactcacataaatttcccgctgagccactacgagaaggagctggaggagatgaagcacatgtcgaggcaggagttcattgcacacctgagaaggcatcaccagcacgggagatggcaggccaggattgggagggtcgctggcaataaggacctgtaccttggcacattcagcacgcaggaggaagcggcggaggcgtacgacatcgcggcgatcaagttccgtggcctcaacgcggtgaccaacttcgacatcagcaagtacgacgtgaagcgcatctgcgccagcacccacctcatcggcggcggcgacgcgtgcaggcgctccccgacgcggcaaccgactagtgagctc

SEQ ID NO: 497 - DNA, 2323 bp, Zea mays
  unsure (1)..(2323): unsure at all n locations
  Clone ID: TF_ZmC67_1
agtttctgaacttgctgctgctcaagactgcgcataatatcaccggtctggcccnaccctagagagctcggtcggacaaacccaccacccacaccggccggccgggagagccacgaagttactgcgcgcgtacgtcgccggttccctttctcaccgcacgtcgtcgtcatggacacctcgcaccactatcatccatggctcaacttctccctcgcccaccactgtgacctcgaggaggaggagaggggcgcggccgccgagctggccgcgatagccggcgccgcgccgccgccgaagctggaggacttcctcggcggaggcgtcgccaccggtggtccggaggcggtggcgcccgcggagatgtacgactcggacctcaagttcatagccgccgccgggttccttggcggctcggcggcggcggcggcgacgtcgccgctgtcctccctcgaccaggccggttccaagctggccttgcctgcggcggcggctgctccggcgccggagcagaggaaggccgtcgactcctttgggcagcgcacgtccatctaccgcggcgtcacacggcaccggtggactggcaggtacgaggcacatctgtgggacaacagctgccgacgcgaagggcagagccgcaagggccgccaagtatatttgggtggctatgataaggaggagaaggctgccagggcgtatgatcttgcagctttgaagtactggggttctagcaccaccaccaactttccggttgctgagtatgagaaggaggtcgaggagatgaagaacatgacgcgacaagagtttgttgcttcccttcgaaggaagagcagtggattctctcggggtgcttccatctaccgaggtgtaaccagacatcaccagcatggacggtggcaggcgaggatcggaagggtggccggtaacaaggacctctaccttgggacgttcagcaccgaggaggaagctgcagaggcctacgacatagcggccatcaagttcagaggcctgaacgccgtcacaaacttcgagatcagccggtacaacgtggagaccataatgagcagcaaccttccagtcgcgagcatgtcgtcgtcggcggcggcggcggcgggtggccggagcagcaaggcgctggagtcccctccgtccggctcgcttgacggcggcggcggcatgccagtcgtcgaagccagcacggcaccgccgctgttcattccggtgaagtacgaccagcagcagcaggagtacctgtcgatgctcgcgttgcagcagcaccaccagcagcaacaagcagggaacctgttgcaggggccgctagtagggttcggcggcctctactcctccggggtgaacctggatttcgccaactcccacggcacggcggctccgtcgtcgatggcccaccactgctacgccaatggcaccgcctccgcctcgcatgagcaccagcaccagcaccagatgcagcagggcggcgagaacgagacgcagccgcagccgcagcagagctccagcagctgctcctccctgccattcgccaccccggtcgctttcaatgggtcctatgaaagctccatcacggcggcaggcccctttggatactcctacccaaatgtggcagcctttcagacgccgatctatggaatggaatgattcgggccgcccggtcgtggctgctggtcggcctccgctcgccgctggcgtctcgcatgtgcgaaaagggtggggagaagccatgagaacacgagactgacatgggcgctctcgcacaaaagacataaagcggggggactgaaagatcagaggtaccagtagacagtagtagtatgatggaagagacagtaagcagcgagtagtgtgctgcaggatacactgaccatcgatctgctaacaacaaaatgatcgttgcagctagctatagcatatttgcctttgcccttttgtagctttggtctggtctctctctctctctctctctttttttcagctttgttgctccccagcgtcctgcactgcatgccagctgctttgaagctttctctttctactgacatggttctgcaagtgccatcatagctttagtcagccctgtacaatggatgcaggaacgtcgtctttgaattggatctctgtagctcatctctccccctagctcccccactttgttttcttttttgtgctttcctttctgctgcctctgctagcgttatgtgtactgaacaagttcatcaaacagatatagcacccttgcaactaaaaaaaaaaaaaaaaaaaatttggagagtttctttaaataagactttttttttattttatttttttt

SEQ ID NO: 498 - DNA, 1198 bp, Zea mays
  Clone ID: TF_ZmC16163_1
acccctcactcagcccgatctcttttccgccattgggtcctcggaggcgggccggcgtcttcccgcttccagcgcacccccatcttgagtctcgccgccgcaagcttgtgtaaggtgtaaccctaaccctaaaacacttaccttcgcctccagcaccacgcttccatggaggggcgcggaggctaagtatagccaacctctacaccatatccccatggattgagcggattcccaaggcatgggtacaaaccctcacctgcaagagctggccgcttcggcggtggcggcttctgaaccaccaccgcgggcgcgcgtggtgcggatcctagtgcacgatgctgacgccaccgattcgtcctccagcgaggatgaggcaccgccacttcttcctcggcggaggtcgaggggtggtagcagcagcctgagcgtgaggcgccgtgttatggaaccggctggggcaagctcggccgttcggttccgtggcgtccgtcgtaggccgtgggggcgctgggctgcggagatccgcgacccgcacaaccgccgcagactgtggctcggcaccttcgacaccgctgaggaggctgccaacgcctacgacgctgcgaacatccgcttccgcggtgtcagcgccactaccaacttccctgcggcccgctactcgccccctccaaagccagcgaagcctatcatctcgctgactcctgaacccggaaaggtgatcaccttgccaccggtacctgtgaagccaaccttccctgttcaggtgaaggaagtgggtgggagctggggcggcctggtcaagggagctaggtcggaggtcaaggcgtttgcaccgaagccagtatggaagatgatccccagggtgcaccagaagtttccgggttgtgccgatggctctggcctgcgtgccgtccatgctgcctccatctacgtggaggaggttggcggtggctgatggtccaagtatctgcaattactatcgctagaggttttattgtctatctccatggcatcattataacctggtactgtattattttggttagtgttaaactgttgatgtggaaacctatgactcttgctgtgttatgatcggtggtaatataatgtgtatatggtgacatttggtaataaaaaaaaaaaaaaagcggcccaatgtgctggctttgattggggatcaaaaaaaaaaaaaaaaaaa

SEQ ID NO: 499 - DNA, 672 bp, Zea mays
  Clone ID: TF_ZmC587761_1
ctccttccctccgcgttcttatcagtacgttgtccgcgcctaggcaccaaagtccaaagcaacagccatagctcgatctcgatccccggcgcgacgaaagagaaagaagcggcggcaggtcgacaggtcgatcaactaaggtggatccccggaggcatgggaagaggcccctacccgccgacgaggaggaggaacagccgccaccgccgccgtcagcacccaagcacgagcaggtggaggagcagccgtatcaccccctcatcgcgcgcgctctgcagcagcaaggagctgccagcgccggcggaagcccgggagcagatgtggccgacccttccccgtcaccggaggcgtacgcgcagtactactactcggcgcgcgccgaccacgacgccaccgccatggtctccgctctgtcccacgtcatccgcgccacaccggaccagcaacaagcctactaccccgccggatccgccgctgtctcaggagaacagcagcatcagcacgatgcggcggctgcagcggccatcgctgaggaacaagggaggaagcggcactacagaggggtgaggcagcggccatggggaaagtgggcggcggagatccgggaccccaagaaagcggctcgtgtgtggctcggcacctttgacacggctgaggacgccgccatcgcct

SEQ ID NO: 500 - DNA, 964 bp, Zea mays
  Clone ID: TF_ZmC4601_1
attcggcctcagctcaatcccgagacaaaggaacccacctccactcccaccagcaagctcaagcaagcagccaccaccagcagcgatcagcggcagccatggacatgggccggcaccagctccagctccagcacgcggcctcctcgtcctccacctcggcgtcgtcctcgtccgagcaggacaagccgctctgctgctctggtcccaagaagcgccccgcggggcgcaccaagttccgggagacgcggcacccggtgttccgcggcgtgcggcggcggggcgccgcggggcggtgggtgtgcgaggtgcgcgtccccgggcggcgcggcgcgcggctgtggctcggcacctacctcggcgccgaggcggcggcgcgcgcgcacgacgccgcgatgctcgccctgggccgcggcgcggcctgcctcaacttccccgactccgcgtggctgctcgccgtgccgcccccgcccgcgctctcgggcggcctggacggcgcccgccgggccgcgctcgaggccgtcgcggagttccagagacgccgcttcggggcggcagccgccgacgaagcgacctcgggcacgtctcctccctcctcctcctcctcggcgacgaagccggcgccggcgattgagcgcgtgcctgtggaggccagtgagacggtggcgttggacggcgccgtgttcgagcccgactggttcggggacatggacttggacttgtactatgccagcctcgcggaagggctgctcgtggagccgccgccaccgccaccgcccgccgcctgggatcatggtgactgctgcgactccggagctgacgtcgcgctctggagctactagcaagctatagcagcaataagctccaccaactcatctgtactgtagtgtacttgtaccttgtaccttgtaccaaaatccaaattgatttgtagcgaattaacttaccaatcccccttggcaactcc

SEQ ID NO: 501 - DNA, 1002 bp, Zea mays
  Clone ID: TF_ZmC4601_2
tcgcgatctagaactagtctcagctcaatcccgagacaaaggagccctcctccacctccactcccagcagcaagctcaagcaagcagccaccacaccaccagcagtgaacagcggcagccatggacatgggccggctccagctccagctccagcacgcggcctcctcgtcctccacctcggcgtcgtcctcgtcctcgtccgagcagaacaagctggcctggtccccgtcctccccgcagccgcccaagaagcgccccgcggggcgcaccaagttccgggagacgcggcacccggtgttccgcggcgtgcggcggcggggcgccgcgggccggtgggtgtgcgaggtgcgcgtccccgggcggcgcggcgcgcggctgtggctcggcacctacctcggcgccgaggcggcggcgcgcgcgcacgacgccgcgatgctcgccctgggccgcggcgccgcctgcctcaacttccccgactccgcgtggctgctcgccgtgccgcccccgcccgcgctctcgggcggcctggacggcgcccgccgggccgcgctcgaggccgtcgcggagttccagcgacgccgcttcggggcggtagccgccgacgaagcgacctcgggcacgtctcctccctcctcctcctcgtcgccgtcgggcacttatgtctcgcaggcgccggcgccggcgattgagcgcgtgcctgtggaggccagtgagacggcggcgttggacggcgccgtgttcgagcccgactggttcggggacatggacttggacttgtactatgccagcctcgcggaagggctgctcgtggagccgccgccaccgcccgccgcctgggatcatggtgactgctgcgactccggagctgacgtcgcgctctggagctactagcaagctatagcagcaataagcttggcaatgccaccaactcatctgtactgtactgtacttgtaccctgtaccaaaatcaaaattgatttccagcaaattaacttaccaatc

SEQ ID NO: 502 - DNA, 1220 bp, Zea mays
  Clone ID: TF_ZmC21315_1
atagccagccacagccacacacaacgactgacctaccccatgctatctctgcatatttgcgttcttgatcgcgctcttattactcctcaccgtcgacatcacgcgcacgcatcgaactttgtatagcagctagagcaccagagccaggagcggcgcggcacgggacatggtgaagggcgcgcatttccaggacgcggcggtcgacggcggcgccggcggcaatgcggaggcggcgatgcagggcggcgccaagcggcagtacaagggcgtgcggatgcggagctggggctcgtgggtgtcggaggtccgggcgcccagccagaagacgcggatatggctcggctcctactccaccgccgaggccgccgcgcgcgcctacgacgccgccctgctctgcctcaagggctccgccgccgccgacctcaacttccccgtgcacctccccttccacgtccccgccgccgccgccatgtcgcccaagtccatccagcgcgtcgccgccgccgccgccgccgccagtggcggcgccacatgcagcccgccggcgccactcctccgtgcagctacggcgacgcgtcgtcgtcgtctggcgttagctccccggagaccggccggaacgctggcctgtgctacggcacgacgcactacgacgacatggacatggacttggcgggcgacgccgacgcggacctcgccgcgctcgcggacatcgaggccttcttccagtcgcctaagtgcatggagtacgccatgatggacccgtgcagcacgttcttcgcaccggcgcccgtggctacggacgcggccagcgagtgggcggaggaaggcgagatcgacctctggagcttctcgtccctcaactgatccaaccatcgtcagctcctccacagacatcagtttagaggtgaagcaaaagcaagcctcacgtgatcatcgtccatccactcaacacttagcgattaattacagctgcaacctacgtgatcaagaattggtcacggtataaataagcattaaggattaattgattcatactagtattagttagttattttactatactactagtgtctcatggagctacatgttttaaggcagctttccatggagtcaacgacctcccctcagttgcattgcatggcatgctatgggtaggggtaggaagctgtgtgtttctgcaagtgcaagtaatggattataaattatgatgatgtactcct

SEQ ID NO: 503 - DNA, 1217 bp, Zea mays
  Clone ID: TF_ZmC21315_2
gcgttcttgatcgcgctcttattactcctcaccgtcgacatcacgcgcacgcatcgaactttgtatagcagctagagcaccagagccaggagcggcgcggcacgggacatggtgaagggcgcgcatttccaggacgcggcggtcgacggcggcgccggcggcaatgcggaggcggcgatgcagggcggcgccaagcggcagtacaagggcgtgcggatgcggagctggggctcgtgggtgtcggaggtccgggcgcccagccagaagacgcggatatggctcggctcctactccaccgccgaggccgccgcgcgcgcctacgacgccgccctgctctgcctcaagggctccgccgccgccgacctcaacttccccgtgcacctccccttccacgtccccgccgccgccgccatgtcgcccaagtccatccagcgcgtcgccgccgccgccgccgccgccagtggcggcgccacatgcagcccgccgcaactgcaagccggcgccgccgcgtcggcgccctactcggccggcggtggcgccggcgccactcctccgtgcagctacggcgacgcgtcgtcgtcgtctggcgttagctccccggagaccggccggaacgctggcctgtgctacggcacggcgcactacgacgacatggacatggacttggcgggcgacgccgacgcggacctcgccgcgctcgcggacatcgaggccttcttccagtcgcctaagtgcatggagtacgccatgatggacccgtgcagcacgttcttcgcaccggcgcccgtggctacggacgcggccagcgagtgggcggaggaaggcgagatcgacctctggagcttctcgtccctcaactgatccaaccatcgtcagctcctccacagacatcagtttagaggtgaagcaaaagcaagcctcacgtgatcatcgtccatccactcaacacttagcgattaattacagctgcaacctacgtgatcaagaattggtcacggtataaataagcattaaggattaattgattcatactagtattagttagttattttactatactactagtgtctcatggagctacatgttttaaggcagctttccatggagtcaacgacctcccctcagttgcattgcatggcatgctatgggtaggggtaggaagctgtgtgtttctgcaagtgcaagtaatggattataaattatgatgatgtactcct

SEQ ID NO: 504 - DNA, 499 bp, Zea mays
  Clone ID: TF_ZmC21315_7
gccagccacagccacacacaacgactgacctaccccatgctatctctgcatatttgcgttcttgatcgcgctcttattactcctcaccgtcgacatcacgcgcacgcatcgaactttgtatagcagccagagcaccagagccaggagcggcgcggcgcgcgacatggtgaagggcgcgcggctccaggacgcggcggtcgccggcggcaatgcggagacggcgatgcagggcgccgggggcggcgccaagcggcagtacaagggcgtgcggatgcggagctggggctcgtgggtgtcggaggtccgggcgcccagccagaagacgcggatatggctcggctcctactccaccgccgaggccgccgcgcgcgcctacgacgccgccctgctctgcctcaagggctccgccgccgccgacctcaacttccccgtgcacctccccttccacgtccccgccgccgccgccatgtcgcccaagtccatccagcgcgtcgccgcc

SEQ ID NO: 505 - DNA, 710 bp, Zea mays
  unsure (1)..(710): unsure at all n locations
  Clone ID: TF_ZmC444_1
ctcgaggccggccgggccgggattcctattcccacccgtccatccatcctccgaagctcctcggcagacaagcagcagcgagagaaagcaagcaaggcagaggcagttgtgttgctggtcggtccgtccatggcgcccaagagaccagtgtcggcggcggcggcggcggagcagccgaggctgcgcggcgtgcggaagcggccgtggggccggtacgcggcggagatccgcgacccggtgcggaaggcgcgcgtgtggctgggcaccttcgacacgccggagcaggcggcgcgggcgtacgacgccgccgcgcgcaagctccgcgggcccggcgccgccaccaactaccccgccccggagccgacggcggaggcgttggcggaggctccagcggcgagcgggagcgggagcgccgtggtgtacgagtcgtcgtcggcgtcggcgtcggcgtcgtcgtgctccctgccgctggcggccccgtcgctggacctcagcctggcgctgccggctgcggcggcggccgcagagccgtaccagctgttcgcggacccggcggcggcggccgccgtgacgccggcgctgctgcacttcttgccgcccaanagcgaggagcagcagagctactctgggtcatcgtcnctgtcctcgtcgtcggcgtctgtantgttcgacgcggcgccgcccgtgggcctgcggctggacctcaacct

SEQ ID NO: 506 - DNA, 1020 bp, Zea mays
  Clone ID: TF_ZmC2282_9
aactcggcaactccgcctcccaagtacacccccactccctcgctcaccagaggaactagcggaccgggcaaagccgagccgcaaccgcgaagatcttgcgtggcctccttttcccagctcgtcactgtgccgctcgtgccctccactcccggtccgcccaaccaataatccatcgatccatccaccaccaccaccccgctgcggcgatgtgcggcggcgccatcctctcgggtttcatcccgccgtccggggtggcggcggcggcggcggcggccaagaagaagcagcagcagcagcggtgccgtgtgactgcggacctgctgtggccggggcccggcagtaagggagctccccaggaccaggaggaggacttcgaggccgacttccgcgagttcgagcgcggcctcggcgaggatgacgtggacagcgccggcgaaggcggcgaccccgaggtccaggagcttcctccgccggagccgacgagatggcgtgatgacgacgactccaaaggatgtcaaaggagatagaccagtaaagcgcggccggaagaaccagtacaggggaatccggcagcgcccttggggcaaatgggcagctgagatcagggaccctaacaagggcgtccgcgtctggctcggaacctacaacaccgccgaggaggcagctagggcatacgacgccgaaccgggcaagatccgcggcaagaaagcgaaggtgaatttccccgatgacgacgcgccaggcactggtcacaggccagcgaacgcagcgcctaggctagtagctccacccccaccccccaaggcctgcgccgatgagatctttaacaacctgaagaacgacgacgacgacaacaacaacaacaacgatgatctgtttgcgatgtttgcgttcggtgacaataagaggaggtcgtccgcgaccaacactatgctctccgtctccgacgaccagcgcagcaactcctacggctccggctcctccgacttggtggggtcgtggtcgtgggacgacgacgcg

SEQ ID NO: 507 - DNA, 837 bp, Zea mays
  Clone ID: TF_LIB4742-133-A1-K1-G3
ctcgaggccggccgggatagggtaatggaggtttgtttctcaactcggcaactccgcctcccaagtcacacccccactccctcgctcaccagaggaactagcggaccaggcaaagccgagccgcaaccgcgaagatcttgcgtggcctccttttcccagctcgtcactgtgccgctcgtgccctccactcccggtccgcccaaccaataatccatcgatccatccaccaccaccaccccgctgcggcgatgtgcggcggcgccatcctctcgggtttcatcccgccgtccggggtggcggcggcggcggcggcggccaagaagaagcagcagcagcagcggtgccgtgtgactgcggacctgctgtggccggggcccggcagtaagggagctccccaggaccaggaggaggacttcgaggccgacttccgcgagttcgagcgcggcctcggcgaggatgacgtggacagcgccggcgaaggcggcgaccccgaggtccaggagcttcctccgccggagccgacgaggtttgccttcgccaccgcggccaaggcggcagttgatggcgtgatgacgacgactccaaaggatgtcaaaggagatagaccagtaaagcgcggccggaagaaccagtacaggggaatccggcagcgcccttggggcaaatgggcagctgagatcagggaccctaacaagggcgtccgcgtctggctcggaacctacaacaccgccgaggaggcagctagggcatacgacgccgaagctcgcaagatccgcgggaagaaagcgaaggtgaatttccccgatgacgcgacaggcactcgtcacaggccaacga

SEQ ID NO: 508 - DNA, 1854 bp, Zea mays
  Clone ID: TF_ZmC2282_2
cattggaccctcggagccgcgccgggatctcccaactccgcctcccaagtcccacccccactccctcgctcaccagaggaactagcggaccaggcaaagccgagccgcaccgcaaccgcgaagatcttgcgtggcctccttttcccagctcgtcactgtgccgctcgtgccctacactcccggtccgcccaaccaataatccatccatccatccatccaccaccaccccgctgcggcgatgtgcggcggcgccatcctctcgggtttcatcccgccgtccggggtggcggcggcggcggcggcggccaagaagcagcagcagcagcagcagcggtgccgtgtgactgcggacctgctatggccggggcccggcagtaagggagctccccaggacaaggaggaggacttcgaggccgacttccgcgagttcgagcgcggcctcggcgaggatgacgtggacagcgccggcgaaggcggcgaccccgaggtccaggagcttcctccgccggagccgacgaggtttgccttcgccaccgcggccaaggcggcagttgatggcgtgatgactcctcctccaaaggatgtccaaggagatagagcagtaaaaaagcgcggccggaagaaccagtacaggggaatcaggcagcggccttggggcaaatgggcagctgagatcagggaccctaacaagggcgtccgcgtctggctcggaacctacaacaccgccgaggaggcagctagggcatacgacgccgaagctcgcaagatccgcggcaagaaagcgaaggtgaattttcccgatgacgcgacaggcactcgtcacaggccaacgaccgatgagatctttaacaacctgaagaacgacgacaacaacaacaacgatgatctgtttgcgatgtttgcgttcggtgacaataagaagaaggttcctgcagcgaagccagccgccgccgagggtggcagtggcagtggcagcttcctcgtccctgcgcctgcggtggcggtggtgcccggtaataagaggaggtcgtccgcgaccaacactatgctctccgtctccgacgaccagcgcagcaactcctacggctccggctcctccgacttggtggggtcgtggtcgtgggacgacgacgcggccgcagccgccatgacctcggactacacctcctcggtcttcgctcccgataacgccgtgctgccggcggcgtcttactcttacatgcaaggcggagcgccgaagagaatgaggagcagctacggcggcgcgccgcccagcctcgcacatgacgcggccatgcctggctttggccttgataaagtgagctaccactaccaggcgttgcctccttattacgtcgggagcagcaacgcgtcggtgggcagcctcggtcttctgcaggctgatgatgctccgcaggatggagcgagcgccggggatatctggagcctcgacgagctgctcatgctggcagctgctggtgcttattgagaaccgcaagagaaaaaaaatgtgttggcgctgctagctggagacgagacgagggcgagaggcagttgcatcatccgccatccgctatcgttttgtctctcctatatctagtagtatacatgcttctggcagtcgaactctatggcaatgtgtgtatagtgtgttgctgccgtctatgattggaagcgagctcgagactggttcaataattcacctttgcctaccgtaccgccggcctgctggactgtagtgtgcgtactgcatatatatgccataattatgtatgccctcctcctatatatactatatattattatgatgtgcttaaaaaaaaaaaaaaaaaaaaaaaaaaaaaaaaagcggcc

SEQ ID NO: 509 - DNA, 908 bp, Zea mays
  Clone ID: TF_ZmC2282_8
gcctcccaagtcccacccccactccctcgctcaccagaggaactagcggaccaggcaaagccgagccgcaccgcaaccgcgaagatcttgcgtggcctccttttcccagctcgtcactgtgccgctcgtgccctacactcccggtccgcccaaccaataatccatccatccatccatccaccaccaccccgctgcggcgatgtgcggcggcgccatcctctcgggtttcatcccgccgtccggggtggcggcggcggcggcggcggccaagaagcagcagcagcagcagcagcggtgccgtgtgactgcggacctgctatggccggggcccggcagtaagggagctcctccaaaggatgtccaaggagatagagcagtaaaaaagcgcggccggaagaaccagtacaggggaatcaggcagcggccttggggcaaatgggcagctgagatcagggaccctaacaagggcgtccgcgtctggctcggaacctacaacaccgccgaggaggcagctagggcatacgacgccgaagctcgcaagatccgcggcaagaaagcgaaggtgaattttcccgatgacgcgacaggcactcgtcacaggccaacgaccgatgagatctttaacaacctgaagaacgacgacaacaacaacaacgatgatctgtttgcgatgtttgcgttcggtgacaataagaagaaggttcctgcagcgaagccagccgccgccgagggtggcagtggcagtggcagcttcctcgtccctgcgcctgcggtggcggtggtgcccggtaataagaggaggtcgtccgcgaccaacactatgctctccgtctccgacgaccagcgcagcaactcctacggctccggctcctccgacttggtggggtcgtggtcgtgggacgacgacg

SEQ ID NO: 510 - DNA, 410 bp, Zea mays
  Clone ID: TF_LIB3356-023-P1-K1-B12
gccaaaataaactcaggtacgggcctggctacgctacgctacgcgcgccgcccggtgggctcacctcgcatcgggccggtcccggagctgaccgtgcccggctggggctgttgatttgcatgcaggaaggcgcggatatggctgggcaccttcgagacggcggaggacgcggcgcgcgcctacgacgaggcggcgcggatcatgtgcgggccccgcgcgcgcaccaacttccccgcggacgccaacggcccgccgccgtcgttcctcttcgcggcgcttgtcgacaagctgcaccggttcaacctggcgttcgtgcaagccgcgcagcggcagaaagaggcggcagcggtcgctgcggcagcaacaagaacctccgtgcccgcgacgccttcgacgcctgcgggcacgca

SEQ ID NO: 511 - DNA, 933 bp, Zea mays
  Clone ID: TF_ZmC7732_1
ccccgcgtccgccccgcgtccgctcgcacacactcccctgccgctgtgccgcacccgcacccctccagcgcgcgcgggcacgagcacgagtacgaggctccatcgccggacgaccaggtagttgcactgccgccaccgtcgacgacgaccgaaggcgacgatggccaggccgcagcaacggtaccgcggcgtgcggcagcgccactggggctcctgggtctccgagatccgccaccctctcctctgaccgcgcccggctggggctgttgatttgcatgcaggaaggcgcggatatggctgggcaccttcgagacggcggaggacgcggcgcgcgcctacgacgaggcggcgcggatcatgtgcgggccccgcgcgcgcaccaacttccccgccgacgccaacggcccgccgccgtcgttcctctccgcggcgctcgtcgacaagctgcaccggttcaacctggcgtccgtgcaggccgcgcagcggcagagagaggcggcggcggcggcggcggcagcagcagcaacctccgcgcccgcgacgcctccgacgccgccggccacgcagtggggcggcggcggtaggtccctggaggagcagcacgtggagcagatgatcgaggaactgctggactccgacttctccatggagatttgctgctagtgctaggctagccgcgacgcgacctgcctagcgactggctagcgcccccggccggcccgtcaccgccgcgctccgctccacctctcctctgttcttgttcttgcacttgcaccatgcgtcgcgctcgcgctcttctttgtactcgtgccgacgtgcgtagtatcgctcagccgctgcagcgtgcgtaggagcctgatttgtgtacgccacgtgtatagctgtagctgtacgtataagtatatatatgtaatcgagcattctcattcttgc

SEQ ID NO: 512 - DNA, 520 bp, Zea mays
  Clone ID: TF_21393791
ttttttttttttttttttcgatagaaggagttatgtattatgtaaggaataatgatgaagggggacgaggggaggaactcgggcccagttgcatctagcttgcggtggactcgtcgtgtaacaccacgatacccttcgagtgctgggagtagcgctcaaccccgatccatactagtgttcttacacatggcagcaaggcgtgcagcgacagcgccggaagcgggacacgataatcaagcgtcgcaaggaagttggtgttctccgacggcccgcggagtcggcacgcctcactgtcgtacctcctggccgcctcctcagcagtgtcgaacgtgcctagccacagccacacgcccttatgttgatcgcggatctccgccgagtaccgccccctaggccgtctcctctgcgcgtccctgtacctcggctccgtcggcacgcccgccgtcgtcactttcctcttgccaccgtcgacaacactccccttgggcaccgtggcattgcagcacggctgatgctccac

SEQ ID NO: 513 - DNA, 1842 bp, Zea mays
  Clone ID: TF_ZmC5960_2
agttctaacattcccctccttgcaccggtgctacccttcttctagcttagacttctatcaaggcacgcggccgccatggatatggacatgagctccgctacccaccccgctcaccactggctctccttctccctctccaacaactaccaccacggcctcctcgaggccctctccagctcctcctccgcccaccagatcgccggagatgaggcgccggtggatgaggcgcctaagatggaggacttcctcggctgcgtcggcagcgctgggacgggatcgacggctgtggtggaccacggcgagctgggcagcatcgccgcgggtttcttacaccggtatccggcgcacgacgggatgacggatcagaactctggcgcggtgaccgtcgcggcggcgacgatggaggttgccgagtccgatcaggcgaggaggcccgccgagacatttggccagcggacctccatctaccgtggcgtcaccaggcaccggtggacggggaggtacgaggcgcacctgtgggacaacagctgccgccgggagggccaaagccgcaaaggccgccaagtctacctaggaggctatgacaaggaggagaaggcggctagagcttacgacctcgccgcgctcaagtactgggggcctacaaccacgaccaacttcccggtaaagagaactcaaagtcaatctcgggcggcaacacatatttgctgcgagagatggctagctttacctgaatgatccatgcatgcatggcgtaggtgtccaactacgagaaggagctggaggagatgaagtccatgacgcggcaggagttcatcgcgtcgttgcgcaggaagagcagcggcttctcacgaggcgcctccatctacagaggagtcacaaggcatcatcagcacggccggtggcaggcgaggatcggcagggtggccggaaacaaggacctgtacttgggcactttcagtactcaggaagaggcggcggaggcgtacgacatcgctgcgatcaagttccgcgggctcaacgccgtcaccaacttcgacatgagccgctacgacgtggagagcatcctcagcagcgacctccccgtcgggggcggagccaccgggcgcgccgccaagttcccgttggactcgctgcagccggggagcgctgctgcgatgatgctcgccggggctgctgccgcttcgcaggccaccatgccgccgtccgagaaggactactggtctctgctcgccctgcactaccagcagcagcaggagcaggagcggcagttcccggcttctgcttacgaggcttacggctccggcggcgtgaacgtggacttcacgatgggcaccagcagcggcagcaacaacaacaccggcagcggcgtcatgtggggcgccacctctggtgcagtagtgggccagcaagacagcagcagcaagcagggcaacggctatgccagtaacattccttatgctgctgctatggtttctggatctgctggctacgagggctccaccggcgacaatggaacctgggttactacgactaccagcagcaacaccggcacggctccccactactacaactatctcttcgggatggagtaggtgcatgcgctgacaagctagctagctgaaatcaggtggtaggcctaggaagaagctaggactgacatcgaactgatcacaattttggctgctacatataccatgcatgccccatgtatggatgggggtgcgtgtgcttccttctgcttgctattcacgacacttgctgacttactgtggcagagccgcagagggctcgtgtaccatcagcatttctaaattctaattatcaagctcgtttcaagct

SEQ ID NO: 514 - DNA, 1232 bp, Zea mays
  Clone ID: TF_ZmC3047_1
ctcgtctgtctctccttgcctgtgcgcttcggttattagctagctagcttgggtctagtctagtgtaactcccggccgccatctttgctgtacttcgttcgtccatgtcgcgctcgcgcacggtgcggatcttctgggacgatcctgacctgaccgattcctccggcgacgacgagggctgcggagcccggagggtcggcagaatggtgagggagctggcaccagcaccagcaccggcaccagcggctcttcccgtgccggatcagtgcaacgccggggacggcgaccgcgggaggaaggccggcgtcgctggtcccggcgtgtgcagcggggcgcggagacgggtggccaagggcgccggtggcccggcgagcaccaagttccgcggcgtgcggaggaggccgtggggcaagttcgcggcggagatccgcgacccgtggcgcggcgtgcgcgtctggctcggcaccttcgacaccgcggaggaggccgcgcgcgtctacgacaccgccgccgtccagctccgcggggccaacgccaccaccaacttcgccgcgtccgccgccactaacagcggctccggggccggggccgggcaggacccggcgacgacaccggcagcgggctacgagtccggcgcggagtcgtcgccgacgtccgtgctccgcaaggtcccctccctgtcctccctcgccgaggacgactccgacgcgccggccgccgagcgccgcagcctggccgtcctcgaggaggaggagctgggcgagttcgtgccgttcgaggacgcgcccgtctacgccaccagcggcttctgggacttcgagcccgacgcggggttcctctacgccgagccgtcgtcgccggaggcgtcgtggaatgccgccgccgccgtcgccgagcccgcctcgtctgacgacgcgcccagctgggccgcgtcgccggtgcaggagaacgactacttccaggacctgcgcgacctcttcccgctcaaccggcttcccgcgattttctgaacaggtggacggggaacgccggaaccgggaacggcgccgctggttcgtctaccgggatgttattttggacgtcgagagtgcgctgtgtctgtgtctgtgtctgtgtcgtgcctacgcgcaccgtgtacttgtacgcctttccccacgccgtttttgttactatcttcgagtcgatgagaaatgtggaaatatgctgccgaacgatgagcacgtagagttttg

SEQ ID NO: 515 - DNA, 1111 bp, Zea mays
  Clone ID: TF_ZmC6700_3
cattgggtacctcgaggccggccgggtgtttttaaaaaaaaaaaaaaaaaaaaaaaaaaaaaattagttacctcgacgagggccgggaacctcgcctccccccactccttccctccctccctcgctcacccagtggggcagccaaagccgagccgcaaccgcaaagatcttgcgcggcctcctttccccagctcgtcactgtgccgctcgtgccatccaccctcggttcacccaaccaacaatccatccgccaccacaccccgctgcggcgatgtgcggcggcgccatcctctcgggtttcatcccgccgtccggggtgccggcggcggcagcggcggccaagaagaaacagcagcggcgtgcgacggcggacctgctgtggccggggcccggcaagaagggagcgccccgggaggaggacttcgaggccgacttccgcgagttcgagcgcggcctcggagaggatgacgacgtggacggggccggcgacgaggtccaggagcttcctctgccggagccggcgaggcttgccttcgccgccgcggttggggcgccgcgcactgcagttgacggcgtgatgactccaaaggatggtgaaggagacatgcctactaccgctaccaactcagcagcaaataagcgcaggcggaagaaccagtacaggggaatccggcggcggccctggggcaagtgggcggccgagatcagagaccccagcaagggcgtgcgcgtctggctcggcacatacagcaccgccgaggaggcggccagggcgtacgacgccgaggctcgcaggatacgcgggaagaaagccaggtcaatttccgggacgaagcggcggcagcagcgtgctcagaagccaccagccgcaactactccaactgcttgtcgccagcgcagcgaggctagctcctcgtccgcgcactgcagttgacggcgtgatgactccaaaggatggtgaaggagacatgcctactaccgctaacaactcagcagcaaataagcgcaggcggaaggaccagtacaggggaatccggcggcggccctggggcaagtgggcggccgagatcagagaccccagcaagggcgtccgcgtctggctcggcacata

SEQ ID NO: 516 - DNA, 610 bp, Zea mays
  Clone ID: TF_LIB4073-022-Q6-K1-D12
cggacgcgtgggcggacgcgtgggcggacgcgtgggcgcgcgcgcctcccgctgttctctccacaaagaaagaagagcaacgaagccatggcgccgagaacgtcagagaaaacgatgacaccggcggcggcggctgccgccacggggctcgcgcttagcgtcagcggcggagccggagccagcggcccgcacttcagaggcgtcaggaagcggccgtggggccggtacgccgcggagatccgcgacccggccaagaagagccgcgtgtggctcggcacgttcgacacggccgaggaggctgcgcgggcctacgacgccgccgcgcgcgactaccgcggcccaaaggccaagaccaacttccctttcccttcgtcgtgcatgccactcgccgccggcgccggcgccggcagcttgcctgcggcgaaggccgtcaccggtggcggcggcagccggagcagcaacagcagcaccgtcgagtctttcagcagcggcagcgacgtgcaggcggcgcccatgcaggccatgccgctcccaccgtctctggagctcgacctgttccaccgcgcggcggctgcgggcacgggcacgggcggcgccgccgtacggttcc

SEQ ID NO: 517 - DNA, 131 bp, Zea mays
  Clone ID: TF_uC-zmflteosinte001a02b2
cactggctaaccacgacggcatcttttgcagagtggctggagtgttcctgctagtgccaaacgtattgatgcagaccatgccttcatctatctcagacgggagagaggcgagctcggccgaggagatgatc

SEQ ID NO: 518 - DNA, 1348 bp, Zea mays
  Clone ID: TF_ZmC258_3
agtcaacgtgggaactacgggccgaagctgattcagatgaagtttatgctcaaattatgttgcagccagaagctgatcaaaatgaactcaccagcctggacgctgaaccacagacgtgaaaaagcactgcccattccttctgcaagacactgacagcttgggatacgagcactcacggcgggttttctgttcttcggaggcatgctgaggaagaagtattacctgaggttactgctccaggtgttggttatgagcagactgctgcctctgtagagttgaactcggataagctctcacagccatctgatgtcaacaattctgatgccctagcagctagcagtgaacgttcacctcttgaatcccaaagccggcaagtgaggagctgtaccaaggtaattatgcaaggaatggcagtaggaagggctgtagacctgacaaagcttagtggctacagcgatctttgccagaagctggaggagatgtttgacatccagggggagctgggttccacactaaagaaatggcgggtcattttcactgatgatgaggatgacatgatgcttgttggagatgatccttgggagtaagaaccctttgtctctgtattaacgagtgcatgttttccattattggaagtcctaatccctgtgcaatgcatcttccttcagtgagttttgcaggatggtgaaaaggatttacatttacacatacgaggaggcaaagaagctgacatccaagtcaaagttaccggttagcagtgacagcagcaagctgagcgctgcgaactcactgtctgaatgactatgaacaaaaactgcagagtgctaacgtccctctaattttgttatttccatcatttgattatgggggtgaatgctcacggttgctccgtgggctgaagttgtggttggcattcaactgccttgagttttggaggcttttggactgccttgccagcatgagcctcctggaagaggcaccctggcatctgcgtgccatttcccatttgttcgtgccgtttggtaggagtatccattggcttatttagcaggtccctggtttgaagaaagaagcggtcagctgcaagatggacggtgccttgcctcttcttcgactacttagctagtaattaggactatgtatgtaatgaatgtatatagtgccattaagacgcccatgccctggtattgaggtcccggcatttgtatgaatcaattgttcggaaattgttacctttagcagcaacgaacctgagggtgtagggtggccaggtgggagaagttgtatgtttctttcagtaacaatctttgtgcaagtgatctgtatatagtctactgttttaataagc

SEQ ID NO: 519 - DNA, 276 bp, Zea mays
  unsure (1)..(276): unsure at all n locations
  Clone ID: TF_LIB3180-047-P2-G3
ctcaagaccttgactgcttcagatacaagggcccatggtggattgtgtgtggtcatgaggcattctttagaatgtttgtctcaactggacatgtcttataattcaccatgnattgatctggtttttataggatctttatggaaatgattggcatttatgtcacattttttgaggcccacctagggtgcatgtactttattacaggttgaagttgttattatagtttttttttttccctcgcttggggacgtgtttttatttttattagtggttgtc

SEQ ID NO: 520 - DNA, 603 bp, Zea mays
  Clone ID: TF_LIB4757-020-Q1-K1-H5
gggctccttccccgcaaatcgcccgggtgcctgccaggtgcgcggcgcagggaggtcgcgacggattccgggcaagtgcatgtgagatccgatggtggcggctgtccagcgtgccgctactcggggagaaggtctactacttcccgcagggccacatcgagcaggtggaggcatcgacgaaccatcttgccgagcatcagggcacgcccctctacaacctgccatggaagataccctgcaagctcatgaacatggagctgaaggctgagccggatactgatgaggtgtacgcccagctcaccctgctccctgataagaagcaagatgagaatacatctgcaagagtggagaatgaggaggcagaggaggagggtggtgcctcatgtgccaccagccacaagtgaggaggggcttcgcatccattccttctgcaagacattgactgcctcagacacaagcacacattggtggtttctcagtgttgcgccggcatgcagatgagtgcctcccaccactggatatgggtcaacatcccccaaatcaagaatttggtggccaaggacctgcatgggggttgaggtggcggttccgtcacatctttcg

SEQ ID NO: 521 - DNA, 669 bp, Zea mays
  unsure (1)..(669): unsure at all n locations
  Clone ID: TF_LIB3689-215-Q6-K6-B9
ccgctgngnaggggtaagcgnntcccggcccggncccggnaacccagtacagtacctttgccagcctctggtgaatgagcgtcgcctcgtctcgctgcagaatgcggccgatttgaggaaggctgtgggcgcgatggatgcggtttcgggcggattcgcgaggaggctgtagaggttaggttccggtgtcccccggcccggccggtcgtgggagatgagctcctcgtccgcggccagcatcgggcagccgccgccgcccgcgccgccgccggaagaagagaagaagtgcctcaactcggagctgtggcacgcctgcgccggcccgctcgtctgcctccccaccgtcggtacgcgcgtcgtctacttcccgcagggccacagcgagcaggtggcagcgtcgacgaacaaggaggtggacgggcacatccccaactaccccaacctgccgccgcagctgatctgccagctccatgatgtcacaatgcatgncggatgtggagaccagacgaagtgtacgcgcagatgacgctgcagccgctcaatccacaagagcagacggacgcgtacctgcctgccgagatgggaatcatgagcaagcagccgacgaattacttctgcaagacgctgactgcgagcgacaccagcacgcacggcgggttctctgtgccc

SEQ ID NO: 522 - DNA, 1689 bp, Zea mays
  unsure (1)..(1689): unsure at all n locations
  Clone ID: TF_ZmC37547_1
tttttttttgttcccaaactggcgatagataaccggccacaagtatgctgatgaaatgaataagtgttgtcaaactgtaataacagatacacgcattttaactaaatcgacagtgacaactgaattgccatgttgccatggcacttaccataacacaacaactcgaactttattccaagctaattcgtcaaagaggttattcatcaacttcgaccaagcaaaacacaactgaccacgacagagttctaacgaccaagtcacgaagcgtacaccaaggttttccacacgaccagacaagcatcgcgattctgcttcggcggcagacaaacacaaatgaaaacacacagcagttacttcgctctaagctcagtcttgcacaagtttcagattgccttgtccgaaccaccatgcaatcaagcccgctcgaccatgtattccacgagaggtttctgcagtctcccctccgtgccctctataatggtgagcctccgtgctactttcatgaagtcattgaacggctcttcaccagtatgcctgacagcaccagcagcatcacggtagcaaaggtgcctcattatttccgccttctcaattccaaacatgtccgctaactggccgtacagctcttcgtacgaaccaaagacagataggtcaatggtgcggccaacatcctctgattccataaacaccttgcagtgcccgtcttctagcccaagctcagaagccttgcggtcttgggataggccttccctcgatcctccagaatccatctgctgctcagtaaggataggctttccgaacagcattatgtggggtctctttatgtcatcagatttctctgtggcctgtggtgtgccgattgtcagcaagcaagagacactctcactggctggtgcgctgctgatcacaaaacccttggatatacggggcgtcggagtcatagcaccaagccggttgaaaccgaggtgcagctggttaagctggtagtctgttaggggtaaaccaaattgagcatgcctggctccctgtatgcctgcaggagcgatgtccgagaaacagcgaagtgggctgttgcttggaccaagtgggttgccatggaaaattggattcaacagctgaccctcaaatggaaagtctggatgttgggccacccgcaacttctttctaggtggagaaaatgtccctaggtgaatcggtggaatgcttgatacaatctccacaagccatggattgacacatttcacattctgcagcaagtctggttcatcccatgacacctgaagaagcctccacggtgaatttggccatctgattgggtcagcaacctgagcagaagctatcgtccccataaaccagctgatccttgacgaatcctctgtctcaaatgccatcttgaacctcatcccagggcaccactggttcctcatcgcgttctgtaccgatgcagccttcacaacaaactctggagtgctagctctcgggtagtacaccacctcaaatggctgcccgctcgcggctaagcttgcggcctcaacaacgtccgtgatctccaccttccccctgccactcatgtacccaccaggacccttagtgatcttaccggcctcgtccttcaagaacgccgacaaggccccgtacaccggggcgttccagccagagatgcacnccggacgctgggcggacgctggg

SEQ ID NO: 523 - DNA, 203 bp, Zea mays
  unsure (1)..(203): unsure at all n locations
  Clone ID: TF_LIB3245-352-P1-K1-E12
acccacgcgtccgcccactcgtccgcccacgtctttctgactcttgccggatcatctgggtcgggggcactgtctcctgcgcgcgacttcnctgaccccatccgatggtccaattcaccctggaggcttgtccaggtctcctgggatgacccggacctgttacatatcgtgaagagggcgagcccatggcttgttgagctgat

SEQ ID NO: 524 - DNA, 588 bp, Zea mays
  Clone ID: TF_5555419
cccctacgcccgggtggcatcattacgccggccttatgcgaggtaatgtgagcccttgcgcggctgccaaggcacggggcaaggtgcgaccagaggacgtggccgaggcggcgaggctggcggctgccgggcagtcgtttgaggtggtgtactaccctcgcgcgagcacgcccgagttctgcgttcgcgccgccgcggtccgcgcggcgatgagggtgcagtggtccccagggatgcggttcaagatggcgttcgagaccgaggactcctccaggatcagctggttcatgggcaccgtcgccggcgtccaggtcaccgaccccatccgctggccgcagtcgccgtggcgccttcttcaggtgacctgggacgagccggaccttctgcagaacgtgaagcgggtgagcccatggctggtcgagctggtgtcaagcatgccggccatccacctcgcctccttctcgccgccgcggaagaagccccgcatcccagcgtaccccgagttccccttcgaagggcagctccttaacccggcgttcccgcccagcccactgccacacggccagcaacaccaccacaatttcctta

SEQ ID NO: 525 - DNA, 2129 bp, Zea mays
  Clone ID: TF_ZmC15491_1
tacaatgttgagtgttggtctcactccaaatatagtaacctacaattctcttatatatggtctctgcaagtctggggagttatccagggctgtcagtctttttaagaagttgtggacaaagggtatatcccctaatgctatcacatataatacattaattgataagcattgcaaggatggttacataaccgaggcctttaaactaaagcaaaggatgatagaggaaggtattcatcctactgtgttcacctattctatactgattaatggtctctgtactcaaggctatatggaagaagcaatcaagcttcttgatcaaatgattgagaataatgtggatccaaattatgtcacatattggacactgattcaaggttatgttagatgtggtaacatgatagagatttcaaagatttatgataagatgcatatccatggacttctgcccaccaatgtttctggggatgtaaaacaatcatgtcctgctatacacaacccgaatagagaaacatgtcagatgaagatgcacagccagtgctagctgctatcacattctttgcatgtctacttcttttgaaagatggcagtgacttatgtttgtatgaggagcaaatcatgggacccatttctatcttgggatgatatccaatataattgtctaattgtcttctgcgaaggggcctggtcatatcatgagaaatgtttccaacctccctcacatgtcagccaagtggtatcttctaactacaggctggattggctttctaagtgcagagacttgttgctggtgactttgccccttttatctggacttaggaatggcaatactcagcttctgctgggaatttgctgggtatatcggctacaaactgtcaagccatcttaagtcttatcaagtgatagcatgcatatcggtcttctcgctgcagctgttcatgccgtttaaacaattagtcggcttacaattttctacagcccaaggcaagcccttcagattttgtcataccgcttgcaaagtctgttaagactgtatactataccagtgtatctgtggggatgtgtttcaagatgctttttgagacaggagagtctagcgtgaggagataagttcaaatctgtttgcaacatcacctcgttattgaagtgggagaaacgaaagacgactagtctttttcgtggtctcgatccacattctattccagcagaagaactgtcggcatctttgaggtacacgctacattccatcaatattgcagtccgtatcctatccacgattgttcttcatggatcaggctttaagtatggttcatgctcaaatatatggcagcagagttcctactgaagtatatgacagtcccagaggtggtgaagaaaccccattgacagaaagtggttcgagttactttggagctgactctggattctgtcaagaaacagtcttttggttccaagagaagcaatagttttagtttctctggtgcatcttctcactccatggagaggcatcgatatttgcagagaggaatgttgtcgtcatcaaaggcccttcgaactgcttttgaatcgaacattgcttcaaggtcagaaaagcaagcgcagccgctaaacagattgatttgaagtgaagttcagccgtatcatcagacatcatgcacacaaccatcatggtaaattcctgttcagcacgcacagtaggtctccgtgtgctctgtacggcctagtgctgctgcgctagctggttgggtgcgtccgtgcgtggacgcgctgtagcaaccagggcacccctgtccatggtcgcgatcgcggcctccgctggcctggcccttggcgtgtgcggggcgtagagacggaggagaatgttgtactatgtgcgggcgcggcgagcgaagccggctggaccagaccagaccacaccagggccagagccagggccacgtggcattggctcggcgtagagaacgtcctcccaatatctatgaatttactacaatatacgtctcattatttttagattcatatatgtatccatcacgggggcctccggcctcgttatagcaagtatgggctgactgtaatataatatccaactccgattcaaaactgtaatgtttattacaaaatttgacttt

SEQ ID NO: 526 - DNA, 420 bp, Zea mays
  Clone ID: TF_uC-zmflb73175c11b1
cttacgcgtgggccagaaggcactgtatagtgaccaaatatctttaggaatgcgattccggatgatgtttgagaccgaggaattagggatgagaaggtacatgggtacaataactgggataactgatctagatcctgtaagatggaaaaactcccagtggcgcaacttacaggttggttgggatgaatctgccgcaggggaaaggagaaacagagtttcaatgtgggagattgaaccaattgctgctcctttcttcatatgcccccagcctttctttggcgtaaagcgccctaggcaaatagatgacgagtcatcagagatggaaaaccttttcaagagggcaatgccttggcttggtgaggagatatgcataaaggacgctcagacccataacaccacaatgcctggtttgagcttggt

SEQ ID NO: 527 - DNA, 656 bp, Zea mays
  Clone ID: TF_LIB3245-093-P1-K1-H4
acgagggggaaggccgccagggtgtgggtgcggccagaggaggtcgtcgaggcgcgctaacctggccgtgagcgggcagccgttcgaggtggtgtactacccgagggcgagcacgccagagttctgcgtcaaggcggggggggtgcgcgccgccatgcgcacccagtggtgccccgggatgaggttcaagatggccttcgagacggaggactcgtcccggatcagctggttcatgggcactgtctccgccgtgcacgtcgctgaccccatccgatggcccaattcaccctggaggcttctccaggtcgcctgggatgagccggacctgttacagaacgtgaagagggtgagcccatggctggttgagctggtgtcgaacatgccggtcatccatcacctcacagccacgcccttctcgccgcccaggaagaagctgtgcgtcccactgtacccggagcttccgctggagggccagttcccggcgccgatgttccacggaagccccctcctcggccgtggcggcgccggtggcccgatgtgctacttcccggacggcacttctgcaggcatacagggagccaggcatgctcaattcggcatatccttatcagatctccacctgaacaagctgcagccgggcctgtcaccgtacgggc

SEQ ID NO: 528 - DNA, 690 bp, Zea mays
  unsure (1)..(690): unsure at all n locations
  Clone ID: TF_ZmC84987_1
aatattttacatgccatagcccccgtataggcctgcctctcgtctgcgccctactccccaccacttcccttccccgcctacaagcaagccgccccagccattcatggccatccggacccgtgggtgtcgccgccactccacctccacctcccacccactcctctcaccgcaccactaaacccgcctccctcgctcctcacccgctccctgtccatccacccatcgcctcgccgccgctctgctgccgtttgctccagctgcggccgaccggggccatggctggcatcgacctcaacaccgtggaggaggaggacgaggaggaggcggaggcgctgcctttgcccggacccggtggccgtggcgccgtgtgcctggagctgtggcacgcgtgcgcgggccccgtcccgccgctgccgcggaagggcagcgccgtcgtgtacctgccgcagggccacctcgagcacatcggcggcgacgcggcgcgaggagcagcagctgcggcggtgccgccgcacgtgctctgccgcgtcgtcgacgtcaccctccacgcggacggcgcgacagacgaggtgtacgcgcgggtgtcgctgctgcccgaggacgaggacgcggagaagcgggcgcaggcgcaggcgcgggtcccggaggacgaggaccgccgcgacggcgaggacggnggcgccatgaggc

SEQ ID NO: 529 - DNA, 373 bp, Zea mays
  Clone ID: TF_LIB4730-133-A1-K1-C7
ctcgcctcggtgcgttccgatgatacgttcgcggacctgacggagccggcagcggccggcgccgaacggtgcgtggaccggcagctgtggctggcgtgcgcgggcggcatgtgcaccgtgccgcccgtgggcgccagcgtctactacttcccgcaggggcactcggagcacgcgctcggcctcgccggtgcggccgacctctccgcggcgcgcgtcccggcgctggtcccctgccgcgtcacggcagtgcgctacatggctgacccagacaccgatgaggtcttcgccaggatccgcctcgtcccgctgcgcggcggggacgcggacgcggacgcgttttttttttttacaccccctcccctccatctccacc

SEQ ID NO: 530 - DNA, 1764 bp, Zea mays
  unsure (1)..(1764): unsure at all n locations
  Clone ID: TF_ZmC952_2
ccnnggccgggttataccacaccataagttcctgaagagcctaaatcttccattctgtattggagcaaggatcaacttacagtgccataatgaagatgttagtgaaaggcgatctggaatggttgttcatgtcagtgaaatagatcccatgaaatggccaggctcgaagtggagaagcctgctggtaagatgggaggatggtgttgaatgtaacggccaagatagagtatctccatgggagattgagatagctggtggctctgtctctgttgctcattctctgtccgcatctagctctaaaagaaccaagttgtgtcctcagggaaatttggacgttccaacaatgtatgttacagggaatgggaatggttgtactgactccgtggaaactggaaagtttcccagggtcttgcaaggtcaagatttgatgagttttaggactcgtcatgttccgtctgctcctcaaactgttgaggctgcaaaacttcaatcttctggtgctagtaggttcctcagtaatgcatgtggctgcgcgttgggtggtccaacaagcagactcgcagtgcataactctgattttacctaccaatctgtaggcttcaatgaatctattggattctcagaggtcttgcaaggtcaagaaatttctcgggcagttcctatgttccaaggaatgatgtctgaggcttgttcactaaaaggaggatatgggctgcatagttatatgcgtaccccagttgctgttactggattgtcagccacaactcaagagtgttctctcacactatctactccgccaggagcacaagttccttctgtctaccctgataatatttttaaccgaactgtggttcgacagcttggactggcaagcaagtttgatggtggagctacaaatgcccagcagtctggcccatttgataggccgagggaaatttggagcaagccacagcatgaaatatctgatcaaacgaaaatggatcactttgagactagaagagcttcagcacctggagatgatgctgctaagcatgggtctggtggagaggtggttcgcaaaactagctgcagactttttggtttctcgttgactgagaagatcttgccagcagatgatgatggcatcaaggaagtgacctatgagcctgagtgccagaatccacggatgctggacctgttcgggtacaactgctcagccccaagtgctgctcttccagctctgtgtgctgccccctttggaatgtgatgctacttcaataacgctgctgagtatttccatgtactcttagaagttttactttcctaatacccaagtgtatgtcataagctgccttttgacatcattccccctgttggtctgcctcaagcgaagcagtcatttgcacaagtaaacaaaggatcgttgatgatccacttctcgccatgcctcaccctatcgctaagatattgtaattagtcttaggatacgaagaggcagtacattgtaactgactaacttctgtggctgatccttcagaaaagttgtgcgatgaagcaaacaattttctttagaagttcttcgctggcagattttagattcatgtggggaggtttgtcagctcagctttaatgtactggttatgtatctttaaatcagctgctgtacgacttttttttagctccaagccctggttgcagtcgcctaggccgtgtgattgtatcagtatgtaagacatgctatattttaatattcttatcgatatttattctgatgcattgtgtgtg

SEQ ID NO: 531 - DNA, 2091 bp, Zea mays
  unsure (1)..(2091): unsure at all n locations
  Clone ID: TF_ZmC500_1
gggccgcacatgggttctgcaagacgctcacggcctccgacaccagcacgcacggcggcttctccgtgccacgccgcgccgccgaggactgcttcccgcctctggactacagccagcagcgaccgtcgcaggagcttgtggccaaggatttgcacggaaccgagtggaggttccgccacatttatcgagggcagccccgcagacaccttttaaccactggatggagtgcctttgtcaacaagaagaagcttgtctcaggggacgccgtactatttttgaggggtgataatggggagctaagacttggagtgcgccgtgcagctcagcttaaaaatggatctgcttttccagctctttataaccagtgcttaaatcttggttcactacctaatgttgcacatgctgtggccaccaaaagtgtgttccacatctactacaaccccagattaagccaatctgaattcattataccattttcgaagtttatcaagagcttcagtcaaccattttctgctggttcgaggttcaaagtgaaatatgagagtgatgatgcttctgaaagaagatgcacagggatcatagcaggaattggtgatgctgaccccatgtggcgtggttcgaaatggaaatgtttgatggttcgatgggatgacgatgtagattttcgtcaaccaaacaggatttctccttgggagattgagctgactagttcagtttcaggatctcacatgtctgcaccaaatgcaaagagactgaaaccatgtcttccccatgttaatccagactacctagttccaaatggaagcggtcgtcctgattttgcggaatctgcccaattccacaaggtcttgcaaggtcaagaattactgggttatagaactcatgacaatgctgctgttgcaacttctcagccatgcgaagcaacgaacatgcagtacattgatgaacgaagttgctccaacgatgcgagtaacattatcccgggggttccaagaattggtgtcagaacaccactcggaagccctaggttttcctaccgttgctcaggctttggggagtctccaagattccaaaaggtcttgcaaggtcaagaagtatttcatccctacagaggaactctggtcgatgcaagcttgagtaatagtggcttccatcagcaagatggttctcatgtgcctactcaggccagcaagtggcacgcacagctacatggatgtgcttttcgtggccaacaagcaccagctgttccatctcaatcctcatccccaccatctgtcctgatgtttcaacgaggtgatccaaagatgtccccatttgaatttgggcatttccacgtgaataagaaagaggatagacgcgcaatgtttgtccatgctggaggcatcggaggaactgagcaaacgacgatgctccaggctcatcatgtttctggaggaacgggaaacagagatgtgaccgttgagaaatctcatcccgctgttgccgctgcttcagacaacagggaagttagcaaaaacagttgcaaaatatttggcatatctttgaccgagaaggttccagcaatgaaagaaaagggctgtggtgacatcaacaccaactatccatcccccttcctgtctttgaagcaacaagtgccgaaatcgctgggcaacagctgtgccaccgttcatgagcagaggcctgttgttgctagggtgattgacgtttcaacagtggatatgatgatctgatgtattggaaaactgtcctggaggctgtgttgcgtagtgtggacagtgtcggtttgatggttcggtatcgtgaagacgggatttgattgaggatctggccagatttgtatcctagttgtagctgttagagcactttgtatgacaaccgtgagtgctccgtgttatcagcactagttgctgctcacaacttgcctctatgttcataatctgtatgccatgtcagacccatttatagagggtttgtttgcttggcatagttctagacttaaagcattattatgagaacaaatttgctctgcaccgtaaaaaaaaaaaaaactcgaggggggggccgaaaaaannnnnnnnnnnnnnnnnnnnn

SEQ ID NO: 532 - DNA, 4211 bp, Zea mays
  Clone ID: TF_ZmC1173_1
ccacgcgtccgctcacgcacaggagatcaatgcaaaagatcttcatgtgaccattgaaaaagacagcatatatgtagagggcagagaaaacggtatattctgatctcagggtggagtgtatttgttagagcaaagagactggttgctggcgactctgtcctttttatctggaatgacaacaaccagctgattgtggtaattcgactggcaaacagaccacataccgtcatgccatcatcagtactttctagtgatagcatgcatattggtctgctcgatgctgtagctcatgctgcatcaacaaatagtcggtttactatcttctataatccaagagcaagcccttgtgaatttgtcatacccatggctaagtatgtgaaagctgtgtaccatacccgtctatatatgtccatcaagtttcaatctaaattgcttaagtgcccttgcagttatatggggacaattacaggaataagtgatcttgatcctgttcgctggccaaactcgcactggcgctcagtaaaggtaggtctcgaaacaaacacagctttgtttttcttaatgccattctacatgccttcacacttctttaactgcgtcatgagtgaattccgagttagatggtggtctctactttcatacatatagtagtaagcatgcaaccaattttcgcctgaatcatgcaggttggatgggacgagtcaactgctggagagaagcagccaagggtatctctttgggagattgaaccgttgacaacttttccaatgtatccatctccttttgctcttggattaaagcgcccatggcctgcaggcctgccttctttatacggtacaagtgacagttacacacttagcaactcttccagtatacagcattgaacaatggattatattgatactgcttatgtgctaatgtcactagtcttgtttctgattgttttggtaggtggaacaagtgatggcttgacctcttctctaatgtggcttcgagacagggcaaacccgggtttccagtcactgaatttcagcgggcttggtatgagtccctggatgcagcctaggctggataattccttacttggtctccaatctgacatgtaccagaccatagcagcagcagcagcatttcaaagcactacgaagcaagttccaccttcagcaatgcagttccaacagcctcagaacattgctgatagatctgctcttctatcaagtcagattctgcagcaagtacaacctcggtttcagcaaatttaccctcaaaatctcaacgaaaacaaaattcaaggccatacacaacctgagtacctccaagtccaacagcagcttcaacgctgccaatcatttaatgagcagaagcctccgatgcatccacagcaacaacagcaggaaccacagaagcagcaatgcgtccaaacaccacaggatcaacaaatgcaagaacagaagcatctgcacaacttccactccttgccagatgcattatcggccttttctcagctttccccagccactcactccccaccttccgcattgcagacagttccagcattctcgcatcaacaaaacttcccagatacaaacattagctctctctcaccatctactggcccttcaatgcatggcatgttggggagattaccttccgaagcagcttcgagcctcccatgtgtggcaatgaacgcccctgtatcggtatctgacccatggtcatccaagagagttgcagtggagtctgttaacccttgtcgaccccgttgcttccacagcatcaacgacggggactccgtaagcgaggatggggcgatctgctttggcctcgagggccgagctggaagacccttctgagatcaggctggcagcttgtatttgttgaacagggaggacgatgtcctttctggttggcgatgacccatggcaggaattcgtgaacagtgtgtcctgtataaagatactttcaccggaggaggtccagcggatgggaaagccgggcatccagctcctgagctcggctccttcaagaaggctgggcaatggctgcgacagctacgcgagcatgcaggagccgagaggcctggacgctgggatggcgccggtgggttcggtcgagttctgaagacggcggagggaagcccaccatggccctcgggtcgaggattactctccctcctgtatgtttctgcagcacttgctagctctgcgacttggaacaaagcacgtagatcaaatggagctctgtgctgctccccgtctgatgatgtcttatggtatagactcgtagcagtaactactacatgttgtatacatgccggcacttcagttcttatcgagtagcaataccgctagtttagtccatccaatcaactacgttcttgttcctatgatcctgttgttgcgatgcagtaaaactttttttttggtcatataaatcgcaccaacaagacaaaaaagttactaaccgccttctgttttcgctgtccgtctcctgtttctcatacgtttgttgggctcggtggtttacaaatccgggaccgtcagtgtgtcctgtataaagatactttcaccggaggaggtccagcggatgggcaagccgggcatccagctcctgagctcggctccttcaagaaggctgggcaatggctgcgacagctacgcgagcatgcaggagccgagaggcctggacgctgggatggcgccggtgggttcggtcgagttctgaagacggcggaggggagcccatggccctcggctcgaggattactctccctcctgtatgtttctgcagcacttgctagctctgcgacttggaacaaagcacgtagatcaaatggagctctgtgctgctccccgtctgatgatgtcttatggtatagactcgtagcagtaactactacatgttgtatacatgccgggcacttcagttcttatcgagtagcaataccgctagtttagtccatccaatcaactacgttcttgttcctatgatcctgttgttgcgatgcagtaaaactttttttttcataataacctgtatattgaaactgttcttggctcccacggtatgctgctgacgacgactgacgaggaaaactggaatttggggggatttcacagaattgaaactactgataattccaacttaccgatgcaattccaattccaacttggtcagaccaacattgccgttgctgtcaatgtcacgataattgctaaagctaccttcagtaaaagcaaaaggcagtttgttatgatcctggaaaagttgagagatagatatatagatatgatctctgagggaattcattcaggtgcacctttatgcttgcataatttggcaccacttggtgcagacaacgacgccatggaccggtcctcttcctctcatagtctcatgtgctccctgggtccctatctgactgaaacccctgagtgcggccctcccctggcgaagaagaaaaggatggcctcccgttccctgaggtcagtggtgcatcggtgagctgaatgcgacgccgctctcgccatcacagttcacggatccactatccctgctccgatccacctcacctggggccgccgccgccgcgccgggccttctgggatcgaccggtttggtggctgcctgctccgcctccgcgcggtggatcgtgacaagattctgagtgggagcacgtggagtgcgacggcaatggcggcgtgacacgcgggcgagcacagctcgcccgttcttgtcgacgctctgcgactctgggcaggtcgtccgtaggagcgaaccccggtagcttctctggtgatctctccatcgctttcatcatatcttcggctgggcccccgggtttggatcccggacgggtattgccatccccgccaatcttggccggcttttcgcggtggggaaggtagaaatctctgttgcctcccaaaaatctgtgccctttttggatgtctatcgacaacagtaacacgagcagagaccgtcagctcacacatatctatcgacgacagctcgagatgcacgaggctttgacttgttgcagccttgcaggtacatcaggtaaagtaccagccgtatctggaaaattgttggtcacctgctggcgatgggtgatcatggtcatggaaccctgagaagagattcaactgagaacacaaggaaaacgacggctctggacacgctcctgtccagctctggaaccgtgcggccgc

SEQ ID NO: 533 - DNA, 786 bp, Zea mays
  Clone ID: TF_ZmC1113_2
gcggccgcggctgctgccgcccaggtggcgggaggaggtggaggcggcgagggagatgccgccgctgcggcgcgaggcggaggcggaacggaggacggcatgtacacggagctgtggaacctctgcgccggcccgctggtcacggtgcccagggtcggggacaaggtgtactacttcccgcagggccatatcgagcaggtggaggcgtcgaccaaccaggtggctgagcagcacatgcaattttacgatctcccgtggaagatcctgtgtgaggtcatgaacgttgaattgaaggctgagccagacaatgatgaggtttatgcccagctcactctgctacctgaatcaaagccagaggagaatggctctagtgaggagatgcctgcttcacctcctgctgcacttgcaaggccacgcgtgcactccttctgcaagacattgacagcctctgataccagcactcatggtggattctcggtgctgcggcgccatgcagatgagtgtcttccgccactggtagcttgctggattcttgacttgatattgccagtgcatcagttgtaggtttgctatttgttgctttactggtagtggtaatctttgctttggctttctggtcaggatatgacccgtcaacctccaacacaagagcttgtagccaaggacctgcatggtgtggaatggcgctttcgccacatattcagaggtcaaccacgaaggcatcttttgcagagtggctggagtgtttttgttagtgccaaacgtcttgttgctggcgatgccttc

SEQ ID NO: 534 - DNA, 612 bp, Zea mays
  Clone ID: TF_LIB3279-211-Q6-N6-B2
tcgcgatctagaacctgttgacttcggacgagaacgccaccggccccgacgggggcaaccgtaggcgtgagttcctcctgaacgctccgtcgccggagcgcgcgaccaaggggagcatccggcttcgttccgaggccgcagccggtggctccaggaagagcgacggtagcagccatgcccctgaggggaaccgtgagaagctggggaaggtgaagctcaagattcgtaatgtgctaccgaaaccgaaccctgatacgtcgcctgtgaagcccccacggcctgtagattcgcggcaccagcaaaagcatggccatctgaaggaaggcacaaaagattctgacaggccaacctcttcacgagacaagaaagccagaaaggagaggtcgattcaagaaacaatggcacaggagcaagcagacaaatttcagagagaacctacttcagatcctcgcactcatttgtcgccgcactcaacgccacatcgccctcttcaatcttcatcgagccattctctagctgggcaaccaagggagcatctacttttgacagactggagtatttttgttagctcaaaaagactggtttctggtgacacatttattttcttgagtg

SEQ ID NO: 535 - DNA, 373 bp, Zea mays
  Clone ID: TF_LIB4171-034-R1-L1-C6
aggggggggccttttttgggtggggactcccccaccgtgggggggggcgctctctatcattagagcgcccccccgctctgcagaatttccgcaggagggttgtactgcggcttaagatgagattttaaggtgatgatgctcctgaaagaaggtccagcgtaacagtcataggcatcgtgaggttgccggcaatgtcaaactctctgtgggcagattctgagtggagatctctaataggctaatgggatgaaccttcatccattcttcttccagatagaatctcaccatgggaagtggagccattgcatgcatctaatccacaatcctctcaacctgcactaagggctgaggcgtccagcgacccccagcttca

SEQ ID NO: 536 - DNA, 750 bp, Zea mays
  Clone ID: TF_ZmC952_3
tgtcagctcattccttctcaagagctggttgccaaggagttgcatggagccaagtggaagtttcgtcatatatataggggtcagcctcgtaggcatctcttgactactggatggagttcatttgtcaataaaaagaaactggtttctggggatgcggtcttatttctccgaggtgatgatggtgaactaaggctgggcgtacggagggccattcagcttaaaaatgaggccctttttgacgatttcagttgcgacagtacaaaacggcatacattgttggctgtagctgattccttgaagcacaaaagtgtttttcacatttcttacaatccaagagctactgcttcagaatatattataccataccataagttcctgaagagcctcaatcttccagtctgtattggagcaaggatcaactttcagtgccataatgaagatgttagtgaaaggcgatctggagtggttgttcgcattagtgaaatagatcccatgaaatggcctggctcgaagtggagaagcctgctggtaagatgggaggacggtgctgaatgtaatggccaagatagagtatctccatgggaaatcgagatagctggtggttctgtctctgtttctcattccctttctgcatctagttctaaaagaaccaagttgtgtcctcagggaaatttggacgttccagcaatgtgtaagctctcatagcacaagactaatgcctgtatatgtatgctgctatccttttacctc

SEQ ID NO: 537 - DNA, 718 bp, Zea mays
  Clone ID: TF_ZmC425960_1
aattcggcacgagggggctctggggaggaggaggagggtagctaggtagtagctgcctataggcctcggcccccattcatggccattaccacgatgtgtcaccccaccacaccgccctctccgatgctgcctccctcatgataaccctctccctggtggttgttctttgccttgttgccgtgcagctcggcacgaggccctcctcattaatcacttgctagctccctgcctccctcccggctcccgctcccccttctcgtgcttcgcgcccccgcagcagccatggcggggatcgacctcaacgacaccgtggaggaggacgaggaggaggcggagcccggcaacgcctgctcccagcagagccggaccagctccgcggccacgttcccgccgccgccgccgaaccagccgaggccgagcgccgcggtgtgcctcgagctgtggcacgcctgcgccggccccgtcgcgccgctgccgaggaaagggagcgtcgtggtgtacctcccgcagggacacatcgagcacctcggcgacgccgcggccgccggcggaggcgcgccgccgcccgtcgccctgccgccccacgtcttctgccgcgtcgtcgacgtcactctccatgcggacgcgtccacggacgaggtgtacgcccagctcgccctcgtcgccgagaacgaggatgtcgcgaggcggctgcgcggacggtcggaggacggcagcg

SEQ ID NO: 538 - DNA, 2370 bp, Zea mays
  unsure (1)..(2370): unsure at all n locations
  Clone ID: TF_ZmC12351_3
gtaccctcgngggcttgccgggnagcagcctttggctgtacacagccaactctccacttcttttcttttcttcttcttttctgttcttcacacttgaacaagatattagtacacaaaaccaatgcactgaggcttagaaacatacctttacttgtgatttgcactttgttcatccatgggcatattttcacatttaagcacttgtgtttgcactcaatcaccaaaatacttagaaatggcccaagggcacatttccctttcaatcctttcctaccccctggtgcttatcgcagggagactcagctgcgtgctttctattcaaccacagaagaaatctcttctctgtttgcgaaacagcaggaacagctgaaagctatgcagagaactttggaggatgaagagaactatgagagcaccttaatgggtgtggatcttaataaagtgcctctagccactgataatgctggtatgaagccagtagactgctcaaaaaatacagtgggagcttcaagtgcttcaccagaaaatactcaggtaagtgaacatgattccagtgacgaagatgccaacatgactgagcagcaggatgatgatggtactgccattggtggcagcactcaaggtctagaatgcaccagtccagaaaggtcagaggggaggaggtcaggttttcatggcaatcctgtttctacagctcctgagagagaggttacagataccgagcaagttcccgagacagatagccaagctggtaatgctggttgcgatgaccaaagatgtgacaacacaggaggagagactatgccactagaagatgatatgctgctcccagataacgaggaacctactgcattgctgaaagatgcagggcagccacaagcaaatgtggttcctattccaatccccggtgatggcgttgggcactgttccgaagaaaaacatgagggtgcctgctctgagagcaaacgggaggacacacatgctggagccatcagaacggctgatctgttggcctcagaagtcgctgggagctgggcagtggaaacagctccgtctgtcaatggggagaacgaatctccaaggagcttgggcgatgctacagagcacgatgaagctggaggcagcgtggcaggcgatgctttggtaactctggtgaactcagagggccaggcggctgggagccagaacaatgttgagcgtggcagctccaaaataacccatcatcatcatcatcatcgtcatcaccatcgtgttcttagtgccatgattggaattgttgatcctgagttcaggaagcaaatgtccggcagaagcggagttggaaacgaggaacccatgtctgacgccgagacgggtgagggcatcgaggaaggcgattcagattcaggttcagacggcagtgacagcgaggaggctatggttgaggattctgtcgtttagcttaaacagaagtgactgctcactgtaaatatacctcaattcgttttgtgtacctttcgttgtatcatcatgcgtagcgtaagcccctcgtgtgcatttgattattttattcgttaggtgtcctcagcagctcgtggtgcatgttgtacgaaatcgaggccttttggtcttcaacacaaataaatatatgtactcacttggtttacaattataaaccgttttggttttttagcatgagacaatagacttcatctcagtctaaactacaatttgaacccaaaacgtgtcgcgcccgctacaaatgataatgtgatatgaaactgaacttaattccaggaacctgtcattcaacttgtccctcattttttcatgacaagccttggattttagaccagatgaagatgacccatctctacccctgctcactgtggccttgaagaaaatacatcactcgactatcgaccgcaggcaatgaaacaagagagccggcacatgcatgccacaactcagaattcaggcacttgtgctcttcagcttctcgagggtcgcacctgctctggcaccacgttggcagcaaccatcatcatcacagcataggcaccagcaggccggcgatgaccgcacaggctctggcaccacgaggccgtggacggaaatcgacgctggccatggacggaaatcgacgctgcgaggtggtctggcagagtggagcctcgttggagggttgaaggcgacacagttgtggtatagacaccggaagtggttatgcggagatagaacttaggagccgaagtgaaggaggcggatgtggcgcggaggagcacggagggcggtgccatggatggggatgaggaatgggagaacgtgtgctagggttgccgcagggaatgcgaattgaccgggtaggtgagacgtccccggccggcctcg

SEQ ID NO: 539 - DNA, 827 bp, Zea mays
  Clone ID: TF_ZmC13783_3
gagtccctctgccctctctgccctctctctctctctccgtgccccccaggccctcctcccaggctcccagcccccctcccgtccctctctctgtctctctccacgcaccatggcgatctccgagctcgggtgagcggacaaggtgggcgtcccgtacctagtaccgttgcctgcctcgggtgaacgagcgtcggttcggctcggtgcagaatgcggccgatttgagcgaggacgggagggcgcgatggatgcgggttcgggcggattcgcgaggaggctctagaggaggttaggtttcggccccggccccggcccggctgtgggagatgagctgctcgtccgcggccagcatcgggcagccgccgccggaggaagagaagaagtgcctcaactcggagctgtggcacgcgtgcgccggcccgctcgtctgcctccccaccgtcgccacgcgcgtcgtctacttcccgcagggccacagcgagcaggtggcggcgtcgacgaacaaggaggtggacgggcacatccccaactaccccaacctgccgccgcagctgatctgccagctgcacgatgtcacaatgcatgcggatgtggagacggatgaagtgtacgcgcagatgacgctgcagccgctcaacccacaagagcagaacgacccgtacctgcctgcggagatgggaatcatgagcaagcagccgacgaactacttctgcaagacgctgactgcgagcgacaccagcacgcacggcgggttctctgtgccccgtcgcgcgggcgagcgtgtcttccccccactggatttcacacagcagccttcagcacaggag

SEQ ID NO: 540 - DNA, 3403 bp, Zea mays
  Clone ID: TF_ZmC965_1
cgagcaaagattcactggcacaatagttggaatatgtgtttctgatccatctggctggcggacgcgtgggcgacacgctgcgagagggggaaagaacttagaagggcaattcggcacgagggagcgacacaggaaactgacgtcgcttttgacggcctgctacttaataaatcccctcgcctgcctcccttcccatctccttcccgcaaaaatcgcccgggtgccaggtgcgcggcgcagggaggtcgcgacggattccgggcaagtgcatgtgagatccgatggtggcggctgcagcggcggccggcggcggcgccgacgcgggatgcggaggcggaggcggaggcggagggaaggacgcgctgttcgtggagctgtggaaggcctgcgcggggccgctgtccagcgtgccgctactcggggagaaggtctactacttcccgcagggccacatcgagcaggtggaggcatcgacgaaccatcttgccgagcatcagggcacgcccctctacaacctgccatggaagataccctgcaagctcatgaacatggagctgaaggctgagccggatactgatgaggtgtacgcccagctcaccctgctccctgataagaagcaagatgagaatacatctgcaagagtggagaatgaggaggcagaggaggaggtggtgcctcatgtgccaccagccacaagtgaggggcttcgcatccattccttctgcaagacattgactgcctcagacacaagcacacatggtggtttctcagtgttgcgccggcatgcagatgagtgcctcccaccactggatatgagtcaacatcccccaaatcaagaattggtggccaaggacctgcatggggttgagtggcggttccgtcacatctttcgaggtcagccacggagacacctccttcagagtggttggagtgtttttgttagtgccaagcgtcttgttgcgggggatgcattcatatttctcagaggtgagaatggggagttacgtgttggagttcggcgtgcactgaggcaccaaaccactatcccatcttcagtcatatcaagccacagtatgcatcttggtgttcttgcaacagcatggcatgcagtgaacactgggagtatgttcactgtctactacaaaccaaggactagtccagctgaatttgtggtctcgcgagctaggtactgtgaatcactgaaacgaaattattcaatagggatgaggtttaggatgagatttgaaggtgaagaagcggcagagcaaagattcactggcacaatagttggaatatgtgtttctgatccatctggctgggctgactcaaaatggcgttcccttaaggtgagatgggatgaagcttcttctgttcctcgtcctgaaagagtttctccttggcaaatagaacctgctgttagcccatctcctgtgaaccctcttccagtcagattcaagaggtctcgttcaagtgttaatgcttcaccatctgatgtgtctactgtaaacagagaagttgcttctaaagtcatggtagactcgcaacaaaataatctcccaagggccttgcacaatcaaggaaggacacaattgacaggtcgataccgtgatagcactgatgtgaagactgctcaggatcttaccatgtggtcttcaggaactgagcaacagagaaacaatattgctgcccagacaaaacgatgtctggagggttggacgcaatctagaactcccgaaggttacaatcaactgttctcggcatttcaaccactgaaagatgcacataatccacttcgtccttttcctaataaaatatctgggactcgctcaagtacctgggtcacagccgatgcccgttatccagctcaacaagccaatcacaacatgttacatggcacattgtcttttatgcctcatagcagtggttttaggatgattcaacagaataatctagtgatgcctgaagctgcaaattttactgggaaatcagctttcacttcacttcagggccatgtcactgatcagtgctccacaggttggtttggacctattgagtcaaattcccacacagaccatgcatcgtcaagtttgatcaggtcccagcctttggttattggaaatgatgttcagaaaaccaaaggcacttcattcaaactatttgggattcctcttggcagtccagaaaaatctgaacctctggtatccccaccaagtgtcgcatatgacgggaaacttcaaacttctccaacagacaacaatgagccttgttcagaagctacccagaatatccagaacaaagtgccaagtagttcaaccagaagctgcaagaaggtccataagcaaggcagcgcccttggcagatcgatcgatctaacaaagttcgcttgctacgatgagctgatcgctgaactggaccagatgtttgacttcgatggtgagctgaagagtccttgcaggaactggttggtcgtctacactgacaacgaaggcgacatgatgctggtcggcgacgacccctggaatgagttctgtgacatggtccacaagatcttcatctacacaagggaggaagtggagaggatgaacccaggcgccctaaactcgaggctcgaagactgcctgtctgactcgctgggaagagggctggcttccaaagagccccggagcggcccctcgacttcggctgtcgattctgagaaccgcgctaacttgtccagtcagtgagcccttttgaaagtggtgaagcagacaaaaggccacgtgtcagagtgaccggaagaacgagaaaggggtgtgtttcagtggtgtgtagtaggtaggtaattttgtgtgtatgcctccgggtaaaagccccgcggtacccagtttgtagatggtgcttctcctggtgctagtttcccgtcgtaagctggatttttttggggggtgtgtgccctgctctgtgtgctgacccgcctgggggtaagttgtagcagagcaggagaaagcaggcaagaaaccgctggtgcgcctgcttggccaatccttttccttgcggagcgctgtaaatagccttggatctgaagcgtagtaatgtattgtcatggtactcgaagtcatgctccagtttgtgttgggtatgacctgcaactgtcggttcgatgggtgcggaccatatctggcccctttttcttttctagtcatccccttgatacataaacgcatcctaggctcctaagcatgcttcaatcaagttatgtgctgttggtctcttttggcaacatgttttatgcatgtataagcgccagtccaataaaatcggcgagatctgaaatccttcgtgttgatagatggctttcagtttttaaaaaaaaaaaaaaaccaaaacaaaaaaaaaaaaagggcggcccccgaatagtaagctc

SEQ ID NO: 541 - DNA, 1596 bp, Zea mays
  Clone ID: TF_ZmC488_2
gaaatttattgtgaagtacagttaagtgctcttcaaaatttggatctctgcaccgccaaggtcatctagtgatgcctgacatgctttgaattattaatgcatttttattgtttgaatgcacatttgtctgtactgcttaactcatgcgcatttgtaaatttcaaggaacatgcaacctccaaaaaccaatgtctacttcgagtattggtatagtttcgcttaactaatttcagtgttttgtcattaaacagggttggtgcatcagaatttattgtgccgtattgcaagttcttgaagagcttgaactatcccttttcagttggaaccagatttaaagttggctgcgagaatgaagatgctaacgagaggtcctttggattgatcataggtattagtgaagttgatcccatacactggcctggatcaaaatggaaatctctcctgataaagtgggatggtgctactaagtacagccaccagaatagagtatctccatgggacatcgagggagttggcagctcagttttagttactcaccgtctttcctcttctgtttcgaagcgaacaaaactgtgcttccctccaagcgatttggacacaccaattctagatggaaatggtcgtccagactccgtggaaactgaacgtttccacagggtcttgcaaggtcaagaattggtgcaccctagtattcatggtgctgcatgctctcattcatcagatagccccagatgtcaaggctcttatggcaggagattctctgctgatgtgtggaactgcaagatgaatgatgtaatgagtgggcctcgacacctaaatgccactgggtttgcttaccagcccctaggcttcagtgaatctgtcaaattctcagaggtcttgcaaggtcaagaaatatctcaggcggttccttccttcatgagatctgcattcaacgctggcacacagaatggcagggttcgaccatttgattatgtgcagagatcagatgcaactcaaggatacgctctccagcagtttaatctgccagcaacagaagtgcattcgccctcttctgttcttatgtttaaccaaaccatggcaccacatgctgagctagatggtgcgaccaaccgtgaagaagtacatggcagcaggtacttgtcatccaatgcaatagggagagaagctgaaccatggccatccatgcagcagcaaagagcgagtgtaaatggaagcgagcctctcgacaactgaagcctcagctcctgcaaggaacgctgaatctggatcggtcggcaggggcgcggggcgaagcaactgtaagctttttggtttctccctgactgagaagatccttggaacggatggtggtggtgtgaaagaagggaactacgaagtggaccgtcaaactccccgggtgctagacttgtttgggcacggttctacgcctggagctctgcatgctctctgtgctgctcccttgggaatatgatgctgttctgcctagttttacagcagttagatttatgtaatccttcaaccattttcatcgcgttgtacttgaccaatatgtccagcgtatgatttccagttttaattgtatgctgatgctac

SEQ ID NO: 542 - DNA, 811 bp, Zea mays
  Clone ID: TF_ZmC499146_1
gccggccgtggctcgttaccgtgagaacacgcagctccgtagctcagttacacacgacacccgctcgtcttcgtcagttcgtctcctccacctctgtatccctctcactccaccggccgccggccctcgcatcggcgcgttcccaatgatcacatttgcggacctgacggagccggccgcggccggcgccgagcggtgcgtggaccggcaactgtggctggcgtgcgcgggcagcatgtgcaccgtgccgcttgttggcgccagcgtctgctacttcccgcaggggcacgcggagcacgcgctcggtctcgacggtgcggccgacctctccgcggcgcgcgtaccggcgctggtcccctgccgcgtcacggcagtgcgctacatggctgatccagacaccgacgaggtcttcgccaggatccgcctcgtcccgctacgcggcggggaggcgcacgcgggtggcctcgatgacgatgtggccgcggcggacgagcaggagaagccggcgtcgttcgccaagacgctgacacagtccgacgccaacaacggcggcgggttctccgtgccgaggtactgcgcggagaccatcttcccgcggcttgactacgccgccgacccgcccgtgcagaacgtcgtcgccaaggatgtgcacggaccccgcctggaagttccgccacatctaccggggcacgccgcgccggcacctgctcaccactgggtgggagcacgtttgtcaaccagaagaagctcatcgccggggactccatcgggttcctccgcggtgacagcggggaactgcacgtcggcatcg

SEQ ID NO: 543 - DNA, 4859 bp, Zea mays
  Clone ID: TF_ZmC2665_1
gcactcataccattccatcatcccccttgcaagtatagttctcggcggcatctagaagacgatgggcaaggacgacgtgatcgagagcggcgctggcggcggcgagttcgctgccaaggactacacggaccctcccccggcgccgctgatcgacgcggctgagctggggtcctggtcgctgtaccgcgccgtgatcgccgagttcatcgccacgctgctgtgcctgtacatcacggcggccaccgtgatcgggtacagctcaattcggcacgaggcttgctagttgctcctttctctgccgcccgccgctgccgagtgccgggtcttcgctttctttctcctcttcgggcgcttcgctgcttgcctgctctgctcgcgacctgcttctcagacccgccctcctcgccgcccgcccggcgatgcctcctggccagaggcggcggtggcggcggcggcgacggagatagttagctcttcagattgagtgactggtggtcgccggcggcggggacgcggagtatggaggcgccggggacgagctcgggcggcgccggaggcgagggggccgggggcaccaaggtcaacgaggagctgtggtacgcgtgcgcgggaccgctcgtggcgctgccgccggcggggagcctcgttgtctacttcccgcagggacacagcgagcaggtagcagcatctatgcgaaaggatgcagatgccaaaattccgagctatccaaatctctcatctaagcttatatgcatactccgtagtgtcactatgcttgctgatcctgacacagatgaggtttacgctcgaatgactctccagcccgttagcaatgtgacgcattgtgacaaggagacgttgctggcaacagagcttgcactgaaacaaaccagaccacagacagagttcttttgtaaaacactgactgcaagtgatacaagcactcatggaggtttctctgtgccacggcgtgctgcagagcgaattttcccccatcttgacttctcagtgcagcctcctgctcaggaactgcaggccagggatttgcacgatgcaatttggacattccgtcatatatatcgaggccagcctaaaaggcatttgctgactactggctggagcctatttgtcagtggaaagagactccttgctggtgattcagtcctgtttattagggacggaagacagcaactcctcttggggataaggcgggcaaataggcagcccgttaacctctcatcatctgttttgtctagcgacagtatgcatattggaattcttgctgctgcagcccatgcagcagccaataacagccaattcacagtattctataacccaagggctagtccttcagaatttgttattccttttgccaagtaccagaaggccgtctatagcaaccaactatcacttggcatgcggtttagaatgatgtttgaaactgaagaatctgcaacaagaaggtacatgggaacaataactggtataagtgatatggatcctttaaggtggaaaaactcccaatggcgcaatattcaggttgcatgggatgaagcagcaccaagtgagagacgcaccagggtttccctttgggaggttgaacctgttatcgctccattcttcatttatccctcgccattgttcactgcaaaacgtccgaggcaacctggggtaacagatgatgatagctcagaaatggacaatctttttaagcggaccatgccatggtttggtgaggaggttggcaagagagatctgagtactcaaaacggtttagttcctggattaagtttggttcagtggatgaatatgcaacacaacccctctcttgccaacacggttatgcaaccggaattgctaaattcgttagctggaaaacctgtacaaactctggctgcggctgatctatctaggcaaattagcttccagccccagttcctgcaacaaaataacatccagttcaacacttcgctgctacctccccaaaaccaacagaccgaacagttagcaaatgtaatagctacaccaaaccaattgggaagtgttatagtaccacaaaaggcagttcaaaattgcagttctgaacagaaacagaatctggttacacaaccactgcaagtcagccaaccaatggttagtgtggcacagcctcaacttgtccatactcaactccagcaacctcaagtagttctccaggctcagcctcagcaacctcaagtcattgtccaagctcaactacaacaacagcaacctctggttcaaaatcacaccaccatacaaggtggccttcaacaaatccagcttctgcagcaacagcaagttcagcagtcagtgcaggaacaacagcaaataaagatacagccttttcaggtacctaatgatgccaacatggtaacacagttatctgatcagatgaaaatacaactattgaaggctctacagccacagcagcctctggtcatggaacagcagaaaatgatatttgatttgcagcaacaagcagtaaattctcagtcaactgctcagcagtgctcacaggtagctacccaagtggttggtttgcatagcagtagcactaatcagtacccgacgcagcaaaagactcaacctctcaaaacatttcaagattttcctgggaatgctgtttctattgtaaaaccagaaattgtcacctccgtgggtgctcgctctttgcatgtgcctggtggggtgcagtcaatgaagatggatgaagttccctcttcttcaacatcgccatccacaaacaacaatcctgttattttgcgatcaactccaagtagctccaagaaccaatgtttacctactgcagcaaaggctcctcagtcatctgttgtattgggttctacacttgaacagggtatgaagccttgtgacagtacacaacacccaatggtgattcccaagctggctgaagaaaggccagctactggacaagactacatgaacaacaatcagctggattatttggatacatcatcttcagcgacttcagtttgcctttcacaggctgatggatcgctgcaacaaagttttccaccttcatccttcaatcaacatcaaccgttgagagaagcagttccagatagtgagtttgaggttacagatgcaggaaataactttctatttggggcaaatatcgatggccatatggagcctcttaacgaagacgatttgcttggaactgccttcgaagctgacaagtacatggaacagatgccaggaaacggcatctctaactacatttcatcaaaggattctcagcaagagttatcatcttcaatgatctcacatccatttggcgttgctgatatcgcgttcaattccatagattcatcgatcaatgatatccaattcttaaacagaaattcccgggctccaggtcctgttcaacaacgtatgcgaacatacaccaaggtgcacaagcgtggcgctgttggaagatctatcgacatcaacagatattctggttacgatgaactgaagcatgacgttgcccgtatgtttggaattgaggggcagctcagcgaccaaaacagagttggctggaaactggtttacgaagatcacgagaaggatgtcctattagttggtgatgacccatgggaggacttcgtgaactgcgtgcggtgcatcaggattctttcgccgcaggaagagaggcaaatgaggctggccagcgactacggagacagctttcttggcaaccaagcgtgtagcagctcggacgggggtcgtccgtggagggtcaccggcgactagaaatagcaggctatgcctgagcacaaatgtttgatataatccgtcccacgatagcaagaaaatgatacgcgatttctgagcacaaacttttgcactcagatgatcgtgcaaacagttagcattttaagaaaaatgttgcagttcaatgtaactgcaggaatgtctctgatgtagcctcttcgatgtggcagccttaacaatcgatgtgctacagttactctgcctatgtatttactatactaccttggccttgtatatccttttgatgtaggcgcagctggatgctgaaccccccggaggctgttagggacaattacaaccgttcataatttgccacagatacagatctgagtggacaaatggattcagtttacgtaaaaaatcaacaacgtatgcgaacatacaccaaggtgcacaagcgcggcgctgttggaagatctatcgacatcaacagatattctgggtacgatgaactgaagcatgacgttgcccgtatgtttggaattgaggggcagctcagcgaccagaacagagttggctggaaactggtttatgaagatcacgagaaggatgtcctattagttggtgatgacccatgggaggacttcgtgaactgcgtgcggtgcatcaggattctttcgccgcaggaagagaggcaaatgaggctggccagcgactacggagacagcttcgttggcaaccaagcgtgcagcagctcggacggaggtcgcccgtggagggtcaccggcgactagaaatagcaggcgatgtctgagcacaaatgtttggtataatccgtccaacgatagcaagaaaatgatacgcgatttctgagcacaaacttttgcactcagatgatcgtgcaaacagttagcaattagcatttaaaaaaaatgttgcagttcaatgtaactgcaggaatgtctctgatgtagcctcttcgatgtggcgcttctgtcttgctatgttttggcagccttaacaatcgatgtgctacagttgctctgcctatgtatttactatactacctaaaaaaaaaaaaaaaaaaaaaaactggagcagctggacgctgaacgtgg

SEQ ID NO: 544 - DNA, 2816 bp, Zea mays
  Clone ID: TF_ZmC1173_2
gtctacctccgcagcttatatgccaactgcataatgtgactatgcatgctgatgctgagacagatgaggtgtatgcacagatgacactgcagccactcagtccacaagagctcaaggacccatttttgctcgctgagttaggcactgccagcaaccagccaacaaattatttttgtaaaacactaactgcaagtgatacgagtacacatggtgggttctctgttccacgccgagcagctgagaaggtgtttcctccactggatttcaatcagcaacctcccgcacaggagttgattgcaaaagatcttcatggcaacgactggaaatttcgccatattttccgaggtcagccaaagcggcatcttctgacaacaggttggagtgtctttgttagtgcaaagagactggttgctggcgactctgtcctttttatctggaatgacaacaaccagctgcttctgggaattcgacgggcaaacagaccacaaaccgtcatgccatcatcagtactttctagtgatagcatgcatattggcctgctcgctgctgcagctcatgctgcatcaacaaatagtcggtttactatcttctataatccaagagcaagcccttgtgaatttgtcatacccatggctaagtatgtgaaagctgtgtaccatacccgtatatctgtgggcatgcgtttccggatgctttttgagacggaggaatctagtgtaaggcgttatatggggacaattacaggaataagtgatcttgatcctgttcgctggccaaactcgcactggcgctcagtaaaggttggatgggacgagtcaactgctggagagaagcagccaagggtatctctttgggagattgaaccgttgacaacttttccaatgtatccatctccttttgctcttggattaaagcgcccatggcctgcaggcctgccttctttatacggtggaaggggtgatggcttgacctcttctcttatgtggcttcgagacagggcaaacccgggtttccagtcactgaatttcagcgggcttggtatgagtccctggatgcagcctaggctggataattccttacttggtctccaatctgacatgtaccagaccatagcagcagcagcagcattacaaagcactacgaagcaagttccaccttcagcaatgcagttccaacagcctcagaacattgctgatagatctgctcttctatcaagtcagattctgcagcaagtacaacctcggtttcagcaaatttaccctcaaaatctcaacgaaaacaaaattcaaggtcatacacaacctgagtacctccaacagcagcttcaacgctgccaatcatttaatgagcagaagcctccgatgcatccacagcaacaacagcaggaaccacagcagcagcaatgcgtccaaacaccacaggatcaacaaatgcaagaacagaagcatctgcacaacttccactccttgccagatgcattatcggccttttctcagctttccccagccactcactccccaccttccgcattgcagacagttccagcattctcgcatcaacaaaacttcccagatacaaacattagctctctctcaccatctactggcccttcaatgcatggcatgttggggagattaccttccgaagcagcttcgagcctcccatgtgtggcaataaacgcccatgtatcggtatctgacccatggtcatccaagagagttgcagtggagtctgttaacccttgtcgacctcatgtttcaccacagatagaacatttggatatggcaacgtgtaacatgccgcagagctctgcactagcaccattacctggacgagaatgcctagtggatgaagatgggtgctctgatcctcaaaatcacctcttgtttggtgttcacatagactcacattcacttctgatgcaagggggcattccagcccttcagaatgataacagttcaggcactattccatactcaacctccaatttcctgagcccttctgataacgatttccccttgaatcaaccgctacgcagcgctggctgcttagatgagtcggattatcttccatgtgcagagaatgccgaacaggcaaatcaacagtttgcaacctttgtgaaggtttacaaatccgggaccgtcggaaggttgctcgacatcactagattcagcagctacgacgagctccgtagcgaggtggggcgtctgtttggcctcgagggccagctggaagaccctttgagatcaggctggcagcttgtatttgttgacagggaggacgatgtccttctggttggcgatgacccatggcaggaattcgtgaacagtgtgtcctgtataaagatactttcaccggaggaggtccagcggatgggcaagccgggcatccagctcctgagctcggctccttcaagaaggctgggcaatggctgcgacagctacgcgagcatgcaggagccgagaggcctggacgctgggatggcgccggtgggttcggtcgagttctgaagacggcggaggggagcccatggccctcggctcgaggattactctccctcctgtatgtttctgcagcacttgctagctctgcgacttggaacaaagcacgtagatcaaatggagctctgtgctgctccccgtctgatgatgtcttatggtatagactcgtagcagtaactactacatgttgtatacatgccgggcacttcagttcttatcgagtagcaataccgctagtttagtccatccaatcaactacgttcttgttcctatgatcctgttgttgcgatgcagtaaaactttttttttcatcat

SEQ ID NO: 545 - DNA, 3174 bp, Zea mays
  Clone ID: TF_ZmC1113_1
aattcggcacgaggatttttttttggggaaggtgaagcgagaggagcaggaggagagaaaggggaacgaggccggccgcgaatcggaggggaattcggggggcggggctcggtccggccggaaattcgcgcgattcgggcgcgggttagcggaaggggagggtgagcgcgcgcgcggaggcgccgcgaatgtgaagatctggtgctcggcgggatgacttcttcggcggcggccgcggctgctgccgcccaggtggcgggaggaggtggaggcggcgagggggatgccgccgctgcggcgcgaggcggaggcggaacggaggacggcatgtacacggagctgtggaacctctgcgccggcccgctggtcacggtgcccagggtcggggacaaggtgtactacttcccgcagggccatatcgagcaggtggaggcgtcgaccaaccaggtggctgagcagcacatgcaattttacgatctcccgtggaagatcctgtgtgaggtcatgaacgttgaattgaaggctgagccagacaatgatgaggtttatgcccagctcactctgctacctgaatcaaagcagccagaggagaatggctctagtgaggagatgcctgcttcacctcctgctgcacttgcaaggccacgcgtgcactccttctgcaagacattgacagcctctgataccagcactcatggtggattctcggtgctgcggcgccatgcagatgagtgtcttccgccactggatatgacccgtcaacctccaacacaagagcttgtagccaaggacctgcatggtgtggaatggcgctttcgccacatattcagaggtcaaccacgaaggcatcttttgcagagtggctggagtgtttttgttagtgccaaacgtcttgttgctggcgatgccttcatctttctaagaggtgatagtggggagcttcgtgtaggagtcaggcgtgccatgaggcagcaagcaaatgttccgtcttcagtaatatcaagccacagcatgcatcttggtgttcttgctacagcatggcatgctgttaacactgggaccatgtttactgtctactacaagcctaggacaagtccagctgagtttgttgttccctgtgatcgctatatggaatcactgaaacgaaattaccctatagggatgagatttaaaatgaggtttgaaggtgaagaggctccagaacaaaggttcactgggaccattgttggaaatgtggatcctgatcaagctggatgggctgaatctaaatggcgttacctcaaggtgaggtgggatgaagcttcctccattccacgtcctgaaagggtttctccctggcaaatagaacctgcagtcagccctccccctatcaacccacttccagtgcacagacccaagagacctcgctctaatgctgtagcttctctgcccgagtcttcagctccaacaaaagaagctgctccaaaggtcacattagagactcaacaacatgccctgcaaaggcccttgcagacccaggataatgtggccccgaaaagtgtttttggtgataacagtgaattggactctgctcataagtcctccctgcgaccgtcaggttttgatctggacaagagcaccattggcatgcagaggaagctgggttcagatatttggatgcgaatgaacagacctgatggttacagtgaaatgttatcgggatatcaaccacctaatgaaggtgcacggaattcgcagggtttctgttctttacctgatcagattgccgctggacgtcctaatttctggcacactgtaaacgctcattaccaagaccagcaaggcaatcacaatctgttccctggttcatggtccatgatgccttcaagtactggctttgggatgaacagacagagctatccaatgatccaggaagtcggtgggatgtctcagagttgtacaaacaccaagtttgggaatggagtttatgctgcactacctggccgaggcattgatcgatacccatctggatggtttgggcacacgacacccggtggtcgcgtggacgatgcccagccacgcgtgattaagcctcaacctttggtccttgctcacggcgaagctctgaaaatgaagggcaactcgtgcaagctttttggaatccatctcgacagcccagccaaatctgaacctttgaagtctccgccaagcgttgccacaccggcagctgagaagtggatggcagacggaatcgacgcagacaaaagccctgagccgcacaagacgccaaagcaactcggtgctacacaggtggatcctgtcccagagagatgcccacaagcttcaaggggcacacagtgcaaatcacaaggcgggtcgactaggagctgcaagaaggtccacaagcaaggaatggcgctgggcaggtccgtggaccttaccaagttcaacggctacacggagctggtggcggagctggacgagatgttcgacttcaacggcgagctgaaaggctgtagcaaggagtggatggtcgtgtacaccgactacgaaggcgacatgatgctggtcggggacgacccctggaatgagttctgcagcatggtgcacaagatcttcgtgtacacgagggaggaggtccagcgcatgaacccgggcgccctgaactcgaggccggaggacagcggcctcgccaattcgacggagaggggctccgcatctactgctgctgctagagaggcacccggctaccagtccgcctcgtcgcttaactccgacaactgctgatgccttggcagctagctggtcgtcccaagtagtagagaacaaggcaaatgtatccatagatctccttgtagcggagcttaatgcctttttttcccctttctaatatgcattggatgagcccgtagcgcaccgtagtagtatctaaagctggtgttctgagttggttggaccttcctgcagttttggtttctccttctgatgtggcaagttttagctggtcgcacctacctaatgtatgcttagcaaacgaagtcccactaagcgctgtacataactgcccctccctgcatcaactctaatatatcatctgcttaatcgtcaaaaaaaaaaaaaaaaaaaaaaaagaaaaaaaaaaaaaaaaaaaaaaaaaaaaaagggcggcccggacgcgtggaggcacacaaagat

SEQ ID NO: 546 - DNA, 734 bp, Zea mays
  unsure (1)..(734): unsure at all n locations
  Clone ID: TF_LIB5046-008-R1-K1-E10
atctttaatctgttgcacttccttccttctcaccgacgaatcctccatcccgcgcagcatctcctccctccctccctccgctccgtccgcgtcgccaaaccctagtagtacgttgtacaggacaatggggccacagccaccgcttcaccttcccgccgccaacggcgacagcatcgtcgaccgcgacgtttggctcgcctgcgccgtcccgctctcccgcctccccgccgtcggtgccgaggtctactacttcccgcacggccacgccgagcagtgccccgcgcatctcccggcgccgctcccggcgccgcacctcttcccttgcaccgtcgccggcgtcagccttggcgcggacgacgagaccaacgaggtgttcgccaaaatctccctcagcccaggcccccaccgcgggcccgccgccgcttgtcgtaccgaccccaccagcgactgcccgccgcaggagctcagttacttcaccaaggagctcacgcagagcgacgccaacaacggcggcggattctccgtcccgcgctactgcgccgaccacatcttccccacgctcgacttcgacgccaacccgcccgtgcagaagcttttcatgcgcgacaccaggggcaacccgtggcagttccgccacatctaccgcggnacgccacgccgccacctgcttaccacggctggagcaggttcgtcaacgccaagctgctcgtcgcgggggacatcgtcgtcttcat

SEQ ID NO: 547 - DNA, 638 bp, Zea mays
  Clone ID: TF_ZmC2665_4
gaccgctcgtggcgctgccgccggcggggagcctcgttgtctacttcccgcagggacacagcgagcaggtagcagcatctatgcgaaaggatgcagatgccaaaattccgagctatccaaatctctcatcatctgttttgtctagcgacagtatgcatattggaattcttgctgctgcagcccatgcagcagccaataacagccaattcacagtattctataacccaagggctagtccttcagaatttgttattccttttgccaagtaccagaaggccgtctatagcaaccaactatcacttggcatgcggtttagaatgatgtttgaaactgaagaatctgcaacaagaaggtacatgggaacaataactggtataagtgatatggatcctttaaggtggaaaaactcccaatggcgcaatattcaggttgcatgggatgaagcagcaccaagtgagagacgcaccagggtttccctttgggaggttgaacctgttatcgctccattcttcatttatccctcgccattgttcactgcaaaacgtccgaggcaacctggggtaacagatgatgatagctcagaaatggacaatctttttaagcggaccatgccatggtttggtgaggaagttggcaag

SEQ ID NO: 548 - DNA, 873 bp, Zea mays
  Clone ID: TF_ZmC371412_1
ccggccggggaaaatcaaaacaactgtgtgtgccgctgtagcagcgcgcgccaccaccgtcaacttctccccacctcgccgccgtctagatttcgtctcctgggctcgagcaaccgaagcaggcttggggtgttctcggagagaatcgttgcctcggccgatgccggccctgatgtaggtttctgctctgctttgcccggtgccaacgtctctcccggagtagcggttccgccgccccatgatctgccagttggaacacatgggcgttcacggaggaggttgctctgctggacagtgaccgcatttggtagcggtggaggaagacgacgaagaggaggaggagtaggccatgaaggaggtggccgaggaaaggtgccttgacccgcagctgtggcacgcgtgcgctggcggcatggtgcagatgccgcccgtgcgctcccgtgtctactacttcccgcagggtcacgcggagcacgcgcatggcggcggggccgcggacctcgccggggcgcgagcgctcccgtcgctcgtgctctgcagcgtcaccggggtgcgcttcctggccgatccggagaccgacgaggtcttcgccaagatccgcctggtgccggtcgcgcccggcgaggtggagttccgagagccccgtgagttcagcgtcgaccccgaggacgcccgggagaagctttcttccttcgccaagacgctgacgcagtccgacgccaacaacggtggcggcttctcggtgccgcgctactgcgccgagaccatcttccccaagctcgactaccgggccgacccgccggtgcagacggtgcttgccaagacgtgcacgggaaggtctggaagttcgcccatttaccggggcacgccgcg

SEQ ID NO: 549 - DNA, 884 bp, Zea mays
  Clone ID: TF_ZmC13783_2
aattcgacttcggcatgccttctcctaccaccccacaccctctccccatctctctctctctccccgtgccctcctccccccagtccgccccacccttccggccctccccctcttttatatccagtaccatggtgatctccgagctcgggtgagctgatgagaatgcggccgatttgaggaaggctgtgggcgcgatggatgcggtttcgggcggattcgcgaggaggctgtagaggttaggttccggtgtcccccggcccggccggtcgtgggagatgagctcctcgtccgcggccagcatcgggcagccgccgccgcccgcgccgccgccggaagaagagaagaagtgcctcaactcggagctgtggcacgcctgcgccggcccgctcgtctgcctccccaccgtcggtacgcgcgtcgtctacttcccgcagggccacagcgagcaggtggcagcgtcgacgaacaaggaggtggacgggcacatccccaactaccccaacctgccgccgcagctgatctgccagctccatgatgtcacaatgcatgcggatgtggagacagacgaagtgtacgcgcagatgacgctgcagccgctcaatccacaagagcagaacgacgcgtacctgcctgccgagatgggaatcatgagcaagcagccgacgaattacttctgcaagacgctgactgcgagcgacaccagcacgcacggcgggttctctgtgccccgtcgtgcggccgagcgcgtcttccccccgctggatttcacacagcagcctccagcacaggagcttattgcacgggatattcatgatgttgagtggaagttcaggcatatctttcgaggccagcccaaaagacacctgctgacgactggctggagt

SEQ ID NO: 550 - DNA, 3310 bp, Zea mays
  Clone ID: TF_ZmC1206_1
ccgggacggagccacaccgcacaccccatcccgcccggagcagcaaagcataggtgctcgagcgctccctccagagctccccgcctgacgccccgtccaccccctcctccggcgccccccgcctacgctcggctcccttccctagccggtacgcgcgacctccccttccccctacgtgcgagccaactccttgctccctacccggacttcggcggctctcggtccctacatcggcgtggggccgcgggcctgacgcctaccagccgaatgctgcgcgcgccgatcgccgtaggtagacaaggggtcccgtgccggctggtcaggagctgaagtcagtgcgcgggtcgtctcgtaggcagcggtgtgggctacccctgccgtgacgacgtactcagggcctcaccatgatgctctgtttagacaactcaggatggcttgtacggggtgcatggtcatgcagcgtcggctaggcgagctgtttttcgtcttccctcagggttgtttccaccagcgttacacagctacggagtaatggtagaatgaggacttgcgtctgattgagctgccacctatgatcctctgcaaggtggtcaatgtagaacttagagctgaaactgattctgatgaagtttatgctcaaattatgctgcaaccagaagcagatcaaagtgagcccaccagcccagattctgagccaccggagcctgaaagatgcaacgtctattccttctgcaagaccttgactgcttcagatacaagtacccatggtggattctctgtcctcaggaggcatgctgaagaatgtttgccccaactggacatgactcagaatccaccatggcaagaactggtggctaaagatctccatggaaatgaatggcatttccgtcacatctttcgagggcaaccaaggaggcatctacttacgacaggttggagtgtttttgttagctcaaaaagattggttgctggtgacgcgtttatcttcttgagaggtgagaacggagagctgagagttggggtaaggaggctcatgaggcaactaaataacatgccatcttcggttatctcaagccacaacatgcatcttggagtcctagcaactgcatctcatgccatctccacaggaactctcttttctgttttctacaaacctagaacaagtcgatcggaatttgtcgttagtgtaaataagtaccttgaagctaagaatcacaaggtgtctgttggcatgaggtttaaaatgagatttgagggtgatgaatctcctgaaagaagattaagtgggacaattattggtatgggaagcatgccagctaactcaacatctccatgggctaactctgattggagatctttgagggtccaatgggacgagccttctgctattctgcgtccagatagagtttcaccatgggaactagaaccccttgatccaactaatccacagccacctcaacctcctttacggaataagcgagcacggcctcctgcttcaccttctattgctccagaacttgctccagtttttggtttttggaagtccccagctgagcctgcccaagctttctcattttcaagaccgcagcgaactcaggaattataccattcaaatcccagttcaatcttctcatcatcgttgaatgtaggattcagttcaaagaatgaccgttctactccaatcaacagtcatttgtactggacaatgaggcagacaagaactgaatcctactccgctagcattaacaaagctcctactgaaaagaagcaagaatctgctacttctggctgcagattgtttggcattgagataggttctgcagtatcaccagtggctactgttgctagtgttggccaggatcagccacctgctctctcagtagacgttgaatctgatcagctgtcacagccgtcccatgccaacaaaacggatgccccagtggcaagcagcgagcgctctcctaacgagtcagagagccggcaagtcaggagctgcaccaaggtaatcatgcaaggaatggcggttggcagggcagtggacttgacaaggttagatgggtacgatgacctccgccgcaagttggaggagatgttcgatatcccgggagagctttccgccagcctcaagaaatggaaggtgatctacacagatgacgaggacgatatgatgctggtcggggacgatccatggagtgaatttcgcaggatggtaaaaaggatatacatttactcttacgaggaggccaagtctttgactcgcaaggcgaagccgccggttgttggtgacaccatcaagccagacccaaacaaattgccaccggaatctgacgtgccacatgactcaaacaacaatgctcccgttgctgctgattatcaggactgatggatgctaacttggctcctaccttttctttcccctcttggatgtcggtcatgggaggcaatgcacgctccttgggacttgtaagagttatctgttttgttgcttcgcgggcccaaaggacgcttccctgcaccatctgcctttgtttggaacggcttggaccgccgtggtccttttacctgcagcaaggaaaggaatggctgggagggaatggatactggtatcgttccgtgtgtggcaccccgtgatctgtttgccgtgctttgtaggaggcatggcgtattgccgggtactttggttttggagactgctactgactgctgccgtcgtcgggccgctcctctcacctctggtaaataggactttgtacacaattattttgttagtagcagtatatgtacatcatcggtcgtgttgcttgctacatgtactcctatgtagcatcctcccctgcattttagtcctggctaggtatcagatgctctggtgcaaaaatgtctctgcttgttccaacggcatgctcttttcggcccgtgctgccttgctgggtgtcgtgtgtgccttttcggttggaacattgctgccaccgcccggcatttggtgctttcagcagttatgatcggctccatactgttccaaagggacgagggtttctaactctagtagccatggactcgctctgtcaagttgctccttgaccgggagagtcaggccacaggaggtggtattaatgtataataactcgttgaatcaattgcaataactggagtttgttagggagtatagcccccggcatgcattcgtcaaaaggcgaagttatgttctgcccctggcggttctgagacttgtgtttgctttgacactgcacttgaatttgttcatctgtaagtcagagatgagttatacaatcggccactgtcatatcaa

SEQ ID NO: 551 - DNA, 3140 bp, Zea mays
  Clone ID: TF_ZmC258_1
cgcgcagcgcagtccatccatccacgcacacgcgcacccgtccctctcggcgcccctctcccccctcctccactccgctgctgcctgcttgcctcctccttgccgccgcgaccgcgaccgccgttcgctgtcgaggccagaggagaggagtggtcaagtccgaggccacctgcccaggctcagacctcccccgccacaacgcgagccgcatcgcctcgtctcctccacgccatacacgcccgccttcccttccccggcgaccaggacccctcgcccgcggcgccagcgagctcccccggccagtcgtaggcctcccggagctcagcacgcacgcaggtgggtccagtgaggcctggttgtgcgcgttcctgcgggcgtcgtcggggcagatccatggaactcagccgcccgcagcgcggatagtactgcacttgtgcaccagccaccagcggatcgccaggactgcccacctgctgctgcttgtgtcgctagccatttttcgggcgtctggcttggaggatatggccgcggcgatggacgcgcccaaccctggagcggctgctggcccaggaatgcctagtgacgccctgtaccaggagctgtggcatgcgtgtgctggcccgttggtcacagtacctagacgaggcgagcgtgtctattacttccctcagggccatatggagcagctcgaggcgtctgcacaccaccagcagcttgatcagtacttaccgatgttcgatctaccacccaagatcctatgcagagtagtcaacgtggaactacgggccgaagctgattcagatgaagtttatgctcaaattatgttgcagccagaagctgatcaaaatgaactcaccagcctggacgctgaaccacaagaacgtgaaaaatgcactgcccattccttctgcaagacactgacagcttcagatacgagcactcacggcgggttttctgttcttcggaggcatgctgaggaatgtcttcctcagctggacatgtctcaaaatccactttgccaagaactggttgccaaagagctccatggcactgaatggcattttcggcacatttttcgagggcaacccaagaggcatctccttaccaccggctggagtgtctttgttagctcaaaaagattggtttctggggatgcattcatcttcatgagaggtgaaaatggtgagctacgggttggtgtaaggagcctcattttgtatgaatctaacatgctcggaaattgttacctttagcagcacatgcactgagggtgtagggtggccaggtgggagaacgtttccactggaaccctcttttctgttttctacaaaccaagaactagtcgctctgattttattgtgagtgtgaacaagtaccttgaagctaagaagcagaaaatatctgttggaatgaggtttaagatgagatttgaaggtgatgatgctcctgaaagaaggttcagcggaacaatcattggcatcgggagtttgccggcaatgtcaaaatctctgtgggcagattctgactggagatctctaaaggttcaatgggatgaaccttcatccattcttcgtccagatagaatctcaccatgggaagtggagccactggatgcagctaatccacaatcccctcaacctccactaagggctaagcgtccacgacccccagcttcaccttgtatggtttcggaactgccttcaggttttggactctggaaatccccaattgaatcatcctgtacactctcattttcggaacctcaacgggctcgagagttatttccttcaatccccacgtcaaccttgtcatcttcatcaaatgtcagttttaattcaaagaatgagccgtccatgctaaccagtcagttctactggtcagcaaggcatacaagagctgactcctgcgctgctagcaccaacacagtcgtaattgaaaagaagcaagagccaagttctggtggttgtagattgtttggaattaatatatgctcagctgaggaagaagtattacctgaggttactgctccaggtgttggttatgagcagactgctgcctctgtagagttgaactcggataagctctcacagccatctgatgtcaacaattctgatgccctagcagctagcagtgaacgttcacctcttgaatcccaaagccggcaagtgaggagctgtaccaaggtaattatgcaaggaatggcagtaggaagggctgtagacctgacaaagcttagtggctacagcgatctttgccagaagctggaggagatgtttgacatccagggggagctgggttccacactaaagaaatggcgggtcattttcactgatgatgaggatgacatgatgcttgttggagatgatccttgggatgagttttgcaggatggtgaaaaggatttacatttacacatacgaggaggcaaagaagctgacatccaagtcaaagttaccggttagcagtgacagcagcaagctgagcgctgcgaactcactgtctgaatgactatgaacaaaaactgcagagtgctaacgtccctctaattttgttatttccatcatttgattatgggggtgaatgctcacggttgctccgtgggctgaagttgtggttggcattcaactgccttgagttttggaggcttttggactgccttgccagcatgagcctcctggaagaggcaccctggcatctgcgtgccatttcccatttgttcgtgccgtttggtaggagtatccattggcttatttagcaggtccctggtttgaagaaagaagcggtcagctgcaagatggacggtgccttgcctcttcttcgactacttagctagtaattaggactatgtatgtaatgaatgtatatagtgccattaagacgcccatgccctggtattgaggtcccggcatttgtatgaatcaattgttcggaaattgttacctttagcagcaacgaacctgagggtgtagggtggccaggtgggagaagttgtatgtttctttcagtaacaatctttgtgcaagtgatctgtatatagtctactgttttaataagcaatgttgtgcaacttgcgctcctacaccctacagtacagtggggcttttcttgtgctaaaaaaaaaaaaaaaaaaaaaaaaaaaaa

SEQ ID NO: 552 - DNA, 4302 bp, Zea mays
  Clone ID: TF_ZmC965_2
gccggccgggctgggctcttcctcccctcgctctcttgcgaacttgatcacacagcacatagcacacacacgacacgctgcgagagggggaaagaacttagaagggcaggcaggagaagcgacacaggaaactgacgtcgccttcggcggcctgctacttaaataaatcccctcgcctcgcctccggctgcctcttccctttttccttccgcgcaaatcactcaggtgccagttgcgcggcggagatcgcgacgaattccggacggcagggaggtggtcgggggaactgggaagtgcatgtgagatccgatggcggcggctgcctgcgccggtgcggaagcaggacgcggatgcggagggaaggacgcgctgttcgtcgagctgtggaaggcctgcgcggggccgctgtcctgcgtgccgccgcttggggagaaggtctactacctcccgcagggccacatcgagcaggtggaggcatcgacgaaccagcttgccgagcagcagggcacgcccctctacaacctgccatggaagattccctgcaagctcatgaacatcgaactgaaggttgagccggatactgatgaggtgtacgcccagctcaccctgctccctgataagaagcaagatgagaatacatctacaacagtggaggaagaggaggtggtggtgcctcctgcgctaccagccacaaatgagggtcctcacatccattccttctgcaagacattgactgcctcagacacaagcacacatggtggtttctcagtgttgcgccggcatgcagatgagtgcctcccaccattggatatgagtcaacatcccccaaatcaagaattggtggccaaggacctgcatggggccgagtggcggttccgtcacatctttcgaggtcagccacggagacatctcctgcaaagtggttggagtgtttttgtgagcgccaagcgtcttgtcgcgggggatgccttcatatttctcagaggtgagaatggggagctccgtgttggagttcggcgtgcactgaggcaccaaaccactatcccatcttcagtcatatcaagccacaatatgcatcttggggttcttgcaacagcatggcatgcagtgaacactgatagtatgttcactgtctactacaagccaaggactagtccagctgaatttgtggtttcgcgagataggtactatgaatcactgaaacgaaattattcaatagggatgagatttaagatgagatttgaaggtgaagaggcagcagagcaaagattcactggcacaatagttggaataggtgcttctgatccatctggttgggctgactcaaaatggcgttcccttaaggtgagatgggatgaaccttcttctatttctcgtcctgaaagagtttctccttggcaaatagaaccttctgttagcccatgtcatgtgaaccctcttccagttagattcaagaggtctcgatcaagcgttaatgctttgccatctgacgtgtctactgtaaccagagaagtcacttctaaagtcatggcagactcgcagcaaaatagtctcacaagagccttgcacaatcaaggaaggacacaattgacagttcgataccatgataacagtgatgtgaagactactcaggatcttaccgtgtggtcttcaggaactgagcaacagagaaacaatattgctgcccagacaaagctatgtctggagggttggacgccaactagaagtcctgaaggctacaatcagatattctcggcatttaaaccactgaaagatatacataacccacttggtccttttcctagtcaaatatctgggactcactcaaatagctgggacacagctgatgctcgttatccagtccaacaagctaattacagcatgttacctggcacatggtctttgaggcctcataacagtggttttaggatgaatcaacaaaattatctagtgatgcctgaaggtgcaaattttacggggaaatcagctttcacttcacttcaggaccatggcactgataaatgctccacaggctgctttggtcatattgagtcaagttcccacacagaccatgcatcctcaagtttgatcaggccccagcctttggtccttggaaatggtgttcagaaaagcaaaggcacttcatttaaattatttgggattccccttggcagcccagaaaaatctgaacctctggtatccccaccaagtgtcgcatatgacgggaaacttcaaacttctccatcagaaaaagggaatcagctagacgtagttgaagtggataattgttctcatccttctaagactgtgaagccacttgatggtcctcagtcagattctattacagagaataatcagccttctccagaagctacccttaatatccagaacaaagtgcaaagtagttccaccagaagctgcaagaaggttcatcatatgttgcacctttttccttgctagtagtcattccttgatacataaatgcttactaggcccaaaccttcaattgaatacttctcaaagtatgctccaaagaagtttatgtactcttgatcccttttggcaacttgttttatgtatctagaagcaccggtccaataaaacctgctagttgtgtaacctactaacctttcatgctaataaattacttgagtttttcttgccccttcaagtgtcgtatttggatctgtttggcatcatcaaaagagctatttatccttaagtttggctgtcaagaaagaaaaaaaaagctgtgggaatcctgtgatgagactttttaatctttaagcagtatgccttttggatatatagtctagcattatgcaaatggttattaaatacaatgtggatgacaaatgtcacgttgtcattagattggtgacatgggctttgagaaatgttagctttctaatgataacggtcaaatgttctatctaattgcatccatttttctccggttgctttttattttattttatttatttgaggggaaggataggcctgacacaatataccgagtaaaggccttgggttcgacgcagcttttctgcaaaaatgtagggatatggcgtgcctcggttattacttcatcggactccactcaagtgttcataagcaagatgtttgacttcgatggtgagctgaagagtccatgcaaaagttggttagttgtctacactgacaatgaaggcgatataatgctggttggtgatgacccctggaatgaattctgcgatatggtccacaagatcttcatctacacgagagaggaagtcgaaaggatgaacccaggtgccctgaactcaaggtctgaagatagtctatctgactcgctgggaagaggggtagcttccagagatccccgaggaggcgggtctacttcggctctcgattccgagaactgctagtttgttcagtcagtgaggcctttggaagtgaagcagacaaaaggcgtgaatcttgcggtgtagagtgtagttggtacattgtgtgtatgcctccgggtaagccctgcggtacccagtttgtgtcctggcgccagtttaccatttaagctaagtttttgggtgtgccctgtgctggggtctgggctctagttattgtagcagagcaggcaatgcatgcaagaaactgatgatgcgcctgtttggccctctttcccttcccaagccatgtaaatagccttggctctgaagcgtagtattgtattgtcgacagccgtacttgagatagtactccaagaggcgcgcttgctcctgtcagttgggtgtgcgtatgtagatgtgcgtgtgaagccatgcaagcaagggtttgtggggttgatggcttttcatggtagcggatctgctttcatggtactgacaagcaggtcccaggcggcccgttgactgcggcggtttgctttgagaaccgcgctaacttgtccagtcagtgagcccttttgaaagtggtgaagaaaacaaaaggccccgtgtcagagtgaccggaagaacgaaaaaagggtgtgtttcagtggtgtgtagtaggtaggtaattttgtgtgtatgcctccgggtaaaagccccccggtacccagtttgtaaatggtgcttctcctggtgctagtttcccgtcgtaaactggatttttttggggggggtgtgccctgctctgtgtgctgacccgcctgggggtaagttgtagcaaagcaggagaaaacaggcaaaaaaccgctggtgggcctgcttggccaatccttttccctgcggagcgccgtaaataaccttggatttgaagcggaggaatgtattgtcccgggcctcc

SEQ ID NO: 553 - DNA, 839 bp, Zea mays
  unsure (1)..(839): unsure at all n locations
  Clone ID: TF_ZmC371412_2
gccgcgaggccggcctggcagtcatcaccattacaaggtagaggcgtccgaggcctcgccataattccaacccactgtgtgtgccgctgtagcagcgcagcgcagcgcgcgcgccaccaccgtcaacctcctgatctccccgcctcgccgccgtcgattcttcgccgtcttcctggggctcgggggcagccggagcaagcttgggggggtggtgtcctcggaccgacgacagagtcgttgcccgcgaagatgccggccctggtgtacattcctactccgctttgcccggtgccagagcgtttctcccggagtagcggttgcgccgcctcatgatctgccaattggaacccctgggcgtgcgcagaggaggttgctctgcagctggacagtgatcgcgtttggtgggtgtggcggcggtggaggaagacgacacgacgaagacgaggaggtcaggaggccatgaaggaggcgggcgaggagaggtgccttgacccgcagctgtggcacgcgtgcgccggcggcatggtgcagatgccccccgtgcgctcccgtgtctactacttcccgcagggccacgcggaacacgcgcacggcggcggcggcgccacggacctcgccggggcgcgggcgcgaccgctcccgccgctcgtgctctgcaccgtcgccgaggtgcgcttcctggccgatccggagaccgacgaggtcttcgccaagatccgcctcgtgccggccgcgcccggcgaggtggagttcggagagccccgcgagttcggcatcgaccccgaggacgcccgggagaagctgtcctccttcgncagacgctcacgcagtccgacgcc

SEQ ID NO: 554 - DNA, 305 bp, Zea mays
  Clone ID: TF_LIB3068-003-Q1-K1-F5
acgtccactcgtccgatttattatatcacaaacattgatgctatcataatgatttaggttactgtgactcttgacgtatttgttgttacttttatggcaaccaatgaggcatctacttatgacagactggagtatttttgttagctcaaaaagactggtttctggtgacacatttattttcttgagtgtgacatcattacatgttaaagttgtcttgtacgttacatttatttcctggctttactaaatttttggatcaaccttctaactgttcttcatctaattgatgtgagaacaaatagctg

SEQ ID NO: 555 - DNA, 742 bp, Zea mays
  Clone ID: TF_ZmC929401_1
gtcaagcaagcgcagatgcacaggtacaattgtgggaattagcgactatgaaccgatgcgatggccaaactcaaaaggcgcaacttgcaggtagaatgggatgaacatgggtatggagaaagacctgaaagagttagtctatgggatatcgaaactccagagaacatggttttctcttccccattgaattcgaaaaggcaatgtcttcctagttatggagtttctggcctacatgtgtcatcaatttcaaagccacaaggaagtccttttggtaacttgcagcacatgccagggatcagttcagacattgctttgctgcttctcaatcaatctgcccagaacctcgggagttcaattgcttgtcaacaatcatcattttccagcattattcaaaatgctaagcaaagctatttccctccaacgacattaggtgcttccactgggtggaatgaatctcagcagcagttaaacgcccttggtattcaaaaaggtgatcaagtaagctgtgatgttcagccaggtattgattcaatcactgcaccggagatgaatgttaaaccaagagtcccaagaagcacggattcatactcaagtcagagcatttcggatccaaacagcaagagtgaccctaaaacaaaaacgcgaaggagcaagaagagctcgtctcacaaaaccatttcggatagatctgagattcttcagtaccttctcagatctgtgacaaagcagagcatggttcaga

SEQ ID NO: 556 - DNA, 360 bp, Zea mays
  unsure (1)..(360): unsure at all n locations
  Clone ID: TF_cC-zmle189096f07d1
cgggggaaggaattccggggggctncacatanccngcattttgctaacggactcngacacaagcacgcatgggnnaggctgtgtttctaaccgtgctgctgaccacccccccccgcctatggattataatcagctcaggcctaaaaaaaaacctgcttgccaaggattagcatggagccaagtggaagattcgtcatatatataggggccagcctcgaaagcatctcttgactactggatggagttcatttgtcaaaaaaaagaaactgcttacaagggatgctgtgtaatttctccgacgagaaaactgtaaactaatgatggaagaacttacgcctattcagcataaaaaacacgccc

SEQ ID NO: 557 - DNA, 1873 bp, Zea mays
  Clone ID: TF_ZmC488_1
ttcataattgttccacatggtcttgtaatctgtcgatgcttgtcagaacttggggcaaaatgacaaggcccaaagagtgaatagccaaggatttgcatggcatgaaatggaggttccgtcatatctatagaggtcaacctcgaaggcatcttctgacaactggatggagttcatttatcaataagaagaaactagtctcaggggatgcagtcttgtttcttagaggtaatgatggtgagctaagattgggtgtgaggagagcagttcaactgaaaaatgaagctctacttgaagctgtcaactgtactgattcgaagctacttatgctgtctgctgtcgccaattctttggacaacagaagtatatttcacatctgtttcaacccaagggttggtgcatcagaatttattgtgccgtattgcaagttcttgaagagcttgaactatcccttttcagttggaaccagatttaaagttggctgcgagaatgaagatgctaaggaggcccacgcgtccgtgatcataggtattagtgaagttgatcccatacactggcctggatcaaaatggaaatctctcctgataaagtgggatggtgctactaagtacagccaccagaatagagtatctccatgggacatcgagggagttggcagctcagttttagttactcaccgtctttcctcttctgtttcgaagcgaacaaaactgtgcttccctccaagcgatttggacacaccaattctagatggaaatggtcgtccagactccgtggaaactgaacgtttccacagggtcttgcaaggtcaagaattggtgcaccctagtattcatggtgctgcatgctctcattcatcagatagccccagatgtcaaggctcttatggcaggagattctctgctgatgtgtggaactgcaagatgaatgatgtaatgagtgggcctcgacacctaaatgccactgggtttgcttaccagcccctaggcttcagtgaatctgtcaaattctcagaggtcttgcaaggtcaagaaatgtctcaggcggttccttccttcatgagatctgctttcaactctggcacgcagaatggcagggttcgaccatttgattatgtgcagagatcagatgcaactcaaggatacgctctccagcagtttaatctgccagcaacagaagtgcattcgccctcttctgttcttatgtttaaccaaaccatggtaccacatgctgagctagatggtgcgaccaaccgtgaagaagtacatggcagcaggtacttgtcatccaatgcaatagggagagaagctgaaccatggccatccatgcagcagcaaagagcgagtgtaaatggaagcgagcctctcgacacaactgaagcctcagctcctgcaaggaacgctgaatctggatcggtcggcaggggcgcggggcgaagcaactgtaagctttttggtttctccctgactgagaagatccttggaacggatggtggtggtgtgaaagaagggaactacgaagtggaccgtcaaactccccgggtgctagacttgtttgggcacggttctacgcctggagctctgcatgctctctgtgctgctcccttgggaatatgatgctgttctgcctagttttacaacagttagatttatgtaatccttcagccattttcatcgcgttgtacttgaccaatatgtccagcgtatgatttccagttttaattgtatgctgatgctacatatcctctcttgagatccatgcatgagaattctggcagaatgaacagaggtaaattgatgtccagctgttttctttatgaacaaataggtaaattgatgtttaatttcagaataaaaaccatggcgaatttgatagt

SEQ ID NO: 558 - DNA, 3511 bp, Zea mays
  Clone ID: TF_ZmC2734_1
ccgcttgtttccttgcccgcggtgggtagccgagttgtgtacttccctcagggccacagcgagcaggtagcagcatcaacaaacaaggaaatagagtctcagatccccaactatcctaatctgccgccacagcttatatgccaacttcataatgtgacgatgcatgctgatgcagagacagatgaggtatatgcacagatgacactacaaccactcaacccgcaagaactgaaggacccatatttacctgcagaattaggttcggccaataaacagccaacaaactatttctgcaaaacattaacagcaagtgataccagtacccatggtgggttctccgttccccgtcgagcagctgagaaagtgtttcctccactggatttcacccagcaacccccatgccaggagttgatggcaaaagatcttcatggcaatgagtggaaattccgtcacatctttcgtggccagccaaagcggcatcttctaactacaggttggagtgtctttgtaagtgcaaagagactcgttgctggcgactctgtcctttttatctggaatgacaataaccagcttctgctgggaattcgtcgtgcaaatcggccacaaactgtcatgccatcttcagtcttatcaagcgatagcatgcatatcggtcttcttgctgcagctgctcatgctgcttcgacaaatagccgatttacaattttttacaacccaagggcaagcccttcagagtttgtcataccactcgtaaagtatgttaaggctgtgtatcatacccgcatatctgtggggatgcgattcaggatgctttttgagacagaagagtctagcgttaggagatacatggggacaattaccggaatctgtgatcttgattctgttcggtggccaaattcacactggcgttctgttaaggttggctgggatgagtcaactgctggtgagcgacaaccaagggtgtcactatgggagattgaacccctgacaactttcccaatgtatccatctccttttccgctcaggctcaagcgtccatggccaacaggcttgccttctctgcatggtgggaaggatgatgacctggctaactctctcatgtggcttcgagataccgcaaatcctggttttcagtcgttaaattttggtggacttggtatgagcccttggatgcagccaaggctggatgctaccttacttggtctgcaacctgacatgtatcaggcgatggccacagctgcttttcaggatgcaacaaagcaggcatcgcccacaatgctgcagttccagcagccccagaacatagctggccgggcttccccgcttctttcaagtcagattttgcagcaagcacatcatcaatttcagcagcaaccgtaccttcaaaacatctctgagagcacaatccaagcacagggtcagtctgagttcctcaagcagcagatccaacgcagccagtcattcaatgagcagaagccccagatgcaacaccagcaagaatcacagcagcagcagcaaccacagtgtctgccagttcccccaaacatcagcaaatgcaaccaaccggattatgaccaactaccagtctatatctaatgcattatcaccgttttctcagcggtcgccaagtttctcagtcttcacctatggcgattgtagactatattaccgttctctgactttcctctggaccatacactaaattcttcaggctgcttagatgattctgggtacgtcccgccatgttcagataattctgacaaagtgaaccgaccaccagcgaccttcgtgaaggtttacaaatctggaacctacgggaggtcgcttgatatcactaggtttagcagctatcacgagctccgtagggaactggggcgcctatttggccttgagggccagttggaagacccattgagatcaggctggcagcttgtattcgtcgaccgtgaggaggacgtccttctcgtgggcgacgacccttggcaggaattcgtgagcacggtgtcctgcataaagatcctctccccgcaggaggtgcagcagatggggaagcagggcctggagctcctgagctcggcccccgcgcggaggctcggtagcagctgtgacgactacgtcagcaggcaggagtcgagaagcctgagcaccgggatcgcgtccgtcggttcggtcgagttgggatgagcagcaagatagcgcgcacgcagcagcagcagcagcaggttacgcatcctcagcctcagggtaggtaggggactgaagggttggtctgcgacttgatgacccacgagctcctcgttgcgcgcttcgttcgcctccatgcgatggatagaagttcagcgcagaccaagccttagctctgcgagctatgtaccatctaataattctgtccgtgtcgtaccatgtcaactcctaagtagaagaattgaagaaactaccagcagccgctgtctggtatacacgctgaaacattttttttcttgtatggagaaatactaatcatctggatgtagccaggcctatgcaggctaagtagcagctgtgacgactacgtcagcaggcaggagtcgagaagcctgagcaccgggatcgcgtccgtcggttcggtcgagttgggatgagcagcaagatagcgcgcacgcagcagcagcagcagcaggttacgcatcctcagcctcagggtaggtaggggactgaagggttggtctgcgacttgatgacccacgagctcctcgttgcgcgcttcgttcgcctccatgcgatggatagaagttcagcgcagaccaagccttagctctgcgagctatgtaccatctaataattctgtccgtgtcgtaccatgtcaactcctaagtagaagaattgaagaaactaccagcagccgctgtctggtatacacgctgaaacattttttttcttgtatggagaaatactaatcatctggatgtagccaggcctatgctctctaatggttgatcgggtaatacagcccctcgcacacaaattaaaaaaaccaggtgttggagtgggccaatagacaactatgaggctcacatcattgtttgtggggggatagtacaaactaacataaactgctaatgcaagggggcattcctggtctccaaaacgggaatgattcagctgctataccttattccacttacaatttcctcagcccttctcagaatgactttcctctggaccatacactaaattcttcaggctgcttagatgattctgggtacgtcccgccatgttcagataattctgacaaagtgaaccgaccaccagcgaccttcgtgaaggtttacaaatctggaacctacgggaggtcgcttgatatcactaggtttagcagctatcacgagctccgtagggaactggggcgcctatttggccttgagggccagttggaagacccattgagatcaggctggcagcttgtattcgtcgaccgtgaggaggacgtccttctcgtgggcgacgacccttggcaggaattcgtgagcac

SEQ ID NO: 559 - DNA, 454 bp, Zea mays
  unsure (1)..(454): unsure at all n locations
  Clone ID: TF_LIB3245-008-P2-N1-H10
actatcgaagagctatgacgtcgcatgcacgcgtacgtaagctcggaattcggctcgagcaaacgaacccgcccggagcagcaaagcataggcgctcgagcgctccctcctgagctcctccgcctcacggtcacgcctcgtgtgccccttccccctcctcggccggccgcctcacgccgtcacctncgctcggcgagtctcggctccgacagcagccgccacgtgcgacctcccctactcctgagagatctgcggngctcggcatggggtgaccagatcgggccgctgctcggtgctttccagctgaattctgcccgcagctcgtgtcggaggcagcggacatggcggaggccggcgtggcacgcggctcagggagcgctggcgatgacttgttcacggaactctggcatgcttgtgctgggcccgtggtcacagtgcctcggcaaggcgagct

SEQ ID NO: 560 - DNA, 586 bp, Zea mays
  unsure (1)..(586): unsure at all n locations
  Clone ID: TF_LIB3959-021-Q1-K6-B1
ccgnggtgatgatggtgaactaaggctgggcgtacggagggccattcagcttaaaatgaggccctttttgacgatttcagttgcgacagtacaaaacggcatacattgttggctgtagctgattccttgaagcacaaaagtgtttttcacatttcttacaatccaagagctacggcttcagaatatattataccacaccataagttcctgaagagcctaaatcttccattctgtattggagcaaggatcaacttacagtgccataatgaagatgttagtgaaaggcgatctggaatggttgttcatgtcagtgaaatagatcccatgaaatggccaggctcgaagtggagaagcctgctggtaagatgggaggatggtgttgaatgtaacggccaagatagagtatctccatgggagattgagatagctggtggctctgtctctgttgctcattctctgtccgcatctagctctaaaagaaccaagttgtgtcctcagggaaatttggacgttccaacaatgtatgttacagggaatgggaatggttgtactgactccgtggaaactggaaagttcccaaggtctt

SEQ ID NO: 561 - DNA, 2943 bp, Zea mays
  unsure (1)..(2943): unsure at all n locations
  Clone ID: TF_ZmC1206_6
ccgggttatgannttcttattttaccaaaaaaaaaaaaaaaaaaaaaaaaaaaaaaaaaaaaaaaaaaaggaaaaaactccccagacaaccaagagaaccccgcccggagcagcaaagcataggcgctcgagcgctccctcccgacctcctccgcctcacggtcacgcctcgtgtccccccaccccctcctcctcctcctcggccggccgcctcacgccgtcacctccgctcggcgagtctcggctccgacagcagccgccacgtgcgacctcccctactcctgagagatctgcggggctcggcatggggtgaccagatcgggccgctgctcggtgctctccagctgaattctgcccgcagctcgtgtcggaggcagcggagatggcggaggccggcgtggcacgcggctcagggagtgctggcgatgctttgttcagggaactctggcatgcttgtgctgggccattggtcacagtgcctcgccaaggcgagctggtttattacttcccgcagggtcatatggaacagcttgaagcatctacagatcaacaacttgatcagcacttgcctttgtttaatctaccgcacaagatcctctgcaaggtggtcaatgtagaacttagagctgaaactgattctgatgaagtttatgctcaaattatgctgcaaccacaaacagagcaaagtgagcccaccagcccagatcctgaaccacctgagcctgaaagatgcaacattcattccttctgcaagaccttgactgcttcagatacaagtacccatggtggattctctgtcctcaggaggcatgctgaagaatgtttgccccaactggacatgactcagaatccaccgtggcaagaactagtggctaaagatctccatggaaatgaatggcatttccgtcacatctttcgagggcaaccaaggaggcatctacttacgacaggctggagtgtttttgttagctcaaaaagattggttgcgggtgacgcgtttatcttcttgagaggtgagaacggagagctgcgagtcggggtaaggaggctcatgagacaactaaataacatgccgtcttcggttatctcaagccacagcatgcatcttggagtcctagcaactgcatctcatgccatctccactggaactctcttttctgttttctacaaacccagaacaagtagatctgaatttgtcgttagtgtaaacaagtacctcgaagctaagaatcacaagatgtctgttggtatgaggtttaaaatgagatttgagggtgatgaatcccctgaaagaagattcagtgggacaattattggtatgggatgcatgccagctaactccacatctccatgggctaactctgaatggagatcattgaaggtccaatgggacgagccttctgctattctgcgtccagatagagtttcaccatgggaagtagaaccccttgatcgaactaatccacagccacctcaacctcctttacggaataagcgagcacggcctcctgcttcaccttcgattgctccagaacttgctccagtttttggtttttggaagtccccagctgagcctgcccaagctttctcattctcaggactgcagcgaactcaggagctataccattcaagccccagttcaatgttctcatcgtcgttgaatgtgggattcaatccaaagtacgagggtcccactccaaacaccaaccatttgtactggacaatgagagagacaagaactgaatcctactccgctagcatcaacaaagctccaactgaaaagaagcaagaatccactacttctggctgcagattgttcggtatcgagataggttcttctgcagtgtcacccgtggttactgttgctagcgtcgggcatgatcctccgccacctgctctctcagtagacgctgaatcagaccagctgtcacagccgtcccatgccaacaaagcaatggatgccccagcggcaagcagcgatcgctctcctaacgagacagagagccggcaagccaggagctgcaccaaggtaatcatgcaaggggtggcggttggcagggcggtggacttgacgaggctagatgggtacgatgacctccgccgcaagttggaggagatgttcgatatcccgggagagctttgcgccagcatcaagaaatggaaggtgatctacacagatgacgaggacgatatgatgctggtcggggacgatccatggagtgaattttgcaggatggtaaaaaggatatacatttattcctacgaggaggccaagtctttgactcccaaggcgaagctgccggccatcggtggtgacaccggcgtcaagccggacccaagcaaactgccaccagaatctgacgtgccacagagcgactccgacaacagtgctcccgttgctgctgataaggactgatggacgctagctcggccgtaccttctctttggatgttggccatgggaggcaagtgcagtgcccatgctccttgagactgctaagagttgatcatctggttccatctgcctcggcttggaccagcgaggatggccgggagggagtgcatgccgttccgtgcgtgtttcgtttgccgtgtttggtaggagcccatggcttgttgccggctacttgggttctgtagactgttacactgactgctgccgtctcacctggccgtcggcgcgggccgccccctctcacctctctagtaatatatactagggcttatgtacacagctgttttggtagtggcatatgtatatcgtcggtcatgttgcttgcgacatttagcatcctccgtagctgctatttcctctcctgcattttaatcctgtcttggtatcagatgctctggcgcaatatgtgttccagcgggaaaaaaaaaaaaaaaaaaaaagaaaaaccgcagggcggcctgctatctatgcgtacgagcgcatgtacgc

SEQ ID NO: 562 - DNA, 832 bp, Zea mays
  unsure (1)..(832): unsure at all n locations
  Clone ID: TF_ZmC1249_3
gccggccgggtcgggatctcccccccgcctctgctctcctttctcccgtccccgcacaaaaacatttgcaccccctcccgactgctactgccgctgcctcctccccctttccgcctgccttcgctctcctcgtcgtctcctccgtctagggttctccaccccaccccgccccgccgccgcccgatccgaggcagatgccgcccgcagccatggcgctgccgtcccaggccccgtctaactcaggggatccgctgtacccggagctctggcgcgcctgcgccggcccgctcgtcaccgtcccccgcgtcggcgacctcgtcttctacttcccccagggacacatcgagcaggtggaggcgtccatgaaccaggttgccgggaacccgatgcgtctctacgatctgccctccaagctgctctgccgcgtgctcaacgtcgagctgaaggcggagacagacaccgacgaggtgtacgcgcagatcatgctcatgccggagcccgagcaaaacgatgtggcggccgagaagacgagctctgggtctgctgcgccaccgaggccagcggtcaggtcattctgcaagacgctcaccgcctccgacaccagcacacacggcggcttctctgtcctgcgccgccacgctgacgagtgcctccctgccctggatatgtcccagtcgcctcccactcaggagctggtggcgaaggatctgcatggcatggagtggcgattccgccacatcttccgcgggcaacccaggaggcatctccttcagagtggttggagtgtttttgtcagttccaaaggcttgntgctggagacgccttcattttc

SEQ ID NO: 563 - DNA, 1335 bp, Zea mays
  unsure (1)..(1335): unsure at all n locations
  Clone ID: TF_ZmC9734_2
gatggcccaattcaccctggaggcttctccaggtcgcctgggatgagccggacttgttacagaacgtgaagagagtgagcccatggctggtcgagcttgtctcaagcacgccggccatccaccacctcacgccgttctcgccgccaagcaggaagaagctgtgtatcccattgtacccggagggccaccagctcccggcgccgatgttccacggaagccctctggtgggccgtggtgttgggccgatgcgctacttcccggacggcggcactcctcctgcaggcatacagggagccaggcatgcgcaattcggcatatgtttaccagatctccaccacctcaccaggctgcagtcgagtctatcgccgcacgcgcacgggcttcgccaccagctcgaccacggcgcgcggccgaggatcgccggcggcctcatcgtcggccacccggcagctcgggacgacatctcgtgcttgctcaccattggcaccgccccgcacaagaaaccatcagacgtcaagtcggccgcggcggcgccggcgccgcagctgatgctgtttgggaaaccgattctcaccgagcagcagatatctctaggcttccggccgctgccggcgccgaagaagagcccgtccggcgacgttgctgagactgagataacgatgagcaacaactcggatgcctcgagcccagctgggactgggagtgggagcacgccgtccatcagtggaggcgccccgtcgtcgtgccaggacaacaaggcggcggcgacggcgactgatgacgacgatctcctcgggcactgcaaggtgttcatgcagtcggaggacgtcgggcgcacgctcgacctctcggctgtcgcgtcgtacgaggagctctaccagaggctggccgacatgttcggcgtcgacagggccgagctgacgagccatgtcttctaccgcgacggcgcttctggagcgctcaagcacgccggcgacgagcctttcagtgagttcaccaagaccgctcggaggctgaccatactaacggacgcgaggtagaagaaggcggcagacaatgaagctctcgtcgcctgtacaaccggggggagctagcgagtgtggcgcacccgttgngtgattgcccgatctttcgatgagagggtgtggaataactcgattggnggaggagacgacgttcacggcccgactacagcctttcaaagacgctgcgccttagcaaccgatacaccacctcctatggctgtcacgatcttgtggagcgtgacaccctggccactanggcactcgtcctgcaagcaatcgaaagactagcaagaaacagtagaaacagtac

SEQ ID NO: 564 - DNA, 736 bp, Zea mays
  unsure (1)..(736): unsure at all n locations
  Clone ID: TF_LIB5117-056-Q2-PF1-A3
gcttcccctttcctcatctccaccccatccctcgccccccgcctcgcgcagcggctagggttcctcccgccacgccgccggccagcagcagcagcagatgccgcccgccgccatggcgccgccgcaggccccctccgcaggggatccgctctacgacgagctctggcacgcctgcgccggcccgctcgtcaccgtcccgcgcgtcggggacctcgtcttctacttcccgcaggggcacatcgagcaggtggaggcctccatgaaccaggtcgccggcaaccagatgcgcctctacgatctgccctccaagctgctctgccgggtcatcaacgtcgagctcaaggcggaggcggacaccgacgaggtctacgcgcaggtcatgctcatgccggagccggagcaaaatgagatggcggtggacaagtcgacctctacgacgggcgccacgcctccgaggccggcggtacggtccttctgcaagaccctgacggcatccgacaccagcacgcatggcggtttctccgtgctgcgccgccacgctgacgagtgcctccctcccctggacatgacccagtcgcctccaacacaagagcttgtggcaaaggatctgcatggcatggactggcgcttccgccacatcttccgcgggcaacctaggaggcatctccttcagagcggntggagtgtgtttgtcagttccaaaaggcttgtaactggggatgccttcattttcctc

SEQ ID NO: 565 - DNA, 2830 bp, Zea mays
  Clone ID: TF_ZmC1206_4
cattgggtacctcgaggccgggactccaagccaaggcagcccacggagccacaccgcacaccccatcccgcccggagcagcaaagcataggtgctcgagcgctccctccagagctccccgcctgccgccccgtcctcaccctcctcggtcgcctcccgccgaggctcggctcccgtccgcagccaccacgtgcgacctcccctcccctgttcctgagaatctccgtaggtcggcatggggtgaccagatcggtgctctccagctgaattctgctcgcggctcgtctcggaggcagcggagatggcgagcgccggcgtggcgggctgctcagggagtgctggcgatgctttgttcagggaactctggcatgcttgtgctgggccgttggtcacagtgcctcgccaaggcgagctggtttactacttcccacagggtcatatggaacagcttgaagcatctacagatcaacaacttgatcagcacttacctttgtttgatctaccacccaagattctctgcaaggtggtcaatgtagaacttagagctgaaactgattctgatgaagtttatgctcaaattatgctgcaaccagaagcagatcaaagtgagcccaccagcccagattctgagccaccggagcctgaaagatgcaacgtctattccttctgcaagaccttgactgcttcagatacaagtacccatggtggattctctgtcctcaggaggcatgctgaagaatgtttgccccaactggacatgactcagaatccaccatggcaagaactgctggctaaagatctccatggaaatgattggcatttccgtcacatctttcgagggcaaccaaggaggcatctacttacgacaggttggagtgtttttgttagctcaaaaagattggttgctggtgacgcgtttatcttttttagaggtgagaacggagagctgagagttggggtaaggaggctcatgaggcaactaaataacatgccatcttcggttatctcaagccacaacatgcatcttggagtcctagcaactgcatctcatgccatctccacaggaactctcttttctgttttctacaaacctagaacaagtcgatcggaatttgtcgttagtgtaaataagtaccttgaagctaagaatcacaagatgtctgttggcatgaggtttaaaatgagatttgagggtgatgaatctcctgaaagaagattcagtgggacaattattggtctgggaagcatgccagctaactcaacttctccatgggctaactctgattggagatctttgaaggtccaatgggacgagccttctgctattctgcgtccagatagagtttcaccatgggaactagaaccccttgatgcaactaatccacaaccacctcaacctcatttacggaataagcgtgcacgaccccctgctttactttctattgctccagaacttcctcaagtttttggtttttggaaatccccagctgagcctgcccaagctttttcattttcaagaccacagcaaactcaggaattataccattcaaatcccagttcaatcttctcatcatcgttgaatgtaggattcagttcaaagaatgaccgttctactccaatcaacagtcatttgtactggacaatgaggcagacaagaactgaatcctactctgctagcattaacaaagctcctactgaaaagaagcaagaatctgctacttctggctgcagattgtttggcattgagataggttctgcagtatcaccagtggctactgttgctagtgttggccaggatcagccacctgctctctcagtagacgttgaatctgatcagctgtcacagccatccaatgccaacaaaacggatgccccagtggcaagcagcgagcgctctcttaacgagtcagagagccggcaagtcaggagctgcaccaaggtaatcatgcaaggaatggcggttggcagggcagtggacttgacgaggttagatgggtatgctgatctccaccgcaagttggaggagatgtttgatatccagggagagctttctgccaacctcaagaaatggaaggtcatttacacagatgatgaggatgatacgatgctggttggggacgatccatggaatgaattcctcaggatggtaaaaaggatatacatttactcttacgaggaggccaagtctttgactcgcaaggcgaagccgccggtcgttggtgacaccatcaagccagacccaaacaaattgccaccggaatctgacgtaatcaaacaacaatgctccgttgctgctgattatcaggactgatggatgctaacttggctcctaccttttctttcccctcttggatgtcggtcacgggtcatgggaggcaatgccacgctccttgggacttgtaagagttatctgttttgttgcttcacgggcccaaagggcgcttccctgcaccatctgccttggtttggaacggcttggaccgccgtggtccttttacctgcagcaaggaaaggaatggctgggagggaatggatactggtatcgttccgtgtgtggcaccccgtgatctgtttgccgtgctttgtaggaggcatggcgtattgccgggtactttggttttggagactgccactgactgctgccgtcgtcggggacgctcctctcacctctggtaaataggactttgtacacaattattttgttagtagcagtatatgtacatcatcggtcatgttgcttgctacatgtactcctatgtagcatcctcccctgcattttagtcctggctaggtatcagatgctctggtgcaaaaatgtctctgcttgttcc

SEQ ID NO: 566 - DNA, 341 bp, Zea mays
  Clone ID: TF_LIB4172-034-R1-L1-A5
aattcggcacgaggtgcgattcaggatgttgtttgagacagaggaatctagtgtccgcaggtacatggggacaataactgaagtgagtgatgctgacccagtgcgttggcctagttcctattggagatcagtgaaggttggctgggatgaatcaacagcaggagaaaggccacctagagtttctctgtgggaaattgagccactgacaacctttcctatgtatccatccctgttcccactgcgagttaagcatccatggtattcaggagttgctgctcttcatgatgacagcaatgctttgatgttgctgagagggagttgctgtgaagggggctttcagt

SEQ ID NO: 567 - DNA, 2903 bp, Zea mays
  Clone ID: TF_ZmC1284_1
gtttttccttctctttccgcttccgccgaggccactctctttctctctctgcgcctgcgcctttctcttctccttctccttctccctcctctcaaccccaacaatctctgtctctccatctcctctcgacaaggcggcctcaacaaagtcccaccgcacctttctttaatggagcgagggtgagcctaacaagcactctcgacacacaggaggaggtgctgcccgcttctcccctccctcagtctcactcgctccgctctcctccccgagaccaggaggccaagccaagaaccgcaaaccctcaggccgtggccatggcgcaaggagcaggacgggacccggaggagctcttcgaggagctgtggcgcgcctgcgcggggccgctcgtggagttgccccagaccaacgagagggtcttctacttcctccagggtcacctagaacagctgcaagagccgacggacccggcgctgctggctgagcagatcaagatgttccaggtgcccaacaagatcctctgcaaggtcgtcaacgtcgagctcaaggccgagacagaaacggacgagatgtacgcccagatcactctgcagccggaaccagatcaagtggatctaccccaattacctgaaccgcccctgcaggagacgtcaaggcccgtggtgcactccttctgcaagatcctcacaccatccgacaccagtactcatggcggtttctccgttcttcggcgtcatgcaaacgaatgcctcccagcactggatatgtcgatgccgaccccgacccaagagctcatcacaaaggacctacatggatctgaatggaggttcaagcacatatacaggggccaaccccgtcggcaccttctgactactggatggagcacgtttgtcacatcaaagaagctgattgctggtgacgcgtttgtctacctgaggagcgagaccggacagcagcgtgtgggagtgaggcgcctcgtgcagaagcaaagcacaatgccagcatctgttatatcaagccaaagcatgcatcttggggtgcttgcaagtgcatcacacgctattaggactcattccattttcctagtgtattatagaccaaggttaagccaaagccaatacatcgtcaggctgaacaagtacctggaatctagtaaaattggattcgatgtgggcatgaggtttaagatgagttttgaaggggatgacgtccctataaagaagttttctggaacagttgtcgataaaggagatctttctccacaatggcaaggttctgaatggaagacattgaaggtcaaatgggacgaagccacaaacttaaatggccctgagagggtttcctcctgggaaattgaaccattcgatgcatccgcacctgccatcaccatgcccgtgcaaccatcaatgaaaaacaaaaggcctagggagacagctgaaggcctggatattcatgcactggaacctgctcaagaattctggctctctggaaggcctgaacagcatgagaagacaagcgtaagctccagcgaacccaaacatcaagtcgcttggacaagtgaacgcgcaggatacagtgccatgagcagttcaatctgtcagaattctgcagtaactgggagctggttcaagggcttcaattcctccggctcacacccttccctgccagagatctcccagaaactgtttcaggtcaccagcaacgacgcgagggttcctccttggcctgggctctccgcttatcatgctgacgagccctcttccaagctgtcctgcaacactgctctgtgcagctaccagaccgaggaggtggctccaagattttccaatgccgtcgaagaggaaaagaaggagcccggcatgttccgtctgtttggcgtcaatttgattaaccatgctaggagtagtgctaccgctgacaaggcgagtgtgggagcaggggaagcatcggcgcgagctgctggttcttttgaagactctgctcagctatcaagagtgacgaaggatcatacgcacatggtgaacggaagcccccgagaaatccaaagccatcagagttgcagtggaaggagtcgtatcaaggttcaaatgcatggaaatgacgtgtgcagagctgtggatttgggaaatctggatgggtacgagcagctgatgggtgaggttggagtgatgtttgagatcaaagaccttggctccaaagagaaagaggaatggaaggttactttcactaacgacgagaatgagacaatggaagtcggagctgttccttggcaggagttttgccagatggtgaggaagatcgtgatccattccattggagacaggggccatatggaggcttgcccttgcctggggcaggatgggaagagggactattagaagaagggattttttttttggctggggcaggcaggagatggttgctgctgaaacatgatggcgtagcttgtcgatgacgaagaaggcaacagattggttgctggcgtcagttcttccttgagaaaaaaattcagtggaaggaagaagtgatgtaacataggatttgcagaaaagatttgataatgcgtcttttagaagtttggtttggtttaaagatgacaagttaatgtgtgtctagtgatctgcctaaagccttagcgacgggcaacaagcaataacaaggatggatgatgaccttaccttgggtatgttagctgtgtaaatattatgtatgtatgtatgggacattaaattggttggcatacttgactcctgatttatattgtacgtagtgtgttgcagtgctcaggattcagttgtgatgtaccactattacaagtagtagaaggaatctggtttttagtccaagaatcaacatcatatatgtcaatcacaggcacactagtgcgtaattttagtctttttctg

SEQ ID NO: 568 - DNA, 1124 bp, Zea mays
  Clone ID: TF_ZmC1206_11
ggccgggccgggatgcagcgccgcgcctccaccttgactccatggccaaggcagccagcctacccagacaaccaaacgaacccgcccggagcagcaaagcataggcgctcgagcgctccctcccgacctcctccgcctcacggtcacgcctcgtgtccccccaccccctcctcctcctcctcggccggccgcctcacgccgtcacctccgctcggcgagtctcggctccgacagcagccgccacgtgcgacctcccctactcctgagagatctgcggggctcggcatggggtgaccagatcgggccgctgctcggtgctctccagctgaattctgcccgcagctcgtgtcggaggcagcggagatggcggaggccggcgtggcacgcggctcagggagtgctggcgatgctttgttcagggaactctggcatgcttgtgctgggccattggtcacagtgcctcgccaaggcgagctggtttattacttcccgcagggtcatatggaacagcttgaagcatctacagatcaacaacttgatcagcacttgcctttgtttaatctaccgcacaagatcctctgcaaggtggtcaatgtagaacttagagctgaaactgattctgatgaagtttatgctcaaattatgctgcaaccacaaacagagtgcaattccagagagagaacaactacgaccgccgccgccgccagtgcgacaggcgcgaccagcacgtcctgcccacgcttcaccacacaagcggctcctctccacaatcgccgtcactggaatcgcctgcggtaccgcaatttcccacgcgagcagttatgatcggctccatactgttccaaagggacgagggtttctagctccagtggccatggacttactctgtctgccatgttgtttcttgaccgggagagtcatgccacaggaggtgtatttatgtataataactcctcgaatcagtgcataaatcgagtttgtttgagagcatagccccaggcgtgggtttgtggaaaatgcaaagtaaccgtggataaatgcgttcgcccttggcagttctggaaaaaaaaaaaaaaaaaaaaaaaaaaaaaaaaaaaaacaaaaaaaaaataaaaaaaaataat

SEQ ID NO: 569 - DNA, 3243 bp, Zea mays
  Clone ID: TF_ZmC1249_2
aattcggcacgacctcgaggccggctgggcccgtccccgcaaaaaacatttgcccccccaccccggccaacccctcccgagtcccgactgctactgccgctgcctcctctccctttccgcctgccttcgctctcctcgtcgtctcctccgtctagggttctccaccccacccgccccgccgccgcccgatccgaggcagatgccgcccgcagccatggcgctgccgtcccaggccccgtctaactcaggggatccgctgtacccggagctctggcgcgcctgcgccggcccgctcgtcaccgtcccccgcgtcggcgacctcgtcttctacttcccccagggacacatcgagcaggtggaggcgtccatgaaccaggttgccgggaacccgatgcgtctctacgatctgccttccaagctgctctgccgcgtgctcaacgtcgagctgaaggcggagaccgacaccgacgaggtgtacgcgcagatcatgctcatgccggagcccgagcaaaacgatgtggctgccgagaagacgagctctgggtctgctgcgccaccgaggccagcggtcaggtcattctgcaagacgctcaccgcctccgacaccagcacacacggcggcttctctgtcctgcgccgccacgctgacgagtgcctccctgccctggatatgtcccagtcgcctcccactcaggagctggtggcgaaggatctgcatggcatggagtggcgattccgccacatcttccgcgggcaacccaggaggcatctccttcagagtggttggagtgtttttgtcagttccaaaaggcttgttgctggagacgccttcattttcctcagaggagaaaacggtgaacttcgagttggtgttaggcgcgctatgaggcagttgtctaatgtaccttcttcggttatatctagccaaagcatgcatctcggggttcttgcgactgcatggcacgctattaacacaaagtccatgttcactgtctactacaaacctaggacgagcccttcagagttcatcattccatatgatcaatatatggagtcagtaaaaaacaattattctattgggatgagattcaggatgaggtttgaaggggaagaggcccccgagcagaggtttactggtacaatagttggctgtgaaaatcttgacccactatggcctgattccagttggagatacttgaaggtgcgctgggatgagccttctactatcccgcggccagataaggtctctccctggaagatagagcctgcttcatcacctcctgttaatcctctccctctttctagaggaaaaagacctagacaaaatgcacctccaccttcccctgaatcatctgttctcacaaaagaaggtgcaaccaagattgatactgattctgctcaaacaccacatcaaaattcggtcttgcaaagtcaagagcagatgagctttaggaacaacctgactgaaagcaccgactctgattccactgttcagaagcagatgatgtggtccccatcacccaatgggaaagttcacactaattttcagccgagacctgctatggataactggatgccattgggaaggcgtgaaactgacttcaaggacacccgttctgccttcaaggatgcccgcaccgcttctcaatcgtttggagatacacaggggttctttatgcaagcttatgatgacagtcgtcaccgtctttctttcaacaatcagtttcaagatcagggttcagctcatcgctttgcagatccatacttctatatgcctcaacaaccttctctgacggttgaatcaggcacaaggacgcaaacagcgaacaatgacttgcgtttttggagtgagcggaattcgatgtatggtaatccaagtgaccaacagcagggtttcagctttgggcaaaacacatcaagttggttgaaccagccacttccccaggttgaacagtcacgagtggtcaggccgcatgcaacggttgctccatttgatttagagaagactagagaaggcagtgggttcaaaatatttggtttccaagttgatacaaccaatccatcacctgtccaattgagctctccattgtctgctatccgagagcatgtggtacaaactcgaccatcggcaccagtgaatgaattgcaacctgtgcaaattgagtgcttgcctgaggtgtccgtaagcacagctggaactgcagctgagaacattcagcaagtccagcaaagttcgaaagatattcaaagcaagtcccagggcgcttcaacaaggagctgtacaaaggttcataagcaaggagttgcgcttggccggtccgtggacctctctaaattcaccgactacggtgagctcaaagcggaactagacaagatgtttgagttcgagggcgaattggtatctgctaaccggaactggcagatcgtttataccgacaacgagggtgatatgatgcttgtcggagatgacccgtgggaggagttctgcaacatagtgcgcaagatctacatctacacgaaggaggaggtccagaagatgaactcgaaatcatccgtgccgaggaaggaggaacccccagcagcaggcgaaggctgcgccgccgccgccgcaaacgagtaggatgtctgcctgcactgcagcaagcagttttagatgactaggtcgtgtggaggaagccgacgatgatgcatgcgtgatgaacccgttccttgtgcaggaggtggtgccagcccgggtcccagggaagtaaaaactcctgagatcttttgcttgtccgttgcagccccatcccccgtccgtttgggttttagttgggaacgtagaaactactgtctccgcctgcttctccgaagctcgctgttggtagcaagttttattgctagtattattgttattgctgatttgctcccctctgcctttgcgatgtaaatatttgtgtacccagccccagccccagccccagccccagcttgtagtgagcagtaacaagcagtagcggtaccttcggtattaaccggcagctagctatttcgcggcattttaatccctgtaagcgtagctctgtggcgtgagatagatgacaaacactgggtatatgtatgtctgatctttctcactgaatgtaccataagagagtttgtagagtacctgacctgtgaccaaccccgttcctgtcagctctctggtctcagcaacacgctgtgtgatgccgcatatggtcaatgcaagtccgtgtcgtttac

SEQ ID NO: 570 - DNA, 776 bp, Zea mays
  unsure (1)..(776): unsure at all n locations
  Clone ID: TF_ZmC172363_1
gcccgcctctaagaactaagtggaattcccccgggcctgcaggacattcggcacgatgcctctccctcacccgcacctcaccactcctcggcctcacttcttcacaagttcacatcagcagcagctcacgaaacaggagcgtcataaagacatggtcgtcgcaggatagcctcagacccagcgacgcagcggcagcgacccaggaagcaacagcgaccggcatcgatcgcggcagccgaggcggggggacgggaggagggagggagcggtcgccgcaggagcagagcggcacggcatggggtcctgagtgactgactgactgacgactgagtgtctgactgagaaggagatggctggagcgcgacggccccggagccattaatggggcgctcatcctcctcgtcctcccactcctcgcctcccccccgccaggtcgcggtcggctccgctttttaaccggcttgtcctggagcggggcgaacggcgaacctcacgggcgccggaacacgaaccggaaccctagtggtggtggtggtggcgcgccccatgggcatcgacctcaacatggcggacggcgagagccaggagcgccgcccgccgccggcggtgtgccgggagctgtggcacgcgtgcgcggngcccgtggttgcgctaccgcggcggggcagcctggtcgtgtacctgccgcaaggccacctatccgcggccggcggcgggcacgtcgctgtggacctgccgncgcacgtggcgtgccgcgtcgcggatgtcgagttatg

SEQ ID NO: 571 - DNA, 3343 bp, Zea mays
  unsure (1)..(3343): unsure at all n locations
  Clone ID: TF_ZmC13783_1
cgatgggtgcccccctccccgccccctcgcgccctcagagactccctctctgctcacttatctctctctctccgcagcctcatcctccggtttccgcgcccccctcccgtccctctgttggtctcctcttcgagagaatggcgatctccgagctcgggtgagcggaggtgggcgtccctacctagtccgttgcctgcctcgggtgaagcgtcggttcggctcggtgcagaatgcggccgatttgagcgaggacgggggggcgatggatgtgggttcggacaggattcggcagcagcttgtagaggatccggttcgagccatcccggcccagctgatggtagataaagatactttcccctcaggatgtgcagaagatgggaaagccaggaacgatccacgctacatatctgaactgcctatcctaagtcgattcatggaggtgcgtctggctcctcttctgcctccccaccacaccgtagcgcggcgtacgatggcctgctctactctgctcgcaggttcgcccgggtcgcctgtagcatgcaccaccgtgctcgtcttcagaagaccaactccccgtcgcttgtatccggtgcaggtcaccgctcctggactgatactgtggtggattccacgtaggaatcagtagcagcaaatctatcctagtttgtggcaggctcgagcggcgctcgttgctctgtcgcaccaagatcttcggcctaaaaagcgtggccgaaaccgatctctgcaagacgctgactgcgagcgacaccagcattcaccgcgggttttctgtgccccgtcgtgcggcagagcgtgtcttccccccgctggatttcacacagcagcctccagcacaggagcttattgcacgggatattcatgatggcaaagccaatgcaggcatgtcttcatgactcagtgctaaagagcactgcacaggactggctggagtgtgtttgtcagtgctaagagacttgttgctggagattctgtgctattcatatggaatgagaaaaaccagcttttgcttggaatcagacacgctacccggccacagactgtgatgccctcttctgttctttcgagtgacagcatgcacatcggactccttgcagcagcagctcatgctgctgcaacaaacagccgcttcacaattttctataatcctagggcaagtccaacagaatttgttatacccctttcgaaatacatcaaggctgtttttcacacgcggatatcagttgggatgcgattcaggatgttatttgagactgaggaatcaagtgtccgcaggtacatggggacaataacagaagtgagtgatgctgacccagtgcgttggcctagttcctattggagatcagtgaaggttggttgggatgaatcaaccgcaggagaaaggccacctagagtttctctgtgggaaattgagccactgacaacctttcctatgtatccatccctgttcccactgcgagttaagcatccttggtattcaggacttgctgctcttcatgatgacagcaatgctttgatgtggctgagaggagtaaccggtgaagggggctttcattctttgaacttccagtcacctggtataggttcctggggacaacagagactccatccatccttacttagcaatgaccatgatcagtatcaagcagtggttgctgccgcagctgcctcccagtccggtggttatctgaagcagcaattcctacaccttcaacaacctatgcagtccccacaggagcagtgcaatctcaatccgctgttgcagcaacaaatactacagcaagcgagccaacagcagatggttagttctgatgctcaaaatattcagtccgtgctcaacccaggtgctattcagcagcagctccaccaactccagcagatgcagcatactcataatgaccagaagcaaaagattcaaccagatcaacagtaccaagttgctagcagtgcggttctcccgagtccaacatcattaccaagccatttgcgtgaaaaatttggcttctctgatcctaatgtgaactcttccagcttcatcagctctagcagcaacgaaaacatgctggaatcaaacttccttcaggtaagttcaaaatccgtggatttgtctagattcaaccaaccagtagttagcgagcagcagcagccgcaacaacaacaggcatggaagcaaaagtttatgggctcacagtcaatgtcttttgggggctcggtttcgcttaactcgcccactagcaaagatggttctgttgacaacaaagttggtcgtgatgtgcagaaccagtccctttttagccctcaagtcgactcttcctccctactgtacaatatggtacctaatcttacctcaaatgttgctgataataatatatcagcgtttccctctggatcaacatatctgcaaagtccaatgtatggttgtctggatgactcttctggtttattgcaaaatacaggagagaatgatccgacaactagaacttttgttaaggtttacaagtcaggatcagtggggagatccttggacatcacccggttctctaattatgctgaacttcgagaggaactgggtcagatgttcggcattaagggtcagttggacgaccctgatagatcaggctggcagcttgtatttgtcgacagggagaacgatgtgcttctccttggagacgacccgtgggagtcatttgtgaatagtgtatggtacatcaagatactttcacctgaggatgtgcataagatgggaaagccaggaaacgatccacgctacctatcttagctacctatcttaaatcgatacatggagctctttctggctcccatgacgattctgcggcacactgtagcactgttcacgacggcctgctctactgtgctcgcatgttcgcccgtgtcatctgtagcatgcacaccgtgctcgtcttcagaagacgaactccccgtcgcttgtatccggtgcaggtcaccgctcctggactgatattttgtaggttccacgtaggaatcagtatcagcaactctatcctagtttgtggtaggctcgcgcggcgctcgttcctgtgtcgcatcaggatcttcggactaaaatgcgtagtcgaaaccgttctcgtgattcgtaagctattcatgtatttgaggattcctcgacatgctttcgacgatgaactgcaataatctgaatgcaggaggattgtttgagatttgtaaaaaaaaaaaaaaaaaaaaaaaaaaagaggggnnnnnnnnnnnngccccggccgcggcccccccnggggggaannccgcggggnncccccccacggggggggccccgggcgggcggccc

SEQ ID NO: 572 - DNA, 793 bp, Zea mays
  Clone ID: TF_ZmC12351_2
cgtaacgcaaaagaagagcataagcttcgttaatcacacgattccatgtagttattgtaatttttattctagctaacggaaagtgagaaccatacatatggccgcttttttttttttttttttcgaaaacaaaaggagctttaattccggtggaaccatttaagatctgacaatgaatccgtaagatatggaattcagaacaacacaagattcatgtccttgacattattaacatccatataaactctgcaatattcatgtctaatttctggcaatatgaagtccaaggaagaagagtaacctgctcactgtggccttgaagaaaatacatcactcgactatcgaccgcaggcaatgaaacaagagagccggcacatgcatgccacaactcagaattcaggcacttgtgctcttcagcttctcacctgctctggcaccacgttggcagcaaccatcatcatcacagcataggcaccagcaggccggcgatgaccgcacaggctctggcaccacgaggccgtggacggaaatcgacgctggccatggacggaaatcgacgctgcgaggtggtctggcagagtggagcctcgttggagggttgaaggcgacacagttgtggtatagacaccggaagtggttatgcggagatagaacttaggagccgaagtgaaggaggcggatgtggcgcggaggagcacggagggcggtgccatggatggggatgaggaatgggagaacgtgtgctagggttgccgcagggaatgcccgaattcccggccggcccgggggtacc

SEQ ID NO: 573 - DNA, 825 bp, Zea mays
  Clone ID: TF_ZmC1126_1
aattcggcacgaggctttcgtggactcggcggccatggagcgggagcgggagagtgacaggtgcctggacccgcagctgtggcacgcctgcgccggcgggatggtccagatgccggcggtgcactccaaggtgtactacttcccgcaggcagcgtcggagcacgcgcagggccccgtgggacctccccgccggccgggtccccgcgctcgtcctctgccgcgtcgccgccgtccgcttcatggccgatccggacaccgacgaggtcttcgccaagatccgcctggccccggtccgtcccaacgagccgggctacgccgacgacgccattggcgccgcggcggcgtcgggcgcgcaggaggacaagcccgcgtccttcgccaagacgctcacgcagtccgacgccaacaacggcgggggcttctccgtgccgcgctactgcgccgagaccatcttcccgcggctcgactactcggccgacccccccgtgcagaccgtgctcgccaaggacgtgcacggcgtggtctggaagttccgccacatctaccgcggcacgccccggcgccacctgctcaccaccggctggagcaccttcgtgaaccagaagaagctcgtcgcgggggactccatcgtgttcatgcggacggagaacggggacctctgcgtcggcatccggcgcgccaagaagggcggcatcggagggccggagttcatgcaccaccaccaccagcagccgcccccgccgcagggcggcgggtacgccgggttctccatgttcctgcgaggggaagaggacggcggcaagatgatggccgcggccgcccctt

SEQ ID NO: 574 - DNA, 575 bp, Zea mays
  Clone ID: TF_LIB3594-048-Q1-N7-A7
ggccaactagcaatgttcttaattaaatatcctgatgtttgcagccatatcatttaacactatgaccagataagaagtgactcagtaccagcagtggtgaggtcacacgtttctcaatagcgagaacaacaccatccttcgtcttcaacccaattgcagtggatcccaacagcttggtcgtctcgggtagcacgagccactgcgaatacaacacatcagcgatggagttctcacgaagcgcgcccggggcaagctccaccagctgcagcagctccgggtccagcgctgccgcgtccctcctcgtcggtccctgataaataagacagagtcacatgctttaagccgtttcgcacccacaaagagactccatccaattgttagaagatgtcagcttggcttgccacgggcagctgactaggggaggtcgctagcctaatccttgaactcgtcgacgttctggaactcctggagatctgcctcgacaccttcttctttaccttcaccaaacagatgctcagggtcttcaactttataacttgaaaagttcgacctcttggtcgccgaaacttaactgt

SEQ ID NO: 575 - DNA, 4051 bp, Zea mays
  Clone ID: TF_ZmC7095_1
actagttctagatcgcgggcggccgctcgcgatctagaactagcccacgcgtccgcgcacgcgtccgaattcggcgcgaggcgaaagcaagcaaggagcaccgcaccacgccactccagtactccactccactctcgtcccctcctcgatccagccatggcggcctagcccccccccctcccctagggttctctgccagcccccacccacccaggcgcctcttgccgctcccacccggtggtcgcgctgcccgcgtcgaatgggaggccacccggcgctcggagtcgggcgtgaccgcgcgctgccggaggttccctgagctcggcggcggcgggagcgtggctggtccggagcgcgccgcgcgtgcaatgggaggttcgagtggggttcctgcgagccgccgcggcggtctcggttctgcgagcgcgtggcccatgcttcgcgaagggtagggttgtctgtctgtctagctagctgctagctgcttggtctgatgagctcagctccggcgccccgcctcggcttccccgcgcgcttgctccgtcggctgcccagaacccagcttgcccgctccggcgcttctcttcgcttcttcggggaaaggttggagctttgaggtggtgcgggtgctcagccgaggactccgggcgatgacgcccgcagtggcgcgcgtttgccgcgacagtcctgggttcgggtagcgagttcctcgagcggatttggctgctgctgcgtcctgcgtgggaaggggaggcggcggcggcggcagcagctgaggaaggggaacggttgctctgaacaggagggggggcaggctgacattgcttctgggaggatggcgacctgcaaagcacccgcagccatcgcagcccagtcattctcatcgccgcaccttggtgttcttgcccccaggtcgtactggttggtgggagggaacatgaacctctccccgcccaagatgtcggagccatctcctgaaagtgacggggaacaaaggtgtctgaactcagagctatggcatgcatgcgcagggccccttgtgtccctgcctgtggttgggagccgggtcgtctactttcctcagggccatagtgagcaggttgctgcatcaactaataaagaagttgatgctcaaatcccaaactatccaaacctacctccacagttaatatgccagcttcataatgtcacaatgcatgctgatgcagagactgaagaggtgtatgcccaaatgacactgcaaccattgagcccggaagagcaaaaggatccttttcttccaattgaattgggtgctggtagcaagcagccaaccaattacttctgcaagacgttgactgcaagtgatacgagtacccatggtggattctctgttccgcgccgagcagctgagaaagtcttccctccattggatttttcacaacagcctccagtgcaagagctggttgcaagagatctgcatgataatgaatggaaatttcgtcatatttttcgtggtcagccaaaaaggcatctactgacgactggttggagtgtttttgtaagcgcgaaaagactagtagcaggggattctatcatatttatctggaatgataataaccagcttctcttgggaattcgccgtgcaagtcgtccacagactgtaatgccctcttctgtgctatcaagcgatagcatgcacattggtcttcttgctgcagcagctcatgctgcagccacaaacagtcgtttcactattttctacaaccctcgggctagcccttctgagtttgtcattccactggctaagtatgtgaaagctgtttaccacacgcgcgtatctgttggaatgcggtttcggatgctttttgagacagaggaatcaagtgtcagaagatacatgggtacaatcacaggcataagtgatctggactcagagcgctggccaaactcgcactggcgttctgtgaaggttggttgggatgagtctacagctggtgataaacagccaagagtttcactctgggagattgagccactgacaacctttccgatgtacccaactgcttttccattaaggctaaagcgtccgtgggcttcaggactacctatgttcaatggtgggaggagcgacgagttcgctcgttattcttctctcatgtggcttcgagatggaaaccgaggggctcagtcactgaacttccagggacttggagcatcaccatggcttcagccaagaatagattatccattgttgagtctgaagccagatacttaccagcagatggctgctgccgcactagaagaaattagagctggggatcatttgaagcaggcatcttctctcctgccagttcagcagactcaaactttgaatggtggattagatcatttgtatggaaatcctgttctacagcagatgcagttccaatctcagcagtcaacactgcaagctgtgcagcaaggttatggtcagaatgcaaacgactctgggtatgttcaaaatcaactgcagcagctgcagctgcaaaagcagcaggagccaccaccaccacagcagcagcagcagacacaagtccttcagcgacaagcacatcaggaaatgcaacagcacctctcagctagttgtcatgatattgctaatgtagcttctggtgtgtccatgtctggatctgcttgtcaatcacaatcttctctgctttctgggtcatcgttctaccaacagaacatctttgatggaaatggtggtccagatctgcatctgcacaacagtttccacaacttttcaagccaagagtcctccaaccttcttaacctcccaagaagtggccaattaatggcatcagagggatggccttcaaagaggttggctgtggaatctcttgctggtcatgagatccaacctctgcagcacaagcttgagaaagttagtcaccagagtactgtgtctcactgttctggcaccttgccgccactatcagcaagagacggttctagtgcccaggcttgtggtacaaatgttcagagtcacctgcttccatcatcatttgcaatccatgatggattgtcaaccatcaggagtggtggtgttggcagtggaactgatgcgataaccatagcttcgttgagatatagtgatgcgaatttgctacctgaaaactccatagcaacttccagttgtttgggtgaatcaggaaccttcaattctcttgacgatgtttgtggtgtaaacccatcacaaggtggaacctttgtgaaggtttacaaatcagggtccctcgggagatcgctcgacatcaccagattcggcagctactacgagttgcgtgtcgagctcgagcggttatttggtctcgaaggccaactggaggaccctgcaagatcaggctggcagcttgtattcgtcgaccgggaaaacgatgttcttctcctcggcgacgacccgtggcaggagtttgtgaatagcgtagggtgcataaagatcctctcgccgcaagacctgcagcagatggcccgcggcggcggaggtgaccttctgtctgcgcctggagcgaggatgctgcagggcagtgtctgtgacgactattctgcaggccacgacgtgcagaacctcaccggcagcattgcgcctgtggtgcctctggactactgaagaggactgaggcgaaggccgggatctgaagctctgaaccaaaaccggcaatccagcatttgcaggatttgccatccgcaagtcgtttcgttcctgtgttatgatcctctcagtctcaggccctgttgatcgggaataacctagtcgtttaatatagctagatgatgatccatgtatcattatggtaatggacatgctgtacgatagctactgtagctctaaatgcaggcaaggcaagaattgatctatcaaagaacgaatgaatgcaggcactcactgtagaggtgatctagccctgtactcctaagtcctaagatatattctcatagctaaaactgatggttccatgtggcattggcacccaagctattgaaaccagtcacctttgccgattcctccttcaaaaaaaaaaaaaaaaaa

SEQ ID NO: 576 - DNA, 3321 bp, Zea mays
  unsure (1)..(3321): unsure at all n locations
  Clone ID: TF_ZmC1249_1
ccagggtcacaccgaatctcccctctcgtctaccctcctctccttcctcgccgcacacacagacacacgcaaaaacatttctcccccctcccgactgctactgccgctgcctcctccccctttccgcccgccttcgctccctcccaacccccttcctcctccgtctagggtttcccgccgccgcctgatccgagtcagatgccgcccgcaacagccatggcgccgccgtcccagcccccgtctaactcaggggatccgctgtacccggagctctggcgcgcctgcgccggcccgctcgtcaccgtcccccgcgtcggcgacctcgtcttctacttcccccaggggcacatcgagcaggtggaggcgtccatgaaccaggtcgccgggaaccagatgcgcctctacgatctgccccccaagctgctctgccgcgtgctcaacgtcgagctcaaggcggagacggacaccgacgaggtctacgcgcagatcatgctcatgccggagcccgagcaaaccgatgtgccggctgagaagccgagttctgcacctgctgcgtcgccgaggccagcagtcaggtccttctgcaagacgctcaccgcctcggacaccagcacacacggtggcttctctgtgctgcgccgacacgctgacgagtgcctccctcccctggatatgacccagtcgcctcccacacaggagctggtggcgaaggatctgcatggcatggagtggcgcttccgccacatctttagagggcagccaaggaggtatcatgatcagatcgtgtggaggaagccgacgatgatgcatgcgtgatgaacccgttccttgtgcaggaggtggtgccagcccgggtcccagggaagtaaaaactcctgagatcttttgcttgtccgttgcagccccatcccctctccctttgctagtcagaggatgcacctcagagtcctggctactgcatggtccgcgaagaacactgaagtccatgtgcactgtctactacaaacctaggacgagcccttcagagttcatcataccgtatgatcaatatatggagtcagtaaaaaagaattattctattggcatgagattcaggatgaggtttgaaggggaagaggccccagagcagaggtttactggtacaatagttggctgtgaaaatcttgacccactatggcctgattccagttggagatacttgaaggtgcgttgggatgagccttctactatcccgcggccagatagggtctctccttggaagatagagcctgcttcatcacctcctgttaatccactcgtgcattcttctagagcaaaaagacctagacaaaacgttcctccaccttcacttgaatcatctgttctcacaaaagaaggtgcaaccaaggtcgaaatcgattcagctcaaacacaacaccaaaattcggtcttgcaaggtcaggagcagatgaccttgaggaacaacctgactgaaagcgctgattctgattccactgttcagaagccgatgatgtggtccccatcactcaatgggaaagcccacactcattttcagcagagacctgctatggataattggatgccattgggaaggcgtgaaaatgacttcaaggacacccgttctgccttcaaggatgcccgcaccgcctctcaatcatttggagatacacagggtttttttgtgcaagcttatgatgacaatcatcaccgtctctctttcaaaaatcagggttcaactcatcgcttcgcagatccgtacttctatatgcctcaacaatcgtcagtgacggttgaatcaagcacaaggacacaaacagcaaacaatgacttgtgtttctggggtgaccagaatgctatgtacggcaatccaagtgaccaacaacagggtttcaactttggacaaaacccatcaagttggttgaaccagccatttccccaggttgaacagccacgagtggtcaggcctcatgcaacggttgctccatttgatctggagaagactagagaaggaagtggcttcaagatttttgggttccaagttgatacaaccagtccatctcctgtccaattgagctctccattgcccgctatccaggagcatgtgttacaaactcgaccatcggcaccggtgaatgaattgcaacctgtgcaaattgagtgcttgcctgagggatctgtaagcacagctggaactgcaacggagaacattcagcaagccccgcagagttcaaaagatatccaaagcaagtcccagggtgcttcaacaaggagctgtacaaaggttcataagcaaggagtcgcacttggcaggtcggtggacctctctaaattcaccgactacggcgaactccaagcagagctggacaagatgtttgacttcgagggtgaattggtatctggcagccaaaactggcagatcgtctataccgacgacgagggcgatatgatgcttgtgggagacgacccgtgggaagagttctgcagcatagtgcgcaagatctacatctacacgaaggaggaggtccagaagatgaactcgaaatcagctgcgccaaggaaggaggaatctccggcagcgggcggcggaggaggttgcgccgccgccacaaacgagtagtatggtggtttgctcttggtggcaagttgaggccaaggttttactactgctattgttattgctgatttgctctccccgccttccggtgtaaatatctgtgtgtacccagtcccggccttgtgctagtaagtagcaagcagtgttaccttttggtattttaaccagcagctaagttcgcggcattttagtccctgtaagcggtaagcagctctgtagcgtgagatagatggccaagcgccggtacgtacgtgtagtgtctggtcttctcactgagtgtactataaagagttaatataggagctgaccctgtgaacccgcgtgatggatgcatatgcttagtgcaaagcttgtagtgagcagtaacaagcagtagcggtaccttcggtattaaccggcagctagctatttcgcggcattttaatccctgtaagcgtagctctgtggcgtgagatagatgacaaacactgggtatatgtatgtctgatctttctcactgaatgtaccataagagagtttgtagagtaaaaaaaaaaaaaaaaaaaaccgacctgcccgcgcgctcgtctcagcacccccctgtgtatgccgcataggtcaaaaaaatcccaaaaaaaaaaaaaaaaaaaaaaaaaaaaaaaaaaaaaaaaaaaaaaaaaaaaaaaaaaaaaaaaaaaaaaactcgagggagggcnccgggtacccat

SEQ ID NO: 577 - DNA, 2281 bp, Zea mays
  unsure (1)..(2281): unsure at all n locations
  Clone ID: TF_ZmC490_1
caccgnntcggaaaacccggccgggggacgcgtccggttcaaaaccattctccactgttcctccgctccctctgtctcgtcgtctcccatctccggctagggtttgccctttccaccgcgtccgacgcctacctcgcccgcgccactgcagggaccaaggatgtcgcaacagcaaggtgtggaggagccgccgccggcaccgctgccggcggcggaaggcgaggcacaaccggccgccgatatccccatgagcgaggccgcggcggtggaggatgaggaggaggaacccgtcgtgggggaaggggaggacggtgcagacggggccgccgacgccgtcgattccgtcaatgcttcagcgaaacccgaagcagagggcgcggaggaggggggcagcgacagggaggagcggaatggtggcccgacggcggatttggttggcgaggttgtgaagttggagaatggggacgggcctgtgacggtgggcggctcggtggacgagggtcgaggtggagatggcggtgacgacaaaggcctggctggtcagaatcagcctgctgtgaaccagcttttgctggcgccggctgaggaggatctggcattgtccaagatctcagataattccttcatgttcgattacaccactggtggcgatgactcagggactgaggaggagcaggctgccttcatgaaggagctggagcgtttccacagggagaaaatgttggagttcaagccccctaagttttatggtgaaggattgaattgcctcaaattgtggagacaagttactggattgggtggctatgatcaggtgacatcatgcaagctgtggcggcaagttggagagtcattcaaacctccaaagccatgtacaactgtttcctggaatttccgtaacttctatcagaaggcactccttgaatatggggtacacaaaatcgacacacgaaagtatcttgttgctccatttcatcttccacgtctacttggtggttggggcttatttggtggaagcatgagatctgaatctggcagcccgacaatagcaaatgcctagggccttgctgattgcaagccttctcgacgcttccgtgctaatgctcgactgtatcaagttaaactcattggttgacgtggttctgtgtgtatgcgggatagaactcctaaaagcagtggttctgccaagaaagaaaggacaccatgcgttgaagatgatattgggataccttataaatcctataagctacaaaaagactcaatggatattgacatgggccctcttgctgattgggtgaaaataaatgttaggaaaaccaaagattgctatgaagtctatgcattggttcctggccttctgcgtgaagaggtacatgttcagtctgaccctgctggtcgtttgatagttactggagagcccgagcaattggataacccatggggtgtcactccattcaagaaggtcattaggttgccttcccgcattgatcctcaccaaacctctgcagttgtcaccctccatgggcagctatttgtgcgtgcaccatttgaacaatcaaaataatgttgatgccacaatgaagcacaatactacaagtttgccttatgagtgggattatatcgttatgacatgagcttagaagtgctcaccctgaccgtcgtccaaaactagttccttgctgattttaatgcttcaagcctcctccatgctagatctctcatgtatcaagttaaactcattagttgacatagttctgtgtgtattcggttgtgcccattggctgtgaattgtagctaaagcaaagttactaagcctagagtttaggatgttgatagtctgatgctcaacatgtccatggtttcttttcaatttagtctgcataaaatgtactgtttgtagcaatgtagtatgtagcttgttcccagtatttaagctccggaacatgaagagaggtagagattcattgtatgtaactgttgctgttgcattgcaattgctattcaacttgtattgtcaaacagtttaggatgttgatagtttgatgctcaacatgtccatggtttcttttcaatttagtcggcatagaatgtactgtttgtagcaatgtagtatgtagcttgttcccagtatttaagctccggaacatggagagcggtagagattcattgtatgtaactgttgcccctggtgcattgcaattgctattcaactttgtgattaccgtatgtcaaacaatcttttactctatggcctcctaaaaaaaaaaaaaaaaaaaaaaaagag

SEQ ID NO: 578 - DNA, 3643 bp, Zea mays
  Clone ID: TF_ZmC5175_1
ccgtattccaactcacaacaaattcggcacgaggcaggctcgaaccgcgccagcgccaatccggatccccgatcacaacccctacaccacaccacaagtccacaggccacaccgaatcgatctgcaccaaccgaacacatacatgcacaccaaaagcagtcgcagcatccgatattccgatcccggcaaaaacaattctcccagaaagagattatttcgcccccctcaccaatcctgctcccgaaattcctaatcttttaatccgcgttttccctccgtccgtcccccggcttgcagcagtaatgaagcggaggaggaaaaggagaaaacgaaaaagcgcagggaaaacaacacaccagcacccgcagagagcaggcacacatcaactcatcaagctgagcgatgcgtgtgattgcgagcatgtgagcaggcaggcgggcagggcgaaaatccgaggaggaaaagtccgcgagaatctccggactggcctccccacacatcgtcaaaaatccaatcttgacgcctccctggtcgagccgagactgttccaaagtttctgcctctgtgatgcgtgcgggattgttgccagttggttggttgccgctgctaatgaggcccgcccgcccgatccccgtggtcgccgtctccggttaatcccgcttcagttcttgtaccggttcttggagagagatttttttccgcctctccccccctgtggattgcgccgtgtgtgtttgtctggatcgtgatgggggcgtgggccgattcgccaccaccacaagcacgactcctcttttttattgcctccgcactgggatttgctttcgcgttgttgcagtagctatttccgcgaatcgtcttctagggctccgtgtgttctcgcgcactttaccctctgttttccccattcacccgcaccgaatccacccccttcccggtcgcgtccggccgtcgattgaggccgtgccgccgccgattacgccgcaaaatcgcgtcttgggtttggtgcatgaagaagtggggttgatttcgaggggaggtttttctcctgcttggctgccgtcgggaaggctccggccggccagtatgtctcaaatccaaagcttctcgaggaacaactgtgcgctcctcgcggtgctgtgtgggaagtatgctgagaaccgcacaccagcagcgaggtctgggctggaggcgaagcggccgcggccggcttacccgttcccggagctcagctcggctgggcgattggaggtccacaccctgttcaatcctacaccagagcagttcctcgaggcgcagcgaacacattaaaaaggcattacgagacatacttgttggaatatgagttagcacatgatgatgtggatggcgaaagctgcttgctttgtcacagtagcgcacctggagattgggtgaactgcggtttatgtggcgaatgggctcactttggttgagacagacgacaagggctaggcactttcaaggattacgctaagacagacggtttggaatacatctgcccccactgtagcttagcaaactacaagaagccaccactaccaccaaaagtagctaatggtttctcaaatacagcatatgttccacgacttttcagcttgctcatgcatccttccgtctatattgtgtaagaaacagtcatgtgcaaagtgttaagcttggtccgcgtctccttggggatgctccaaaaataaatataagtccacctgagacagaaatggtcgatgaagaaggttcatctgaagtgaccccggctttaaaattatatgatgaagaaatcaacatgaaattactcttatgtggagtgccatgcaccttgattcgtgggagcaaactgcagaatcgaatcagtgcttctccaccacctcttgaagctgcatctctaccacgtgggatggttactatgcgctgtgatatcagtacttgcagctcttcccatgtgtcactcctcgtttctggtagcgcacaaacttgtttcgatgaccagcttctagagagccacataaagaatgaaattattgagaaaagccagttagtccgggctctctcaaatagtgaggacaagttaccatcaagtgagcctttaacttccatgtctacggcttgtggggcttctacctttgaagtttggatgtcccttcctaagtgggcagcacaggttctgaagcatctagcgccagatatatcatacaggagtttggttgcacttggtattggttgtataaatggtactcctgttgcttcatttgagaggcgagatgcagaccgtcttcttttcttttgcacaagccagtgcaaagatttggctaatgaaaacggtccatattttcatctgccaagatggtcagcctcccttaccaaggacagaacaaagttgggttcagaatcaaaacaaaatctgttgggtgcaaatggagttttggaagacaagaagcatatgatggaagggccttcctcatggtcagccgtcaaggctaaattaaagcctgcaactatgaggcccattcctcactctcgaaagcaacaaatgcatccatttatgggttttcctgaaacttcccttcacgaaactagtattgtgaagccaagcttgccagctgcaccaactgtgaagcacaattcagtttcttctgccacaaccacgcacagaaaatcaacatcagggccgtctcatactccctcagtcattcagttaaatcctctgccaatgaagaaacacggatgtgataggttgcctatccaagtgtgctctgaggaggattttttgaaggatgtcatgcagtttttaatccagaggggccacaatcgacttgtacctcacggaggactagctgaatttcctgatgcaatccttaacgccaagcgccttgatctttataacctgtacaaagaggtggtgtctagaggtggattttatgtgggtaatggcataaactggaagggtcaagttttttcaaagatgcgtaaccataccgcaacaaacagaatgactggtgtaggtaacacgttgaaaagacattacgagacatacttgttggaatatgagttggcacatgatgacgtggatggcgaatgctgcttactttgtcacagtagcgcacccggagattgggtgaactgcggtttatgtggtgaatgggctcactttggttgcgacagacgacaaggactaggcactttcaaggattacgctaagacagatggtttggaatacatctgcccccactgtagcttagcaaactacaagaagaagccaccaccaccaaaagcagctaacgtttcccttgtctggatcaatcaaacatttgatgcaacagcacggaagtgtgaggtcctgaagctgttggcgcaataatatgggaagaattcattagagtagataataggctgatggaaagatgggcaaggccttccaggtatgtagtagtattcgaatgtatcatctcgttaatttagtggttattatgaggcttatataacatgtaacaactgataacacagacaagctcctacagtagttggttagatgctggtgtaagcttcttgtttatattaatctcaattgtgtttttagtttcccttgtctggatcaaaaactgggacgttataaaattataaaaacttg

SEQ ID NO: 579 - DNA, 1879 bp, Zea mays
  unsure (1)..(1879): unsure at all n locations
  Clone ID: TF_ZmC5175_2
ctcgccgggaagaaaaaacatgaagttacttctatgtggagtgtcatgcaccttggatccttgtttattgggctctttagaggacggtctgaatgcacttctgaatattgaaattcgtgggagcaaactgcagaatcgaatcagtgcttctccaccacctcttgaagctgcatctctaccacgtgggatggttactatgcgctgtgatatcactacttgcagctcttcccatgtgtcactcctcgtttctggtagcgcacagacttgtttcgatgaccagcttctagagagccacataaaaaatgaaattattgagaaaagccagttagtccgggctctctcaaatagtgaggacaagttaccatcaagtgagcctttaacttccatgtctacggcttgtggggcttctacctttgaagtttggatgtcccttcctaagtgggcagcacaggttctgaagcatctagcgccagatatatcatacaggangtttggttgcacttggntattggttgtataaatggtactcctgttgcttcatttgagaggcgagatgcagaccgtcttcttttcttttgcacaagccagtgcaaagatttggctaatgaaaacggtccatattttcatctgccaagatggtcagcctcccttaccaaggacagaacaaagtttgggttcagaatcaaaacaaaatctgttgggtgcaaatggagttttggaagacaagaagcatatgatggaagggccttcctcattttcagccgtcaaggctaaattaaagcctgcaactatgaggccaattcctcactctcaaaagcaacaaatgcatccttttatgtgtttacctgaaacttcctttcatgaaactagtattgtgaagccaagcttgacagttgcgccaactgtgaagcacaattcagtttcttatgccccaaccacgcacagaaaatcaacatcagggccatctcatactccttcagtcattcagttgaatcctctgcctatgaagaaacatggatgtgataggttgtctatacaagtatgctctgaggaggacttcttgaaggatgtcatgcagtttttaatccagaggggccacaatcgacttgtacctcacggaggactagctgaatttcctgatgcagtccttaacgccaagcgccttgacctttataacctgtacaaagaggtggtgtctagaggtggattttatgtgggtaacggcataaactggaagggtcaagtcttctcaaagatgcgtaaccatactgcaacaaacagaatgactggtgtaggtaacacattaaaaaggcattacgagacatacttgttggaatatgagttagcacatgatgatgtggatggcgaatgctgcttgctttgtcacagtagcgcacctggagattgggtgaactgcggtttatgtggcgaatgggctcactttggttgcgacagacgacaagggctaggcactttcaaggattacgctaagacagacggtttggaatacatctgcccccactgtagcttagcaaactacaagaagccaccactaccaccaaaagtagctaatggtttctcaaatacagcatatgtaccacgaagtgtttaatttcttgtttttttcttttcctttggtcccgtgtttgtgggaagaagtcattagagtagggaatagcctgatggaaagatgggcaaggccttcagggtaggtatcgaaggtatcatctcgctaatttagtggctatgagttttttatagatgtacaattgataacacattcaagttcctaagtagttttttagtggttatgaggtttatatagcatgcatttgaatgcgggtgttacttgtttatattaatctcccctgtgtttttt

SEQ ID NO: 580 - DNA, 823 bp, Zea mays
  Clone ID: TF_LIB4978-057-A1-K1-D3
tttgaacaagaaaatttaattttcttttttgctccaaaaaataacaaaatggacaaatataaattaaatgataactcgaaaacttttatcaatgagctgttcaacttttggggtcagaggggtgtcactaatctaaagattcctcaaattggtggtcgtgaacttgatctgatgcatttgtataaagcggtttgcaaaagaggaggattccatcgcgtctgcagcaataaactctggaaagaaatcgtccttgagttcggacttcccagaacatgcacttctgccagttttaccttgcgtaatcattaccagaaatatcttcttgcttatgaacaaaaattcttctttggcagaaatgaagaagtagaatatcctgaagttcaaggtgccagacccagaaaagtcgtcagacctgttgaagaagaacccaaatttattgcactagaaatcgccccaagaaatcaatccattgaaaatgttctcaacggaatgtaccaaaatatcccagataatagtgaaattctttacttgagaaaatacaaaacagtccctgttgtgagtgaaatgagtagaatccttctcgctttcgagtcacatatgcaagaagaaaccacttttgccctcaattctttattactttactcttgcaatgctcatttccatctcgagtatcaccccaccctcttggacactctctttgtttatgtcgaaaacatcatcaaggatgtcccttactacaaaaaatctatctcaagacagacaaagaaaaaaactcgacgttgttcataacggcaattaccctgtctcagaaatatcagcacaa

SEQ ID NO: 581 - DNA, 2027 bp, Zea mays
  Clone ID: TF_ZmC8963_1
ctacgcctcagacctcggtgcaaacctgccgcgaaaatagcagccgcccgttcgctctcccactcctcccgcgatgagcgacccgcggggccacgccgccggtcccgaccgtgacggggacgacccgctcgccgaggacgccaacagcgaggaagcgtggcagacgcccgagaaagagccggttgctgtgtcgaaagaggcggctgcgcggggtggggacacgaccccggacgccgaaccggagagcgatgacggagagggaggagtgggctccccggatcagatggagcccaatgcggacggggagcgcgcaccgcccgtggccgcggctgaggacccggaggggattgttggcagcgcaaaggtggagacgaacggcgaggacgccatcagccttgacgccgacggggaggaggaggacgacgatgatgacggagacgaggaggaggaggaggaggacgacgacgacgacgactccacccctgatgcgtctccgagggccgaggtgaaggtggagggcgaaagctccacggggatgacccagagtggcgccggccaccgcgtggaggtggaaccggaccccttcctcgacggtgatgactctgggacggaggaggagcaaggtgcgttcatggcggagctggagcgcttccatagggagcacagtctcgagttcaagccgcccaagttctacggcaagggcctcaactgcctcaagttatggaggcaggtcgcccacctgggaggccacgagcaggtaacggtttgtaaactatggcgtcaagttggagagactttcaggccaccaaagacctgcacgactgtttcttggtcatttcgaattttctatgagaaggcacttcttgaatacgaaaaacacaaggtccggactggtcagcttcagataccaccgcctggtttaccacagcctagtggtgctgaccgtgaggtggttgtaaatcaatcatcttctgccagagttagaagggatgctgcagcgcgtgctatgcagggttggcatgctcaccgccttctcacaaatggcacttatggggataacattttgaaggacaaagatacaatgccacttccaaatcgtgataaaaacctaagctttggggtgctcaagagaaagaaagcatctagtccagagtatgctctcaagtcgtcccgctcaaaaacaaataagtcacaggaagattctatggtcgttgacgttggagaaccagccgactgggtgaagatcaatgtgcggcagactaaagattgctttgaagtttatgcactagttccgggacttctaagagaggaggtgcatgttcaatcagatcctgctggacgtctggttatcacaggggatccagagcagcctgataatccttgggggatcactccgttcaagaaggtggtcaacttgccatcaagaatcgatcctcaccaaacatccgctgttgtcacgcttcatggtcagctattcgtgcgtgcaccatttggtcatcctgatatgtagatatgaaatcctgtttacttcagttttgttgactggcgatgcctcgtcatcagtgatattccttgatattactagggtttatgtcaattctgttgaggaaataggattttgtttgagcagatacatgatgtcaagctgacttagctgaaccgttctgtggttggatgctgattgctgctgttgccatctgttatcaccttgtttattactccctccgttcttttttatttgttgtggtttagtttaaaaatgaactagaggacgataaatatttgagaacggaggtagtattatagtagtggccataaagttagctgattcatgcatgtattccagtttcatggtgagattttatagagaaaggagatgttgttcgtagtagggctaatttgacattatgattacttattgttctttattatttttcttctgtattataaatgcctctctgggtcactccaggcgccttaatgttgcatttttgtgcataacgccggttcctatggtttatgaagct

SEQ ID NO: 582 - DNA, 1891 bp, Zea mays
  Clone ID: TF_ZmC50242_2
ggccgggaacttatgtacagtaacgttatctctcttcctcctttctctctctacctatctgttcccaagtatagaatataggaggagtatatttttttagagatcgttaacctctcacagtaatccctccttttgcccaaaacctaaaggaagccaaagtgggagcaccaaaatattcgcggcgggtgcatagttgtttgtttaggagaagacgaggttaagaggagatgaccgagccggcacctgcggcagcagcggaggagaagagggccgtcgcggacacggctgcggctgtggtggcgaagggaaaagagaaggaggaggcggcgccaactctggcggccggcgccagggggaggttcgtggcctacccggcgcgggtgacggagcacacggacgtggtggcggacgccgcgcgcttcagggcggcgctcgaggggctgcacgcgcacatgaacacgaggctcaaggtgccacccacgcgtccgaaagatttggatcttcatcagctatataaggaggtcacatcacggggtggtattgacaagttgaaggcagagaatagatggagggaagtgaccgcatcatttattttccccgccactgcaacaaatgcttcttttatgttgaagaaatactatatgtcactcttatatcattttgagcagctatacttttttagagtgcaaggctggtaccaacaagaaatagattccagaacgaattcctccattgaagttaaaaccgaagcccaagcttaccacaaaagaaaaaggggtatcaatgcatctctttcaggtccagcttcgtcttcagataatgttgacgtagatgtgatagttgatggcaaatttgaacatggctacataataactgttattatgggatcaaaatccactaaagcaatcctctataactgcactgaagaacctgctctaccaacttcggagctagctgttgcaagtaacaacaatgatttgaagggtggacgtcgccgaagacgacgtaagaagaagctaagtacaacagaccccaggcaccccaaaccaaacaggagtggctataatttcttcttccaggatcaacatagaatgcttaagccacaatgtcctggacaagacagattgatcagtaaaatgattggtgaacgatggaacaatctaagtcctgaagataaagctgtatatcaagaaagaggtgtacaggacaaggagcgataccggacccagctggctgcttatagaaagctgacaggccaacctatcagcaatgctgtgcctatcgagcagagactccctctgacagatgtgacgattgatgaggtagactccaaggtgagtgaaggtgatatgctgctgtcgaaccaagcgtacagcagcagtgatgaaagtgaccactcaggagaaaaaactgttgaagacgagctcaacactgaaacatctcctgaggtgagcatggaaacgactggttctcttcgacaccctgatccttgtgccgatgaggaccactttgagttgcggcggagagaaaaccccaaggcagatgagaaatataatgcaccacctgattcatgactttccgatttgaatgctatatctgtgaacgtatgaaagaagaatttccaaggggtgccgagctagacatacctgattgacttgcatagctctattagcagttagaatacctttcgttttgacagttctgaatttgtgttgctaaatttctttcgaacttaacaggtggctactggataaaattcccattatccagggatatgactggatggacacttgattgacttgcataggaagttggaagtatattctttcattcaatatgtgtcattaaagtacgttgttctccccccaaaaaattaaaataaacccataat

SEQ ID NO: 583 - DNA, 984 bp, Zea mays
  Clone ID: TF_ZmC27538_1
cgtcctcccagcgtccgcccagcgtccgtaagattgaggccggcggcctccgaaataaaaaagatcctgcaagaaaaaaaaaagaaagatctagggcgagagaggaagagggagggagggaggaaaaagaataacctagcaagcaagcttgtgagatcgatcgtggtcaagattatggatccggtcacggcatccatacacggtcattatctccctccgccattcaacacccgcgacttccaccaccatctccagcagcagcagcagcaccaccaccaccagcagcacctgcagctcaagaccgaggacgaccacggcggcggcgcgccagggctgttcggcgaccgcggcacgcagggcgaccacgagaacaatgacgagaacagtggaaacagcaacgggagcggcggcggcgagctggcgctggttcccccgtctggtggcggcgggcccgagggcggggatgccacccctcgccgcccgagaggccggccggcggggtccaagaacaagccgaagccgcccatcatcatcacccgggacagcgccaacacgctgcggacgcacgtgatggaggtggccggtggctgcgacatctcggagagcgtgacggccttcgcgcggcgcaggcagcgcggggtgtgcgtgctgagcggcgcgggcaccgtgaccaacgtcaccctgcggcagccggcctcgcagggcgcggtggtggcgctgcacggccggttcgagatcctctccctctccggctccttcctcccgccgcccgcgccgcccgaggccacgggcctcaccgtctacctcgccggcggccagggccaggtggtcgggggcagcgtcgtcggcgcgctcacggcggctgggcccgtcgtggtaatggccgcctccttcgccaacgcggtgtacgagaggctgccgctggaggacgacgacttgctcgctgcccatcaagcgccgcaggcgcaggccgacggtgtcctc

SEQ ID NO: 584 - DNA, 482 bp, Zea mays
  Clone ID: TF_LIB3069-002-Q1-K1-B12.F2
aaaaagggggaaggggcctgcaccggctcgaaaagggcccgctgaagaaaaaaacaccgggcaccaaaaaaaaaaagaaaaaaaaaggggggccaccccaccccaaaataagggggagggggcccccgcgaccactggggacaaataggaaccaaaaagggcaccccccccccaaaaaaagccgccccgggccacgggggacaaagaaagtgccccccccccccaggggagaacacaggcccccaaaggggggagggcaacaacagtggtttcccgggggaggaccccacccaagggggggggcccccaccctgcgggggccatataccaaaaatgcggcgcaagaacccaaaactcgtttaaaggggcgcccacccggcggaggggtacgtggaaaaaaaggtaagcggccggaggccccgggggcgaccaaaaaaaatctgaaaatcccgggccggtgtgggaaaaaacccccccctggg

SEQ ID NO: 585 - DNA, 2579 bp, Zea mays
  Clone ID: TF_ZmC139_1
ctcgaggccggattggccggctcgtccctatccgtgacgcagtcaggagatccccaattccccattcaccaatccccagtattgtagtagggggaaaaacgagagaaaagaaacagcagtagcggaggcaagacgaaatggtggccgccgtcgcgtcgccttcgtcggcggcaccctccgccggccgtccccatccgacatacaaggagatgatcatgcaggcgctgacggagctgcgggacccgagcgggtcgagccgcagcgccatcgccagctacatcgccgaccacttctccggcctccactcgcgccacgatgccctcctctccgtccatctccgcagcctcaagtcccatggccaacttcgcctcgtctctggcaactacttcgtctccaccgccgctcagcggcaggggcgaggctccaacatcccgcccaaccccaagcctgctccggggcagaagcgtggtcgggggcggcctcgcaagcacgcagattcagccccttccgcttcgaccccggcgtttcagggcgccaagcgagggcgtggacgcccacgcaaacgcaagagcgcccaggacccggtggcttcctccccctccccttcgccgctacagggagcaagtgttccgccgcctccatctggggtcaagagggggcgtggacgccctcggaaggacgcccttgtccctccgccttcctcttcttcgccactgctgggagggattgatccaccgcctccatctgggatcaagacgggccgtgcacgtcctcggaaggcccttgtccctgtgcgttcctccttttccgagctgctgggagctgttgttctaccacctccgtctggggtcaagcgtggccgcggacgcccgcgcaagagtgcctaccccgctgtggcgccgttggtgggagctgagaagggacctgctggtggacaaccacagaggaataccactcctctctcaccgacacctgctaccatgtcccacagtggtaagagtgagactgtccggctgcccaaggttgctgttgatatcagtgctttgcgtggttcctccatgaacatatctgcttctagtaacagtttggttggtgcgaagcggggaagagggcgcccacctaaggttgtggttgctgggaaagagaagatgcaacaacctgaatctgtgcagtccgtggatgcttcattgactaagagagggcgtgggaggcccagaaaggagaaggcattggaaagtggccgcatgaaagcctcgcagatgactgagggtcaacgtgaagctctgactgcagaccaagctggggctgtccaaaatgaagtagaagatagggatttgcaatccttgggtactcctttgacagagaagagaggccgcggtcgtcctagaaagaggccgttggaaatcgaaactgcaaaagcaggggctgctaagcgtgggaggccaagaaaggagaagacatctgaaactggggacttgaaagttgcacagatgactgagggtcggcatgaagctctgcctgcacaagctgtagaccaaactgggcctgtgcaaaatgaagttgaagctatgattttgcaatcccttgctactactcctttgatggagaagaggagtcgtgggcgacctagaaagaggccattggaaactgaaactgcagaaacccaagttgctgcatcggtggagaagcgagggcgtgggaggccaagaaagaagaatccatcggcagggtggtctgcaggaaccagggatactgcattaaaggggattaagagagggcctgggaggccaaggaaggccaggccttttgaaactgagtctgtgaaaactgcacttgaggtgtctagggacttgacagaagatgggcctcaaaaggatggggatcttgtgtcagggaagaaagcagatactcatggtgtggtttggtagtgtcaactgaggaggtagccattgctcccatggatgctgggtgcgcagacgccaagggttgatctgatggatgtgggcaccaagagtcactagtgctctgatggtgcgaacaagaacaaaaaagaaataatgatagtacctgaaaggctaaacagaacatgcagctaataagtgtgttcatggatataattaatagccatactgcaagtattgctatatgtttgcaccagtttgattactcgtatgtttttgagcagttccattggaaactgcgtttgatgggtttcacttttgggggttggatttaaatatctaacccacatcctctttctttgtcaaggactataacatttttgtaattttgttgcttgtactggaaactagccatcataaggttcattttgttttccagtttcaaaaaaatttagtgatatgttcacataatatctctgttttgtgctttatttggtgtgtctattgggtgtttggttggagggatgggacgagttggtccactattgcttcattcagtcattcctcatactaataagcacagagtattcagtataaaaacaaggatttgtgtcatctgagtaaattttgtagaatggtattatgatgtaccaaaccattgaggtttctcataccaac

SEQ ID NO: 586 - DNA, 423 bp, Zea mays
  Clone ID: TF_LIB3637-199-Q1-N6-F3
ccattggggggaaaattagctttccaacccggagaagaaaaaaggggggaaaaacaaggaaaagaccacaaaccggcgacgcggaggcaacgtggacaaaagggcggcaagggggggggcgcaccgcaaaaaaacgggggggggggagaagcgaaaaaaaaccgggggagaaacaaagggaaaccaccgggggcaaaaacaccaaaaggccccgccggcaagaacaaaacagcagaggcccaggaaaaggccacaaccatggaacccaacaccggggaaaaaagcgggaacccccgggaaaaacaacaaaaggaccccacccccggaacacctttaacagaccccggggacgaccccgaaaatccccacccgtacccagaagggtaacaacttcgcgtaaaggggggccgataagaacccggg

SEQ ID NO: 587 - DNA, 676 bp, Zea mays
  unsure (1)..(676): unsure at all n locations
  Clone ID: TF_LIB4172-013-Q1-L1-E6
tacgcctgcggttccggtccggaattcccgggtcgacccacgcgtccgccgagtcggggctatttctggtgttggcgcggctccaagaagactcactgtgtgctgccccacacatagagaaggagaatgagcgagtcgggctcaaagtccagccagcccctggcctccaaacaggaaaaggatgggactgagaagcgaggccggggcaggccacgcaagcagcctccggtgagtcctgggacggcgctggtcgggagtcagaaagagcccagtgaagtgccaactccgaagagacctcggggccgaccaaagggaagcaagaataagggcgccgccaagacccggaaagtcaccacagctccagggaggaaaccaaggggcagacccaagaaactggagaaggaggaagaggagggcatctcccaggagtcctctgaggaggagcagtgatcaccactcgcagtgccgcctgctccatagccactgaggagcagctgtcccctgggactggaagccctgctcccaggcccctccccgcccccactgcacactaccgcaccaggcaccagctgcaggctctgctccgcancacccaagggagcaggattcggctcagtccctgtgccctcctcccgaacacacctgccccatcctgagcaggctaacttcccattta

SEQ ID NO: 588 - DNA, 483 bp, Zea mays
  Clone ID: TF_jC-zmXLIB3526P032bf12a1
gctccggttcctggcgtcccgctccaaggccgaggtcgtcgacatgctccgcaagcacacatacttcgacgagctcgcgcagaacaagcgcgccttcgccgccgcgtccgcggccaccgcctcgtcgctggccaacaacccttcttcctacgcgtcgctctcccccgcgaccgcgacggccgccgccgccgccgcgcgggagcacctcttcgacaagacggtcacccccagcgacgtgggcaagctgaaccggctggtgatcccgaagcagcacgccgagaagcacttcccgctgcagctcccgtccgccggcggcgagagcaagggcgtgctcctcaacctggaggacgccgcgggcaagggtgtggcggttccgctactcgtactggaacagcagccagagctacgtgctcaccaagggctggagccgcttcgtcaaggagaagggcctccaagccggcgacgtcgtcggcttctaccgct

SEQ ID NO: 589 - DNA, 491 bp, Zea mays
  Clone ID: TF_ZmC4844_3
aggtgaatttgtgaagacacatggccttcaggcaggggatacactcattatctacaaaaactccgtacctggcaaatttattatccgtggggagaagtccattcagcagacaaacctgtagacacaaattgatgtgattgacaccatcagatatggtgctcgaggatacaccatacgttcagaattgagttgttatcgacttctgtaatgtttcaccatcacattgggataagtcgaaaaggagaatcacgagtctgagaccccgcgtgaatggagggaaggaggaaaggaagacattggaagtgcgcctaagttcagaacaagtggttcatgtcctacgcccccccccccccccccaaccggttgtatttggatggctgagtcctgctgcacattgcattctgaagaacattcgtagtctttttgttttgtaaatattttggatctataagataaaggaagcggtttggaacttacgcaaattctgatac

SEQ ID NO: 590 - DNA, 204 bp, Zea mays
  Clone ID: TF_uC-zmroteosinte109f10b3
ggactttgtggggaaagtgtggtggttgcggtactggtactgtaacagctgtcagagctactttctcaccaagggctggagccgttttatcaaggagaagggcctccaggccggattacgtcttccgttactaccgttcctcggtcggcgcctacagcatgctcttcattgacttgcaagcatgcgactctgcagaacattcta

SEQ ID NO: 591 - DNA, 383 bp, Zea mays
  Clone ID: TF_LIB3245-012-P2-N1-F3
actatagaagagctatgacgtcgcatgcacgcgtacgtaagctcggaattcggctcgagggcgccacagacaaagcccgcgcctgctggtgctcggcaggacgacattcaccaccgcctcgcagcggcttcagataagcggcagggcgccaaggcggacaagaacctgcggttcctgctgcagaaggtgctgaagcagagcgacgtcgggagcctcggccgcatcgtgctccccaaaaaggaagcggaggttcacctgccggagctgaagacgagggatggcatctccatccccatggaggacatcggaacgtcgcgcgtgtggaacatgcggtacaggttttggcccaacaacaagagcagaatgtatctgctggagaacac

SEQ ID NO: 592 - DNA, 497 bp, Zea mays
  unsure (1)..(497): unsure at all n locations
  Clone ID: TF_jC-zmXLIB3526P032be12a1
ctgcttttgttttctgtgcgtaccgctccaaggctcgaggttcgtggacatgctccgcatgcacacatacttatgcgagctcacgcacaacaagatgcgccttcggcggcgagacgctgtcaccagatggtctctggcctataacccttacttactacgcgtcaggtatacccggggaccgagatgggaagaaccgtcgccggcgcgggagacacctgttnagacacagaaagtcaccatcggcgacaaacgcaagcagaaccggctggtgatccccaagcaccacgccgagaagcacttacagctgcagatcccgtccgtcggcgatgagagcaatggcgcgctcctcaacctggaggacgaacagggcaaagtgtggcggctccactactcgcactggaacagcagacaaagctacctgctcaccaacggctggagccaatgggtaaaagagaatggccttcaacccggagacgtagtaggcttatagcgctccg

SEQ ID NO: 593 - DNA, 1978 bp, Zea mays
  Clone ID: TF_ZmC1903_2
gccggccgggcctccatatcctacaacacttcccgcaacagttgcatacgccgtgcccatctatctatagctagcactaggagtggtgcacactgaaatggacagcgccagcagcctcgtggacgacaccagcagcggctgcggaggcggcgcgtccacggacaagctaagggctttgggcgtcttcgccgacgactcggtgacgccgctggagcgcatgggcagcggcgccagcgcggtcgtgaacgcgcccgaggcgggcgccgaggcggactccggctccggtgccgccgtggtgagcgtcgacgggaagctgccgtcgtccagggacaagggcgtggtgacgcaggccaacgggcggtggggcgcgcagatctacgagcgccaccagcgcgtgcggctcggcaccttcgcgctcgaggccgacgcggtgcgcgccctcgacgccggccgggccgggtacgcgacacacacacaccatcactgcgctgcgctactctactccccaccaccgccgccacccaagagctttcctcgctgcacaagaaatggccacgaaccatctctcccaagggcagcacccgcaggcctggccctggggcgtggccatgtacaccaacctacactaccaccaccagcagcaccaccactacgagaaggagcacctgttcgagaagccgctgacgccgagcgacgtgggcaagctcaacaggctggtgatccccaagcagcacgccgagaggtacttccctctcagcagcagcggcgccggcgacaaaggcctcatcctgtgcttcgaggacgacgacgacgaggaggctgccgccgccaacaagccgtggcggttccgctactcgtactggaccagcagccagagctacgtgctcaccaagggctggagccgctacgtcaaggagaagcagcttgacgccggcgacgtcgtgcgcttccagaggatgcgtggtttcggcatgcccgaccgcctgttcatcagccacagccgccgcggcgagactactgctactgctgcaacaacagtgccccccgctgctgctgccgtgcgcgtagtagtggcacctgcacagagcgctggctcagaccacgcagcagcagcagccgtcgccttggagcccaatgtgctacagcacatcgggctcgtactcgtacccccaccagcagcccagccaattcccagcatgcctaccaccgccactcagctgaccatgaccacagcaacaacatgcaacatgcaggagaatctcagtccgacagagacaacaggagctgcagtgcagcttcggcaccgccgccaccgtcgcggcggctccggctgttcggcgtaaacctgactgcggcccggggccggagccggagacaccaacggcgatgtacggctacatgcaccaaagcccctacgcttacaacaactggggcagtccataccagcatgacgaggagatttaagattatgcctgcagaatccaaacagccaaagtagtagcagtagtagttgctagcagcagcagcagccgcctagtactacttgcacacgaagtgacaggattgaattgacctgtacacggggagaaaaaaaaaggaaggaaggaagtggagagagatcccttgtttcccgggcaatcttccttccatccccgcccccagaagaatgctgctgcctttttgctgttccgtttttttttttttaatttttattttcttctccatggcttccagaaaaccctacttactgtaggggatctggtagcagggggccgggcatgcgtgggaggtttgcaggaagcatcaagctgccaaggagctggaacgagagacaacagacagagagagatgtgtgtgtatgtatgtgtgtgtcatctgtacctatatgtcttaatttgtgggtccgatagagaacaaactgtgaagttgatgtgtgtgcctgcctgcctcctgaagaaacaatgcaatatccccatgg

SEQ ID NO: 594 - DNA, 2825 bp, Zea mays
  unsure (1)..(2825): unsure at all n locations
  Clone ID: TF_ZmC4844_1
ggcaaagttcatcgtgacacagttggcactcttcctgagtcgaagcagagccatgaaagttgtgcttccgtgaataatgtgatacatctaacacacactccatgtcctttttttattgtgcatattcttctcttatggcgtatctgcatttgctaagttcatcggaaaaagaaaataactgaagttcaactctggagagtaccaagtcattttgcgcaaggagttgacaaagagtgatgtcgcaaattccggacgaattgngctccccaagaaggatgctgaggctggtcttccaccattggtgcaaggggatcctctgatactgcagatggatgacatggtgcttccaattatatggaaatttaagtatagatccttccactacaacctctcccagtcttatgccctatggacccattacatgctcaacaagaatgtatcctactctacttactctacaccacatgagccgttgcgccatacccacatcccggataagtattcaggtacatcttctgcactctcctgctgcaaattctttctctctctctctctatgccctacattgcacaggcatcacaccattatcacccttatgctccaacaatcgttgaacttactacagcagttaaaaaaaaaaaaaaaaaaaaaaaaaaaaaaaaaaaaaaaaaaaaaaaaaaaaattggtacctcgggcgggccctttccccttctttgcccttggcccttggcctccttccgtcgagagagagagagagagagctgtgctggctgctgctgccccgggtccgtcgggacgggtagatgaggaggaagagaacagctcgtgactgactgactccctccctcagcgtgagtgggttgcggacgaccacatccatccgttcccaccattcccttctcccacctcgcctcctccccttgcccttgcccttccacagccggaatcagggggtaatgggccagatgggaggacccgacggcgacggcgacggcggcgcgggcccgcaccaccagtaccactaccaggcgcttctcgccgccgtgcagaaccccagccagggcctgcacccctttcccctccccttccacgtgcctctccacgcaggagcgggagcacccgccgccggaccaggacctggagctgatgctgatgcctccacacacaatgccaatgccgctcaccactctcagcctccaagaggtttcaccgattggagcgcgtccaacagtgccttcgccgccgttgcctcacagcccgcacctgctaccaccaatacacccttccattacaacctctcccagtcttatgccctatggacccattacatgcttaacaagaatgtatcctactctacttaccctacaccacatgaggagcatccccacccattgcgccatacccacatccaggagaatccccacccattacgccatacccacatcccggataaggattcaggttgtgcatctagccttggatttgactctttcactacaatgtcacttggaccaaatatttgttcccacatgacgcccatggaaggatctatatctgccaaagaacccgagaattcagaggatttgcctgcaatagttaggagcagtgatgaaatggacactagaaacagtggcaaagttcatcgtgacacagttggcactcttcctgagtcgaagcagagccatgaaagttgtgcttccgtgaataacaagttcaactctggagagtaccaagtcattttgcgcaaggagttgacaaagagtgatgtcgcaaattccggacgaattgtgcttcccaagaaggatgctgaggctggtcttccaccattggtgcaaggggatcctctgatactgcagatggatgacatggtgcttccaattatatggaaatttaagtatagattttggccaaacaacaaaagcagaatgtatatcttggaagctgcaggtgaattcgtgaagacacatggccttcaggcaggggatgcgctcattatctacaaaaactccgtgcctggcaaatttattatccgtggggagaagtccattcagcagacaaacccctagacacaatttgatgtgactgtgcaccatcagatatggcgtccgaggatacaccatatgttcacgttccagttgttatcgacttttataatgtctcaccgtcacactgagataagtcgaaaaaggagatacaccgcgtggatggagaaaaagagaagaaattttgggagacattggaagtgctgccagtgaggctacgtctaagctcagaacaaatggtttatgttttttcccctaattcggtcgtatttggatgcttgagtcctgcattgcatgatgaagaacattctcaatctctctttttttgtaaatattttaattcaggatctataaggtaaaggaagtggtttggaagcagaaaaaaaaaaaaaaagcggcacatctcctgcactctcctgctgcaaattctttctctctctctctctctctctctctctctctctctctctctctctctctctctcaactcatatatcaatacgcttaaattcgattgaaaataaaaactctcatggggaccttagagcaaaaaacatatgctttgctttcttttcattcctttcagcttcgcagacataactgtagcttgctgcaactagtaagtttgattttgtcttctttgttttgaatgcccttctgaccttcaagcatgtaatgtaagctcgcactttatttctgtactatcgtattattatctgtggtcgcatgttacatttagaatccaatgtagtattaaccgatatccacattgattcaaccag

SEQ ID NO: 595 - DNA, 2233 bp, Zea mays
  Clone ID: TF_ZmC1903_1
accagcatgcctaccaccgccactcagctgaccatgaccacagcaacaacatgcaacatgcaggagaatcccccccccccccggccgccagggcctgcgcggccgcctcggccccgccgccgccgccggcgcggcggcgccggctccgcggcgcctaccgcgactgcggcccgggccccgtgctcaccaagggctggagccgcttcgtcaaggagaagggcctccaagccggcgacgtcgtcggcttctaccgctccgctgccggcgccgacaccaagctcttcatcgactgcaagctgcgacccaacagcgtcgacgccgcctcgacgacgagcccggtcgtcgccgccggcgccggtggcgaaggccgtgcgtctcttcggcgtcgacctgctgacggcgccggcggacgccatggcccggtgcaagagagccagggacttggcctcgcccccgcaggcggcgatcaagaagcagctcgtggagctggcactagctagtgtagatcaatgctacggagcgggtcgatctttctcttagttagctaagctagtcggtttttattttattttattttattttgctcgatcgctcactgaaatggtagcatcagggctgagctaaatttttagtccctcctcggaatctcatgtagttggttcgtcatcctctggctttgctccgatgtaaatcttctcatcaactgtatactaccaatggaaacaaaaagcagccatggaaggctgcacgatgattaactgaaaaaaaaaaaaaaaaaaaaaaaaaaaaaaaaaaaaaaaaaaaaaaaaaaaaaaaaaaaaaaaaaaaaaaaaaaaaaaaaaaaaaaaaaaaaaaaaaaaaaaaaaaaaaggggggggcccttttaaagaatcaaattttacttccccgtgcttgcaacgtaaaactttttttatggggcccccaaaataaaataaatgggccggggtttaaaaacttccgaattgctcgaggccggccgggtgcctccctctacacagcacacggcacaccaccaccactcacctctccctcttctcgctgccgatctttcttcccttcccttccttccacctcggctagctagctagttattaccttagcatcccaccacatcacaccaaggtcacgcggcggccggcaagaatggcgacgcaccacctggcccagggccacccgcaggcgtggccgtgggggatggccatgtacaccaacctgcactaccaccaccaccaccaccaccagcagtactacgagagggagcacctgttcgagaagccgctcacgccgagcgacgtgggcaagctaaaccgcctggtgatccccaagcagcacgcggagaggcacttccccctcggcggcggcgacggggacgggaacgagaagggcctgctgctggaattcgacgacgaggccggcaggccgtggcggttccgctactcgtactgggtcagcagccagagctacgtgctcaccaagggctggagccgctacgtcaaggagaagcgcctcgacgccggcgacgtcgtgcgcttcgaccgggtgcgcggcgtcggcccccccgtccgactattcctctgctccccagcggcgcggcgaagcggaccgcggcgggtgattccgacgccgcccggcgcccggcgggcgagcagcagcagcagcagccgtggagccccaccgtgtgctacagcacgtcggggtcgtcgtacccgcccagccccgctagccccccttacgcctaccacatcgacacgccacacgcaggcgcaggcgaggcggacgccaagagcagcggcggcacgcctactacaggaacagcgccgacgaggaagctccggctgttcggcgtcaacctcgactgcggcccggagccggagccggagacgccgacggcgccaatgtacggctacggatacgtgcaccagagtccctacgcagcagtgcccgcagttcccagctactggtaatgagcaagcacggtcggaaggaacaacaccgagatcattcagtcgcattacacgtactgtactactgctagctgaagctgatagagctaattaaaatggataagcatataagcaaagcgtcagtttcttttctttttttaatgtttgctcaacttgtataggaaattaggaatgaataggataggagtaattgtaaaaaaaaaaaaaaaaaaaaaaaaaaaaaaaaaacccccccccgaccccctttc

SEQ ID NO: 596 - DNA, 3415 bp, Zea mays
  Clone ID: TF_ZmC7307_1
gggaaattgatcatgggcttcaggaaggcaactaacaattctttcgaacaggagcaagctacaaagcctgccaatggcgccctagcaacttcagaagcaaatggtaaagtttctgccccagattccagtccaaatgctgcagtttcccgtcaaaacaagctcaacacagagaccacaagatctggtcctgtggaacaagccactgcattgaaaatggacaaggatggattaacacataaggaagggcctggaactggtagttcttccccaggttctgtcaagagaaaaacaactattcttggtcaaaagaataaaagattacggatggataatgaggaatcaatggagttgaagataacatgggaggaagctcaagaattgcttcgccctcctcctaaggccccatccattgttattgttgatggccatgagtttgaggaatatgaggagccaccggtacttggaaggaagacttattttgtagcagataaatcaggttcgaaccatcaatgggcccaatgtgaagattgttccaaatggaggaaacttccaatagatgctctgttgccctccaaatggacctgctctgacaacaaatgggatccagagaggtgttcttgcgaatctgcacaggaaataagtatagaggagcttgcagaattcattcctataaaacctgccaaaaagcccaaattgaagatagaatctgatgctatcgatgcttcagatgggctggacacgcttgcaaaccttgcgattcttggtgaaggtgaagctctcccttcacagccaacaacaaaacatccccgccatcgtccgggctgctcatgcatcgtctgcatccaaccaccaagcgggaagggtccaaagcacaagcaaacttgcacctgtaacgtttgtatgacggttcgccgccgtttcaggacactcatgcttcgacgcgagaagaaggcgacaaaggatctgtctcgcaagaaagagacgggccaatccagtgagaaggccacacaacaagctgtgtccggacctccaggagccaatgccactgcaaccagatctgcccagaaagcagatggaaacaccgatggacctgaagacatggccgtcgatcacaaggtgacaacatcctctcccgtcaagaaccatattgacctgaacatccaacctgaacgggacgatgagcagtcaccgaaatctggtgcggctggtttgttgagccgagacaatgcaacttagagagtggatagcgtggattgattgatcataccataccaatgagtggacatagataaccgatcgaacatatccttccgaatgtctatacccttgtttttttttttaagatagatgtggcgtgaggcgtggggccttgtagtgtagctgttaccttcccataccatagagccggtttccttttaccctgagactccagtggtaatgttatcgtgtataccatagggcaggacacccgtaggtgttgcgtggggacttgcataaccatgtatattgcaagaccagctcgtttcggctgaatgtgaaccgtaagttgctactgttcccatctcccaacctgaacggctccctttaaaggttcaggatgccagtggtaaagaatggatattccaattccgtttctggccaaataataatagcaggatgtatgtattggagggtgtcacaccttgcattcagtcaatgcagttacaagcaggcgacacagtaacctttagtcgaatagacccagaagggaaattgatcatgggcttcaggaaggcaactaacaattctttcgaacaggagcaagctacaaagcctgccaatggcgccctagcaacttcagaagcaaatggtaaagtttctgccccagattccagtccaaatgctgcagtttcccgtcaaaacaagctcaacacagagaccaaaagttctagtcctgtggaacaagccactgcattgaaaatggacaaggatggattaacacagaaggaagggcctggaactggtagttcttccccaggttctgtcaagagaaaaacaactattcttggtcaaaagaataaaagattacggatggataatgaggaatcaatggagttgaagataacatgggaggaagctcaagaattgcttcgccctcctcctaaggccccatccattgttattgttgatggccatgagtttgaggaatatgaggagccgccggtacttggaaggaagacttattttgtagcagataaatcaggttcgaaccatcaatgggcccaatgtgaagattgttccaaatggaggaaacttccaatagatgctctgttgccctccaaatggacctgctctgacaacaaatgggatccagagaggtgttcttgcgaatctgcacaggaaataagtatagaggagcttgcagaattcattcctataaaacctgccaaaaagcccaaattgaagatagaatctgatgctatcgatgcttcagatgggctggacacgcttgcaaaccttgcgattcttggtgaaggtgaagctctcccttcacagccaacaacaaaacatccccgccatcgtcccggctgctcatgcatcgtctgcatccaaccaccaagcgggaagggtccaaagcacaagcaaacttgcacctgtaacgtttgtatgacggttcgccgccgtttcaggacactcatgcttcgacgcgagaagaaggcgacaagagattcgtctcgcaagaaagagacaggccaatccagtgagaaggccacacaacaagctgtgtccggtcctccaggagccaatgccactgcaaccagatctgcccagaaagcagatggaaacgccgatggacctgaagacatggccgtcgatcacaaggtgacaacatcctctcccgtcaagaaccatattgacctgaacatccaacctgaacgggacgatgagcagtcaccgaaatctggtgcggctggtttgttgagccgagacaatgcaacttagagagtggatagcgttgtttgattgatcataccaatgagtggacatagataaccgatcgaacatatccttccgaatgtctatacccttgttttttttaagatagatgtggcgtgaggcgtggggtcttgtagtgtagctgttaccttcccataccatagagccggtttccttttaccctgagactccagtggtaatgttatcgtgtataccaaagggcaggacacccgtaggtgttgcgtggggacttgcataaccctgtatgcatgtatattgcaagaccagctcgttttggctgaatgtgaaccgtaagttgctactgtacccctgaacatatttcccccgaaaaaaaaaaaaacgccaaaaaaaaaaaaaaaaaaaaaaaaaaaaaaaaaaaaaaaaaaaaaaaaaaaactcgaggaggggggccggtacc

SEQ ID NO: 597 - DNA, 261 bp, Zea mays
  Clone ID: TF_jC-zmX700468806a1
attcggctcgaggccacatacaaagccctttcttggtggtgctcggctggacgactttgacctccgcctctcaacggtttcagataagcgcctcggcgccaaggctgtcaagaacctgctgctcctgtccgagaaggtggttattcattgtgacactaggagcctcggccgcatcgtgctccccataaaggtagcggaggttcacctgcccgtgttaaagacgagggatggcatttccatccccattggaggacattggta

SEQ ID NO: 598 - DNA, 1848 bp, Zea mays
  Clone ID: TF_ZmC7307_2
accatatcagaattgcaccaactcagcagcaagcacaaatggcttcctccccattgcagaaacaattctattctcacactgtaactggttataatgaattccaagcacaaatgcgcaatggaagacccagaatggattcaaaggcgagatcacagttacttccccgctattggcctagaataacagatcaagagctacaacacttatcaagcgattcaaattctgttattactcctttgtttgaaaaaatgttaagtgctagtgatgctgggcggattggtcgtttagttttgccaaagaagtgtgctgaggcatacttccctccgatctcccaacctgaagggctccctttaaaagttcaggatgccggtggtaaagaatggatattccaattccgtttctggccaaataataatagcagaatgtatgtattggagggtgtcacaccttgcattcagtcaatgcagttacaagcaggcgacacagtaaccttcagtcgaatagatcctgaagggaaattgatcatgggctttcggaaggcaactaataattcttttgaacaggagcaagctacaaagcctgtcaatggtgcaccagcaacttcagaagtaaatggtaaagtttctgccccagattccagtccaaatgctgcagtttcccgtcagaacatggtcaagacagagaccaaaagttctagccctgtggaacaagccactgtatcaaaaatggataaggacagattaacacagaaggaaggacctggaattgctagttcttccccaggttctttaaagagaaaaacaactaatcttggtcaaaagaataaaagattacggatggataatgaggaatcaatggagttgaagataacatgggaggaagctcaagaattgcttcgccctcctcctaaggtcccatccattgttattgttgatggccatgagtttgaggaatatgaggagccacctatacttggaaggaagacttattttgtagcagataaatcaggtttgaaccatcaatgggtccagtgtgaagattgttccaaatggagaaaacttccaatagatgccctgttgccctccaaatggacctgctttgacaataaatgggatccagaaaggtcttcttgcgaacctgcacaggaaataagtttggaggagcttgcagaactcattcctataaaacctggaaaaaagcccagattgaagatagaatctgatgctattgatgcttcagatgggctggacacgcttgcaaaccttgcaattcttggcgaaggtgaagcgctcccttcgcagccaacaacaaaacatccccgccaccgtcccggctgctcatgcatcgtctgcatccaaccaccaagtgggaagggcccaaagcacaagcagacatgcacctgtaacgtttgtatgacggttcgccgccgttttaggacactcatgcttcgacgcgagaagaaggtgacaagagattcctctcgcaagaaagagacgggccaatccagtgagaaggtcacacaacaagccgtgtccggtccgccaggagccaatggcagtacaaccagctccccccagaaagcagatggaaatgctgatgcgcccgaaaacatggccgtcgatcacaaggtggcatcctctcccgtcaagaaccacattgacctgaacatccaacctgaacgggacgacgagcagtcaccgaaatctggtgcggctggtttgttgacccgagacaatccaacttagcccttgttgttattcctgtcccatatggattggatcccatatggaattatggattggatgagattggaaaacattatgaaaaattttgacttgtttagaattt

SEQ ID NO: 599 - DNA, 3511 bp, Zea mays
  unsure (1)..(3511): unsure at all n locations
  Clone ID: TF_ZmC10032_1
actttttcacgagggcccaaacaacncngacaagcgcgnggggaaaagcgacgagctatcgccaagcagaaaatttgaacaaccaccctctcttatgttgtattccagaaatgatgatattgctattgtaaataagagcaatcacctgttcatggtaaaaggtatagaggctggacaaagcagtaacatcttgagacaaaaagagatagagaatggttcaaggcagattaaatgggaacaaccaacccttagttttggggacatgggaaggcctttcctaactaggtctcaaagtgcattagagtcacctcaatgtactcgaagagatgacaataaggatccaactacagatagcacaagtgagtcattttcagaagcatgtctgagcatgagcctaggtattgcaaacaatgtaaacaggatggaggctacttcaacagcggaaaggcctgtgcggcttttcccgacatgacgaacagccctcgaggacgtgttcacgcatgttgaaattgcttttggcaaccggacgttgcacgagctggtcaagggaagaggctaagacggcatcggcatgggccaacgagaaccagcaggacaagcctgccgactctgccgctgccgctgctacttgacggcgtgcgtctgttgtgaaagtgactgatgggtgttgtcagcgtgctttgatggtttcaaggtgttgctcctggaggctggagttacttacgtgtacgtatgaggctgtgcaaccaacccccaggttgtatgttgtagaagttctgtaaaccacgatgctcttgtgttggttgctgctgtaatctaaaaacgcttagacctttggattcaataactcaccacatacttgatctgtactgtacatctcatctattgtatctatcggacaacaggaatgtcacagaacttgccaccacacaatctccctttaaacacgcacaaagggcacagcatttcctgaccagacctccaagggttggtgaaggtgctgcttttgatccaacaagagacatgtttccacatcttcgtgttgctagacaacctgctgatggaaggggacgcaatcaattacttcctcgttattggccaagaataacagaccaagagctgcaacaaatatctggagattcaaattccacaatcgttccattgttcgagaaggtcctgagtgcgagtgatgcaggccgcatagggcgccttgttcttccaaaagcttgtgccgaggcatattttcccccaatttctcaaccagaaggacgccccttgacaattcaagatgcaagaggaaaagaatggcattttcagtttaggttttggccaaataataacagcagaatgtatgtcttggagggtgttacaccatgcatacaatcattgcaattacaagctggcgatacagtgacctttagtcgtatagatcctggagggaaacttgttatgggctttcggaaggccacaaatactgtcagtctgccagactcacagatttcagctattgcaaatggttcccttctcagtgagacactcttttctactgcaaatgagagcataggagtagtaagtggttatcctggatttcttcactcaataaagggagctgcagatttccatccaagctctctatatgatcatcatatgaactcagctgacggggatgtcagttggaataaggcagataaatttggcagcaggccagatgaggggtctttgcaatttctacaaaaacgaagtcgcaatattggttccaaaagcaggaggttcttaatcgacgctgaagatgccatggaactaaagcttacctgggaagaagctcaagagttgttgcgccctgctcccactgcaaaaccaactgttgtgatgattgaggactatgaatttgaagaatatgatgaaccccctgtctttgcaaagagatcaatttttaccatccgtgcaacaggggaacaagaccagtggattcaatgtgacgagtgctcaaaatggcgccggttgcctcttaatgttattgttgcatccaaatggacatgcaccgacaactcatgggacccaaaatgctgctcctgctctgcgcctgaagagttgaccccaaaagagttgcaaagtgttatgcagcagtatgaagaaatgaggaggcgaaagggcagctatggtctgaagctgaatgtcgctgaaatggatgcatccagctttgacgccttggccacgggtgcagtattcggtgaagtcgggaaccaaggtacggcttcagtcgcgacgaccacaaggcacccccggcatcgccccggctgcacatgcatcgtgtgcatccagccacccagtggcaagggcccgaagcacaaccctgcgtgcacctgcaacgtgtgcatgacggtgaggcgccggttcaagacactgatgatgaggaagaagcagcggcagtcggagcgcgaggaggcggaggcaagcaagaagatcgcgtgggtgaacagagacgagcctgaggggagcagcctgtcgagatccccgcagacgctggacagcacccgagacaacagcgatgtcaccatgttcgacaaggtgtccgacgtgaacaagcaggggcacatcgacgtcgacctcaacctccaccctgctgcccctgccgtccaggctgcgcagcagcagccccggccggtgagcatgatgggtctcttggaagtggcgggccggccgcttgacaactacatgaagcagaatggcctgacgagcctggtgggggagcaaggtggtggcagctccagcacggccacggtcccgccggctccggtggagagtgaggagcggacgtccaacgagggcctcgtcccatcagcatcggcagagcgggaaccgaacgccatggccgtcgacgaggctggcgagaaccagcaggacaaggctgccgacgacgacgacgacgccgtcgctgccgcggctacttgacgtgattttttttcatggagctgcttctcctggaggctgggagtaacttacgtgtacgtatgaggcttgtgttggttggtgttgtaatctgacgcttaaacattggcttcaataactcatacagagtgagaacctgaaagtatcagtctagagcaagttctttttactggtgctgagtcttcccaaaaggaggaaacaaaaattttagacccttcctttaatttttaatcagccatgtcgtgaaacagacgccatggccatcgacgaggccggcgagaaccagcaggacaagcctgccgactctgccgctgccgctgctacttgacggcgtgcgtctgttgtgaatgtgactgatgggtgttgtcggcgtgctttgatggtttcaaggtgttgctcctcctggaggctgaagttacttacgtgtacgtatgaggctgtgcaaccaatccccaggttgtatgttgtaaaagttctgtaaaccaaatgctcttgtgttggttggtgctgtaatctaaaaacgcttagccccttggctccaataactccccacatacttgat

SEQ ID NO: 600 - DNA, 2957 bp, Zea mays
  unsure (1)..(2957): unsure at all n locations
  Clone ID: TF_ZmC10032_2
gccggccggtccgggaactaggtctcaaagtgcattagagtcacctcagtgtactcgaagagatgacaataaggattcaactacagatagcacaacaagtgaatcgtttccagaggcatgtctgagcatgaacctaggtattgcaaacaatggaaacaggatggaggctacttcaacagcggaaagacctatgctatcgccaacgacagccattgctgaaggaagagaacttaccactgcactgtccccctttcagcacgcacaaagggctcggcatttcctgaccagaccaccaagggttggtgagggtgcagcttttgatccaactagagacatgtttctgcatcttcgtgttgctaggccacctgctgaaggaaggggccgcaatcaattacttcctcggtattggccaagaataacggaccaagagctgcaacaaatatctggagattcaaattccacaatcgttccattgttcgagaaggtcctgagtgcgagtgatgcaggccgcatagggcgccttgttcttccaaaagcttgtgccgaggcatattttcccccaatttctcaaccagaaggacgccccttgacaattcaagatgcaagaggaaaagaatggcattttcagtttaggttttggccaaataataacagcagaatgtatgtcttggagggtgttacaccatgcatacaatcattgcaattacaagctggcgatacagtgacctttagtcgtatagatcctggagggaaacttgttatgggctttcggaaggccacaaatactgtcagtctgccagactcacagatttcagctattgcaaatggttcccttctcagtgagacactcttttctactgcaaatgaaagcataggagtagtaagtggttatcctggatttcttcactcaataaagggagctgcagatttccatccaagctctctatatgatcatcatattaactcagctgacggggatgtcagttggaataaggcagataaatttggcagcaggccagatgaggggtctttgcaatttctacaaaaacgaagtcgcaatattggttccaaaagcaggaggttcttaatcgacgctgaagatgccatggaactaaagcttacctgggaagaagctcaagagttgntgcgccctgctcccactgcanaaccaactgttgtgatgattgaggactatgaatttgaagaatatgatgaaccccctgtctttgcaaagagatcaatttttaccatccgtgcaacaggggaacaagaccagtggattcaatgtgacgagtgctcaaaatggcgccggttgcctcttaatgttattgttgcatccaaatggacatgcaccgacaactcatgggacccaaaatgctgctcctgctctgcgcctgaagagttgaccccaaaagagttgcaaagtgttatgcagcagtatgaagaaatgaagaggcgaaagggcagctatggtctgaagacgaatgtcgctgaaatggatgcatccagctttgacgccttggccacgggtgcagtattcggtgaagtcgggaaccaaggtacggcttcagtcgcgacgaccacaaggcaccccaggcatcgccccggctgcacatgcatcgtgtgcatccagccacccagtggcaagggcccgaagcacaaccctgcgtgcacctgcaacgtgtgcatgacggtgaggcgccggttcaagacactgatgatgaggaagaagcagcggcagtcggagcgagaggaggcggaggcaagcaagaagatcgcgtgggtgaacagagacgagcccgaggggagcagcctgtcgagatccccgcagacgctggacacgacccgagacagcagcgatgtcaccatgttcgacaaggtggccgccgacgtgaacaaggggcacatcgacctcaacttccaccctgcagcccctgccgtccgtggcgctggcgaccagggacagaatggcgcgcagcagccccgggcggtgagcatgatgggcctcctggaagtggcgagccggccccttgataactacatgaagcagaacggcctgacgagcctggcgggggagcaaggaggtggcagctccagcacggccacggtcccgccggctccagtggagagtgaggaccggacgtccgatgagggccgtgtcgcgtcagcagagcgggaagcagacgccatggccatcgacgaggccggcgagaaccagcaggacaagcctgccgactctgccgctgccgctgctacttgacggcgtgcgtctgttgtgaatgttgggtgttgtcagcgtgctttgatgtgcgtatcttatcggctcctcttggtttttttcttcttttctttcaggaatagctggtgagtttttgatgtgaaagttctaaactaaatttctgtagggtttcaaggtgttgctcctcctggaggctggagttacttacttacgtgtacgtatgaggctgtgcaaccaacccccaggttgtatgttgtagaagttctgtaaaccacgatgctcttgtgttggttgctgctgtaatctaaaaacgcttagacctttggattcaataactcaccacatacttgatctgtactgtacatctcatctaagacatcttttggaaaacaggaatttcacaggagtgcgtgcgtctgttgtgaatgtgattgatgggtgttgtcagcgtgctttaatggtttcaaggtgttgctcctcctggaggctggagttacttacttacgtgtacgtatgaggctgtgcaaccaatccccaggttgtatgttgtaaaagttctgtaaaccccgatgctcttgtgttggttgctgctgtaatctaaaaacgcttagacctgtggattcaataactccccacaaacttgttttgtactgtacatctcatctaagacttttttggaaaacaggaatttcccaggagtcccggacggactcagtgc

SEQ ID NO: 601 - DNA, 691 bp, Zea mays
  Clone ID: TF_ZmC403009_1
aattcggcacgaggagccagctagtcagtctccgccaagcagggaccgcgtcgcatcaaagccgctgcccgcaacagggacaggcaggccagcgcgcgctcgaaaggggagccgtcgttctacacgaagacgaggaggaggagccctgcagggcgtagctagctatggagttcgcgagctcttcgagtaggttttccagggaggaggacgaggaggaagagcaggaggaagaggaggaggaggaggaggcgtctccgcgcgagatccccttcatgacagcggcagcgacagccgacaccggagccgccgcctcctcgtcctcgccttccgcggcggcctcatcgggtcctgctgctgccccccgctcgagcgacggcgccggggcgtccgggagcggcggcggcgggagcgacgacgtgcaggtgatcgagaaggagcacatgttcgacaaggtggtgacgcccagcgacgtggggaagctcaaccggctggtgatcccgaagcagcacgcggagaagtacttcccgctggacgcggcggccaacgagaagggccagctgctcagcttcgaggaccgcgccggtaagctctggcgcttccgctactcctactggaacagcagccagagctacgtcatgaccaagggctggagccgcttcgtcaaggagaagcgcctcgacgccggcgacac

SEQ ID NO: 602 - DNA, 1145 bp, Zea mays
  Clone ID: TF_ZmC2719_1
cccacgcgtccgctgctgtttatgctcctgcaacaatgaatatgctccaaactcctccatttcatagcaacagccatgaaaaagagtcaggtgcagttttttcaaatagctttaacatggccccatcagtgacacctacctccccttttcaacttatgtctccaagctcaaccaactacacttccactcaaatcttcgaggaaaccaacaatttagaggacacttcaagagtctttggaggtggggataacgaaagcaacaacagtgaggaaccggatcccaagccggctgtggagatggaagacctaaaccaaggcaatgatcatacttcgaataaaacagctaactgtcaagattaccgtatggtcctgcgcaaggacttgacaaacagtgatgttggaaacattggaagaatcgtgctgccaaagaaagatgcagagcctaaccttccaatcttggaagataaggatggcctgatactggaaatggacgattttgaactcccggttgtatggaatttcaagtacaggtactggcctaataacaagagtaggatgtatatattggaaagtactggtgaatttgttaagaggcatgggcttcaagctaaggacatcctcatcatttacaggaacaagaaatctggcagatatgttgcccgtgcggtgaaggctgaggacatagcgccgccagaatgcgagtgcgtcgaggcaggaaaccctagagaagagtgcggcttctccgtcagtccttcgatcaataagaagatcatcacgtagatggctggagcatcagaaatgtatggtgtaggctgtttgccgcgcaggagcacaccgagaatcggcggttgctgggagccaagcaactgtttcgatcgaggttgtgtcgtcaaagctgaattcccacccaacctgcgtaggcctgtactatactgtttcccttgtttttgtcggccgtttcgtgtagttcgagataaatgatgagtttgcttttgtacctgtatatatttcgtctttggataattcggtgacaaacaagtcaaggtcgttatataccgtctttttgaataattattacgattataagaagtttatttatttattttagatcggtagctaatgccaaattgacaggtccttccccga

SEQ ID NO: 603 - DNA, 874 bp, Zea mays
  Clone ID: TF_ZmC1903_4
cctcgaggccggccggggaagcccttccactttgattcctcctgtctctctagccttctccatgctaatagccagatcaaacgcatcaagacctcatgttgtgtagtaccagcagggggggaaatattaatactacgtcgcgtagacgctagctagctccgtcgtcgtcccaaaagtcctcctgctcttgggctataaatgcctggccaagacacctgcatggttctctacgcgacacacacacaccatcactgctgctatactctactccccaccaccgccgccacccaagagctttcctcgctgcacaagaaatggccacgaaccatctctcccaagggcagcacccgcaggcctggccctggggcgtggccatgtacaccaacctacactaccaccaccagcagcaccaccactacgagaaggagcacctgttcgagaagccgctgacgccgagcgacgtgggcaagctcaacaggctggtgatccccaagcagcacgccgagaggtacttccctctaggcaagcggctccggcgacaggcctcatcctgcgcttcgaggacgacgacgacgacgaggctgccgccgccaacaagccgtggcggttccgctactcgtactggaccagcagccagagctacgtgctcaccaagggctggagccgctacgtcaaggagaagcagcttgacgccggcgacgtcgtgcgcttccagaggatgcgtggtttcggcatgcccgaccgcctgttcatcagccacagccgccgcggcgagactactgctactgctgcaacaacagtgccccccgctgctgctgccgtgcgcgtagtagtggcacctgcacagagcgctggcgcagaccaccagcagcag

SEQ ID NO: 604 - DNA, 870 bp, Zea mays
  Clone ID: TF_ZmC10115_12
cacttactctcggcaacggatatctcggctctcgcatcgatgaagaacgtagcgaaatgcgatacctggtgtgaattgcagaatcccgcgaaccatcgagtctttgaacgcaagttgcgcccgaggccactcggccgagggcacgccaccctattcctgactctccactcctcccctctcccctcctcttctcttctctccactgcccaacttttgctatagacaagaaagaacctaagctaggtagctttcctccagagcagagcaatggccatgcatcctcttgcccaggggcacccgcaagcctggccatggggggtagccatgtacacgaacatacactaccaccaccagtacgagagagagcacctgttcgagaaatccttgacgcccagtgacgtgggcaagctcaacaggctggtgatccccaagcagcacgcggagaggtacttccccctcaacggcggagactcccccggtgacaaggacctgctcctgtctttcgaggacgaggccggcaagccgtggcggttccggtactcgtactggacgagcagccagagctacgttctcaccaagggctggagcaggtacgtcaaggagaagcagcttgacgccggagacatcgtgcacttcgagagggtgcgcggccttggcacaggcgaccggctcttcatccactgcaggcgccgtggcgagagcgcgccgccaccacctgtccgcgtacctccgcccgctctgaacgccggggagcagcagccttggagcccgatgtgctatagcacatcaggatcataccctaccagccctgccaactcccatgcctatcgccgctccgtggagcaagatcacagcgagatgctgcatgca

SEQ ID NO: 605 - DNA, 441 bp, Zea mays
  Clone ID: TF_LIB3239-009-P1-N1-E9
agccgcgcgcagcccacgccggcctgggcgcgcgtgctgctgttcgacaaggcggtcacgcccagcgacgtcggcaagctcaaccgcctcgtggtccccaagcagcacgccgagaagcacttcccgctgaagcgcgcgccgccgtcggtggaggcgcaggcgcccaccaccgccaagggcgtgctcctcaacttcgaggacggggagggcaaggtgtggcggttccgctactcctactggaacagcagccagagctacgtgctcaccaagggctggagccgcttcgtcagggagaagggcctccgagccggggacaccatcgtcttctcccactccacgtacggctcggagaagcagctcttcatcgactgcaagaagaccaagacgacgacgcccgccaccgacggggtaccggtaccattaccagcaccagcggagaaa

SEQ ID NO: 606 - DNA, 716 bp, Zea mays
  Clone ID: TF_16927321
ttttttttttttttttttcgaaaaacatgactaattaagattcaacaaggcatgcacgccacctatggtgtaataaggtccctgatcagtagatcaccatcgttcatcgtctctctgcgcactctacgccgccgctgctactaggtgtcgccgtcgacatactccacttcggcgggagcaggtgccggtgccggtgcatcgtcgccgctgcactcaacattgaacccgaagagcctgaagctcctcgcccccgagggtgccactgccacctcgatgtcatggccggcgatggtggcggacgccaccgttgcacccccattattcatggccgcggttccgataactatcggcctcggccacgccggcacggtggcagcgtcgccgaagctgatatcgacgtcgcggcgccggcgctggcagtggcggtactcgatgaagtatcggccgccgccgctgcgggagaaggtgacggtgtcccccgcggcaagtcgtgcggcgcggacgaagcggctccaccccttggtcatgacatagctctggctgctcccccagtaggagtagcggaactgccacagcgccccgccgcggtcctggaagcacagctgcgtcgacccggcgccggccgccgggaagaaccgctccgcgtgctgctttggcaccaccagccggttgagcttgcctacgtcgctcggggtcagcaccttgtcgaacatgtg

SEQ ID NO: 607 - DNA, 822 bp, Zea mays
  unsure (1)..(822): unsure at all n locations
  Clone ID: TF_LIB4828-034-A1-N1-A10
ccggccggactaatcctcccccttcatcccgtgtcacaaagccacaaagaagtttagcaggtcctccatggcagcctctctgccactgtcagctgccatcgttggagccgaagagtcggttgacaaggaggtcttggagatggagtacctctttgagaagtttttgatgccaagtgacttgtgcagcaatactgaatggcttgggatcccagaagaacatgttaggaaatttggcatgatgttggaggacagggacggttactccgtcattttctttcaggacggtgtggtgcctgggaagttgtggtgctttaggtactggaaaagcaatggagtccatggcttgaccaagggctggaggtgctttgttagggagaagggcctcaaagccggagacaccatctccttcttccgaggatctgcatgtggccgtctcttcatctgctgcaggttaggcacccatgcaacctttgcgtcatcctccaccttgcatcatggcttttctatgcccccaccacctgcccgcccgctggtgggtcttcaatctggcatgttggcaagagatgtcccatcattaggacaagctaggttgcatgatggaaatcaagatggaggcggtgcaccatcaagacatgttccatcctcaggacgacgtgtggaggcacagctatcacgtgtgtcgtcgcgccgtcaacgccgtactatgaagcactcgataccagagcccacgatagagacgccaccaattncttgagtcgatgttcctcatagccgcaccacccggcagtggagtgcttacggctttttggcgtcaacatctat

SEQ ID NO: 608 - DNA, 1538 bp, Zea mays
  unsure (1)..(1538): unsure at all n locations
  Clone ID: TF_2437851
tcgaccagctcctcgacttcgcgtcgctttccatgccgtgggactccgagccgttcccgggggttagcatgatgctagagaacgccatgtcggcgccgccgcagccggtgggcgacggcatgagtgaagagaaagccgtgccggaagggaccacggggggagaggaggcctgcatggatgcgtcggagggggaggagctgccgcggttcttcatggagtggctcacgagcaaccgcgaaaacatctcggccgaggatctccgcgggatccgcctccgccgctccaccatcgaggccgccgccgcccggctcggcggcgggcgccagggcaccatgcagctgctcaagctcatcctcacctgggtgcagaaccaccacctccagaggaagcgcccgcgcgacgtgatggaggaggaggcgggcctgcacgtccagctccccagcccggtcgccaacccaccaggatacgagttccccgccggcggacaggacatggccgcgggcggcggcacatcttggatgccccaccagcaggcattcacgccgcctgctgcgtacggcggcgacgcggtgtacccgagcgcggcaggccaacagtactctttccaccagggccccagcacgagcagcgtggtcgtgaacagccaaccgttctccccgccgcctgtgggcgacatgcacggcgcgaacatggcctggccgcagcagtacgtgccgttcccaccgcctggggcttccacgggctcttaccctatgccgcagccgttctcccccggattcggcgggcagtacgccggcgccggcgctggccacctctcagtggccccccagcgcatggcaggcgtggaggcctcggcgaccaaggaggcccgcaagaagcgcatggcgagacagcggcgcctgtcctgcctgcagcagcagcgcagccagcagctgagcctgggccagatccagacctccgtccacctgcaggagccgtcccctcggtccacgcactccggcccggtcacgccgtcagcaggcggctggggattctggtcgccgagcagccagcagcaggtccagaacccgctctccaagtccaattcctcaagggcgccgccttcctcgctggaagcggcggcggcggctccacagacaaagcccgcgcctgctggtgctcggcaggacgacattcaccaccgcctcgcagcggcttcagataagcggcagggcgccaaggcggacaagaacctgcggttcctgctgcagaaggtgctgaagcagagcgacgtcgggagcctcggccgcatcgtgctccccaaagtgagacatgttaggatagataagtctctggaacagattagtctgtaacaacttgtatgcgtccattcctgattacatgccgaagcttactnagaaggttagtttatgtaaggatgttacttccgataagctttggcaagtatatctgatggcactcgttctgtaaactgaaatagcgcgtttcgtcgcctatattaacatgcaagcagcgcacggtaaaggtgctctgtttcc

SEQ ID NO: 609 - DNA, 1249 bp, Zea mays
  Clone ID: TF_ZmC9208_1
gcacgagcttccttccttctccgctcgtcgtcgttctaccggcatggccggcattaccaagcgccgcacctccccggcctccacctcctcttcgtccggcgacgtcttgccgcagcgggtcacccggaagcgtcggtccgcccgccgcgggccccggagcaccgcccgtaggccgtcggcgcctccacctatgaatgaactggacttgaatacagctgctcttgatccggatcattatgctacaggattgagagttcttcttcagaaggagctccgaaatagcgatgtaagccagcttgggagaattgttctcccaaagaaggaggcggagtcttacctccctattctgatggcaaaggatggaaagagtttatgcatgcatgacttgctaaattcacaactgtggaccttcaagtatagatattggttcaacaacaaaagcaggatgtatgtgcttgaaaataccggagattatgtaaaagctcatgaccttcagcaaggagacttcatcgtgatctacaaggacgacgagaacaaccgctttgtcataggagcaaagaaggcaggagatgagcagaccgccactgtacctcaagtccatgaacacatgcacatctctgccgcactgccagctccacaagcgttccatgactatgcaggccccgtcgcagcagaagctggtatgctcgcgatcgtgccacagggtgacgagatattcgacggcatactgaactccctgccggagataccagtggcgaacgtgaggtactccgacttcttcgacccgttcggtgactccatggacatggcaaatccgctgagctcctccaataacccctcggtcaacctggctacgcacttccatgacgagaggatcgggagctgctcgtttccctacccaaaatccgggcctcagatgtgagatcctggcagaaaaactgccgcggtcaaaaccatcatcccctgcgtggaactcagagatcccctggttgacgccattgctgtacatccaaataaatggcgtcctcattttgtatgttcagtagtatatgattgggtacgcgtgttgtttatgtgtaaaagggtaactctgcaaaactgaactgagcgttacatcagatgcaacgctgtgacgactgacgaggaggcaggctctggtgtttcctgtcccaaaaaaaaaaaaaataaaaaaagaaaaaaaaaaaaaaaaaaaaaaaaaaaaaaaaaaaaaaaaaaaaaaaaaaaaaaa

SEQ ID NO: 610 - DNA, 1316 bp, Zea mays
  Clone ID: TF_ZmC9208_2
cattgggtacctcgaggccggccgggacctcgcgcgcgcgcggttggccgcgcctgcgcgccctcggcatcgcccccgacggggggcgttggcgttgcctcccccactttgcacccatttcagagcccgcccgacacttgtcaccgcgcgccgcacctccccggcctccacctcctcttcgtccggcgacgtcttgccgcagcgggtcacccggaagcgtcggtccgcccgccgcgggccccggagcaccgcccgtaggccgtcggcgcctccacctatgaatgaactggacttgaatacagctgctcttgatccggatcattatgctacaggattgagagttcttcttcagaaggagctccgaaatagcgatgtaagccagcttgggagaattgttctcccaaagaaggaggcggagtcttacctccctattctgatggcaaaggatggaaagagtttatgcatgcatgacttgctaaattcacaactgtggaccttcaagtatagatattggttcaacaacaaaagcaggatgtatgtgcttgaaaataccggagattatgtaaaagctcatgaccttcagcaaggagacttcatcgtgatctacaaggacgacgagaacaaccgctttgtcataggagcaaagaaggcaggagatgagcagaccgccactgtacctcaagtccatgaacacatgcacatctctgccgcactgccagctccacaagcgttccatgactatgcaggccccgtcgcagcagaagctggtatgctcgcgatcgtgccacagggtgacgagatattcgacggcatactgaactccctgccggagataccagtggcgaacgtgaggtactccgacttcttcgacccgttcggtgactccatggacatggcaaatccgctgagctcctccaataacccctcggtcaacctggctacgcacttccatgacgagaggatcgggagctgctcgtttccctacccaaaatccgggcctcagatgtgagatcctggcagaaaaactgccgcggtcaaaaccatcatcccctgcgtggaactcagagatcccctggttgacgccattgctgtacatccaaataaatggcgtcctcattttgtatgttcagtagtatatgattgggtacgcgtgttgtttatgtgtaaaagggtaactctgcaaaactgaactgagcgttacatcagatgcaacgctgtgacgactgacgaggaggcaggctctggtgtttcctgtcctgcaccctgtgaatgtgtgtgcaggtacataaacgaaagacatcctgtgcattagcatt

SEQ ID NO: 611 - DNA, 836 bp, Zea mays
  unsure (1)..(836): unsure at all n locations
  Clone ID: TF_LIB4742-120-A1-K1-H3
ctcgaagccggccggggtccgttcccctacctaccaattctttctgtgtagtgcctttggtctagatctatggctttctcggcaagaacgatttcaagggagatggaggtgcaaatggggaaggccccaccatgtttgaatcccttcctaatggtaaaccctcttttgccccctcagcatgtctctccctggtcatccaagtttgtaccagttttccaatttggcatgaccaatggtcatggagctttagatctatgtgaagaaagcaaaagggccaggaaggttgttcacttggagtacttgttcagcaaggttttaactccaagcgatgttggtaaactaaatcgtctactgataccaaggcaatgtgcagaggggttctttcctatgatttcagaggtaaagagtggtggagatgacattttcctcaattttgaggacacctccacagggttagtctggcgcttccgcttttgcctctggaataatagcaagacctatgtcctgaccaagggttggtctgtctttatcaaggagaagaatctcaagaaaggtgatattttatccttttatcgtgatgccagtaagtcgataaggacaaaccacatatttattcatatcaagccccataccggtaccatgcctctgccacatcatgtgccaagtccggtcttctctccatctggcatggtaattgatgatcaggtccacaatagccttgacatcggtaaaagccatggaattgctccattctggaagcctttgtcctttggatctngggagttaagccctcaactaatccgacgccacaacaaacaaatttcctgaatcgacgt

SEQ ID NO: 612 - DNA, 2678 bp, Zea mays
  Clone ID: TF_ZmC2776_1
ccggggtctcctcagtaactgcacccacctccacacctacacccgagaggcggcggcggcagacacagacaccgtctctctcctccctttgtcgtcgtgtctctctgcatggaagcctccgccggctcgtcgccaccgcactcccaagagaacccgccggagcacggtggcgacatgggaggggcccccgcggaggagatcgaaggggaggcggcggatgacttcatgttcgctgaagacacgttcccctccctcccggacttcccttgcctttcgtcgccgtccagctccaccttctcgtccaactcctcgtcaaactcctccagcgcctacaccaacacggcaggaagagccggcggcgagccctccgagcctgcttcggccggagaagggtttgatgcgctcgatgacatcgaccagctcctcgacttcgcgtcgctttccatgccgtgggactccgagccgttcccgggggttagcatgatgctagagaacgccatgtcggcgccgccgcagccggtgggcgacggcatgagtgaagagaaagccgtgccggaagggaccacagggggagaggaggcctgcatggatgcgtcggagggggaggagctgccgcggttcttcatggagtggctcacgagcaaccgcgaaaacatctcggccgaggatctccgcgggatccgcctccgccgctccaccatcgaggccgccgccgcccggctcggcggcgggcgccagggcaccatgcagctgctcaagctcatcctcacctgggtgcagaaccaccacctccagaggaagcgcccgcgcgacgtgatggaggaggaggcgggcctgcacgtccagctccccagcccggtcgccaacccaccaggatacgagttccccgccggcggacaggacatggccgcgggcggcggcacatcttggatgccccaccagcaggcattcacgccgcctgctgcgtacggcggcgacgcggtgtacccgagcgcggcaggccaacagtactctttccaccagggccccagcacgagcagcgtggtcgtgaacagccaaccgttctccccgccgcctgtgggcgacatgcacggcgcgaacatggcctggccgcagcagtacgtgccgttcccaccgcctggggcttccacgggctcttaccctatgccgcagccgttctcccccggattcggcgggcagtacgccggcgccggcgctggccacctctcagtggccccccagcgcatggcaggcgtggaggcctcggcgaccaaggaggcccgcaagaagcgcatggcgagacagcggcgcctgtcctgcctgcagcagcagcgcagccagcagctgagcctgggccagatccagacctccgtccacctgcaggagccgtcccctcggtccacgcactccggcccggtcacgccgtcagcaggcggctggggattctggtcgccgagcagccagcagcaggtccagaacccgctctccaagtccaattcctcaagggcgccgccttcctcgctggaagcggcggcggcggctccacagacaaagcccgcgcctgctggtgctcggcaggacgacattcaccaccgcctcgcagcggcttcagataagcggcagggcgccaaggcggacaagaacctgcggttcctgctgcagaaggtgctgaagcagagcgacgtcgggagcctcggccgcatcgtgctccccaaaaaggaagcggaggttcacctgccggagctgaagacgagggatggcatctccatccccatggaggacatcggaacgtcgcgcgtgtggaacatgcggtacaggttttggcccaacaacaagagcagaatgtatctgctggagaacacaggggaatttgttcgttccaacgagcttcaggagggggatttcatagtgatctactccgatgtcaagtcgggcaaatatctgatacggggcgtgaaggtaaggcccccgccggcgcaagagcaaggcagtggttccagcgggggaggcaagcacaggcccctctgtccagcaggtccagggagagccgcagccgccggtgctcctgaagacgccgtcgtcgacggggtcagcggcgcctgcaaggggaggtctccggaaggcgtgcggcgggttcggcagcagggagccggcgccatgagccagatggcggtgagcatctgaaagagcagcagactccgccatatattgatcgatcgaccaatcgatcgttagttctccaagttactattagctagctatagctcgaaacagctgaactgatgatgacgatggtaacctccgtcgtgtgtgctaagcatgtagcgtgctaggagatgatatattaaatataatcgagtagtagagccacccgctgtgtgacgctaaatttgtgtgcatttggtttggtttgtgagttgggcccgtgcgtggctgtgtcatgtcgtggttaattagctatactagtcctgtctgtacatgcatggacatccctgtttcggcccttgggtggggggggcccttcggctaccaaggccagctgcggcctgccgcaaaagctagacccttttcccccgcttaaaaaaaaaaaaaaaaaaaaaaaaaaaaaaaaaagggcggccgccgactagtgagctcgtcgacccgggaattaattccggaccggtacctgcaggcgg

SEQ ID NO: 613 - DNA, 371 bp, Zea mays
  Clone ID: TF_LIB3069-031-Q1-K1-A4
cccacgcgtacgagtcaagttaccgtttcaaaggatgtttcttctagggaagcttcaaaggacgtcacatggatgggagcttcatggaaatgccaacgaagtctgaagcactacaaatctttctgccgtacaggaattactatctcggtgcatagctttgtatacattatgggtgaagagatgaacagacttattgcttatgtggaagatctctatgaggatacaaattcctgcaacatggtcaaggtacaatggtttggcaaagctgatgaagttggtgttctgttgcccatggattttgatgacagggagattttcttttctctgggacggcaagatctcaatgtaatatgtattgacggattggctgc

SEQ ID NO: 614 - DNA, 2306 bp, Zea mays
  Clone ID: TF_ZmC5665_1
tcttggtgtttttttatagccaaactctggaaggtcggcaaaggcccaactgtcggcttcgccccgttgacatcaacctgtcagtgatgagtttgggctgttcgcctgtggctgcctttgttccgtctgtgtctgtctatgatgggacgggacacctagggttcggataccggcaccggctcaactgacgacggactatcgccagtggcgatcaccctccctgtcccctgaccgcggcgtcccctgctcgcgccgcaccggtggcgacaaggcaccccttgcctgctcccctagacgcgagcgagcgagccaacacctgtcggcacaagaatggatgggaatgctgagacgatccaattctcatggggcaagcgtcgagggaaaggtggtgctaagatggatacacagttctttgggtccttcacattggacaatgtgaagtattcactgtttgactgtgtctatctatttaagcatggtgatcctgaaccgtacattggaaaaatagtgaagatctgggagaaagataatgataaaaaagtaaaaattctttggtttttccaccctgatgaggttcagaaatatttaagtggccctgtgatgggaaaggagatttttcttgcctgtggtgaaggtgctgggcttgcagatatcaacccgctggaagctgtcgctggaaaatgcactgttatatgtacttcaaaggataagaggaatcgtcaaccatcccctcaggaactacaaattgctgattatatcttctatagggtctttgatgttaaaagtctaacactttctgatcagttaccagataaaattgctgcatttacagttgatcttcttctgaatccaaaagatgagctagtcatacctgcaaatgttctggtgaatccaaatgtggatgagggtatggttgccacagttcctacacccccttcagcagttaaattggaggatcgaagtcaggctgctgcacttccccttacgcagacaggccaggtggatgaaaatctgcctgccacagttccccttccccaatcagaggtcaaggaggaacagaaaccagtcattgccattcccatttcccagactgtggtcaagaaagaggataagaaatcactttctgacattcccctttcccattcagcagtcaaggaggatgagacaccagttgcttcaattggccctccacagtctgcagttatggagaacattcccaaacatacacagttacaggatgctcatgctggggagaggccaccaaaaaagttgaaattatcccaagaaactacagagcaggacatagatccaacgaatactgaacaaagacctttggagctacagccaaagaatattgacagaagcaaatggtttaacattgaatggaatgacagactaaagatggctgatgataaggggacacttgtctatattcaaaatctcgatattcggtttggacctgctgacatagaggagttagttcgtaaagcattacagctaaattgtactgcgaagcccattaaccaccccacatatgatgatccaaacaatggcaaagcatatgctatattcagaactaaagatgctgctgatgctgccatttcaaaaatcaattctggtttggttgttggtggaaggcccctgtactgcagcaaagggttacttgaggttccaaaaccttcagcgaatcttgttgggcacctctcctcatatgttaagattggtcaaaagcagcgcgacgagcagaagaaggctgtagcaacctcgcattgttcccagcccaacacgatcgagtacgacttggccttggactggatgcttcttcgggaaaagcaagaccagagcttcagagtacttcacaagaagcacagagaagccaggaaagggttcgcaagcctggtcggcaaaggatccaaggcagagtagcaggccggttgcccggttccaacctttcagagcttggcgcggtatgactgccgactggcaggaagagagggtcgtgcgcgcagaggttctctttttgcagtagccatcgagtagttcgttgggtcaattcgtgttaatttctgttaggaaaggaaaaatgtgttaataagtgttaggatagaaaatgcacgtcagctttgacaggtcagagcagcctaggtaggcatcaatatgttgctgcgactgcgatgttttaatttgacttggaacctcttatgttgggcgacaagtttgccctatgggggagagagacactgtttcgtctctgttaccatctcatctgatttcactttcagtcaatctcgtccatatcgttctac

SEQ ID NO: 615 - DNA, 2513 bp, Zea mays
  unsure (1)..(2513): unsure at all n locations
  Clone ID: TF_ZmC2907_1
cggncgcgtgggctcaaaattagtattttagtaatgttcttaaggttagtatgctactaggaaaaacctacgccggcccattggctcgggaccctccgggagacacgaagtccaacccaaatctcaatatcccaaccctccgatccccatttccatccactccgacaccaatcctccgctccgaccaccgccggagaaatggggcggcgccgccggttcgcgcagctggacgatgacgacgacgacgacgaagacgtgcccatcaatttcaagccctcgggtggcgcctcctcctcggacgccaaacccaggaagccccagccgccgccgcagcagcgccgcggagtctccgatgacgacgacgaggacgtggaggaagtggaacttgaggaggaggaggacgacgagaaggatctcgaggcaatgcgacgggccgaggaggaggagcgccgcgagcaggaggccgagacgaagactcgccgccgccggggacggcccaagcgccgccgcgacccggggagcgaggatgaggagcccgaggagctagagctgcaaacggaggatccccgtgaggaggagatcacggaggcggtgcccgtagctgtaggggacccggtcaagatcactggcaaggggaagaagcagaagaagcactatgcttccttcgagtacgagggcaacagcttcgagctggaggaccccgtgcttctcacgcctgaggacagcaatcagaagccctatgtcgccatcctcaaggatataacagaaactgatgggagcctatatgtaactggccaatggttttatagaccagaagaggctgacaaaaaggagggtggattctgggtagcacgagatacacgagagctattttacagttttcatactgatgatgtgcctgcagaatcagttatgcacaaatgtgtggtccatttcattcctcagcaaaaacagattcccagtcgaaagcagcatccgggatttattgtccagaaggtctatgatgcagttgagaagaaactgtggaacctaacagacaaggactatgaggataacaagcagcaagagattgatcttctggttaagaaaacaatagaccgtattgggcagcttcctgatctcgaacctgaagagacacctcttgagaacaattatttgtcaaataaacgaggcctgcgtaagaaacctgttaaccctatagatgtaacaagagaacctccagttggcaaatccgagcagtttgcaaaagcagagacacctggaagtgataagatacggaattatgatacccttgttaagtataaagtacttactggacattctcatcgtgataggtggctcgataaattgatagaaagtattccgcttgcatcaaaggagaatgctggaacatctgctgatgctaattctacagccaaaagttcaatcagtggttcacctgcaaaggatgttggttctgctgaaaatgaaaaatcatatggacttgatgttgttgttgagataatgactgcattagaaagatctgcatatgaagctcttggaacagattttgggaaatataaccagaaactgcgacaactacagttcaacatcaagaatatctctaaacttcgcaggaggctgatggacaaggagcttgatcctccagttcttttaaccatgtcccccgatgaattaaaggctggcttgacttcagcagagaaaacatctgaaccagaagaatcaaggaaattgcagatgactgatacaagatgtcaaagatgcagcgaaaagaaagttggcatatctgatattatccatgcaggtcatggagaccgctatcagttggaatgcacttcctgtggctacacatggttttcgtccagagatgccatcacaacacttacagaggatgccccaagcactgctgggaatgtgggcactgcccccttggcaacagcaaagttcgaggtcgttgagaagaagctcacgagcccacgggaccaatccggcaagcctgcttctgatgctctgcagaagagcactgcagcttacatgccaactatggagaggcagaagtcgtttgctaagaccaagctgttggatgaaccctcccccgcaccaaaacaggggtagagccgtattcatgctgcagattggtctttgcaggatttcgagatacatacttgtacataggggtgatccaccccccgcaccaaaacaggggatgaaccctcccctgcaccaaaacaggggcccttttcttgacatgctaccacctcgtactggttgtcttcgtttcggtagtttgttttgcagtcatgcatagccagttacctctcgttttattatttgcttgtttgttgtagcactcatcagttgacatgaggacgtaggtttgtggcgtttaccagattgattttgctttctatgtgctataaattttgtcttgcaaggatcacttcccagttatgctgggcgacatcatgaccgtctgttgcaaacttaaaaccccttctttgagtttttgagtt

SEQ ID NO: 616 - DNA, 634 bp, Zea mays
  Clone ID: TF_ZmC35813_2
accagtcttaatagtgtaatggtctactctatataggaataccctgaggtggtaggttcgactcctatcaactatgttcaactattcccttttttaaaaaaaaaaaaaaaaaaaaaaaaaaaaaaaaaaaaaaaaaaaaaaaaaaaaaaaaaaaaaaaaaaaaaaaaaaaaaaaaaaaaaaaaaccttagggcccccggccccggtttccgcccccccgccttcgccgtcgggggggggccccatggggggaaagtcgcgaccgcccaaggggatcctcgagtcctataccatcaagggttcggaaagagtcatcaagcctggcgattgggggctaatgagggcatctgatgcttcaaagccaccctatgtggaaagagttgaggaaattgaagaagaaggatctcgaggcaccaatgtgaaagtacgagtgggggggtattatcgaccaaaggagtccataggtggtcgggggccatttcatggttccaaggaggttttcctctctgaccattatgatgtacaaagggttgacaccattgaggggaaatgaaatgtccacagtttccgaagctatacaaagcttgattttgccaatggtgaggatttcttatgccgctttgagaataaatcac

SEQ ID NO: 617 - DNA, 1856 bp, Zea mays
  unsure (1)..(1856): unsure at all n locations
  Clone ID: TF_ZmC3042_6
gcagttccacggcgccaaggagctattcctctccgaccatttcgacctgcagagcgcccacacaattgaggggaagtgtgttgtccactctttcaagaactataccaggcttgacaatgttgggcctgaggacttcttctgccgattcgagtacaaggcggccaccggttcgttcacccctgaccgcgtggcagtgtatgaagctcctcaacccttccattgctggctgtcccttttactgtgcatgcatttttagcttgcttgtgatgatttcggcgcctggtttctctcaaggtattgcaaatgtgagatgccgtacaaccccgatgacctcatggtgcagtgcgatgcttgcaagcactggtacatttgttacaatgatttgcaatttacatttcactgatatttgcctttgttccccgtctattatgtgactgtacaaagcatgttttaaatctcctgatattgagtttagcggcatcatcaccgagctgctaacacagtgccaaacgcaccacccagagtcccagacctacctcttcagtccttgtccacgagttctcgctgacgctcacaccttttatctgttttcttgcccaactctgtcttgcctgcactctgccactctaactttccaatactcactctgctgcaaaacggcttctgctgcattgctgctggggaggactttgcgcccaacagcacacacgtttgtggctgcgcttggggagagtgtcgtggatgagatggccatgattcagcagggctcagtgctcctatcctagatcgaggaggagctcaagcacacatcacaggggctcaaggacactgaggtggtgggccagaaagcgccgagcagagggcaagagtcacacagccagtagtcagggcacctcgccgactggagctaggtgcttctgtgtgcagaggggggggggagccggcatcaagtggagctgttgcttcttctattggtgcgctgaggtggagagctggaattggacgatgctcgacaaggaggtactcttgtaactgcggcaggcagtagagaaggtctcagcctgctgctggcagtgttccgacgggtgttctgcgaggaacagcaagtctcaacaatgtaagcggtagcgcggtactaaatcacatcttgattagcagatttcgcgcactaaatccggctattagtgctaaaagtcaactatcccagccgctgttctgtgcagctcggcacgatagttgtagcgtccactatagctggagatttagaacttcggtacaaaggcaggaatttcacgtcagttttatctgcttcacagcccaagaggcttcgctggcccagtgcccttgtttcaagcccagtggattgtttagctggagtataagtagaagtagccgtgtaggagactccaacaattgtatcgaaatgtttaactcataatcatttaactgttatgttgtcgttctcttctgtccccttctttccgaaggctaccgtcacaatttgtatcagattcatggatcctagatctgttcccgctgctgcattaccattcaccagattccagggagcctgcggtgcgatgggcttgctcagagcttcactgagcatggtgccaagttggagtgttgcttcgtcgatttggtgcgctcccatgacgactcttatgccgccttgagcaatgataggttgattaggagaacaaccgctccgaacacgtcaacaccaagtgtgatgactgatgattgtgtctccaccttagaagctgctgccacanatctcagcacctgatgcctggaagtggaggccgctatcgatatctaaagctgaacaagttgacaaagcattggtgggactg

SEQ ID NO: 618 - DNA, 1995 bp, Zea mays
  Clone ID: TF_ZmC977_1
ggaacgaccgcacgcgttcgcggacgcgtggggtggcgccttaggcacgtagccaaacaggcctaaatcctctacatcctggtgccatggatatgagtcatatgacttgtacatataatcctgtttattctatattctatggaaaatgcttatttaacttgttaacaatgtaattatgcttatgatatttggatgatgatattgctcttgtttattaccatttttattagttatccaacttttaactcttgaaactaccaaattacccctagcccgctccctcagcttcctgctccgttggaacggacagccgcggcagtccccagcccccccgcttcctgcaccctcgctgctagggttttctcgcaatccagcccctctgtcatggccaagacgaagcaagggaagcgggatgtcgacgcctataccatcaagggcaccaacaaggtggtccgagtgggggactgcgtgctgatgcggccagcggacacggacaacccgccgtacgtggcgcgggtggagcggatttggagtcggacgggcgcggcagcgtgagggtgcgggtgcgctggtactaccgccccgaggaggccaagggcggccgacgcccgttccacggtgccaaggagctcttcctctccgaccacttcgacacgcagagcgcccacaccattgagggcaagtgcatcgttcactccttcaagagctacaccaagctcgacaacgttggtccggaggacttctactgccgatttgactacaaggccgccaccggtgcattcacccccgaccgtgtcgccgtatattgcaagtgtgagatgccgtacaacccggatgacctcatggtgcagtgtgaaggatgcaaggactggttccatccgtcttgtatgggaatgaccattgagcaagcaaaaaagatagatcattacatgtgctcggattgtgctaaagaaaatggtgcaaagagaccctcaaattcatactcagtttcaccaaactcagattctaagattgaatcaaagaggcgcaagagataaatgctgcggcagaagcacccctggcaaaggagatgcggtatttatggtgtcagctcctcattactggtgcatatttgagatgttgatgtgtacactgcgagagaagagccaagccaattgtagggcaaaacctatttgacttatcattcttctgtgtattctgcctagacattagtgtgatgagtaggtgagttccccgttgcggcgtgtgcatgatcagctgctggaggcgggatgtcgggaaatgctagaattatgctgactcttgtcgatgtaagtgtatcgtgtgtgtgtgttaacatatgcactggctggaaacgttcccatgtgtgaatggaggatgctgatgatagcttgactgttgtttcatattcagttagaaatatacggagagttgaaataatgagtttgatctcgaaaaaaaaaaaaaaaaaggggcggcctgctgtttcataattcagttccggtttgccaagcaaagacttgagataatattgagttcgatcttgaaacttgaaaaaaaaaaaaagaaaaatgtccaggttccatccgtcttgtatgggaatgaccattgagcaagccaaaaaattacatgtgctcggattgtgctaaagaaaatggtgcaaagagaccctcaaactcatacccagtttcaccaaactctgattctaagaattggtagttttgcctgcatttccactcccaaattatatcatgagcagtgcttagttttgggcggtcgattacaagtgctctttatggaagcataggtccaaatgacttctttgttcagctgtataccatctagacattggaacccttcagtgcagtgctggctcatttcattgtgaactaaagactgcatgccctcggggtgctcggctgtgtcatgtgcattgcagggtttgtggtcattgttgtggctactcttgctagggaatgtgctgaattttttctc

SEQ ID NO: 619 - DNA, 1093 bp, Zea mays
  Clone ID: TF_ZmC29757_2
ggagtgcgacgcgtgcctcggcggattccatctgcgatgcgtgcgaccgccgcttcggagggtgcgtgaaggtgattgggcgtgcccttactgctaggccgagcgcgccggtaaggtggtcgagcggcccatgccgcctgaggggaagcgcgtcgtgaggaccgccaaggaaaaactcctttccagcgacctgtgggctgcacgcatcgagagtttatggagggagcctgatgggacgttctgggcaaaggtcaggtggtacattatccctgaagagactgcagcaggaaggcagctgcataacttgagaagagagctgtatcgtaccaatgatcttgcagacattgagatggaaacaatccttagacattgttctataatgtgccccaaagactttagggatgctaacaacggaggggatgatgtattttattgtgaatatgagtatgatatacattggcataattttaagcgtttggcagatattgatgatgagccagagacaaaggaagatctcagtgacgagccctacaatgctggtgatgattataacagtgacactgatgaagattcagactatgacgaggaggaagaatccacatcatctttctctgtcagaaggaatcaatcacatgaatctgcggcgaattcaaggaaaggtagaatatatggcctgcaaaaaattgggatacaaaaaattcctgagcatgctcggtgccaccaaaagactgagctggagaaggctaaagcaaccctgttattggcaactcttcctaagtcattgccttgcagagataaagaaatggatgagatatcaatatttgtaaaggatgcaatctgcaacaaccaatgcctaggacgctgcctttatatacatggtgtacctggcactggcaagactatgagtgtacttgctgttatgaggaggctgagatctgaatttgattctggaactctgaggccatattgttctatcgaaattaatggtcttaaattagcatctccagagaatatctacaaggttgtatatgaacagctgagtgggcataagggtgggtggaaaaaggctcttcactatttaacagaacatttt

SEQ ID NO: 620 - DNA, 1056 bp, Zea mays
  Clone ID: TF_ZmC3042_4
cccacgcgtccgcgctccacggccatggtgaggatgaagcaggtaaagatttcggtaaagaaggacgtggattcgtacacaatccgcggcaccaacaaggtcgtccatgtgggcgactgcgtgctgatgcgggcgtcggactcggacaagcagccgtatgtggcgcgggtggagaagatggaggccgacggacgcggcagcgtgcgggtgcaggtgcgctggtactaccgccccgaggaatccaagggcggtcgccggcagttccacggcgccaaggagcttttcctttccgatcatttcgacctacagagcgcccacaccatcgaggggaaatgtgttgtccactctttcaagaactacaccaagcttgataatgtcgggcctgaggactacttctcccgatttgagtacaaggcggccaccggttcgttcacccctgaccgcgtggcagtgtacggagctcctcaatcctttcattgttgactttttcttctctttgcatgcgttttgagcctgcttgtgataatttgggtgtgtgtatttttctctcaaggtattgcaaatgtgagatgccatacaacccggatgacctcatggtgcagtgcgaagcttgcaaggactggttccatccatcttgcatggctatgaccattgaacaggccaaaaaactagatcactttgtttgctcagactgtttgaaagaaaatggttcaaagagactttcaaatgtatatgccacttcatcaaattcttagcccaaggctgaatcaataaggcagacgaggtgaaaactgagtgccaacatccagtggagatgtgctgcttctgtggcgaatcagtccttgcactggcgagagcagaggtgtacagtgtttgctgtggtttgttcgatgtaactagccagtgtggcatgtcatgcagttgttggtagatcagtcattgtgttgacttggtcagcttaactcaataccccccttcgttgattacattgttgctatggcggtgcggcatgatcgattactgttctattaatatatgacttttatatgttgatat

SEQ ID NO: 621 - DNA, 1799 bp, Zea mays
  unsure (1)..(1799): unsure at all n locations
  Clone ID: TF_ZmC3042_1
cggttcgtcacccctgaccgcgtggcagtgtattgcaaatgtgagatgccatacaacccggatgacctcatggtgcagtgcgaagcttgcaaggactggttccatccatcttgcatggctatgaccattgaacaggccaaaaacagatcacttgttgtagctgttgaaagaaaggtagaaccggccggaaaaaaaaaaaaaaaaaaaaaaaattaaaaaaaaaaaaaaaccggctcgatgatgatgtagagatctaaggatgtttggttcttcactttcggcggttggtactgcatatgtgaggtgccggactgcctgcattaaactgcttgcgccgtgggatggcaataaccttcctccttcgttccccatttctcctcttgctaggtttctacccctctaaatcgatcctcgctccacggccatggtgaggatgaagcaggtaaagatctcggtaaagaaggacgtggattcgtacacaatccgcggcaccaacaaggtcgtccatgtgggcgactgcgtgctgatgcgggcgtcggactcggacaagcagccgtatgtggcgcgggtggagaagatggaggccgacggacgcggcagcgtgcgggtgcaggtgcgctggtactaccgccccgaggaatccaagggcggtcgccggcagttccacggcgccaaggagcttttcctttccgatcatttcgacctacagagcgcccacaccatcgaggggaaatgtgttgtccactctttcaagaactacaccaagcttgataatgtcgggcctgaggactacttctcccgatttgagtacaaggcggccaccggttcgttcacccctgaccgcgtggcagtgtattgcaaatgtgagatgccatacaacccggatgacctcatggtgcagtgcgaagcttgcaaggactggttccatccatcttgcatggctatgaccattgaacaggccaaaaaactagatcactttgtttgctcagactgtttgaaagaaaatggttcaaagagactttcaaatgtatatgccacttcatcaaattcttagcccaaggctgaatcaataaggcagacgaggtgaaaactgagtgccaacatccaggggagatgtgctgcttctgtggcgaatcagcccttgcactggcgagagcagaggtgtacagtgtttgctgtggtttgttcgatgtaactagccagtgtggcatgtcatgcagttgttggtagatcagtcattgtgttgacttggtcagcttaactcaatacccccttcgttgattactttgttgctatggcggtgcggcatgatcgattactgttctattaacatatgacttttatatgttgatataattaaattattttgatactaaaaaaaaaaaaaaaactgaaccaaaaaggcagaggaggtaacaaactgtgagtggtaacatccatatgggtaaggggagatgtgctgcttctgtggtgaatcagcccttgccctttgctgtggtgagagcagaggtgtacagtgtactagaccagtgtttgctgttaggggaacgggttttgttcgatgtgtagaccgtgtggcatggcatgcagttgttggtagaggtcaaaagaacagtcgttgtgttcacttggtcagcttagcgccttagcccttgttaatgtgttaatgcactgtgttaactcagcgagccccccttgtggctgataatgcaagtcatgcagttgttgatacaaaaaaaaaaaaaaaaaaaaaaaaaaaaaaaaaaaaaaaaaaaaaaaaaaaaaangaanaacgatat

SEQ ID NO: 622 - DNA, 3219 bp, Zea mays
  Clone ID: TF_ZmC29605_1
ggccgcgggaattcgattttagatctagagcagcagcagctaccgcatcccttgccatggcgccaagctccccgtcatccgctaggcccacgcgcgcctccggccgggagcgctccgccatggccgaggagatccaccagaaccaggaggaggaggaggaggttgtggctgcgtccaccgccaagcgcagacgcaaggcggcgtcttccgggaagaagcccaagccgacgcccaagcaggccaaaccggccgtggcggggatgaagaagaagggggagaccgagaagacggagcccgttgtggacgacgtgtgcgccgaggagcccgacgaggaggagttggccatgggcgaggaggaggcggaggccgaggagcaggccatgcaggaggtggtggccgcggtcgcggccgggtcgcccggtaagaagagggtggggagaaggagcgccgccgcctcgggcgaccacgtgcccgagttcatcggcagccccgttgctgcggccgaggcgcacagcaactggcccaagcgctacgagcgcagcactgccgcaaataaaccggaggaggacgatgagctcaaggccaggtgccactaccggagcgctaaggtggacaacattgtctactgcctcggggatgacgtttatgtcaaggctggagaaaatgaggctgattacattggtcgcattactgaattttttgagggcactgatcgatgccactattttacttgccgttggtttttccgtgcagaggacacggtcatcaattcgttggtgtcgattaatgttgatggccacaagcatgaccctagacgtgtttttctttccgaggaaaagaatgacaatgtgcttgattgcatcatctccaaggtcaagatagtccatgttgatccaaatatggatccaaaagctaaggcccaactgatagaacattgtgacctatactatgacatgtcttactctgttgcatattctacatttgctaatatctcatcagaaaatgggcagtcaggcagtgaaaccgcttcgggtatttcttctgatgatgcgggtttggagacgtcatctaatatgccagagaggacagcaacccttcttgacttgtattcgggctgtgggggcatgtccactggtctttgcttgggtgctgctctttctggcctgaaacttgaaactcgatgggctgttgatcttaacagttttgcgtgccaaagtttaaaatacaatcatccacagactgaggtgcgaaatgagaaagctgatgagtttcttgctctccttaaggaatgggcagtcttatgtgaaaaatatgttcatcaagacgtggattcgaatttagcaggttcagaggatcaagaggatgctgacactcttgacaaggatgaatttgttgtacagaagcttattggaatacgctatgatggcactggaaggaaaaaaggcgtatattttaaggtccaatgggaagaatatggtcctgaagaggatacatgggaacctattgataacctgagtgactgtccgctgaaaattagagaatttgtacaagaagggcgcaaaagaaaaattctcccgcttcctggtgatgttgatgtcatttgtggaggcccaccatgtcaaggtataagtgggtttaatcggttcaggaaccgtgatgagccacttaaagatgagaaaaacaagcaaatggtgactttcatggatattgtggcatacttgaagcccaagtatgttctcatggaaaatgttgtggacatactgaaatttgctgatggctacctaggaaaatatgctttgagctgcctagttgctatgaagtaccaagcacgccttggaatgatggtggcaggctgctatggtctgccacagttcaggatgcgtgtgttcctctggggtgctctttcttccatggtgctccctaagtatcctctgcctacctatgacgttgtagtacgtggaggagcccctaatgccttttcgcaatgtatggttgcatatgatgagacacaaaggccatccctgaagaaagctttgcttcttggtgatgcattttcagatttaccaaaggttcaaaaccatcaacctaacgatgtgatggagtatggtggttcccccaagacagagttccagcgctacattcgacttggtcgtaaagacatgttggattggtcgtttggtgagggggctggtccagatgaaggcaagctcttggatcaccagcccttacggcttaacaatgatgattatgagcgggttaagcaaattcctgtcaagaagggagccaacttccgtgacctaaagggcgtgagggttggagcaaacaatattgttgagtgggatccagaaatcgaacgtgtgaaactttcgtctgggaaaccactggttcctgactatgcaatgtcattcatcaagggcaaatcactcaagccgtttgggcgcctgtggtgggacgagacagttcctacagttgtaaccagagcagagcctcacaaccaggttataattcatccgactcaagcaagggtcctcactatccgggagaacgcaaggttacagggcttccccgattactaccgattgtttggcccgatcaaggagaagtacattcaagtcgggaacgcagtggctgtccctgttgcccgggcactgggctactgtctggggcaagcctacctgggtgaatctgaggggagtgaccctctgtaccagctgcctccaagtttcacctctgttggaggacgcactgcggggcaggcgagggcctctcctgttggcacccctgcaggggaggtagttgagcagtaaaaggatgacagatctgagctgagctgggcaacatccagcggcaggagcatttctggttcggttcgattcgggctcacgagcgcatcgtgctgattcgcagggtgcactcgagctcgagtgcggagttgttgtaatgtaggttgaggtttcaaaacatccatccatccatcggccccgcctatttgtggatggtgtttctcgtgccattttagttcagctgtattgatgcttcgtcatgtatgtgtattgtaccattcgttcttgttacctactggtaaggcaacatttaatccatgttcaacgcgagcaaattttcatccactttaggtactgagatgctcaagtagttaaaaaaaactgtaaaaaaaaaaaaacagtgcccgaaaagccgcaaaaaaaaaaaaaaaaaaaa

SEQ ID NO: 623 - DNA, 1466 bp, Zea mays
  Clone ID: TF_ZmC35813_1
gtacctcgaggcggccggggcgaccgggccgggatttcgaaccaaagggggcagaactgagagatcgagagaaataataaaaaaaaatccgtcttcttgtggtcttctccaaaccctagcgcccccggccccggtctccgcccccccgccttcgccgtcgcggtcgcgccccatggcggggaagtcgcgaccgcccaagcggatcctcgagtcctataccatcaagggttcggacagagtcatcaagcctggcgattgcgtgctaatgagggcatctgatgcttcaaagccaccttatgtggcaagagttgaggcaattgaagcagcaggatctcgaggcaccaatgtgagagtacgagtgcggtggtattatcgaccagaggagtccataggtggtcggcggccatttcatggttccaaggaggttttcctctctgaccactatgatgtacaaagtgctgacaccattgaggggaaatgcaatgtccacagcttccgtagctatacaaagcttgattctgtcaatgctgaggatttcttctgccgcttcgagtataaatcagctactggcagctttgtaccagatcgtatagcagtgttttgcaagtgcgagatgccatacaatccagatgaccttatgatccaatgcgaggaatgttctgactggtttcaccctgcttgcattgggatgacaatcaaagaagcaaagaaactcgagcattttttctgccagacctgtacagctgaaaatggtaagatggttgagaattcacatgaagctacagcgcaatcagaagaaaagccggtggagtcaaaaaggcggcgaaggtgatggccgtgctgattaaatttatgaaatctatgctcggttgtacaaagccttcccacgtttcacgtttgagaactgtaattttattgttcgtcgcagtttgtggtcctgggctggggtccctctaatgtcaggcacactgtatatagcttgtaacctggtcagattgttgtattagagcacactagggtttgtgtgatagcacggaagttcggactactgagtatgtgtagagtatggcattataatgccagcatcaggtgatcaggcttcttctgggcattaggactcctgcatgatccagcaataatacttccatgcagctggacctggttagtcactagtaagttgtcaggaaacttagtactgccatgtgaactttttttgaaaccctctatgtaatgtaagcatctgtgtcctacttgcaaactgttgcacgaaattgggcacccaccctggcccattggctgcggttgcataattgcggcaactaacttgtgttttaagtttggaggaacaataataaagtttaggctcattgaactggtctggttcaacgaaacaaaccctcactttttgcttgtattttgagttaatgtgatgtttattcaaattatgggctaataaattgctgtcc

SEQ ID NO: 624 - DNA, 3129 bp, Zea mays
  unsure (1)..(3129): unsure at all n locations
  Clone ID: TF_ZmC29605_2
cgcccgtggtcggacgacacactgcccgcgggcgggtgcgggacggagcctgcgcgctcgagcagcagtaatccccgcagagcgagggtcctcgctgtccgggagaacacaaggttacagggcttccctgactactaccgattgtttggcccgatcaaggaaaagtacattcaagatgggaacgcagtggctgtccctgttgccctaccactgggctactgtctggggcaagccttcctgggtgaatctgaggggagtgaccctctgtaccagctgcctccaagtttcgcgtctgtaggaggacggagtgcgggagaggagagggcctctcctgttggcacccctgcagggggggccgttcagcgggaagtggatgacagatgtgaacggagctggggaccatgcagcgggaggagcatttctggttcggttcgattcgggctcacgagcgcattgtgctgattcgcagggtgcactcgagctcgagtgcggagttgttgtaatgtaggttgagggttcaaaacatccatccatccatcggccccgcctatttgtggagggctacggtcgcgccactgcagcaaagctgcctggttacgaggaagagttcaaggacagatgtcaccaccggagcgctaaggtggacaacgtcgtctactgcctcggggatgacgtctatgtcaaggctggagaaaacgaggcagattacattggccgcattactgaattttttgaggggactgaccagtgtcactattttacttgccgttggttcttccgagcagaggacacggttatcaattctttggtgtccataagtgtggatggccacaagcatgaccctagacgtgtttttctttctgaggaaaagaacgacaatgtgcttgattgcattatctccaaggtcaagatagtccatgttgatccaaatatggatccaaaagccaaggctcagctgatagagagttgcgacctatactatgacatgtcttactctgttgcatattctacatttgctaatatctcgtctgaaaatgggcagtcaggcagtgataccgcttcgggtatttcttctgatgatgtggatctggagacgtcatctagtatgccaacgaggacagcaacccttcttgatctgtattctggctgtgggggcatgtctactggtctttgcttgggtgcagctctttctggcttgaaacttgaaactcgatgggctgttgatttcaacagttttgcgtgccaaagtttaaaatataatcatccacagactgaggtgcgaaatgagaaagccgatgagtttcttgccctccttaaggaatgggcagttctatgcaaaaaatatgtccaagatgtggattcaaatttagcaagctcagaggatcaagcggatgaagacagccctcttgacaaggacgaatttgttgtagagaagcttgtcgggatatgttatggtggcagtgacacgggaaaaggcgtctattttaaggtccagtgggaaggatacggtcctgaagaggatacatgggaaccgattgataacctgagtgactgtccgcagaaaattagagaatttgtacaagaaaaacacaaaagaaaaaaaaacccactgcctggtgatgttgatgtcatttgtggaggcccaccatgccaaggtatcagtgggtttaatcggtacagaaaccgtgatgagccactcaaagatgagaaaaacaaacaaatggtgactttcatggatattgtggcgtacttgaagcccaagtatgttctcatggaaaatgtggtggacatactcaaatttgcggatggttacctaggaaaatatgctttgagctgccttgttgctatgaagtaccaagcgcggcttggaatgatggtggctggttgctatggtctgccacagttcaggatgcgtgtgttcctctggggtgctctttcttccatggtgctccctaagtatcctctgcccacctatgatgttgtagtacgtggaggagcccctaatgccttttcgcaatgtatggttgcatatgacgagacacaaaaaccatccctgaaaaaagccttgcttcttggcgatgcaatttcagatttaccaaaggttcaaaatcaccacccgtccgatgtgatggagtatggtggttcccccaagaccgagttccagcgctacattcgactcggtcgtaaagacatgttggattggtccttcggtgagggggctggtccagatgaaggcaagctcttggatcaccagcccttacggcttaacaacgatgattatgagcgggttcagcagattcctgtcaagaagggagccaacttccgcgacctaaagggcgtcagggttggagcaaacaatgttgttgagtgggatccagaagtcgagcgtgtgtacctttcgtctgggaaaccactggttcctgactatgcgatgtcattcatcaagggcaaatcactcaagccgttcgggcgcctgtggtgggacgagacggttcctacagttgtgaccagagcagagcctcacaaccaggttatattgcatccgactcaagcaagggtcctcactatccgggagaacgcaaggttacagggcttccccgattactaccgattgtttggcccgatcaaggagaagtacattcaagtcgggaacgcagtggctgtccctgttgcccgggcactgggctactgtctggggcaagcctacctgggtgaatctgacgggagtcaccctctgtaccagctgcctccaagtttcacctctgtggggcgacgcaccgcggggcaggcgagggccgctcctgttggcacccctgcaggggaggtagtcgagcagtaaaaggatgacagatctgagctgagctggnnnnnnnnnnnnnnnnnnnnnnnnnnnnnnnnnnnnnnnnnnnnnnnnnnnnnnnnctgattcttatggttggagatgaatgtatgtagggtgtactcgagctcgagtgcttgttgtactgtaggttgaggtttctcatccattggcctgcctatttgtggatgacgtttcatttcagattagcaatgtgcttatttaaggtttcgtcatgtacctgtattctacaatccactattgtttccaaagacagcatttgatccttg

SEQ ID NO: 625 - DNA, 919 bp, Zea mays
  Clone ID: TF_LIB3150-078-B9_FLI
gacgtggattcgtacacaatccgcggcaccaacaaggtcgtccatgtgggcgactgcgtgctgatgcgggcgtcggactcggacaagcagccgtatgtggcgcgggtggagaagatggaggccgatggacgcggcagcgtgcgggtgcaggtgcgctggtactaccgccccgaggaatccaagggcggtcgccggcagttccacggcgccaaggagcttttcctttccgatcatttcgacctacagagcgcccacaccatcgaggggaaatttgttgtccactctttcaagaactacaccaagcttgataatgtcgggcctgaggacttcttctcccgatttgagtacaaggcggccaccggttcgttcacccctgaccgcgtggcagtgtattgcaaatgtgagatgccatacaacccggatgacctcatggtgcagtgcgaagcttgcaaggactggttccatccatcttgcatggctatgaccattgaacaggccaaaaaactagatcactttgtttgctcagactgtttgaaagaaaatggttcaaagagactttcaaatgtatatgccacttcatcaaattcttagcccaaggctgaatcaataaggcagacgaggtgaaaactgagtgccaacatccaggggagatgtgctgcttctgtggcgaatcagcccttgcactggcgagagcagaggtgtacagtgtttgctgtggtttgttcgatgtaactagccagtgtggcatgtcatgcagttgttggtagatcagtcattgtgttgacttggtcagcttaactcgacatccccttcgttgattacattgcgcatgttttgttaggatcagcagatcctggtcgaagcctagatgcaggctgggcttagcctgtatgcattgatgcaaaccaaaataagttct

SEQ ID NO: 626 - DNA, 4936 bp, Zea mays
  unsure (1)..(4936): unsure at all n locations
  Clone ID: TF_ZmC2046_1
ttcaggaacaagaagatgcagagcaaagccacaaaagaaggaagaggaatccacagaaaacaacaagctggagaatggacctctggatgcaacagaagaggtgcatcatggagtcgaaaaaggtgatggacatgttacccgcaagagaccaaggagagcagcggcctgttctgatttcaaagagaaatccatacgcttatccgaaaaaaaatctgttgtcatggtcaagaagaatcggatggaggaggaagaagtagatgctgtcaatctgacaaaacttggaccagaagatccaccaccttgccggaagttgatcgattttatcttgcatgatgcagaagggaacccacaaccctttgaaatgtcagaaattgatgacttctttataacagctcttatcatgcccatggatgatgatctagaaaaagagcgtgaaagaggagtacgctgtgaaggatttgggcgaattgaggactggaatatttctggttatgatgaaggtactcctgtaatctgggtgtcaactgatgttgctgactatgaatgtgtgaaaccatcaaccaattacaaatcttattttgaccacttctatgagaaggctcaggtgtgtgttgaagttttcaaaaagcttgcaaaatcagttggtgggaatcctaaccagggcctggatgaattgcttgctagtgttgttcggtcaaccaatgccatgaaaggatatagtggaaccatgagcaaagatttggtgatatccattggagaatttgtatacaatcaacttgttggtttggatgagacatcaaacaatgatgatgaaaagtttgctaccctgccagttcttctttctctaagagaccagtgcagatctagggtggaactgaccaagttgccctctaacttctcgaacacaagtctgaaaattaaggactcagagtgtgatgagacagcagaagacgatgatgatgcaaaattagctagattacttcaacaagaagaagaatggaaaatgatgaagaaacagaggggtaggcgtggaacaccatcccagaaaaatgtctacataaaaatcagtgaagctgagattgccaatgactatccccttcctgcatactataagccatttagccaggaaatggatgaatacatatttgatagtgatgacagcatattttctgatgatgtgccagttaggatactcaataactggacactgtacaatgcagattccaggcttatatctttggaattgatccctatgaaatcaggggcagaaaatgatgtggttgtctttggatctggtttcatgagagatgatgatggcagttgctgttctacagctgagtctgtgaaatcttcgtcttcctccagcaaagctgaccaactggatgcgggaatccctatttatctgagcccaatcaaagaatggattatagagtttggtggctcaatgatttgtataaccattcggactgatgtggcctggtacaagctacgccaaccaacaaaacaatatgctccatggtgtgagcctgtactgaaaacagcaaggcttgctgttagcatcattaccctgttgaaagagcagagtcgtgcctcaaagctttcttttgcagatgtcataagaaaagtagctgaatttgacaaaggaaaccctgcatttatatcttcaaacatcacacttgttgagagatatattgtggtgcatggacagataatactccagcagtttgcagattttccagatgagactatccgtcggagtgcatttgtcagtggtcttttattgaagatggaacagaggaggcatacaaagttagttatgaagaaaaaaactcaagtgatgaggggagagaatctgaatccaagtgcagcaatgggtccagcatcgaggaaaaaagcaatgcgtgcaacaacaaccaggctcatcaacagaatctggagtgattactatgcacatcatttccctgaagattccaaggagggagatggaaatgaaataaaagaaattgatgatgaacaagaagaaaatgaagatgaggatgctgaagatgaaggacagattgaagagaacatctcaaagactcctccatcaacacggtcccggaagttgctatcacaaacttgtaaggaaatcagatgggaaggtgaaacatctgggaaaacattgtctggagaaactctatataaatgtgcttatgttagggaactcagaatacctgttggtggaacagtggctctagaagatgattcaggagacacagtcatttgttttgttgagtacatgttccagaaagttgatggttcaaaaatggttcatgggaggattctgcaaaaaggttcacagacaattcttggcaatgcggcaaatgagagggaggttttcttaactaatgactgcttagaattcaaattagatgacatcaaggaattggtaatggttgatatccaatcaaggccttggggtcacaagtacagaaaagagaattctgaagctgataaagttgagcaggtcaaagcagaagagagaaagaaaaagggccagcccatggtatatttctgcaaaagcttgtactggcctgagaagggtgccttctttgccctctcccgagataaaatgggtcttggtagtggtttatgtagttcttgtgataatatagagccagattctgatgaattgaaaatattctcgaagaccagctttgtctacagaaaggttacatataatgtcaatgagtttttatacataagacctgatttttttgctgaagatgaggatcgtgcaaccttcaaggctggccgaaatgtgggtctaaagccctatgcagtttgtcaaatattgtccatccctgaaggggctggatctaaaaaactcaatccagcatcagcaaatatcagtgctagaagattttacagaccagatgacatttcatcagccaaagcctatgcttctgacatcagagaggtctactatagtgaggatgtaattgatgtgcctgtggatatgatagagggaaaatgtgaggttagaaagaagaacgatcttgcaagttcagaccttccagtgatgtttgaacatgtatttttctgtgaacttatatatgaccgtgccagtggagctctcaagcagttgcctccaaatgttaggtttatgtctatggtgcaaaggacaagtgcgttgaaaaagaacaaaggaaagcagatctgtgagcctgatcaaatagattcaggtaaatggttggatgtgcctaaagagaaccgtctagctactcttgacatttttgctggctgtggaggtttatcagaagggctgcagcaagctggtgtatcttttacaaaatgggcgattgaatacgaagagcctgctggtgaagcatttaataaaaatcatccagaggctgtggtctttgtagataactgcaatgtgattctaaaggcaattatggataaatgtggggatactgatgattgtgtttcaacttctgaagctgctgaacaagcagcaaaacttccagaagtgaacattaataatcttccagtccctggcgaagttgaattcataaatggtggtcctccgtgtcagggattctctgggatgaatagattcaaccaaagcccatggagtaaagttcagtgtgagatgattctagcattcctctcattcgctgagtatttccgtcccagattctttctgttagaaaatgttcggaactttgtttccttcaacaaagggcagaccttccgtttggcagttgcatctcttctggagatgggataccaggtccggtttggaattctagaagcaggggcttttggtgttgcccagtccaggaaaagggcgtttatttgggctgctgcacctggagagatgcttcctgattggccagagccgatgcatgtgtttgctagccctgagctgaagataacactgcctgatggccaatactatgcagctgcaagaagcactgctggtggagcgcctttccgagcgattactgttagagatacaattggggatctgcctaaagtgggaaatggtgccagcaaactcacgcttgagtatggaggtgagcccgtgtcttggttccagaagaagataagagggaatatgatggtactgaatgatcacatatctaaggagatgaatgagctgaacctaataaggtgccaacacattccgaaacggccgggttgtgattggcatgacctaccggacgagaaggttaagctgtcaaatgggcagatggctgacctgataccttggtgcctgcccaacacagccaagaggcacaatcagtggaaaggactgtacgggaggctggactgggaaggcaacttccccacatccgtcactgatccccagccaatgggcaaggtcggcatgtgcttccaccctgatcaagacaggatcatcacagtccgggaatgtgctcggtcacagggctttcctgacagctatgaatttgcgggcaacatccagaacaagcaccggcagattggcaatgccgtgcccccgcctcttgcctatgcacttgggaggaagctgaaggaagccgttgacaagcgtcaggaagccagcgcaggcgtgcctgcaccatgagaagttttccttccatcaaaccatgacccatgaagctaagcgctgaggtcgtccttgaggaccagttaattttggttttatcagtcttaatgcactcctgaatgtatatgttagagaagtgtcgattgctgattgttaccctgattcagggtagcggttatatctaaaaacttgagaaaatctagtgtactctagttgccatgtgttccattttgttggctctaaactttcaactagttttggtgattaatgacaacatgagattaacttaaaaaaaaaaaaaaaaaaaaaaaaaaaaaagtactccgcgttgttaccactgctnnnaaaaaaaaaaaaaaa

SEQ ID NO: 627 - DNA, 758 bp, Zea mays
  Clone ID: TF_ZmC3042_3
ccggccgggcgcccacacaattgaggggaagtgtgttgtccactctttcaagaactataccaggcttgacaatgttgggcctgaggacttcttctgccgattcgagtacaaggcggccaccggttcgttcacccctgaccgcgtggcagtgaattgcaaatgtgagatgccgtacaaccccgaatgacctcatggtgcagtgcgatgcttgcaagcactggttccatccatcttgtgtggctatgaccattgaacaggccaaaaagctagatcactttgtttgctcagactgtttcaaagaaaatggttcaaagagactttcaaatgcatatgccacttcaccaaattttgagcctaaggctgaaccaaaaaggcagaggaggtaacaaactgtgagtggtaacatccatatgggtaaggggagatgtgctgcttctgtggtgaatcagcccttgccctttgctgtggtgagagcagaggtgtacagtgtactagaccagtgtttgctgttaggggaacgggttttgttcgatgtgtagaccgtgtggcatggcatgcagttgttggtagaggtcaaaagaacagtcgttgtgttcacttggtcagcttagcgccttagcccttgttaatgtgttaatgcactgtgttaactcagcgagccccccttgtggctgataatgcaagtcatgcagttgttgatacaaaaaaaaaaaaaaaaaaaaaaaaaaaaaaaaaaaaaagggcggccggacgcgtgg

SEQ ID NO: 628 - DNA, 3010 bp, Zea mays
  Clone ID: TF_ZmC29757_1
cgcgtccatttctcagattgacattccacccgttttcctgtcactcttcaacgcaccccgtatccggggggtccaggatttgccaaactttggaacacccttacggttaacctttgatcctgagctgtccaaaagtgatctcggtgaaataatcttcgataagatggtagaaacagttttcccctggtgccatgccaacagagaactattgcctggatacgacactctcttgaaaatttgttgcaagcttggtgaaagcaagatcatcctctgtgaagagggtagtaagcacaagttgcagaaggttcagcttaactatccaagtgacgatgtgacatttgccctcaaggaatccccagatcttccttggctatccaagtacttgtgaggttcatattacattaaccattaattcctggcgttctgttgcatttctgttctctttggaagcaacgattcactttacctgcagaccttgcatacacacgtcccatggtcgatctgcaaaggaaccatcgaaggatgtcggcatggcgctgcacccaagggatcacgcatatttaatcgcacaacaggaacataaaacgttaagaaatatgtacgtctgcaatttcgtctccttcaaactatggtgttgtttgtgttgtattgaactgccgcgtgtgagctgatccaattgttttctattgccatctttcagtaactatatacgaattgttcgttaaacattgacagttttgaataagaaacattgagatatcaaatttgtactttgccggcccctttatggagggagcctgatggcaccttctgggcaaaggtcaggtggtacattatccccgaagagactgcagcaggaaggcagctgcataacttgagaagagagctgtatcgtaccaatgatcttgcagacattgagatggaaacaatccttagacattgttctataatgtgccccaaagactttagggatgctaacgatggaggagatgatgtattttactgtgaatatgagtatgatattcattggcataattttaagcgtttggcagatattggtgatgaacccgagacaaaggaagatcccagtgacgagccttacaatgccagtgatgattataacatttaacagaacatttttcaggtggtactaaaattggaaggccagcaaaccagccacttgttttgcggatagctgtaatttatcttcgtagcgaattcaaggaagggtagaatatatggcctacaaaatggcctaccacgaaaaattcctgagcatgttcggtgccaccaaaagactgagctggagaaggctaaagcaaccctgttattggcaactctccctaagtcattaccttgcagggataaagaaatggaggagatatcgatatttgtaaaggatgcaatctgcaatgaccagtgcctaggacggtgcctttatatacatggtgtacctggtactggcaagactatgagtgtacttgctgttatgaggaggctgagatctgaatttgattctggaacactgaggccatattgttttattgaaattaatggtcttaaattagcatccccagagaatatctacaaggttgtatatgagcagttgagtgggcatagggttgggtggaaaaaggctcttcactatttaacagaacatttttcaggtggtactaaaattggaaagcaagcaaaccagccaattgttttgctgatcgatgaacttgatcttcttatgacaagaaaccaatcggtgttgtataacattcttgattggcctaccaaaccaaattcaaatctagttgttataggtatagcaaacacaatggatcttccagaaaagttattgcctcgtatatcaagtcggatgggtatccaacgactgtgttttggtccatacaattatagacaactgcaggaaattataacaagccgtttaaaggggattgatgcctttgaagaacaagctattgaatttgcttctagaaaggtagctgctatgtcaggtgatgctaggcgagctttagagatttgtagacgagcagcagagtttgcagactaccgtgttaaacagtctcgacagtctgcacagaatactgtttctgcaaataaaggtgatggtgttgtttccatgggtgacatagaagctgctattcaggaagtcttccaggcaccgcatattcaagtgatgaagaattgtccaaagtttggaaaagttatcttggttgccatagttcatgagctgtacaaaagtggactaggtgaaataatgtttgataagttagcaacaacagttttctcctggtgccatgcccacagagaactattgcctggatacgacactctcttgaaaatttgctgcaagcttggtgaaagcaagatcatcctctgtgaagagggtaccaagcacaagttgcagaaggtgcagctcaactatccaagtgatgatgtgacatttgccctcaaggaatctccagatcttccttggctatctaagtacttgtgaggctcttattgcattaaccattgattcctggcactctgttgcctttctgttctctttggaggctagacaattctacttcacccgcaaacctttcaaacacacatatcccatggtcgatctcctggtcactctagcctcgtatctgcaaaggaaccggcgaaggatgacggcatgtcgctgcacccaacggaacgcgtcacactaggaacgtaaaacgttagaaacatgtacgtctggaatttcgtccccttcatgactggatacgtatgtatccacttcaacccatgtagtttggagtggtttggtatgtattttaaactaaactctatattaaaccactctaatccatatcgattgaggtgaatatgcatgcgtccatatgttgtaactgaactgccgcgtagtgagatttagtaactatatatgaatggtttgttacaataacattgcgagttttgaataagaaacattgagatatcaatttgtaaaaaaaaaaaaaaaaaa

SEQ ID NO: 629 - DNA, 3021 bp, Zea mays
  unsure (1)..(3021): unsure at all n locations
  Clone ID: TF_21213068
cccacgcgtccggnnnnnnnnnngaaacatttcctctctctctctgacgtcttaactcggatcacgagttgaaatttgtgtcggggacaagccatgaacaacgcaaccaccagttgttaactaaccctcttttaaacttcaagcaaccaaagccaagagcagaaatggttttccaaaagagnnnnnnnnnnnnagagatggagtcgtgcggtggaggccaagtcccggagatgccacgcgttcccaagtccgcgaggggcaagagatcggtcaggaagaaggaggcccagagcccggcccagatgtctgcattcgaccttctcgcgaccgtggcagggaagctgtttgnnnnnnnnnnnnnnnnnnnnnnnnncacgagcgccggtgccccggccttggctgcgtgcgcaaaggatgccctggtgaagcaggagcagtgtgatgagcaaatgaagctgttcaagcatgaggcgacggatcaggatagctgcaatgagagtgcaatcctnnnnnacattgtgctccagcgggtggtgaataatgctaggaatgaggatcctaaggcgaagtctgaggtccaggacaaggaatcctccatgatcagctatacgaaggctgnnnnnnnnnnnnnnnnnnnnnnnntcgcagacaggtggtcgcctgaatccgtggaatcaggagcctgcacaggagatgcagtggcgagactgatgatgacggccccggcaggatttcataagaatgcacccgaaatgtatagtttgcttgattcaatggatgtggatgtcaagccgcctcctttggtcagctctgacagcaccggcgagatgccattgcatggcgataaaattcaccgctcaacctccttaccgaggggcccnnnnnnnnnnnnnnnnnnnnnnnnngatagannnnnnnnnnnnnnnnngtcctcagggtgcactcatccgagcaccgccactaacaaggatttcacatccaattgtaaagctgagtataatagggtaaggaagctgctcactagtaagcacaggaaagttgctccagcgaggattcacaaatctgatctttcctatagtgatgtcgagcggaagccttctttccggtacnnnnnnntgcatacacgacagaggacacaaaggagtacattcaagcggaggaagctctttgatcgccatttagctctagcatctgaatttggtacagcaaatggaaagggaaacacaaaggttgccggaagaaactccaatgctgtgtctttggaagcaaacaaggggactaattcaatgccattccagaaatcttgtgggtcaaatgattgctatgtgaaacttagaattaagtcttttaacgtgcctgaacttcttgttgaaatcccagacagtgcaactgttggctcactaaagaaaactgttctcgaggcagtgactgcgattcttggaggtggcctacgtgttggtgttcttcaccatggaaagaaagtcagagatgatagtaaaacgttaattcaggctgggattggtcaggatgatatgctggacaaccttggcttttcacttgaacccaactgtactcaaaacccacaagtccaagctcctgaagatgtcaatttcctcgaaaacattgatactaccgaacccctcgcaaggatcacacctgctgactcgtcttctaagcttggtgaagttgacgtatcacaggagcttgcattaaccccattagcaatgaactaccagggcagtgatcatgattccgtgcactcccctggggctgtctcgtcgcgcgataaagactcgcgagccttatttctggttccagctgcagatcccaatgcaggagctgtagttccagcaaataagactaagaggtcaccagagcagggacaccgcagaatcaggcggccgttctctgttgctgaagtagaagcacttgtgctcgcagtcgaaaagcttggaaccggaaggtggcgagatgttaaacttcgcgcttttgacaatgcaaagcaccgtacctacgttgaccttaaggacaaatggaagacgctggtacacacagcgagcatctcgccgcagcagcggcgtggcgagccggtgcctcaggagctgctcgaccgggtcctggcggcccaggcctactggtcccagcagcaagccaagctccagccgaagacgccctcgctggctgaggctcgcttgctcacccaataattcgatgatcccggctgatggcctcctctgaggccgttgcagcctttgtataannnnnnnnnnnnnnnnnnnnnccttcacaggannnnnnnnnnnnnnnnnnnnnnnnnnnnnnnnnnnnnnnnnnnnnnnnnntacaagaagcattgaccgatttgttgtaatatctactcaccaccggttattctttaagccaggattctctctccttgtgaatttaaccaaaggaaagggcatttctttggcaattgtacattttgatgatggaagaagaagatgatccatgaactgagatctgcagtgtctcctactaatggctcacaannnnngcaattgtgattaagaaattcaaggtgctgcttgaccaagctcggctccggcttccagnnnnnggattctcttgcgnnnnnnnnnnnnnnnnntcttttttacagcagaagctgagagccgaacagtgtatttggcttgaattgcagcctatatagtttcatccactcatacagacggccacaaatgccgtaaaaggagggtagcttcttttgctgagtctagtcttgggagcaaagctcaggaccgaagtctagacttgagacggagcgngggccaaagcggcacccgaatgaaagcttcagattcttttgttcagttaaattcattctttggtagtggagactgacggaaggataggagattaggtggggtggttgtcgattacacacgataannnnnnnnnnnnnnnnnnnnnnnnnnnnnttgtattaatgtactatattattttaccaatcttgtagttaccctcaaatttgtaattggt

SEQ ID NO: 630 - DNA, 2503 bp, Zea mays
  Clone ID: TF_ZmC9036_2
ggatcctaaggcgaagtctgaggtccaggacaaggaatcctccatgatcagctatacgaaggctgaattgggttgtaattttggtgtgatcgcagacaggtggtcgcctgaatccgtggaatcaggagccttcacaggagatgcagtggcgagactgatgatgacggccccggcaggatttcataagaatgcacccgaaatgtatagtttgcttgattcaatggatgtggatgtcaagccgcctcctttggtcagctctgacagcaccggcgagatgccattgcatggcgataaaattcaccgctcaacctccttaccgaggggcccaaagggggtggggttttttgctgtagatagagatgatgacgacgacaagtcctcagggtgcactcatccgagcaccgccactaacaaggatttcacatccaattgtaaagctgagtataatagggtaaggaagctgctcactagtaagcacaggaaagttgctccagcgaggattcacaaatctgatctttcctatagtgatgtcgagcggaagccttctttccggtacaaaaaaatgcatacacgacagaggacacaaaggagtacattcaagcggaggaagctctttgatcgccatttagctctagcatctgaatttggtacagcaaatggaaagggaaacacaaaggttgccggaagaaactccaatgctgtgtctttggaagcaaacaaggggactaattcaatgccattccagaaatcttgtgggtcaaatgattgctatgtgaaacttagaattaagtcttttaacgtgcctgaacttcttgttgaaatcccagacagtgcaactgttggctcactaaagaaaactgttctcgaggcagtgactgcgattcttggaggtggcctacgtgttggtgttcttcaccatggaaagaaagtcagagatgatagtaaaacgttaattcaggctgggattggtcaggatgatatgctggacaaccttggcttttcacttgaacccaactgtactcaaaacccacaagtccaagctcctgaagatgtcaatttcctcgaaaacattgatactaccgaacccctcgcaaggatcacacctgctgactcgtcttctaagcttggtgaagttgacgtatcacaggagcttgcattaaccccattagcaatgaactaccagggcagtgatcatgattccgtgcactcccctggggctgtctcgtcgcgcgataaagactcgcgagccttatttctggttccagctgcagatcccaatgcaggagctgtagttccagcaaataagactaagaggtcaccagagcagggacaccgcagaatcaggcggccgttctctgttgctgaagtagaagcacttgtgctcgcagtcgaaaagcttggaaccggaaggtggcgagatgttaaacttcgcgcttttgacaatgcaaagcaccgtacctacgttgaccttaaggacaaatggaagacgctggtacacacagcgagcatctcgccgcagcagcggcgtggcgagccggtgcctcaggagctgctcgaccgggtcctggcggcccaggcctactggtcccagcagcaagccaagctccagccgaagacgccctcgctggctgaggctcgcttgctcacccaataattcgatgatcccggctgatggcctcctctgaggccgttgcagcctttgtataaagtcagtaagtcagtcagtcccttcacaggaggtttaatgaaaatataatattaggggaaaaaataatgcatatataaggtacaagaagcattgaccgatttgttgtaacatctactcaccaccggttattctttaagccaggattctctctccttgtgaatttaaccaaaggaaagggcatttctttggcaattgtacattttgatgatggaagaagaagatgatccatgaactgagatctgcagtgtctacctactaatggctcacaatttttgcaatgtgattaagaaattcaaggtgctgcttgaccaagctcggctccggcttccagtttttggattctcttgtgaagaagttgctgcctcttttttatacagaagctgagagccgaacagtgtatttggcttgaattgcagcctatatagtttcatccactcatacagacggccacaaatgccgtaaaaggagggtagcttcttttgctgagtctagtcttgggagcaaagctcaggaccgaagtctagacttgagacggagcgggggccaaagcggcacccgaatgaaagcttcagattcttttgttcagttaaattcattctttggtagtggagactgacggaaggataggagattaggtggggtggatctttggttccctttttctttttttcttctattattacattattagttgtattaatgtactatattattttaccaatcttgtagttaccctcaaatttgtaattggtgaaattaacaaaattgaaggaaatacatttctaccccttcgct

SEQ ID NO: 631 - DNA, 2935 bp, Zea mays
  Clone ID: TF_ZmC9036_4
cccacgcgtccggaaaaaaaaaagaaacatttcctctctctctctgacgtcttaactcggatcacgagttgaaatttgtgtcggggacaagccatgaacaacgcaaccaccagttgttaactaaccctcttttaaacttcaagcaaccaaagccaagagcagaaatggttttccaaaagaggtcgtcgtcgtcagagatggagtcgtgcggtggaggccaagtcccggagatgccacgcgttcccaagtccgcgaggggcaagagatcggtcaggaagaaggaggcccagagcccggcccagatgtctgcattcgaccttctcgcgaccgtggcagggaagctgtttgacgagggggcggggtcgctggggaacacgagcgccggtgccccggccttggctgcgtgcgcaaaggatgccctggtgaagcaggagcagtgtgatgagcaaatgaagctgttcaagcatgaggcgacggatcaggatagctgcaatgagagtgcaatcctcccccacattgtgctccagcgggtggtgaataatgctaggaatgaggatcctaaggcgaagtctgaggtccaggacaaggaatcctccatgatcagctatacgaaggctgaattgggttgtaattttggtgtgatcgcagacaggtggtcgcctgaatccgtggaatcaggagcctgcacaggagatgcagtggcgagactgatgatgacggccccggcaggatttcataagaatgcacccgaaatgtatagtttgcttgattcaatggatgtggatgtcaagccgcctcctttggtcagctctgacagcaccggcgagatgccattgcatggcgataaaattcaccgctcaacctccttaccgaggggcccaaagggggtggggttttttgctgtagatagagatgatgacgacgacaagtcctcagggtgcactcatccgagcaccgccactaacaaggatttcacatccaattgtaaagctgagtataatagggtaaggaagctgctcactagtaagcacaggaaagttgctccagcgaggattcacaaatctgatctttcctatagtgatgtcgagcggaagccttctttccggtacaaaaaaatgcatacacgacagaggacacaaaggagtacattcaagcggaggaagctctttgatcgccatttagctctagcatctgaatttggtacagcaaatggaaagggaaacacaaaggttgccggaagaaactccaatgctgtgtctttggaagcaaacaaggggactaattcaatgccattccagaaatcttgtgggtcaaatgattgctatgtgaaacttagaattaagtcttttaacgtgcctgaacttcttgttgaaatcccagacagtgcaactgttggctcactaaagaaaactgttctcgaggcagtgactgcgattcttggaggtggcctacgtgttggtgttcttcaccatggaaagaaagtcagagatgatagtaaaacgttaattcaggctgggattggtcaggatgatatgctggacaaccttggcttttcacttgaacccaactgtactcaaaacccacaagtccaagctcctgaagatgtcaatttcctcgaaaacattgatactaccgaacccctcgcaaggatcacacctgctgactcgtcttctaagcttggtgaagttgacgtatcacaggagcttgcattaaccccattagcaatgaactaccagggcagtgatcatgattccgtgcactcccctggggctgtctcgtcgcgcgataaagactcgcgagccttatttctggttccagctgcagatcccaatgcaggagctgtagttccagcaaataagactaagaggtcaccagagcagggacaccgcagaatcaggcggccgttctctgttgctgaagtagaagcacttgtgctcgcagtcgaaaagcttggaaccggaaggtggcgagatgttaaacttcgcgcttttgacaatgcaaagcaccgtacctacgttgaccttaaggacaaatggaagacgctggtacacacagcgagcatctcgccgcagcagcggcgtggcgagccggtgcctcaggagctgctcgaccgggtcctggcggcccaggcctactggtcccagcagcaagccaagctccagccgaagacgccctcgctggctgaggctcgcttgctcacccaataattcgatgatcccggctgatggcctcctctgaggccgttgcagcctttgtataaagtcagtaagtcaagtcagtcccttcacaggaggtttaatgaaaatataatattaggggaaaaaaagaatgcatatataaggtacaagaagcattgaccgatttgttgtaatatctactcaccaccggttattctttaagccaggattctctctccttgtgaatttaaccaaaggaaagggcatttctttggcaattgtacattttgatgatggaagaagaagatgatccatgaactgagatctcgagtgtctcctacaaaaaaaaaaaaaaaaaaaaaaaaaacccacgaagaagttcaaggtgctgcttgaccagctcggctccggcttccagtttttggattctcttgtgaagaagttgctgcctctcttttatacagcagaagctgagagccgaacagtgtatatggcttgaattgagcctatatagtttcatccactcatacagacggccacaaatgccgtaaaaggagggtagcttcttttgctgagtctagtcttgggagcaaagctcaggaccgaagtctagacttgagacggagcgggggccaaagcggcacccgaatgaaagcttcagattcttttgttcagttaaattcattctttttttttttttgacacaacacaggtactttaaaatttaaggagatatcattgtcgattacacacgataa

SEQ ID NO: 632 - DNA, 479 bp, Zea mays
  Clone ID: TF_LIB4171-017-R1-K1-A8
aaaaaaaaggggggggggttggcaaaaccacacaaactaatggggttccttgggaccccccttttaacctggttttttataacccacagttttaacaaaagaacaagttttccttggaaaaaaaaatctaagaaaaaggaagagccgggggggggggtttgcccaaaaccctcccctggtgttggtgggggaaccagaaggcctgccctagaagaacccggtttaaaattttttggggaaccgggtgccctttcggtgggggggggaatatgctcgcagggaaaaccagggttttccatttgtccttggggccaacggaggcccggggatttatttgggcgagggcgagggtttaaaagggtttcccctttccagcccaaaggtggtggaccgttcccaccagcgcttaaacctcgcggaaggggaaggcgctcctaaggcgccttggcccggtttaaaacccttgggatttacaaggg

SEQ ID NO: 633 - DNA, 777 bp, Zea mays
  Clone ID: TF_ZmC426700_1
ctcgaggccggccgggccgggaaaagcccctctgcctctctctctctcacctcctgtcccctctcctctccgtgtccggtggagcttctccacctccggccaagatctggaaccagcgagggtgcccggcggttctcatcccggaccccgactctttcctcatctctgcaacctctggatcctccatctgcccccctgcaggatctggaagctgcacccgtcggggggagaagcaagcagcacatccagcccgctcgagctcgctcatccgacctcaccactgagcttccgcaggatcttcacatccccattccattgacaacgtgaaagagaacatgtgacggggctgccaagctacatgccaacgacgccgattgccgaatgccgagacaccgcgcacgctcttgcagataaagatgatcgacgtggtatttgtaccactttgctgtccgtgaaagcccgctatataggtggtgacatcaagtgatcaagattttatggtgcgcaagaggttgggttatagttcccgtggccatcgaattccaactatgccacgtgttccaaactcagctcgggggaaacgttctaccagaagaaagaaagatgagaatgatgatatgtgtgcaatggatttgctcgcaactgtggcaggaaagttactagcagatcaggacaattcatctagcgttcctaataccagtgcagcgaaagctaaaaaaaggaaatcagttaaggaagaacactttgatgaaattccgctctaaaaaatgtggctat

SEQ ID NO: 634 - DNA, 1859 bp, Zea mays
  Clone ID: TF_ZmC1435_1
cagtattagagtcactaacagtgaaatcaaatatgctagcaaaaattcctgagtgtggatcttatggaatacaccatgcaggctcctcaagttcagcagagcctgaacaagtgcatcaagctgaacctaaagtgagcagaagacaagcagatggacatcctgtggcttatggtatatttaactccgtggatgtggatggcaaacctccggctttggttagttctgacagtagctcgtgtgttcctctgagcagccatgacaaggaacatcaaacctcttccttgtatcggggtgtagtgcagtatactgcagatagagaagatgatgaaaattcttctgggtgcacgcatccaagcaccatagaaaataagggttgcaaaccacaatatctaggtaaccataggataaggaaattgcttgcctcgaaggtaaggaaggcagcacgtaataagatttgtggagggattccatcaaaaaagatctgtggagggttgtcaaaaaaaggtagcaagctaaacttatgtgggaaaaagatgtccaccacacaccaaaaggtgcaaagaatgattttcaaaaagaaaaagctagcgcaccgtacatcttttgctaaggagatgctaactgaagctagtgggacatcatttgctatggaaggtcaaaataaatcatgtgaagctgagaattaccatgttaagctaagaatcaagtcattcaacatcccagaattgttcattaaggtcccagaaaatgcaaccattggatcactgaagagagctgttatggatgttgtcaatagtataatggaaggcgacctacgcgttggtgttcttcttcaaggaaaagatatccaagacgacaacaagacactttgtcaggctgggatatgccacgataaaaagctaaataacatagacttcacgctggagtgcgagcgtgagcgtgagcctccctctggagtcattatacaagaacagatggatttcctcaccacagatatggtggagccattagctaggatgaagtgtgaggaaccttttcctgaagccgacgtcggagatgacagccagcagcctagagcgccttatcgaagccgctctctctctgacctgtactctgtccattgtcctgttcagatggcttcccaggacacgtcggtgagctcccaggccatcgtccctgtttcgcctgcgccttcagacgtgggcgctctagccattgtgcccctttgtaagtccaaggggtctgaagtcgggcagaggcgcatgaggagacccttcactgtcggcgaggttgaggcgctggtgggagcggttgagcagcttgggactggaaggtggagagctgttaaaacgcttgcattcgacagtatagatcaccggacctacgtcgacctcaaggacaagtggaagaccctggttcacactgcgagcatatccccgcagcaacgaagagggcagccggttccacaagaacttctagaccgtgtcctcctagcgcaggcctactggtcccagcagcagcagcaggcgaggctctaggacaagccccgcggcaaggctcctcttcttcctgagatctgttttccctaggagaagggaaagcttgtacttgtgtaaatactgtgcgtaatagaaaacgaggtagaaggggtgtccaaaggaaccagattagtttgtgtgttattgcatactcacaacattgttgttccttttcatgccctgctcgctggtctctgtcgaagccaggggctctctcgcatgtggataaataagggggagagaaccttgcgtggcacttgtaaatggtggcgcaaacttgccgtgttttaataagcctttgacatgtcgctcgaggaacct

SEQ ID NO: 635 - DNA, 588 bp, Zea mays
  Clone ID: TF_LIB3600-034-Q6-K6-C8
tgttcattaaggtcccagaaaatgcaaccattggatcactgaaggtaaacactagatgggcatacagaagttattgctaagcaatcgtgcattcatttggcatcccaatattctttttggtgatgttgttgttaatttactatacagtgtaattgatgaaatctgcaaggttgcaagagcgcacttgagttcatagatttatctttttcattccacagttggtacgctggattcagttgactgtcatgttagatttctgcatttgaggtttattgcaatgtggaataatgagtcttcacaatagttttactggtatacagagcaaataaataatttttttagtaacagtttgtagttcgtctatgcctacagagagctgttatggatgttgtcaatagtataatggaaggcggcctacgcgttggtgttcttcttcaaggaaaagatatccaagacgacaacaagacactttgtcaggctgggatatgccacgataaaaagctaaataacatagacttcacgctggagtgcgagcgtgagcgcgagcctccctctggagtcattgtacaagaacagatggatttcctc

SEQ ID NO: 636 - DNA, 1774 bp, Zea mays
  Clone ID: TF_UC-ZMFLB73193B04_FLI
gtgacagaatttcatggcttctgtattctcctgtatggttatggatatcatgtaggtggcgagatgttaaacttcgcgcgtttgacaatgcgaagcaccgtacctatgttgatcttaaggtaagaactgtcaaatgcttgactttgacttcaactaaagactaaagcaaaaatatctttgctttgcatatactcgtcaaatctgataactagttttcttactgtcctttcctgatttatttattgatcctctcgatttccttctcttttttttttttgccaaaccttttaattgcctgtgaaaaggagtcttttgcatgggtttgtctacgtaatacgtatgctttatgcaaattcctagtgaggttaggttacttggccgatttaatcaatagtttggcacttgtgggttttaggcctactcacctaacaggtgcgtgctgtttctgtgttctttatttgaaagttttctgccagactcttgttcttgaaaaacttgtgtccttgtgattcagttggtgctgttcccacgcatcagctttgtagtttggctgggtcatgttagctttagtaccagaatgcttcacctggaaacaaaggagacccattcttgcacgtcaactaacccgatccggactttggagaaaaaacaagtccagctcagggatcagataacctttcctttattagactggaagcttcttggctgctttgcactgtacattgctgcattctctggtcagattttaacgatgactttgaaagtttgaacaggcaatggattaaccgtgtcgaaattgtggtgcgaacaggacaaatggaagacgctggtgcacaccgcgagcatctcgccgcagcagcggcgtggcgagccggtgcctcaggagctgctcgaccgggtcctggcggcccaggcctactggtcccagcagcaagccaagctccagcctaagacgcccccgctgctggctgaggctcgcttgctcacctaataaattcgatgatcctggctgatggcctcctccgaggccgttgcagcctttgtataaagtcagtaagtcagtcagtcccttcacaggaggtttaaggaagatatattaggaaaaaaaagaatacacatataaggtacaagaagcattgaccgatttgttgtaatatctactcaccaacagatattctttaagccaggattctctctccttgtgaatttaaccaaaggaaagggtatttctttggcaaattgtacatgttgatggtggaagaagaagatgatccatgaactgagatctggggtgccattgctcacaatttttgcagttgtgactgagaaattgaaggtcctgcttgaccaagctcggctccggctccggcttttggattctcctgcgaagaagttgttgcctcctcgcagaagctgagagccgaacagtgtatttggtttgaattgcagcctatagtataatttgattcacccgtacagacggccacaaaaagccgtaaagggagggtagcttcttttgttgagtctaggcttgcgagctgggccaaagcggcaccgaaagaaagcttcagattcttttgttcaattaaattcattcttttgttagtggacagtgacggaaggataggacattaggagggatggatctttggttctcttttccttttttttcttctattaaattagttgtactatgttatgtcaccaatcttgtagttaccctcaaatttgtaattgatgaaattaagaaattggaaggaaatgctttcgtacc

SEQ ID NO: 637 - DNA, 3614 bp, Zea mays
  Clone ID: TF_ZmC9036_1
caccccttacgcttcgcctgacgcgtcgcctgacccgtgggtgacagaatctcatggcttctgtattctcctgcctggttatggatatcatgtacgtggcgagatgttaaacttcgcgcgtttgacaatgcgaagcaccgtacctatgttgatcttaaggtttgatctgacaaaagcttggctttgacttaaacgctatcgtagaaaaagaatatattctcttttggcaaaaccccccaaaaatggaaacacacaccaagctactgtcctttcctgatttatttattgaccctctcgattgccgccctttttttttttttttcctaaatatcttccttaaacgagtataaattcggcacgagggaaaaaaattggcggagggcggagaggatagcaaggagggtgaagggggaaaagggtaataaaaataaaggaggaggggagaagcaagacgaggaggaagagggagcaccccaaagtaggggagggggaataattccgcaggggctgagggatctcggcgagtccggccgcggagcagcgcagcgaggcggcgatccgagggcgatcggaggcgggcgggcgtagacgccggcgagatttgtgttggtgacaagccatgaacagcgcaaccaccagttgttaagtaaccctcctgtaaacttgaagcaaccgaagcggagagcagaaatggtgttccaaaagaggtcctcgtcagagttggaggcgtccggtggaggccaagtcgcggagatgccgcgcgttcccaagtctgcgaggggcaagagatcggtcaggaagaaggaggcccagaacccgccccagatgtcagcattcgaccttctcgcgacggtggcagggaagctgcttgatgagggggtgggctcgctggggaacatgagcgctggtgccccagctttgactgcatgcgcgaaggatgtccgtgtgaagaaggagcagtgtgacgaggaaatgaagcagttcaagcatgaggtgacagatcaggatagctgcaatgagagtgcaattctcccgcacattgtgttccagcgggcggtgaataatgctcggaatgaggatcctaaggcgaagtctgaggcccaggacaaggaatcctccatgatcagctgtaccaaggctgaactgggttgtaattttggtgtgattgcagataggtggtcgcctgaatccgtggaatcaggagccttcacaggagatgcagtggcgagcctgatgccacctgccccagcaggatttcataagaatgcacccgaaatgtataatttgcttgattcaatggatgtggatgtcaagcctcctcctttggtcagctctgacagcaccggcgagatgccattgtatggcgataaagttcaccgctcaacctccttaccaagggtctcgaagggagtggggtttttttgctgtagatagagatgatgacgacgataagtcctctgggtgcactcatcccagcaccaccactaacaaggatttcaggtccaattgtacagctgagtatagtagggtaaggaagttgctcaccagtaagtacaggaaagttgctccagcgagggtttacaaatctgatctttcctatagtgatgttgatcggaagccttctttccggaacaaaaaaatgcattatacacgacagaggacacaaaggagtacattcaagcgtaggaagctctttgatcgccattcagttctagcatctgaatttggtaccgcacatggaaagggaaacacgaagaaggttaccggaagagactcccatgctgtgtctttggaagcaaacaaggggactagttcaacgccattccagaaatctcgtgggtcaaatgattgccatgtgaaacttaaaattaagtcttttaaggtgcctgaacttcttgttgaaatcccagaaagtgcaactgttggctcactaaagaaaactgttctcgaggcagtgactgcgattctcggaggtggtctacgtgttggtgttcttcaccatggaaagaaagttagagatgataataaaacgttgattcaggctggtattggtcaggaggatatgctggacaaccttggcttttcacttgaacccaactgtacacaaaacccacaagtccaagctcctgaagatatcagtttcctggaaaccattgatactgctgaacccctcgcaaggattgcacctgctgactcgtcttctaagcatggtgaagttgacctatcacaggagtttgcattaaccccattagcaatgaactaccagggcagtgatcatgattctgtgcactcccctgggggcgtctcatcgcccgataaagtctccacaaactcgcgagctttagttccagttccagctgcagatcccaatgcaggagctatagttccagcgaataagtctaagaggtcaccagagcaggggcaacgcagaatcaggcgcccgttctctgttgctgaagtagaagcacttgtgctcgcagtcgaaaagcttggaaccggaaggtggcgagatgttaaacttcgcgcgtttgacaatgcgaagcaccgtacctatgttgatcttaaggacaaatggaagacgctggtgcacaccgcgagcatctcgccgcagcagcggcgtggcgagccggtgcctcaggagctgctcgaccgggtcctggcggcccaggcctactggtcccagcagcaagccaagctccagcctaagacgcccccgctgctggctgaggctcgcttgctcacctaataaattcgatgatcctggctgatggcctcctccgaggccgttgcagcctttgtataaagtcagtaagtcagtcagtcccttcacaggaggtttaaggaagatatattattaggaaaaaaaaagaatacacatataaggtacaagaagcattgaccgatttgttgtaatatctactcaccaacagatattctttaagccaggattctctctccttgtgaatttaaccaaaggaaagggtatttctttggcaaattgtacatgttgatggtggaagaagaagatgatccatgaactgagatctggggtgccattgctcacaatttttgcagttgtgactgagaaattgaaggtcctgcttgaccaagctcggctccggctccggcttttggattctcctgcgaagaagttgttgcctcctcgcagaagctgagagccgaacagtgtatttggtttgaattgcagcctatagtataatttgattcacccgtacagacggccacaaaaagccgtaaagggagggtagcttcttttgttgagtctaggcttgcgagctgggccaaagcggcaccgaaagaaagcttcagattcttttgttcaattaaattcattcttttgttagtggacagtgacggaaggataggacattaggagggatggatctttggttctcttttccttttttttcttctattaaattagttgtactatgttatgtcaccaatcttgtagttaccctcaaatttgtaattgatgaaattaagaaattggaaggaaatgctttcgtacccaaaaaaaaaaaaaaaaaaaaaaaaaaaaaaaaaaaaaaaaaaaaaaaaaaaaaaaaactcgagagggggccgcgggtacc

SEQ ID NO: 638 - DNA, 254 bp, Zea mays
  Clone ID: TF_LIB3245-450-P1-N1-F8
acaaaaaaaactccctaaaaccccctggaaaggccccgcctgacttactgcctttatccaaggcctcaaacgccctcgggggagcccatcaccccggaccatcgaatttattaggggaccaagcaaccctaaaccaccaggggggccgtttaagcctgaaccttggtttgctgttggaaccaaaaggcctggccccccagaacccggtcaagcaattcctgaggcacccgttcccccccccttttttgcgaaaa

SEQ ID NO: 639 - DNA, 396 bp, Zea mays
  Clone ID: TF_jC-zmX3061005Q1K1D06b2
ccccgggggactagttcaacgccgggccttttaacacgggggggcgatgattgccatgggaaacttaaaattgagtcttctacggtgcctggactgatagcgaaattccagaacgcgcatctgttggatcactaaagaaaactgttgtcagggaagtgactagcgatcttggaggtcggctacgagttggtgtcctttacacatggaaagaaagttagagatgataataaatccgtagattcacgctggtattggtcaagaggatatgctggacaacctaggctcatcacttgaacccagctggacacgcaacccacaagtcccagctactggagacattaactacccggaagccattggtactgctgaacccccttccaggattggacctgctga

SEQ ID NO: 640 - DNA, 440 bp, Zea mays
  Clone ID: TF_ZmC73462_1
gtgcaccatcaggcgccacgtggacctggagactggtgaggtccaggctggactggtgggtccggcagctacgcctcggcgaccgagttctaccgcgacctgctccttctgtgcgccaacgcgctggtcttctacccgcgcggctcgcccgagcgttccgccgcggcgcggacgcgcgcgctcgtcgccaagcacatgtccaaggatcagccggggccctcggggaaggctgtcgcggggccggcggcgtccaagaaggccaaggcggaggccgacgttgggtcgctgctggagaagacggcgcccatcatcgtgtgccggaagcggagctctatcgccaaggccgccgcggcggccaccgccaaagaggagagatcggagaaggcggagtccgacaaggagggcgagaagcagcaggaggcggtgggcaagaggaaggc

SEQ ID NO: 641 - DNA, 406 bp, Zea mays
  Clone ID: TF_LIB3279-203-Q1-K6-H9
ggtccctgcattctcgtgcgcgcaccactgtgatgcctgagcggggcctgttctctcatgcgtataagaagtactcatcacttgtggagccgcttaatgaagcacaagtttggtttgggtgttcaacaagccttgttgatgcagctacacttggtttgcgtgatgattatactattatcaagcacccaatggatcttggcacaataaggaggctggtgacccgctggctgaccatgaaccctcacgagttagctgaggatgtgcgcattactagccataacgggaggacatataatcccacgggtcctgttgtacattttatggtgaaacaaaagttatgaatctttgacgcacagtggatctgagaattgaggctgacgttaactacctattattatgttctcca

SEQ ID NO: 642 - DNA, 2333 bp, Zea mays
  Clone ID: TF_ZmC1240_1
gatttacggaaatttcctataaaaataatttatctttattaggcttctttggtggggctctcagttggcaagggacttctatattacccagcgtccggcttgccggattcctccctcacacatggttgtgttgggtagttcgcagccggcctggagcgccccaagcaccacaagaagaaacataggtccctagaatctcgtggcgcagactttgatgccgagcggcgcctgtactctcatgcgttcaagaagtcctcatcacttctgagccgcttaatgaagcacaagtttgggtgggtgttcaacaagcctgttgatccagttacacttggtttgcatgatatcaagcacctggatcttggcacaataacggcttagccgtggacagtacaggaaccctaaggagtttgctgaggatgtccggcttactttccataatgcgatgacatataatcccaagggtcaggatgtgcattttatggcagagcagttgtcaggaatcttcgaggcacagtggcctgagattgaggctgaggttaactaccttgcatcgtgtcctccattgccgaagaagtttccacctccaccaattgacctgcacttcctagagaggtcagattcgatgagacaccacatggcattggacaccaattcaagaccgatcagtcatactcccacttacacccggactccatcaatgaagaaaccaagagcaaaggatccaaataagagggacatgacaatagatgagaagcgtaagcttagtgagaacctccagaatttgccgccggtgaagcttgatgctgttgtgcaagtcattaagaacaagaacttatcagttaagcaacatgatgatgagatagaggttgaaattgatagcatggatgctgagacactttgggagcttgacaggtttgtgtcgaactacaagaagaacctgagcaagcaaaagagaaaggccgagcgagcgatgcttgcccgacaagatgcagagttgcgtgcacagcaccctatacaacaaccacaaccaaccccagtcccccaagaaccttttggtgaaaaatctccaaaacaagttgtgaaagattcgctggaaggcgagcaactgccagcatctgcaccagaacaaaatggtgagaatagacagaatgcgagtagttcaagcaattcaagcagctccagcagtggctcaggatcatcttctagtggctcagacagtgatagctcctcttcagatggatctgatgctggcaattcatcttgagatataggttcagaagttctgtcgagtaggcaataactgcctatttgacgcgacaatagcaccataagattgtacatgcttaccttgtctggcttagggaacccctgtagtttaagtaggttttgtatgtcgattcacccgctgatgaaggcagtaacttgtaggtttcgtggtgtacccgcctaataagactaggcttgttgctgacaccgtcccttggtacaccgcacttttgctaggagccctctggctggcccagacagtactagcatgtacattagcggcagcttgaacgctgattttgtttagctgtgttgattgcagtatgtaggaaggcgactgctgtatgcatttttttcttacttttgtttaacttacggatgaaagcattggcaagccccgttggtgttcagtttgcccccatctttttgtggactacctgtaacccctgtgggttcatcgccatgtgccaagtctttttgatgttgtaaattaaagtttgttgatgcatctgatgtttagcatcacgactattgacggtccattgttatgttatgatgtgaggaatgtttgctggaaaaaaaaagaaaaaaaaaaaaaaaaaagaataggtggttgtgttgggcacgagcacgagagatgatgtgtagcagttcggacctttgggtgggtagcagtaggtagcctcccctcctttcccctggtctggtgatgatggtttgttggagatgtggctatatgtgcgtatgatatgccgtggctccttttgagctgtttgctggctggcgtcttccagcgatggataatacgtgaaggctgggctgcgacggcctccagcatgcagtcagttgaagtgaagtgtacgtgtggatgttccgtctgttgggtgtgccttcctttggcactgtacgtttggttcgtcagctcaggtgtctggtctacgaggagcaatgtagtaaaggcagcaggctgttcgtattggttatttggaagtagtagggtcagcataatggaggggatcgaaggggccaaaataacttaggctaaaacaacatagtacctctgtttt

SEQ ID NO: 643 - DNA, 535 bp, Zea mays
  Clone ID: TF_ZmC209461_1
ggttctagatcgcgatctagaactaggggccacgcgtccgctcttgttctctattccctcttgggctttctgttttccatattattcttttttctcatggttcgcagaactagattaatatgtgagttggttttggttattcgcatggaggttaattgctattggtgaaggttgacgtgtcaaacatcctacatgacccacagcaatgcagaaacattctttggtatgaagcaatatgaattacagattttgtgtcatcattctagatacctgactatcatggcattataaagcatccaatggattttttaacaataagaaagaagcttgataagggggatattcctacttgaagcgatttgagaagactcttggtcatcatacatgctgttgtaaatgccagattgtccaaggacagttctgtggggattctttgtacatgagatatggtgagaatgtggtagaggttaagaagaatcctaacaggatatgtcaaggttggcgcggcatctataattgcaggatatgcagaact

SEQ ID NO: 644 - DNA, 159 bp, Zea mays
  Clone ID: TF_700223701H1
gatgattctcgagaaacttcaaaagaaggatacatatggagtgtttgcggacctgtggatccagaggagctgcctgattaccacgatgtgattgagcacccaatggacttcagcaccgtcaggaagaagcttgccaggaatgcatatcgctcgttcgag

SEQ ID NO: 645 - DNA, 403 bp, Zea mays
  Clone ID: TF_LIB5116-027-A1-PF1-E10
agattataatgacattatcaagcacccgatggaccttgggaccatcaagaagaagctagattctggttcctacgcaagtccatctgattttgcagctgatgtcaggctgacttttaacaatgcgataacttataatcctcgagggcatgtagtgcatgatctggccattcaactgaataaaatgtttgagtccagatggagaacagttgagaagaagttagctactgccgccactaagccacatgttgaggttgataaggccgactcaaagaggagaaagacccctcccgtggaacgcagtaacttgtcaatagaccgtgtcaggccaactgagattgtgaagccaaagatgacaaaagaggagagagaaaccttgggagactgcttaacttctttggccgag

SEQ ID NO: 646 - DNA, 1021 bp, Zea mays
  unsure (1)..(1021): unsure at all n locations
  Clone ID: TF_ZmC2164_1
ggggaaaagaaagacctggnaagattttgaggagcgaagagaaagccacaagcaaggctctttgatgctacgatatatgcatcaaggcaggaggatcatctaaaggcaaaaaaagaaaaacaagaaaaagaaaaaacatgaattcaaagatgatgacttacttgatcacaggccatacagaaatgacaggagggtacctgaaagacatcgagcactaaaacgatctagtccagctcctgtggttggatatgcatcatctgccaagcgtcgcagaggaggagaggttgagctctccaacatattggaaaaagtagttgatcacttgcggggtttgagtggatcactgctgtttttaaaaccagtgacaaagaaagaagcttctgattaccttgatatcatacggtacccaatggatcttggtaccatcagggacaaggtgagaaagatggtgtacagaaacagggatgaattcaggcacgacgtagcacagatacaactcaacgcacacatatacaacgacactcgctatcctcacatccctccgcttgctgacgagctcatggaggtctgcgaccatctgctttacgaaaacgcagatctgctcaccgaggcggaagatgctatcgagtagcaatataaaaagctagatttagcatttggatcttgctatatcctaacatagatgatgtatctatcttctgatctgtaggaggggaaaaggttgtacattttttgggcctagcagcaatctacatgtgatcccgaatccagccagcttctgttggtattgtgttgagaggtagtggaagtacaaaatgtctaggttagccactcaatggcctcatgttgtaaaaatgtagaatgtaatcatgtccatatacatggcatatatcggtccaataaaccgattgtgttgcagtatttgatatgatatggaatggcgtttcaattgcagcgtgaaaaaaaaaaaaaaaaaaaaaaaaaaaaaaaaaaaaaaaaaaaaaaaaaaaaaaaaaaaana

SEQ ID NO: 647 - DNA, 3234 bp, Zea mays
  Clone ID: TF_ZmC906_1
aattcggcacgagggttcgcatcgcttctggttcgggtctcacctctcgcgatcaaagcagtagcgggttcagtggcttggcgaaggaaaaaaaaggaggaaaaaaaaatagcaaggctgtgcagcgaggagacgactcgactccaactgggaggcgaaaaataaaaaagaggataaggcgaggcccgaccgggcggccaccgcgctcccagatccgctccgctgccgtggagatccagctcccttgcgcgcctgagcgtggacgccggcgtctcgctcccggatcccgaccttggggttgcagctgcttcagatccagcgttaccagatctgtgacccgctggcgcctgggcacatgacaccgacggttttaatggagtttgggcagcagaggccaatgaaacggggatacgaggaaatggtcttcagggcagcctcttcccgtggttatgcagagactgttggcgagtcgggagttgcagctggtagtcctcttcgtgttgattctgaggactcatctgtgccaaagcgcaagtgcatcagcctgaacagcgttggctttgatgtgaagcgggagatcttggtgccctctaagatgtcgtcatctgaacggcggtaccttcgaaagagattccgggcagagcttgattcggtgcgggatctcctcaagaagccagagtttgcagcccctgttcctctcaatcgggcacctgctttgtcatcctcagctgcacctcgagctaagaagccacagaagtctcagcgtggtgggaccaatgttatacgtggtgcaaagggacgattcttgcctacaaaaccgcggccggagacttccactgtgttatctgaagctgcagcgtttaagcagtgtgaagctattttgaagaagcttatgactcaaaagtatagtcatatattcaatgttccagttgatattgtgaagctgcaaattcctgattattttgacattgtgaagaccccaatggatcttggtactgtcaagaaaaagcttgaatctggttcatacacaagtccatcagattttgctgctgatgtccggctgacctttaacaacgctatggcttataatccgcgggggcatgctgtgcacgacatggccatccagctgaacaagatgtttgagagtcgatggaggccaattgagaagaaattggcttctgctgccactgagaaacatgttgaggttgacagggctgactcgaagaggaggaagacacctcctgtggaccgcagtgatgtgtcaatggagtgtgcacgacagacagagccagaaacaccgaagatgacagctgaagagagggaagcctttgggaactgcttggcatccatatctgatgagttacctcctcacatatttgaactgctacaacaatgcatcgacagcaatgcagatttgtctggggatggagagatagagattgacatccatgctgtcagtgatgacttgttatttgagctgaagaaacatgttgacaagtatttgcaagagaaagagcagagccagcaggtgaaatctgagccctccgagaatgaagctgtgaatgtatctggccttagccactcttctacaaatccttgcaaaggcggcgaacctatcgaagaggatgtggacatctgtggcaatgcctcacctatcatgctagacaaagatgcacaaatcaggaatagcaagtgtggtagtccaagtagttccagcagcgactctgaatcatcttctagcgattctgattcaggcagtgactctgaaagcgaatcagaaaaagttggcagccctggaaagcttgcgaaggggactaagaaacctgatcagctggtggagcaagaaaagagtgatgttattagtccagctgatgccaaccgtcctgctgctattgtggggcttcatggggaggacagtgagtcaaagcctgcaccagggggggaaaactcagaacccgatacacaagtctcaccagacaggctattgcgagcagcccttttgaggagccgttatgctgatgtgattgtcaaagctcgtggcattcttagtcagggtggagacaaacaggaggagctggaaaagctacagaaggaagagaaagagcgcttgttggctgaaggtactgcagccatggaggcttgtagagccgaagctgaagctgaaaagaagcgtaaacggaattttgagagggagaaggctcgtcaggccctacaggagatggagagaactgtagaaattaatgataacctccatctcaaggatttggaattgcttggaacagccacaacagaacatattgtaagctctgttgatgagactagtccagaacgctctcatgatggcatggccggctatcatccaggagctgtcaatcctttggagcaacttggactgttcataaaggtagacgatgaggaagacgacgagcagtgttccctgcattaaagaaagaagagaaaggagaaatcagctgatggtgctgtgtttttccatgccctgtcacgggctaggggctggtgccaacctattgatccaaagtgatcacctgttgcgggccatcatgtgtggcaatggttctaaactggggtggtgagagccgtccattttgttaaaaatatgcatgggaaggatgaagatcatcttgcatagtcatttgcttccaggaggcgcacaggaggtggagtaaaaacgaacgtatttatggtgcctagaggacggttttttcagccactgccaaaacggcttgaatgacgccaccgaagtagtggagttcaaatggctcattgtttgccgcaacctcaatttcaagcgggtttgttcagcggcttatagcttcttctctccttttgttgtctcatctgttttagattgtagaatttgggctagttgcttcctgctgtaaatccgaattttgatgtagtgacggaagtgctacctttttgttgagcatgatcgaaaagtttacaagaaaaatcgtttttttgtaaaaaaaaaaaaaaaaaaaaaaaaacctacaaaaaaaaaagaaatcagtgtaacaaccgttgtgtttaaattaaaaaaaaaaacgaattttttgttaagcacgggccagtcgtgactgaaacagcaatttgtttcgcaatcagtgtaacatccgttgtgtttatattctgctcgacaacgagtacggatttaagcacgtgatatcagtgaataagacagacattagggtctaatcgtttttatcaaaa

SEQ ID NO: 648 - DNA, 365 bp, Zea mays
  unsure (1)..(365): unsure at all n locations
  Clone ID: TF_LIB189-003-Q1-E1-D10
gaaaagagctagatataagaagatgattcgccggcatatggacttccgaatgcttcactctaagatcaagagtggcgcaatctcttgcaccaaggagcttctgagagatgtgctcattttcatcaataatgtaataacattctatccgaaggctacattggagcacatggctgcggttgagcttcgtgagtctgcatgcaaaactgtgaagcagagtgcaagcttgttcttgaaaagccatggagagaccggaacagctggtgcccctgtagtaaagaatactcgagtcctgcagcctcgatgcnctggccccggtgatgcaaggccaagcaaggttttcttcaaggacgctactgccaaggaaa

SEQ ID NO: 649 - DNA, 2439 bp, Zea mays
  Clone ID: TF_ZmC20581_1
gttccagttgacattgtgaagttgaacatccctgactactttcaaatagtcaagcagcccatggatttgggtacgatccagaaaaggatgaaggcaggcatgtactctacacctccggaatttgctgcagatgtgaggctcactttcagcaacgctatgaactataacccagctaacaatgatgttcatttaatggccaaaactttgagcaagaactttgagagccgatggaagcttattgagaagaagctccctaaaccagatgagaagcctcctcagccagatgagaagcctcctcaaccagttgagaagcctcctgtgaggaagcccacaaaaaagaattcaactaagagagtttccattgagaaagaagacctcactaagaaaaaaccctcaaagaaaagtgtacctaagcagtacatctttcggggagaagattcagctgacagtccagttctgcaaccaaagaaaaggaaaacctctcctttggtacaagatgctcctttggtaggggatattgttccaaccagaaagagaataatgacgagtgagcaaaaatatgatttaagtgcaagattacagtcatatggtgcattcattccagatcatgtagttgagctcataaggagtcacgctgactattgcgacgccaacgaagaggaattagagcttgatatggatgctctaggtgatgatacactttttgaattactgaggctacttgatgactatgacagagttaacccatcaagaaaccttacagaacaggatcctcatgaggttaagtctcgaagtcaatatgaactcatcaatgcgtcagtgtgtaacgaggaagtaaatgagctctttgacgaggacgttgatattggggagaatgaccctccagttttgacttttactcctttggtacttgaagatgaaacagcagacagaagccgcaaacatagtgcatctagcagttctagtagtgacggagaatcatcctctagtggttctagtagctcttctggaagtgatgccgatgccaaagctgctcaacaaaacagcgggtcaaaggaaaaaattctacctgtggatggcgtgggtcatgaaaaggattcactggacacattaaatttaccagagcaaagtacagaccctgtctctgtttctgcttatggtgagggggggtatgtatctgagaaggtctcccctgagaagcaaatccgagctgcccttctgagaagccgctttgctgatacgattctgaaggctcgcgaaaaggctcttgatcagactaccaaaaaggatcctgagaagcttcgacgcgagagggaggaacttgagaggttacaaagacaagaatttgagagctcggttgcaagctgaggctaaagctgcagaggatgcctgcaagagggctgaagaagcagcagctgctgaggctgctgcagaagctaaacgacaaagagatattgagagagaagcagctcggaaagctttgcaagagatggagagaactgttgacatcaacggagggagccactttctgaaagaccttgaaatgcttagaggtgtcacaggcgaagagatgcccaacttggttggtgaagggagccctgggtttcaactgggaagcagcaacgccctagcaaagctcgggctgtacatgaaagatgacgaagatgacgaggagggcgatttggcagatgcaccagtggtggttgatatcgaagagggagaaatagattaagcgtgcttcttctggaccattttttatacgcgacaggagacctgtgggcatcactgatctgcatagcttttctttggcatacaaagcgacctgacgaaaagatcgcctcgcaccagacctggaggtctggtattcgtttttgtaactgcccaagttttggagccaagtcactaggttcgtcgagcttatcgtttggattgagaatctctggacttctgatatccactttcgataaggacttgttcggttaagaggtgatcgaaggagattggagaggggattggagaggattaaatccctttctagtcaattgaacagaggtagcaactgaataagccctaaaatggaatggcgagtttactgcatatatgatgaggccataaaagcggatgaaaagggaggagaaggcacaaggagtgatatatatgatgaggccataaattcggatgaaatgggagaagagatggggtagtggggagaaggcacaaggagtgatggtgatggctcttgagctggtgccagccgtttttgaggggtagttttagagccatttccgtgtcgtgaatgtaatatcggaaactgtacaaaagttagctagttagacgatggaaatcattctttccttcaatttatgcagtgcctgttcttatgagacgttgcccaaaaaaaaacaaaaaaaaaaaaaaaaaaaaaaaaaaaaaaagaga

SEQ ID NO: 650 - DNA, 286 bp, Zea mays
  Clone ID: TF_700332659H1
aagcacgccgcctacgcctggcccttgtacaagcctgtggacgtggaggcactgggcctacacgactactgtgacatcatcaagcaccccatggacatgagcacaatcaagtctaacctggaggcccgtgagtaccgtgatgctcaggagtttggtgctgacgtccgattgatgttctccaactgctataagtacaaccctcctgaccatgaggtggtggccatggcccgcaagctccaggatgtgttcgaaatgcgctttgccaagatgccggacgagcctgagg

SEQ ID NO: 651 - DNA, 1942 bp, Zea mays
  Clone ID: TF_ZmC1935_1
cacgaacacgcccccccgggctgcagcatcccgctcccagatctgccgaagaaccctaccacccaacgttctagaacttcccctctttccccgcatggacggcctcgtggcgccgtcgccatcccactccggcgccacctccggcggcggggcctcccaccgcaagcggaagctcccgccgtcgtcgctctccgacgccaccggcgacgaggacgacgacaccaccgctccgtcatccccctccacggccccatcctcgccctctcgcccgtcatctccatcttcttcgcactccgacgatgacgacgacgactcgctccacacgttcaatgccgcgcgcctcgacggcgcgccgagtgggggctctgcgtccggccgtcctcctaagccggattcctcatcagtgtctgctgctgcggcggcagccgcggctgcggtgggtggaggacctaagccggagcccggctcggcgaacgccggcgacgggaaggaggacacaaaggggctgttcacggacaacctccagaccagcggcgcgtacagcgcccgtgaggagggcctcaagcgcgaggaagattcaggaaggctgaagtttctctgttattctaatgacggcgttgatgaacacatgatatggttggtagggttgaagaatatcttcgcccgacagcttcctaatatgcccaaagaatatattgtacgccttgtcatggatagaactcacaagtcaatgatggttatcaggaacaatattgtcgtggggggcattacttatcgcccttatgcaagccagagatttggagaaatagcgttttgtgctatcacagctgatgagcaagttaaaggctatggaacaagattaatgaatcatttgaaacaacatgcacgggatgctgatgggctcacacatttcttaacctatgctgataacaatgctgttggctattttgtaaagcagggtttcacaaaggagatcacattggacaaagaaagatggcaagggtacattaaagattatgacggaggaatattgatggagtgtaaaattgacccaaagctgccatatgttgatgtggcaacaatgattcgacgtcaaaggcaggccattgatgagaagatcagagagctttctaactgccatattgtttattcaggaattgattttcaaaagaaagaagctggcattccaagaagactgataaagccagaagatatccctggtctcagggaagctgggtggacgcctgatcaattggggcattctaaatcacgatcatcattctccccggactataatacttacaggcaacagcttactacccttatgcagacagcgctgaagaatctgaatgaacatcctgatgcttggccattcaaagagcctgtggattcacgggatgttccagactattatgatatcatcaaagatcctattgatttaagaacaatgttaagaagagtcgactcggaacaatattatgtgaccctagagatgtttgtagccgacatgaagagaatgttcagcaatgcaagaacttacaattctccagatactatctattacaaatgtgcgacacggcttgaaaacttcttctcgggcagaattactgtactgcttgcacaactctcaaccaagagctaggctggcgtgggctcactggactgggcactactgtcgcatgttgtaaaattattattggctcactggactggacactactgtcgcatgttgtaaaattattaagttgtattgatatagttgtcaccttgctgaatgttcggcacggtgatgaacttttagtttagcatgtagtttttattttaaccaggagggacactgattgatctttacatttcggtctcaacctggccggcctaataatatagattgaggagattcttcagtttctaaaacctatgggtaaagatgttttgcatcctt

SEQ ID NO: 652 - DNA, 1070 bp, Zea mays
  Clone ID: TF_ZmC1935_2
gagaaatagcgttttgtgctatcacagctgatgagcaagttaaaggctatggaacaagattaatgaatcatttgaaacaacatgcacgggatgctgatgggctcacacatttcttaacctatgctgataacaatgctgttggctattttgtaaagcagggtttcacaaaggagatcacattggacaaagaaagatggcaagggtacattaaagattatgacggaggaatattgatggagtgtaaaattgacccaaagctgccatatgttgatgtggcaacaatgattcgacgtcaaaggcaggccattgatgagaagatcagagagctttctaactgccatattgtttattcaggaattgattttcaaaagaaagaagctggcattccaagaagactgataaagccagaagatatccctggtctcagggaagctgggtggacgcccgatcaattggggcattctaaatcacgatcatcattctccccggactataatacttacaggcaacagcttactacccttatgcagacagcgctgaagaatctgaatgaacatcctgatgcttggccattcaaagagcctgtggattcacgggatgttccagactattatgatatcatcaaagatcctattgatttaagaacaatgttaagaagagtcgactcggaacaatattatgtgaccctagagatgtttgtagccgacatgaagagaatgttcagcaatgcaagaacttacaattctccagatactatctattacaaatgtgcgacacggcttgaaaacttcttctcgggcagaattactgtactgcttgcacaactctcaaccaagagctaggctggcgtgggctcactggactggacactactgtcgcatgttgtaaaattattaagttgtattgatatagttgtcaccttgctgaatgttacgcacggtgatgaacttttagtttagcatgtagtttttattttaaccaggagggacactgattgatctttacatttcggtctcaacctggccggcctaataatatagattgaggagattcttcagtttccagccacc

SEQ ID NO: 653 - DNA, 273 bp, Zea mays
  Clone ID: TF_700447086H1
ttctctgtctgtagtgaggatcaggaagctattcaggcacagaaaatttggaagaaagccatcatgcttgtatggagagctgcagctaatcataggtatgccaatgtcttcctgcagcctgttacagatgacatagcacctggctaccacagcattgtgcagaggcctatggatttgtcaactattaagaaaaacatagaaaatggactgatccgaagcacagctgaatttcagcgtgacattatgctgatgtttcagaatgcgtaatgtaca

SEQ ID NO: 654 - DNA, 1948 bp, Zea mays
  Clone ID: TF_ZmC8951_1
gccgagaaaaaatcctcgcccgcaacaccatttccgaacgggtcgcgcccgagcccgatatgcccgcgaagcccaggcccagccagacccaaagcgatgcgacggagatcgtgagatcgcgcgccgcagcctcctcccccgcccccgccgccggcgatgacctccgcagtcctcgccggccggaatgaggtccaccaggcgcatcagcaccaccgccaatgggctggcgcccgcgtcccgctcatgcccaagccgtcctccaaccctaaccctaggcgccaccgcgcgggcccaaaccctatccccagtggctcgccgccggagccgcgggccgctccggccgtcgcggccgagccctcgccgtcgccttcggggcacctgaacttcaggccgtcggaaatgacccccgccgaggcccggcacctccgcgcgcggctcaccagcgagctctgccgcgtccgcgctttcctctcccgcatcgactcgtggcaggacgggcagcgccggcgccggggccccgagccccccgcgcgcggcccgtccccgccgccggcgctggtggaggcgatgcggaagcggtgcgcggacatcctgatgcggctgcggaggtcgaagaagagcgtgtggttcaactcccccgtcgacgtggagggcctcaagctgcacgactaccgcgccatcatccggagccccatggatctcggcaccgtcaagcagaacctcaccgccggccggtacccctcgcacgaggcgttcgctggcgacgtccggctcaccttcaacaacgcgctgcggtacaacccgcccgaccaccacgtgcacaggtacgccggcaacctcctcgcctcgttcgaggggatgtacaaggaggccgtctcgtggttcgagcagcagcgccagcagctcgagccaccaatgcagcccgatttgccgccgccgccacagctcccggtcgtctctgtgccagtgcaagcgcccccgaggatgggtgggggcgggaggaggcccaagcccaaggcccgggagccaaacaagagggagatggacgaggaggagaagcagaagctgagggtagagatcgagaacttacccgaggagaagatgctgaatgtgctgcagattgtgcagaagaggaacagcgatccagcgttcactggggaggttgtcgagctcgatttcgacgagctggatatggagaccctctgggagctcgatcggttcgtggtcaattggaggaaggctctgaagaagagccagcggaactctatggtgaatggcgatgctgccgcggcggtgaatggagacgccatcgatgtgacagttgttccggacgacgacgacatggtcgaggttgctgtcaatccgtccgtggcggtcgagatcggagagtcggctgacgttccagagaaagaaatggaggccgagatggtcgacgattacgtggatataggcgacgagatgccgacagtgaattaccagtcagtggagatcgagagggattccccggcggctgccagcagctcaagcggatcaggaagtggctcgtcttcatccagcgattccgactcggactccgattctgacggggacgatgccagcgccccgcactaggtgtggctgttgttgctgttttatctgactgtactgtaggattagcgatgagtaggtgactgaaaaggttccatttgatgaggcgttttgaagaacggtatagagaagcctgtagggaactcttgttcatgcaatgcaagtggttgtgttcgtctgtgtatgtgtgggtgcagcatttaggttgtcggtacttgggtgatgggtaggtggtagatgcttgggtagattgggaggcttctgtaaagaggggaatataagctggaacaaagaggaaaagtagcaatgccggccggggcatttcttcatgaaaaaaaaaaaaaaaaatcattatgtttct

SEQ ID NO: 655 - DNA, 1280 bp, Zea mays
  Clone ID: TF_ZmC296488_1
gacagctacaggtactagcaggctagcggctgcctcccttgtccccaccggccgccaccaccaccaccacggcaccaccacaccgacccccttcccctcccctctccctgtcgtgcggtgcctcctccgcccaaatccccaaatccgcgcctccgatccgccgccgtccacgatctgccgcagccgttgacccgctaaaaatggcctccgggccgccctcgccatccggcaaaccctactcgcgcaaatctcacgccagctccaaggctcccagcgtcccttccttcgacgcccacaacggccagctcctacccaccgtcaccttttcgctgccctccacgaccaccgcccgccgggagctgcgccgccgcctctcttccgagctctcccaggtgcgcgccgccgtcaagcgcctgaactccctcccggctcccgccccctcctcggcgctctctgccaccgacccctccacgccgcatccgccgtacccgccggcgtccaagcacaagtctaagaagggcggcggagtcccgcagccgcacctctcggcggaggcgcggcgcaagctctacgcgcccgtgttcaagacctgcgccgctctgctctccaggctgatgaagcacaagcacagctgggtgttcaacaagcccgtagatgcgagcgcgcttggcctgcacgactaccatacaatcatcaccaaacccatggacctcggcacagtcaagtcaaagctaggtgccgggcagtacaagtcaccacgggaatttgcaggtgatgtgcgtctgacgttccagaacgccatgacgtacaaccccaagggccaggacgtgcacttcatggccgagcagctgcttaacatgttcgaggagaagtggccggagattgaggctgagatagctcagctatcaccacagcctcctacaccatcctcagcagcacccaaaaagccaaagccaaaggagatagataattctaggccgttagagaggtctgattcgacagttcatgctgccgggatagaagctaccccgaagacacacactggcagaccccaagttttaaagaagcccaaggcaagggagcccaataagagggatatgacattctgggagaagcagcggcttagcaataacctccaggatttgccaccagagaagctagacaatgttgttcagatcataaagaagaggaacttgttactcatcccgcacgacgatgagattgagggtgatatcgatagctttgatgttgaaacattattggggctcgatagatttgtg

SEQ ID NO: 656 - DNA, 666 bp, Zea mays
  Clone ID: TF_LIB3595-033-Q2-K6-E12
aggtatcaagtggatcaaccaagttttgacgatagattgaggtacttcagtatattgtttgagtcattgctctctttccaaatggaagaatcaagaaacaagtcaaagaaacagaagtctgctattgaccttcccaaagccccgaaagaagtggagggccctaaggtttctgagctaaaggctagggcagaagctgagcagcatgctgttcgtcgaatgaggatgtgcctccgagatatctgtaatcgcattttgtacaacaaaaggttcaatgtatttcacttcccagtattagaagatgaggtgcctgactatcgatcaataatccacaagcctatggatatggctactgtcttgcagcgggtggactctggacagtaccttaccagggcagcatttataaaggatattgatcttattgtctcaaacgcaaagacttacaacggggatgactacaatggatctaggattgtcagtagagcatgtgaactcagagatgtggtatcttgtttgttctcactttctcctacattagactgttgacaatgcctctacagattatcgttgttgtgtctaatgaacctctttttggccaggtccaaggcatgttgtcacaaatggacccatctttggtgtccttctgtgataaaattgcttcacaagggg

SEQ ID NO: 657 - DNA, 1771 bp, Zea mays
  Clone ID: TF_ZmC828_1
ccggccgggtagacctcgccttttgatatgtggtggtgaaagtgtcggactggatcatgtgggaccagctgttttgcatgagcttgagaagttctctgttcactctttgggactgccgtctcttctctctgatccaagtgcgaagacacctgaagaagctcttgtgcatatctttggggaagccaagagaacaaccccgtccattctatacatacctcagttccatctttggtgggatacggcacacgaacaactaagggctgtgttgttgactctgttgaacgatttgccctccaaccttccagttttattgcttggaacatcatcagtggtttttactgaccttgaagaagagtgtgcttccatattctcttctcgcaatgtgtatcaagtggatcaaccaagttttgacgatagattgaggtacttcagtatattgtttgagtcattgctctctttccaaatggaagaatcaagaaacaagtcaaagaaacagaagtctgctattgaccttcccaaagccccgaaagaagtggagggccctaaggtttctgagctaaaggctagggcagaagctgagcagcatgctgttcgtcgaatgaggatgtgcctccgagatatctgtaatcgcattttgtacaacaaaaggttcaatgtatttcacttcccagtattagaagatgaggtgcctgactatcgatcaataatccacaagcctatggatatggctactgtcttgcagcgggtggactctggacagtaccttaccagggcagcatttataaaggatattgatcttattgtctcaaacgcaaagacttacaacggggatgactacaatggatctaggattgtcagtagagcatgtgaactcagagatgtggtccaaggcatgttgtcacaaatggacccatctttggtgtccttctgtgataaaattgcttcacaaggggggccactgcaggctgtggatgatgaagatagagctattcttcaagcagcacctgttgctcagctggtttctggtactagaataagtgcaaggcttcgaaatgtacagcctgaagtaaacctgtcacaaagttatgaagtgctaaggcggcaaaagaaaagtgcagaaaatgaacaaagcatgactagagatgaaaagtctcctgaagatgtagatttgtcgaagccaactgacgcagaagaagctgcaaaagaaccagagtcaaatggcactacgaaagaagccaacgattcaccagccaaagaaccagaagtatctacttcccctgaacccatggagagtgacaacggcaaaattgccgcggctactggcgacgacttgttagaacagctagaagccctgaagcaacgcttcatggaactcactgcaagctatggcgtgccgcagctcgagaggctgtattccaagataatgaaaggagcaatagagttgacaagtaaagaaagcaacgaggatcataggcggttagtagttaggtatttgtggacattcgttgagaacagcaacaatttttaacctggcgccaataagattcttgttttccttgtacatcctctttggaacgaaacaatagtagccgttcatcttgggagttgtccccgttccatgccttgtaacaaatcttccaaatgctctagtgtcagtgacacagttttgccatgaaatgatgtagcaagtgaacccttcctagatttgtacctcagtttgatgaatttatgaggtggaattccctcttaatgcataacatgtgttaccatg

SEQ ID NO: 658 - DNA, 769 bp, Zea mays
  unsure (1)..(769): unsure at all n locations
  Clone ID: TF_LIB4969-022-Q1-XP1-A11
gccggccgggtcggggctcacacgcaacgacgcgcctcggcctcgcagaaacaggggccaaaaaggaaaagaaaaaaaaagaggaaaagaacgcagggaatgggcaagcagcagcaggcaccaccggcgcggcggtccccggcgatgtcggcgcctccgccaccgaagcgccggaagaagaagggccggccgtccctcctcgacctccagaagcggaacctccgcctcgagcagcagctccaacagcagcagcagcagcagcagcccaaggggcgacgctccaaccgccggagcgccggctccgcggacgagngacgacgacggccccgcctccggctccggccgccgcgagaagaagctgcgcctcgtcatgggcctccacgacggatcacccaagcaggtagaaaaggcgaggaaagcgacggatgggcatgaagagttgtcagattccgggcccacaacacctttgccaaacaaaaagttattgctcttcatccttgataggctacagaagaaggatancatatggtgtattttcagagncctgttgatcctgaagagctacctgactatcatgacattgtaaagcatccgatggatttttcgacaatacgtaagaagctcgataagggtgcctattccaacttggagcaanttgaggacgatgtgttcctgataacaccaacgcgatgtgctacaattcaccagatacnatatactatcgacaggcacgaggtattttcagagatcgctaaaaggattttgagat

SEQ ID NO: 659 - DNA, 631 bp, Zea mays
  unsure (1)..(631): unsure at all n locations
  Clone ID: TF_LIB3632-059-Q6-K6-E4
cgctcccgtgctctctccctctccccaggatccgaattgccagcgcaccagtcgagctcgcgggacctcgccggcgccggcgatggcctcctcccttttggccggacggggagggggccaccaccacaactggggggagacgcgcgccccgctcgagcccataccccccaaccctagtcccagccagccccacccgcgcgccgacgggtccaagtccaagccgcgggcggcggccggctacgtgaagttccgcccggcgtccctgggccaccgcgaggcccgcgcgctccgggaccgcctcgcggtggagctcggccaggtccgcgccctcctctcccgcatcgacacctggcagcagcagggcccgccgccgcgcgcggtgctccgcggggcgatgcggaagcggtgcggccagatcctcagcaggctgcgcaaggacaagcgcagcgtgtggttcaacgcgcccgtcgaggtggagcgcctcggcctccacgactaccatgccgtcatcaagcgccccatggatctcggcaccgtcaaggagggcctcgccgccgggaggtacgcctcgcacgacgacttcgcggncgacgtncgcctcaccttcaccaacgcgctgcggtacaacccc

SEQ ID NO: 660 - DNA, 510 bp, Zea mays
  Clone ID: TF_uC-zmflteosinte056e06a1
aaataattaggatgaggttgctgcactgtttaatatgtcataatatatataataatagaaattaacaaatgtttcttcaactcaaatagcatgtagtcactgacagtattgctgtcgttgcattgttgcagcagataactaatgggatatagaaaccaaacagttctcaaatgcttgtctcttcaactgtcatgtttggtttttcatgctatacacactccatgtctcactgcagtccataggaggtattgtcttcctcttcaaatttctcagtggcagcaaaagctagtttcttctcatttggcctccatcgactctcaaacatcttgttcacctgaatggtcatgtcgtgcacagcatgcccccaaggattataagccatagcgttgttaaaggtcagcctggcatccgcagcaaaatcagatggacttgtgcatgagccagattggagcttcttgtggactgttaccaagatccattggatcttgacaatgcaaactaatcaggaat

SEQ ID NO: 661 - DNA, 1988 bp, Zea mays
  Clone ID: TF_ZmC19394_1
tcgccgccgggcctgcgcaaaaaaaaaatatcgcagctagttactccactccccccatccctcctctctctctctctctctctctctctcggatccgaattgccagcgcaccagtcgagctcgcgggacctcgccggcaccggcgatggcctccgccctactggccggacagggcggggcgcgccaccacggctggggggagacgcgcgccccactcgcgcccatacctcccaaccctaaccccagccagccccacccacgcgccgacgggtccaagtccaagccgcgggcggcagcctcctcgccggcggccggatacgtgacgttccgcccggcgtccctgggcccgcgcgaggcccgcgcgctccgggaccgcctcgcgggggagctcacccaggtgcgcgccctcctctcccgcatcgacacctggcagcagcagggcccgccgcccgcggggctccgcggcgaggtgcggaagcggtgcgggcagatcctcaccaggctgcgcaaggacaagcggagcgtgtggttcaacgcgcccgtcgaggtggagcgcctcggcctccacgactaccacgccgtcatcaagcgccccatggacctcggcaccgtcaaggagggcctcgccgccgggaggtacgcctcgcacgacgacttcgcggccgacgtccgcctcaccttcaccaacgcgctgcggtacaacccggtcggccacgaggtccacaccttcgctggcgccctcctcgcctacttcgagaggatgtacaaggaggcgctcgcgtgcttcgaggaagactgcaaacgccctgagccgccaaggccagtggcgcctgaattgacacctccacccgcagctgagcctgttgaggccaaggttaagccgagagcagggaatgtgaggatgcggaagcccaaggccagggagcctaacaagagggagatgagcctggaggagaagaacatgctcagggtggggctggagagtttgcccgaagagaagatgcataatgtgctacagattgtgcgcaagaggaacaacaatccggagatgctgggggatgagatcgagcttgatattgatgagatggatgttgagacacagtgggagcttgatcgtttcgttgctaacttcaacaaggcgctcaagaaatcccagcgtgctgtgttgaagcagtacagcaccatgtgtatgtaagctggaggtggaaggtactggtgtgttaaaagtatcagcaatgtgcttacgttggttgacaatgatgatgtggagagagagaaacctgtgaggagcgctacaatggctgagcaggtggatgagtatgttgatattggggatgagatgccaacagccacttaccaatccatggaaatcgagaaggacgctgaaggtgcgactggctctcgtggttctggcagtggctcttcgtcgtccagtggttctgagtcgaggagctcaggggacagtgcctcaggagctggcaatgctcattctttggcttaggggaggttgttaacaataggatttgaaaatttggatgatccgagttctgttgttgggtgatttacgtagaggtagtggtaattgtaagtatgtagctctttctgagacgtgggtttgcgtaggcgtggattacacagttagtagtagataacaaactggctttctgggtgtctgttagcaccatgtgtatgtaagctgggggtggaaggtgctggggtgttaaaagtagttgatcgaccttctggtatggagggggccagggctagtgtttgtgttctttgtagtacagttgttctggtgcagacctcttatgtaattaatgctttgtgcatgacattaaagtatggttttataagtaacaaagcagtatcatttgttgggtggtgttcttaatggtagggttgatcgaccttctcgtaattgatgctttgtgcatgacattaaagtatggttttataagtaacaatgcagtatcatttgttgggtg

SEQ ID NO: 662 - DNA, 929 bp, Zea mays
  Clone ID: TF_ZmC1935_3
gtacgtaagctcggaattcggctcgaggctaaaagggcatacttgtgctcgtataaaattgagaaagacatcaaatgatctgtacatcttgatcaactttgcagaatctgaatgaacatcctgatgcttggccattcaaagagcctgtggattcacgggatgttccagactattatgatatcatcaaagatcctattgatttaagaacaatgttaagaagagtcgactcggaacaatattatgtgaccctagagatgtttgtagccgacatgaagagaatgttcagcaatgcaagaacttacaattctccagatactatctattacaaatgtgcgacacggtgagtattctttttacgtacattattctcgcagccagggatgggtatgttcctggcaagtaagctaggacctgggttgccaacatctagtttctcgagattttctaaccggctgctttatcatgtttagttgttcacattatctgacctaatattatcaaccatgccattctatcttctaaatggcacaatgcccagcttaaatctggccggtacagtttatgccagctggcagactagggttgcatctctggcgctgccacgtgactatcgattttgttggttttggtcacgcaggcttgaaaacttcttctcgggcagaattactgtactgcttgcacaactctcaaccaagagctaggctggcgtgggctcactggactggacactactgtcgcatgttgtaaaattattaagttgtattgatatagttgtcaccttgctgaatgttacgcacggtgatgaacttttagtttagcatgtagtttttattttaaccaggagggacactgattgatctttacatttcggtctcaacctggccggcctaataatatagattgaggagattcttcagtttccagcaaac

SEQ ID NO: 663 - DNA, 939 bp, Zea mays
  Clone ID: TF_ZmC531483_1
gaccctcgaggttggccgggagggaaaaaaataccaaacgcacgcaaagcccacgcacctcgacccgttcccaggccatcacaccaccagcaccacctcgtcccccgtacctgcctcgccgccgccgccgcctcctgccggcctccgatggcgaagacccgcaagcctccggcccctccttctccgccgccgccccccgcagaaacgccatccccgcagcggcggcgcaagaagaagggccgcccgtccctcctcgacctccagcgccgcagcctccgcctgcaggcccaaaaccctagccccgccgcctcgcccacccgccgggaccccaatccctccgacgacgatgaggacgggaccgggagcgggcggcggcggcagaagcgcctcaagagcgtcctctccggcgtcgtcaaggaggagcagggggaggggaagaaggatgcagcgaaagcgacggggaaagaggacgctgcgtcggatggtgggcccacggggactcccctcccagacaaaaagttgctactcttcatcctcgataggctccagaagaaggatacttatggagttttctcggagcctgtcgatgcagaggagcttccagattactttgacattattgaccatccaatggacttctcaacaatccgtgagaagctgttgaatgactcgtattctaagttggagcagtttgaggatgatgtgtttctactcacatcaaatgccatgtcttacaattcagctgatacaatctacttccgacaggcacggtctattgaagctcttgccaaaaaggattttgagaacctgaggcaacccagtgatgaagaggaacccaaacaccagctcgaaggggtaggccaccgaagaatcccaagacagagggtgatgtgtcaccagacctatctaatgtgaaagcaaataaacctgaagacaatg

SEQ ID NO: 664 - DNA, 1482 bp, Zea mays
  Clone ID: TF_ZmC21171_1
tgggtacctcgagccggccgggaaagaaataccgtcagagcgacgttagtcggctcagctgtagtgtagttgcaggtgttcgccggcacacgcgcgtggccgcgaaccctagatgacgccggcgaacggcgccccagcgcgggcagcggaggcgggcccccacgaggtggagtcggaggccgacgcgttccggcgccaggtcgacgacctcgtctcgaagaccgacgtgctggagcggcgggtgaaagaggtggcggacttctacgatggcaaaaagcacggaagcggcgggaggaagggtggtggtggtggcaggtatggggcatcctcgaggggaatgccggaccttatgcgccagttcggcgtgcttttgaaagagatcacctctcataaagatgcatggccatttctggagccggtggatgttgtaactctacagcttcctgactatcacaacattattacccaacctatggacttctctaccatccaaaagaaaatggaaaggaaggatggtacttgttacaccaatgttagagaaatatgttctgatgttcgattaatttttgccaatgcgatgaagtacaatgatgatcaaaatgtcatccacttgatggctaaatcattgcttgagaaatttgaagagaagtggctccattttcttcctaaagttgagagtgaggaaaaaagacaaaaggaggaggaatcaaagggtgttgcagccacaaatacttctcgagaagttgcaattgtaaaattagcaaaagacactgatgatgagctaaatcagatcaacaggaagctggaggagctccggaaaatggtggttcacagatgcaggaaaatgacgacagatgagaagaggaagctgggtgcaggtatctgtcacttgtctccagatgatcttagcaaggcgctagagattgtcgcacaagacaatcctagcttccagactaaagcagaagaagtggatcttgatatggatgcccagagcgagacaactctatggaggctgaaattctttgtgagggaagcgctggaacgacaggccaacgttgcctctgggaagatggacgaaaacgccaagagaaagagggagatatgcaatgctctggccaaaaccacctcgagacggatcaagaagcagccctagccatcttccatatctttcactcgcgtcctctgattgtttagaagttctttttttgatactagccaccagctttgtgaaacgttttcctgcattttttttgtgatgtgtatatagtagtatagtgaactgtccagtccagtaacaagtgatttcgtgtgtaaccatgagctggtcgcattcgcgtcccctctgatccaacaacaaacattgtctcacaatgtgattgattgtagaagcaagcttttgtcacagggcgatgttgctcacttgtggaatcagatgatgcatacatttcgtaactgttcaaaaaaacaaaaaaaaaaaaaaaa

SEQ ID NO: 665 - DNA, 974 bp, Zea mays
  Clone ID: TF_ZmC8951_2
cattgggtacctcgaggccggccgggaaagacttatagttccctacctagatggcctccacgtagcacgctcccaaatctccccacccctcgtcacctcgtcctcagcaccccaagtccccaaccaacatttgccgaacggatcccgcccgagcccgagagctcgcgaagcccaggcccagccagacccacgaagcgatgcaacggagatagtgagatcgcgtgaagccgccgatgacctccgccgtcctcgccagccgggatgaggtccaccacgggcacccgcaccaccgccgctggggcggcgcccgcgcccccctcatgcccaagccatcctccaatcataaccctaggcgctaccgcccgggaccaaaccctatcgtcagtggctcgccgccggcgccgcgggccggttcggctgtcgcggctgagcccttgccgtcgcccttaaggcacgtgaaattcaggccgtcggaactgacacccgccgaggcccgtcatctccgcgagcggctcaccggcgagcttggccgcgtccgcgctttcgtctcccgcatcgactcgtggcaggacgggcgtcgctcttccccgccgccggcgctggtggaggcgatgtggaggcgatgcgcggatatcctgacgcggctgcggagatcgaagaaaagcgtgtggttcaattcccccgtcgacgtggagggcctcaagctgcacgactaccgcgccatcattcggagccccatggatctcggcaccgtcaagcagaacctcaccgctggccggtacccctcgcacgaggcgttcgctggggacgtccggctgaccttcaacaacgcgctgcggtacaaccctcccgaccaccacgtgcacaggtacgccggcgacctcctcgccacgtttgaagggatgtacaaagaggaggtctcgtggttcgagcagcagcgccagcagctcgagctgccaatgcagcttgatttg

SEQ ID NO: 666 - DNA, 2661 bp, Zea mays
  Clone ID: TF_ZmC16_1
ggtacccaaacggaaaccagccgaccgcccccgaaaaaacagcaggcggggcactcgtcaccagagtaccatacccccgccccgataccgcgacgaccggacgcctcgtccgcccctcctcccgagttccgactcatactggctatccaccgcctgtctcccccgcgatcaagtcgaccagagccggcaaccgatggtggtggtggcggtgggagggggcggcggcggcggtggctgggggacgtgggaggagctggtgctgggcggcgcagtgctccggcacgggggcgccgcgtgggccaccgtcgccgacgagcttcggacccgctctccgtgcaccttctcgcccgaggaatgtgaagcaaaatttgcagagatacagttgcggtactctgcgtgcaatgcttggtatgaagagcttcgtaagcagagagttgctgaactgaaaagggaattggagaagtcagaaaattctattggatccctccaatctgtgattcaaagcctcagcaatagcaaacacgttgatgggagttctgaatgccgcaccagtcatactgaatcatgtccacattctgaaaatacagcagatactaattcctcaggtaaagaaacgtccagggatagatcatcagctgctagtttcacagaggaagcaaggaacagtcagaaatctcagaaagtgcagcagtgtgatactgattcaattcaagctatcaatccatcaccagatgagtcatatccccaggcccaagttgaaaaggtcggtcccaaagatggcttgctttggggttctagaaaacaaagagtagggagagctagaaggacacttctgaaaggtggtgatagtagcggggatggtgagcctacatctacagcatgcatacagagggagggtttgtctaaaggctgcatgaagaacttcataactcaaaacttagaatcagttgttgtgaagaagggtgtgaaaactccaaaggtagaatctgatgtgatgaataaggatttgaaaacccccacgcgtccgcccacgcgtccggaacttctaaagcagagtctgatggtatgaagaaggggatgaaaataccgaaagtagaacctgatgttatggactggaaaactcccaaagcaggatctgatgttacgaagaagggcttgagatctccaaaggcagaatgttgccagcctgtgattgagagcgttaaactaaagctggcagagattttgaatactatatcaactcaagatgactgcaaaatgttgcaacaccaacttgatacccagaggaaaagagctagatataagaagatgattcgccggcatatggacttccgaatgcttcactctaagatcaagagtggcgcaatctctggcaccaaggagcttttgagagatatacttattttcatcaataatgtaataaccttctatccgaagactacattagagcacatggctgcggttgagcttcgtgactttgcatgcaaaactgtgaagcagagtgcaagcttgttcttgaaaagccatcgagagaccagaacagctggtgcccctgtaataaagaagaatgctcgagccctgcatttttcaagaacaagcttgcactctggggatgcaagggcaagcaaggtttcttcaagggatgctgctgccaaggaaggggatggcaagagaccttgcagtgatgagctggctaatcaaaagactacaaagagaaatgagccagccaagaagaggggtgtgggtcggcctccaaagagtgggcagaggattgctggggcacaggaaaatagccccatcaaaggcaggaaaagtagcgctggggcacaggtagatagccccagcaaaggcaggaagaggagtgtggaagcacatgatgatagctccagcaaagggggcaagaggagccggcggtgaagctaccatcagctcaatgccggtgaaactgtgtacagcttaaccatatatcataggctgttcccttccggtttgtttacctgacaaaaaaaagttattgtcccagtattcaaactgatgtaacaggaagggttagttgtttctgatgttgttttgtaaggagtaaggacaattagaagggaaccctcatttttatattgagattatccgagttaggctatacatatctgaccatgtaatgcttatagtagtttaagttgttataccatgtgaactgatgcttgaacaccgaaaaaaaaaaaaaaaaaaaggcggccgccctttttttttttttttatcatataatagttttttatatataatataatataaagtaaagctgagaataataaactactactacatggtagttacatgctagcagtggccaataagcctagtcactggcattgggccccacgcacgccttagcctctgggctccacagccactgcaccaagaatttcctccccttcctcccattcacattccagctcctcccctgcgcgtccaccgacaccttcccggcgtacccgccgccgccgcccgtaccgtacaccccctcgcacaggtcggcgatctcggtgggcgccgtggggtcctccccggcgtaccacgcgttgacgagcgggttcgtggcgagctcggccagctcgtgcgcgatgacgctgaccatgccgtcgacgcccgcgtcgccgttgctgt

SEQ ID NO: 667 - DNA, 1924 bp, Zea mays
  Clone ID: TF_ZmC4386_6
aaaacgggaaaaaggataaaaaaaaagtggggaaaagaacgccgggaatgggcaagcagcagcaggcgccaccggcgcggcggtccccggcgatgtcggcgcctccgccgccgaagcgccggaagaagaagggccgcccgtccctgctcgacctccagaagcggagcctccgcctcgagcagcagcagctaccccaggggcgccgctccaaccgcaggagcgccggctccgcggacgaggacgacgatgggcccgcctccggctccggccgccgcgagaagaagctgcgcctcgtcatgggcctccacgacggatcagccaagggagaaaagatgaggaaagcgacggatgggcgtgaagagccgtcagattccgggcccacaacacctttaccgaacaaaaagttgttgctcttcatcctcgacaggctacagaagaaggatacgtatggtgtattttcagagcctgttgatcctgaagagctacctgactatcatgacattataaagcatccaatggatttttcgacaataagaaagaagctcgataaggaggcctatttcaacttggagcaatttgaggatgatgtgttcctgataacctccaacgcgatgtgttacaattcaccagatacaatatactatcgacaggcacgaggtattcaagagattgctaaaaaggattttgagaatcttaggcaagatagtgatgccagtgaaccagaaccggaaccagaacgagaacccaagccggagcccgaaccagaagaaccaaagccacagcctcgccggggcaggcctccaaacaagaataatgccaaacagaaagttgggaagccaccagcagaacgtgccactgcagacttttctggtgcaacacttgctactgcggcaaatattggacggcatgcacaggcagatgttgatctgtcacgaagagtaatggataaagcgatgattgcggatgtgttgagagcttcttttgccaacctaaggaatgagcacaactggtctggtgagcggaagtttgaaagacttgaagcttactcaggttatgggggtacatggtctgcaaaaacggggaagaggccgattctgatggaagatagtcgccggagcacatattatgagactcaaccatccagttcaatatatgagctgccggtatcgtcctcctacaatgggaccgagaagctgctagtaccagttggggttcagttaccgcagtcctattcccacagcctggcacgttttgctgcacaacttggccctgttggctgggaaattgcgtcaagacgacttgaacggagccttgctcctggaacaaagtttggtcgtggctgggtaggagatggtgaaacgccgccgaacccatttcagacacctgtactcgctgcattttcagaaacaatggcaccaccgagcagtatagcagcatcaggtgagcagccatctatgaagtcccccacgcacaagcaagcctgcactggcagcataagccataggttgggatctcccgagctgaacgtacccttgagatgaaagggcagccccaataatcttcacggacacccaggcatgcagcaaactgcgaatggtttcaatgatgttccaggaccaatgatgttcccacatgtggctcaactggtggtgaatcagatgcagacacatacggctgattgataatgttgtgtgtgtgccagggggtcgggtcgcctttgatccgtcgcgcctcaacctgaggctgcaactgtgagcctgttgtgtaattgcttaagtagttattaggatgatagcatgcatagatgtgttgggtggatgctgtaacagtggtgatcggtgagttgcgattctgaatgtgtagcagaaaaaaccacagccgaaatgaaacatctgtatagattatcgaggatttttttagcatg

SEQ ID NO: 668 - DNA, 1720 bp, Zea mays
  Clone ID: TF_ZmC1240_2
cggggacggcttagccgcggacagtacaggaacccgaaggagtttgctgaggatgtccggctcactttccataatgcgatgacatataatcctaagggtcaggatgtgcattttatggcagagcagttgtcaggaatcttcgaggcacagtggcctgagattgaggctgaggttaactaccttgcatcgtgtcctccattgccgaagaagtttccacctccaccaattgacctgcacttcctagagaggtcagattcgatgagacaccacatggcattggacaccaattcaagaccgatcagtcatactcccacttacacccggactccatcaatgaagaaaccaagggcaaaggatccaaataagagggacatgacaatagacgagaagcgtaagcttagtgagaacctgcagaatttgccacctgagaagcttgatgctgttgtgcaagtcattaagaacaagaacctatcagttatgcagcatgatgatgagattgaggttgaaattgatagtatggatgctgagacactttgggagcttgaccggtttgtggccaactacaagaagaacctgagtaagcaaaagaggaaggccgagcgagcgatgcttgccagacaagatgcagagttgcgtgcgcagcgccttatacaacaaccgcaaccaaccccagtcccccaagaacctgttggtgaaaaatctctaaagcaagttgcaaaagattcactggcaggtgagcaactaccaacatctgcatcagagaaaaacgacgagaatagacagaacgcgagtggttcaagcaattcaagcagctccagcagtgactcaggatcatcgtctagcgactcagacagtgatagctcctcttcagatggatctgatgctgccaattcatcttgagatataggttcacaagttctgtcgagtagacaataactgtctatttgacatgacattggcaccataagactgtacatgcttaccttgtctggcttaggaaaccccctgtattttaagtagctttgtatgtggattcaccggctggaggcagtaacttaggtttcatggtgtacccgcctaataagactaggcttgttgctgacaccgtgtctttgtacaccgcactgttgctaggagccctcagttggctcagtagcctgtacattagcggcagcttgcacattgattctgtttagctgtgttgattgcagtatgtaggaaggcgattgccgtaagcattgtttcttccatctgttaactgactgatgaaagcattgacaaagcccaaaaaaaaaaaaaaaaaaaaaaaaaccagtgattcggaggcttcatcaccacaccatgcgcaaaagtctgttggattgactgctctaaattcgggtcttgggtttgcataaagtttgttgatgcacatgatgttcgtcatgacgatcattgatggtccattgttatgttatggagtgaggaatagaggtgattaggtggttgtgttgggcacgagagatgatgtatagcagcagttcggacctttgggtgggtagcagtaggtagcctcccctcctttcctctggtctggtgatgatggtttgttggagatgtggctatatgtgcgtatgatatgccgtggctccttttgagctgtttgctgcctggcgtcttccagcgatggataatacgtgaagggtgggctgggacagccatacaaccaccccctcagttg

SEQ ID NO: 669 - DNA, 1668 bp, Zea mays
  Clone ID: TF_ZmC119_1762
tgttttttccctttttaaagttcatcacgattcacgcaacagctgttctgacgttttttttttttttgttccggctcctcctagtccccttctctaacataaaacccctgcgaggtttgggtgtttcaaatacaagaggagccacgtggcaactcccagctggccttaggattgatgaaattttttctccttccgggaataaaacccatagttcctccccgctccagcaccttgcacaccaaaggttccatttggtctcttccttcctccccagattccgcatcttctccttaaaatgcctgcagagaggaaccttgcaggtgtccgggaggaagcacatgcgggaatgcagctcgaggagctgccacatccgcctgcagttggcacagccgccgggcacccggactccgcaggccgagaagtggcgcacgagcagctcaatgcccttgcaggcgcgaaacttgcaggcggctgctaggctgcccttgagcgcttgatctcgaggcccgatcgtcctgcatccgtcccggcagatgtggaccagcgcctccattgcttcgtacagttgcagatacactttcttttcttccatccttttagctctttcctgccttctcgtatcagcttcgacaagagactcgagcagctcctgttccatacttggattggcccgtctcatcactttccacccatccgtcagagagatggtcttgaaatccccgatgaccatccggacacaggcgagcgcgaggcggggcgcgtcacacagcctggcaagctgcagcatgtctaccacgttgtcaggagcgaggaagcccctctcgagttggtcgacgcagaccgtcttcagagacggcaccgagaagacgtgggagagcacaagcaaatgcagagcgtgctccttcatctgttcctgctcaaaccgtgaagagtagagaaatctgatgaagacacggactgcttccgaaggcgcgccagagacacggatacaccgaaacccatcatctctcagtctagcttcctccagcatagctctcaggacaggggatttgacgccaagaacgcaggaatgcgacggaatctcagcgccgccgtctgtggagacacggaggtcagactggtatccctccaagaacaacctgtcccaggaatccaggacgccgccttcggggacacgggcacggcgacaggccttcgccttcctccgcgcgccataataagaggttccaggcagcggcggtggaacaggcgcgttactcccatgaagctgagcacgccggctatgactatgactatgacccggcgcagctttggctttggcacctgccgagctacttgactcgagatggttctccagtgagaagtcggtcgcatgcgcatcgccgccgtccaggaagaagagatcgggagaatccagcagctccacgcattccatcaactgcctcctgctctgggctgaagtgaaatcagtctggagtgcaaactgcaaagcctctgagacgagagcgaggcggagaacgaaaagggggagctcgttcaccactcactcactcaccacggcgtcctcgtcctcgtcgctccaccaaaattttggaggcctccccttcctatggcgactcaagccaaggcgcctgtcctgacaagtgttccctacaaaatcccggcagg

SEQ ID NO: 670 - DNA, 1441 bp, Zea mays
  Clone ID: TF_UC-ZMROB73012D02_FLI
agatatcacattctatgtggacagaaagcctgttgaagctcatcgggtcatcctttgtgcccgatctcctttcttcgaaaagaagttcaagacagactggaaagacaggaaggaagtgagattttctaaccaaaagttgtattttggcgccttatacagcctcatccatttcttctattctgatagactcgaggtagctgttgacgacatggaaaatttggcgcgtgcatgcaaagtttgcaagtgcgaggagttgcaaaaagttttggataaagaagttgtgcatcagaagtatgcggagtacaagtcagcaagagaactggatatggacagctcacagaaacgattcatcttacaagcgcaatccttgcctgaggaagatcgccttccatcagccttgcagcgtattctgcagacttgtctagcaaactcaagagaaggttactgtagtgaggaatcaaatgagatgataaggaactcagaggatgatgatcttgcagatctttatattaaagtaggtgataaggttttccattgtcatcaggtgattttggcctcaaggtcagagtactttagagccaggctatctcgaactgttgattttcttgaaggtaactgtggctttgaagctgctcagaatgttccgcttcttgaggagcatgacataagtgcagaagcatttgaaaagatgctcgaatacatgtaagatcctattgtaatatgctttaccactattgttttgttgttgctgttgctgttgctgttttctggcttactttttacttgtaaaacttaggtatactgataagctagagcatttggaccctggccaggctgaagaactatttgatgttgcatcaaggtacctgctgtttccccttaagcgggttgtagctgatatgctgctgccatatctcgaacatgtttcgcctgcagaactgtgccactggttgatgatgtcagacatatacggtgtcatgaaaataagggagtatatcttggatatcattgcttgcaactttgagatgtttgcagccacccgggagttccgggccttgctcttgactcttccaccaccatccggagatgactcactacggacaacacgtcccagtgcacctgggactggaggcaacaccgaccaaggcaacattcttgatgatttgcgtgagaagtggctagaagcagagggtgccgagctcgacgagagggatgagagtgcagctctgttcgacaagcgactggagatgcttatgctagttgcagagaaagaagccgatgatgaagacgcttgagtttcggagagtacgtgtgctagggtagcattgtttttgcattcttcactgcgcagttgtttaggtttgtgagttacaagttcatcttttgttgtatgaacttcaaacagatcagttttgacccatcaagtatccagtgagcaagt

SEQ ID NO: 671 - DNA, 833 bp, Zea mays
  unsure (1)..(833): unsure at all n locations
  Clone ID: TF_LIB5117-027-A1-PF1-D12
catttcaccaatcggcacagcacgctcccacagctgcctccatccgtccccttctcctccaactcctccgccgccgctcctgctagggttaaggtaacgtgcgcgcgaggcgaccgatgtcgacgggagcgggagcggaaccggagatggacgacggttacggctttgacacggtcttcaacgtggaggctttctccgacaggacgctgcaggtagaggtcgtcggccgcgacgaccacgcgcctgggtccggccgcaagcgccgccgcgaggaggacaaagaatatgatggagaacatattgactcgttttgtactgtgatgagtacaccagttttacgagtggagaccatatatgtgagctcggcgattcttgctgcaaaaagtagtttctttcgcaagcttttctcaaatggcatgaaagaatctggtcagagagaggcaacagttagacttgctgattcagaggaaaaggccttcatggagcttttacgcttcatgtacatggggaaagttgacaccaacaactgagcccactcatctggttgacatcttgatggctgctgacaaatttgaggccatttcttgcatgaagctttgtgtgccagctgtcctaacagaggcagtcatgaaattccttgctgaacggtacaaggaattcctgtcaacagagtcccaagatgaactgatgaggatccctggtggctgngattgaagccatcctaagaaggaatagctttgggtttgcatctggagtagctgtctatgacttcgtgcttaggtggacctgttatcagtgcccaaattcagaagaaatacggaagttctcgagta

SEQ ID NO: 672 - DNA, 1042 bp, Zea mays
  unsure (1)..(1042): unsure at all n locations
  Clone ID: TF_ZmC13701_3
ccggccgggatctcctcgccctcggcaagcccagcaaccccaatccccaatcccgtccgcttctttccccgtccccgaccttgccgaggaacctcccgctcccaaatcctagcctctcctccctcgccgctcccctccccatggaggacgaggacgccggcctcggcgacgggggcgaggcctcccctccgcaccatgccgcggcgtcgggcgaccgggcgcgggacttggcggcgtccccgaccagctcgcgctccgtgacgcagacggtgaacgggtcccaccgcttcgtgatccagggctactcgctcgccaagggcatgggcgtggggaagcacatcgccagcgacaccttcaccgtcggcggctaccagtgggcgatctacttttacccagacgggaagaaccccgaggacaactccggctacgtctcggtcttcatcgcgctcgcgtccgacggcaccgacgtgcgcgcgctcttcgagctcacgcttctagaccagagtggcaagggcaagcacaaggtgcactcgcactttgaccgctccctagagtccggaccgtacactctcaagtaccgcggatccatgtggggctataaaaggttctttcggcgtaatgctcttgagcaatcagattttcttaaagatgattgcttgaagataaactgtactgtgggtgttgtagtatcaactatggattattccaggccacattcaatagaggttccagagtctgacataggctatcattttggaactcttttggacactctggaaggtgtagatgtcatttttagtgtagcaggggagaagtttcatgcccataagttggtgttggctgcccgatcttccttttttagatctgaatttttcgaccatgaatctgatgaagagaagaacgaaactggtacaggggatgaaatcaaagagatcgttattgatgatatggatcctgtagtgttcaggcggtgcttcactttatgtacagggacaatcttgntaatgatgatgagttgatggcatcaagctctgactgctct

SEQ ID NO: 673 - DNA, 708 bp, Zea mays
  unsure (1)..(708): unsure at all n locations
  Clone ID: TF_LIB4765-040-R1-K1-C1
cattgggtacctcgaggccggccggggccgccacctctagagagaactgtagatccctgtcatccaatcacccaccatgcaatacctcaccgatgttgctcgctccaaggacctgctcaaggttgtaggccattcggtgatcaaggcgatgtgcgatggggagttcctcatgtcgaggaaatgggccgtcggtggccacgattgggaggtccacttgcgtcccaaggatcactcggagggccacgagcgcccggtgacgctgaggctcgtcttgatctccgaagcgcgcggcggcgacgtcaaggccaagctcagctgccgcctggttgatccgaccgggaggctgaagccgtcgaaggagaatagcaaatcgcataagttctacaagtccggcgattactccggtgcaatccaggtgacgggaagagaggatctggagaagtctggctacctggtggacgattcctacaccgtggagtgcagcatcacggtgctaaaaaaagcgccggcgcggaatactgcggctgcggctgcggcgacggccatggatcgcgatgctgcgatgctgccgtccctcgaactgcaccggcacttgngcgaacttctgcagaaggggacgggcgcggacgtcacgttccatgtgtccggcgagaagttcgccgcgcacaagggcatcctttgctcgagggtcgccggtgttcatggcgg

SEQ ID NO: 674 - DNA, 918 bp, Zea mays
  Clone ID: TF_ZmC868_4
gggtttcttaaatcaatcgatcaatcacgcgcacaagatttggcaataaatcgcggaattcccaacgccgcaccttcaccgccgggctccccagtccaatccaacccaaccccagtccggcgacggttccgggcagcgcgcgatcggatcgtcgcgggttcggcttctcgtcgaacggcgcggattcctgcccccgatcggagggcgtcgggtgcggcgtctcggcgattgatctgttgtggatcgattcttcttggaagaggagcgggatggacggggaagtgatgcggatgggtggggggctgtcggcgtgctcccccgtgttcaagagcatgttcgtgcacgacctgagggagaaggagtcgacgacggtggacatcggcgacatgtgcgtgaagtcgtgctcggcgctgctgggtttcgtgtacgggacgatcgagcaggggcagttctggaagcgccggctgccgctgctggcggcggcggacaagtacgggatcggcgacatcaaggactgctgcgaggagagcctgctggaggacataggctcgggcaacgtgctggagcggctccacgtggcgtggctgtaccggctggagcggctgaagaaagggtgcctcacctacctgttcgtgttcgggaagatctatgacgtgagggacgagatgcacggcttcttccaccacgcggaccgcgagctcatgcacgacatgttccaggaggtgctcagcgtgtggaagcccatgtgaattgaagtgtccctttccacgcaacctgtgtgtgtgtgtgtgtgtgtgtgtgccgcgtgtgtgtgtgtgtgtgtgtgtgtgtggtgcttgttcagtcagcagtgtgtggagagcatgctggttatgcatatttgaaacgaaaaggatgttcagaatttgaatggaagct

SEQ ID NO: 675 - DNA, 1449 bp, Zea mays
  Clone ID: TF_ZmC21312_1
gaattggcctggctacccagacaagagcacgcaacgcaagcaactgcgacgtctcccgcccccgccgcgccccggaccttttccgcagatattttttttatccccccacgcccccggctcgttcccttccattccaccacctctcgccagacaacgagatgtgcgaggcaccgcggctcggcaaccgcgccggcgccggcgacccggccgccgccgacgtcgacgtcgtcacgacgggcgggcgccggaggatccccgcgcattcctctgtcctggcctcggcgtcgccggtgctcggcagcatcctggagcgtcgcctgcggaaggacagggagagcggcaagcccgggcggtccgtcgtccggatccgcggcgtcaccgacgacgccgccgcggccttcgtccgcctcctctacgccggcaggtgcggcgaggatgaggatgacgacatggaggagcacgcggtgcaggtgctggtgctggcgcacgcgtaccaggtgccgtggctgaagcgggcgtgcgagggcgccatcggcgcgcgcctcaccgcggactcggtggtggacgtgctgcagctggccggcctctgcgacgcgccgcgcctgcacctgcgctgcgccaggctgctggccaaggagttcgcggccgtggagcgcaccgaggcctggcgcttcctgcaggagaacgacccctggcaggagctccacgtcctgcagcgcctgcacgaggccgacatgcggcggcgcaagtggcggcggaagcgcgcggagcagcgcgtgtacatggagctgagcgaggccatggactgcctggaccacatctgcacggagggatgcacggaggtcggcccggcggggcgggcgccggcgccggcgccgtgcgcgcgctacgccacgtgccggggcctgcagctgctcatccgccacttctcccagtgccaccgcaagagctgcgcgcggtgccagcgcatgtggcagctgctccgcctccactccgcgctctgcgaccgcaccgaccgctgcaacaccccgctctgcatgaggtttaagcagcaggagcaggataaggcggctgccaagggcggcgatgatggcgacaaatgggggcttctggtgaagaaggtgaagactgccagggtcttctcttctctggccaacaggaagcagatgagcaccaccaccacccagtgctgaggagcagcctgggatgcttaggggtcaaagttagattagtgagagagaatgaagcgagcagtttttttttgggtctgttttgagatgtcagatctcttttgagatatgtacatgtacatgccctacacctactttgtcaccctacgttggtatagcgcttttatcgaggtgggagttggtcagccggaagtctatgtaaaaagtgcgcatgtatcattatataataatagggaaatatgagaagtattttagtctt

SEQ ID NO: 676 - DNA, 738 bp, Zea mays
  unsure (1)..(738): unsure at all n locations
  Clone ID: TF_LIB4725-011-R1-K1-C12
tgcagcactttctccatggatgctgcccctccatctccaacacctcaggtttatcttggtgagcaatacgtgaatagttcaacactttcagatgttactttcttggtagaaggttggtactatttcacgaccctgatttcatcagtagatactttaaataattcttttctatcatgtcctagataatcttaatcccttctacaggaaagcgcttttatgcacacagaattgctttgcttgcttcttcggatgcatttcgtgcaatgtttgatggtgggtattagggtgagttttgacttggcacaacataatgtgcttttgctggttttagtctgttgatctctttccgtagttgatatattgctgctgtatatagtatgttagttttgaacaggccttgaatctcatgtctaattcaaaggtcattttcttaaccaggaaaaggatgcaagagacattgaaattccaaatatcagatgggaggtctttgaactcatgatgagatttatctatacagggtcagtgcagattaacagtgaaatttcacaggatcttcttagagctgctgatcagtatctcttagaaggactcaaacgcttatgtgaatatactattgcgaaggatgtgaatctagataatgtatctgacatgtatgacttgtccgaagcctttcatgccgtgtcactgagacatacatgcatcttgtacattctggaacattntaacaagatctgcacc

SEQ ID NO: 677 - DNA, 1074 bp, Zea mays
  unsure (1)..(1074): unsure at all n locations
  Clone ID: TF_ZmC2364_3
ccggccgggctccccgggcctttctctcatttcgccctccctccgccggctagggttactgccaccgccttccacccctccccgactgcccgtgggtggaggaggctggttggcgtgcagggtacctcggcggcggagatggagccggacttctcgaccgtgggcgggcccagctttgagttcgctttcaacgaggccaacttctccgaccgggaattgcggatcgaggtcgtcgcgggggattacgacgcgccggggtccactggcggcggttccggaggaggtggcctcgccgactgggcgcgccatcggaagcgccgacgcgaggagctcttcaaggagaaaggtgatgatgagcaaggtattgatccatcttgggctgctgtggttacgccggttttacgagtcaagacaatttatatcagttcggcgattcttgctgcgaagagtcctttctttttcaagcttttctcaaacggcatgaaagaatcggaccagagacatgcaacccttagaattactgactcaggtaatgtgacaattttgggaaactagagcatcctgcttcttttgtatttatttcctaataattttcatttttaaatcaactgttatgattatatatgccaagaatattcgatgtttccaaagttgtgcttttttttctttgatagtgacattgcctactatttttccctccttagctctacctatcaaatggatattttgtgtagcctgctttctgtacagatttcatcatttgttctctgagaaccagttgccacaaaaacacacacacacgtgcacaaacaaacacaaataaaatagaaaaatccttctctagtggatctttactttgtgcgtcatcctttttcccttaattctcttggaacagaggaaactgccctcatggagcttttaagctttatgtatagtggaaagttggcaactactgagcccactcttctgctggatatcttgatggctgccgacaaatttgaggttgtttcatgcatgangtactgcagccagttgctcacaagcttgccgatgaccacagaatctgcacttctc

SEQ ID NO: 678 - DNA, 845 bp, Zea mays
  unsure (1)..(845): unsure at all n locations
  Clone ID: TF_LIB5072-031-Q1-XP1-G12
tttcgactctagtcttttcgacataccgctttctctcctctctcaccgccccctttttttctttctctgtttttctacctgaccggaaaggagaggtggattttggtttaaaaagagtgaggtcgaagaaggttggttgtatcttatcgtgttacgtggagccaacaacgaccgagaaaaaggagagaccaagggaagacagtattcaaggaaaagaagaagggtaaatcgaataagccatcatgtctaatgttcaggataagccgctcaatgagctcctctcgcgctcaatggtagacatctacgtcgggccagagaacacacactggatcctgcacgaaaaactgctatgccaccactcgcccttcttccgcaaaatcttctactccaaatcctcgacctcgtcgcgcacgcaatcctttggcctccccgatgaagaagacctccccttcaagacctttgtcggctggctctactcgtctagcctgcccgtgccccgcgaggaagccgacctcggcacagccttcgatctgtacctgatggctgagaagttcgagatccctgcgctagtcgccgatgtgctgcaggttgtccgcgagtggtacaagtacagcgattcgtaccctggactgcgccgcgtgcagtatatctacgctaacactgaggagtcgagcccaatgcgacatatgctggtccacgccgtcgcgcgcatgatggtagtggcgaacacgggtattccgccgcactgngacaaggcgctgcgcaagaacgggcagttggttgttgacgtcatccgcgcgatccaggactggcggctcgacgaggagacagtgcccgatgcgcgt

SEQ ID NO: 679 - DNA, 1523 bp, Zea mays
  Clone ID: TF_ZmC1033_1
cctttgagggcagttcttatgatgcttctctctcctagccaattcattttctctgagaaagttagatgcggggattgtgtgccatgaatgcagagatcattacaacgaaggtttggttggagtccttaaacaagccttgtgtcagaacatgagcccagggcccaagtcttatattgcacatatactgagtatgtttggcctctgtggttttccaagcaagctaggaggaaatatgagaaatgttttgtgtgacagtgagttagttgatctggaactgttgcttgcagatggcgaatctctaagtgctcatgcgggtatcctatcagcaagatgtcctaaattattaccatgtgaaaaaacttttgtccgtgatgggtcagtaactttggaatggggcaggaggtcttgctatgttgttcgaatgtctgatcgtgtcgatagtcacgctctgaagaaaattttggagtatgcatacactgggttggtcactgtagatgatgccactgttaagcctgtaaaaacacttgcaaagtattgccatttgagatcgctacacttgatgcttcagaaagagcaacctagatggcactcatgtcccatatatgatcttactacagcactcgaaccagctaaacattcgttctcggacatcattttggaggcccaatcaaatgacaaaatggagtgtcaccatggttcgtgccagttatcgactcctcatattcatagccataaggtcattctgagcgtgagctgcgaatacctccgtgctttgttccagtctgggatgcatgagaggtagctttgcggagactatcagagttccggtcggatgggaagcactgagaaaactagttcagtggttctactcaggcgagctgcctagagttccacctgactgccgatggaaggctatgagtacagaagagaagctatctatcctgaaatcgtacgcggagctgtcgtccctggcggacttctggttcgtggacgggatgaaggaagagagccttcaagtgttgacctcgtgcctgaattcctccagcacggacgcctccctcgccttcatcggcttcgcggcgaacttgggccagtgggagctggtggaggccgccatcagcagcgtggcgcatctgtaccccaggctgcgagactccggtcggttggagcagctcgatgaggacgtgctcaacatgctgcggacagagcatgtcaggtatttgcagcaccgcagtgcaagtaactgaatccttaatgtcatggagggtttttttccccgtccactggtggtcgcatagcggtcctgttgtggtggtgtatgcacagctgttgcgttaaaaaaaaactgtacagccacttccgttgaagcttatggcgtcatgaacggggctcatctccgttgaaacaggtactctctccgttcttttttatttgtcgcgttttagtaaaaaaaatgaattagcggacgataaatattagagaacggatgtagtatattagtattggttgataaaaaaaaataa

SEQ ID NO: 680 - DNA, 580 bp, Zea mays
  Clone ID: TF_ZmC184317_2
ttagcccccttgtgtcccgacaacgctgggagcccattctcgcaccgcacttcgttaggttggtttagatcacatcattctcaggtttgttttaggcttttagtctacacctgtcgcctcaattaattcgctgtggagggggagattcggaggcattagcagaatcaaaatccatggtgttgtacgccgatctcgacgcgctccgggcgtcggcggccgacgtgcggatcgtcacgtcggacggccagaccatcgccgcacactcctacgttcttgcctcggcgtcgccggtgctggagaggatgatccacagggcgcgccgcgggtggggcgccgccgactgcacagtcgctgtcttcggcgtcccctccgacgccgtcctcgccttcctccacctactctactcatccagggtggcgcccggaacggaggaggagctggtggccgcgcacgggccgcagctgctggcgctggcgcacgcgtaccgcgtcgggtggctgaagcgcgccaccgaggccgccgtgtcggcgcggctgaccgcggaccgcgccgtggacatgctcaagctggccaggctctg

SEQ ID NO: 681 - DNA, 814 bp, Zea mays
  Clone ID: TF_LIB4743-082-A1-K1-C4
agcggcggtcggtcttgtcgctccgcctcggaactccacacggtcacacctcgctcgctctcgctcccgtatcgcggtttccttttcgaagccttgctaggtttagctggggcctccgtctatcctgtcaatggccccttaggcggctgtacttcagacttcagaggtgacgtgaggcgtggggacgcgcgtagctgattggttcgaggaggcggggatggacccggacttctcgccggcgagtgggggcccgagctttgagttcgccttcaactcggtcaacttctctgaccgggtgttgcagatcgagatcgtcgctggggatgacgccctcggggccaagggcgccaccggcgaggggtgctcatctcttgccgactgggcgtgccaccgcaagcgacgacgggaggagctccgacgcgacaaagatccagcaaactgcaaagttgaagctgaagaatgtgatgcctacgaggaaggcaatgagcctgtagctatgatagaagaatctccgcctgatattgaggcagatggtgaggatggaaaaagcagcgactcatactgtagtatggagtgtactcaggttttgagagttaagtctatgtacatcagctctgcaattctagctgcaaagagccctttcttttacaagcttttctcaaatggaatgaaagaatccgatcagaggcatgcaactcttagaataactgcttcagaggaaaatgcgcttatggagcttctaagctttatgtatagtggcaagttgacgacaaaccagccaactgtcctgctggatatagtgatgatcgctgac

SEQ ID NO: 682 - DNA, 1014 bp, Zea mays
  Clone ID: TF_ZmC5281_2
aaaaacccccagatttctctatatcacgacgctacccctccacgtcgccgcttctcgtgttcttgttcgtctccgcctcaggcaactccacacggacacggtcacacctcgctcgctctcgctcccgtatcgcggtttccttttcgaagccttgctaggtttagctggggcctccgtctatcctgtcaatggccccttaggcggctgtacttcagacttcagaggtgacgtgaggcgtggggacgcgcgtagctgattggttcgaggaggcggggatggacccggacttctcgccggcgagtgggggcccgagctttgagttcgccttcaactcggtcaacttctctgaccgggtgttgcggatcgagatcgtcgctggggatgacgccctcggggccaagggcgccaccggcgaggggtgctcatctcttgccgactgggcgtgccaccgcaagcgacgacgggaggagctccgacgcgacaaagaatctagaaaatacatgccagatccagcaaactgcaaagttgaagctgaagaatgtgatgcctacgaggaaggcaatgagcctgtagctatgatagaagaatctccgcctgatattgaggcagatggtgaggatggaaaaagcagcgactcatactgtagtatggagtgtactcaggttttgagagttaagtctatgtacatcagctctgcaattctagctgcaaagagccctttcttttacaagcttttctcaaatggaatgaaagaatccgatcagaggcatgcaactcttagaataactgcttcagaggaaaatgcgcttatggagcttctaagctttatgtatagcggcaagttgacgacaaaccagccaactgtcctgctggatatattgatgatcgctgacaaatttgagttcggcccttgacggcggcactgcagtcaattgcttagaaatttgcctatgaccacagagtctgcactgctctatctggatctaccttcaagcatttcaatggctgctgcag

SEQ ID NO: 683 - DNA, 1061 bp, Zea mays
  Clone ID: TF_ZmC13121_1
tctgaagctcatccttgtcagtgaacccctgagggacaagctgagggtgagcctgagctgccggcttgtatgccaccccccaagccagcggcaccttgatgcctccaaagagaagagtgtgtctcatatatttgccagtaacttcaaatgctcgcctgtagttctccttttcgaaaaaaggaaggtacgatcatcaggttatctcgtgaacgattccctgaccgtggaatgcacggtcaccatgctacgcgacttggacgccacggataaggagcagcacctgccggtgctaccgccctcggacctgcaccagcacctcggcgagctcctgcagaccagcgatggagcggacgtcacgtttcgtgtctccggggagtccttcgccgcccacaagatcttcctcgccgcaaggtccccggtcttcaaggccgagtgcttcggaggtgtggagttaggtagccccgcttctgtttataacaaagacatggaggcagctgtgttcagggccatgcttcacttcatgtttaccgacatggccccagagctcgacggtgaccaggagcctgaggccgcggcggccatggctcagcacctactggtagccgctgacaggtatggtctaaacaggctaaagctgatgtgtgaatgcaagctctctggtggcatcgacattggcacagcggctgcgacgttggctttcgccgagaagcacgactgcccgctgctcaaagccaagtgtcttgagttcgtcactaagtcgcctgagactcttgatgctgtcctggcgactgacggctacgagcatctggtggcaagttgccccttggtgctggctgaactgctgagggctgcgcgtggaaggaagatctgagctcgcgatgatggtttacgttgacagtcctcatgtaacgagttgcttggcttctccacttgtgcttgtcatgtatgtgtgcacacacatgagacgggcagctagcattattttctgtggttagatctcgttcggttttgtgccagactctgcttcagttgcaggttgcagctagtgcaaaaagattcag

SEQ ID NO: 684 - DNA, 1734 bp, Zea mays
  unsure (1)..(1734): unsure at all n locations
  Clone ID: TF_ZmC11136_1
ccggccggcnnnnnnttaannnnnnaaaaaaaaaaaaaaaaaaaaaaaaaaaaaaaaaaaaaaaaaaaaaaacgccatccgccatcctcactgatggttccgtcccgccgccatcggagagtgtagaagtggaagcaagcagataaaccccaggttctgtactcctgttctctttccactttgtcccttctttccccattgacacgctttccttccgcccattgacgagttgacgaccaacagacccaggcctccgaccagatcgaggtgagcgaacgtgccccgcctgcgctggtgacggtgagggtgaggccgcacgccatccgccatcctcactgatggttccgtcccgccgccatcggagagtgtagaagtggaagcaagcagataaaccccagcacaagtagttcgtaacgccatccatgggatcctccttatcgaacctcaccgacgccgcttgcatcgtgcaccagtttaagatcaacggctactcggctaccaaatccatggcgaggacggactcgctcccgtccaagcggctggccgtgggagggtacgagtgggaggtccactacaccccaagcctcctcgtcgacggcagctacatgatagcgttcaggctcgtcctcctcggcgcgccgcgtcggaacgacgtgaaggcggcgttcagatgtcggctgctgtatccttccaccaactacggtcatcaacgcggtgcgtgcgtcagcgattcaatggggaacgtggaaggtcagatgtctcatgcgttcaagcgggcgaaggagagctcgggatggattccgctccgcaaaaggaatgttgtggaggcggcccgggtcatcgagaacgactctctcactgccgaatgtaccatcacggtggtcaccgagctacctgaacctgatacagcaaagactaacgccgtcttgccccgaattcggcgattgacgggcgtgcattccttgcaccatgatctcggtgagctcttgggcaagggaaccggatccgatgtcgtgctggtggtttgcggtgagtccttcgcagcgcacaaggccatacttgcatcgaggtccccggttttcatggcccagttctttggccccatgaaggagacgcactcgcagtcgcagagggtggagatcatggacatggaggcggccgtattcggggccatgcttcgcttcatgtacaccgacgtggtgcccgagcttgagcggcaggagaacggcgacgtcatcgcgcagcatctgcttgcagctgcggacagatatggactcgacaagctcaaatcgatgtgcgaggacaagctctgcggtggcaccacagtggagacagcagcgacgactctggcgctggcagagcagcacggttgcccaaagctcaaggcttggtgtgttgagttcatcgctgcaaaccttgatgccgtcatggtgaccgagggttacaagcatctgatgacaagctccccgttggttctgaatgaccttctgagagctgtgcgtggaacgaagaactgaagaacattggtagttgtattgtatctgctctctatgaattcggtgtttaagtttatattccttcccattgaggaagggtggattgctggaaggctgtcatttgagaacttggcttcatttctagtcgttgtcccagctcatgggtttatgggtattttctaggagaaaagaggtaagacttagctatcctaggtgctacagaaaagatagttaatga

SEQ ID NO: 685 - DNA, 2396 bp, Zea mays
  Clone ID: TF_ZmC684_2
acctcgaggccggccgggatgcaatcctgattgcttttttgtcgcgtctgcttctcccccctcctgcctcttcgtgctgcttcctggttggggaagtggaaggagaaggagaaggttgcgtgcgtcctgcgccgataacgcgatggtgtccattgtcaccgaggtatgggcgctcgctggatgcggcccggtgtccaaggcggcggcggtagcggtagcggcgcaggagttgccggtgcagcatccttctcctgccgcagcgggaggagggaaggccaagaagagagtcgtgccagtgtcgttcagaggcgtcagcagcggcggtggccaggaccaccagcgcgaggcgttaacctcgacggccgggccggcgacgcaaaaccacacacacacacgccacctccttgagtccttgtcggctcgccatcgccaccatcatttcgtgtcgagtctccgtttcaccctccccaaattcccctcaaatcgatctcccccgcaccccgaatccccgcgcccccgcgtctgaatccggcgccccccgccccgatccgtccgatccgcgccgaatcgccgttgctcggggcggaaccctagcccgatctccacctgtttcctcgcgatgggcgccggtcgtgtctgccgcggcggccctttctccgcctcccccgccgctggcgccgccgcggggcggccgttcccgccgctcaccgcgtcctcctcctcatctccttcatcggccccttccgagacagcgtccacgtcggtcaccaagacggtgaacggctcccaccacttcaagatcgcgggctactccctctccaaggggatcggcgtggggaagttcatcgcctccgagtccttcaacgtggggggattcgactgggcgatctacttctaccccgacgggaagagcggcgaggatggcgctgcctacgtctcgctcttcatagccctggccagcgaaggcaccgatgtgcgcgcgctgttcgagctcacgctcgtcgaccagagcggcaaggggcaagacaaggtgcatacccactttgggaggtctctcgagagcggcccatacaccctcaagtaccgcggcagcatgtggggctataagcgtttcttcaaacgagttgccctggaaacatcagactatcttaaagatgattgccttttagtgaactgcacctgttggagaagttcaatcacatactgtccaacatggctctacatattggtcagctattgacaagtggaaagaggacagacattgcattcgaagttgatggagagatgtgtcagacattgcatttgaatcttttggagagatgtttcctgcccacaaggtgattctttcagcccggtctcctgtttttagggcacaactttttggtccaatgaaggataaggacatgaagtgtataaagattgaagacatggaggctccagtattcaaggccttgctccatttcatgtattgggatgagttgccggatattgaagagcttactggtgtaaatacaacttgggtatccaccttgatggctcaacatttactagctgctgcagaccgttatgcattggagagattgaagttgctctgtgaacttaagctgtgtgaagatgttgcaataaatacagtggcaaatactttggcactggctgaacagcaccactgctatcagctaaaaactgtttgcttaaaatttgtggctctgcctgagaatttgaaagctgtcatgcaaaccgatgggtttgattatttgcaacaaagctgcccatccctcctgaccgagcttcttgaatatgtggccaagataggagagcactccgtgagcccctgcctgtattcaactgaagtccttgatggtggagatgccaatggacgacgcgtgaaaccaaggatctaacggctgcccagatgagcctagaagagggagttccttgtgcttattttttgttgttgttaaagtgattccaatgacgggcgctttctgtggtgccataatcatgcatgttgtagcgttggtttgtgtgtgttgtgatttccccagccccattgctgctactgtagagggactgatatacatcctactgactagactgcgttgctgctgcaaagcagcttttcatcatatgccaaggatggtctggtgcaaaggtttgatcaaggggggagaatggcgcagaatatgttctgcagaagttttacctttcgctaggccagatttgtcgattcatggtcatctgtattgactgtattcaattgaaatgaaatgtatccgttgaacattcactttcaaaagtgcgtaaaaaaaaaaaaaaaaaactctcgaaaaaaaaaaaaaaaaaaaactcgagagtacccccaaaaaaaaaaaaaaaaaaaaaaaaaaaaaaaaaaa

SEQ ID NO: 686 - DNA, 1785 bp, Zea mays
  Clone ID: TF_ZmC1451_1
cagcgttccactcgcgttgaatttacagcgctcgcagctcggtcggggggacgtcgccaatgccgttgggtggcggattcactctctctctctcccccctcctccgcccatccaaccaccatataacaacctagtagccgccaacgccacattgtcccctcggggcgggccacgagtagtcctactggtccttgacgtccgtggccactcaggttgtgttctcggagttctttcgccggggccgggtggggaggcggagtgcgcggtcgaggaaggccttagcggtcggatcgttcggcgccgtgcttgactgcctgtacatgaggagcggctgcggcggcggcggagggagacaacctggggaaggaggcgggggaggcgctggggctgctgggctgcgtcaatgaggtggtggcggcggtggcggccacgtgggggcccatgaccgacggcgcgcgcgtcgagacggcgcccaggctcgcccaatggcgcgtcgacccgctcccctgctacacctaccgcaagtcactccccttcctcatcggcctctggaactggtgcatatctgtggagagaaataacaagcaaacctgtgttaagctctttgcagagaatacaagttctctcaagaacggttcctcagccccaatagcttcctttatcgccaaacttattgtatctcttccacctaatcagcagaccatagtccacccaggaatttttgacaaacagctgaaatacgacggttttgtgtggacaatcgatagcaccgtcactgggaggtttgtgattgagatagagtttcttgacctgaaggtcgctgatccgtctggcggggagccggcctcgatttgggcctcccgccaggtcaagcagtgctcggacagcacggccctgtcgtccctggctcggatgctgcacgaggacgtcctcaccgacatcaccatcaacgcggcggacggcagcgtgggcgcgcaccgcgcggtcctggcgacgcggtcgccggtgttccggagcatgttctcgcacgacctgagggagaaggagctctccaccgtggacatcaccgacatgtccctggacgcgtgccgcgccttcctcagctacatctacggcgacgtgcgcggcggcgaggagttcctggcgaaccggctggcgctcctccgcgccgccgacaagtacgacatcggcgacctcagggaggcctgccacgagagcctgctggaagacatcgacgcgcgcaacgtgctggagcggctgcagacggcgcacctgtaccggctgccgaggctcaagggcggctgcctgaggttccttgtggacttcaggaaggtgtacgagatgcacgacgacgacctcaacgcgttcctgcagacggccgacagggaactcgtggccgaggtgttccatggcgttcttgccgcgtggagcgggcggtaagccgggcgcatgccatggcactgccgctctgctgcaggtgttgcacatctggttggttcagttcgtcacaactcagaagcgttgtttgcaactggaggattcttgctgggaaagcgtgtaaatatttgcaaactgtacatgcgtgccagtggttggtctaaaatttactgtgcatgccttgattggattttgttcctatgatgtggaaatcagctcatatgctgctcatattcacgttttgaggaatttcagacttgatcttcaggtttacacatggcatggcaacagagagaggcaatgctcaataatctcattgtacatggtttcgatcccaccccccccccc

SEQ ID NO: 687 - DNA, 1710 bp, Zea mays
  Clone ID: TF_ZmC2246_2
tcgaggccggccgggacgccgcctccttcgccgtttcgccttcacttttccgcgccgccggttcgtgccaaaaccctactccctacaaaatgcagcggcgcctaagctgaaatcggtgaatcgtgcgccgcggcgaagagagaactcgaactcggcaggacttgtgcggaataggaggggagcggccgagcgggggtcagagagggagatagagttcatcaggtttgccatgtcctccagggctggcggcggcaagccgttgtggtctgcctccaccatcgtcgccaaagtcgcgagtgggtaccacatcctcaggatcgatggctactccaggaccatggagacccccacaggagagtccatcgcgtccctcccgttctcggtgggcggccgttgctggcgcattcgctactaccccaacggcgacaagttggagaataaagaatacatctcgctttatcttaatctccacgacagaagcgtcgaggcagagaaggcgcagttaatgttccgtttcgtcggtgacgtagcggagcagccgttgattctgggaggactgcataccttcgaaaagcaaggttgggggtacggcaagttcatcaaaaggaaagatttggaagagtcgaagcatctcgtggacgattctttttccatcaggtgcgatgtggccgtgcgcttcaacgatgtccgcgtggagaaggcgccggaagccgctgctgcagcagctatgatttccgtgcaaccatctgacctgcaccagcacctcggcagtctcctgctgacccagaagggcgccgatgtggtgtttgacgtcgccggtgagacgttcgcagcgcaccggtgcgtgctcgcagcccgctctcctgtcttcactgcagagctctttggtgcgatgaaagagggccacaccggaggcgtggtgcgcatagaggacatggaacctcgggcgttcaaggcattgctctacttcctttacaccgatttactattcccaaagacaatggcaacgacgatgaatcaatctgaagacggagacgtaggcggcgacgatgaagacgttctgtgtcagcacctactggtcgctgcagacagatacaacttggagaggctgaaatcgctatgtgaaaagaagctgtctgagtgcatccatgtgggcacggtagcaatcatcctgacgctagctgagcaacaccgctgccctggactgaagaaggtgtgcctccattttctcagatctcctgcaaatttgagggcagtcgcctccagcgacgcctttaagcatctgagcagcagctgcccctctgttatggtggagttggttgccatgcttggcaactcagcgtagaccttcatctaagcaggaaactgcacttggtgtttttttctggatcgacttgtattatcaagcggtcttggaaaaatgctactagttcatagtgtccacttccagtagctatgcatcctaagtttcaaggtagattctgaagtagttgaatccgttggcgcttttggtacaccatttcgcagcggatgattttggtatctggtagctttgaatgtctgccagaagtccgtctatgtccttaacatacaattctcagacgttggaaacttggaatgcaatgcagttcttgttattgttaaaaaaaaaaaaaaaaaaaaaaaaaaaaaaaaaaaaaaaaaaacaaaaaaaaaaaaaaaaaagcggcc

SEQ ID NO: 688 - DNA, 3124 bp, Zea mays
  Clone ID: TF_ZmC5281_1
atatatcacgacgctacccctccacgtctccgcttctcgtgttcttgttcgtctccgcctcaggcaaactccacacggacacggtcacacctcgctcgctctcgctcccgtatcgcggtttccttttcgaagccttgctaggtttagctggggcctccgtctatcctgtcaatggccccttaggcggctgtacttcagacttcagaggtgacgtgaggcgtggggacgcgcgtagctgattggttcgaggaggcggggatggacccggacttctcgccggcgagtgggggcccgagctttgagttcgccttcaactcggtcaacttctctgaccgggtgttgcggatcgagatcgtcgctggggatgacgccctcggggccaagggcgccaccggcgaggggtgctcatctcttgccgactgggcgtgccaccgcaagcgacgacgggaggagctccgacgcgacaaaggtgagagaggatttctgattatctttttttttttcatattccctagaatttgcgaattggctgtggattccaaactggggaaagacagtggttggttgtttgaattgaattattccatgcgttctctggaacttttgaggtgatttgatttgaccttaccatgtgctcgggctttactaaagccttcggcctcaagtgctaaaatcccccctttctattcaaaataggaagggtattttagcccccctcgttcccctccaattccctgactcccaaactagccccaagtgttgtgaaggcactttttgttttaatcgaggctgtgaaatgtgggattgtggttctctttttcaatcctttgagttggcgtagtggcaattcagattatcatttactaagcaatctgttaccaatgaaatgaccaagtggtggaaattagtggggataattattgcaattgacacttggctgtgggtgatatgttctgctgtattggcacgatgtcattcatctctgcatttggtttgtgcaaactaattatttgtatgccctaccttgatcaatgcctgtaatatgatttacataatcatgaacatatgaacaacacactcaagaccagcctgtgcgaccgaacaaagcttgcaagtttgggatgtaatctctttggctattgctgcatcggttgtaaatgaggaagaggaaaggagcgaggaagaagataaagaagggagagtgtcaagggggtgcatatcttggctgttggatcgatccaacacccaaaaaatgtgattgaagccatagccaaatatcaggcaactgataaggatgctgatctatattagtgatatttttttgtgctgaccatcatgccttggcaatttactatctcattttctttcactgattgctgtaatttccagtttattcccatcttatgtctttcatagttctgcatgatcttcaactatcaaatttatcatgcgtataacttttgaactactgttttatggacccagaatctagaaaatacatgccagatccagcaaactgcaaagttgaagctgaagaatgtgatgcctacgaggaaggcaatgagcctgtagctatgatagaagaatctccgcctgatattgaggcagatggtgaggatggaaaaagcagcgactcatactgtagtatggagtgtactcaggttttgagagttaagtctatttacatcagctctgcaattctagctgcaaagagccctttcttttacaagcttttctcaaatggaatgaaagaatccgaccagaggcatgcaactcttaggataactgcttcagaggaaaatgcgcttatggagcttctaagctttatgtatagcggcaagttgacgacaaaccagccaactgtcctgctggatatattgatgatcgctgacaaatttgaggttggttcctgtatgcggcactgcagtcaattgcttagaaatttgcctatgaccacagagtctgcactgctctatctggatctaccttcaagcatttcaatggctgctgcagttcagccattgacggacaccgccaaggaattccttgccaacaaatacaaggatttgactaagttccaagatgaagcaatgaacattcctcttgctggaattgaagccatcctatggagcaatgaccttcaggtcgcgtcggaggatgctatctacgacttcatgataaagtgggcacgtgctcaatacccaaaattggaggaaagacgtgagatcttgggcacacgcttgctgccccttgttcggttctgccatatgacctgcaggaagttgcggaaggttattgcctgcagtgatctggatcacgagcaggcgacgaaatgtgtcacagaggcacttctctacaaagctgatgcaccacataggcagcgtgcccttgcagcagacgtgatgacatgtaggaagtatgctgagcgagcttacaaatatcgcccgcttaaggttgtagagtttgataggccgtaccggcagtgcatagcatacttggacctgaagcgagaggagtgcagccgacttttcccatctgggcggatatactcgcaagctttccatctagctggacagggcttcttcctctcagcacactgtaacgtggaccagcaaagtgcgttctattgttttggtctcttcctagggatgcaagagaaagggtcgacaagtgttaccgtggattatgagttcgctgcaaggacaaggccgtcaggcgagtttgtcagcaaatataagggctactatactttcactggcggtaaggctgttgggtaccggaatctctttgcgatcccgtggccgttattcatggctgatgacagtctcttctttatcgacggggtattgcatctcagagctgagctgaccataaaacaaccctagatgaggccgtgtttgtgccgcgcgcgtgtccaaatccatgcaatggtgttctgcagtgtagaatatggaaatcttgtgtgctgttttgttttgaaaacgacaactcaattctctcttgttcagttgtttgtacacctgaggaggatcatgtcatgttttgtactctcactaaactgtgataagtgatttagctaatcaaactttaagttcaccagcaacaaaaaaaaaaaaaagcgggc

SEQ ID NO: 689 - DNA, 1044 bp, Zea mays
  Clone ID: TF_ZmC1327826_1
atggccggcctcctgccccagcatccagctactgtagacatgagtgacagcgtgctcatcagttcctgtttcacacataaattcaagatcaactatgtggagacggagaaggtcgccgtcgagcactcagtcaggtcggagcaaatcctcgccggtgggcacctctggaggatcatctgcttcccgcgtaggatcggaggtatgaaagagagcaacgttgagtacctatctatatacctctgtcatgagagcgaatccaaagacgtcaaagctgtcttcgaggcctttgtaatgtacaaagaaggcactccatctttggcccataagaaaaagctggtgcacgttttctcacccaaggccggcggcaggcacatccatggttggccttgcttcgtggagcgaagcgtcctacagtcgttctacgtgacgaattctggctcgttcgtcatcgtgggagccgtcaaagttttgcaggaggaccctctcgacgtgccgccctccaacctcgggatccatctcggcggcctcctgctgggctccacggacggttccgacgtttcgttcgttgtcggcggcgagaggttcgctgctcaccgggccgtgcttgccgcccgctcgccggtcttcaaggcgcagttcttcggctccatggcggaagccaccatgtcgtccatcaccttgcatggcatcacggcagcgacgttcaaggccatgctccgcttcgtgtacaccgatgcgtgtcctgaagaagcccccagcgaggcgtttcaggacctgctcgctgctgctgaccggttccagttggatcgcttgaagatcctgtgcgcgagcaagctgtggaataatgtctcggtggatacagtttctgctacgttgatctgtgccgaaatatataactgcccacagctgaaaaggaagtgcattgggttcttcggggaggggaagggcttcaagacgaaggctgtgttaacggatggttttgctcagctgtcgcagcagttcccgtccattcttgatgagctgaggaagaaggttggagcatag

SEQ ID NO: 690 - DNA, 1439 bp, Zea mays
  Clone ID: TF_ZmC2246_1
tgtgcggcgcccggccgggactccaagatggaacccaaaatgcagggagggattgtcatggctggcggcggcaagccgtcgtggtctgcctcgcccatcgtcgccactgtcgcgagtgggtaccacatcctcaggatcgatggctactcccacaccatggggacccccacaggagagtacatcgcgtccctcccgttcaccgtgggcggccatcgctggcacattcgctactaccccaacggcaggagctcggagaccaaagagtacgtctcgctttctctctatctccacgactgggtcgctgagacagtgaaggcgcggttcaagttccgtttcgtcggtgacgtggcggagcagccgttgatactgggaggactgcatagctttgataatattgacaacaattgggggcgccccgagttcatcaaaaggaaagatttggaagagtcgaagcatctcctagacgattctttttccattcggtgcgatgtggtcgtgcccaccaacgaagtccgcgtggtagccactgctgcggctgctatggtttccgtgcccccatctgacctgcaccagcatctcggcattctcctgctgaccgagaagggcgccgatgtggtgttcgacgtcgccggtgagacgttcgccgcacaccggtgcgtgctcgcagcccgttcgcctgtcttcagtgcagatctctttggtgcgatggaagaggggggccacaccggaggcgtggtgcgcatagaggacatggaacctctggtgttcaaggcattgctctacttcctttacaccgacttgttagagacagagacgatgaaacaaggtgaagacggagacgatgaagacgttttgtgtcagcacctactggtcgctgcggacaaatacaacttggagaggctgaaattgctatgtgaaaagaagctgtgtgagtgcatccatgtgggcacgatagcaaccatcctggcgctcgctgagcaacaccgctgccatgcactgaagaaggtctgcttccattttctcagctctcctgcaaatttgagggcagtcgccgccactgacggctttgagcatctgagcagaagctgcccctctgttatggaggagttggttgtcatgctcagcaacttggtgtagaaaactgcacagtagttgtgcatcctaggagattctcaatcttttggtgcttttgccagttgacttgactgcgtatgtgccgctctccaccaattcgcagcgggtgattttgttagctgctagctttgaatatccacaacaagtccgtctatgtgcttaatgtttaattctcagaagttggaatgcactatagctcttgctttcttatttagttgtagaattcgtttacttctagttctctagccgtcaatctagatgcatatataaaaaaaaaaaaaaaaaaaactcgagagtcttctaga

SEQ ID NO: 691 - DNA, 667 bp, Zea mays
  Clone ID: TF_LIB4741-124-A1-K1-C6
tcgagccggccgccatggaggacaccctcaagtcgctgtccatggactacctcaacctgctcatcaacgggcaggccttcagcgacgtcacgttcaacgtggagggtcgcctcgtgcacgcgcaccgctgcatcctggccgcgcgcagcctcttcttccgcaagttcttctgcggcgccgaccaggccgccgccgggcccggcgcgctgctgctggaccacctcagcccgcgctccccgtccggcacctcctccccgcgcggagcctccgccgccgcgccgggcgccgtcatacccgtcaactccgtcagctacgaggtgttcctgctgctcctgcagttcctttacagcggccaggtgtccctggtgccgcagaagggggagccccggccgggctgcggcgagcgcgcgtgctggcacacgcactgcgccgccgccgtcgacctcgcgctcgacacgctcgccgccgcacgctctttcggcgtcgaggagctcgcgctcctcacccagaagcagctggccggcatggtggagaaggcgtcgatcgaggacgtgatgaaggtgctgatggcgtcgcggaagcaggacctgcaccagctgtggaccacgtgctcccacctcgtggccaagtccgggctggccgccggaggtgctcgccaagccccccc

SEQ ID NO: 692 - DNA, 2171 bp, Zea mays
  unsure (1)..(2171): unsure at all n locations
  Clone ID: TF_ZmC2364_2
ccggccgggttatgtatggtaggaataatcctgatcaatggaggagattgtggaggcatcanagaattcgggagtacaagaacctccgggccggccgggctctcctcctttccctcccggccacttctctcgtttcgccctccccctcgagcaccccgccggctagggttacggccaccgccttccacgcctcccccacttcccgtaggcggaggctggtcggcgtgcacgcgaccgcggcggcggagatggacccggacttctcgcccgggggcggggggcccagctttgaattcgccttcaacgaggtcaacttctccgaccgggaattgcgtatcgaggtcgtcgccggggatgactacgctccggggtccagcggcgccggtgccggaggaggtggcctcgccgactgggcgcgccaccgcaagcgtcgccgtgaggagctcctcaaggagaaagaatctacaactcacatgtcagaccaaacaaattgcaatgaagttgaagcagaagagtgtgatgcgtatgaagaaaatcaagaggaacctgtagcaatggtagaagaatctccacccgatgttggccaagatggtgatgatgggcaaggtattgattcgtcttggactgtggttggtacaccagttttacgagtcaagacaatttatatcagttcagcgattcttgctgcgaagagtcctttctttttcaagcttttctcaaacggcatgaaagaatcggatcagagacatgcaacccttagaattactgactcagaggaaactgccctcatggagcttttaagctttatgtatagtggaaagttggcaactactgagcccactcttctgctggatatcttgatggctgccgacaaatttgaggttgtttcatgcatgaggtactgcagccagttgctcacaagcttgccgatgaccacagaatctgcacttctctacctagatctcccttgctcaatttcaatggcagcagcagttcaacctctgacagatgcagctaaggatttccttgctgtaaaatacaaggatttgactaagttccaagatgaagtgatgaacatccctcttgctggaattgaagccatcttgtcaagtaatgacctccaggtggcatctgaagataccatctatgacttcttgctcagatgggcccgtgcacaatacccgaaatcagaagagagacgtgagatccttagttctcggctgctccctcttgtgcgattcagtcacatgacatgtaggaagcttcggaaggtcctaacatgcacagatatagaccacgagcaggcaaccaagtgtgtcaccgaggctcttctgtacaaagctgatgcaccacaccggcaacgagctcttgcagcggacacaacaacctgtcggaaattcgctgagcgggcttacaagtacagaccactcaaggtcgttgagtttgatcggccctatccacagtgcatagcatacttggatctcaagcgcgaggaagtgctctcgactctttcctgcaggccggatatactcgcaagcgttccacctcgcagggcagggcttcttcctctcagctcactgtaacatggagcagcaaagcaccttctactgctttggcctgttcctggggatgcaagagaagggctcaacgagcgtgaccgtggactatgagtttgctgcaaggacgagaccatccggcgagtttgtgagcaagtataagggtaactacacatttaccggtgggaaggcagttgggtacaggaatctctttggaatcccgtggcaggcgttcatggccgatgacagcctcttcttcatcgacgggatgctgcatctgagagctgagcttacgataaagcaacctacgtagatgtgctgccgtcgggttaagtgtgtccagtcatgggtgatgtggaaaatgctgtgtgctgcagatatcctttttgttttttttccttttgttcacgcaccttaatccttacattaatagacagtttggtgatgacaaaatataaaggaaaaaaaagggctggaaagctgccttttgttgtttcactaagatgaaggttgtatgatctctgtctcttcgtagtggaagttgttacaccagatgaaaaagaaaagatatcggatgggaatccccccgcccttgagttctctgcaagtttccat

SEQ ID NO: 693 - DNA, 1205 bp, Zea mays
  Clone ID: TF_ZmC29433_1
gcggccgtttcaagaccagttgcgtcgtcgcccggccgctgtgcgtgcgtgcgtgcgtgctgtgccgcctttctttctcgctttaatttctttccatccatccgctttccccccctcccaatcccaatccctccaaaaatccgctccgcgcgcgcaagcgcggccggcctttatcgatccctcccggcctctagcgctgctccggcggcggagtccggccccaggaaacaaaggccgcgcgcgccgaccggaccgaccggggggccgtccagttccagttccagttccaggccgcacaagcacatgagatcatgagctcggaggactcgctcaagtcgctgtcgctggactacctgaacctgctcatcaacgggcaggccttcagcgacgtggccttcagcgtggagggccggctggtgcacgcgcaccgctgcgtgctggccgcgcgcagcctcttcttccgcaagctcttctgcggcctggacccgagccaccagccgcccccacccaccgccggcgggcgcgcgccggacctcgtcatccccgtcagctccatccgctacgaggtgctggtgctggtgctccagttcctctacagcggccaggcctccgtcgccgctcccaagagcggcccgctcccgggctgcggcgccaggggctgctggcacacccgctgcggcgccgccgtcgacctcgccctcgacaccctcgccgctgcgcgctccttcggcgtcgagcagctcgcgctcctcgtccagaagcagctggaggccatggtgaaggaggcgtccgtggacgacgtgatgaaggtgctgatggcgtcgcgcaagttcgagatgcaggagctctgggccgcctgctcccacctggtggcgcgctcgggcctctccgccgacctcctcgccaagcacctccccatcgacgtggtcgccaagatcgaggagatccgcgccaagtcccccggcggcgccgccgccgcgggcggcgccgggccgcgctcgccgttcctcctcacccaccactacctccccgtcaacggcgcgtcggcgtcggaggccgagcgcgaccacagggtccggcgcatgcggcgcgcgctggacgccgccgacatcgagctggtgaagctgatggtgatgggcgaggggctggacctggacggggcgctggccgtgcactacgccgtcgcagcactgcggccgctcata

SEQ ID NO: 694 - DNA, 1049 bp, Zea mays
  Clone ID: TF_ZmC13701_4
attgggtacctcgaggccggccgggaaacttcctttcatttctttccgttccggactcctgtttccatcctcttgccacgggtccacttgcacccccatctcctcggcctcgggaagcccagcaaccccaatccccaatcccgtccgcttctttccccgtccccgaccttggcgaggaacctccaattccccagtcctggcctcttagccccaaccctaaccctagccaatcgcattcccatggacgacgacgccggcgacgcctcgccgccgccgggacctgccccccttgctgccacaggcgccccgtcgttgcgtgacatggcggcgtcccctaccagctcgcgctccgtgacggagacggtgaacggctcccaccgcttcgtgatccagggctactccctcgccaaggggatgggcgtcgggaagcacatcgcgagcgagaccttcaccgtcgggggataccagtgggctatctacttctacccagacgggaagaacccggaggacaactcggcctatgtttccgtcttcatcgcgctcgcttccgagggcactgacgtccgcgctctctttgagctcacgctgcaggaccagagcggcaagggcaagcacaaggtccactcccatttcgatcgctcgctcgagtctgggccctacaccctcaagtaccgaggctccatgtggggttacaaacggttctttcggcgaactgctcttgagacatcggactttcttaaagatgattgtttgaggataaactgcactgtgggtgttgtggtttcaactattgattactccggaccacactccattcaggttccagactctgatattggctaccacttcggttctcttttggacagtaatgaaaggggttgatgttattcttaatgtgagtggagagaggtttcatgcccataagttggtgttggctgcacggtctactgtatttagatccaaactttttgacgatgaatcagaaggagacaagacgcgagttatgagagtgaggatctgaaggagattgttcttgatgatctagagcc

SEQ ID NO: 695 - DNA, 844 bp, Zea mays
  unsure (1)..(844): unsure at all n locations
  Clone ID: TF_LIB4757-047-Q1-K1-E12
attgggtacctcgaggccggccgggacgcctcacgacaagcgagttcgacaaccaaagtgtgctttgtcttcaccaccagtgtggataaacacgcttaagctcttcgaatcctcactgacttttctcccccgaaaggtttgcgagttcgagagtttccagagctcccaacttcacatgaacgttgcgtcacactaacctgtccactctttacgagaaacacccccccccctctcgcttcagtcgctcgcttcatcatgttcggcaagcgttctttggctagttcaaaggacaaggaccgttcaggcaagatcaccaagcagccaaagagatcgtttcgcgatgcctccaagcaaaaggccatggccgagaagctggatgcacgcaaggacagccccatgatggacggaggttcaccgcagctgacctctgccattgtgacagtcatcgttggttccgaccagcgactgttcgcggcccacgaagatgtactgtgtcattctccgtactttgctgaactgctgcggagccagttcttcgagtcaactaaccgccgcatcgatctgcccacggaagagcctgaaatcttcagttgcatcctcgagtatctgtacaagggagactactacccccgccttgtccacgacaagcggcgccagacctggatgctcgaaggtgcaattgcctcacccgaccccaacaaaaccggcgaccgcgctgccgcagtcgagccaacctttttccacaccgngcgtgggagacgttcttctccgtgacactgctgtgtactgcgctgccgatcgttacggncttgaggagctcaagaagctctccctggcgcagcag

SEQ ID NO: 696 - DNA, 1268 bp, Zea mays
  Clone ID: TF_ZmC13701_5
ctccatttcatttccgttccaggtctcctgtttccatcctcttccacggttccacttccacccccatctcctcgccctcggcaagcccagcaaccccaatccccaatcccgtccgcttctttccccgtccccgaccttgccgaggaacctcccgctcccaaatcctagcctctcctccctcgccgctcccctccccatggaggacgaggacgccggcctcggcgacgggggcgaggcctcccctccgcaccatgccgcggcgtcgggcgaccgggcgcgggacttggcggcgtccccgaccagctcgcgctccgtgacgcagacggtgaacgggtcccaccgcttcgtgatccagggctactcgctcgccaagggcatgggcgtggggaagcacatcgccagcgacaccttcaccgtcggcggctaccagtgggcgatctacttttacccagacgggaagaaccccgaggacaactccggctacgtctcggtcttcatcgcgctcgcgtccgacggcaccgacgtgcgcgcgctcttcgagctcacgcttctagaccagagtggcaagggcaagcacaaggggctataaaaggttctttcggcgtaatgctcttgagcaatcagattttcttaaagatgattgcttgaagataaactgtactgtgggtgttgtagtatcaactatggattattccaggccacattcaatagaggttccagagtctgacataggctatcattttggaactcttttggacactctggaaggtgtagatgtcatttttagtgtagcaggagagaagtttcatgcccataagttggtattggctgcccgatcttccttttttagatctgaatttttcgaccatgaatctgatgaagagaagaacgaaactggtacaggggatgaaatcaaggagatcgttattgatgatatggatcctgtagtgttcaaggcggtgcttcactttatgtacagggacaatcttgttaatgatgatgagttgatggcatcaagctctgactgctctatatttgatagtttagctgggaagttaatggctgctgcagacaaatatgagttgccaaggctaagattgttgtgtgaatcttacttgtgcaagcatgtttctgtaaactccgtggcaactactctagcattggctgatcgataccatgctatcgagcttaaatctgtttgcctaaaatttgctgctgaaaacctttcggggtataagacttacaacatgaaaatatgtttaaccttc

SEQ ID NO: 697 - DNA, 1200 bp, Zea mays
  Clone ID: TF_ZmC184_1
ccggaaaaagaagcagcagcctctgccgttcgttttatacgcttacccgacgacaggcgaccggccggcagctatagccctgcagttagtagcatctcgtttcagagctcagaggagggaggaggaagaagaagcagcagcaaggcatggattgctgcatctgcagccccgtggcgtccgtgtacaggctgccaaggaacgccatctgcgctccctgccaccaaggcgccaaggccatcatcggtttcctcgacagggatggtgagcgggaagaggacgacggcggtggccgttctgtccagctccagcctcgcggctcggccaaggggctgagagatgcgtgggagcaggtgaaggagatgagagccagggaggaggagaccaggcagagagctgccttcctccagcacggcttcgcgtcggcgtggaaggagggaatccacaccgacatcgtcgtcaaacctggcaccggtcccgcgattccagcccacaaggccatcctggccgcgcggtcggaggtgttccggcacatgctgtccggcgacgaccgctgcaaggcccccgccggcggctccatctcgctcccggagctctcccacgacgacctgtccctcctgctcgccttcctctacacaggcgctctggaggcgccaggagaaggaggaggagaggccagccaggaccaggagcggcagctgcacgcgctcctcgtcgcggccgacaagtacgacgtgccgttcctgaggcgggcatgcgaggcgcggctggcggcgggcgtggcgccccggaacgcgctgcggacgcttgaggtcgccgagctgagctccagcgccgcgctcatggagcgcgccatgggcgccgtcgtggagcacgccgaggaggtcgtgttctcggcggagtacgagcggttcgccgcacggaacgcggggctgtgcgtcgagatcacccgcgcgctgctggccaggatgccgacgccggcgaggagtgatggcccgtgcttagagcttggaagcagctgatgcatgcagttgtattgtatatgtatcagatgatgatggatcggaaagaatactactcttgtttcagtttcgagtcacgacaatatgtaattgtaaacgcataagttcttctgaaacacgggcgagcacgatgagctagactgcaagaacaacacaggtcgacgcggccgcgaattcggat

SEQ ID NO: 698 - DNA, 926 bp, Zea mays
  Clone ID: TF_ZmC34319_1
cgagagtaacggggttttcaaatttgaagttacaaagcgctcgggatttacgaaattcaacgaatttctagcgatttttcgttttcgcagacgaccaccggaaaaatgcgttcaaaacctgcacgtactaattcatcaaagaagattactacgtacgtgcatcgcttttgagaaacgagcagagcaacctgcattgtatgaaactggaaaccgttggccatggctactcagaagatcaaaacggtggcaagcttggccagtagctccttgagaacagcagggcagctggcgttgagcacctcgaagccatccgtcgtctgagtgaaggagccaaggttgccgctagaagagaggaaacggaagcacgcctccttgagcgcagggcaatggtgtcggtcagctaaaaccagcatcgtggccaccgagtccgcgcgtatgtgcttgcacagcttctcctggcaaaccagcttcatcctgtcgacgccgtacctgtccgcggcggcaagcagaagctgatactgcaccatggcttcatcgtcgtcgtcgtcgtcgtcgtcgccgctgccagtctccggcggcaacgagtcggtgtagatgaaggccagcagggcgctgaacacctgggcttccatgtcctcaaccggtatgacgacgccggtgcccttgctgctctccatcatctcgccgaacagctgcgctctgaacacgggcgaccgcgccgcgagcacgcaccggtgcgcggagaacgtctcgccgcccgcgtcgaccagctggaacgtgacgtccgcgccgtccttgcgcgccagcaggtcgccgaggtgccggtggaggtcgtcggacgggggcgccgcgacgaaggcgtcgccgtcgccggccgtggccgcggcgaagggcttgatggcgatgtcgcagcggacgcggaagca

SEQ ID NO: 699 - DNA, 800 bp, Zea mays
  Clone ID: TF_LIB4756-081-R1-K1-E6
cattgggtacctcgaggccggccgggactgatgacttcacttgtctcttattctgataaatgtgattgttttatccttgtcctgtggcagtgcacgagcatcttctgcgtaccagcgatgattttgtatggcaagtcgatgcgatgtcccatgggcgttttacgattgatgttgagtttctagacctgaggatagccacgaacaatgctacggaatcgtcatcggtgtggccaaacgaaggcatggtgcagaagatcgcgagcaagagcgccctgggctgcctgtcgcgcatgctggcggactccatccacgcggacgtgaccatcaacacgacggacggggtgctgaaggcgcacaaggcggtgctggcggcgtgctcccccgtgttcaagagcatgttcgtgcacgacctgagggagaaggagtcgtcgacggtggacatcggcgacatgtgcgtggagtcgtgctcggcgctgctgggcttcgtgtacgggacgatcgagcagggacagttctggaagcaccggctgccgctgctggcggcggcggacaagtacgggatcggcgacatcaaggactgctgcgaggagagcctgctggaggacataggctcgggcaacgtgctggagcggctccacgtggcgtggctgtaccggctggagcggctgaagaaagggtgcctcacctacctgttcgtgttcgggaagatctatgacgtgagggacgagatgcacggcttctttcaccacgcggaccgcgagctcatgcacgactgttccaggaggtgctcagcgtgtgga

SEQ ID NO: 700 - DNA, 2020 bp, Zea mays
  Clone ID: TF_ZmC684_5
cattgctacctcgagcccgggaccctcgggcgggcggggtacacccaaaaaaccacacaccacctcctcgccggctcgtcatcgacatcgccatcgccatcgccatcgtttcattgcgagtctccgtttcatctcgccccctcacccccacacacactggaatccccgcgtctgaatccggcgccccccgccccgatccgcgccgaatcgccgccgctcggggtggaaccctagcccgatctcgatccgtttctccgcgatgggcgccggccgtgtctgtcgcggcggcccctcctccgcctcccccgccgcagggcggccgttctcgacgctcgccgcgtcgtcctccgcctccccttcctcggctccttcagagacggcgtccacgtcggtcaccaagacggtgaacggctcccaccacttcaaaatcgcgggctactctctctccaagggaatcggggtggggaagttcatcgcttccgagtccttcaacgtggggggattcgactgggcgatctacttctaccccgacgggaagagcgccgaggacggcgctgcctacgtctcgctcttcatagccctcgccagcgagggcaccgatgtgcgcgcgctgttcgagctcacgctcgtcgaccagagcggcaagggtcaggataaggtgcatacccacttcgggaggtcgctcgagagcggcccatacaccctcaagtaccgcggcagcatgtggggctacaagcgtttcttcaaacgaactgccctagaaacatcagactatcttaaagatgattgccttttagtgaactgcactgttggcgttgttcaatcacatactgaaggaccaaagatatacacaattccagtaccgcggtccaacatggctctacatattggtcagctattgacaagtggaaagaggacagacattgcattcgaagttgatggagagatgtttcctgcccacaaggtgattctttcagcccggtctcctgtttttagggcacaactttttggcccaatgaaggataaggacatgaagtgtataaagattgaagacatggaggctccagtattcaaggccttgctccatttcatgtattgggatgagttgccggatattgaagagcttactggtgtaaatacaacttgggtatccaccttgatggctcaacatttactagctgctgcagaccgttatgcattggagagattgaagttgctctgtgaacttaagctgtgtgaagatgttgcaataaatacagtggcaaatactttggcactggctgaacagcaccactgttatcagctaaaaactgtttgcttgaaatttgtagctctgcctgaaaatttgaaagctgtcatgcaaaccgatgggtttgattatttgcaacaaagctgcccatccctcctgaccgagcttctcgagtatgtggccaaggcaggagagcactccgtgagcccctgcttgtattcaactgaagtccttgacggtggtgatgccaatgggcgacgcgtgaaaccaaggatctaacggttggaagaggagttcctcgtgcccattttaagttgtaaagtgtttcgaatgacgggtgcttatgtggccgtgccatatcatgcatgttgtagcgtgtgggtttgtgtgtgtgtttgtgacttccatccctctccccagccgtattgatggtactgtagagggtgttatcgctaatatataccctactgacttatgtattgcatcgctgtttcaaagcagtctgtcatcataagtgcacacaggtggaatagggcgaggatggtctggtgcaaaggtgaaataatggcacagattgtgtatgtgtgtgtcctgtttttcagaagttttaccttgcggtaggccagatttgtcgattcttagtcgtctgtatttggctgtattcaattgaaattgtgaaatgtatcagttgaagttatgcgtagacattcactgcaaacaactatgacacaaaatggtgctctcatcatgattttgcaagtgccaagtatg

SEQ ID NO: 701 - DNA, 697 bp, Zea mays
  Clone ID: TF_ZmC3486_1
tgaggccggcggtgagacattccccgcgcataggtgcgtgctcgcggctcggtcgccggtcttcgctgcagagttctttggcgcgatggaggagagtaaaagcggcagtgcggtccacattcacgacatggaggctcgggtcttcaaggctttgcttcatttcatatatactgacttgtgttggaaaacgaatgaagttgaagaggaagaagaagacgatgtcatggctcagcacctgcttgttgcagcagacaggtataacttgccaagattgaagctcatatgtgaagataaattatgcaagtacatcgatgtgggaacggtggcaaccatattggcactagccgagcagcaccattgccatggattgaagaaggcatgctttcgtttccttagctccccggagaatttgaaggtagccgtggcaagtgaaagcttcgatcatttgagcaagaattgcccctctgttatgaaggagttggttgccatgctcggcaccttacttgagtaaggctgggttttgtgtgttcttgtgttggtgtgtgctaatgtgatgtgatgaatcaaatgctcctgatttgtctgggtttctgctacctggtttctgtatgtgttgtttgataccaatgaatccaggtattcaagtcaagaaaactctgttcagtttgcactttcagtatttccggaactgactacc

SEQ ID NO: 702 - DNA, 2363 bp, Zea mays
  Clone ID: TF_ZmC13701_1
gtagcaacccacccttgtcgtccgcgtcctccacgccctcgtcggctcgtcctcgccgtcctcctccacaccgcgcgcgcggtggtgttgacccacccacccgttcctctcccaccccatcaccactgcacgcggcgctgcgtaagtccccaggacgggtaccctgccggaagtctcctgtttcagctctcttcccttcactccatcggctcgtctgtacagcatcccgtgtagcgtgtatccacctcgtcgccaccccaatcctcgttccccaatcccgtccgcttctctccccgtcccttacctcgcccaggaggggagcctcccgcttacaaaccctagcctctactcctctgagcttccaccgctccgctccccatggaggacgaggacaccggccccggcgatgggggcgaggcctctcctccgcaccacgtcgcggcgtcgagcgaccgggcgcgcgacatggtggcgtccccgaccagctcgcgctctgtgacgcagacggtgaacgggtcccaccacttcgtgatccagggctactcgctcgctaagggcatgggcgtggggaagcacatcgccagcgagacattcaccgtgggcggttaccagtgggcgatctacttctaccccgacgggaagaaccccgaggacaactccacctacgtctccgtcttcatcgcgctcgcgtccgacggcaccgacgtgcgcgcgctcttcgagctcacgctcctcgaccagagcggaaagggcaagcataaggtgcactcgcacttcgaccgctccctagagtccgggccgtacaccctcaagtaccgcggatccatgtggggctacaaaaggttctttcggcgtactgctcttgagcaatcagattttcttaaagatgattgcttgaagataaactgtactgtgggtgttgtagtatcaactatggattattctaggccacattcaatagaggttccagagtctgacataggctttcattttggaacgcttttggacactcaggaaggtgtagatgttatttttagtgtagcaggagagaagtttcatgcccataagttggtattggctgcccgatctcccttttttagatctgaatttttcgatcatgaattgggtgaagagaagaacggaactgatacgggggatgaaatcaaagagatcgttattgatgacatggatcctgtagtgttcaaggctgtgcttcattttatctacagggacaatcttgttaatgatgacgagttgtctgcatcaagctctgactgctctatctttgatcgtttgtccgggaagttaatggctgcagcagacaaatatgagttgccaaggttaagattgttgtgtgaatcttacttgtgcaagcatatttctgtaaattccgtggcaactactctagcattggctgatcggcaccatgctatggagcttaaatccgtttgcctcaaatttgctgccgaaaacctgtcagctgtgatccggactgagggtttcgactatctcaaagacaactgcccatctctgcagtcagagatactgcggacagttgccgggtgtgaggagccatgtagcagcggcttgaaaagccagagcgtgtgggcgcagctctctgacggcggcgacaccagcgggcgcagggtgaggccaagggtctgagacgcaaaccccggaagcactgacctttgtaatcaaaagctgttgtggtgtaaatgggacggcttttcttaattttcacttgagacaacgatttaaataacatgattgacgtgtttgtggtgctcgcagacattatttggttctgaacaggaattctctgagtctgccgcacattaacgataaacatggtggccttgtgtcttggcaactggtgtttgcagcaggcgggccagcagctgtctgctactaatatggatccgttgattttgttgtattcttctttcgactggaaggtatcataagtcaattaggaggtgattcttatatgtattcgttatgctgcaaaagtgaaggtgacaatatttttggtttattggcaagtacatggaatttacatttttgttgagatggttcgtagatggagtaattttgctgtaaagatatagtggtgacaagttttttttgtttgtttggattttttacatttctgttcgcaagtatcgtcatctgtcaatgttgagaggtgatgatatataggattgtcctttggtggcctccattgaaaaaaaaaaaaaaaagaaaaaaaaataaaaaaaaaaaaaaaaaaaaaacgctctagagacgacaggtttgtttttttccttgtattgtgggccgttttttcttttattaatataatgatatgttcaaggaatctt

SEQ ID NO: 703 - DNA, 1425 bp, Zea mays
  Clone ID: TF_ZmC868_1
aaggaacagtttttgtactcctcgcctgtgtcgtcaaatcctccacaccctggactggagtggctgctgctcgtgcccggcgatgagcggcggcgggcccggaggtgcgtgcgggccggactcccgcgtggagaccatctcccggctggcgcagtggcgcatcgataccttcggcccctgctcctaccgccggtcggacccctttaagctcggcatctggaactggtacctgtcggtggagaagagccgctccatcgttgtgcgcctcttcccggagcccggccgggtggccaaggagcagccccctctcgcgcgcttcctgctccgcgtctcctgggccggcccgccgcgacgctcctgcgtctcccctgtgcacgagcatcttctgcgtaccagcgatgattttatatggcaagtcgatgcgatgccccatgggcgttttacgattgatgttgagtttctagacctgaggatagccacgaacaatgctacggaatcgtcatcggtgtggccaaacgaaggcatggtgcagaagatcgcgagcaagagcgccctgggctgcctgtcgcacatgctggcggactccatccacgcggacgtgaccatcaacacgacggacggggtgctgaaggcgcacaaggcggtgctggcggcgtgctcccccgtgttcaagagcatgttcgtgcacgacctgagggagaaggagtcgtcgacggtggacatcggcgacatgtgcgtggagtcgtgctcggcgctgctgggtttcgtgtacgggacgatcgagcaggggcagttctggaagcaccggctgccgctgctggcggcggcggacaagtacgggatcggcgacatcaaggactgctgcgaggagagcctgctggaggacataggctcgggcaacgtgctggagcggctccacgtggcgtggctgtaccggctggagcggctgaagaaagggtgcctcacctacctgttcgtgttcgggaagatctatgacgtgagggacgagatgcacggcttcttccaccacgcggaccgcgagctcatgcacgacatgttccaggaggtgctcagcgtgtggaagcccatgtgaatggaagtgtccctttccacgcgagctgtgtgtgtgtgtgtgtgtcgtgcttgttcagtcagcagtgtgtggagagcatgctggttatgcatatttgaaacgaaaaggatgctcagaatttgaatggaagctaaattatacatgatgagacagaaaaaaaaatagtcgatccagatgtgttcaagtctaatagatcttgtgtgggtacgaatggaagcagccaacttgggcttgaatgctccctagttggctgagaaatgttgacattgtttgttctagatgagggttacctggcctgggaaatgttgtagctaaaaaaaaaaaaaaaaaaa

SEQ ID NO: 704 - DNA, 1076 bp, Zea mays
  Clone ID: TF_ZmC868_3
ccacaccctggactggagtggctgctgctcgtgcccggcgatgagcggcggcgggcccggaggtgcgtgcgggccggactcccgcgtggagaccatctcccggctggcgcagtggcgcatcgataccttcggcccctgctcctaccgccggtcggacccctttaagctcggcatctggaactggtacctgtcggtggagaagagccgctccatctttgtgcgcctcttcccggagcccggccgggtggccaaggagcagccccctctcgcgcgcttcctgctccgcgtctcctgggccggcccgccgcgacgctcctgcgtctcccctggctacggaatcgtcatcggtgtggccaaacgaaggcatggtgcagaagatcgcgagcaagagcgccctgggctgcctgtcgcacatgctggcggactccatccacgcggacgtgaccatcaacacgacggacggggtgctgaaggcgcacaaggcggtgctggcggcgtgctcccccgtgttcaagagcatgttcgtgcacgacctgagggagaaggagtcgtcgacggtggacatcggcgacatgtgcgtggagtcgtgctcggcgctgctgggtttcgtgtacgggacgatcgagcaggggcagttctggaagcaccggctgccgctgctggcggcggcggacaagtacgggatcggcgacatcaaggactgctgcgaggagagcctgctggaggacataggctcgggcaacgtgctggagcggctccacgtggcgtggctgtaccggctggagcggctgaagaaagggtgcctcacctacctgttcgtgttcgggaagatctatgacgtgagggacgagatgcacggcttcttccaccacgcggaccgcgagctcatgcacgacatgttccaggaggtgctcagcgtgtggaagcccatgtgaatggaagtgtccctttccacgcgagctgtgtgtgtgtgtgtgtgtcgtgcttgttcagtcagcagtgtgtggagagcatgctggttatgcatatttgaaacgaaaaggatgctcagaatttgaatggaagctaaattatac

SEQ ID NO: 705 - DNA, 1924 bp, Zea mays
  unsure (1)..(1924): unsure at all n locations
  Clone ID: TF_ZmC13701_2
cnncggccgggaaaaagaaaagaaaagaaaaactcaaaagcgcacggcgggccggcggcacgccgcacggctacggcagaaaagttagcaacaacaaaccagcggagctcgaaatcgaattccccaatccccgccttcctcggttccctcaccgcgaaccctaaccctagtccaccccgctcccatggacgaggatgctggcggcgcctcgccgccgccggtgccactggctcacgtgccccctcttcagcaacccaccaccgccgccccctcgcatcgggacatggcggcgtcccccaccagctcgcgctccgtgacggagacggtgaacggctcccaccgcttcgtgatccagggctactcgctcgccaagggcatgggcgtggggaagcacatcgccagcgagaccttctccgtgggcggataccagtgggcggtctacttctaccccgacgggaagaaccccgaggacaactccgtctacgtctccgtcttcatcgccctcgcttccgatggcaccgacgtgcgtgccctcttcgagctcacgctccttgatcagagcggcaagggcaagcacaaggtccactcccactttgaccgctccatggagtccgggccgtacaccctcaagtaccgcggatccatgtggggttacaaacgattctttcggcgaactgcccttgaattatcagactatctcaaagatgattgtctgaaaataaattgcactgtgggagttgtagtgtcaactatcgattactccataccgcactctatccatgttccagactcagacatcggctatgattttggttcactgttggacagtcaggagggtgctgatgtcattcttaatgtgggaggagagaggtttcatgcccataagttagtgttggctgcacggtctcatgtattcggatctcaattttttgatgatgaatctgatggagagaagagtgaggttaatgagactgatgaactaaaagagttttctattgatgatatggagccaaatgttttcaaggcaatgcttcacttcatctatagagatacccttgttgatgatgatgagttgggcgcgtcaagctctgatggttctatctttgatactccggcagctaagttgttggctgcagccgataagtatcacttagcaagactaaagtcgctatgtgaatcttacctgtgcaagggcatatcagtggcctcagttgcgagtacgttagcattggctgataggcaccatgccatggagcttaaagctgtttgcctaaaatttgctgctgaaaatctttcagctgtaatgcggagtgagggtttcatttacctcaaggacaactgcccatctctccagtcagagatactgaaaactgttgcagggtgtgaggaccagtgcagcagtgttgggaagagccagagcgtttgtgggcagctctcggacggtggcgattccagttgccgcagggttaggcaaagaacctgaggtcaacccagaactgacatggttagccagctcttgctctgtaaatgacgatggcaatcatctgtatgtgaagaaaaaacaatttgaaggagctgtaactagctgtatctcatcatgctccttacatcttacctgccgtcttgtttgtaactagttgactgtttggtcatgagcagttactgaatcgatgtgtagacagccctgcaaatgctcacgagtcaacgataaacatggtggccttgtgtcttggcaactggtgtttgcagcaggcgggccagcagctgtctgctactaatatggatccgttgattttgttgtattcttctttcgactggaaggtatcataagtcaattaggaggtgattcttatatgtattcgttatgctgcaaaagtgaaggtgacatttttttttggtttattggcaagtacatggaatttac

SEQ ID NO: 706 - DNA, 785 bp, Zea mays
  unsure (1)..(785): unsure at all n locations
  Clone ID: TF_LIB4729-113-A1-K1-H2
aaacctactccaaatggagtccaaaatgcagggagggattgtcatggctggcggcggcaagccgacctggtctgcctcggccatcgtcgccactgtcgcgagtgggtaccacatcctcaggatcgatggctactcccacaccatggggacccccacaggagagtacatcgctggcacattcgctactaccccaacggcaggagctcggagaccaaagagtacgtctcgctttctctctatctccacgactgggtcgctgagacagtgaaggcgcggttcaagttccgtttcgtcggtgacgtggcggagcagccgttgatactgggaggactgcatagctttgataatattgacaacaattgggggcgccccgagttcatcaaaaggaaagatttggaagagtcgaagcatctcctagacgattctttttccattcggtgcgatgtggtcgtgcccaccaacgaagtccgcgtggtagccactgctgcggctgctatggtttccgtgcccccatctgacctgcaccagcatctcggcattctcctgctgaccgagaagggcgccgatgtggtgttcgacgtcgccggtgagacgttcgccgcacaccggtgcgtgctcgcagcccgttcgcctgtcttcagtgcagatctctttggtgcgatgggaagaggggggccacaccgggaggcgtggtgcgcatagaggacatggaacctcctgggtgttcaaggcattgctctactttctttacaccgacttgttanagacagagacgatgaaacaag

SEQ ID NO: 707 - DNA, 494 bp, Zea mays
  Clone ID: TF_ZmC142074_1
cggacgcactttttttggtaacagaaggaaaaaaccccatcaacatgaactctatgtcttcaagtcttgcaagaaccggtcaatgggttttttctcaagatattccgaccgatgttgttgttgaagtcggagaagccaatttctctcttcataagttcatgttagtggctaagagtaactacataaggaagctaataatggaatccaaagatagcgacgtgacaagaatcaatctctcggatatacccggaggtcctgagatatttgagaaagctgccaagttctgttacggtgttaacttcgagatcaccgttcagaacgtggcggctcttcattgcgcagccgagttttttcagatgaccgataagtactgcgacaacaaccttgctggtcggacacaagacttcctttctcaagtagctctctctagcctctctggagctaatcgtgtcctcaagtcttgcgagattctccttcctatttctcgtgatctt

SEQ ID NO: 708 - DNA, 3011 bp, Zea mays
  Clone ID: TF_ZmC22965_1
ggggttagatcgcagcacattacccgaatccgagcaatcatcatttttcgcctttcttctacctcccgactctctggcctctcctgactctgccccgcctcatcactcccattccaccgacacgcggcggcggcgtgtcgcgcgcctccgctaaaaccgtagcccgaggcccgatggccgccccgccgcaaccgcacccacaggcagcggaggagagggccgcgccggcggttcccctgcccactgccccggcgggtccgcggccgtacgacgtggcggtcgcggcggcggagctccggccggtagactgcaacctcgccgcgctctgtgaccacgtccaggcggaggggttcgggttgggggccttctccgacctcgtcgtggaggccgcgggcgccacctaccgcctccatcgcctcatcctctctcgtagcgcctatttcaggaatatgctacatggtccttggagagaggcgggagcacccacagtggttttgcacatagatgatgccaatgttgattcagaagcaattgcaattgcgcttgcatatctttatgggcaagcccccaagcttaatgataacaatgcattccgggttcttgcagctgcatcatttctggatcttcaggacttgtgcacgatatgtacagattttattatttctgagctttggacatcgaactttttacaatatcagttgtttgctgagagtcaagattatggtagccatggagagcgtgtcaggaatgcttgctggggttatctttgtcaaagtgccacactggaattgcgagaggttctaccaaagctttcttcacagactttgcatgctctccttacatctgatgaattgtgggtacctaacgaggagaaaaggtttgaactagcattgtttactctacttgcaaaggttactacgtgtgagatacaagttagtgggaatgaaacaagcttaccaagtgctgatcgatccatgaggaaggggaaggctccaatgaacgaatctggggaggaactgttaatggactctgaattgaagaacttgaagttgcatgataacttggggaatgaaattccccataacattattgctatttcagatatgaatggtgaagctcccaagagaatggagtttgattgttctactggaggaccatctggagaaagcacttcatatcaatttaatgaaaataactggatttctagtgagcaaactgcaaataattatttctcaagaactttcagtagtggtgttgttcctactgagtggggaaggcccaatgcaccactttggggtggcagggtcgttggacggcggcaaattagatacattagaggaagctcttgtctatctactgatgaatataatgcttttatgaatatatttgagagaggttctcttctctactgcaatatgtcctttgatgcactgctaagtgttcgaaagcaactcgaagaatttggattcccttgtaaagctgtcaatgatagtctatggctacagatgcttctgtgtcacagggtgcaagcgattgttgctgatacttgcaggaattgttgccttatgaatagttcttgtgcttgcaagcaagcatatgtgagctcgcatacacattacaggcaggagcatgacaggagcagtgcctccgacaacataggtaatgtctaccttgcggatggccagggtgatgggaatggtgtacttgggcctgtccgtgttaatgtaagaggagcagtcgatggacttgctggtattgggagagggaactcaaatgtgcctggtgcagcttgggctcctacacgttaggtcttctcccgtgtcccttatgggcttggttcaagaaatggccagcaatttgccattgatgaatcagaacctagaattgaccgcaatggagatatttcagcagatggtctgactgcattggttaaccttagccaagaaaacaatgctgctcatctgcaggatcaaagtctatttgagacagggatgcagacaagatatcgcagtgttccatctgtttccactccaggtggttcttctgtccagatgcaggagtcaaaggagcatgaatgggaaaccacaaaggatgcaactatatcattagacatgaaaacacctcttagccattttccacctttccgctttggggttgagttcgatgatgtgcacaggcttgctgatggtcatgtgaaacattcgactgaagtgttttatgcaggctctctatggaaggtgagtgtccaggcattcaatgatgaggatcctcatgggcgacgcactcttggactttttctccaccggcgcaaggctgagttgttagatcccttgaggaaggctcacttgtacgtcgacccccgggaaaaggtcactgcgcgctatcagctcatctgtccatcaaagagggaggtcatggtatttggatgcctgaagcaggctgggacgctgctgccgaaagccccaaagggctggggttggcgcactgctatactgtttgatgagcttgcagatcttctccagggtggtgccctgcgaattgctgcagtggtccagctcgtctaaacttgagttgtagaaaacaactgcttgcttgcaaggatggtgacaccacggcagtttgtgtagttggtacctgcaagaactcaatccgtcatgtattcgttctctgtaattgtgtattactgtatagtggttcgttgtttgatgctcactccgtcctaaaatatagttctttctggtccttttttccgtccacattcgaacaaatgataatgaatagacatacatacaaactacattcataaattaagttaagtagtcaatgcttgtttagtgtaaaacgaattatattttaggacggggtgagtatgtaagaactcaatctgtcatgtactcgttgtcatgtactcgtgctctgaaatattgtataatctatagcggtttgctgtttggtaaataaaagagaatatatcagatgcaaaccaaccacttgtaaaaaaaaaaaaaaaa

SEQ ID NO: 709 - DNA, 1527 bp, Zea mays
  Clone ID: TF_ZmC13598_1
cctcgaggccggccgggtttcccggatgcaataatttttttccgccaaagccaggattcctctgctcttcctgtttagggtttccccctctctctgctcctgccggatgcgatggcgattccgccgcggactccttccccgccgccatcgtggtcgcgctctgtaaccgagaccgttcgggggtcccaccagttcaccgtacggggctactccctcgccaagggcatgggccccggccgctacctcgccagcgacgtcttcgccgtcggaggataccactgggccgtctacctctaccccgacggcaagaacgccgaggacaactccaactacgtctccgttttcgtcgccctcgcttccgacggcatcgacgtccgagccctcttcgagctcaccctcctcgaccagtccggccgcggctgccacaaggttcactcgcactttgaccgctcgctcaagttcggcccatacaccctcaagtacaggggatccatgtggggttacaagcgcttctacaaaagaacactcttggaagaatctgatttcttaaagaatgattgcctagtgatgaactgcacagtaggtgttgtcaagaaccgtatagaaacaccaaaggacatccagattcatgttccacgatcagacatgggccgctgcttcaaggagctcctcagccgctgcattggatgtgacataacattcgaagtgcgagatgagaaagtcagggcacacaagtggattcttgctgctcgctccccagtatttaaagcccagttctttggtcctattggaaagcctgacctgcacacggttgttgtggaggatgtggaacctgttgtcttcaaggcaatggtgaacttcatttacgctgatgaactccccagcattcctgagctagctggatctgcctcaacgtggacatcaacagtagtagtacagcatttgttggcagcagctgatagatatggactggtccgtctgcgtatcctgtgtgaatcaaagctctgtgatgaactgactcctgaaactgtcgcaacaactttagcccttgctgaacagcaccattgtgctgagctgaagtctgcatgtctaaagttcattgctttgcgaggaaatttgggagctgttatggagacggaaggctttgattacctggaggatacatgcccgtccctactatctgacttgttagctactgtggcagtcgtggacgacgatcttgcatcccttaaccgaaaaaggggagtcagcgggaaccaagtcatggctctagtgggaagcgttgaaaggcgcacccggaggaagctttagtagctggcttccctagagggagactgtagttgacaacgatttgatttggacgctggtagctgtgaataatatcgtatccagatgatttttttttttttttgcagaagcagaagttgtaaattttttgaattgaatgcctttttttttctgtttgggacccttccttacgtaaagttctagcttttatactgttttcaatactctaaattgtcccct

SEQ ID NO: 710 - DNA, 829 bp, Zea mays
  unsure (1)..(829): unsure at all n locations
  Clone ID: TF_LIB4741-097-Q1-K1-A11
agcatcatcttcgaggcgtagccagaatgatgtacactggtcttccgccaccagcttgggagccggcactaccactacaagacggacaccagccgccactacaccgtcatcctgggcagccataggaacaagcggctcaagatcgaagtagatggaaacactgctgttgatgttgctgccgtcggtctctgctgctcctcgtctttccagagctactggatcagcatctatgacggatacataagcatcggccaaggaaagcatccaagcaacaatctcctcttccagtggcttgatcctgatcccaacccacatgttcagtatgtcggcctatccagctgggacaagcatgtagggtacagaaacataagccttcttccatcagctcccccaaatagcatattttggactcaaattgagtacgccaatgtccacccggatgctgacgccagggattatgtgaggaaagataattgtggtcaacgggtacttgcagactttctagagaactgggatttctctgatgccgtatttgtcggtggcactgaaagaaaggtcgtccctgcacacaaacttgtcttgtgtgcctctggagatttcccttttgaaataggggatggagctaccattgtgcttccatcagcatcctaccctgttctccactctcttcttgagtatatctatacaggttcgacccagattgctgaatggctactaagttctctgctggagttaagctcacagnttanagtcgacccactgatgaagtggtgtaaagacatcattgactgtttagaagtggataagaaaccttcccgatctggaaaat

SEQ ID NO: 711 - DNA, 774 bp, Zea mays
  Clone ID: TF_ZmC560263_1
cattgggtacctcgaggccggccgggaaaaaccctcccattccccctccgctgccgccgcccacccgacccaaccgatcgaggcgcgccagcgccaggccgccagcgccctacgttgttgtcctccatgccgggatcatctggctctcccgctgctggctacagtaggagcggcgacggctcgcactctgcctccgccatcgtcgccggcgctgtgaccggctcccacgtgcttaagatcgtgttctactcccgcactaaggaggtccccaatcgtcaggtcatctgctcccgtcacttccgcctgggaggacacacctggttcgtgaagtattaccccaatgggaacgccgccgacaaagccgatttcatatcgttgtatctcgctatccatggtgcagtagtcggcaagccagtgaaggcgcaggtcaccatcagtttactcgaccaggacgggaagccggtgccgtcgtacaccaaagtcacaccattcgtggacttcgctgcgaaaggggactggggatacacagagttcatcgagaggaaagctctggaggaatccgagcatctcagggatgactccttcaccgtcaggtttgatgtgaccatcatgagcgacatccaaaccgtagaaatgccgtcagtggtcgtgccgccgtccgacatgcaccggcactacgctgatctcctgctgagcaaggaaggcgccgacgtcaaattccgaatcggcgggcagacattcaccgcccatcggcttgttctctcgacacggtcg

SEQ ID NO: 712 - DNA, 1192 bp, Zea mays
  Clone ID: TF_ZmC1125_1
ccacgcgtccggtgagcaattcgtgttatagttcaacactttcagacgttactttcttggtagaaggttggtactatttcacgaccctgatttcatcagtataattcttttcaatcgtgtaccagataatcttaatcccttctacaggaaagcgattttatgcacacagaattgctttgcttgcttcttctgatgcatttcgtgcaatgtttgatggcgggtacagggaaaaggatgcaagggacattgaaattcctaatatcagatgggacgtctttgaactcatgatgagatttatctatacagggtcagttcaggttaccagtgaaattgcacaggatcttcttagagctggtgatcagtatctcttagaaggcctcaaacgcctatgtgaatatactattgcgaaggatgtgaatctagataatgtatctgacatgtatgacttgtccgaagcctttcatgccgtgtcactgagacatacgtgcatcttgtacattctggaacattttaacaagatctgcaccagagccggttctgcacagctgatccagcgtgttattccagagatccgcaattttctaaccaaggcactgagttcatcaagaagtccaagtccaagcgacaggaactcgcagacttgatgagtcccaattcattggcaccgacgccgtcatctgaccaaagttgctggagatcctgtacagtaaaatttctggcgctgagcgttcaatggtatctattttgggtacatggtggcgcggtccttgaaattaacatcagcaatgtaacaaaattttctaagatctagttgaggataaggataaggagaacatgtctcgtactcatgcatcgaccagcttacactgggataggctatagttggatggtcctggccgtaattcgtcggtctcagctttgattgagtttagtgttgttttcactttccagttcacagttcagtgtatgcccgcatctgtttatttaaagtattaagcgtgaacaagttagacattaggacatgtacaatgatgttgtgataaagctgtctgtgtagatccaccgattggagttaccgaaacaactatgtaacatcatagatgacattagatgcatgataattgctggtaaagcttggtcaaaaaaaaaaaaaaaaaaaaaaaaaaaaaaaaaaattaaaaaaaaattaaaa

SEQ ID NO: 713 - DNA, 2462 bp, Zea mays
  Clone ID: TF_ZmC2364_1
tctttccgctctcccggccatttctctcatttcgccctccctccgccggctagggttactgccaccgccttccacccctccccgactgcccgtgggtggaggaggctggttggcgtgcaggcgacctcggcggcggagatggagccggacttctcgaccgtgggcgggcccagctttgagttcgctttcaacgaggccaacttctccgaccgggaattgcggatcgaggtcgtcgccggggatgactacgctccggggtccagcggcgccggtgccggtcgacggcggggggagcccttttcctaatcttgctgctaccgcgcgctccctctcccccggccatttctctcatttcgccctccctccgccggctagggttactgccaccgccttccacccctccccgactgcccgtgggtggaggaggctggttggcgtgcagggtacctcggcggcggagatggagccggacttctcgaccgtgggcgggcccagctttgagttcgctttcaacgaggccaacttctccgaccgggaattgcggatcgaggtcgtcgcgggggattacgacgcgccggggtccactggcggcggttccggaggaggtggcctcgccgactgggcgcgccatcggaagcgccgacgcgaggagctcttcaaggagaaagaatctacaacctacatgccagaccaaactaattttaatgaagtcgaagcagaagagtgtgatgcatatgaagaaaatcaagaggaacctgtagcaatgatggaaggatctccacctgatgttggtcaagatggtgatgatgagcaaggtattgatccatcttgggctgctgtagttacgccggttttacgagtcaagacaatttatatcagttcggcgattcttgctgcgaagagtcctttctttttcaagcttttctcaaacggcatgaaagaatcggaccagagacatgcaacccttagaattactgactcagaggaaattgccctcatggagcttttaagctttatgtatagtggaaagttgacaactactgagcccactcttcttctggatatcttgatggctgccgacaaatttgaggttgtttcatgcatgaggtactgcagccagttgctcacaagcttgcagatgaccacagaatctgcacttctctacctagatctcccttgctcagtttcaatggcagctgcagttcaacctctgacagatgcagctaaggattttctcgctgtaaagtacaaggatttgattaagttccaagatgaagtgatgaacatccctcgtgctggaatcgaagccatcttgtcaagtaatgacctccaggtggcatctgaagataccatctatgacttcttactcagatgggcccgtgcacaatacccgaaatcagaagagagacgtgaggtccttagttctcggctgctccctcttgtgcgattcagtcatatgacgtgtaggaagctgcggaaggtcctagcctgcacagatatagaccacgagcaagcaaccaagtgtgtcaccgaggctcttctgttcaaagctgatgcaccacaccggcaacgagctcttgcagcggacgcaataacctgccggaaattcgccgagcgggcttacaagtacagaccactcaaagttgttgagtttgatcggccctacccacagtgcatagcatacttggatctcaagcgcgacgagtgctctcgactctttcctgcagggcggatatactcgcaagcgttccaccttgcagggcagggtttcttcctctcagctcactgtaacatggagcagcaaagcgcgttctactgcttcgggctcttcctggggatgcaagagaagggctccacgagtgtgacagtggactacgagttcgctgcaaggacgagaccatccggcgagtttgtgagcaagtacaagggtaactacacattcaccggtggaaaggcggttgggtacaggaatctctttgcaatcccatggcagaagttcttggccgatgacagcctcttcttcgtggatgggatgctgcatctgagagccgagcttacgataaagcaaccctagagcaatggtctctgtatagtggtagttgttacgacagatgaaaaatatatcggatgggatacctcacaagttccagttcgctgcaagtttccagattggccggtatctcactgccaatgagcttgtttgcctccgtaacggcgcagggtgtgtaatggcttatttattcctagtatatacaagttggggtgagatgtgcgaggagcagcagcggtggcggcgatctggatgaagactccgtcccccgacctgtgcaccaggacggcggggaagcacgccaacaagtacaaggtggtggacgcggtgacggtgctagagatgcaggtggacgcgttcaagaagcgcgtgaaggcggcgcggaggctcgccaacgatgaggtcaagacgg

SEQ ID NO: 714 - DNA, 939 bp, Zea mays
  Clone ID: TF_ZmC1239096_1
cagatgcagcgtcgacggatacgactgggagatccagttccgcttttcaccttacgagggcagtcctgaagactactggtagcgctcgtgcttgtgtacctcggcgcgccgtgcgacggcggtgtggcggtggctctgagctgtcatctggttgatcagagctgcgatcttcgtgttccattattaacaacaacacaaggtctaaacacaacgtttaggcgtcccttggaccgctctcctccgatttacttcggcaaagggaaggttagagacgatgtgcaggcagcagcagcagctggtcgcccgctaatattcaagggtggttcatttactgtggaatgccagatcgacgtgcacagcagcagggactcagattccgtttctctgccgtcctctgacctgccccaacacctcggggagctcttgcggaaccagtctggtgcagacgtcaccttcatcgtttctggcgagtccatcgcagcacacaagagcatactagccgcaaggtccccgatcttcatggcccagttctttggcaacatgctggagaggggctcccagtgcgtggagatccaggacatgcacccggccgtgttcaaggccatgcttcactacatctacactgacacagtgcctgaccttggtactgataccaccacggtcgaggagacagcggtgatggctcagcacctgcttgtagctgccgacatgtatgcgctgcacaggctcaaggagatctgcgaggaaaggctcacccgcggcatcggcattggcacggtggcgtcgacgctggctctagcagaccagcacaacttggcccagctcaaggctaagtgcatcgacttcatcactggagggtccagtgaaaatcttctagccgtcttgagacggaagagtacaggcatctggaggccagcgacagcaacggaattcgagctc

SEQ ID NO: 715 - DNA, 415 bp, Zea mays
  unsure (1)..(415): unsure at all n locations
  Clone ID: TF_LIB189-031-Q1-E1-F6
agcccacgcgtccgcccacgcgtccgcccacgcgtccgcccacgcgtccgcccacgcgtccggggctgcctgtcgcacatgctggcggactccatccacgcggacgtgaccatcaacacgacggacggggtgctgaaggcgcacaaggcggtgctggcggcgtgctcccccgtgttcaagagcatgttcgtgcacgacctgagggagaaggagtcgtcgacggtggacatcggcgacatgtgcgtggagtcgtgctcggcgctgctgggtttcgtgtacgggacgatcgagcaggggcagttctggaagcaccggctgccgctgctggcggcggcggacaagtacgggatcngcgacatcaaggactgctgcnanganagcctgctggaggacataggctcgggcaacgtgctgg

SEQ ID NO: 716 - DNA, 1043 bp, Zea mays
  Clone ID: TF_ZmC3490_1
gctcacttggacccggccgggtttgccctcacagccctcgaaggcaccacccgcgccgccgccaccgctccgaaaatacagccatcgtagtgcggcggctaggtcggccggcgtttggaggagctccgaagatgtggtgccagtcgtgcaaggaagggtacgacgaggaggacgccgggacctgcaaggagtgctacgaggaggccagcgagacggaggaggagctcaagcgggagatcgacgacctccgctcccgcctcctcttcctccgcctcccctcccctaccctagacgccgcatcagcccccaactgcgacctcctcctccacgccatcccctcgaccggcgcgggaggcgaacgcgatgctgggcgcacccccgacacacccgccgtgcccgcccatcgcgtcatccttgccagcagatctcctgttttcagagcgatgcttgagaatgagatggaagagagtaggagtggtgtcatcaagatctatgatgtgtcttacgacatccttcgtgcttttgtccattacatgtacactgcagaagcccttctagatgaacagatggcatctgacctcttggtgttggctgagaagtacgaagtaaagcacctgaaggcatactgtgagaagttcataacatccaaagtgaatgacgacaatgctattacccactacgccttcgcgcaccgtcacagcgcaaagcagctgctggaggcctcgctttctgtgctcatggccaacatgtctacgctatcggatcgtgaagaatacaaggagcttgtggagaaggacccaaggcttgttgtggagatttatgaagcatatctcaaccggcaagtcaacactgcagctgggaaggacacaaattgtagcaacaggaagtgataattacgaacagaactcgtgcagtagcaatattctaactacgcatttgtgcattcatgtaagcaagttaagaacatcatattctcatgctgtcttgatttaactgctaatttttttgatgataaatcaattaaaaaaaaaaaaaaagcggcc

SEQ ID NO: 717 - DNA, 1978 bp, Zea mays
  Clone ID: TF_ZmC1125_2
agcagctgctggggccttgcgtactttatcctttaaaaatgatgaaaataaaactcagattgtgcaatgcaatgctttgccaactttgatcttaatgctgcgatctgaagatgctgcaattcactatgaagcagttgcgatcattggaaggttggttcattcatcacctaagatcaagaaggaggttcttaatgcaggggcactgcaacctgtgattggattattaagctcatgttgtacagaaagccaaagagaggctgctttgttgctagggcaatttgcttcagccgactcagattgcaaggtccatattgtgcaaaggggtgcagtccgtccactaattgaaatgctacagtcggctgatgtccaactccgggagatgtctgcttttgcacttggcaggcttgcccaggacacacataaccaagcaggtattgcatataatggtggcttggtgcctttgttaaaacttcttgactcaaaaaatggatctctgcaacataatgctgcatttgccctttatggagttgcagataatgaggactatgtatctgacttcattaaagtaggaggtgtccaaaagttacaagatggagaatttattgtccaggcaacaaaggactgtgtggcaaaaacattgaagaggttagaggagaagataaatggacgagtgttgaaacacttgctttatttgatgcgagtaggagagaaatctgtgcaaaggcgtgttgctctggctcttgcacacctttgtgcccctgaagatcaaagggcaatttttattgataataatggtctcgacttgcttcttgatcttcttatttccatgagcccaaaacatcaacaagatggctcagcagcattatacaaattggccaacaaagctgcagcactttctcccatggatgctgcccctccatctccaacacctcaggtttatcttggtgagcaatacgtgaatagttcaacactttcagacgttactttcttggtagaaggaaagcgattttatgcacacagaattgctttgcttgcttcttctgatgcatttcgtgcaatgtttgatggcgggtacagggaaaaggatgcaagggacattgaaattcctaatatcagatgggacgtctttgaactcatgatgagatttatctatacagggtcagttcaggttaccagtgaaattgcacaggatcttcttagagctggtgatcagtatctcttagaaggcctcaaacgcctatgtgaatatactattgcgaaggatgtgaatctagataatgtatctgacatgtatgacttgtccgaagcctttcatgccgtgtctctgagacatacgtgcatcttgtacattctggaacattttaacaagatctgcaccagagccggttctgcacagctgatccagcgtgttattccagagctccgcaatttcctaaccaaggcactgagttcatcaagaagcccaagtacaaccgacgacaggaacttgcagacttgattttgagtcccaattcattgacactgacaccgtcatctgaccaaagttgctggacatcctgtacagtgaagtttctggcgctgcgcatttgatggcatctgttgtggtacatggtggccggctcctcaaaattaacatcagcagcttaacaaacttttgtaagatttagtggaggatatgggtaaagagaacccgcgtcttagtcatgcctcgaccagcttacactgggataggctgtagttgtgaatggtcttggccgtaattcgtcggtctctgctttgtttctgagttgtgtttgtttcaagttcacagttcagtgtatgcctgcatatgtttaaagtatgaagcttgagcaagttagaaattagcccctgtagtgataaagctgtctgtgtagatccaccgattggagttaccgaaacaactatgtaacatcatagatgacattagatgcatgataattgctggtaaagcttggtc

SEQ ID NO: 718 - DNA, 1767 bp, Zea mays
  Clone ID: TF_ZmC2315_13
ataaataccatgttacggtccaattccaatcaaccacgccgtctaaaaccacgagatccccggtgtcccactaatccatcagcagccgcacatagtaagggtgtacccagcaattcggccgcacgatgcacgagcaggaacaacccacggagtcccacaagggtcactgacagacacgcaagacagattcccttcaccttgctcccatcagcatttcatgggagccattctgccatgacaagagaattacaaagatgccctcgtcccggcattaaatacacctccccgctcggcctgatcccctcccccttccctcctctccgcctccgattggagtggctcgccttcttccccgcagccagcacgagcttgtcgagatttcagctcgtttctccgccagaggtcgagcaggccagcttcccaggaccgaagctctgcccggttcgccagtccaggaactgctgctctcccggggccagagatccaaacaaacctctgcgttggggttctccggggttccttgcgctggagggaggtttcgttctcgccggccatggtttggctgagaagaagcagcagcatattgatgcgaaatctctgagctttatgaagatcgccactcacctgcgccgctcctgcttcctccactccttctcggtcgtcttcctctactggttttatgtgatctcgtaacttgccctcctccggatccgccattccccgtgccctctctctctctctctctctctctctctctctctctctctctctctctctctctctctccgtcccctcttgcttctcccttctttcttgccttcccgaacaaccgccgaagaataatagcactagcactagcgctagcgatagaggaattttgttggaggtaaagtagccagaccgaccgggggaaaaaagagcgtgtcttgatgtcgtcgtcgtcgctgtcgccggcggggaggacgtccgggtcggacggcgactcggcggcggacacgcgccggcgcgagaagcggcggctgtcgaaccgcgagtcggcgcggcggtcgcggctgcggaagcagcagcacctggacgagctggcccaggaggcggcgctcctgcaggccgagaacgcgcgcgtggcggcccgcgccgcccgacgtcgcgtcgcagaacgcgcgcgtcgagcaggagaacgccgtgctccgcgctcgcgccgccgaactcggcgcccgcctccgctccgtcaacgaggtgctccgcgtcgtcgaggagttcagcggcgtcgccatggacatccaggaggaggtgccgccggcggacgacccgctgctccgcccctggcagttgccctgctacccggccgccgccatgcccatcggcgccccgcatatgctccgctactgatgagtgatgaatgattgcccccgccaaccatacgaggcagacagactgacagagccggggctggtcggcaaacgagacaagaagaattggctgcgtctcaacaacacatgattattgctgctgatctgttctctctgtgtgtatgagatgatgctcgtttacatatgtatctggttggttgtactttcggtattgtaatgttattatatcaataagtgttatgtaatctcctacgtttgagtgttattcgatgattcaatttttgtatacggttaacaagttactccatgaaaacatttctcatagagttcagtttggaaaaaacaaaacaaatcaagctaaaaaaaaaagaaaaatgagtagaaaaaaaaaaaaaga

SEQ ID NO: 719 - DNA, 1383 bp, Zea mays
  Clone ID: TF_ZmC69637_1
cattgggtacctcgaggccggccgggcccttttcccctcctccctcgctaaggttcctgtgcagcagccctgttgcatgccatcttcctagcttagctagcaagaatctcttgccctccttgcttcctgatcctgcgcccttggatcaccttccatgtgttcttggccttgttctctcgtgcatctgaccatcagttcttaagaatatatttccattggaagcaaattttagggtttcctgggagagactctgccaacctttttttttgccctggtgcatctgcatcaacttgttcgtttctctctcgtaaaaaaaaagctcactgtcgtaaacgttttcgccaattgatccatgatagactaacgtcgtgtagatgtcacaaatcctctccgaggtgagtcaccgctgcagatttatgatcaactcgacgctccggcgaggcacccatcttgttctctctttctccgttgtgttcctctattggttctatgtgttctcagtaagatcctaaccaccaatacaacatactagtatcatatccttggaaattataagcctctacatacaacaacttaattagtcagaggaaagctttcaagtctagatataaccccaagtatcttttgaggatgaccctgtccggtggggcctcgtctgggtctagtcatgggacccgtagcttggggtcagagggtgacatggtgcaccggatggagctcatgcgcaagagaaggatggagtcaaaccgggagtccgcgaagcgatcgaggcagcggaagcagcaacatctcgacgacctcaactcgcaggtggacaagttgaggacgacgaaacagcaactcatgtagcactgaacatgaccagcatgcattacgcgcaacaagcagctcagaactcggtgctgcgcacccagatgatggagctgcagagcaggctctgcgcactgcgtgagatcatatgccatatgtacgcaacaacaacgaatgtccatccagcaactgtcatgggcggtgctgctacctaccatacttttggcgaaactgcgtggaactctggcagctgcagcatgcaaatggtcgaccacttgttgcaccagtgcttctaggctctagctacgtacgaggaggtagaggccaagacaaacaaaggcatgcatatatatgtattccatgttttctatgtcacaactcacaagtagtgtgtacgtcatttgatttaatgtataaaagggtttgtgcaattaattgggcacatgcatgtgggttaaagccaacattattgttgttgcctctaatttgctcatgcgtgaaaaaacacatggcaactggcaacttgtgttttgttcacaactattgctaactgcaatattaatgatgatgatc

SEQ ID NO: 720 - DNA, 354 bp, Zea mays
  Clone ID: TF_LIB3245-236-P1-N1-H1
gcggcggcggaggatgatcaagaacagggagtccgccgcgaggtcccgagcgcgcaaacaggcttattcaatggaatttgaagcccaagttcaaaaacttaaaaaggcaaattaagaacctgagaaggaaccagccaaaattattggaattgcaaacaaccaaggtttaaaaattgtggaaggatcaattcgaccgaagaaaccggtgtgctctcgaagaacatttaccggcccctgtggacaaatgcctataacacaacataagtttcactttctacatacctgtaggggcgcttgggatctgtagataaattctctcctatagtgtggcgctgaactcatcatgtacatgta

SEQ ID NO: 721 - DNA, 1456 bp, Zea mays
  unsure (1)..(1456): unsure at all n locations
  Clone ID: TF_ZmC5838_3
atttgcgctcggcacgcaggcgacggctgcgggctgcggcgctcaggttgtggttctcatcgacggcgtcagcggcttcccctcccgcctctcgccagtcgcttcgcgccctcgcctccggtcctccgcacactggccggtgaccctgcatagtattatctgattttcctggaggacacattttaaggactgaggttacaatggcagatgccagccctagaacagaaacatcaacagatgatactgacgacaataacgggcttgaaccaggcagaggtggtcttgttgcttctgactccagtgacagatccaaagacaaacatggagatcaaaagacattgcgtcgccttgctcaaaatcgtgaggctgcaaggaagagccgactaaggaagaaggcatatgttcaacagttggagaatagcaggctaaaacttacccaactagagcaagagctgcaaagagctcgtcagcagatattttctctcacagggcatttttatatctagttcagttgatcagtcacactccatgagtggaaatggggcattggcctttgatatggagtatgcgaggtggttggaagagcacaatcggcaaattagtgaactaagggctggtgtcagtgctcatgcaagtgatactgatcttcgaagtgttgttgataagatcatgtcacactatgatgagatttttaggctcaaaggcaatgcagccaaggcagatgtttttcacgtcttatctggcatgtggaagacaccggcggagaggtgttttttgtggctaggaggtttccgaccatctgaggttttaaagcttctttcgacacaacttgaacctctcaccgaacagcagctgtcagggataagcaaccttcagcaatcttcacagcaggctgaggatgctctttcacaaggaatggaggcccttcagcaatcattggccgaaaccttggctgggtctctttcgtcttctggatcaacaggaaatgtggcaaactacatgggtcaaatggccatggctatgggaaaacttggaacgcttgagaatttccttcgtcagactctacaacagatgcaaaggatcctgaccactagacagtcagctcgggcgctacttgtgataagtgattactcttcacgtctccgtgccctaagctctctctggcttgctcggcccaaggaatagcaagaacatgctatttgactgcaatacttttcacaatttggttttcaatggtcaggagatttgacaaggctgcgacagacttgattcggacatatctgcacatactatgacccaaatggaaggggatgttcatgtagcttaggctgcttagctttgtagttaagtgttgttgatgtatcattaccaactgctgtaaaattctccctccgtatgcccctgatttgcagcgaaccaatagaatgcacatttatgntcacctgacgattttttg

SEQ ID NO: 722 - DNA, 776 bp, Zea mays
  Clone ID: TF_ZmC179456_1
cattgggtacctcgaggccggccgggatgcagtatgatcgatgcaatgcaagcagtctctctcatctcatgcaatattgcaaacgcagtgccccacctcacaaggccatccccccatgcatgtgcacacacacacacacacacacacaccatatatctctccacctacaccctgcctgcctgcttgcaattgcaattgcaaccaataaccatatacacacagctagctagcttcacatatcgcaagcacccagatcggcaggaccagcggcagcggcagcggtgccggcaagaagcaggccgcgcgctccactctccgaccccggccgaaacaaaggtgatggcgcagctgccgccgagggcgccggggggcgccgcgccgcaggaccactggtcggcggcgggggagttcctggggttcgccgcggccaggcgcggcgcgcaccgccgctcggcgagcgactccgccgcgttcctcgaggccctgcccatggaagacgtcatcggcggcgacggcttcgaccgcctcgacgacgaccagctcatgtccatgttctccgacgtcgacgcgccagccgtctccgccggggacgcggcgcagctcatggacgtggcggacgccgacgcggacgacgacgggtcggccgtcctcgtcgcgcgtcgccgtggacggcgtctccgttgacctcaaaaggttcaagacgataattggcaaacaggcagtcagcgcagaggtcacgagtcaggaagctacagtacatctccgagctcgaacgg

SEQ ID NO: 723 - DNA, 839 bp, Zea mays
  Clone ID: TF_ZmC342438_1
ttttgtgtctttctctgtcgatgtaaagggcaaaagcttataaagtgacaatcacagacaatctatctgcgcctataaggctttggattaatggcggtgtgaacaagggcgactctggccaccgtgtgtccatcttccccctactatacacactcctccttcacgagcgatactgctaggtacaggtccacgagcttaccacagacctgccaacgtcctccgcagacaaattctctttatcgtgggtccgacttgccgtctcattctctccaggacctcattcttttgcttctccagcatttcgacctgtttttttgcaactcatcgttcaactctttaagttttgccacctcagcttccaactccatcatatacgcctgtttcctcccacgcgacctcgcggccaactcccggttcttgatcatccggcgttgcctcctctcaaccaccttctccacagctggtggcttccttcccctcaaaccagcacaaaaaaacgtacgacaccggtgatggcgacagatgcgacaagtcgtctccttccatcttcccgaacccgcttgccgtcaccggccgcggcgataccgccggggcctcaagaacacctccctgctgctgactgagagcccccgacacaaacccattcccgaattggagcggaggcactaagggagcaaacacattgccatgtggaaacagcattggcggttgcagatgaggtggtgggcaacccggcgctggtggtacgggcgccgccgccatcatgtcctccctcaccacgccggcgcggacgaggaactcctccagcatgatctccccgagcgtcggctgccgttggg

SEQ ID NO: 724 - DNA, 973 bp, Zea mays
  Clone ID: TF_ZmC1889_3
atataacattggaccctctcctccacgcaaccggtagtgtcgtcgtcctttggagctgcacacacatctgtgaggagaaaccttgtgcttggcgatttggcaccctccagttaattatccttggtttgaggaagaacaacacttcagccagacatgctttaagcagggaggccatttttttttcctcgagcgcgctacgatggagctctactccggataccttgacgaccatttcaacccccacaagctaagcatcgccggcagcgccgtctcgccgccggagtacatggcgtcggcgtcgccggcgcagttcgcggcggcgcccctcaggatggggtacgggaggccggcgcccgcgccgcccccgcccgtgatgggcatgtggagcagcgagccgttcagggtcgacagcggcagcgcccacgccaccagcgcgtccaccgtcaacaccaagctggaggagacaaggctagaagacgacgtggtagcacttgagccggcaagaagtacggagcaggaaacgagcaggccgccagagagggcccagagaaggctcgcgcagaacagagaggctgcccggaagagtcgcctgcggaagaaggcctacatccagcagctagagacaagccgcatgaagctgtcgcagctagagctggagcttcaacgggcgcggcagcagcagggtgcatatgcgaatagggaagcatgggagactcggctctcggctacacatgcccgatagatccaggcgtcgcctgggttcgagatcgactactggcactgggtggacgagcagaagcggcacacgacggagctgatgtcggcgctccaggggcagcagacgtcgtcgacgtcggagctggagctccgcttgctggtggagacggggctcagcaactacgagcacctcttcaggatcaaggcggtggccagcaacgcggacgtgttccacgttatgtcaggcgtgtggaag

SEQ ID NO: 725 - DNA, 1946 bp, Zea mays
  unsure (1)..(1946): unsure at all n locations
  Clone ID: TF_ZmC5008_2
cctcgaggggccggccgggaanaaaaaaaaaaaaaaaaaaaggggcctacgcgcccaacacgtccccgtccagattcatccacccttccccttcgtctccctccctccatccaatccaccccctctcccccttctcgtcgtcgccgccgccgccgcccatccggggcttggactgtcctttccccgttctgctggtaggtaaggaattcctcttctggctccgacggattctctcgctccgtttgtctctggtacaattcgttcgctgctgcgagccctcgaatccgtttgtatccggagcagcggcggagtagtaatactagtacaattccttagtcgtgttcccaagtgggtggatgcgtctttgactgcccggcgcccgcccgcaccccgcagcagcaatggacgacggggacctggatttctccaacccggacacgtacctgtgtccggccctcggcaccgacccgcccagcagctgctccatggacagctacttcgacgagatcctcaaggacacggagcacctcgcctgcacgcacacccacacctgcaacccgccggtgcacgacctctcgcacacccacacctgcgtccacgtccataccaagatcgtcgcggcctcgccgggcgacgccgagtcgccgtccgagaacaacagcaacggcaacgccgcctctaagaagcgcccgtcggggaaccgcgccgccgtcaggaagtaccgggagaagaagaaggcccacaccgcatcgctcgaggaggaggtggtgcacctccgggcgctcaaccagcagctcatgaaaaagctccagagccacgccgcgctcgaggcggaggcggccaggctccgctgcctgctcgtcgacatcaggggcaggatcgagggggagattggtgcgttcccgtatcagaggccgccggcggtcaagaacgtcgacctcctgtctagtgttgaccaggaaagcctccttggcagcgctgctgcccaggttgccaactcctgtgattttagatgcaaccatcagatgtactgcaaccctgggatgcagggcgctatcagcggtcaggtgttgggacaaggtgcctgtgatgtcgccagtatgcaatgcattggaagcaccaagtctggatccactaagctacctgtttgtgggggtctggatacactacctgctgtctgcttaccaaatgttgaaaagaagtgatggactcctggcggtgtttatggtctctcctttccagagacatgctgtataaactgctagcttttctatgtaggactgcatctggttcaaactgctatactgctatgttagtatgtcactgagtttgtcgcccatgatgcttctatggtgtctgaggcgattcaagtttgttagctctaaagctgacaggacatcctcgtttactttgcctagtttccagacggtctatgatcaagtgcagaactgaaccggatcgtaaggagttgaacatgaacttgttaaaatctggcatatgtagatgcatggatcgcgaaatcccctcgtgtaggtgcagtgtccctcttctgctatgtgcgagatctgagggaacctggattcatttattgtttgaatgtttcactgtttctgtcgcaagtaaataatttattgcatgggaagtttataactctagacctggtaaaattctgagtagcagcaattctacatcttaccctgtgatgttaccgaccagacactgcaagtttggggcagccgtgcagggcgttacttttgtttgggggtgtttgaaaacatctcattctgtttggtgttgactgacttgtgggcattattattattaagggctagtttgggaaccctgttgcctatgtaaaaatatctactaaccatggatatggatcgctattacacaaacatatacgggtcgcacaacgactggtaacctgctagccccgtaattaa

SEQ ID NO: 726 - DNA, 858 bp, Zea mays
  Clone ID: TF_ZmC5008_5
attcccctccgccgcctacgcgcccaacacgcccccgtccagattcagttccacccttccccttcgtctccctccctccatccaatccaccccctctcccccttctcgtcgtcgccgccgccgccgcccatccggggcttggactgtcctttccccgttctgctggtagtgggtggatgcgtctttgactgcccggcgcccgcccgcaccccgcagcagcaatggacgacggggacctggatttctccaacccggacacgtacctgtgtccggccctcggcaccgacccgcccagcagctgctccatggacagctacttcgacgagatcctcaaggacacggagcacctcgcctgcacgcacacccacacctgcaacccgccggtgcacgacctctcgcacacccacacctgcgtccacgtccataccaagatcgtcgcggcctcgccgggcgacgccgagtcgccgtccgagaacaacagcaacggcaacgccgcctctaagaagcgcccgtcgggtaaccgcgccgccgtcaggaagtaccgggagaagaagaaggcccacaccgcatcgctcgaggaggaggtggtgcacctccgggcgctcaaccagcagctcatgaaaaagctccagagccacgccgcgctcgaggcggaggcggccaggctccgctgcctgctcgtcgacatcaggggcaggatcgagggggagatcggtgcgttcccgtatcagaggccgccggcggtcaagaacgtcgacctcctgtctagtgttgaccaggaaagcctccttggcagcgctgctgcccggttgccaactcctgtgattttagatgaaccatcagatgtactgcacccct

SEQ ID NO: 727 - DNA, 852 bp, Zea mays
  Clone ID: TF_ZmC30857_4
ctccgctgtccgctggctgcgatagtgctgcctgctgctctaagctctaacccaatccaggaggatgccgaggagcccgcagctgagcctgagcggctgcagctctctcttctccctgtccagcaccagtacgagccgcgacagcgccgccctgaaggcgccggtgcccccacggcgcacccctctcctgtcgctcagcgtcggcgaggaggaagaggacgagggtgaggacgaggaggagtacctgctgggggccggcgccctggatctgcagctgacggggcccggtggcggcagcaacagcagcggcggctacgacgacgagcggaagaacatccggatgatgaggaacagggagtctgcgctgcgctccagggcaaggaagagggtacgaacacgaatctaagcagctcaacccatgtctctctctgacacacaaacactacaggcctatgtgcaggagctggagaaggaggttcgtcgcctggtgaatgagaacctcaagctcaagaggcagtgcaaacaagtaacaaatagtagcacactttgtctcttatagctaaaaatgaatgaatactcatctgtttgtatataacatgtaccagctgaaactagatatggctgcactggtccagcaaagcagcagcaagagcagctcccacatcagaagaacctcctcatccactcagctctaggctgctaccaataggaatatgtatgtgaatttaaagccatatatgaccaaggaagaatgggaggaagacgaacaaagctagctagactagactgcagcccctctaatccatggccattcgctgattaatacgataatatctcttatttgttggcttc

SEQ ID NO: 728 - DNA, 671 bp, Zea mays
  unsure (1)..(671): unsure at all n locations
  Clone ID: TF_LIB4666-020-R1-K1-A2
cggatgcccccaaagcgaagcgttacccgtcctcttagcgcttcagcgcgctgaagcgtgcgcttagtgccccgccttttggaaccctagaattagccattgcgtgtagtgtggaggaagtggtgccaagcaaatgataagagggaaggcatcacataatctgaagtgctatggaaaacaactatccactgccttgaatatacccaaagatttagccttgaaaggaaaacaactattcacatgcctgaaccatgatttgtggtttctattaggtttcaactctagcctactatagtattatctgattttcctggaggccacattttaaggactgaggttacaatggcagatgccagccctagaacagaaacatcaacagatgatactgacgacaataacgggcttgaaccaggcagaggtggtcttgttgcttctgactccagtgacagatccaaagacaaacatggagatcaaaagacattgcgtcgccttgctcaaaatcgtgaggctgcaaggaagagccgactaaggaaagaggcatatngtcaacagttggagaatagcanggctaaacttacccaactagagcaagagctgcaaagagctcgtcagcagggcatttttatatctaggtcagttgatcagtcacactccatgagtggaaatggggc

SEQ ID NO: 729 - DNA, 758 bp, Zea mays
  Clone ID: TF_LIB4765-018-Q1-K1-C1
ctggccgggtttccttccccaccatcgcgtgtgagtcccggtgtgatgtcacggagcggtggcggctttcccgatccactgtgcgggagaaatccccgtgcagccttcttccagctcttcctactctttgctactcgtcttcgctgatttctgccttaattccatcccttccctgcctagaacttgctttgcttcaccccatcacagcttttggtgcctcgtcatcggcgacctaaccgccggcgaccagataaactaagccaggcccttcgctccgaaagtcgtctctcgtagagagcacttgctcacctgctcctcgccctcctctgctggcagtggacttgcgcggagtggagatccatccggacctggttcgatttcttcatctcgttagaaaacggacagagtggagccatggtcccggcttctaattcatctgaccggtctgacagatctgacaaacctatggaccagaaggttttacgacggcttgcccaaaatcgtgaggcagcaagaaaaagccggctgaggaaaaaggcatatgtgcaacagctagagagcagtaagctaaaacttgcaagcctggagcaagaactccagaaagctcgacagcagggaatcttcatttctagttctggagatcaaactcatactatgagtggaaatggagctatgaccttcgatttggaatattctcgatggcaagaggaacaaaataagcagataaatgagctgaggactgcagtaaatgctcatgc

SEQ ID NO: 730 - DNA, 2739 bp, Zea mays
  Clone ID: TF_ZmC1124_1
attccccctccccacgccatcccttgtccgtctctccgtcctctcctcccgaccctcaccctgccctcgcgcccgccgccgcgcacacaccaggttatccttccgccgttaacaagcacgctccattcccaactaattctctcttacccttccgcctcgctcttggggccgctgcaagtgcagatccgtctagactgactccgattggtttcggcttcttcgcttctccttctcggtcatatgattgcaatgaatcctgacatggtactactgtcttggaaacaacttccaccaacggtcgatcctgtgaaacactaagacacccgttgccactggaaaggagagagcaaagtgatttgctgtctcctggcgatcgttgctcgtgaggcctagtgatggcagatgctagctcaaggactgacacctcaattgttttagacgacaacgacaagaatcatagggatctcactacgcattggcacctctgaaggtcttcgttggatatgaccaaactatttcaaccaattttgaacaagcttttcttcaattagtgctacccctagcctatcagatggtcgggggaggtaccctcgaggccggccgggcggagacgtgctgcagagcctgcagaggcttttcttccccccaccccacccatcgcgtgtgagtccacggtgtgatgtcacggagcggtggcggctttcccgattcactgtgcgggagaaatccccgtgcagccttcttccagctcttcctactctttgctactcgtcttcgctgatttctgccgctccaattccatcgcttccctgctttagaaccttctctgctagcttctccccgtcacagcttttggtgcctcgtcatcggcgaccaaaccgccggcgaccggataaactaagccagctccttcgctccgaaagtcgtctctcgtagagagcacttgctcacctgctccccgcccccctctgctggcgctggacttgctcggagtggagatccatccggacctggttcgatttcttcatttcgggttcgattcggtttttctatcccagagcgaaagatcaatatcacctgacacaacataacgatttcgtggaagccgaggttgcttctctgctcagtgggtggataactggattgtggattttgctaactacatgctgggttatcagcctatcataaggaaagcaaagaagagacaacaaagcaatttgttgtctctttcttaggagctggcgagtactcggcatggcagatgctagttcaaggactgacacctcgactgttttagacatggatgataagaatcaaaggttagaaaatggacagagtggagctatggccctggcttcgaattcatctgatcggtctgacagatctgacaaacctatggaccaaaaggttttacgacggcttgcccaaaatcgtgaggcagcaaggaaaagtcggctgaggaaaaaggcatatgtgcaacaactagagagcagcaagctaaaacttgcaagcctggagcaagaactccagaaagctcgacaacagggaatcttcatatccagttctggagatcaaactcatgctatgagtggaaatggagctatgaccttcgatttagaatattctcgatggcaagaggaagaaaataagcagataaatgagctgaggactgcagtaaatgctcatgcaagtgaaagtgacctccgtcttatcgtcgatgggataatggcacattatgatgagatattcaggctgaagggtattgctgcaaaggctgatgtgttccatatactttcaggcatgtggaaaacacctgctgaaaggtgcttcttgtggcttgggggtttccgttcgtctgagcttctaaagctccttgtgaatcagcttgagcctctaactgagcagcaattgatggggctatccaatctccagcaatcctcccagcaggctgaggatgcattgtcacaaggcatggaagcattgcagcagtccttggcagaaacgctggctgggtcccttggtccatcaggatcttctggaaacgtggcaaactatatgggtcaaatggctatggccatgggaaaacttggcacactcgagaatttccttcgccaggctgacaatctacgacagcagaccttacatcagatgcaacgtatcctgacaatccgacaagctgctcgtgcgcttcttgcaatccatgactacttttcacgtttgcgcgcactgagttctctttggcttgctaggccacgagagtaacatcacccccgttggggtcactcgatgaactgatctgtgaatgtgggactgctggctgcaaactcgcaaagcatttgcagatgactggaggatcagtcctctctgtacaagttgtattaacatcttctggtctcatattgtgctccagtgttgtacaatttagggaaaagcttggattaacttgtaagttatcatgaatttgttattggcatattgtacaattgtattagcaataaaaatagaagtacataagtgctggaaggactatccagcgtctatattggttggaaacgagcagcagaagcttgtcatgtcgattttgaatagtcggttgaagtgtttttttgggggtctatagagaacaaagaaagcttcaggagaaatgtataggtattcaccagtctaccatagagtgtgtgcttcggggagctccttgtgatggtaaaatttgataacgaggatgagttctgtgacatt

SEQ ID NO: 731 - DNA, 2648 bp, Zea mays
  Clone ID: TF_ZmC1124_2
ctcgaggccggccggggtccgtctcataccatcccatcccatcccatcccatccccgtgcgccgagttcacggccgccaccaccaccaccacaaccgattgcacaaggccacgcggcttctggaagcttccttcccttgccttgccttccctctcaacccaaatcgccacggctcctccgcccgcagcgccctcggcacgaccgccggattcgcctctgggtggggttggttttgtctcccccaccaccctacccacccctctcctctcctccaaggcttggcttgcctcgtgtcgtgtgtccctccaccgcccgccatgccgacgaggcttgccccccaccgacgatcgcacacgatcatatgattgcaatgaatcctgacatggtactactgtcttggaaacaaattggcctgccggccgtgaaacacgaaacgaggaaggcgaggagacgtgctctgctgctgcagcctgcagcggctttccttcccccaccatcgcgtgtgagtccacggtgtgatgtcacggagcggtggcggctttcccgatccactgtgcgggagaaatccccgtgcagccttcttccagctcttcctactctttgctactcgtcttcgctgatttctgccttaattccatcccttccctgcctagaacttgctttgcttcaccccatcacagcttttggtgcctcgtcatcggcgacctaaccgccggcgaccagataaactaagccaggcccttcgctccgaaagtcgtctctcgtagagagcacttgctcacctgctcctcgccctcctctgctggcagtggacttgcgcggagtggagatccatccggacctggttcgatttcttcatctcggttgcttctctgtccagtgggtggatcactggattgtgggttgtgctaactgcaggctggcttgtcagcctatcataaggaaagtgaaaaagagacaacaaagcaatttgttgtctcattcttaggagctggcgagcactcggcatggcagatgctagttcgaggactgacacctcgactgttgtagacatggatgataagaatcaaaggattattttacgaaatttcaacttctctctgtgggacatctaatggtacaggtcttggagagatgcatgtaaagtgttagaaaacggacagagtggagccatggtcccggcttctaattcatctgaccggtctgacagatctgacaaacctatggaccagaaggttttacgacggcttgcccaaaatcgtgaggcagcaagaaaaagccggctgaggaaaaaggcatatgtgcaacagctagagagcagtaagctaaaacttgcaagcctggagcaagaactccagaaagctcgacagcagggaatcttcatttctagttctggagatcaaactcatactatgagtggaaatggagctatgaccttcgatttagaatattctcgatggcaagaggaacaaaataagcagataaatgagctgaggactgcagtaaatgctcatgcaagtgatagtgacctccgtcttatagtcgatgggataatggcacattatgacgagatattcaggctgaagggcattgctgcaaaggctgatgtgttccatatactttcaggcatgtggaaaacatctgctgaaaggtgcttcttgtggcttgggggtttccgttcgtctgagcttctaaagctccttgtgaatcagcttgagcctctaactgagcagcaattgatggggctgtccaatctgcagcaatcttctcagcaggctgaggatgcattgtcacaaggaatggaagcattgcagcagtccttggcagaaacgctggctgggtcccttggtccatcaggatcttctggaaacgtggcaaactatatgggtcaaatggctatggccatgggaaaacttggcacactcgagaatttccttcgccaggctgacaatctacgacagcagaccttacatcagatgcaacgtatcctgacaatccgacaagctgctcgtgcgcttcttgcaatccatgactacttttcacgtttgcgcgcactgagttctctttggcttgctaggccacgagagtaacatcacccccgttggggtcactcgatgaactgatctgtgaatgtgggactgctggctgcaaactcgcaaagcatttgcagatgactggaggatcagtcctctctgtacaagttgtattaacatcttctggtctcatattgtgctccagtgttgtacaatttagggaaaagcttggattaacttgtaagttatcatgaatttgttattggcatattgtacaattgtattagcaataaaaatagaagtacataagtgctggaagcctggaaggatatccagaatctatattggttggaaacgagcagcagaagattgttatagattgttatgttgctttgaatattcggttgtaagtgccttttttggggtatatagaacaaagaaagattcaggagagatgtagggattcaccagaggctatcggggattgtgcttctaggagctccctggactatctctagcaagtctcatattaagctctactctgtaaacagtgatacattgaattgaacgtgctacggttatgatggtaacatttaaaaaaaaaaaaaagcggcc

SEQ ID NO: 732 - DNA, 1061 bp, Zea mays
  Clone ID: TF_ZmC1124_8
ttgggtacctcgaggccggccgggaaacaaaaaacgaggaaggcgaggagacgtgctctgctgctgcagcctgcagcggctttccttcccccaccatcgcgtgtgagtccacggtgtgatgtcacggagcggtggcggctttcccgatccactgtgcgggagaaatccccgtgcagccttcttccagctcttcctactctttgctactcgtcttcgctgatttctgccttaattccatcccttccctgcctagaacttgctttgcttcaccccatcacagcttttggtgcctcgtcatcggcgacctaaccgccggcgaccagataaactaagccaggcccttcgctccgaaagtcgtctctcgtagagagcacttgctcacctgctcctcgccctcctctgctggcagtggacttgcgcggagtggagatccatccggacctggttcgatttcttcatctcggttgcttctctgtccagtgggtggatcactggattgtgggttgtgctaactgcaggctggcttgtcagcctatcataaggaaagtgaaaaagagacaacaaagcaatttgttgtctcattcttaggagctggcgagcactcggcatggcagatgctagttcgaggactgacacctcgactgttgtagacatggatgataagaatcaaaggttagaaaacggacagagtggagccatggtcccggcttctaattcatctgaccggtctgacagatctgacaaacctatggaccagaaggttttacgacggcttgcccaaaatcgtgaggcagcaagaaaaagccggctgaggaaaaaggcatatgtgcaacagctagagagcagtaagctaaaacttgcaagcctggagcaagaactccagaaagctcgacagcagggaatcttcatttctagttctggagatcaaactcatactatgagtggaaatggagctatgaccttcgatttggaatattctcgatggcaagaggaacaaaataagcagataaatgagctgaggactgcagtaaatgctcatgcaagtgatagtgacctccgtc

SEQ ID NO: 733 - DNA, 875 bp, Zea mays
  unsure (1)..(875): unsure at all n locations
  Clone ID: TF_ZmC592431_1
agggcgannattgggtaccccctcgagggcccggcccgggccggccggcaaaatcatcaaccaaaaaaacggacatctccgtttttttcgtcctcatcccttctccctccagcctaacggcctctctgcaaacgtaggggaggccgccgccccctcaacttgaatcaatggcagcagcgtgtgcatccgccgccgcctgcagcctcgcctcggccatgtcctggtagtctgctcgctgccccggcgtcgttacctagtaacgatctcggcatcgatcctggtctgcttctctttgaaaactattctccctacttggaatttctaccggccgattacaacgggtttgatggagcgacgtgggatttcgggaacatcgccaacaataataacaccaccgctgccaccaacgacaatgacgttcagaacttcagcggtgatgggctattcgacaatatcatgatcccggaattgaacgttttggatacacagtcttcgctcgatgtggctggagatggcttcctctctcaggagcagcctctcctcactgtcaactctacaacacccatcgagtaccctgctactgcaagctcttcatccagcactcctcatcccccaccaacgattagaaccaaatctccaacatcaacatccgccatcccaggaacatctaccttttctctccacccctccccctcttcatcatcatcatcgtcctcctcccgcaaacgcaaatcctctcccgaagaagaggactcagccgtcaccctcaagcgccagcgcaacaccctcgcggcacgcaagtaccgncagaagcgcatcgaccgcatcactgagcttgaggaggccttggctgccaaggcgaaggaatgcgatga

SEQ ID NO: 734 - DNA, 1500 bp, Zea mays
  Clone ID: TF_ZmC104_72
gccagtgtcagccatgtccatttctgacttttcatataaggtcttgttcgtttctatcggattgcacccggaattgttccagctaatcaaagtttatataaattagagaagcaatccggctaggaatcgttccgacccaccaatccggcacaaacgaacaaggcctaatgaaatctgaaaacaagtggttctatctttcaaaaaaaaacccgaaggaatacatgtgattaaggcatgcttgggagttgggaacaactacagtgcagttgatcaacaataaactccagtttttgcagttgatcaagtctgaatcttactcgcggggacgggaagcccagaggttgctgagagctctgaggcggctgtagtactccccaatggagaggaagcaccgcgcagcctgccgagtggtcaggatccggcgcatctgatgcaacgtctggtgccttagattgtcggcctgttgatagaaattttcgaggctggcgagcttctcaagtgcgacggccatgatgttcatgtagttgggggcggcggcgccgtcgttgagcgtgcccgcggcgactgtgtcggccagggactggtgcagctggtgcaggccctgggcgagagcttcctccgcttgctccgacgactgctgcagattgcagatccccagcagctgctgctccgtcagcgggtccagctgcggtatcaggatcttgagcagctcggacgggcggaagccgcccatccagaagaagcagcgctcggcgggggtggcccaggagccggtgaggaggtggaagacgtcggagcgcgcgagcgccgccttgagctggaacagctcgtcgtagtgctgcatgcactcctccacgatgagtcccaggttgccgtccagcaggtgcgcctgcagcccgcctcggagctccgccagccgcttggtgtcgtcgtcaagccaccgcgcgtactccatgtcgaacatggcggcgccagagctcatgtccccggcggcgctgcaccctccaacgaacaggccctgtgaccgtgctctctggagctcatgctcgacctgctgaagcctgatcctgctagtctcgagctgctgcacgtaagccttcttcctcagcctgctcttcctcgcagcctctctgttctgcgccagccgccgttccgtcttgtcatggtctccccctccctctcctccgtgcagctgcagcgggagcgggtggtgctgctgaaagctcggcggggcggcagcagcgggcgcagcggcgaggcctggcttgtagctgtaatcatcagtggtcaccatcatgacctcctgccgcggcgcagaggaggctggggacaccaactccatctgagacattgtgttctgagctgagctcgagtcagtgccggtgctccctactgactgcgaattcccactttgcctgcgcgacgtcgttcttgatgatcacgcccggatcgacgccgccgccggcgctggcggcgccaccaccgtggatgagggcctcc

SEQ ID NO: 735 - DNA, 1502 bp, Zea mays
  Clone ID: TF_ZmC14082_3
caaaagtccaagctttttcgacaggaatcctcctccgcttctgcttggcttgcgatgcttgtttgaatgcgcgggcctgcggtgaggcgacagcggcgccggacggttgcatgctgattgatggtagccgatggagagtagacgaggagggtcggtggcagaagatgcgagcggggcgatgacgagctttgggccacctcagcacggcatcaacacagatgtgaacagcatgcaaccttctcgagttactgactttggggcacttgcacagtctgctggattccgaatagaagatcttgttaaccttaatgcaaatgctttgttcaatctgaagtcgaatactcatacaattaacaacattcctcttcagtttggaagctacggaaagtttgaacaaggacttgttgctgtccccacagcttctgattctagtgacaaatcaagggacaaactagatcagaagacacttcggcgtcttgcccaaaatcgtgaagctgcccggaaaagccgtttacgaaagaaggcatacatccaaaaccttgagagtagcagattgaaacttactcagttagagcaagagcttcaccagactcgtcaacagggtatttttatttctacatcaggagatcaacctcaatcaacaagcggaaatggagctttggcatttgacatggagtatgcacgctggttggaagagcacaacaaacatgtaaatgagttgaggcttgcagtcaatgcacatgccggtgataatgatctccgtggtattgttggtagtgttatggcacactacgatgaatttttcaggctcaagggtgtggcagctagatcagatgtttttcatgtgctgtctgggatgtggaagacccctgctgagagatgtttcatgtggttaggtggcttccgatcatctgaggttcttaagcagtcctcccaacaagctgaagatgctctttctcaagggatggaagcattacaacagtcgcttgcagaaactctagcatctggatccctgggccctgctggaccttctggcaatgttgcaaattacatgggacaaatggcgatggctatgggaaaacttggcaccctagagaactttctacgacaggctgataatctacggctgcaaacacttcaacaaatgcaacgcatcttaaccacccgacaatcagcacgagccctacttgcaataagcgactacttctctcggctgcgtgctttgagttctctttggcttgcccgtccaagggaataaattcaattaactcataaataggattttttttgtactgtctctagtatgccaattagtttcttcacattactcatgtgttgatgggatatttggatctaagatcttatgaaggggtgacatgtctgtgtccaagtgaacgctcagttcatattttaggccatcatgggttaattttggagaaaaaacgagttgtaaatacatctggaataatctaagatcttatgaagagatgatattggaggat

SEQ ID NO: 736 - DNA, 1705 bp, Zea mays
  Clone ID: TF_ZmC14082_4
gaccacgcgtccgcttcgtccttcccaatcacctcgaaacacaacccctgtcatttcttccactgatcaccaggccgtgcaaaaggccgagctttttcgacaggaatcctcctccgcttctgcttggcttgcgatgcttgtttgaatgcgcgggcctgcggtgaggcgacagcggcgccggacggttgcatgctgattgatggtagccgatggagagtagacgaggagggtcggtggcagaagatgcgagcggggcgatgacgagctttgggccacctcagcacggcatcaacacagatgtgaacagcatgcaaccttctcgagttactgactttggggcacttgcacagtctgctggattccgaatagaagatcttgttaaccttaatgcaacaacacagatgtgaacagcatgcaaccttctcgagttactgactttggggcacttgcacagtctgctggattccgaatagaagatcttgttaaccttaatgcaaggcctaaagtatcccagcttactaattatatgcctatcagctttggagaactggggagagtcagctatggctggtagccctatgactgacacatctacagatccagacactgatgagaggaaccagatgtttgaacaaggacttgttgctgtccccacagcttctgattctagtgacaaatcaagggacaaactagatcagaagacacttcggcgtcttgcccaaaatcgtgaagctgcccggaaaagccgtttacgaaagaaggcatacatccaaaaccttgagagtagcagattgaaacttactcagttagagcaagagcttcaccagactcgtcaacagggtatttttatttctacatcaggagatcaacctcaatcaacaagcggaaatggagctttggcatttgacatggagtatgcacgctggttggaagagcacaacaaacatgtaaatgagttgaggcttgcagtcaatgcacatgccggtgataatgatctccgtggtattgttggtagtgttatggcacactacgatgaatttttcaggctcaagggtgtggcagctagatcagatgtttttcatgtgctgtctgggatgtggaagacccctgctgagagatgtttcatgtggttaggtggcttccgatcatctgaggttcttaagttactggcaggtcacctagagcctcttactgatcagcagcttgttggtatatccaacctgcagcagtcctcccaacaagctgaagatgctctttctcaagggatggaagcattacaacagtcgcttgcagaaactctagcatctggatccctgggccctgctggaccttctggcaatgttgcaaattacatgggacaaatggcgatggctatgggaaaacttggcaccctagagaactttctacgacaggctgataatctacggctgcaaacacttcaacaaatgcaacgcatcttaaccacccgacaatccgcacgagccctacttgcaataagcgactacttctctcggctgcgtgctttgagttctctttggcttgcccgtccaagggaataaattcaattaactcataaataggattttttttgtactgtctctagtatgtcaattagtttcttcacattgctcatgtgttgatgggatatttggatctaagatcttatgaatggatgacatgtatgtgttcaagtgaaaaaaaaaaa

SEQ ID NO: 737 - DNA, 753 bp, Zea mays
  unsure (1)..(753): unsure at all n locations
  Clone ID: TF_LIB4729-141-A1-K1-C7
agtccgtctctccgtcctctcctccccaccctcaccctgccctcgcgcccgccgccgcgcacacgccaggtcctccttccgccgttaacaagcacgctccatttccaactaattctctcttacccttccgcctcgctcttggggctgctgcaagtgcagatccgtctagactgactccgattggtttcggcttcttcgcttctccttctcgatggagaatggaagtggtgcggttgtaccttctaattcttcagataggtccgacaggtctgataaacctttggaccaaaagacaatgcgacggcttgctcaaaatcgtgaggcagcaagaaaaagtcggctgaggaaaaaggcatatgtgcagcagctggagagcagtaagctgaaacttgcacaactggaacaggaactccagaaagctcgccagcagggaatcttcatttctagctctggagaccaaacccatgccatgagtggaaatggagctttgactttcgacatagaatatgctagatggctagaggaccaaaataagcagataaatgagttgaggactgcagtgaatgctcatgcaagtgacagcgatctacgacttattgtagatggcataatggcacactatgatgaaatattcaaggtcaaaggtgttgctgcaaaggctgatgtgtttcatatactttcaggcatgtggaagacacctggctgaagtgcttcctatgggctggngggttttcgtccatctgagcttttaaa

SEQ ID NO: 738 - DNA, 798 bp, Zea mays
  Clone ID: TF_LIB4766-040-R1-K1-D1
ttgggtacctcgaggccggccgggccgcccgcaagcgccctcggcacgaccgccggattcgcctctgggtggggttggttttgtctcccccaccacccacccacccctctcctctcctctcctccaggcttggcttgcctcgtgtcgtgtgtccctccaccgcccgccatgccgacgaggcttgccccccaccgccgatcgcacacgatggagaatggaagtggtgcggttgtaccttctaattcttcagataggtccgacaggtctgataaacctttggaccaaaagacaatgcgacggcttgcccaaaatcgtgaggcagcaagaaaaagtcggctgaggaaaaaggcatatgtgcagcagctggagagcagtaagctgaaacttgcacaactggaacaggaactccagaaagctcgccagcagggaatcttcatttctagctctggagaccaaacccatgccatgagtggaaatggtaatatttcaattcgttatatctgtgcgtttctggatttgattagtctatcttgattgaatgctatctttatctctagaagtgcatctgaaattataaacttgttgttgcaggagctttgacttttgacatagaatatgctagatggctagaggaccaaaataagcagataaatgagttgaggactgcagtgaatgctcatgcaagtgatagtgatctacgacttattgtagatggcataatggcacactatgatgaaatattcaaggtcaaaggtgttgctgcaaaggctgatgtgtttcatatactttcaggcatgt

SEQ ID NO: 739 - DNA, 780 bp, Zea mays
  Clone ID: TF_ZmC1124_10
ggggtacaccccgggtttcgccgccgcccgggaattcccccaccccacgccatcccttgtccgtctctccgtcctctcctccccaccctcgccctgccctcgcgcccgccgccgcgcacacgccaggtcctccttccgccgttaacaagcacgctccatttccaactaattctctcttacccttccgcctcgctcttggggccgctgcaagtgcagatccgtctagactgactccgattggtttcggcttcttcgcttctccttctcggtcatatgattgcaatgaatcctgacatggtactactgtcttggaaacaacttccaccaacggtcgatcctgtgaaacactaagacacccgttgccactggaaaggagagagcaaagtgatttgctgtctcctggcgatcgttgctcgtgaggcctagtgatggcagatgctagctcaaggactgacacctcaattgttttagacgacaacgacaagaatcataggatggagaatggaagtggtgcggttgtaccttctaattcttcagataggtccgacaggtctgataaacctttggaccaaaagacaatgcgacggcttgcccaaaatcgtgaggcagcaagaaaaagtcggctgaggaaaaaggcatatgtgcagcagctggagagcagtaagctgaaacttgcacaactggaacaggaactccagaaagctcgccagcagggaatcttcttttctagctctggagaccaaacccatgccatgaagtggaaatggagcttttgacttt

SEQ ID NO: 740 - DNA, 961 bp, Zea mays
  unsure (1)..(961): unsure at all n locations
  Clone ID: TF_ZmC1124_3
gaagctttcctccttgcttgccttcctctcacccaatcgccacggctcctccgcccgcagcgccctcggcacgaccgccggattcgcctctgggtggggttggttttgtctcccccaccacccacccacccctctcctctcctccaaggcttggcttgcctcgtgtcgtgtgtccctccaccgcccgccatgccgacgaggcttgccccccaccgccgatcgcacacggtcatatgattgcaatgaatcctgacatggtactactgtcttggaaacaacttccaccaacggtcgatcctgtgaaacactaagacacccgttgccactggaaaggagagagcaaagtgatttgctgtctcctggcgatcgttgctcgtgaggcctagtgatggcagatgctagctcaaggactgacacctcaattgttttagacgacaacgacaagaatcataggatggagaatggaagtggtgcggttgtaccttctaattcttcagataggtccgacaggtctgataaacctttggaccaaaagacaatgcgacggcttgcccaaaatcgtgaggcagcaagaaaaagtcggctgaggaaaaaggcatatgtgcagcagctggagagcagtaagctgaaacttgcacaactggaacaggaactccagaaagctcgccagcagggaatcttcatttctagctctggagaccaaacccatgccatgagtggaaatggagctttgacttttgacatagaatatgctagatggctagaggaccaaaataagcagataaatgagttgaggactgcagtgaatgctcatgcaagtgatagtgatctacgacttattgtagatggcataatggcacactatgatgaaatattcaaggtcaaaggtgttgctgcaaaggctgatgtgtttcatatactttcaggcatgtggaagacacctngctgaaggtgcttccta

SEQ ID NO: 741 - DNA, 1112 bp, Zea mays
  unsure (1)..(1112): unsure at all n locations
  Clone ID: TF_ZmC1124_4
gaaaacttggcccaccccaaaatttcctttgtcaggctggcaattttggacaacagaccttgcatcaaatgcaacgcatcctgtcaatttgacaaactggtcgtgcgcttcttgcaaaacacgactaccttttacgtttacgcgccctgagttctctttggcccgctaggcccccaaagtaacatcccccccgttggagtccccccatgggccgatctgttaatgtgggggtgctggctgcaaactcgcaactcattttcaaatggctggagggtcagttccctctgtacaagttggattaacatcttctggtcccaaattccggccggggccctcggcacgaccgccggattcgcctctgggtggggttggttttgtctcccccaccacccacccacccctctcctctcctctcctccaaggcttggcttgcctcgtgtcgtgtgtccctccaccgcccgccatgccgacgaggcttgccccccaccgccgatcgcacacgatggagaatggaagtggtgcggttgtaccttctaattcttcagataggtccgacaggtctgataaacctttggaccaaaagacaatgcgacggcttgcccaaaatcgtgaggcagcaagaaaaagtcggctgaggaaaaaggcatatgtgcagcagctggagagcagtaagctgaaacttgcacaactggaacaggaactccagaaagctcgccagcagggaatcttcatttctagctctggagaccaaacccatgccatgagtggaaatggagctttgacttttgacatagaataatgctagatggctagaggaccaaaataagcagataaatgagttgaggactgcagtgaatgctcatgcaagtgatagtgatctacgacttattgtagatggcataatggcacactatgatgaaatattcaaggtcaaaggtgttgctgcaaaggctgatgtgtttcatatactttcaggcatgtggaagacacctgctgaaaggtgcttcctatggcttgggggttttcgtccatctgagcttttnaagctcctagcgaatcacctcgagcctctaactgagcagcaaatgctgggtttgaccaacctccagcaa

SEQ ID NO: 742 - DNA, 798 bp, Zea mays
  unsure (1)..(798): unsure at all n locations
  Clone ID: TF_ZmC1124_6
cagcgccctcggcacgaccgccggattcgcctctgggtggggttggttttgtctcccccaccaccctacccacccctctcctctcctccaggcttggcttgcctcgcgccgtgtgtccctccaccgcccgccatgccgacgaggcttgccccccaccgccgatcgcacacggtcatatgattgcaatgaatcctgacatggtactactgtcttggaaacaaatggagaatggaagtggtgcggttgtaccttctaattcttcagataggtccgacaggtctgataaacctttggaccaaaagacaatgcgacggcttgcccaaaatcgtgaggcagcaagaaaaagtcggctgaggaaaaaggcatatgtgcagcagctggagagcagtaagctgaaacttgcacaactggaacaggaactccagaaagctcgccagcagggaatcttcatttctagctctggagaccaaacccatgccatgagtggaaatggagctttgacttttgacatagaatatgctagatggctagaggaccaaaataagcagataaatgagttgaggactgcagtgaatgctcatgcaagtgatagtgacctacgacttattgtagatggcataatggcacactatgatgaaatattcaaggtcaaaggtgttgctgcaaaggctgatgtgtttcatatactttcaggcatgtgggagacacctgctngaaggtgcttcctatggcttgnnggttttcgtccatctgagcttttaagctcctagcgaatcacctcgagcctctaactgagca

SEQ ID NO: 743 - DNA, 894 bp, Zea mays
  Clone ID: TF_ZmC1124_7
accccgccgggagcaccaccaccaaaccgattgcacaaggccacgcggcttctggaagcttccttcccttgccttgccttccctctcaacccaaatcgccacggctcctccgcccgcagcgccctcggcacgaccgccggattcgcctctgggtggggttggttttgtctcccccaccacccacccacccctctcctctcctccaaggcttggcttgcctcgtgtcgtgtgtccctccaccgcccgccatgccgacgaggcttgccccccaccgccgatcgcacacggtcatatgattgcaatgaatcctgacatggtactactgtcttggaaacaacttccaccaacggtcgatcctgtgaaacactaagacacccgttgccactggaaaggagagagcaaagtgatttgctgtctcctggcgatcgttgctcgtgaggcctagtgatggcagatgctagctcaaggactgacacctcaattgttttagacgacaacgacaagaatcatagggatctcactacgcattggcacctctgaaggtcttcgttggatatgaccaaactatttcaaccaattttgaacaagcttttcttcaattagtgctacccctagcctatcagatggagaatggaagtggtgcggttgtaccttctaattcttcagataggtccgacaggtctgataaacctttggaccaaaagacaatgcgacggcttgcccaaaatcgtgaggcagcaagaaaaagtcggctgaggaaaaaggcatatgtgcagcagctggagagcagtaagctgaaacttgcacaactggaacaggaactccagaaagctcgccagcagggaatcttcatttctagctctggagacaaacccatgccatgagtggaaatgg

SEQ ID NO: 744 - DNA, 1684 bp, Zea mays
  Clone ID: TF_ZmC5838_1
ctaacttatgccagtcctgttataggttatcagttcctctccattcatcttcctcgcagcgccggcgctccatctcccgctcccttccttactcgcgctcggctctcaggcggcaattcgggacctcggactcacccgccgtttcttttacttgcgctccgcacgcaggcgactgcggtcgcccccacgttggggttttcccctacggcgtcattgcctttcccttgcatttctcgctaagcgatgcgcgctctggccttcggtcctaggcacgttggccagtgacggtccacaggctaatctgacattcctgaaggccacattttaaggactgaggttacaatggcagatgccagccctagaacagaaacatcaacagatgatactgacgacaataacgggcttgaaccagccagaggtggtcttgttgcttctgactccagtgacagatccaaagacaaacatggagatcaaaagacattgcgtcgccttgctcaaaatcgtgaggctgcaaggaagagccgactaaggaagaaggcatatgttcaacagttggagaatagcaggctaaaacttacccaactagagcaagagctgcaaagagctcgtcagcagggcatttttatatctagttcagttgatcagtcacactccatgagtggaaatggggcattggcctttgatatggagtatgcgaggtggttggaagagcacaatcggcaaattagtgaactaagggctggtgtcagtgctcatgcaagtgatactgatcttcgaagtgttgttgataagatcatgtcacactatgatgagatttttaggctcaaaggcaatgcagccaaggcagatgtttttcacgtcttatctggcatgtggaagacaccggcggagaggtgttttttgtggctaggaggtttccgaccatctgaggttttaaagcttctttcgacacaacttgaacctctcaccgaacagcagctgtcagggataagcaaccttcagcaatcttcacagcaggctgaggatgctctttcacaaggaatggaggcccttcagcaatcattggccgaaaccttggctgggtctctttcgtcttctggatcaacaggaaatgtggcaaactacatgggtcaaatggccatggctatgggaaaacttggaacgcttgagaatttccttcgtcaggctgacaacctgcggctgcagactctacaacagatgcaaaggatcctgaccactagacagtcagctcgggcgctacttgtgataagtgattactcttcacgtctccgtgccctaagctctctctggcttgctcggcccaaggaatagcaagaacatgctatttgactgcaatacttttcacaatttggttttcaatggtcaggagatttgacaaggctgcgacagacttgattcggacatatctgcacatactatgacccaaatggaaggggatgttcatgtagcttaggctgcttagctttgtagttaagtgttgttgatgtatcattaccaactgctgtaaaattctcactctgtatgcccctgatttgcagcgaaccattagaatgcacattgatgttcacctgacgattttttgttcactcttaggaacactagcgtaaacataatgttctgcccagtatcatctaaccagggtatatggctgatcccccgcact

SEQ ID NO: 745 - DNA, 895 bp, Zea mays
  Clone ID: TF_ZmC30857_3
cgaggagcccgcagctgagcctgagcggctgcagctctctcttctccctgtccagcaccagtacgagccgcgacagcgccgccctgaaggcgccggtgccagcgccaccggcaggcgcggtgcccccacggcgcacccctctcctgtcgctcagcgtcggcgaggaggaagaggacgagggtgaggacgaggaggagtacctgctgggggccggcgccctggatctgcagctgacggggcccggtggcggcagcaacagcagcggcggctacgacgacgagcggaagaacatccggatgatgaggaacagggagtctgcgctgcgctccagggcaaggaagagggagctggagaaggaggttcgtcgcctggtgaatgagaacctcaagctcaagaggcagtgcaaacaagtaacaaatagtagcacactttgtctcttatagctaaaaatgaatgaatactcatctgtttgtatataacatgtaccagctgaaactagatatggctgcactggtccagcaaagcagcagcaagagcagctcccacatcagaagaacctcctcatccactcagctctaggctgctaccaataggaatatgtatgtgaatttaaagccatatatgaccaaggaagaatgggaggaagacgaacaaagctagctagactagactgcagcccctctaatccatggccattcgctgattaatacgataatatctcttatttgttggcttcttctagcttgcttcaatttcctagtacagcagtttatgtagtatttcctagattgttagcgcaaagctgcctttttcacccatggcatccactctagtggtgtccaggtagtgtcgatccaattttagtatagaggtcactcaaacctctctccatgac

SEQ ID NO: 746 - DNA, 3183 bp, Zea mays
  Clone ID: TF_ZmC1889_1
ccatctccggctgacgacgctgcagcagatgcacaagatcctgacgccgcggcaggcggccaggggcctcctggcgctcggcgactacttccagcgcctccgcacgctcagctcgatgtgggcggcgcgcccgcgttattgcggcgatcagctagatgcctgcggcgtggcaggccaaaagctcgctcactggtgaggcgaccgtaccaaagaacacgacgccgacgacgacgaagactaaagagtggtagcctcgagcggccgggatactctactattgcatagtagccttcaacaacggtgctggtgctctgtcgatccgtctgtcgttactcacagcgcttcccggcccgccggctcttgtctctctgtttgccccgtggccagcatcgccagctccgcctccccgccgcagtacatgacgccggcggcgtcgcccgcgcagttcgcgccggcgcccctcaggatggggtacgggcggccggcgcccgtgatgggcatgtggagcagcgagccgttcaaggtcgacagcggcggccacgccacctgcagcgcgtccaccgtcatggaggcggacaccaagctggagacaagcaggctagaagatgttccgcaggtagcactcgagccagagaggagtacggatcaggaaacgagcaggccgccagagagggtcatgagaaggctcgcgcagaacagagaggctgctcggaagagtcgcctgcggaaaaaggcctacatccagcagctagagacaagccggatgaagctgtcgcagctagagctggagcttcaacgggctcgacggcagcagggcgcgtatgcaaatagtgaagcatgggagacccagctctcggatacacatgcccgatcgatccaggcgttgctgggttcgagatcgaagtgaagtcgtcctttggagctgcacacacatctgtaaggagaaaccttgtgcttggcgatttggcaccctccagttaattatccttggtttgaggaagaacaaggcatgaagaagctacagcagaacctcgccgagatcctgaccgccgaggctgaccccttcggggcccccgacgcctacatgctgcagatggccactgcggtggagaagctgaaagagctcgtcaacttcgtcacccaggcggaccatctccggctgatgacgctgcaacagatgcacaagatcctgacgacgcggcaggcggccaggggcctgctggcgctcggcgactacttccagcgcctccgcacgctgagctcgctgtgggcggtgcgcccgcgggaggcggcgattagctagatgcccgcggtgtgggtgtggccagccaaaggcccaccaaagaacacgacgacgacgaatagtagcagttcgctgtatactttcccaagctgtaaagtccagtggaggacgaaaaaagcgacctcacagtcactggggttcggttccgacgaaaggatgcaaggcttttaagtcaatggcggtgtctccgcagcagcagcagcagcagcaagcggtgtgcgtttgtcaagcgaagcgactagagaataaaacggaaatggattgaggccttctctatttgacgggcggaagacgtgtacatatattgttttgccacccggccgtggccttctagagaggcgtatgattcatgatgcaggccatactaggatcatatttgtacgtggtggaaccgagagcaaaacaatattacaatagtttaaattagggaaaaaaaaaaaaaaaaaaatgttcaagatcaaggcggcggcggccaacgcggacgtgttctacgtcatgtcgggcttgtggaagacccccgccgagaggttctttctctggatcggcgggttccggccgtcggaagtcctcaagatcctgagcccgcagctggagccgctggcggaggcgcagcgcatgctggtgggcggcctgcagcacacgtcggcgcaggcggaggacgcgctgtcgcagggcatggagaagctgcagcagaacctcgcggagaccctgacggccgaggccgacccgttcgggccccccgacccctacatgctgcagatggccaccgcggtgggcatactgaaagagctcgtcaacttcgtgacccaggcggaccatctccggctgacgacgctgcagcagatgcacaagatcctgacgccgcggcaggcggccaggggcctcctggcgctcggcgactacttccagcgcctccgcacgctcagctcgatgtgggcggcgcgcccgcgggaggcggcggtcagctagatgcgcctgcggcgtggcaggccaaaagctcgctcactggtgaggcgaccgtaccaaagaacacgacgccgacgacgacgaagactaaagatgagtggtagcagttcgctgtatacttgccccccaatgcaaggtgtaaagcccagtggaggacgaagagatcgacctcgctgtacgagtacgacgaacggaagggacgcttctcggtcagcggcggcggcgacctcgctgtacaaggcgattagtagacatacaaaatgtaaatggaaatcgatcgatgggcggaggatatgtacgtatcttgttttgatacccgcggccggggccctcctagaggcgtactgtatgattgattatgcgggccttctacaactactactggtgttgggctatatgtatatctctacaactattacggaaatcgattgatgggcggaagacatgtacgtatcttgttttgatacccgcggccggggccctcctagaggcgtactgtatgatggttatgcgggccgtctacaactactactggtgttgggctatatgtatatttatataaaatgtaatcacctgtaactatcgttggtcagattctaaagagcacgcggcatgcaggtgtggaacagttcagttcaaaaaaaaaaaaaaaaaaaaaaaaaaaaaaaaaaaaaaaaaaaaaaaatgtaaacggaaatcgattgatgggcggaagacatgtacgtatcttgttttcatacccgcggccggggcctcctagaggcgtactgtatgattgatgatgcgggccgtctacaactactactggtgttgggctatatgtatatttaatataatgtaatcacctgtaactatcgttggtcagattctaaagagcacggggcatgcaggtgtggaacagttcagttcaccac

SEQ ID NO: 747 - DNA, 635 bp, Zea mays
  Clone ID: TF_LIB4759-003-R1-N1-G7
ccggccgagaactggtagtgagtgtcctttgaagctgggctatagacgctagagcacatcctgtgctgtgagaaacgtaacctaataaaccttgtgttcagcgatttgacggcctccgttatccgaagaaacaacttcaaccagacatgtggcgagcgaggtgattagctagtgacaagtgttgatctaagggagatcgttttgagcatgctatgatggagctctactccggatatcttgaagatcatttcaacctccacaagctaaggtcatgagaaggctcgcgcagaacagagaggctgctcggaagagtcgcctgcggaaaaaggcctacatccagcagctagagacaagccggatgaagctggcccagctagagctggagcttcaacgggctcgacgacagcagggcgcgtacgcaaatgggagcatgggagactcagctctcggatacacagggtcgatcgatccaggcgtcgccgcgttcgagatcgaatacaggcactgggtggacgagcagaagcggcacacggcggagctgatgtcggcgctccaggggcagcagacgtcgtcgacgtcggagctggagctccgcttgctggtggagacggggctcagcaactacgagcacctct

SEQ ID NO: 748 - DNA, 440 bp, Zea mays
  Clone ID: TF_LIB3900-010-Q1-K6-E6
atcgctagcgtccgatacctatctcctgctgcaggcgcagcctctctcagacctcattaccgtgacgacttcctcttccagttccagtacagcgacctcctgctggcgcctgcgcacccttcgctctaccaagatgtcgctgatcacctggtcctcggagctagcttcccggctgctggtgacaacaggtccagctcggaggagtcggacgcctacctgcagcgcagcctcgcggaggagcgcaggaagaggaggatggtatccaacagggagtccgcccggcggtcgcgcgtgaggaagcagaagcagctgagcgagctctgggcgcaggtcgtccacctccgcggcaccaaccgccagctccttgaccagctcaagtgctcaaccgtgtcacggaggatacggtcgcagcccacgcgtccgctagttctagatcgcga

SEQ ID NO: 749 - DNA, 2213 bp, Zea mays
  Clone ID: TF_ZmC2115_2
ggggggattctcacacccatagaaactgaacctactacactgtcatatcacacaagaagagagcttcagcgtgtgagcaagagcaactctcagaaaagaaacaactagtcaagagtcaagactgcctgcggcctgcctgccctccaaggctccaactctccgaggctccaaagtccaagctacttcggcgtccctgactgggcttgtggtctcagtctcagcccttcgttgccgcagagaaccctcagtagttccgctgcaggttgctaattaattaatcgacgagaagtaggagggagcgctgatcgtgtgtgtgcggcatcgcaggatgggggatactagtagttctagccattcaaggcaggatccttctcttcttggctatggcttccatggcgccatcgccaactccactcctcctgcaaacttctttgaccaaggaggaggaggcacctatttcggagagctggaagaagcgttcatgcatcaggtcgcctcgctcagaagaactcaacaggctgcaaccgtctctgcacctcatcatggagacaccaagccctttcccactgctgctggtgctacagctgcaacggctacggctacggctaggccacctcctacactggacatcttcccagcttggcctatgaggtctcgtcttcacacgcccaaggagtgctcgaatgtgacagcagacagcacagacgactcggagagcagcagcaagaaccacagcaaccactcctcagaccagctcggagcagcagcagcagcaaacatggcgagccagttcgagcaagcttcacagcagcagcttcagcacaaaaatatggctacaagttccactccaagaactggcaaggctcttgatccaaaggtaatcagaaggctggctcagaatcgtgaggctgcacgcaaaagccggctgcggaagaaggcgtacattcagcagcttgagagctgcaagctgaagctttctcagatggaacaggacatgcagcgagcccgtacccagggcctctttcttggaggagatccgggtgcaagcaccagttcaggtgccgccatgtttgacgtggagtacgcccggtggctggacaaccacagccggcgcctggccgagctgaacggagccctgcacgcgcacctggcagacggtgacctcagagccatcgtcgacgacgccctcacccaccacgacgagctgttccagctcaaggccatggcggccaaatccgacgtgttccacctcatcactggggtgtggacgacccccgccgagcgctgcttcctctggatgggtggattcaggccctccgatctgctcaagacactgctgccccagctagatccactgacagagcagcaagtggtcggcatatgcagccttcagcagtcatcacagcaggcagaggaagctctctcgcagggcttggagcagctgcatcagtcgcttgctgacaccatggccggtgggtctctgactgacgacgccaacatgagcttcatgagccaaatggctcttgccctcggcaaactggccaaccttgaaggctttgtgatacaggccgataacttgaggcaacagactcttcatcagatgcaccggattctgacagttcggcaggcagctcgatgtctcttggcaattggcgagtaccacaaccgccttcgtgccttaagttccctctgggcttctagacctcgagagatactggtgaccgatgaaggcaattgtgagataagcattgcagcacaaccatcccaaaaccaattttcaaccttctgactgacacatgttgtggaactaaccctcagcataggagcaagagaaaaatgactgcgaagagagattgtttagatgcacgtggcagatatctgagagctacagaggaaagctgggaaatagaagaagctctaaaacaaggagtgtttctggaaattctttagttttcaaaaaacactttctgaaaatgtgtgtacaaggaaattccaggaaggtgaaattgcttcgttgactgcagtgggaaggggaaagagaaaagctagaatctcatgtcgagtactccagtacaatgtgttcttttgtctggtctaaattcttgtaacagctcttcctatgatggaagaatccattcaacaattccacctatgattactggattgagtatgttgaataggttggttgaggctatctagtaatttttatgact

SEQ ID NO: 750 - DNA, 1160 bp, Zea mays
  Clone ID: TF_ZmC2202_6
cttcgcaattgatttcccaagcttcctttgatggtgacatagatggggcaagcctagttacaaactctaatgtcatagaagatgatgattttcaaggcaagccaaccaacagtggcacatcaaaggaactgtcagacgatgatggtgaccttgaagagaatactgaccccgctaacgccaagaagatgaggagaatggtgtcaaaccgggaatcggctaggcgatcaagaaagaggaagcaagcacacttgaccgatcttgaatcacaggttaacgtctgagaatgcatctttgctgaagcgactggctgatatgactcagaaatacaaggacgcttccgttgacaataaaaatctaacagttgatgttgagactatgaggagaaaggtgtgaggagttgtaaaacgaaacaaaacattaaaagcgcacataccatgccgcaatgcgccaagtgtgtgtcccattaagcctgtggggtgttgcccttgccttgccttgtggatgggctgctctatctcaaatgataccgagaggagtccaaacagaatactaccatacaaacatttcttaatgcttgtgtgtgaacatagccgaggaagctgtcaggaggctaactgggatcaccctcatgctaccgaccgcttttgagaagcccacgagcagcgcgcccctgtcatcatgtccatctgatgcagcttctgcttctgcttctgccgccattgaagacagcgtgaagcatttcctccaggcgccacttgaaacagttggggatcattcccaaacgcagcagtttttcagaccaagccagcttctctgcaccgtgttgctagcctggagaacctgcagaagaggatcgtcggggatgcaatgtattccgagaccgcgtcaacgacattctcagatcctgaagctcttgccgataggtaaaggttgctcctgttctgtcctgtgatgaacagccgtgtgatgctctagcggcctaagtgcttctggtaatggaagttgtacactattttgaaggttaataataattgttgagaaatgatctcatccctttaaggcatctcttgggtgtagacacacctcttgggttggctccttcaaggcacccctttgtaagtaaagtattccattaataaaccgaatagagttttcactcc

SEQ ID NO: 751 - DNA, 1422 bp, Zea mays
  Clone ID: TF_ZmC2640_1
ccgggataggatggagaatggaagtggtgcggttgtaccttctaattcttcagataggtccgacaggtctgataaacctttggaccaaagacaatgcgacggcttgcccaaaatcgtgaggcagcaagaaaaagtcggctgaggaaaaaggcatatgtgcagcagctggagagcagtaagctgaaacttgcacaactggaacaggaactccagaaagctcgccagcagggaatcttcatttctagctctggagaccaaacccatgccatgagtggaaatggagctttgacttttgacatagaatatgctagatggctagaggaccaaaataagcagataaatgagttgaggactgcagtgaatgctcatgcaagtgacagcgatctacgacttattgtagatggcataatggcacactatgatgaaatattcaaggtcaaaggtgttgctgcaaaggctgatgtgtttcatatactttcaggcatgtggaagacacctgctgaaaggtgcttcctatggcttgggggttttcgtccatctgagcttttaaagctcctagcgaatcacctcgagcctctaactgagcagcaaatgctgggtttgaccaacctccagcaatcttcccaacaagcagaggatgcgttgtcacagggcatggaagcactgcagcaatctttggcagagactttggctggatctctcggtccagcaggttcttcaggaaatgtggcaaactacatgggtcagatggccatggccatgggcaaactcgggacgctagagaattttcttcgccaagccgacaacctgcgacagcagacgttgcatcaaatgcaacgtatcctaacgatccgacaggcttctcgtgctcttcttgcaatccacgactatttttcacgattgcgcgctttaagttctctgtggcttgctaggccacgtgaataacgaagggccgtcagtattttgagttccctctgccttacggtgctgctgcgtcgttcgcagcgatgcatcacagatctttggtggtactgtttttgttgtacaattacttttggccgctgcttggtccaaattgtactcaggtgggtgtacaagtaggtcaatataatcctgtaagttatggtgatttatgggtgtgttagcaatgcaataataattagagagggcaggatcagggtttctgttgtttgtactggttagagatttagtcctaatgtaacttcctgggacatggggggcggaatgggaagagagtaacaagaatcttcctttggttactgtagtatatgttggtattgttgcatcccatttgctcattttgctgttaggagaatgattattctgtccaataaaaaaaattttgagtaatgttgtttgtaacccccacatgattatggatatgactgctagttccttccc

SEQ ID NO: 752 - DNA, 1939 bp, Zea mays
  Clone ID: TF_ZmC14082_2
ggctttgcttttaccccccaaccttttcgacaggaccctgcttgctctacagggttctcccggaggcagaaactctttgcttccgcctggctcgcgatgcttgtttgggtgcgcgggctgcggcgaggtgaggcgacggcggcgccgggcggttgcatggtggccgatggagagtagacggggagggtcgtcggcggcggcggcggaagatgcgggcggggcgatgccgagctttgggccaacgcagcacgccattcgcgcagatgtgaacagcatgcaaccttctcgagttactgactttggggcactggcacagtctgctggattccgaatagaagatcttgctaaccttaatgcaaatgctttgttcaatctgaagccaaattctcatacgattgacaacagtcctctccagtttggaaattacggaaagtctatttcttctcatataaatactacagaagcaacaacagctgcaacaagaattgaccctcagctgtcagcacagcaaacaggagcacaaccaattctggtggcgttaccaactggtaacatggagaattggggagagtcagctatggctgatagccctatgactgacacatctacagatccagacactgatgagaggaaccagatgtttgaacaaggacttgttgctgtccccacagcatctgattctagtgacaaatcaagggacaaactagatcagaagacacttcggcgtcttgcccaaaatcgtgaagctgccaggaaaagccgtttacgaaagaaggcatacatccaaaaccttgagagtagcagactgaaacttactcagttagagcaagagcttcagcgggctcgtcaacagggtatttttatttcgacatcaggagatcaacctcaatcaacaagtggaaatggagctttggcatttgacatggagtatgcacgctggttggaggagcacaataaacatgtaaatgagttgagggctgcagtcaatgcacatgctggtgataatgatcttcgttgtattgttgatagcattatggtacattacgacgaaattttcaagctcaagggtgtggcagctaaagcagatgtttttcatgtgctgtctgggatgtggaagacccctgctgagagatgtttcatgtggttaggtggcttccggtcatctgagcttcttaagttactggcaggtcacctagagcctcttactgatcagcagcttgttggtatatccaacctgcagcagtcctcccaacaagctgaagatgctctttctcaagggatggaagcattgcaacagtcgcttgcagaaactctagcatctggatccttgggccctgctggaccttctggcaatgttgcaaattacatgggacaaatggcgatggctatgggaaaacttggcactcttgagaactttctacgacaggctgataatctacggctgcaaacacttcaacaaatgcaacgcatcttaactacccgacaatcagcacgagccctactcgcaataagtgactacttctctcggctgcgtgctttgagttctctttggcttgcccgtccaagggaataaattcaattaattcataactaggataatttttttgtactgtttctagtatggccattagtttcttcagaacgctcatgtgtcagtgagatatttggatcatattgtaggccatcatggtttactggacaactttgtaacaattttggagagaaaaaactgagttgtaaatacatctggaataatctaagatcttatgaaggggaaaagtatgtgttcaagtgaacgctcagttcatattttaggccctcatgggttaattttggagaaaaaacgagttgtaaatacatctggaataatctaagatcttatgaagggatgatattggaggataagatcgatgaacaaataatgcaacatcactggggg

SEQ ID NO: 753 - DNA, 365 bp, Zea mays
  Clone ID: TF_LIB3159-013-Q1-K1-D3
gtcggatagcttcagccacgacgatgacgactctaggccgagagacaaggttcagagacgggtcgcgcagaacagagaggcagctcggaagagccggctacggaagaaggcgtacatacggaacctcgagacgagccgcgtgaagctggcgcagctggagcaggagctcataatggccaggcgccagcaggtacgcacggcgcgtacggcgtgggaggaggagtcgcaccgccggcggcgcccgtggacccgcgcgtcgctgcgttcgagctggagtacgcgcactgggtggaggagcagagcaggcaggcgacggagctgcgggcggcgctgcagtcgcacgcgccggacgtccagctgcgggt

SEQ ID NO: 754 - DNA, 613 bp, Zea mays
  Clone ID: TF_LIB4741-023-Q1-K1-G4
atcttctttaggtcgcccgtcgaaaggctcctcttctttttattgcgcctttttggcaaaggtgggggggaggaactcttcgtcgtcgcgcaccagcagcagcgttacgcaattcacgaaagacatcgccggcagcgccgtctcgccgccggagtacatggcgtcggcgtcgccggcgcagttcgcggcggcgcccctcaggatggggtacgggaggccggcgcccgcgccgcccccgcccgtgatgggcatgtggagcagcgagccgttcagggtcgacagcggcagcgcccacgccaccagcgcgtccaccgtcaacaccaagctggaggagacaaggctagaagacgacgtggtagcacttgagccggcaagaagtacggagcaggaaacgagcaggccgccagagagggcccagagaaggctcgcgcagaacagagaggctgcccggaagagtcgcctgcggaagaaggcctacatccagcagctagagacaagccgcatgaagctgtcgcagctagagctggagcttaacgggcgcggcagcagcagggtgcatatgcgaatagtggaagcatgggagactcggctctcggctacacatgcccgatag

SEQ ID NO: 755 - DNA, 791 bp, Zea mays
  unsure (1)..(791): unsure at all n locations
  Clone ID: TF_LIB4765-063-R1-K2-F8
caggcggcggactttgcatagagccttcacaacggtgctggtgctctgtcgatccgtctgtcgttactcacagcgcttcccggcccgccggctcttgtctctctgtttgccccgtggccagcatcgccagctccgcctccccgccgcagtacatgacgccggcggcgtcgcccgcgcagtacatgacgccggcgcccctcaggatggggtacgggcggccggcgcccgtgatgggcatgtggagcagcgagccgttcaaggtcgacagcggcggccacgccacctgcagcgcgtccaccgtcatggaggcggacaccaagctggagacaagcaggctacaagatgatgttccacaggtagcactcgagccagagaggagtacggatcaggaaacgagcaggccgccagagagggtcatgagaaggctcgcgcagaacagagaggctgctcggaagagtcgcctgcggaaaaaggcctacatccagcagctagagacaagccggatgaagctggcccagctagagctggagcttcaacgggctcgacggcagcagggcgcgtacgcaaatgggagcatgggagacccagctctcggatacacagggtcgatcgatccaggcgtcgccgcgttcgagatcgaatacaggcactgggtggacgagcagaagcggcacacggcggagctgatgtcggcgctccaggggcagcagacgtcgtcgacgtcggagctggagctccgcttgctggtggagacggngctcagcaactacgagcacctcttcaggatcaag

SEQ ID NO: 756 - DNA, 1036 bp, Zea mays
  Clone ID: TF_ZmC30857_2
ccggggagagaagaggagtcgcatttcgcgtggtcgagtccgtccgtgtgtgtcctccgctgtccgctggctgcgatagtgctgcctgctgctctaagctctaacccaatccaaggaggatgccgaggagcccgcagctgagcctgagcggctgcagctctctcttctccctgtccagcaccagtacgagccgcgacagcgccgccctgaaggcgccggtgcccccacggcgcacccctctcctgtcgctcagcgtcggcgaggaggaagaggacgagggtgaggacgaggaggagtacctgctgggggccggcgccctggatctgcagctgacggggcccggtggcggcagcaacagcagcggcggctacgacgacgagcggaagaagatccggatgatgaggaacagggagtgctgcgctccagggcaaggaagagggcctatgtgcaggagctggagaaggaggttcgtcgcctggtgaatgagaacctcaagctcaagaggcagtgcaaacaactgaaactagatatggctgcactggtccagcaaagcagcagcaagagcagctcccacatcagaagaacctcctcatccactcagctctaggctgctaccaataggaatatgtatgtgaatttaaagccatatatgaccaaggaagaatgggaggaagacgaacaaagctagctagactagactgcagcccctctaatccatggccattcgctgattaatacgataatatctcttatttgttggcttcttctagcttgcttcaatttcctagtacagcagtttatgtagtatttcctagattgttagcgcaaagctgcctttttcacccatggcatccactctagtggtgtccaggtagtgtcgatccaattttagtatagaggtcactcaaacctctctccatgacagagctttttattcgtttcctgtcttttttttattgttctaatcataataagatacgcacacattcacctgtaaaaaaaaaaaaaaaaaaaactcgagactagttcctcgtgc

SEQ ID NO: 757 - DNA, 1968 bp, Zea mays
  Clone ID: TF_ZmC34730_1
tcgaggccgaaagggaaaaaaccatttttcctccgttccattcttctctcctcgcctcccctcgcctcccctcttgaaccctccgccgctccgaggaaaatccgatttgaattgaaaatcatccggagacagagatcttttcttcctcgaagctatcttctctgtcgactcgatccatagctgctcgcgtccctgttcctcgccggctggcaagtggcggcgacgggacgaggtcttcatcgcctcttcgcgagcgacgatcacccactagtttggtcggtctgaggcacatgatgatggccaacgcgaagctccacaagcaggccctgctgccgccgcggagccccttcccgacggcggcgccgtacgccgaccgcggcccaatcgcgcggccgcaggttggctccacgcaccaccgccacggccaccaccagcgcacgtcgtccgagagcttcatcgaggagcagccgccgtcgtggctcgacgacctgctcaacgagccagagacgcccgcggcgcggcagagcggccgggctgggcaccgcaggtcgtccagtgactcgtttgcgttgtttgacggtggagctgctggtgctggtgcttacgccaatggtttcgaggggatggggagaggaggtgggcaacctgcgccgtggggcggtgtgcaggagtactatgccaagctggccccgattgggagggcacatggccggccgtgggagcaaggcatgccgaattcggcgggcttcaggcatggtggtggcctgccaatgcccacaaaagataaggttggtgggcatcatgggccaccgaaagtgtcgagggagcatgaccatggcatggacaagagaactgatgatgctggccatgatcaaaaggttggagccaaggagggtgtgccgccgaagcatgcacagtcagaggcggacaacaagcgtgctaaacagcaatatgctcagaggtctcgtgtccggaagctgcagtatattgcagagcttgagagtagagtccaggcattacagtcagaaggggtagaagtgtctgctgaaatggagttccttagccagcagaatatcatgctagacctggaaaacaaagccttgaagcaaagagtggagagtctagcacaggaacaacttattaagcgttttcaacaggagatgtttgagcgggaaattggtcgtctcagaacaatatatcagcaacagcagcaacaacaggctcctgctcttgttcgtagtaacagcagggaccttgatgtgcagttcgccaacttgtctctgaaacacaaagaccccaacacgggccgggatgctctctctgggcctcttcgtacttagttctttccatccttccgttcttgtgggttctatcagtggccaccactgtgtctgtcatctccaccaagaaaggagaagtgcacttggattgtgtgaaaaacaccggaaaaaggctaatagctatggatctgatgtttattatttcgggatatgcacctggcggtcatcctcagctcgcgtccattggtgatgctcgaccagtcggcggtgtttagggtttttgtttttagctagatgcttttcaagcatcattgtaccatttttcatgctagggttctaatctgttactacccccgttttcctgaactgtgtgcttcaagcatcttagtcatgtttggattagttctgcgttatcagtgcctcagtggaatgtggagcactaggcagcatcaggtaagttgctttggagatgtgccacatccttgacaactgcatgttctgctattatttcttagtactcaataagctagtgcaaatgaggtattagcgatcttcagatttcaggttgttcttgatgtactcctatgaatatatctcaattgctcaacgtttcctttttatgttaaaatttggctccataattgtatattttgaatcaagcagtgctaaggtatggttgatttaattt

SEQ ID NO: 758 - DNA, 856 bp, Zea mays
  unsure (1)..(856): unsure at all n locations
  Clone ID: TF_LIB5117-060-A1-PF1-H9
gatttcgcttctcgaagcttccccgattcgcctccgctcccccaccaaatccccgacgccgcgagccggagctgctacaggaggaggagtcgccggcctccgggtagaaggcgcgcgtgaggccaggccgtaccggattcggtgccgcggctctgaagctctcccccatccatcccgggcgggggcccgtgggctgaccaccaaccatggccgcggcccgccggcgccacgccgagctccgctccgggcagcatcgccgaccgcacaccaccatacggttgtagtaaccccgagcagctactgatttggactcttggagagaaagggctgggctcaccactttgctgttagaaaggggggagcaaagtgatttactgtctccttgtgattgcggtccgctgagtgatggcagatgctagctcaaggactgacaactcaactgttctagacaacgacggcaagatctataggttagaacaaggacaaagtggtggggcaatcatggcttctaattcttcggataggtctgacaggtccgacaaacccttggaccaaaagacattgcgccgtcttgctcaaaatcgtgaggctgcaaggaaaagtcgactgaggaagaagtcatatgtgcaacagctagaaagcagcaagctgaagcttgcacaactagagcaggagctccagaaagctcgccagcagggaatcttcatttctagctccggagaccaaacccatgccatgagtggaaatggagcaatgactttcgatctagaatacactagatggcttgaggacaannacagcaaatccacgagttgaggactgccgttaatgctcaatgcagtgacagtgacctgcg

SEQ ID NO: 759 - DNA, 1887 bp, Zea mays
  Clone ID: TF_ZmC1399_1
cggccgggatccggctcgcgacaggtttctgggcgagcagtctgcgagatctcgattcgtctggaagacatcgctactaccccagccacagtacccattgggtatttatctgctcccttgctgaagctggaatgtgcagctcgatcggttagcgctacgagtcctcgctgaatccagccaaatgatccccttgagcttgccagttagagcacgcacctaatataatgctggccttccgtcagaagtaacagctagctaagagaagcacaagaaaaatctggtagcttgagttctgactcgaactcagagatggcttatgcaagccccgggactgatgatacgtcgacagatctagatactgacgagaagaatcacatgttggagctagggcagcttgtgtcccttacagcttctgattccggcaacaaagcaaaggacaagctactaggtcaaaaggcactgcgccgtctggcccagaaccgtgaagctgctaggaaaagccgtctaagaaagaaggcatacgttgagcaacttgagaatagcaggctgaaacttagccagctggagcaggaactccagcgtgctcgccaacagggcatcttcattcctactccgggagacgaccagcagccaaactctactagtgaaaaaggtgctttggcgtttgacaaggactacgctggatgggaagacgagcacaggaagcagataagcgagctgagggccgcgctcagcgcacacgccggtgacgacgagctccggcgcatcgtggacggcgtcatggcgcatcaccacgaagcgttcaggctcaagtgcgtggcagccagggccgacgccttccacgtgctgtcggggatgtggaagacccccgtggagaggtgctttatgtggctgggcggatttcgaccgtcagagattctaaagttcctcgcaagccatctggaccccctcaccgagcggcagctcgcgagcgtacacggcctgcagcagtcctcgcagcaagccgaagagggcatctcgcagcgggtgcaagcgctgcagcagtcggtcgcggagaccctcgcgtcgtcagggtccccgtgcctgcctgtgcctgcaggtcgtgctcctccgcctggcgacgacgccgctccagactgctcggggacgatggcggcggcggttgcgaagcttgtcgctcttgaaagcttggtgcatgaggctgacggtctgcggaggcagactcttgagcagatgcagcgcgtgctgaccacccgccagtccgcgcgggcgctgcttgtgatcagtgactacctttcccggctacgcgctctgagttctctctggatcgcacgaccacgggaatgaattcagctcggcttatgtatctttgtttgacccggccgtggagaaaaataagaatcgaagatgcctccgctccttccatcatcactgcatgtaattgtaatctgaacatcattataaacagccgtaaccgttggccatcatcacggtcagtccgcgcgggcgctgcttgtgatcagtgactacctttcccggctacgcgctctgagttctctctggatcgcacgaccacgggaatgaattcatctcggcttatgtatcttgtttgacccgtggagaaaaataacaatcgaagatgccttcgctccttccatcatcactgcatgtaattgtaatctgaacatcaatataaacatccggaattatttttttgttctcacgaacaccgtttcacattaaaaaccaaacgaacagcttggctgattataacctggtccttgtaactatattcaaaatctattctacaaacaatacggtctacaatgtaaaacaatgttttagatgaactatgagtggactgtcaaaaaagtcgacgcggccgcg

SEQ ID NO: 760 - DNA, 1410 bp, Zea mays
  Clone ID: TF_ZmC1399_2
cgagatctcgattcgtctggaagacatcgctactaccccagccacagtacccattgggtatttatctgctcccttgctgaagctggaatgtgcagctcgatcggttagcgctacgagtcctcgctgaatccagccaaatgatccccttgagcttgccagttagagcacgaagtaacagctagctaagagaagcacaagaaaaatctggtagcttgagttctgactcgaactcagagatggcttatgcaagccccgggactgatgatacgtcgacagatctagatactgacgagaagaatcacatgttggagctagggcagcttgtgtcccttacagcttctgattccggcaacaaagcaaaggacaagctactaggtcaaaaggcactgcgccgtctggcccagaaccgtgaagctgctaggaaaagccgtctaagaaagaaggcatacgttgagcaacttgagaatagcaggctgaaacttagccagctggagcaggaactccagcgtgctcgccaacagggcatcttcattcctactccgggagacgaccagcagccaaactctactagtgaaaaaggtgctttggcgtttgacaaggactacgctggatgggaagacgagcacaggaagcagataagcgagctgagggccgcgctcagcgcacacgccggtgacgacgagctccggcgcatcgtggacggcgtcatggcgcatcaccacgaagcgttcaggctcaagtgcgtggcagccagggccgacgccttccacgtgctgtcggggatgtggaagacccccgtggagaggtgctttatgtggctgggcggatttcgaccgtcagagattctaaagttcctcgcaagccatctggaccccctcaccgagcggcagctcgcgagcgtacacggcctgcagcagtcctcgcagcaagccgaagagggcatctcgcagcgggtgcaagcgctgcagcagtcggtcgcggagaccctcgcgtcgtcagggtccccgtgcctgcctgtgcctgcaggtcgtgctcctccgcctggcgacgacgccgctccagactgctcggggacgatggcggcggcggttgcgaagcttgtcgctcttgaaagcttggtgcatgaggctgacggtctgcggaggcagactcttgagcagatgcagcgcgtgctgaccacccgccagtccgcgcgggcgctgcttgtgatcagtgactacctttcccggctacgcgctctgagttctctctggatcgcacgaccacgggaatgaattcagctcggcttatgtatctttgtttgacccggccgtggagaaaaataagaatcgaagatgcctccgctccttccatcatcactgcatgtaattgtaatctgaacatcattataaacagccgtaaccgttggcc

SEQ ID NO: 761 - DNA, 775 bp, Zea mays
  Clone ID: TF_ZmC1399_3
cccgggcgattcgtctggaagacatcgctactaccccagccacagtacccattgggtatttatctgctcccttgctgaagctggaatgtgcagctcgatcggttagcgctacgagtcctcgctgaatccagccaaatgatccccttgagcttgccagttagagcacggtgagtcagcaaagattaaaatagcctccgcacctaatataatgctggccttccgtcagaagtaacagctagctaagagaagcacaagaaaaatctggtagcttgagttctgactcgaactcagagatggcttatgcaagccccgggactgatgatacgtcgacagatctagatactgacgagaagaatcacatgttggagctagggcagcttgtgtcccttacagcttctgattccggcaacaaagcaaaggacaagctactaggtcaaaaggcactgcgccgtctggcccagaaccgtgaagctgctaggaaaagccgtctaagaaagaaggcatacgttgagcaacttgagaatagcaggctgaaacttagccagctggagcaggaactccagcgtgctcgccaacagggcatcttcattcctactccgggagacgaccagcagccaaactctactagtgaaaaaggtgcttttggcgtttgacagggactacgctggatgggaagacgagcacaggaagcagataagcgagctgagggccgcgctcagcgcacacgccggtgacgacgagctccggcgcatcgtggacggcgtcatggcgcata

SEQ ID NO: 762 - DNA, 1358 bp, Zea mays
  Clone ID: TF_ZmC3233_1
ggctcgaggcttggcccagggagttgcaacctgcagcagctgctccttattactttggtgagttggaggaggcccttatccatggcacccgtacatctgttgatcacggcatgatcggaagtgatgtggacacagagcgtaagacagctggataccttgcagctaggccccccacactggagatcttcccttcatggccaatgagtcatctacagcagccatacagtggtaactcgcactcagtagggagcaccactgagtcgagctcaggtcagaacagtatgccacagaccgagctggtgtccccagggagcatgagggccgactctggacagcgtcaggagcttttgatggtgactgttgatgattacaactacgagcaaggactcggagccgcagcaaccacagctccaatctttcagcagcatgcagcaggccaagacaagggaaagcatggatccacaaggaaagacggcaggctgttagacgccaagaccgagaggcgattggcccagaacagagaagctgcgaggaagagcaggctgagaaaaaaggcctacgtacagcagctagagacgagtcggatcaggcttcagcaaatcgagcaggagctgcatggagcacgctcacagggtctgttcccgggaggaggtggtgcggctggagacttgagttcaggcgctgtgattttcgacatggagtacgcccggtggctagaagacgacgcctcgcgcatgacggagctccaggccgtgctgcagccccagatcatcgacgcgaacctgggggccatcgtcgaggactgcatgcggcactacgacgagctgttccacctgagggccatgctcgcaagatccgacgtgttccacctgatgaccggcctgtgggcgaccacggccgagcgatgcttcctctggatgggagggttccgtccttctgaaatcctcaagatgctgataccgcagctcgaccctctcgcggagccgcagctgctagggatgtacaatctgcaacggtcgtcggagcagaccgaggaggcgctcgtgcaggggcttcagcagctgcaccagtcgctggcggacgccgtgggcgctagtcctctcagcgacggcgcgaatgtcgccaactacaccgctctcatggccctggcacttgacaggctcgacaccctcgagagcttttaccgccaggcggacagcctgaggcagcagaccttgcaccagatgcggcggatcctgacgacccgccagacggctcggtgcttcgtctccatcagcgagtaccaccgccgcctccgcgccctcagctccgtctgggcatcgtcccgccctccaactcctccaagcgagggcgtcgtt

SEQ ID NO: 763 - DNA, 505 bp, Zea mays
  Clone ID: TF_LIB3279-234-Q6-N6-E9
aatgcacatcaacactgctagctttcactgcaacggcggcacgcacgcacccatccacagaccaccagagtctctgcaagcagagcagggttttgttcattcacatctcaaagcatcccaagtacagtacagtacagtacccccccgtagacgccctagagagagcccccccccgtgccctcgtcatcagaaagtggcggaattcgttcgccggaggtcgtggcggtgcttcggcggcagctgctgaatcggcggcggaggcggtggcggtggctgcggctgcttcctcttcggttgcggcggcggctgcttcttgttctgctccgccggtggcggctccagtggctccagtggtttcagcaccttgagctcaatgagacgcttgttctcctcctccagccgggccaccttgttctccagctcgatggtgtacgcctgcttcctggcccgggacctcgccgcggactcatggtatttgatcatgcgcttttgccgccggtccacc

SEQ ID NO: 764 - DNA, 518 bp, Zea mays
  unsure (1)..(518): unsure at all n locations
  Clone ID: TF_LIB3060-074-Q1-K6-A2
ggctgctcccaactcccatcctccccctcccggagtacgaagtactagnaaggagagcggctttcctctaagaatggcgggtggcggcgccggcgacgacgacgtggtggtggtgagctgcggcggcagaggcggcggcgaccccggcgcatacgccgcggtgctcaagaggaagctcgacctgtactgcgccgccgtcgccaaatccatggtgacatagatggggcaagcctagttacaaactctaatgtcatagaagatgatgattttcaaggcaagccaaccaacagtggcacatcaaaggaactgtcagacgatgatggtgaccttgaagagaatactgaccccgctaacgccaanaagatgaggagttaaatttcggtgttgtgatcagaatggtgtcaaaccggaaatcggctaggcgatcaataaagaggaagcaagcacacttgaccgatcttgaatcacaggtttccaggttaacgtctgaaaatgcatctttgctgaagcgactggct

SEQ ID NO: 765 - DNA, 1286 bp, Zea mays
  Clone ID: TF_ZmC3114_3
ggaaaggcaaggggaagggcgggggcgcgtcgcctgagaagggcagctctggggcgccctccggtgaggacgactccaggagcagtgacagcggcagcgatgagtcgtcagagacgagagatgatgacactgaccataagggttcatctgcgcccaagaaaaggaaatctggtaacacgtcggctgaaggtgaaccgtctcaagctgctgttgtgcgctatgctacggttgagtcgccatatcccgcaaagggaaggtctgcctcaaagcttccagtgtctgcacctggcagggcagcgcttcctagtgccaccccgaatctgaacattgggatggacatttggaatacttctcctgccttggctgttcctgcagtgcagggggaagcgaatcctgggttggcgcttgcccgacgtgatagcgttactcaactggatgaacgtgaattgaagagggagaggcggaaacaatctaacagggagtctgcaaggagatctaggttacgcaagcaggtagtactggaatcagtacatcctcatttcttgcagaatggcatggtgaaaaatatacaaacacacgcacacacacgcacatgctcactagttcctgtcaatctggtgaagatctgtttgcaagacaattcaaggcaagtaggctaggggatagtattacaacctggagccaaatttccccagaattagttgtatcctaggcccaccaagctttaactagagtcatcaaagatctttgaaattcatttattttgggttaactgatactagtttatttttaaacataaggatgcggttgcttggcctctggctctgggaagtgtttcgataaataaatggtacctgaacctacaggtgttgtaccattagttcagaacccagaaatttttttgtggctctctgacagagcaaccttatgtcatacagaggtggatgaggaagtgacaaagatgagatgagatgaggtgtttcttatctaaccacaacacccatcatcggtcagtgtgtgtgttttttcttagcgaagctgtcgttttagtcctcgcagcccgctggggccatgtagagtcgcccccactgcagccatgtattatttatggctcgtcacggtgtgctttgtgtttttttgtgtgttgtgtaaaaactattgatgtaacaaaacctagagagcctagaggtttttttttatgtctgctaactcctgacgagggatgtaatgtaaccggccaatttgttgcctgatcgttcgttagatgaaatgctagcaaatgtcac

SEQ ID NO: 766 - DNA, 1353 bp, Zea mays
  Clone ID: TF_ZmC3100_2
ctaggcgagagcacgcactgctggcggcgcggctaagaccgagagccgccgcgcacattattgttcgcgcgaggccagccgccggttgcattgcatggcgcagctgccgcccaggatcccgaccgaggtgcaccactggcccgaggggggccagcacggcgcggcggcggcggcgtgggcggacgacttcgccgagttcgcggcggcgcggcggggcgcgcaccgcaggtcgctcagcgactcggtcgccttcgtcgaggtggcgccggccgacggcggggccggcgagttcgacaggctcgacgacgaccagctcctgtccatgttcccacccgacgaggccggcggcagcggcggcggcggcgggtcgtccgcggccgggtccgagaacggcggcagcagcgacagcgacggcgataagcgtggcgcgcgcggcggcccggcgggaggcgctccctccaccggcagtggcggcggcgagcagaacggagtcgtggatgcgcaagcgccggcgactggaggacaagctgccgtcgtcgcctccacggagctgatccgggaccccaagagggtgaagaggatccttgccaaccggcagtcagctcagaggtcgcgggtgaggaagctgcagtacatctccgagctcgagcgcagcgtcacaacactgcagctaacttgctgcggccgtacacgctgagccctgttccagaagactccattcagccgcacatgtagtactgcacgtctactggaacctgaagccagagtgcaagggaggcaaaaaaaaaaatccagaccagtccaagaacatgcatggggatagtttttcgtttatggtctcgtcaacagtgccgcgtgtgaagaattttgtcggagttgcttgcttgcttgcttgctattgctctgcgagatgttgtgttgttgtaactttgtaaaccgaccgtctgtttgccctgcgcctgcctgcagaacgaggtgtcggtgctgtcccctcgcgtggcgtttctggaccagcagcggaccatactgagcgtcggcaacagccacctcaagcagcggatcgcagctcttgcccaggacaagattttcaaggacgctcatcaagaggagctcaagaaggagatcgagaggctgcgccgggtctacgaccagcagaacctcaggatgtcagccggcggcgccgccgcttctgaccatgggccgccaccgccggtggtgcgcgctgagaaggagctcatgagctagcgaaccagtctatgcgtgcccgatgtgcagtccgccttatcattaacatggagggaacattgcatcatgattttttatttccagattatgtggatgttttcttccttc

SEQ ID NO: 767 - DNA, 459 bp, Zea mays
  unsure (1)..(459): unsure at all n locations
  Clone ID: TF_LIB4699-001-R1-K1-D1
gacgggggggaggacgnccgggncggacggcgacacggcggcggacacgcacaggcgcgagaagcgccggcagncgaaccgcgagncggcgcggcggncccggcnccggaagcagcagcaccnggacgagcnggngcaggaggnggcgcgccggcgggccgacaacgcgcgcgnggcggcccgcgccgccgacancgcgacccagaacacccgcgncgagcaagagaacaccgagcnccgggcccgcgccgccgagcncggcgaccgccgccgcaccgacaacgaggagcaccgacncgacgaggagnncagcggcgncgccaaggacanccaggaggagangccggcggacgacccgcngcagcgncccagggaggagcccaacccggcggccgccangcccaacggcgccccgcacaagcgccacaacggangangggcnccaccaaccacaccacc

SEQ ID NO: 768 - DNA, 1539 bp, Zea mays
  Clone ID: TF_ZmC15860_2
cgcctccctttcctttctcctccctcactactcacacccctcacttttggcggcgccgactgggcacccgcgtcgttttccttcgtggcgccgactgcgcaaccggcaccaaccttcgccaggttttcgtgggctctttcaccgatacaaccatcctccagaagaacgcaagggatgctcgattgactctagttacttagcagaaccaaaagtggaaggccatcaaagatacgaggcttttttctcgccatgtctcggtcaccccacctcccaccccgctgcccaccgctgggtcctcagatcactcgaagggatgacggcatgttcacgcaaagctgcaggtttccatctggggatacgttcattggtgaaccaccgtgctggctggatgatctccttgaagattctgggaaagctcccaagctccctcctctcagaagggcctgcagcgattctgatgccatcttagatgcgctgtcgacattccagagcccaatttatccaatcgaggaatgtgatctaaactcaggtggtgaagctgaggacttgttgggtggagtcgaaggtgatgaaagtggttctgtggtcgaggctagctgtttctatggtccgaattcgccaagacagaagagtaggcttacaacttcagagagttccatggtaaatgctgtgcttgagaatgtccccggcaaccccttgcagtacctgaccatcgatgcctgcagtgatgtgaatggtaatgtggccaatgtaactgctgatgcctgtgatgcttttggccatcctgatcaagacaagtcatttaaaaggcgctcagggcaaagatctagggtccgaaaacttcaatacatcgctgaacttgaaagaactgttgaatcgcttcagaacattggtgctgatttggctgtcagagtgtcatcacttttccagcttcataatgctctatctatggaaaacaagcaactgagggtacagatttccagtcttcagcgtgcaaaactgattaaggatggtcagacgcaggccctaaagaacgaagccgaaaggttgaagcggatgtccgcccgccggagcagaagcgccacggcctcctgttacgacccgggctcgttctcgttcggagcagatgcttcgtcagtcagctggcagatgcctgacatggcaaggctcagcctgaacggcggctccccaagaggcagctatggcctgtgacagcagccggccctaacccccacccccaccgtcagaagaaaggccgaggcggttaccctagataacttttcgctaaccttacccaggcacagattttgaggggcccatctttgagtaggagagagtagggtgtttcggtctttcgctttcgcgggaattttaccgaggttgtcagcttattagtagttacaagtagagtggtgagtagggtgtttggtctttgctgtgtagcggcctgcggtctactcgtttgtttgacgctccatcataattgcagtgaagttgcagaccataccatcacacaaaaaaaaaaaaaaaaaagcggcc

SEQ ID NO: 769 - DNA, 1401 bp, Zea mays
  Clone ID: TF_ZmC13996_1
cgcttgatggcatgaggggaggagggcaggtggcttctttggccggtgcgcccgaattcttccctgagccagcctcatttgggcggccttgggagtccaggcagatgtaccggcagggtggtggcatgccaatgccaggcagggagaagaatggagggcgccatggtccgtccagctcatttggtgagcatgagcttggtcatgtgcccaatggggtgaataggaaggcccatggcgatgcggcttatgaccagaggattgtaatagagagaaaggagggcctgaggcactctcagtcggagactgacaccaaacgagccaaacaacaatatgctcagagatctcgtgtccggaagctccagtatattgcagagcttgagagaagagttcagtccttacagacagagggaatagaagtaactgctgaaatggattttctcggtcagcaaaatatcatgttagacttggaaaataaagccttgaagcaacggcttgagagtctatctcaggagcatctcattaaacgttatcagcaggagatgtttgagagggaaattggccgccttagaacattgttccagcagcagcaacagcaacaacatgtgccgcagcagcaggctcctacccatagccgcagtaacagtagagacctggattcgcaatttgcaaacctgtctctgaaacacagtgatcccagttcagggcgcgacgctatctctggcctccgcatttaagatccctttgttccagcttttggatccctgagctttgcagaacctgctgcccctttatgccactctttgtggttgttagtagcatcatgagaggagcagcaccggtgaaaccgggaatctcatcccacggtgaataaagctggaaaggttaataactgtggatctggtccttagttctttcagaatgtgcacctggcggtcatcgttagcttctgtccattattgatgcttgaccagtcggaggtgtttaggatctgtttgcagattgatgacttccatggatccttgtatcagtttgaatctagaacactaaggttctaatccattcctttttagtcgattctctgtcgagtttaggcgccatggcccttgtattagtgtggcacacgaatggaatgtgagctggtcctctttaggttatgccacatcctggaaaaccgttgcgtgaggagttgtcgggccatgtccattgtcctaataagatggtgaggttgaagggctggtgcagttcagtttcattttatttgtgatgtgcacagcaagatattggatactttgggttcttacatttatttgagcactgtatttttatcgcattgtgatgacagtatattccaagttcattttagctgccaaaaaaaaaaaaaaaagggcggccgctcgcgat

SEQ ID NO: 770 - DNA, 565 bp, Zea mays
  Clone ID: TF_LIB4762-034-R1-K1-F3
ggtaccctcgggttcggccgggtccttgtgggtaaaaaaagagaggaccctgccttgatgccccagacggcggtgtctacgacggcggggaggacgtccggctcggacggcgactcgtgggcggacacgcacaggcgcgagaagggccggctgtccaaccgggagacgccgcgtgaggctgggctccggaagcagcacaacctggacgagctggagcaggaggtggcgcgcctgtaggctgacaacgcgcgcgtgggggcccgcgccaccgacatcgcgtactatgacacccgggtcaagcaggacaacaccgtgctccgcacccgcgccgacgagctcatcgatcgtgttcaattcgtacatgaggtgctcaacctaggcgaggaactgagcgacgaagacgtggacagatatgaacgcgatgaccggacgacgacccggttgtgcatacctggtacgaggagtacccggatgtcatgatgcccatgtgagctgaggacatgcgtcactacggtagattgcctctagaaaccacaccaccgtacatcggaggctactagctgca

SEQ ID NO: 771 - DNA, 740 bp, Zea mays
  Clone ID: TF_LIB4698-005-R1-K1-E1
ccgggaggcacatcgaccgctgaacgcgacccaaagtatggccggattgtgatactgctcttaattaagtagcaattattgatgaattatttaaccgctcagtctacctacttgaaaagaaaacactacttgtcatcatttttgttgcactaattttgttccttgtttatggaccatgctgtaatgaacacgcctgcagacgctgagaaggctggcccagaacagggaggctgcaaggaaaagcaggctaaggaagaaggtgagcgagtctcgatactgatgacctacatcaagattggaacaaaagaacgagagaaaaatataatggcaaagaattaacatcgttttctttgttttttttaaaagtttgacatggttcaaattcttgtctccgccatccaatgacagtgtagatttatattgttttacttctcttttgctgcatgcaacaggcttacatccagcaactcgagtccagcaggatcaggctagctcagctcgaacaagaactgcacactgcaagagctcaggtatatgattagtatgcaacaaatttaataataaccacaaaggaaaaatgaaaaaaaaagaaacgtagtgcttgtatatcttgcctctcgacccttgttggtttcgtaaaggttgaatttttttaactgatctctggataaatatgtattctttctgcaaggagttttcttccccagcagtggcatcctcgctgacccaagtgtccccgg

SEQ ID NO: 772 - DNA, 316 bp, Zea mays
  Clone ID: TF_jC-zmX700344307a1
attcggctcgaggtaataaacacggattggcataagcagtctaacagggactttgcaaggagatatacattacgcgagcaacacgagtgcgaggagttagcccggaaggtaactaacctaaccaccgacaacagcgctttcagagtataccttgacaacctcaagaaggcttgtcaagacatggaagcagcaaatccacgtatgttggaatggggttggctgacacacaattaccaagtgtaacgaccacactgagaatgagcatcgagccgccaaatttgcagctgcagctgtagcagcattatgatgaggaggg

SEQ ID NO: 773 - DNA, 882 bp, Zea mays
  Clone ID: TF_700217015_FLI
gaggaacagagattccgccatgaaatccagggagaggaagaagtcgtacataaaggacttggagacaaagagcaagcacttggaggcagagtgccgtcgcctcagctacgcacttcagtgctacgcagctgaaaacatggcactgcgccagagcttgctgaaggataggcctcttggtgctcccacagccacgcaggagtctgccgtactcacgggtaagacatgttatccgtcctctaatctttattcattccctaaattagatgaatcgatttgtctaccatcagtgagtcctctctggcttgaaccgtggatatgataggtcagtcataaattaccaagcaagtaaccaatcaaaagcacaagtgcaaccaattttttgaaaggctggtgaagtaattcgtgatgctaagatgaattttctttttatgtgcagaaaccctgccgctggtttccctgctttggctggtgagcatcgtctgcctgttcctgatgcccgttctgcccaaccgaagcccagctgctccaagcagcggcggaagagacctcgtgatggcagccggaaagacaagcagtgagaccccagagatactggaactcatcctccatggaaggcgttgcaagagcacgagggcgaagattaagctatgtattttaccatttcatgcaggagctgcttgctagtagttgctaggctttgagcctcttgcaagcttacctctatatgtagtgtacccgcaaatcttaccgtgctcgctatgcgcctgtcttgcagagaagcctgtcgatatccatggagtagtaccttttttttgtttaatagctcctgtgctacccagaatatgtttaaaatctggattttgtgttattttctatttcttc

SEQ ID NO: 774 - DNA, 679 bp, Zea mays
  unsure (1)..(679): unsure at all n locations
  Clone ID: TF_ZmC3114_4
tccggcggtcagcgatgagtcatcggnanactagnanatgatgacacnntgaccataaggattcatctgcgcccaagaagaggaaatctggtaacacatcggctgaagatgagccgtctcaagctactgttgtgcgatatgctgcggttgagtcaccatatcccgcaaaaggaaggtctgcctcaaagcttccagtgtctgcacctgggcgtgcagcgcttcctagtgccaccccgaatctaaacattgggatggacatttggaatgcttctcctgccttggctgtgcctgcagtgcagggggaagtgagtcctgggttggcacttgtccgacgtgatggcgttactcaactggacgaacgtgaaataaagagggagaggcgaaaacaatctaacagggagtctgcaaggagatctagattacgcaagcagcaagagtgcgaggagttagcccgctggggccatgtagagtcgcccccactgcagccatgtattatttatggctcgtcgcggtgtgctttgtgtttttttgtgtgttgtgtaaaaactattgatgtaacaaaacctagagagcctagaggttttttttatgtctgctaactcctgacgagggatgtaatgtaaccggccaatttgttgcctgatcgttcgttagatgaaatgctagcaaatgtcactcg

SEQ ID NO: 775 - DNA, 371 bp, Zea mays
  Clone ID: TF_LIB3245-262-P1-N1-F7
ggccagtagggacaggtggcggtgggggcgcagtctgcgctgggcgcaaagaagcgcgggcgcacggcgggggacaaggagcagaatcggctgaagcggttgctgaggaaccgagtttccgatcagcaggcgcagtagcgggagaatgcgttcattacggaactggatgtgaaggtcaatggcctggaactacgcaatgcgtaactggagcagattgtgtgcactctacaaaacgagaacaacacgctccgccagattctgaagaacacgacggcgcacgcgagcatgacgtaccgcggcctccgcggctgccacggtaaggtctgatacggcggcttgaagcaccacctcgtcatgagctagtgagaaac

SEQ ID NO: 776 - DNA, 680 bp, Zea mays
  Clone ID: TF_LIB4762-036-R1-K1-F3
ggttccctgtgggtaaagagagagaggaccctgtcttgatgtcgtcgacggcgctgtctacggcggcggtgaggacgttcggcatgggaccggcgacgtcgtggagtggacacgcacaggctgcgagaagcgccggctgtccaaccgggagtcggctcgtggggctgggctccggaagcagaagaacctggacgagctggagcaggaggtggcgcgcctgtaggctgacaacgcgcgcgtgggggcccgcgccgtcgacatcgcgtactatgacacccgcgtcgagcaggagaacaccgtgctccgggcccgcgccgacgagctcggcgatcgtcttcgattctgtaacgaggtgctccgcctaggcgaggagctgagcggcgacgacatggacatccatgaaggagatgcccgaggacgacccggtgttgcatacctggtacctggcctacccggatgccgtcatgcccataggagcacaggacatgctccactactgatgattgtctccagcagccacaccatcatacatctgaggctgctggctgcagctggttggcctcgagactataagaattgactggctctatcagcatgcacatttactacgctatctgcctggtttgagaattacagggactctactatttgctgctgtgataaatgtaccttctgggttc

SEQ ID NO: 777 - DNA, 799 bp, Zea mays
  Clone ID: TF_ZmC19483_3
tgggaccctcgaggccggccgggaaattttcccgcctctaaccgccttctcgggctaccacgctgatccggcgtcgtctgcggtccttccgaccaactcttcaatcttgtgaattgcttttcgcccagttagggcagatcaccattccttgcaggagttcgttgccgtctctccaatcctccctggctcgactgctcagtggtgactgatgtggtccactgccctgccctgcacctgcaagttagtttcactcgtgatccgtcagcttgccacccagcaaccgctgattatcagaaatccacttctcaaagcttcaaggagcatccttcgaacaagttcctgattccttcgcctcccgccctccccctttcttctcgggcatccttgtccgttgaccacagagggaagaaatctgttccgggcaggcaggcgcattctccgccacaatggacgatggagctgacctcccctgccagttgctcttctcccacccggagatgcctcacagcttcgacgagttcttcagcggcgccacgaccacgaccacctgcacccacacgcacagctgcgaccctccgggcccctcggccgccatgcacacccacacgtgcctgcacacgcacacccaggtcctgggcagcggcggggaggacgacggctcagcgaagccgcggaggcccctggggaacagggaagccgtgcgcaagtaccgcgagaagaagaaggcgcgcgcgtccttcctggaagggggagtcaagaagctgcgcgccgccaaccagcagctcgtgcggcggctgca

SEQ ID NO: 778 - DNA, 1633 bp, Zea mays
  Clone ID: TF_ZmC2115_1
atggccagtgaattgaatttaggtgacactatagaagagctatgacctgctacttacctttttttacagcagtgcatgttcgtctcatggtgctgcattcagtttacaatgtgtctgaaggatttgaagaccccacccccagatagtggatgggcttttttttacatattgtatgtgtcaacaggtaatcagaaggctggctcagaatcgtgaggctgcacgcaaaagccggctgcggaagaaggcgtacattcagcagctcgagagctgtaagctgaagctttctcagatggaacaggacatgcagcgagcccgtacccagggcctctttcttggaggagatccgggtgcaagcaccagttcaggcgcggcaatgtttgacgtggagtacgcccggtggctggacaaccacggccggcgcctggccgagctacaaggagctctgcaagcgcacttgcccgacggtgacctccaagcgatcgtggatgacgccctgacccaccacgacgagctgttccagctgaaggctatggcggccaagtccgacgtgttccacctcatcactggggtgtggacgacccctgccgagcggtgcttcctctggatgggtggattcaggccctccgatctgctcaagacactgctgccccagctagatccactgacagagcagcaagtggtcggcatatgcagccttcagcagtcatcacagcaggcagaggaagctctctcgcagggcttggagcagctgcatcagtcgcttgctgacaccatggccggtggatctctgattgacgacgccaacatgagcttcatgagtcaaatggctcttgccctcggcaaactggccaaccttgaaggctttgtgatacaggccgataacttgaggcaacagactcttcatcagatgcaccggattctgacagttcggcaggcagctcgatgtctcttggcaattggcgagtaccacaaccgccttcgtgccttaagttccctctgggcttctagacctcgagagatactggtgaccgatgaaggcaattgtgagataagcatcgcagcacaaccatcccaaaaccaattttcaaccttctgactgacacatgttgtggaactaaccctcagcataggagcaagagaaaaatgactgggaagagaatgactgggaagagagattgtttggatgcacgtagcagatatctgagagctacagaggaaagctgggaaatagaagaagctctaaaacaaggagtgtttctggaaattctttagttttcaaaaaacactttctgaaaatgtgtgtacaagaaaattccaggaaggtgaaattgcttcattgactgcagtgggaaggggaaagagagaagctagaatctcatgtcgagtactccagtacaatgtgttcttttgtctggtctaaattcttgtaacagctcttcctatgatggaagaatccattcaacaattccacctatgattactggattgagtatgttgaataggttggttgaggctatctagtaatttttatgactatgtttatccattatctaggactatttggttactatattatataatctttatcatatatacatccatttagttcaccaaaaaaaaaaaaaaaaaaaaa

SEQ ID NO: 779 - DNA, 1581 bp, Zea mays
  Clone ID: TF_ZmC11397_2
cccacgcgtccgtgaccgtgctgcagattgtctgtttgcacggtcaaaggaaagaaaatctagatatataacagaactggagcggaaggttcaaactcttcagacagaggctactactctttcagcgcagctcacactattccagagagacacaactggactttcggcagaaaatgctgagctgaagataaggttgcaggccatggagcagcaggctcaactgcgggatgctctaaacgatgcgctgaagcaagaagtggagaggctcaagatagcgacgggcgagatgccgaagtccaacgaacaattcaacatggggatgcagcacgtctcgtacagcggcccttctttcttccatctcccggagcagcacgtagacattcagctgccgcaccatttccagcagcctccgcggaacgtccagatgctgtcccaccccaactccctctcggatatggcgcagcaagactcgcttgggcggctccgggggctggacattggaaaagggtccatggctatgaagccagaggcagaggtcgtggtgaagtcagagggcagctctgtatctgcaggtgaaagcaacaccaccttctagctatacaatacatctgccttccaagaagcctccgtttggtttagagttcttttgttcatagtctgacatcctccttccttgagctgcttcgtccttctcagtaggcctattttttttattccattggttatatctactagttaacattggtcggttgccaatcgttgttgtcgtggtggctgatttctatagggacattgatgtgttggtttcgagtttgttgttgttgttgtgtgtgtggttggttgtttcgagctaggggctgaaagggcaccgagtgtttttttctccacctgttttagttttgttatagatttgacaacaatcgttatgatttctccttctggaaaggtgtacattgtgttgctatgctaatttgtagtgatatttttgatgcttccaactaacagaaaaaaaaaaaaaaaagcggccgagcaacacaccaatgcagcagcatggaaacattcagctgccgcatcatttccaacagcctccgctgactgtcccgagccaccagatgctatcccaccccaactccctctcgaacatggtgcagcaagactcgcttgggcggctccaggggctggacattgggaaaggatccatggctgtgaagtcggaggctgaggtcgtggtgaagtcggagggcagctctatatctgcgggtgaaagcaacaccaccttctagctatacaatacgtctgccttccaagaagcctttgtttggtttagagttcttcttttgttcatagtctgacatccttgaactgcttcctccttccctatagtttttttattccattcgttatatctagttaccattgatcggttgtgtcgatcgttgttgtcgtggtggctgattttatagggacattggtgtgttggttttgagtttgttatgtgtgtggtatggttggttgtttcgagctagtgactgagagggcaccgagtgattttttggcaaaaaaaaaaaaaaaaaagcggcc

SEQ ID NO: 780 - DNA, 425 bp, Zea mays
  Clone ID: TF_ZmC42267_1
cgaagaagaagaagacggcgaggcgaggcgcccgaggcagccccgcgtcgcccctcgactacagcggcgcgtccactagcggcggcgaggacggcgccttctgctcccggccagagccagcgctcccgccggccgccgcgtgccagcagctcgcggcgcccacgcctcccagcaaggtgggtggcctcgccggacggcggacgacccccccggtgccggtgccagtgccactgccaccacctcggcccgccggacagcgggcgcggaagaagatgaggctcccggagatccagcagatggtgcggtcgctgtcggtggagaacgacgccctccgcaaggagatgagagcgttgcggagggattgcacggcgctgtcccaagagaacggcaagctagagacaaggctccatcagtccgttacgctg

SEQ ID NO: 781 - DNA, 931 bp, Zea mays
  Clone ID: TF_ZmC11397_1
gtcaaaggaaagaaaagctcgatatataacagaattggagcggaaggttcaaactcttcagacagaggctactactctttcagcacagctgacactattccagagagacacaactggactttcagcagaaaatgctgagctcaagataaggttgcaggccatggagcagcaggctcagctgcgtgacgctctaaatgatgcactgaggcaagaagtggagaggcttaagatagcaacgggcgagatgtcgaagtccaataacgagcatttcaatatgggaatgcagcacgtctcctacagcccttcattcttccagctctcggagcaacacacaatgcagcagcatggaaacattcagctgccgcatcatttccaacagcctccgctgactgtcccgagccaccagatgctatcccaccccaactccctctcgaacatggtgcagcaagactcgcttgggcggctccaggggctggacattgggaaaggatccatggctgtgaagtcggaggctgaggtcgtggtgaagtcagagggcagctctatatctgcgggtgaaagcaacaccaccttctagctatacaatacgtctgccttccaagaagcctttgtttggtttagagttcttcttttgttcatagtctgacatccttgaactgcttcctccttccctgtagtttttttattccattcgttatatctagttaccattgatcggttgtgtcgatcgttgttgtcgtggtggctgattttatagggacattggtgtgttggttttgagtttgttatgtgtgtggtatggttggttgtttcgagctagtgactgagagggcaccgagtgattttttggcagattttcttttcaccacctgtcttagttttgttatagaacaaccatgatttctccttctgggaatgtgtacattgcgtg

SEQ ID NO: 782 - DNA, 1771 bp, Zea mays
  Clone ID: TF_ZmC19483_1
tcgaggccggccgggggtattgcgagccaaaaaaacctcgctcgggccgggcccggccgggatcgtcccctccctccgtctccaccgcccaccactgatcggatcacgtcggcgtcccatctcctcctccacgacacagaacgccgctccctttccgggattctcctctccaatcgcagctaaaacgcaacgcactggatcggacgtcgccaaaaagatcggtggcgacaccataaagaaagaatccgagaaaaggcgaaaggggaggagagaaaggggaggtacaaaatttctacccgctagaggttagctagctcggcggcgagggaacgagagacgccctaccgtcgattccatatcgtcgctccgatattctgatgccggaatcctgcttttccggctagcttaccgatacctcctaggtggtttccagtcctcacccttccaacctctactatctttttttgtgaatttacctccaccgaattcgggcagctcaccatttcttggagtttggtgtcctttctcgagtgtttccttcctccctcccgggttctactgctgagtggtgaggtctactgccctgcacctgcaagtttgtttcatttgtgatgtgatccgttagtttgccccccagcaaccgttgctcagaaattcagttcttattaaagcttcaagacccttcaaggaacatcttttagacaagctcttgattccttcacctctctctctcttttcaggcatctttcttgtgcgacttgtccgttgaccacaggcggagaaatttgttctcggcacacattctctgccacaatggacgatggagctgacctcccctgccaactgctcttctcccacccggagatgcctgacagcttcgacgagttcttcaacagcgccacgacgacctgcacccacacgcacagctgcaacccgcccggcccctcggtcgccatgcacacccacacgtgcctgcacgcgcacaccctggtcctgggcagcggcggggaggacgacgacgacgccagggaggactcggcgaagccgcgcagaccgctggggaacagggaagctgtgcgcaagtaccgggagaagaagaaggcgcacgcggcctttctggaagaggaggtcaagaagctccgcgccgccaaccagcagctccagaggcggctgcagggccatgcagctttggaggcggaggtggcgaggctccggggtctcctgctcgatatccggggcaagatcgacgccgaggtcggcggcgtgctcccgtttcagaagccgtgcagtgtgggctccgtggcgtgtgccgatcctgctctgtgcttcaacggcaactcggaggttggaggcggctgggaggagagctcaagaccggcagccgcggactgtaggatcgatgaagtgcgagggatgtcacgggaaattgatgtcccagaaggattgcgtcattccatggatgttgttgcgagcttcgtgagttctgatcccctggctgaatgagcgcgtttgcctgattggcagttttttttttgggcctctgccagtgccagcttcttttggcttgcttgaaaggtcaaattttcatgtaattagaagaattgaggaactgataatgagtggaactacctccactgtggtccatgcttcttgtgctggtgttcagtgtgtatagggtacagaatacttacatatgactatatgggcactgaaagaaatctaaaatgcgaagctgtactgcaggtatgccaatgaagtgcccttgacttcc

SEQ ID NO: 783 - DNA, 1588 bp, Zea mays
  Clone ID: TF_ZmC2315_12
aattctttacaaccagtccatggagagattcatgccgatgtacgatgaccgctcggagctggcgccgagagacgtggttgcgaggagcatagacgaccagctgaagaaacgaggcgaaaagtatgtcctcctggacatcagccacagaccaagaaccttgtctcttgcccccttccctctcttccgcctccgattgagtggctcaccttctttcccagccagcacgagcttgcaagcaagcgagctcctgagatttcagctcgcttctcctccagaggtcgagcagaccagactcctccgaccgaagctctaccacttcccagttagcctgtccaggaactgcttggccggagatccaaacaaacctctgtgttggggttctccggggttccttgcgctggagggaggtttcgttctcgctggccatggtttggctgagaagcagcagcggcagcatcttgatgccaaatctctgagctttatgaagatcgccactcacctgcgccgctcctgcttcctccactccttctcggttgtcttcctctactggttttatgtgatctcataacttgccctcccccggatccgccattcccccgtgccctctctccgtcccctcaaccttctccctcctttcttgcttccctcaacaatcgccaaataacagcactagcggcagcggtagaggatcttttcgaggtaagctaggccggccggttccctgcgggaaaaagaaaagaaaaggaccctgtcttgatgtcgtcgtcgtcgctgtctccgacggcggggaggacgtccgggtcggacggcgactcggcggcggacacgcacaggcgcgagaagcgccggctgtccaaccgcgagtcggcgcggcggtctcggctccggaagcagcagcacctggacgagctggtgcaggaggtggcgcgcctgcaggccgacaacgcgcgcgtgggggcccgcgccgccgacatcgcgtcccagtacacccgcgtcgagcaggagaacaccgtgctccgggcccgcgccgccgagctcggcgagccgcctccgctccgtcaacgaggtgctccgcctcgtcgaggagttcagcggcgtcgccatggacatccaggaggagatgccggcggacgacccgctgctgcgtccctggcagctgccctacccggctgccgccatgcccatcggcgccccgcacatgctccactactgatgattgcctccaccaaccacaccaccatacatctgaggctgtcagctggggctggttggcaacaagacaagaagaattggctgcctctcaacaacattcacatctactacctacctggctgctttgagaattacagggcctctactatctgctgctgtgttaaatctacctcctggtttctccaataattgtcgctgttctgtactcttctcttctcttatgttctgtctgtcagtgtgtatgagatgatgctcatcttatgttataaggcttaatcatgtgtctagttgtactttctgtcttgtaatgttatcagttatatgaataataagtgttatgtaagctcccaaaaaaaaaaaaaaaaaatttgcggcc

SEQ ID NO: 784 - DNA, 3354 bp, Zea mays
  Clone ID: TF_ZmC491_1
ccacgcgtccggcctcgtcgtcttcttcgccccgccacccgtcctgcacactcacaactagacatcgtaccacccaggtgatctcgcgcgccactgcctccttccatcccttagccccagctttactctcccctcccgcgcccagatcccgaggctcctacccctcgatcgccgccttccagcggccgatccggcgctggctcgcggcccccgacaggttttgctttatgctggttcatttgtctacggacaatggactagttgctgcactgtttctgtgattcaccatgggaagcagtggagcagatacaccgtctaaggagcagcagccacctgctacctcaggtgctgcaataccacctgtttatccagattggtctagcttccaggcatatcccccaatcccaccacatggattcttcccctcacctgtggcatcaagtccacagggtcatcctttcatgtggggagctcaagctatgattccaccttatggaacaccgccaccatatgtcatgtacccccctggagtatatgcccacccatctatgcccccgggtgcacatccatttactccttatgccattacttctccaaatggcaatgctgatgctactctggtaatactgatggcaagccctctgaaggcaaagataaaagtccaacaaagcgatccaaaggaagtttgggcagcttgaacatgcttactggaaagaatcccagtgaacatggtaagtcctcaggtgcatcgggtaatggagtcacttctcaaagtggcgaaagtggcagtgacagttcaagcgaagggagtgaaggaaattctcacaatgattcacatcacaaggaaagtggacaggaacacgatggggatgttcgaagttcccggaatggtgtatcacgtttgcaatctgagggaaaattgaaccaagctatggcaatcttgcccataccatcaagtggcccagcaactgatccaactacaaacctaaatattgggatggactattgggccaacacagcaagctctgctcctgcaattcatggcaaagcgacgtcaacaacagttccaggggctgtggtcccagcagagcagtggacacaggatgaacatgaactcaaaaagcaaagaagaaagcagtccaatagggagtctgcacgtagatctaggttacgtaaacaggctgaatgtgaggaattggctcaacgtgctgatgttttaaagcaggaaaatgcttcacttagagatgaagtaaaccgtatcagaaaagagtatgaggaacttctatcaaagaataattcactaaaggaaaaacttgaaggcaaacaacacaaaactgatgaggcaggacttaacaacaagctgcaacattctggcaatgacatccagaaaaaaggaaactaatgctatcatgcaatgcttgcatagattggtcctaactagattattgggaggcgcaattgtagtatgcgtattaactccttactttattgcagttaattgttaccaggttgtgataatgttgatgccaaccttttgtgtgggtgtttcctgtttcagatctatcttggcttatcttttagaagccaagatgtgactgaagctataggctgtgacccaattcactatatctgttagaaatagtggataaagtcaaacttacaaatttgaagtgctgactaatattgttatgtatacctggcaaaagactggtttccttttaattcagtctggttgaacattttgctgggctttcactactgcctagtttgtgtacattttttttcatgtcggttgttcctagttattttttgtaataattaacaaatagatgagggacactgtctcaacctctgcaccaatatatatatggacacacacacacacacacacctcttttttgcgtctattttctgttttacttcaaagtttgcaggtttgtttcagccctgtttgattgtgagccttggcgctggcggtattttttctaagtttaaatgatccacctgctgtaggtaagtttggttaaaagacattcctatttttctgtttagtgatactgatattagtaatccttttttttcatccatctatttaagtgtcagcagaatcgtttgttaaacttgctttcctgaacttgctcttgattctggtaagtttttgggctcctggcactttacttttatgatcttattttgatttgctttttacaggaaaatggttctggactatgtcttagatgggaagcatagttcattagtatgtctgccttacaggttcttaagcagggatcgtggaagaacctgtgttgggaggtggtagagaagatgtgccaatgattggtttttggtcaatgtcttctctggtgccgcagaagttggagcggcatagcgagtgcatgttgccgcttttactctgtgttgctgtttgctttatgattccttttattccatggcacctgaataactcccccaagtggtagagatcaggacttgtgagctcgatgccggtgaagtagaacttttgacgcttgatgttggttacggtgatcgtgtcacccaagtggtgggtgggaactggggactatggttccattgggaagcctgatgaggtagttgaacacgaggggcacagtgatggaatgcctggataggaactccagcacctggctcagaaatggacgtgacagcagcctgtcgctgggcatcaggaaggtggtgttacggggtatcttctcctgcaccattctgatgagcatgacgaaggtgaagtagcgcactcgctgcatctcctatgccatggtggcaatgccacagctaaccatctttgtgtaagcaggcggcacacatgtttaaactacatggacacccttattatgaaaataaaaatatagaaaaaaccctctacctggatactgtttacagtctgagcacagtgacaggcttttttgtctactcttcgaccagttcggctctatcttaaggtgctggctgcagaaaatgagcttcatggcttcaataactagctgtatgatcttcagattcttggactgttgaactgtttaacggcagatattaacagttgcagccttacaggtgcttcgtcaaatgttgaggcattgctgcttaataactgtttgggggatagagtttgggttatacactgtaggtgaatcttcacgttgataccacaaacaatgtgtggaagtttcaaaaccattatcatatcaagtgtgcagtgaatcttaacgttgatgccagaaaccatgtgtggaagtttcaaatccttacaaaggaaaggtggttgaaaataacataatttacaaacgtgcttcgcaacgaattctattcctcatc

SEQ ID NO: 785 - DNA, 1878 bp, Zea mays
  Clone ID: TF_ZmC491_2
cgcagagcacagcactccacctcactgctccagtcgcgagccgcagctgcgcgtcgcgtcgcatcgcacgcatctctcctgccctccagctccaaagcttcgtcgtctgcgtcgccccgcgccccgtcttgctcgctccaagctagacaccataccacccaggtgacttcgcgcgccactccttccttccctccctttccccacagctttactctcccctcccgcgtccagatcccgaggcccctctccctcgatcgccgcctcccggtagcggatccggcgccggctcgcgccccccgacaggttttgttttatgcttgttcatttgtctatggacaatggactagttgctgcactgcttttgtgagtcaccatgggaagcagtggagcagatacatcgtctaagccaaacaaggcatccgccccacaggagcagcaacaacctgctacctcaggtgctgcaacaccggctgtttatccagactggtccagcttccaggcatatcctccaatcccaccacatgggttcttcccctcacctgtggcatcaagtccacagggtcatccttacatgtggggagctcagcctatgattccaccatatggagcaccgccatatgtcatgtaccctcctggagtgtatgcacacccatctatggcctcgggtgcacatccatttactccttatgccattacttctccaaatggcaatgctgatgctactggaactactgctgtagcttgtgatactgatggcaagccctctgaaggcaaagataaaagtccaactaagagacccaaaggaactttgggcagcttgaacatgcttactggaaagaaccccagtgaacatggtaagacctcaggtgcatcagctaatggagccacttctcaaagtggcgaaagtggcagtgacagttcaagcgaagggagtgaaggaaattctcataatgattcatacaagcatagtggacaggaacaagatggagacgtacgaagttcccagaatggtgcatcacgttctccatctgagggaaaatttaaccaagctatggcaatcatgcccatgccatcaagtggcccagtaactggtccaactacaaacctgaatattgggatggactattgggccaacacagcaagctctgctcctgtaattcatggcaaagtgaccccaacaacagttccaggggctgtggtcccagcagagcaatggatacaggatgaacgtgaactcaaaaggcaaaaaagaaaacagtctaatagggagtctgcacgcagatctaggttgcgcaaacaggctgaatgtgaggagttggctcaacgtgctgatgttttaaagcaggaaaatgcttcacttagagatgaagtaaaccgtatcagaaaagagtatgaggaacttctatcaaagaataattcactaaaggaaaaacttgaaggcaaacaacacaaaactgatgaggcaggacttaacaacaagctgcaacattctggcaatgacatccagaaaaaaggaaactaatcgagctatcatgcaatgcttgcatagcatggccctaactagattattgggaggcgcaattgtagtatgcgtattaactccttactttattgcagttaattgttaccaggttgtgataatgttgatgccaaccttgtgtgtgggtgtttcctgtttcagatctatcttggcttatcttttagaagtcaagatgtgactgaagatgtaggctgtgacccagttcactgtatctgaaatagtggataaactcaaatttacaatttgtattgctgactaatattgttatgtatacctggcaaaaggttttctttgaattcagtctctggttgaacaaaaaaaaaaaaaaaaaagcggcc

SEQ ID NO: 786 - DNA, 1759 bp, Zea mays
  Clone ID: TF_ZmC491_3
gcacagcactccacctcactgctccagtcgcgagccgcagctgcgcgtcgcgtcgcatcgcacgcatctctcctgccctccagctccaaagcttcgtcgtctgcgtcgccccgcgccccgtcttgctcgctccaagctagacaccataccacccagatcccgaggcccctctccctcgatcgccgcctcccggtagcggatccggcgccggctcgcgccccccgacaggttttgttttatgcttgttcatttgtctatggacaatggactagttgctgcactgcttttgtgagtcaccatgggaagcagtggagcagatacatcgtctaagccaaacaaggcatccgccccacaggagcagcaacaacctgctacctcaggtgctgcaacaccggctgtttatccagactggtccagcttccaggcatatcctccaatcccaccacatgggttcttcccctcacctgtggcatcaagtccacagggtcatccttacatgtggggagctcagcctatgattccaccatatggagcaccgccatatgtcatgtaccctcctggagtgtatgcacacccatctatggcctcgggtgcacatccatttactccttatgccattacttctccaaatggcaatgctgatgctactggaactactgctgtagcttgtgatactgatggcaagccctctgaaggcaaagataaaagtccaactaagagacccaaaggaactttgggcagcttgaacatgcttactggaaagaaccccagtgaacatggtaagacctcaggtgcatcagctaatggagccacttctcaaagtggcgaaagtggcagtgacagttcaagcgaagggagtgaaggaaattctcataatgattcatacaagcatagtggacaggaacaagatggagacgtacgaagttcccagaatggtgcatcacgttctccatctgagggaaaatttaaccaagctatggcaatcatgcccatgccatcaagtggcccagtaactggtccaactacaaacctgaatattgggatggactattgggccaacacagcaagctctgctcctgtaattcatggcaaagtgaccccaacaacagttccaggggctgtggtcccagcagagcaatggatacaggatgaacgtgaactcaaaaggcaaaaaagaaaacagtctaatagggagtctgcacgcagatctaggttgcgtaaacaggctgaatgtgaggagttggctcaacgtgctgatgttttaaagcaggaaaatgcttcacttagagatgaagtaaaccgtatcagaaaagagtatgaggaacttctatcaaagaataattcactaaaggaaaaacttgaaggcaaacaacacaaaactgatgaggcaggacttaacaacaagctgcaacattctggcaatgacatccagaaaaaaggaaactaatcgagctatcatgcaatgcttgcatagcatggccctaactagattattgggaggcgcaattgtagtatgcgtgttaactccttactttattgcagttaattgttaccaggttgtgataatgttgatgccaaccttgtgtgtgggtgtttcctgtttcagatctatcttggcttatcttttagaagtcaagatgtgactgaagatgtaggctgtgacccagttcactgtatctgaaatagtggataaactcaaatttacaatttgtattgctgactaatattgttatgtatacctggcaaaaggttttctttg

SEQ ID NO: 787 - DNA, 563 bp, Zea mays
  unsure (1)..(563): unsure at all n locations
  Clone ID: TF_LIB3594-052-Q1-K7-B11
cggggaagngcccancggagcnggagcnggaggccnnccnccgcggccgggaggacgccacggcggcggcggcggcggcggcgggggccgagcagaagccngcgcacgacgncgcngcgcnggcgccgnncggcgccggnggcgngnnccccnccagcgancngnccgccnncagcnncgcngacncgaacacccgcaagggaaccggaaacanccanaancaccnnnggncccanaaccacaacgncaggcancccgcagncnccacgacgancgagncgcagncgncgaacngngcagcngcagcagcaagnccaacancggcnaccaaccngnaccngaaagagagccaggcncngggcggcacgaggggnnccgacnccgacagcganncgcngcnggacaacgaggggggcccgngcgagcagagcacgaacccacaggacgngaagaggangcgacgganggggncgaaccgggaggcngcncgacgggccaggaagaggaagcaagcccacccagcngaccnngagacacaggncgaccagcngcgaagcgagaac

SEQ ID NO: 788 - DNA, 755 bp, Zea mays
  Clone ID: TF_ZmC458523_1
gaggataaattcattttcccgctatttaaaacaccgatattaatctctctctccaattcatcactatatttgtcttcttatagtctgtactatactcaacagtactatacagtctactatactaaaaaggctaccaaagccatctcagctgggggcacgcaggggtccctgccctgctgccgctgccgctgccgcctctcccacctcctccacctcgccgagccttctccgcaggccagcggcttcctctctgagcctggcgttctcacgagccacggcaccgtgcctggcgaccacgcggttgagctcgacaaggagcctctggttggcgccaaggagctcggcggcccgcaacgacagctcgtgcaggcgccgctgcctccgggcgcgcgacctccgcgcggacgctcggttcgacgccagccttctcctcttcctctcggcagacaccgagctgacgggggtggcaatagcaacgccgccatcgcagctgtgtgggcagtagtagtagtacgcggggtcgaggccgacggccacgtctaagtcgaacgagctggaataatcgtgggcgggaacaggaccgttccgcgccaggaagaggctggccaggtcctccagcccagggacgactgggagtgggagccttgctagattggccgccgcgcagctctgttgcatgcctgatgaaactctctggaaggactgactagtagctagtctttgcaatgtcccggccggcctcgaggtacccaatg

SEQ ID NO: 789 - DNA, 1372 bp, Zea mays
  Clone ID: TF_ZmC19483_2
gggtacctcgaagccggccgggaaaaaacatctgcaaatgttataggcttgtctacaaattgacaaggattcagtagcaatgctttgctagctggttttaacaaaaaaaaaaaaaaaaaaaaaaaaaaaaaaaaaaaaaaaaaaaaaaaaaaaaaaaaaaatttcatggctggcttgccagttctagttttacgggggccatgaagctctctcctaataaagataaatttatggaggtcattaggggaactggggatatcaatgcagatatggagaaattttgcacaaccttctctccttttctcaaaaaaaatcacgagtttctggcgagcgttggtcttgatgatatgaaggcttcgtaaagcgatctccaagggggtgagacgagagacgccctaccgtcgattccatatcgtcgctccgatattctgatgccggaatcctgcttttccggctagcttaccgatacctcctaggtggtttccagtccgcacccttccaacctctactatctttttttgtgaatttacctccaccgaattcgggcagctcaccatttcttggagtttggtgtcctttctcgagtgtttccttcctccctcccgggttctactgctgagtggcatctttcttgtgcaacttgtccgttgaccacaggcggagaaatttgttctcggcacacattctctgccacaatggacgatggagctgacctcccctgccaactgctcttctcccacccggagatgcctgacagcttcgacgagttcttcaacagcgccacgacgacctgcacccacacgcacagctgcaacccgcccggcccctcggtcgccatgcacacccacacgtgcctgcacgcgcacaccctggtcctgggcagcggtggggaggacgacgacgacgccagggaggactcggcgaagccgcgcagaccgctggggaacagggaagctgtgcgcaagtaccgggagaagaagaaggcgcacgcggcctttctggaagaggaggtcaagaagctccgcgccgccaaccagcagctccagaggcggctgcagggtcatgcagctttggaggcggaggtggcgaggctccggagtctcctgctcgatatccggggcaagatcgacgccgaggtcggcggcgtgctcccgtttcagaagccgtgcagtgtgggctccgtggcgtgtgccgatcctgctctgtgcttaacggcacgagttggaggcgctaggaggctccagcggaaattgatgtcccaaaaggcttgcgtcattccatggatgttgttgcgagcttcgtgagttctgatcccctggctgaatgagcgcgtttgcctgattggcagtttttttttttttggggcctctgc

SEQ ID NO: 790 - DNA, 1427 bp, Zea mays
  Clone ID: TF_ZmC25151_1
cattggtacctcgagccggcacccgccgctcgcagagcgacatcccgttcggcttcgcgcagctcagcccgccgctgcccccgccggcgccggtcaagcgcgaggtcaccgctgcggccgacggctgcagatcggacggcggcggcggtgatgacgccgccctctacgacctcgtcaacgcgtacatggacctggacgggctggacccgctcaactcgtctgaggaccgccacgacgaccgcgacagtcgtgccagcggcacgcgcgcggggagcgcggccgagagcagcgagaacgaggcggagagccagtccacgtccgcggacaggaaggacgggggcaagtcccgccattgtcgcagcctgtccatagacagcttcatgggcaagctcagcttcgccgcaggggaggagtctccgaagctgccgctgccgtctcctggtggcagcctcaccaggagcgggagtggctcactggaaggtggtgctgtcgcgctgttcaatatggagtttaccaacggagagtttaccgactccgagaagaagaaaattatggcgaatgagcgacttgctgagatagctctgacggatcctaagagggtcaagaggattctggcgaatcggcagtcagcagccaggtcaaaggagcgcaagatgaggtacattcaggagcttgagcataaggtgcaagtgctgcagacagaggctacgacactctcagcacagttgacaatgctgcagagggactcagctggattggctactcagaacaacgagttgaaaataaggcttcaagcaatggagcaacaagcacagctgagagatgcactgaacgaagcgttaactgccgaggtccagcgtctgaaactcgcgactggggaggtaaccgatggccggatgccgaagggcctacagcagcagatgaactcccagatgctccagatccagcagctgcaggttcagcagcaggcgccccaggcacagcagcagggccagcgacagcagcagcagcagcctcagaaatcggcatagatcaggtcaggtcgagagaaggacgctgaagctaattgagcttgagcatggccaattgaaggatgctgggtggggagaaaaaacccgagtcttttgcgtatatcagacatgttgtaggatagctgcaatagtagggcgacaggcgccgttggtttcgccgagtcaagtaccttagctggagtatgtcgtcttggtgtcgtagtaccatacatgattgcctgcctgcctgcctattgttgaggcgtcttggtagcgtccctgaacgttctctcggaggtgcttcttctgttcttttgtctaagagggctagggtgtcacaaatgtacctgcgtaatagtgtaattattatctatagcgcaccttcagcgtttgtactgtggaggggttcccaagttc

SEQ ID NO: 791 - DNA, 1111 bp, Zea mays
  Clone ID: TF_ZmC25151_2
ctcaacttcgccgcagggatgagtctccaaagctgccgctgccgtctcctcgtgccagtggcagcctcactaggagcgggagcggctcactggaaggtggtgctgtcgcgctgtttgacatggagttctccaatggagagtttactgagtccgagaagaagaaaatcatggcgaatgagcggcttgctgagatagctttgacggatcctaagagggtcaagaggattctggcaaatcggcagtcagcagcaaggtcaaaggagcgcaagatgaggtacattcaggagcttgagcataaggtgcaagtgctgcagacagaggctacgacactctcagcacagttgacaatgctgcagagggactcagctggactggctactcagaacaacgagttgaaaattaggctgcaagccatggagcaacaagcacagctgagagatgccctgaatgaagcgttaacgggcgaggtccagcgtctgaaactcgcaactggggagatgaccgatgggcctatgccgaagggcctgcagcagcagatgaactcccagatgctgcagctccagcagctgcagatccagcagcaggcgcccccacaacagacgcagcagcaaggccagcgacaacagccgcagaagtcggcgtaaagaccgtggctgagaggaggacgcggaagcgaattgagcattggccaaggccaactgaaggatgccgggtgggaaaagaaagaaccccaatcttttgccgtatatatatattatcagacaggttgtaggatagcagcaacagcagtagggcgggcgagggaccccgttggccccgcgcgatttgagttgttttcgccggataccgtaaccttagctggagtctgtcgtcgtcttggtgtcgtgcctgcctgcctagtgttgatgaggcgtcttggtagcgtcccttggaacgccctctcggagccggaggtgcttcttttgcttcttttgtctatatagataattatatgtgcatgggaacctgcgtagtactgcagttattattattatcattgttaatttattaaaaaaaaaaaaaaaaaaaaaaaaaaaaaaaaaaaaaaaaaaaaaaaaaaaaaaaaaaaaaa

SEQ ID NO: 792 - DNA, 780 bp, Zea mays
  Clone ID: TF_ZmC9417_4
atcgcaggcagatagggaaggagaagcggagggcgcgcggtccaaatctgcggggccggaggcggaggcggagggcgagcaagaatgcaggagcagccggcgagctcgcggccttccagcagcgagaggtcgtctagctccgcgcaccacatggacatggaggtcaaggaagggatggagagcgacgaggagataaggagagtgccggagctgggcctggagctgccgggagcttccacgtcgggcagggaggttggcccgggcgccgccggcgcagaccgcgccctggcccagtcgtccacggcgcaggccagcgcgcgccgccgcgtccgcagccccgccgacaaggagcacaagcgcctcaaaagattactgaggaaccgggtgtcagctcaacaggcaagagagaggaagaaggcttatttgactgatctggaggtgaaggtgaaggacctggagaagaagaactcggagatggaagagaggctctccaccctccagaacgagaaccagatgctccgacagatactgaagaacaccactgtaagcagaagaggttcaggaagcactgctagtggagagggccaatagttcagaatgacaggaaaatagtaatgcattatatgctaaacatatgtttatgctcagtggatttggtcagtttgctttgtggccaaaggagggaaccccaaaaactgggggtgaaggatttgtgcagacagtcatatatatcactgtattaatacgaatggttcagaaaaagaagaacttatggagtgc

SEQ ID NO: 793 - DNA, 459 bp, Zea mays
  Clone ID: TF_LIB4744-124-Q1-K1-A3
ctcgaggccggccgcgtcgtcacggcggcgctggccgaggccgaggccgaggcggcgagggacgcggacccggaggacgaggagcggctccggcgtcagcgccgcaaggtgtcgaaccggctctcggcgcagcggtcgcgcgcgcggaagcagcagcggctggaggagctccgcgaggcggcggcgcggctccgcgccgagaagcagcagctggaggcccggctgcaggccctggcgcggcacgacctcgccgtgcgctgccagaacgcgcggctcggcgccgaggcctccgcgctcgcgcgccgctcccgcgaggcgcgcaggctcctcgcgctgcgccgcctcgcgttcgccgccctgcagccgcggcccggcgtcgctcccgcgcccgcgccgccggcgcccctgctgggactggcctcgctcctgacgcatgtggcttggtggggtcgtgctgcc

SEQ ID NO: 794 - DNA, 1399 bp, Zea mays
  Clone ID: TF_ZmC3100_1
tcgcatcggccagctcgtcccgtccgtcacaacactgcagaaccaggtgtccgcgctgtctccccgtgtggcattgctggatcagcagcggaccatactgaccgtcggcaacagccacctcaagcagcggatcgcacgtgttgctcaggacacgagagatctggcgagcgagcgcgcacactgctggcggcaccaggctacgacgatcgagacagccgccgtgccagcacattgtccattgtccgcgcggcgggggatcgggcggacgcgcacataatatggcgcagctgccgcccagggtcccgaccgcggtgcaccgctggccggagggcggccaccacggcgcggcggcgtgggccgatgacttcgccgagttcgctgcgtcgcggcggggcgcgcaccgcaggtccctgagcgactcggtcgccttcgtcgaggtggcgcccgcggccggcgagttcgacaggctcgacgacgaccagctcatgtccatgttccccgacgaggccgccgccggcggcggcggcggcgggtcgtccgcggcagggtccgagaacaacggcggcagcagcgacagttacggcgataggcgcggcggcggtggccctgcggcgggaggcaccagcaccaccaccagctgcaatggcttcgatggtggcgagcacaacgaagccgcggacgcgcaggcgacggggcaagctgccgccgccgccgccgcctccacggagctgatccgggaccccaagagggtgaagaggatccttgccaaccggcagtcagctcagaggtcgcgggtgaggaagctgcagtacatctccgagctcgagcgcagcgtcacaacactgcagaacgaggtgtccgcgctgtctccccgtgtggcatttctggatcagcagcgtaccatactgaccgtcggcaacagccacctcaagcagcggatcgcagctcttgctcaggacaagattttcaaggatgctcatcaagaggcgttgaagaaggagatcgagaggctgcgccaggtctacgagcagcagaacctcaagatgtcagccggcgctgctgcctctgaccatggcccgccaccggtgcgcgcggagaaagagctcatgagctagctacccagtcgatccacgcgtgcccgctgtgcagtgcagcccgcccgccttatcattaattaacatggagggaacattgcatcatgatttctctttttttcggattatgtggatgttttcttctttctttctttcttcttccattgacacgtgtgcgttaattctttgtatgttgattttgggatttggttcactgtgcaaattgtggtaaagtcatcagggaaactgatctgttgtgtaaatcacttttttgaagcattacattcctgggaatctggttaccc

SEQ ID NO: 795 - DNA, 1239 bp, Zea mays
  Clone ID: TF_ZM3393.C1.o2.fg
atggcgtccgagatgagcaaaaacgtgaaggccctcgacgagcaggaggtcacctcgcagcactcacgcgcccagaccagcgacgctgccgaggagcagcagcagcaacagcaggcggtggacccgctggcgcggcagtcgtccattatgtcgctgacgctggaggagctgcagaactcgctgtgcgagccgggccgcaacttcggatccatgaacatggacgagttcatggccaacatatggaacgccgaggagttccaggccgccacagccggctgcaacaaggagggcgcggagcgtgagccggtgcccgtggcgacgacgacgggcacaggtgagaacggaggaggaggaggaagtgggaggggactggttcggcagggttcgttcgcgctgccgccgccgctgtcccggaagacggtggaggaggtctgggccgagatcagccagggcccggcggacttccaggccagcgcggcgccgcagcccgtggcgcagccccaggcggcgagcggcggcggcgtcgcggccagcgggcggcaggcgacgctgggcgagatgacgctggaggacttcctcgtgaaggccggcgtcgtgcggggcgccttcgccggccacggccacggcgtcggcatggtcccggccggcccgatgggcatgcagcacaacgcggctcctcccatgatgtaccaggtggcggcagcggcggcgccgccgcccggcgctgtatacccggtgatgggcgacggcatggggtaccacggcggcgggtaccccgggggcgtggcggtggtgccgcccccgccgccgtctcagtgcgtggcggccgccgccagcccggggtcgtcggacgggatgagcgccatgacgcaggcggagatgatgaactgcattggcaacggaggggtggtccgcaacggcggcggcggcgcgcggaagcgcgacttccccgaggacgggtgcaccgagaagaccgtggagcgacggcagcgccgcatgatcaagaaccgcgagtccgcggcccggtcacgcgcccggaagcaggcgtataccgtggagcttgaggctgagctgaaccatctcaaggaggagaacgagcgcctcagagcagaggagaggacgattctgctgtcgaagaaaaagatgctggtggagaagatgatggagcaggcaagggagaatgtgagcgccaagaaggtcggtcccggactgcgccggtggggcagcgccatgtggtga

SEQ ID NO: 796 - DNA, 2444 bp, Zea mays
  Clone ID: TF_ZmC2896_1
ttgggtacctcgaggccggccgggagtgatgcaccgctgcacacgccacacgggcacggcgccttcgtctccaacacggcgactaattaaccccactgattccgacgaccgagctcccccacactttttcctggcaaaccctgcacgcctccgcaaccgcaaccgcgtcgtcggcgtgcgcgatcccgagaggcccagccatcagcttccttggcggggtgtgtatgcgcgtacgtcggccgtgaccagatcggctgagccaaggccatggcggaaccggccctcctcgcgccggaccccttcgcggacctccccttccccgaatttcaggcgcccatcgacggcgacagcttcgcgctcgaggacttcgatctggaggatctggacctggacgtggacttcgacctcgacctcttcgcctcggacgggcaaccctcgcaaccgcccccgctcgcgacctcgtcctcctcggccgggtctccggttggaggctcgtcctcttccggtgccgtcggggacggcggagggctgaggaatgaggagtcttcggagtcgtcttcgaggagcgcgagcggcacggatggcagcggcaaggggaagggggaggaggacgaagcgaagcggcgcgcgcggcaggtacgcaaccgcgagagcgcgcacctgtcgcggcagaggaagaagcagtacgtggaggagttagagggtaaggtgaaggccatgcaggccaccatcgccgacctctccgccaggatctcctgcgtcaccgccgagaacgccgctctcaaacagcagctgggtggcgctgctggggccgcgccgccgccgatgccgatgtaccccacgatgtattctttgccgatgccgtggatgcacccatcgtatcccatgcgtggatcgcaggtgccgctcgtgccaattcctcggctgaaacccccgcagcctgcatctgctgtagcagagccaccggccaagaaggctaggaagaccaagaaggttgcaagtgttagtctcctggggttgatttgcgttgcaatgctttgtgggtgtttgattcctgcagtaaatcggatgtatgactctgttgatgctggagaaggtgctgcatacggtccatctcatcgtgggagggtgctggctgttgaggggcctcatgataatgtttcagatggtgtcgatccaaagccgccacagcgtgccagtgagacgcttccagcactgttgtatctaccaaagaatgggaagcatgtcaagattaatgggaatcttgttattaagtcgattgttgctagtgagaaagcttcattgcagatgtctggcaatgatgggaagcgtcctcaaaaccaagaggaggagactagactggcaattcctggctatgtgactccattgaaagctggagaggttatggaatcaaccgaaggaatgatgaacaatgaactgttggcgttagctcctgcagatggaagcatgtatagggaggaggatggattgctgccacagtggtttagtgaagcaatgtctggccccctgctgagctcaggaatgtgcactgaagttttccagttcgatgtgtccccatcatctgctcatccaaatggcatcattcctgtctattccaatgccatgtcaaactcgtcacagaacttcactcaagatcttccccctgctcgtgttcgcacggtcaagaacagaaggatttcgtactccgaggccattcctctgagaggttcaacatccaacgacactgagcacctcaagagctttggcagtacgaagcctgtttcgtcagtggtcgtctctgtgctggctgatcccagagaggctggcgatggggatggtgagggaaggatctcttcaaaatcattgtcccgcatcttagttgtcgttcttatagatagtgttaagtatgttacgtactcttgtgtcctgccgttcaaaagccatagccctcacctttaggtctgggttttggacgtgagttgataaagctgacctatacattttatagcagaagaggtgtaagacagctgcctttgttcatttattcaagttttgtgtgctcaaaaaaaaaaaaaaaaaaaaaaaaacaacgacactgagcacctcaagagctttggcagtacgaagcctgtttcgtcagtggtcgtctctgtgctggctgatcccagagaggctggcgatggggatggtgagggaaggatctcttcgaaatcattgtcccgcatcttagttgtcgttcttatagatagtgttaagtatgttacgtactcttgtgtcctgccgttcaaaagtcatagccctcacctttaggtctgggttttggacgtgagttgatagagctgacctatacattttatagcagaagaggtgtaagacagctgcatttgttcatttattcaagctttgtgtgctccatgatgtaaaaaaaaaaaaaaaaaaactcg

SEQ ID NO: 797 - DNA, 2186 bp, Zea mays
  Clone ID: TF_ZmC13853_5
ttgggtacctcgaggccggccggggcatcattcgcaatctcaggtcacggaactctatccactcgtcagcaccaagctagctagtactcgtgcccttcggacgagaggcgcatgtgactcggtaaggaggaggagggtggagatggaattcaagaactgcgggtcgtcgtcgcagccccggccggcggtggtagtgggcgaggcggcgttggcgagacagggatcagtctactcgttgacgttcgacgaattccagagcgcgctcggcggggccgccgccggcggtggcggtggcggcagcatccccaagggtttcggttccgtgaacatggacgaactgctccggagcatctggaccgcagaggagacccaggccatggcctccgcttccgctggagcgggtgcggggatgccccccacgccgctgcagcggcaagggtcgtcgctcacactgccccgcacgctcagcaccaagacggtcgacgaggtgtggcgcaatctcgtgcgcgacgaaccgccgcagggggcggacggcggcgggcaccagcagccccaccgccagtcaacgctcggggagatgactctggaggagttcttggtcagagctggcgcggtcaaggagaaccccgcttctgctcctccagcgccgccacccatggtgccgccgcggccggtacctgttgcccctaaaagctccgccttttttggggatttaccgggtgccgacgacgacgcagctacggcagcggtagggtttgcaccggtcggcatggtggatctggccctgataccgcccagggcggcaggcatgggaggcagcgccatggctgtgcaaacagcggtgagccagcttgattctgtcgggaagggatacagcgacctgtcgtcgctgacggagccgcaaactttttcgtttgaaagaatgattcgggggagaaggcatggaggcggagtggagaaagtggtggagaggcggcggcggaggatgatcaagaacagggagtccgccgcgaggtcccgagcgcgcaaacaggcttatacaatggagttagaagccgaagttcagaaactcagagagcagaatcaggaactggagaggaaacaggcagaaattatggaaatgcagaacaacgaggtatcagaaatgttgaaggatccattcggacggaagaaacggctgtgcttgcgaagaacgttgacggccccctggtgacgattgcctagaacagcacatgacttgcacttgctacgtacctgcaggggcgtttgggatctgtagataatttctctcctatagtgtagcgatgaacccatgaacatgaacgtaatctaaatgattgtactgttagctcccttctgccgcttacgtagtactgcagtaccgtagtggtggagtcgaaaactgacatgtaaattatgtacgtagtagagaacaaaatggagtgaagccggtcgcaagagttgtggcttcagtcatcctccagagcttgtgcagagttgcctaggttttgcatcttgctggcacatccagagcttgtgcagagttgtctaggttttgcgaaaaccctagcttggtgtcgcctcaccagcttgccaaatctctaaccctaggtgcagcggaggagatggcccccaagcgctcggctccacctccgccgcctccgcccccggatgcctcctccgagagagaccgcctctggttcgatctccgaggaggatgaggaggaggatgaagaggtggtggtcttatcaccagtggttttgaaatgtagtcagaagcttgcaacactcaaatataatctactacttattgtggtcaacagttgttaatatgtttatcgccttatcggggatagacttgtgaaaccatgctacctcactctggcaaaggactgtaacttagtcctttgcaatggaatgagcaaagaaaagatccaaagaatattgcgtttatggaagcaacttgataggttctgttacatgctaggctgctagctaatccatttgtaccagacatctgtaatcgctccatatttttttgtatttcctagatttgtctagaatcttacatttatcattgcatgaacgttcattttgtgctacatagcattcatttatctttttttttttcccgggatatatatatcaatcaaaatggtcctgggatatccagcgttctaaatcgc

SEQ ID NO: 798 - DNA, 1442 bp, Zea mays
  Clone ID: TF_ZmC5008_1
tacctcgaggccggccgggggtaccgccggacagggccaacacgtcccaaaaaaaaaacatccacccttcccctttctcttcgtctccgtccgctcccggcatcgtcccctcttccccgtctcgcggtcgccgcccacgggcttcgattgatcttcttccggtgctggtggcaggtggacggatcgtgtccttgcttggccgcccacagcagcaatggacgacggggacctggacttctccaacccggacacgtacctgtgcccggcgctcggcactgacccgcccagcagctgctccatggacagctacttcgacgagatcctcaaggacacggagcaccacgcctgcacgcacacccacacctgcaacccgccggtgcacgacctatcgcacacccacacctgcgtccacgtccacaccaagatcgtcgcggcctcgcccggcgacgacactgccgactcgccgtccgagaacaacaccaacggcagcggcggcaacggcagcaacgccgcctccaagaagcgcccctcggggaaccgcgccgccgtcaggaagtaccgggagaagaagaaggcccacaccgcgtcgctggaggaggaggtggtccatctcagggcgctcaaccagcagctcgtgaagaagctccagagccacgccgcgctcgaggcggaggtggccaggctccgctgcctgctcgtcgacatcaggggcaggatcgagggggagattggcgcgtttccgtaccagaggccgccgccagcggccaagaacgtcgacctcgtgtccggtgttgaccaaggagggttccttgccggggctgctgcccaggttaccagttcctgtgatttcagatgcaacgatcaaatgtactgcagccctggaatgcagggcgctgttggcggccaggtgttgggacaaggtgcctgtgatgtctcgagtatccaatgcgttggaagcaccaggtctgcgtccactaagctacctgtctgcggggggatggatgcagtacctgctgcctgcttgccaaatgttcaaaacaagtgatggattatataactgaagaagagtataactcggctctcttgtcgccgagccattgttttgtggttccattggtttcctgctgtctggctgaatgcaattttgagtgaattgccatctaattgtcaacgatgaagatcagatttgcttctgtcccatcttgtcaatccagagctagacttgctcttgtctattttcagctggatgtcttgtgccccttttaaaggcattgctagtcttgttgacacaccagaaactaagatgctctgtatgaatcaactggctgtttattctctgagatttgagaaaaattcttattagccttcttaagtctatttatcatgattattgtgtaatcatggtgtatgttgttgtttattcattttgctgtggcctattc

SEQ ID NO: 799 - DNA, 1674 bp, Zea mays
  unsure (1)..(1674): unsure at all n locations
  Clone ID: TF_ZmC5008_3
cattgggaccctcgaggccggccggggtccagattcatccaccctccccctttcccttcgtctccgtccgctcccggcatcgtcccctcttccccgtctcgcgttcgtcgcccacgggcttcgattgatcttcttccggtgctggtggcaggtggacggatcgtgtccttgcttggccgcccacagcagcaatggacgacggggacctggacttctccaacccggacacgtacctgtgcccggcgctcggcactgacccgcccagcagctgctccatggacagctacttcgacgagatcctcaaggacacggagcaccacgcctgcacgcacacccacacctgcaacccgccggtgcacgacctatcgcacacccacacctgcgtccacgtccacaccaagatcgtcgcggcctcacccggcgacgacactgccgactcgccgtccgagaacaacaccaacggcagcggcggcaacggcagcaacgccgcctccaagaagcgcccctcggggaaccgcgccgccgtcaggaagtaccgggagaagaagaaggcccacaccgcgtcgctggaggaggaggtggtccatctcagggcgctcaaccagcagctcgtgaagaagctccagagccacgccgcgctcgaggcggaggtggccaggctccgatgcctgctcgtcgacatcaggggcaggatcgagggggagattggcgcgtttccgtaccagaggccgccgccagcggccaagaacgtcgacctcgtgtccggtgttgaccagggagggttccttgccggggctgctgcccaggttaccagttcctgtgatttcagatgcaacgatcagatgtactgcagccctggaatgcagggcgctgttagcggccaggtgttgggacaaggtgcctgcgatgtctcgagtatccaatgcgttggaagcaccaggtctgcgtccactaagctacctgtctgcggggggatggatgcagtacctgctgcctgcttgccaaatgttcaaaacaagtgacgttactggactgctgtgagtcgttggtagaatttgttaatgaatgttcgtactgctcagatcttgcaatggaacttattcaagaaaaaaaaacaggatatgatgtcttattcttcaaatagtcctaaggactcccggcagtgtttatggtcccttccttttcagagactgctgggacttcccgttctgcctcgaaggaacgctgtataaaccgctagcttttctatgtagggccgaatctggttcaaactgctacgtgtgtgagttcgtcgtcgccgatgatgcttctatagtgcctgaggcgattcaagtttgttagctctagagctgataggatatcctcgtttactttgcttagttctcagatgctctccgtctccgatgaagtgcagcaactgaaccggatccgaaggagttggacatgaacaggttaaaatttggcatatgtggtctaagaagacgctgagatgtttgtagcgaatctcaagttcaatgcgaaccctgttgcctatgtnaaaaaaaaaaaaaaaaaaaaaaaaaaaaaaagaagaagaaaaaaaaaaaaaaaaaataaaaaaaaaaaaaaaaaaaaaaaaaaaaaaaaaaaagaaaaaaaaaaaaaaaaaaaaaatagaatgggggcccccccccc

SEQ ID NO: 800 - DNA, 1486 bp, Zea mays
  Clone ID: TF_ZmC5008_4
cctcgagccggcgggactgttcgttacatcccattggtgagtgggtgggtgggtgcctgggtggtgaggactggactcgttcggctcgggattcccctccgccgcctacgcgcccaacacgtccccgtccagattcatccacccttccccttcgtctccctccctccatccaatccaccccctctcccccttctcgtcgtcgccgccgccgccgcccatccggggcttggactgtcctttccccgttctgctggtagcagcaatggacgacggggacctggatttctccaacccggacacgtacctgtgtccggccctcggcaccgacccgcccagcagctgctccatggacagctacttcgacgagatcctcaaggacacggagcacctcgcctgcacgcacacccacacctgcaacccgccggtgcacgacctctcgcacacccacacctgcgtccacgtccataccaagatcgtcgcggcctcgccgggcgacgccgagtcgccgtccgagaacaacagcaacggcagcggcggcaacggcagcaacgccgcctctaagaagcgcccctcggggaaccgcgccgccgtcaggaagtaccgggagaagaagaaggcccacaccgcgtcgctggaggaggaggtggtccatctcagggcgctcaaccagcagctcgtgaagaagctccagagccacgccgcgctcgaggcggaggtggccaggctccgatgcctgctcgtcgacatcaggggcaggatcgagggggagattggcgcgtttccgtaccagaggccgccgccagcggccaagaacgtcgacctcgtgtccggtgttgaccagggagggttccttgccggggctgctgcccaggttaccagttcctgtgatttcagatgcaacgatcagatgtactgcagccctggaatgcagggcgctgttagcggccaggtgttgggacaaggtgcctgcgatgtctcgagtatccaatgcgttggaagcaccaggtctgcgtccactaagctacctgtctgcggggggatggatgcagtacctgctgcctgcttgccaaatgttcaaaacaagtgacggactcccggcagtgtttatggtcccttccttttcagagactgctgggacttcccgttctgcctcgaaggaacgctgtataaaccgctagcttttctatgtagggccgaatctggttcaaactgctacgtgtgtgagttcgtcgtcgccgatgatgcttctatagtgcctgaggcgattcaagtttgttagctctagagctgataggatatcctcgtttactttgcttagttctcagatgctctccgtctccgatgaagtgcagcaactgaaccggatccgaaggagttggacatgaacaggttaaaatttggcatatgtggtctaagaagacgctgagatgtttgtagcgaatctcaagttcaatgcgaaccctgttgcctatgtatattcacatcc

SEQ ID NO: 801 - DNA, 1885 bp, Zea mays
  Clone ID: TF_ZmC7838_2
aattcggcacgaggcttccttcctcggcagcagcagcagatgcgccagcatcgctcccaccgcccaccggcagcaggaggagcgacaagtacagtgacacggacagagagagagggagagggagcccatcacagcgcctacactagctagccaccgcccaccaggccgccaccaccgatcgaatcgggtgcgtgctgctcctcccggccggccgcccgctcgctcgctcgctcgctttataagccagccacccagccccgcccgatcgtcatctccatagccccgtatccgtccacgcacacccgccttgccaccagccagcactccccctcaacccccggcctcgccgccgccgccgcaccccccacacccgctgccgcgcaggccggttgctccgattgggagtgccaatcggagccaacagcagggggaagcacatgctgccgttcgcgcgccctagagttcctcattgatgtcgcctgtgatcagtgagatcctcctctcggggtttatgatcaactccacactccggcgccgcacccacctcgtccagtccttctccgtcgtcttcctctactggttctatgtcttctcataaactactcgcccccgtcaccgccacgcccctctcctcctccccgtccctgctgccttcttctcctccttcttcccgttccatctagtagcatccaccgtcaccctcttctcgtttcttctgcccagtctctgccttcttcttcgtcgtcgtcgtctcggtttcagtcgtttcctaaaactttaccttgcatgcacttccctactactgctgctgctagcgaagacctttattagttattagtagtgttaagttattaccaacaagaagcagaaagaaagaaagaaaaaagggatcaagaagcagagagctgttctgttcttttttttccccccctctcttgcaagaaagggcggttcttgcgcggacggaacgcaggaacaatggcttcctccagcgggagcgggagctcgggcttcctctcggcggcactggacgcggcggcgacggcgggaacggaggaggagctgcgcgcgctcatggcgcagcgccgcgccaagcggatgctgtcgaaccgcgagtcggcgcggcggtcgcggatgcgcaagcagcgccacctggacgagctcacggcgcaggccgcgcacctgcgccgcgagaacgcgcacgtggccaccgcgctcgggctcaccgcgcagggcctcctggccgtcgacgccgagaacgccgtcctccgcacccaggccgccgagctcgccgcgcgcctcggctccctcaacgacatcctcgcctgcatgaacaccaccaacgccgccgccgcctcctccgacccttacctcgccttcgacggcgcggccaccgccttggacgacctcctcaaatcctgccccgacagcatgatgttcgagtaccagctctgctagctcgggaccgaagtcgccatggacagcacaaagcatcgagaggagggaaaaaaacatttttttttttttgctgctggtgtttcaggttagtgatctgctagtgagatggaactgaagggcagatcagacgtggcggtgagccatgaaactaccgtcagctgtactgtgctatcaactgggggtgggaaaaaaaacccagctgggggctggggcactgcacctaattagctagctagatgatgctggggttatggttaatgaactactacttactactaattaccaggtgcaagtgtaactcgaggtctgatctgctttcgtgtactgtgtcactccactccaactgtgtagcaatcagagcagtaaccttactagtatctctgttcaaacaaaggaagtgcaccatacaatctacattttaaccgcg

SEQ ID NO: 802 - DNA, 1300 bp, Zea mays
  Clone ID: TF_ZmC2202_1
tccggatacaacatttcttaatgcttgtcgggaaggccacattgctcaggctgctcccaactcccatcctccccctcccggagtacgaagtactagaaagagagcggctttcctctaagaatggcgggtggcggcgccggcgacgacgacgtggtggtggtgagctgcggcggcagaggcggcggcgaccccggcgcatacgccgcggtgctcaagaggaagctcgacctgtactgcgccgccgtcgccaaatccatggaagctaaatcacaagaacattcgttgggctaccccaactcacaagcttcagatgcttcgcaattgatttctcaagcttcctttgatggtgacatagatggggcaagcctagttacaaactctaatgtcatagaagatgatgattttcaaggcaagccaaccaacagtggcacatcaaaggaactgtcagacgatgatggtgaccttgaagagaatactgaccccgctaacgccaagaagatgaggagaatggtgtcaaaccgggaatcggctaggcgatcaagaaagaggaagcaagcacacttgaccgatcttgaatcacaggtttccaggttaacgtctgagaatgcatctttgctgaagcgactggctgatatgactcagaaatacaaggacgcttccgttgacaataaaaatctaacagttgatgttgagactatgaggagaaaggtgaacatagccgaggaagctgtcaggaggctaactgggatcaccctcatgctaccgaccgcgtttgagaagcccgcgagcagcgcgcccctgtcatcatgtccatctgatgcagcttctgcttctgcttctgccgccattgaagacagcgtgaagcatttcctccaggcgccacttgaaaacagtgggatcatcccaaacgcagcagtttttcagaccaagccagcttctctgcaccgtgttgctagcctggagaacctgcagaagaggatcgtcggggatgcaatgtattccgagaccgcgtcaacgacattctcagatcctgaagctcttgccgataggtaaaggttgctcctgttctgtcctgtgatgaacagccgtgtgatgctctagcggcctaagtgcttctggtaatggaagttgtagcacccatgcgcctgggtggggtctacacagtgatttgtacactattttgaaggttaataataattgttgagaaatgatctcatccctttgtacctatataagtaaagtattccattaataaagagaatagagttttcactcttcaaaaaaaaaaaaaaaagcggcc

SEQ ID NO: 803 - DNA, 2374 bp, Zea mays
  Clone ID: TF_ZmC2202_2
gcgtccgatgaggagaaaggtgtgaggagttgtaaaacgaaacaaaacattaaaagcgcacgtgccatgcccaaatgcgggggggtgtgtcctattaagcctgtggggcttttctcttggtttgtcttggtgatgggctgaaactaaattaaatgatactgagaggagtgcaaactgaatactaccatacaaacatttattaatgcttgtgtggccggggctcaggctgctcccaactcccatcctccccctcccggagtacgaagtactagaaagagagcggctttcctctaagaatggcgggtggcggcgccggcgacgacgacgtggtggtggtgagctgcggcggcagaggcggcggcgaccccggcgcatacgccgcggtgctcaagaggaagctcgacctgtactgcgccgccgtcgccaaatccatggtgacatagatggggcaagcctagttacaaactctaatgtcatagaagatgatgattttcaaggcaagccaaccaacagtggcacatcaaaggaactgtcagacgatgatggtgaccttgaagagaatactgaccccgctaacgccaagaagatgaggagaatggtgtcaaaccgggaatcggctaggcgatcaagaaagaggaagcaagcacacttgaccgatcttgaatcacaggtttccaggttaacgtctgagaatgcatctttgctgaagcgactggctgatatgactcagaaatacaaggacgcttccgttgacaataaaaatctaacagttgatgttgagactatgaggagaaaggttcgttcgtcttgaatgcatcacagacctttttcttctttttgttgtacgagaactcttaactgcatccatttatcgatcataacatttttactgggctctgcgtatactcaccgtaatcaacgtttacatctctctagatggctgcaaagggcagtgaaagtaatatgattgctcatagttcttattttagaacctgcaagtacagttttagtttctaatggtttttaactgcacccaaaaggtatggcagcattttcatttgattctctgacattctgcatacattctgagagaggtgaacatagccgaggaagctgtcaggaggctaactgggatcacccttatgctaccgaccgcttttgagaagcccaggagcagcgcgtccctgtaatcatgtccatcttatgcagcttcagattctggttctgctgccagtgaaaacagcgtgaagaagttcctaaaggctcaactggaatacagttcggatcatccacaacgaaccagatcctcacaccaagcgcgcttctctgcaccgtggtgtcagccgggagagcctgcacgcggcgggtcgtccgggatcgacatcaaactgaccctgaagcatcacataccagcgcgcattgcgcccagtgtgagtcccattcatcacgcggggcttttgctgaccaagccagtgtggatggactgctctatctccaatgataccgagaggagtcggaacagaatactaccatacaaacatttcttaatgcttgtgtgtgagtatatgcacaactctgtactcttgtatcattagtaaaactgtgtttttttaaatatccatgctgaagggttctaacataatcatgttaagtttttatgaaaaaaatttgcttaaactatgactgttccaatcagttttttacctaaagaaggtattcacaagaatcttggcatttaacagacctgcacaccttgactttatgaaaagggacatgtcttcaggaacacagtactgttttaattccaggtgaacatagccgaggaagctgtcaggaggctaactgggatcaccctcatgctaccgaccgcttttgagaagcccacgagcagcgcgcccctgtcatcatgtccatctgatgcagcttctgcttctgcttctgccgccattgaagacagcgtgaagcatttcctccaggcgccacttgaaaacagtgggatcatcccaaacgcagcagtttttcagaccaagccagcttctctgcaccgtgttgctagcctggagaacctgcagaagaggatcgtcggggatgcaatgtattccgagaccgcgtcaacgacattctcagatcctgaagctcttgccgataggtaaaggttgctcctgtcctgtgatgaacagccgtgtgatgctctagcggcctaagtgcttctggtaatggaagttgtagcacccatgcgcctgggtggggtctacacagtgatttgtacactattttgaaggttaataataattgttgagaaatgatctcatccctttgtacctatataagtaaagtattccattaataaagagaatagagttttcactcttcg

SEQ ID NO: 804 - DNA, 1025 bp, Zea mays
  Clone ID: TF_ZmC2202_5
gaggccacttgctcagctgctcccaactcccatcctccccctcccggagtacgaagtactagaaagagagcggctttcctctaagaatggcgggtggcggcgccggcgacgacgacgtggtggtggtgagctgcggcggcagaggcggcggcgaccccggcgcatacgccgcggtgctcaagaggaagctcgacctgtactgcgccggcggcgccaaatccatggaagctaaatcacaagaacattcgttgggctaccccaactcacaagcttcagatgcttcgcaattgatttctcaagcttcctttgatggtgacatagatggggcaagcctagttacaaactctaatgtcatagaagatgatgattttcaaggcaagccaaccaacagtggcacatcaaaggaactgtcagacgatgatggtgaccttgaagagaatactgaccccgctaacgccaagaagatgaggagaatggtgtcaaaccgggaatcggctaggcgatcaagaaagaggaagcaagcacacttgaccgatcttgaatcacaggtttccaggttaacgtctgagaatgcatctttgctgaagcgactggctgatatgactcagaaatacaaggacgcttccgttgacaataaaaatctaacagttgatgttgagactatgaggagaaaggttcgttcgtcttgaatgcatcacagacctttttcttcttttttttgttgtacgagaactcttaactgcatccatttatcgatcataacatttttactgggctctgtgtatactcaccgtaatcaacgtttacatctctctagatggctgcaaagggcagtgaaagtaatatgattgttcatagttcttattttagaacctgcaagttcagttttagtttctaatggtttttaactgcacacaaaaggtatggcagcattttcatttgattttctgaaattctgcataccttctacaagtgtgataggaataatttagttccttggttttgttttcttgcagtatcatttc

SEQ ID NO: 805 - DNA, 353 bp, Zea mays
  unsure (1)..(353): unsure at all n locations
  Clone ID: TF_jC-zmX148064Q1E1B1b1
cccggaggacgnccggggcgggcggggactaataggcggacacccacaggcccccgaagcgccggatggcgaaccgcgagacggcgcggcggacccggctccggaagcagcagcaccaggacgagctggagcaggaggtggcgcgcctgcaggccgacaacgcgcgcgaggcggcccgcgccgccgacagggcgacccagaacacccgcgtcgagcaggagaacaccgggctccgggcccgagccgccgagctgggcgaccgacgtcgctccgacaacgaggtgctgccgcctcgcgaggagttcagcggcgtcgccatggacaagcaggaggagatgccggcggacgacccg

SEQ ID NO: 806 - DNA, 950 bp, Zea mays
  Clone ID: TF_ZmC773_10
gcccccaccgacctcctttgtctccccctcgcccagcgcccacctcttccgtcctcctgtttcccgtcccgcacagcgctacgcacacagactatttctctctctctctcgccctctatcgctcgtccgatctgcatctgcttttcttcccccctccgcgtgtcccctgtcccttccggcgtgcgcgaagatttgattttttttttgtcggggagaaggcggagtaagacagaccaggccgggaggaaggagatcctgatctgttcttggagtggggaggcgaggagaggagaggaggaagatggcggcgcaggagcacgagcacgagcacgagcacgagaagcagcaggcgaagacgagcaccacgagctcgctcccctccagcagcgagcgctcctccagctccgcccccaacaaccttagggaaggaggtaggtgccgctcccgcgcccatcccacgcaccgcccaccctctcagatctcctgcaccatctctcgtttcgtccgcaagccccttagctgaagctgccggcgcaggcgtggagagcgacgaggagatacggcgggtgccggagctgggcggcgcgtcggcgtcggcgtcggcgtcgtcgggcgcgggcaaggaggacggcgcgcgggcggtggccgcgggggcgcaggggcaccctccggcggccgggaagaagcgcggccgcgccccgggggacaaggagcagaaccggctgaagcggctgctgcggaaccgcgtgtcggcgcagcaggcgcgggagcggaagaaggcgtacctgacggagctggaggtgcgggccaaggacctggagctccgcaatgcggagctcgagcagcgggtgtccacgctccagaacgagaacaacacgctccgccagattctgaaaaacacgacggcgcacgccagcaagaggagcggcggcggcggcggcaagggtgga

SEQ ID NO: 807 - DNA, 837 bp, Zea mays
  Clone ID: TF_ZmC3503_8
cggacggagacctctccttctccgacctcgacttcccctccctctccgacgactccccggccgcctccgacccaaccccgcccccgccgctgccgcagccggccccggccccccgcccggccggcggggcccacacgcggagcctctccctcgacgccgccttcttcgagggcctcgcgtttcagggacccagcgggagcgccgggggtgggcccgggcacaagaggagcggctccatggatggggccacctcaccgtttgagggcgagtcggcgctctccagcggcctgccggactacgccaagaaggccatgcccgcagagaggatcgccgagctcgcgctcatcgaccccaagcgcgcaaagaggattctggcgaacaggcagtctgcggcgaggtccaaggagaggaagatcaagtacaccagtgagctggagaggaaggtgcagacgctgcagacagaggccaccacgctttcggcacagctcacgcttcttcagagggacacctctggtttaaccactgagaacagggagctgaaactccggttgcaggccatggaagaacaagctaaacttcgagatggtatgtccttgtctttctttggaaggtctaaagccactgtcatataaggcccagaaagagactccacttttcctgtttcaagaacattacgaggcaaatgctctaaatgatgccttgagggaagaagtccagcggcttaagatagccgcagggcaggtccccaacatgaacgggaatcccttcaatggaggactatcacagcagcagcaggtgccaagctattttttacatacacagcagatgcaatacttt

SEQ ID NO: 808 - DNA, 1287 bp, Zea mays
  Clone ID: TF_ZmC947_1
atggcgtccgagatgaccaagaacgtgaaggccctcgacgagcaggaggtcacctcgcagcactcacgcgcccagaccagcgacgctgccgaggagcagcagcagcaacagcaggcggtggacccgctggcgcggcagtcgtccattatgtcgctgacgctggaggagctgcagaactcgctgtgcgagccgggccgcaacttcggatccatgaacatggacgagttcatggccaacatatggaacgccgaggagttccaggccgccacagccggctgcaacaaggagggcgcggagcgtgagccggtgcccgtggcgacgacgacgggcacaggtgagaacggaggaggaggaggaagtgggaggggactggttcggcagggttcgttcgcgctgccgccgccgctgtcccggaagacggtggaggaggtctgggccgagatcagccagggcccggcggacttccaggccagcgcggcgccgcagcccgtggcgcagccccaggcggcgagcggcggcggcggcgtcgcggccagcgggcggcaggcgacgctgggcgagatgacgctggaggacttcctcgtgaaggccggcgtcgtgcggggcgccttcgccggccacggccacggcgtcggcatggtcccggccggcccgatgggcatgcagcacaacgcggctcctcccatgatgtaccaggtggcggcagcggcggcgccgccgcccggcgctgtatacccggtgatgggcgacggcatggggtaccacggcggcgggtaccccgggggcgtggcggtggtgccgcccccgccgccgtctcagtgcgtggcggccgccgccagcccggggtcgtcggacgggatgagcgccatgacgcaggcggagatgatgaactgcattggcaacggaggggtggtccgcaacggcggcggcggcgcgcggaagcgcgacttccccgaggacgggtgcaccgagaagaccgtggagcgacggcagcgccgcatgatcaagaaccgcgagtccgcggcccggtcacgcgcccggaagcagactcggtctcggtctgctcctggaatgatgccgatgctggtgcaggcgtataccgtggagcttgaggctgagctgaaccatctcaaggaggagaacgagcgcctcagagcagaggagaggacgattctgctgtcgaagaaaaagatgctggtggagaagatgatggagcaggcaagggagaatgtgagcgccaagaaggtcggtcccggactgcgccggtggggcagcgccatgtggtga

SEQ ID NO: 809 - DNA, 1591 bp, Zea mays
  Clone ID: TF_ZmC191_2
cgggattacaaaaaaaaaaaaaaaaaaaaaaaaaaaaaatccgggctcttctcttccaccaaaccaagtgcggccagagaaatttctcccaaatttcagatcaaatcctcgaaatctccgacacctagccccccggagacttctcctcaacagtgtcgcgatccgtctcgatccggcatggagcgcgtcttctccgtggaggagatccccaacccctactgggttccgccgcaccctcaatcggcggccgccggcgctgttgctgcaccagcgggggaggcggcggggctgatgaaccggtgcccgtcggaatggtacttccagaagttcctggaggaggccgtgctcgacagcccggttcccgtagccggcgccagtaggggcagcgttggagctggagttgaggctgcggagagcaagacaccgggggccgcggcgccggcggctgcctcgagctcggttgttgaccccgtggagtacaacgcgatcctcaagcagaagctggagaaggacctcgctgccgttgccttgtggagggcttctggtgcagcacctccagatcattctccagctggttcttccttgccaagtgtggatgttccacacgcaggccctcttaaacccatcggaggtactggaagtctagttcaaaacaagctacctggtgctccaggcgggggatcaagtccacatgtactacaaaatgccgatatccctgttaagcaaaccactagctcttcctcacgtgagcagtcagacgatgatgacatggaaggagatgctgagactactggaaacggaaaccctgttcaacacagattacagagaaggaagcaatccaaccgagaatcagccaggcgttcgagaagcagaaaggcagctcacttgaatgaactggaggcacaggtagcacagttaagagttgagaactcttcgctcctaaggcgacttgctgacgttaatcagaagttcaatgaggctgctgttgacaatagggtgcttaaggcagatgtcgaaaccttaagagcaaaggtgaagatggcagaggactcagtgaagcgggtaactggcatgaacacattgttccctgccgtgtctgatatgtcgtccctcagcatgccattcaatggctccccatctgactccgcctctgatgccgccgtacccatccaagatgacctgaacagttacttcgccaatccaagcgagatcggaggcagcaacggttacatgccagatatagcttcctcggttcaagaggacgacgatttcgtcaacggggctcaggtcgccggcaagatgggcagcactgactcgctgcagcgggtggcgagcctggagcacctccagaagaggatgtgcggaggcccggcttcatcggggtcgacctcctaggttcctactccatcggatatgataaaggccctgatgcccacggcaagaatatgataaattaacagtttcacatactttgtagtggacattgctaatgctgcgatgcgcattcgttcgttgtggacttacgggtctactgctattgatttattgttcgttctccatgtggatctcgtgtgtccatttgacgtgtact

SEQ ID NO: 810 - DNA, 940 bp, Zea mays
  Clone ID: TF_UC-ZMROTEOSINTE106E02_FLI
cttgaaacccatcggagtatggtctggattggatattggacacgtatcaggtactggaagtctagttcaaaacaagctagttggtgctccaggcgggggatcaagtccacatgtagtacaaaatgccgatatccctgttaagcaaaccactagctcttcctcacgtgagcagtcagacgatgatgacatggaaggagatgctgagactactggaaatggaaaccctgttcaacacagattacagagaaggaagcaatccaaccgagaatcagccaggcgttcgagaagcagaaaggcagctcacttgaatgaactggaggcacaggtatcacagttaagagttgagaactcttcgcttctaaggcgacttgctgacgttaatcagaagttcaatgaggctgctgttgacaatagggtgctaaaggcggatgttgaaaccttaagagcaaaggtgaagatggcagaggactcagtgaagcgggtaactggcatgaacacattgttccctgccgtgtctgatatgtcgtccctcagcatgccattcaatggctccccatccgactccgcctctgatgccgccgtacccatccaagatgacctgaacagttacttcgccaatccaagcgagatcggaggcagcaacggttacatgccagatatagcttcctcggctcaagaggacgacgatttcgtcaacggggctcaggtcgccggcaagatgggcagcactgactcgctgcagcgggtggcgagcctggagcacctccagaagaggatgtgcggaggcccggcttcatcggggtcgacctcctaggttcctactccatcggatatgataaaggccctgatgcccacggcaagaatatgataaattaacagtttcacatactttgtagtggacattgctaatgctgcgatgcgcattcgttcgttgtggact

SEQ ID NO: 811 - DNA, 1386 bp, Zea mays
  unsure (1)..(1386): unsure at all n locations
  Clone ID: TF_ZmC2730_1
cccagcgtccgccctgcgtccgcagctagcaaagcagcagtcgagcactccaccatccagcttcgcatcccgcaagttcccagtcagccgagcagccagcggcggtgccaagaaggccgagctgcgagctccactccccacacctcagaagaaaaaggtgatggcgcaactgccgccgcgggcgccgagcgccgcgccgcaggaccactggccgccggcggcgggggagttcctgggcttcgccgcggccaggcgcggcgcgcaccgccgctccgcgagcgactcggccgcgttcctcgaggccgtgcccattgacgacgacgtcgtcattggcggcggcggcggcggcggcgacgacttcgaccgcctcgaccacgaccagctcctgtccatgttctccgacgtcgacgtctccgtctccgtctccgtctccggcagcgccggggagagggcgcagctcatggacgcggggggtgcgggtgcggacgacggggtggcggactcgtcgccggctgccgcggacggcgtcgctgagcccaaaagggtcaagaggatattggcaaacaggcagtcggctcagaggtcacgagtgaggaagctgcagtacatctcggagcttgaacggagcgtcaccagtctccagatggaggtgtcggcgctgtcccctcgcgtggccttcctcgaccaccaccgctcactgctcaccgtcggcaacagccatctcaagcaaagaatcgcggcgctcgcccaggacaagatcttcaaagacgctcaccaagaggcgctggagaaggagatccagcggctgcgccaagtgtaccagcagcagcaggtcaaggtggccaccaccggcggcgccgacatcgccaccgccgcctcgccgtcgatgcaggccaggcaagagctgctcgcgtgcgagggcgctgctattcgatagcggaggcggcggcggcggcggcggcgttcacgcccctgttactgttagtagcttaattaacttttgtgcagtctgatcaatacgtgttggcttgtttgtttgctgcttcttaatttaattcgtatgtgatgtattctgctcaccctagcaaaaaaaaaaaaaaaaatgcatcgatgccaagttgtgaatgaattgtactattcagttatttggaccggcttagtcggaatatagtgagacggagtttgttggtgtgagttatccgttcttaatttattgttgtttagattgattttatttaaaaaaaaaaaaaaaaaaaaaccaagaaaaaaaaaaaaaagaaaaaaaaaaaaaaaaaaaaaaaaaaaaaaaaaananntnnnnaaaaaaaaaaaaataaaaaaaaaaaaaaaaaaaaaaaaaaaataatgggggggggcctttttagg

SEQ ID NO: 812 - DNA, 811 bp, Zea mays
  Clone ID: TF_ZmC233616_1
actgatatggtacctttattgctaccaaatgaactagtttctgtcaatcgttttcaaccattcctgtattttttttttcaagcccacaactggtagtctgataattacaaagcagttcgttcgcccacatctcgcatacacatcatacatggctaatatacacaggccgtagactctgttggtataagattgcttgtgagcaggtaaagagaaggtacaggtgatgttccaaggagaacaacaaggactgatgacgatgggcgatggtgcagctaaatattaaccacctcatctcatctttctgcctcacctagaggtaaaaagcctagctcacggatgccacactccaaaactaccactacccattgctaccagtgttgtttttattaccatgctggtcactgcttctatgatgcgcctttgttgtgtcaatctggatgctcagagtcgtcacaacgctaggcgcctcggactgctccagttcaccaattagctgtgaattctctgcttccatgtcttcacaggccttcttaagctcgtcgagttctgatctgagtgtgccattgacgacggtcaggtcagttaccttctgcgctagttcctcacattcttgctgcttgcgtagccttgatctcctagctgactccctgttagattgttttcttctctcccttttctgttctcgctcatccatcatcgacaaagtgctgccatgatgggaatgcgtcgcagcatttatttcaccctgtccagaggtctctgctttaactggagaaccagtccaaaggtccatcccaatttcaagttcggc

SEQ ID NO: 813 - DNA, 2579 bp, Zea mays
  Clone ID: TF_ZmC3114_1
cattgggtacctcgaggccggccgggggtgctttcctgtgagtattgattgaaaacaaggaaaagctagcagtggctattaggttgtatttgctgattccatttcgaacctcaactgtcatcgataaacgatcttgttttcctcttcgtttcatgctgtcgaccaagttcttggtgacacattttaactgaaccattgtgttgatccacaactggacgacttgagtgttccaatgtctggccattggtctgaagttcactgcactcatctgttaaatagtattgaaagcacaaatagctcttagcttcaagatatcaatacgagttaaagattctagttgagccggccgtactgtgaccttcatgcaaaatttccaattacatggtttggattgccaaggcggggctagagcctagaatatataatgtcaaattaggtatgtaatctaaggtgcctactctcccccagatacagcatataacagtatatgtaagtcaattgtggagcaaagctctcagtacaggaaatatggaagtgttgattccttgttgcatgcataccttgtagtaaaactcctatccttcattcttatgattacgaaataatgttcacacttaccatgtctcatgggccaccggtgctcgctccgcccaggaccagcgggggagcctccagatctcggcgcgccgcgcaggccagcatggcgtcgtcctccgacgagcagtccaagccgccggagtcgcccgccgccgccgccgtggtcaccgccgcagcaccgccacagacgcacgccgagtgggtcgcttcgcttcaggcctactacgctgccgcggggcacccctacgcctggccggcgcagcacctcatggcggcggctgcggcgggggcgcacttcggcacgccggtgccgttccccgtctaccacccaggcgccgccgcggcgtactacgcgcacgcgtccatggccgcgggcgtcccttacccgacgtgcgaagctgtccctgcggtggcgctgcccactggcagaaaattcacgtctattggtgagcgcggtagcgcgtcgcctgagaaaggcgggaatgagcatccagccgccaaggacgcttctaggagcgatgacagcggcagcgatgagtcatcagagacgagagatgatgacactgaccataaggattcatctgcgcccaagaagaggaaatctggtaacacatcggctgaaggtgagccgtctcaagctgctgttgtgcgatatgctgcggttgagtcaccatatcccgcaaagggaaggtctgcctcaaagcttccagtgtctgcacctggccgtgcagcgcttcctagtgccaccccgaatctgaacattgggatggacatttggaatgcttctcctgccttggctgtgcctgcagtgcagggggaagtgagtcctgggttggcacttgcccgacgtgatggcgttactcaactggacgaacgtgaaataaagagggagaggcgaaaacaatctaacagggagtctgcaaggagatctagattacgcaagcagcaagagtgcgaggagttagcccggaaggtagctgacctaacgaccgagaacagcgctctcagagcagaacttgacaacctcaagaaggcttgtcaagacatggaagcagaaaattcacgtctgttgggtggggtggctgacgcccaggtaccaagtgtcacgaccacactgggaatgagcatcgagccgccgaagttgcagctgcagctgcagcagcatcatgatgaggagggccagctccacaagaaatctagtaataacagcaatgggaactgtgctggaggcagccacaaaccggaggctaacactactaggtgagatacagaggtggatgaggaagtgacaaagatgagatgagatgaggtgtttcttatctaaccacaacacccatcatcggtcagtgtgtgtgttttttcttagcgaagctgtcgttttagtcctcgcagcccgctggggccatgtagagtcgcccccactgcagccatgtattatttatggctcgtcgcggtgtgctttgtgtttttttgtgtgttgtgtaaaaactattgatgtaacaaaacctagagagcctagaggttttttttatgtctgctaactcctgacgagggatgtaatgtaaccggccaatttgttgcctgatcgttcgttagatgaaatgctagcaaatgtcactcgataaaaaaaaaaaaaaaaaaaaaaacctcgggctccaaccttgatctttgcgggagtgcgtctaagaaagctgaccgccatagacgacgcccgtattgcttcagtgcgttttcacagcccgctggggggccatgtaaagtcgcccccccctgcagccatgtattatttatggctccccccggtgtgcgttgtgtgtttttttgtgtgtgtgtcgtgtaaacctattgatgtagctattgtaacaaaaacctagagagcctagaatttttatgtctgctaactcctgataaggggggatgtaaccggccaatttggtgcctggtcgatcgtttagatgaaatgcgagcaaatatcttttgtt

SEQ ID NO: 814 - DNA, 829 bp, Zea mays
  Clone ID: TF_ZmC3114_5
tcttaacattgggttggtcatttggcatgcttctcctgccttggctgtgcctgcagtgcagggggaagtgagtcctgggttgtcacttgctcatccacctgtgtatcttacctagtactgttagcctccagtttgtggctggctacaacacagttcccattgctgttattactaaatttcttgtggaggtggccctactgataatgattctgctgcaactgcacttgcttggctgtgcctgcagtgcagggggaagtgagtcctgggttggcacttgcccgacgttatggcgttactcaactgttccttgtttcttcaggacgaacgtgaaataaagagggagaggcgaaaacaatctaacagggagtctgcaaggagatctagattacgcaagcagcaagagtgcgaggagttagcccggaaggtagctgacctaacgaccgagaacagcgctctcagagcagaacttgacaacctcaagaaggcttgtcaagacatggaagcagaaaattcacgtctgttgggtggggtggctgacgcccaggtaccaagtgtcacgaccacactgggaatgagcatcgagccgccgaagttgcagctgcagctgcagcagcatcatgatgaggagggccagctccacaagaaatctagtaataacagcaatgggaactgtgctggaggcagccacaaaccggaggctaacactactaggtgagatacagaggtggatgaggaagtgacaaagatgagatgagatgaggtgtttcttatctaaccacaacacccatcatcggtcagtgtgtgtgttttttcttagcgaagctgtcgt

SEQ ID NO: 815 - DNA, 1506 bp, Zea mays
  Clone ID: TF_ZmC3503_1
ctggagctcacgtttccgggcgcctcccgcaacggccgctagaatgctgtgctaccccgcagtgccacttccacagtccccgcccagccaggtgcaccacgccgccaccacagcctccgccccggctgcgttcacccccgttgacctccgcccgcccggccgccatggacccgcgcttcccgccgccggcgccgtcgtcctgcttcggcgggggcggggagctcccagcacgggggcaccaccggcgggcgcactcggagacgttcatccggctgcccgacgcagacctgctgctggacccggacgccgacttcggcttctccgacatcgacttcccctctctctccgacgactcgcccgcggcgtccgacccgacgccgcagccccaggccccgccgctccagccgccgctgcagcaggcggcttccccggcgtccgcggcgccgccgaggccgccgagcggggcgcacatgcggagcctctccctcgacgccgccttcttcgacggcctctcgctgcagggaggcggcggcggcgggggggtaagagggggcgtggcggggcacaagaggagcggctccatggacggggacacctcgccgttcgagggcgagtcggcgccgccgtccgtgctgccggactacgccaagaaggccgtgcccgacgacaagctcgccgagctcgcgctcctcgatcccaagcgcgccaagaggatcctggcgaaccggcagtccgcggcgaggtccaaggagaggaagatcaagtacaccagtgagctggagaggaaggtgcagacgctgcagacagaggccaccacgctttcggcacagctcacgcttcttcagagggacacctctggtttaaccactgagaacagggagctgaaactccggttgcaggccatggaagaacaagctaaacttcgagatgctctaaatgatgccttgagggaagaagtccagcggcttaagatagccgcagggcaggtccccaacatgaacgggaatcccttcaatggaggactatcacagcagcagcagatgccaagctatttctcacaaccacagcagatgcaatacttcagcggccaccagggccagcatcaccatccgaagcatgacccccagaattcttcaaacggcggtggccagcccttgagtgactccatggatttcatgtgaggactcaggggagacagctcaggagtgttgcctgagatcacataccaacttcaactaaagtaatgtaaatgtagctgatgtataccatattcagtgttatgatatgaaccattgtagtttagctagctgttccttgtaccattaatcaaaagttcattcatggtgacaaacctatcatcgcttttgttctggcgttaaagtaaattggcttgactggttgacgagctgtcgttgtaaagttgttcctgtaacagtgaaggaatggtttgcggttggaacgtggttttccccctgctgaaagccgttgcatttcgtgattggcgtt

SEQ ID NO: 816 - DNA, 1203 bp, Zea mays
  Clone ID: TF_ZmC3503_5
gcggagcctctccctcgacgccgccttcttcgacggcctctcgctacagggaggcgggggcgtggcggggcacaagaggagcggctctatggacggggccacctcgccgttcgagggcgagtccgcgccgacgtccgtgctgccggactacgccaagaaggccgtgcccgacgacaggctcgccgagctcgcgctcctcgaccccaagcgcgccaagaggatcctggcgaaccggcagtctgcggcgaggtccaaggagaggaagatcaagtacaccagtgagctggagaggaaggtgcagacgctgcagacagaggccaccacactttcggcacagctcacgcttcttcagagggacacctctggtttaaccactgagaacagggagctgaagctccggctgcaggccatggaagaacaagctaaactccgagatgctctaaatgacgccctgagagaagaagtccagcggcttaagatagccacagggcaggtccctaacataaacgggaatcccttcaacggaggactaccccagcagcagcagcagcaggtgccgagctatttctcacaaccacaggggatgcaatacttcagcagccaccagggccagcatcagcatccgaaccatcaccctcagagttcttcaaacggtggtggccagtccttgagtgactccatggatttcatgtgaggaccgaaggagagacagctcaggagttgcctgagatcacataccaactaaagtactgtaaaaaggttgctgatgtataccatattcagtattattatgatacgcgtcattgtaggttagctagctgttccttgtaccattaatcagaagttcattcatgcatgaattgacaacctgtcattgctttcgtttctggggttcaagtaaaatcgtttgactgcttgacgagttcagtgtcggtgttgccatgtaaagtcgttcttgtaatagtgaatgaatagttcccggttggaactagtggttttttacactgctgaaagccatcgtggttggcaataatgtctcatggtcaatgaaacgtgaaataattctgcctgtaaaaaaaaaacgtggtaacaaatctcaacaagctggtggagctaccaaaatgatccatctgaagttactcagaacaagatgcaatcacagattgattatctttcgctgaaataaaaaaggggcttccgttt

SEQ ID NO: 817 - DNA, 1550 bp, Zea mays
  Clone ID: TF_ZmC562_1
aattcggcacgaggcggaattgaattccggtaggatttgagagcggagcggagcggagaggagaggagaagaaggcggtaggcggggaagatggagatgccggcagggagcggggccccagcgctggcgcggcagggctcggtctactcgctcacgttcgacgagttccagaccacgctcggcggcgccagcaaggacttcggctccatgaacatggacgagctgctgcgcaacatctggacagccgaggagtctaacgccatggctgcggccgccccggccacggccacggccacggcggccgcatccgtggacgcgcacgcgcagcagcagcagcagcagcagcacggggcgcccatccagcgccagggctccttcacgctgccccgcacactcagccagaagacggtcgacgaggtctggcgcgagatcgtgagcctcaccagcggcgaggacgcgcagcaggttgcggctcccgctcccgctcccgcgcccgagcccgagcccgcgcccgcgcccgcgccgctgccggcgcaggcgcaggcgcagcagacgctggggtccatgactctggaggagttcctggtacgcgccggcgtggttcgtgaggacatgggggggcaccagaccctcctgctgcagccgcacgcgcaggggcttttctcccaggggaatgcggtcgcgccgcagaccctgcagctgggaaacgggatggtggccggggtcgtcgggcagggcctcggaggaggggtgacggtggcggctccgacgacgccggtcgtgttcaacgggttgggaaaggtggaggcgggtgatctgtcgtcgctgtcgccggtgccgtatccgttcgacactgcgctgaggatgcggaagggacccaccgtcgagaaggtggtggagaggaggcagcgccgcatgatcaagaacagggagtcggccgccaggtcgcgtgcgaggaagcaggcgtacataatggagctggaagctgaggtggcaaaactcaaggaccagaatgaggagttgcagaaaaagcaggttgaaatgctaaagaagcaaaaggatgaggtcctggagcgaatcaacagccaacatggaccaaaggcaaagaagctttgcctgcgccgcaccctgactggcccatggtagcctgctgaagcttgcacaaaattgaccgaagtcaagatcgtcgggccagatgtgcccgtgtgtatatatcagatgaagtcaagagtactgagtaccccgttacccctgtagaccgccgctacttcagagctgccgttcttgttctgtgacgtgggtagtctgcgcctgacagttcgctgtttaggttcggttgcgcgatcctcacatgaacaatgaggcgtgccatctaatttgtttattaactcactcctatctatggtgagataatgcaagtaacctggagtatgtttggttgatttgccgttttgaaaaatatgctgtgagctgtgtggaaaaacagcggtggcccgtgtggaaaatagaagccgtttgattttacagctaaaaaaaagggcggccgccga

SEQ ID NO: 818 - DNA, 804 bp, Zea mays
  Clone ID: TF_ZmC737128_1
agacaaaaccaccagaagccagccacacatcgatcgagacgagttgatctcagctcaacgacgacctcacccctcgaaggtccccagcagcaagcacgcatgctgcaccagcaccagcaccattaccatggaggagtggctagcctccacagctacctctcgaatccggaccaggcattccacgctcactactaccaccacagcaacatcatcgccacgccgctgccgcccactccgtcgttccaccacctctggccttctacggcccaaaccttcgaacaacccgtcgtccacgaagctccggcggccgtcgccgccggcaacagcccagccgggtccggcagtgccgatgacggcggcggcggcggcacggcggaggctgagcggaggcggcggaggatggcctccaaccgggagtccgcccggaggtcgcgcatgcgcaagcagcgccagctcaccgagctgtgggcgcaggtcgtccacctccgcggcgccaaccgccgcctcctcgacgagctgaaccgcgccgtgaggggctgcagcgacatgcgccgcgagaaggcccggctccagaaggagaagaccgatctcggtaccaagctccagcgcctcacccagccgcagaacgccgccctgccaagctcctcctcggagccgcaaccgcaacacgacgccgctactgaataaattcattcttatcttcgcattttagcttccatatatacggtgcttctgttactatagtatacgaaataaaatatgttttcacaggttgtttctccgctgcgaaaaaaaaaaaaaaaa

SEQ ID NO: 819 - DNA, 420 bp, Zea mays
  Clone ID: TF_LIB3245-007-P1-N1-G2
gtgacactatagaagagctatgacgtcgcatgcacgcgtacgtaagctcggaattcggctcgagtgaaaccatgtgtgagcaccggtagtgacttgaaagttagtggtgcgacatgaaccgaatggccagctaaggacgacaaggaatcgaagcgtgaaaggaggaagcagtcaaacagggagtctgcccggcgctcaaggctgaggaagcaggctgagactgaagaactggctagaagagtagagctactgaccgcggagaacacgtccctccgaagcgagatcagcaggctaacggaaagctcccagaaactaaggatggagaactcggctctgatggagaaactagcggacggtacatcagaccaagcacaagaagcttccgccggccaccagacgacaccaacggcgccatcgtcg

SEQ ID NO: 820 - DNA, 512 bp, Zea mays
  Clone ID: TF_ZmC241156_1
agagagcgcgccgcgccgcggcgatcacggaggaggagcggcggcgcaaccgcatggcctccaacaggctgtcggcgcgcaagtcccgcatgaagcagcagcagcacgtcgacgacctgaccgcggtggcggagcgccttcggcgcgagaacgaggcgatgcgcgccggcgtcggcggcgtcgtgcggcagagcatagagctcgagcaggagaatcgggtgctcgccgcgcacgcgcgccagctgtgcgccacgctcctactgcggaactcccagctccgcctgctcggtgacgtggccggcctaccgctcgacgtgccgctcgtgcccgaccacctcgtgcaactctacggtatgctcgagttctgaggtgtgacgtgagtgcatgaactatttattgttatcgtgcgaattctgctctgtcgttggtgttgcgctatgtttgctgtatgtatcctgtgttgtgctgatatatcatacattctttatgcgaccacaaaccggacgctgggg

SEQ ID NO: 821 - DNA, 920 bp, Zea mays
  unsure (1)..(920): unsure at all n locations
  Clone ID: TF_ZmC32804_1
cgggcgacgctaagctcgccgagctcgcgcttgttgaccccaagcgtgccaagaggattttggcaaaccgccagtcagctgctaggtcgaaagaaagaaagatgcgctacattgcggagcttgaaaggaaagtacagactctccaattagaagcaactacactatcagctcagctggccatgttgcagcgagatacgactggtatgacaagtgagaatagtgatctgaagatacgtgtgcagacaatggagcagcaggttcagctgcaggacgctctgaacgacaggctaagagacgagattcagcagctgaaggttgcaacaggacaggtaaacgccagcattggaaaaacaggaaactctggtatgtcatcatttggaggtaatccacaaagttaccagcgtagccatatacagtctcttctggctgctcagcacctgcagcggctccggatccactcccaacatcagcaacagcagacgcattttcagcagcagcagcagccgcagccgcagctgctgctgcaggaggcgcatccatttccggtggacctaaagatgagaggattttctctgtcatcacatgctcagaacgcaggtgcatcagacagccatgctgccaagagcgaaccctgagatttagcatgtattcatgtgggttgttagaaataataatgtcgctctgttagcgtggtgtctaggtgaacttcaatttgtttgaggtgcttagattttgtgcagcctggagctcccatttggttgtaagcttcagtgctgactgaccggtcatttaccttgcctaatgcttgtacctgggtcctggccatgactttgtgcctggaggatggagccgttcgcgcatctgtgcaagagcagaatgaaattgttctttgggtcctttggaatagtccaaccctngag

SEQ ID NO: 822 - DNA, 653 bp, Zea mays
  unsure (1)..(653): unsure at all n locations
  Clone ID: TF_LIB4764-072-R1-K1-C5
cattgggtacctcgaggccggccgggatcgcgagatctagcgagcgagcgcgcacactgcntggcggcaccaggctacgacgatcgagagagccgccgtgccagcacattgtccattgtccgcgcggcgggggatcgggcggacgcgcacataatatggcgcagctgccgcccagggtcccgaccgcggtgcaccgctggccggagggcggccaccacggcgcggcggcgtgggccgatgacttcgccgagttcgctgcgttgcggcggggcgcgcaccgcaggtccctgagcgactcggtcgccttcgtcgaggtggcgcccgcggccggcgagttcgacaggctcgacgacgaccagctcatgtccatgttccccgacgaggccgccgccggcggcggcggcggcgggtcgtccgcggcagggtccgagaacaacggcggcagcagcgacagttacgccgccgcctccacggagctgatccgggaccccaagagggtgaagaggatccttgccaaccggcagtcagctcagaggtcgcgggtgaggaagctgcagtacctctccgagctcgagcgcagtgtcacaacactgcagaacgaggggtccgcgctgtctccccgtgtggcatttctggatcagcagcgtaccata

SEQ ID NO: 823 - DNA, 550 bp, Zea mays
  unsure (1)..(550): unsure at all n locations
  Clone ID: TF_LIB3354-121-Q1-K6-H1
gcaccacctgcaggcgtcgtaccagcagcccgccgcggcgtcgccggcgacttgctacgggccccggccccggaacgcgctcaccgaggccgagaaggaggcgaagcggctgcggcgcgtgctggccaaccgggagtccgcccgccagaccatcctccgccgccaggccatccgcgacgagctggccaggaaggtcgccgacctctcgtcgcagaacgagaacatgaagaaggagaaggacgtggtgatgcaggagtacctgtcgctcaaggaggccaacaagcagctcaaagaacaggtggcgaggacgacggccaagaaggcgccggcgggatccctggcggcggcggcgtccccgccggcgacgccgccgcggccggggntcctgtncagcgcggcgccgccgccggtgccctncgtctggggctcctggccgccgngcgccgccgccgtcgctgggttcgagctgctcggtcgcccgccgccgccgcctctctgcctgctgccctgcgcgtggtccttcccggtcgtggcggcggccccgcgcggg

SEQ ID NO: 824 - DNA, 1031 bp, Zea mays
  Clone ID: TF_ZmC30857_1
tcccgaacctcgaggccggccggagtggcattttccgtggtcgagtccgtccgtgtctgtcctccgctgtccgctggctgcgatagtgctgcctgctgctctaacccaatccaaggaggatgccgaggagcccgcagctgagcctgagcggctgcagctctctcttctccctgtccagcaccagtacgagccgcgacagcgccgccctgaaggcgccggtgccagcgccaccggcaggcgcggtgcccccacggcgcacccctctcctgtcgctcagcgtcggcgaggaggaagaggacgagggtgaggacgaggaggagtacctgctgggggccggcgccctggatctgcagctgacggggcccggtggcggcagcaacagcagcggcggctacgacgacgagcggaagaacatccggatgatgaggaacagggagtctgcgctgcgctccagggcaaggaagagggcctatgtgcaggagctggagaaggaggttcgtcgcctggtgaatgagaacctcaagctcaagaggcagtgcaaacaactgaaactagatatggctgcactggtccagcaaagcagcagcaagagcagctcccacatcagaagaacctcctcatccactcagctctaggctgctaccaataggaatatgtatgtgaatttaaagccatatatgaccaaggaagaatgggaggaagacgaacaaagctagctagactagactgcagcccctctaatccatggccattcgctgattaatacgataatatctcttatttgttggcttcttctagcttgcttcaatttcctagtacagcagtttatgtagtatttcctagattgttagcgcaaagctgcctttttcacccaaaaaataaaatctaggggggtccgaccccggtggatccaattttagtatagagctcactctctagtggtgtccaggaagtgtcgatccaattttagtatagaggtcactcaaacctctctccatgacagagctttttattcgtttcctgtctttttt

SEQ ID NO: 825 - DNA, 2115 bp, Zea mays
  Clone ID: TF_ZmC874_46
ccggccggggtccgacccggcgttgtgattgggggagtatgaagtgctcacaccatctcctctccattcacatcagcgctccacgcctgcgcccctgaattcccaaatcctgcgcgcctctgccccaaccccgctcgtcgactcctctctgccaaacacgtcggaggaatccttctccggaactcgtcttcgtcctgtctgtcgggctggcgtggagtggagatccatcaccacgtggataggtctcttcttctgctggttcaacgctgaatctgtccttcaatgccttcacaggctctacccctgaagaagttgcagagttagaagctattgccgcattttttgttgaagggaacattttttttgggtcatatccagattgaatacgaaacatgctcgtccttttgggactttaagagaataagaggcaaaaggaacataaggatagaggagagaaataaacaatggggaagggagatgtggctaccaggtcaaaatctcaaaaatcaccagcaatacagaatgagcagagtacacctgctaacccgcccacagcatatcctgattggtctcagttccaggcatactataatgctgctgggacagctccagtgaccccacctttttttcatccatctgtagctccaagccatcaggggcacccatatatgtggggtccacagatgatgtctccttatgggacaccaccaccatatgcagcaatgtatgcacaaggtacaccatatcagcaggcaccaatgccaccgggttcacacccatacagtccttatcctatgcagttaccaaacgggacagttcaaactccaacatctggtgctggtggtacagcgacagataaatcaaataaaaataagcggaaggcttccctcaagagatcaaaaggaagcttaggtagtctggatgttgttgcagtaaaaaataacaagtcaccggcaaagccttcaacttcttcctccaatgaaggttcttcacaaaggtaatttctttattttttttgttatactaacagataaattattgaatccactatctattatacagtgagagtggaagcgggagttcttctgaaggaagcagtacaaattcaaaaagtggttcaagggtgaaggataattctgagcaaggacagggtaatgatgctaggagtaaatgtactcaaagctctgtcgttgagcccacacaaccatcttcagggtctgttgtgcttaaccctatgatgccattttggcctgtgccccctcccatggctggcccagcaactactctgaatatgggagtggattactggggtactcctgcttctgtacccatgcatggtaaagttattgcagcaccgacatcagctccttcgtcaaattcacgtgatattgttctcagtgatccgactatacaggatgggagagaactgaagagacaaaaacggaagcaatcaaatagggaatcagctcgacgctcaagattgcgcaagcaggctgaatgggaggaagtagccaatcgtgcagttttgctaaagcaggaaaatagttcacttaaagaagaattgaaacaacttcaggagaagtgtgatggcttgacctcagaaaatacatctttacatgagaagcttaaagcgctcgaggatgagaaatcaaatggaaattggtacaaggattaaaggctgaaacttctctctctttctgactgctgatataatttggtggtaacctgataggacgacaactaaagaggtattcatatacggtattagacttttgtccgagggggtaaaattgtatcataggatttgacatggttgacggctacagattcttcttccagttgtgctgctgtgctgtgttgtctttcttccctcttcgtgctagatcctacagaagtacaactatgtagaaacccccaggtggtgtttgaagcctggggggattagcgtgtggtattggtatagctgttgtagagctgctcattgagcttcttgacagaaactgaagcgtgctaaagcagtcgtgtgatttacgattcagacggactaattttacggatagtactgtaactgcactaatgaatacaaatagcctttttactggtttcgccttgtat

SEQ ID NO: 826 - DNA, 427 bp, Zea mays
  Clone ID: TF_LIB3236-081-P1-N1-F12
gaaaaaatgcacacagcacaagtccaacaaccatattccttctcgatcttaactttgtactgctactgctaccaccaaatatataaatctatatatttcatttcccttcgccccttcagaattgggtggatgaggttctccgaagtgagctcttggttgggaggaccagtgccgctacctcccgtttcagctctttgcactgcttcttgagcttcaagttgtcatccactagccggcgaacctctttctccaggttctccacgtatgccctcttcctggccctggagcggagcgcggactcccggttcctcatcatcctgatgctcctccgatcgtcgccgctggcctgctgcacctccatgtcgacctcgttgccgacgaagcccgcgagcgagacgggcgtggagggcagcgcgtggccggcgcg

SEQ ID NO: 827 - DNA, 518 bp, Zea mays
  Clone ID: TF_ZmC9417_8
tggccctggcgctgcgggcgcagaccgcgcccttgcccagtcgtccacggcgcaggccagcgcgcgccgccgcgtccgcagccacgccgacaaggagcacaagcgcctcaaaaggttactgaggaacagggtgtcagctcaacaggctagagagaggaagaaggcttatttaactgatctggaggtgaaggtgagagatctggagaagaagaactcggagatggaagagaggctcgtccaccctccagaacgagaaccagatgctccgacagatactgaagaacaccgctgtaaacagaagaggttcaggaagcactgctagtggagagggccacggccaatagcactgaatgacggaaaaatagtaatgaatcatgataaatatatgtttatatggagtggatttggtgagcttgctttgtggccaaaggagggaaccccaaaaactggggtcagacagccaagtgccgacggttcagggaaaaagaacttatggaattaatgcatttgattttaac

SEQ ID NO: 828 - DNA, 769 bp, Zea mays
  Clone ID: TF_ZmC2730_2
cccacgcgtccgatctcggagcttgaacggagcgtcaccagtctccagatggaggtgtcggcgctgtccccaaaagggtcaagaggatattggcaaacaggcagtcggctcagaggtcacgagtgaggaagctgcagtacatctcggagcttgaacggagcgtcaccagtctccagatggaggtgtcggcgctgtcccctcgcgtggccttcctcgaccaccaccgctcactgctcaccgtcggcaacagccatctcaagcaaagaatcgcggcgctcgcccaggacaagatcttcaaagacgctcaccaagaggcgctggagaaggagatccagcggctgcgccaagtgtaccagcagcagcaggtcaaggtggccaccaccggcggcgccgacatcgccaccgccgcctcgccgtcgatgcaggccaggcaagagctgctcgcgtgcgagggcgctgctattcgatagcggaggcggcggcggcggcggcggcgttcacgcccctgttactgttagtagcttaattaacttttgtgcagtctgatcaatacgtgttggcttgtttgtttgctgcttcttaatttaattcgtatgtgatgtattctgctcaccctagcaaaaaaaaaaaaaaaatgcatcgatgccaagttgtgaatgaattgtactattcagttatttggaccggcttagtcggaatatagtgagacggagtttgttggtgtgagttatccgttcttaatttattgttgtttagattgattttattt

SEQ ID NO: 829 - DNA, 2293 bp, Zea mays
  Clone ID: TF_ZmC773_20
acatcaggtctccattcacgagctcttttgcatacaaaaggttcctctataatacgttcacgaatttcttcatacttctctttcgttgctataagcctccatttaaaacatttagcacattggacagtgaatgctccaatagatggcgatattccccttgttatgattgacttctgcaaacggttttcccccagttcatcttgctctttatctcctgcttcagagttgagaacgaccatttgatttgatgcagcttctgaagaaaaaccatcattgtcaaatcgggggccattactatcagaaggcaccacaatatgactgttctttgacgattgaggagatttagaagtttccatcggttttgtacaaattattagagcctgggtaccagcgaacgaagaaatcgatccgagcccggacggatctctaccacgccccgacccagtgtctacgatttgagcatgcagtaggcccccaacggcgggctccgaagatatcgaggtcggggggccgggggcggcgggggaacggggagggagtgctccggcgaagaacagcggggtttacggcggagccgcggaggggagggattgaggatgggagtgcttactcgcgttctccgcccacgcgtccgcccacgcgtccgcccacgcgtccggccccgcatggcaccccaggggcggagagcgacgaggagatacggcggggtgccagagatgggcggcgcgtcggcgtcggcctcgtcgggcgccggcgcggacgagcgtcccaagggggaggacggcaagcaggggcaggtggcggcgggggcgcagcctccagcgggcgggaagaagcgcgggcgcacggcgggggacaaggagcagaaccggctgaagcggctgctgcggaaccacgtgtccgcgcagcaagcgcgagagcggaagaaggcgtacctgacggagctggaggcgaaggccaagggtctggagctccgcaatgcggagctggagcagcgggtgtccacgctccaaaacgagaacaacacgctccgccaggttatagatgttagtggaaaagaattcaaattcacctgggcatctggacgtggcgaattgtgtgatatttatgaagaacgtcagagtggagaggatggaaatgggttgcttctggagtgtggctctacttggcgcaagtgaaccctatagcctgggcagttcctacaaaacatgagggtgatgccagtgaagaagcttctctcgccgatgagacacttgcatcagaagtagtgctaacccggaagaggaaaataggaagctctttgtcagtagagccaaaccatctctctgatgaacttgaaccaaagttggaggatgcttagaacggggagacgtctaactgaaaagtaaaagtgggcagcatcgtgatgccaacttacccccctgccatggttttattggtcctctgcttgtttctcgttttccttgggagtcagcttctctgttttatgtggtcgcacacggccttatttgtagtattacaccacagaagctggctgacccccactgagggagaggtgattgatgcaagcattgtgtatgatccttggacaagggaatcgcgggggtttggttttgtcaccatggctgctactaaggaggcagatcactgcatcaaatatctggattgttctgtgttgcaaggtcaggtcataattgtttagaagtactctacacagaacattttattgttttgtcttcaccaccgagaatccgagatcgcctcccatagcctccacatccataaggtcctgcttgactgcgacgacgtccaggctgatgccctcatcgtggatcgactcgcctcgctctagaaggagtggcccctctggagttgaatatgcagttataaccaatttttaccccttttatcctagaagagttgccaagacacggtataagaccatgataatagactaagagaggatttggctctaattactatatgttttatttatgcagtcccatgagaactttgagtatttgcagattgctttattaatttattaaagttaaagattgtatgtgttgagtatgtatccactcttgttggaagtgtcttgcaattccaatccaaggatgtataaaatactgcatgggctaagtatgtgttttttcatgtatttggagtatatatactttttgttgcttgagaacatgtatgtacactagaagcttgtcaattgtgtgaacttgagttgatccctgtctaacctgagtatatatatatatatatatatattttgttgcttgag

SEQ ID NO: 830 - DNA, 1079 bp, Zea mays
  unsure (1)..(1079): unsure at all n locations
  Clone ID: TF_ZmC2202_4
tcagttttaccgttcactcctaccattcactgcctttgaaggcagaaagaatccaatcacataaagctttatccaattatccatgcccttaaaaactttcaaaaactgttacattcctagaaaaattggtaattccgtctgaagttgcgggaatagaaaccacatataccttttgccattagtttcctttttctatagatctgtcacctttaccttgaatttacatgaaacatggtatgtgacgtcagaagcttaaccgtccatttctgtgatgaactgcttagttaaatttcggtgttgtgatcagaatggtgtcaaaccgggaatcggctaggcgatcaagaaagaggaagcaagcacacttgaccgatcttgaatcacaggtttccaggttaacgtctgagaatgcatctttgctgaagcgactggctgatatgactcagaaatacaaggatgcttccgttgacaataaaaatctaacagttgatgttgagactatgaggagaaaggtccgttcgtcttgaatgcatcacagacctttttctttttgttgtatgagaattcttaactgcatccatttatcgttcgtcatatttttactgngatctgcatgtagtcactggatcaacgttttactgggctctgcatgtaaacgtaaacgcaaagggcagtgaaagtagtattggntgttcatagttcttattttagaacctgcaagttcagttttagtttttaagaccattccagttcacttgccggtgttgctggcctgtcgtttgaccaaatgacgatcgtcggggatgcaatgtattccgagaccgggtcaacgccattctcagatcctgaagctcttgccgataggtaaaggttgcccctgttctgtcctgtgatgaccacccgtgtgatgctggtaatggaagttgtagttgtagcccccatgcgcctgggtggggtctccccagtgttttgtcccctattttgaaggttaataataattgttgggaaaaaatctccgctctttaagcccaaaaaaaaacaaaannnaaannnnnttnnnnnaggggattaaacaanggggt

SEQ ID NO: 831 - DNA, 638 bp, Zea mays
  unsure (1)..(638): unsure at all n locations
  Clone ID: TF_ZmC745477_1
aagcccactttccctccttcctagctagctcatcgaccgagtggtggtaaacatgtaccctgctgctgagatcgctagcgttccatacttatctcctgcggcctctttcaagcctcactaccatgtagctaccgacgacggcggcggcttcctctaccagcagtacagcaaccttctgctgcctcaccctccgtcctactaccaagaagttgcttacgaccagctggtccttgaagccagcttcccggttggtggtaataacagatccaattcggagtcagacgagtaccaacgcagtgtcgcggaagagcgcaggaagagaaggatggtatccaacagggagtccgcccgacggtcgcgcatgagaaagcagaagcagctgagcgagctctgggcgcaggtcgtccacctccgcagcaccaaccgccaactccttgaccagctgaaccatgccatcagagactgcgaccgtgtcctccgtgaaaactcccagctgagagatgaacagaccaaattgcagcagcagctcgagatgctccctgtagagaccacaagagagtggtgccatgagtcctggctcttgaagtatctactangattccaagtggtagatgagataatatgagatttaaaccaag

SEQ ID NO: 832 - DNA, 526 bp, Zea mays
  unsure (1)..(526): unsure at all n locations
  Clone ID: TF_LIB3960-021-Q1-K6-G3
gaattcaaaaaaaaccttttgccaggtatacataacaatattagtcagcaatacaaattgtaaatttgagtttatccactatttcagatacagtgaactgggtcacagcctacatcttcagtcacatcttgacttctaaaagataagccaagatagatctgaaacaggaaacacccacacacaaggttggcatcaacattatcacaacctggtaacaattaactgcaataaagtaaggagtctgcacgcagatctaggttgcgtaaacaggctgaatgtgaggagttggctcaacgtgctgatgttttaaagcaggaaaatgcttcacttagagatgaagtaaaccgtatcagaaaagagtatgaggaacttctatcaaagaataattcactaaaggaaaaacttgaaggcaaacaacacaaaactgatgaggcgggacttaacaacaagctgcaacattctggcnatgacatccagaaaaaaggagactaatngagctttcatgcaatgcttgcgtagggtgggc

SEQ ID NO: 833 - DNA, 476 bp, Zea mays
  Clone ID: TF_jC-zmX700222555b1
cggatgcgtgggcgaggtggtcccgtgccccccgcggtatctcccaggcctgtgacggccagcgcgttcgggaagatggagggagacgacttgtcatccttgtcgccatcaccggtcccgtacattttcggtggtgggttgaggggaaggaagccaccggctatggagaaggtggttgagaggaggcagcgccggatgatcaagaaccgggagtcggccgcgaggtcgcgccaaaggaaacaggtaaatacatttgtcggcgggttctgcctttacctagttgtatcaattcgtcacgtttcctgcttatattactagttatactgacacgtgtaacggtgtaactttaatgtctatgttttatttttttcctcccaacatgttaagtatttcgcactaatggcgttaagaattctgctgggccatgtgtctagtgttggcccatttacgtgtacacatatactacaagtgtgtgt

SEQ ID NO: 834 - DNA, 1705 bp, Zea mays
  Clone ID: TF_ZmC491_4
acaactagacatcgtaccacccaggtgatctcgcgcgccactgcctccttccatcccttagccccagctttactctcccctcccgcgcccagatcccgaggctcctacccctcgatcgccgccttccagcggccgatccggcgctggctcgcggcccccgacaggggttttgctttatgctggttcatttgtctacggacaatggactagttgctgcactgtttctgtgattcaccatgggaagcagtggagcagatacaccgtctaaggagcagcagccacctgctacctcaggtgctgcaataccacctgtttatccagattggtctagcttccaggcatatcccccaatcccaccacatggattcttcccctcacctgtggcatcaagtccacagggtcatcctttcatgtggggagctcaagctatgattccaccttatggaacaccgccaccatatgtcatgtacccccctggagtatatgcccacccatctatgcccccgggtgcacatccatttactccttatgccattacttctccaaatggcaatgctgatgctactggaactactgctgcagctggtaatactgatggcaagccctctgaaggcaaagataaaagtccaacaaagcgatccaaaggaagtttgggcagcttgaacatgcttactggaaagaatcccagtgaacatggtaagtcctcaggtgcatcgggtaatggagtcacttctcaaagtggcgaaagtggcagtgacagttcaagcgaagggagtgaaggaaattctcacaatgattcacatcacagggaaagtggacaggaacacgatggggatgttcgaagttcccggaatggtgtatcacgtttgcaatctgagggaaaattgaaccaagctatggcaatcttgcccataccatcaagtggcccagcaactgatccaactacaaacctaaatattgggatggactattgggccaacacagcaagctctgctcctgcaattcatggcaaagcgacgtcaacaacagttccaggggctgtggtcccagcagagcagtggacacaggatgaacatgaactcaaaaagcaaagaagaaagcagtccaatagggagtctgcacgtagatctaggttacgtaaacaggctgaatgtgaggaattggctcaacgtgctgatgttttaaagcaggaaaatgcttcacttagagatgaagtaaaccgtatcagaaaagagtacgaggaacttctatcaaggaataactcactaaaggaaaaacttgaaggcaaacaacacaaaactgatgaggcaggacttaacaacaagctgcaacattctggtgatgacagccagaaaaaaggaaactaatgctatcatgcaatgcttgcctacattggtcctaactagattattgggaggtgcaattgtagtatgcacattaactccttactttattgcagttaattgttaccaggttgtgataatgttgatgccaacctcttgtgtgggtgtttcctgtttcagatctatcttggcttatcttttagaagccaagatgtgactgaagctataggctgtgacccaattcactatatctgttagaaatagtggataaagtcaaacttacaaatttgaagtgctgactaatattgttatgtatacctggcaaaagactggttttcttttaattcagtctggttgaacgg

SEQ ID NO: 835 - DNA, 1921 bp, Zea mays
  Clone ID: TF_ZmC491_5
gggccggggtcttcttcgccccgccacccgtcctgcacactcacaactagacatcgtaccacccaggtgatctcgcgcgccactccctccttccatcccttagccccagctttactctcccctcccgcgcccagatcccgaggctcctacccctcgatcgccgccttccagcggccgatccggcgctggctcgcggcccccgacaggcaccctacccaccgaccggatctagccgccgcgtggtttttgaattgagctcccctcgcgtcgcatggcgctggcgcgggccgcgcgggttcctctctgggctgctgccggatcgacggcgatgctagggtttaggtgtggttcgtgtctagttagctgagtggcgcgtacgcgtttcgttttgtcttggggagccaagcgtggcccgaaatttatctggagcaggttttgctttatgctggttcatttgtctacggacaatggactagttgctgcactgtttctgtgattcaccatgggaagcagtggagcagatacaccgtctaaggagcagcagccacctgctacctcaggtgctgcaataccacctgtttatccagattggtctagcttccaggcatatcccccaatcccaccacatggattcttcccctcacctgtggcatcaagtccacagggtcatcctttcatgtagggagctcaagctatgattccaccttatggaacaccgccaccatatgtcatgtacccccctggagtatatgcccacccatctatgcccccgggtgcacatccatttactccttatgccattacttctccaaatggcaatgctgatgctactggaactactgttgcagctggtaatactgatggcaagccctctgaaggcaaagataaaagtccaacaaagcgatccaaaggaagtttgggcagcttgaacatgcttactggaaagaatcccagtgaacatggtaagtcctcaggtgcatcgggtaatggagtcacttctcaaagtggcgaaagtggcagtgacagttcaagcgaagggagtgaaggaaattctcacaatgattcacatcacaaggaaagtggacaggaacacgatggggatgttcgaagttcccggaatggtgtatcacgtttgcaatctgagggaaaattgaaccaagctatggcaatcttgcccataccatcaagtggcccagcaactgatccaactacaaacctaaatattgggatggactattgggccaacacagcaagctctgctcctgcaattcatggcaaagcgacgtcaacaacagttccaggggctgtggtcccagcagagcagtggacacaggatgaacatgaactcaaaaagcaaagaagaaagcagtccaatagggagtctgcacgtagatctaggttacgtaaacaggctgaatgtgaggaattggctcaacgtgctgatgttttaaagcaggaaaatgcttcacttagagatgaagtaaaccgtatcagaaaagagtacgaggaacttctatcaaggaataactcactaaaggaaaaacttgaaggcaaacaacacaaaactgatgaggcaggacttaacaacaagctgcaacattctggtgatgacagccagaaaaaaggaaactaatgctatcatgcaatgcttgcctacattggtcctaactagattattgggaggtgcaattgtagtatgcacattaactccttactttattgcagttaattgttaccaggttgtgataatgttgatgccaaccttttgtgtgggtgtttcctgtttcagatctatcttggcttatcttttagaagccaagatgtgactgaagctataggctgtgacccaattcactatatctgttggaaatagtggataaagtcaaactttcaaatttgaagtgctgactaatattgttgt

SEQ ID NO: 836 - DNA, 1675 bp, Zea mays
  Clone ID: TF_ZmC13853_2
gtcttgaggctttgagctctcctcacctcgtatccgtgtctttctggtgctgagctgagtctgagagacaggtaaggaggaggagggtggagatggaattcaagaactgcgggtcgtcgtcgcagccccggccggcggtggtagtgggcgaggaggcggcgttggcgagacagggatcagtctactcgttgacgttcgacgaattccagagcaccctcggcggggccgccaccggcggtggcggtggcggcagcatccccaagggtttcggttccgtgaacatggacgaactgctccggagcatctggaccgcagaggagacccaggccatggcctccgcttctggacgcaggagcgggtgcggggatgccgcccacgccgctgcagcggcaggggtcgtcgctcacactgccccgcatgctcagcaccaagacggtcgacgaggcgtggagaaatctcgtgcgcgacgaaccgctgcagggggcggacggcggcgggcaccagccgcaccaccgccagtcaacgctcggggagatgactctggaggagttcttggtcagagctggcgcggtcagggagaaccccgctccggctcctccagcgccaccacccatgatcccgccgcggccggtacctgtcgcccctaaaagctccgccttttttgggaatttaccgggtgccgacgccgacaccgccgcagctgcggcagcgctggggtttgcaccggtcggcatgggggatctggcccaaataccgcccagggcagcaggcatgggaggcggcgccatggctgtgcaagcagcggtgaaccagcttgattctggcgggaaggggtacagcgacctgtcgtcgccgacggagccgctcccgttttcgtttgaggggatgattcgagggaggaggcatgggggcggagtagagaaagtggtggagaggcggcagaggaggatgatcaagaacagggagtccgccgccaggtcccgagcgcgcaaacaggcttatactatggagttagaagctgaagttcagaaactcaaggagcagaatcaggaactggagaggaaacaggcagagattatggaaatgcagaagaacgagctaccagaaatgttgaaggatccattcggacggaagaagcgtctgtgcttgcgaagaacattgactgggccttggtgatgactatctgaaacagcagacgagtcgctgcatacctgcagtggtgcctgggatctgtacacaatttgtctcctatagactagcgatggacgtaacgtagtggggatgattgtactgttaccgcttatagtggagtcgggaaactgacacatgtagattatgttagtagagaaccaaatggagtgaagccggccgcgcaagactcggcggcttcggccatcctccagagcttgtgtagagttgcctagctttgcatcttgccagagccagcacgtcgtgtagagattggacggttttaaaagatcggtggctgggtgtaagtaggttggtgggattacaagcatgggcatggcgacgttcaggatgcaaccggcttgacgactgtacgtacatctgatggctgtagagctgtagtatgcaaactgtcccgctgctgcttgtgtgtaacggtgaaaccagatgaatcggttatttgtgtgagaaaaaaaaaaaaaaaaaa

SEQ ID NO: 837 - DNA, 1544 bp, Zea mays
  Clone ID: TF_ZmC1437_1
gcctgcgcgcccggccgcccctccccttcgggccccccgccgcgcaccctcgcggaactgggaggccggtgcggtcctcccccccttctgcccgttctctccccgtgtgggcctgcccccttccggcgcgacgagacgccttatgcttgttcaagacgtcaggtgttggtatttgggttgcaattgagtgattgggaaacctgactggacagaagcattgttggtcaaccaatgggaagcaatgaccctagcacaccctccaaggcttcaaaggcatcagaacaagtacttgaaacagtggatcaacctccagctaccacatccagtggaacagtttcagtttaccctgaatggcccagctttcaggcataccaagcaattccaccacatgggttcttcccccctaccgttgctgcaaatccacaggcccattcatacatgtggggagctcagcccatggtaccaccttatgggactccaccaccaccttatgtgatgtatccacctggagcagtatatgcccatccctctacacctcctactatgcatccgtttagtcattaccctatgccaacaaatggacatgctgaaactcctggaaccgcgccaagtgctccagaaatgaatgggaaaagtgagcctggcagaacatctgctccatctgccaatgggattacctcgcacagtgagagtggaagtgagagtgagagtgaaggaagtgatgccaattatgaaaatgattcacattcaaaggacaatgatggaaaggaagatggcaattctcagaatagcatatcttattcagcatcacaaggagtgttaaaccaaaccatggcgatgcttccaatacaaccgggcgcaatggttggaggagtttctagctccacagctaacttgaatattggagtgcactactgggaagctccaggttctgcagctgtctctgcaacgcatggcaaagcaccagctggttcagctcggggagaccaatgggatgaaagggaactcaagaagcaaaaacggaagcagtctaatagagaatcggcacgcagatcccggctgcgcaagcaggctgagtgtgaggagcttgggcaacgtgctgaaactctgaggtcggaaaactcgtctctcagggccgagcttgaacggatcagaaaggagtacgaacagctactttcgcagaacgcttcactcaaggaaaagctggggggcagcagtgacccgattcctgatatgaatgaacagaacgacggcaacggcagcgacaagaagcaatctgattccgatgcccagcctgggagcgagtcttgacccgtttagctcaggatccttgggaatgcacattgctatttattttctcgaacatggttgaacagaacataggagaaaaagaattgtttatgtaactcttaccccttgactgcctaatgtctctgacggcatgtatataatgtatgccctcactgctgaactagtactagtaattgaggaattgcagatattgacagctaaaaaaagggcggccgctcgcgatctagaactag

SEQ ID NO: 838 - DNA, 808 bp, Zea mays
  Clone ID: TF_LIB4739-086-R1-K1-F4
gctttgcccaagtgctcgctcgccggggccgcctttccttttgggccgcccgcacttgccatttcggagagagctagcggctagcgcagcgcattatttgccttcccgtcctcgcgccgattccatcccgcgaggctagctgctccgtcgacccgtctgtcgtttactcacgccgccggctcttgactctgccgccttgcctcggccagcatcgccggcagcgccgtctcgccgccggatacatggcgtcggcgtcgccggcgcagttcgcggcggcgcccctcaggatggggtacgggaggccggcgccggcgccgcccccgcccgtgatgggcatgtggagcagcgagccgttcagggtcgacagcggcagcgcccacgccaccagcgcgtccaccgtcaacaccaagctggaggagacaaggttagaagacgacgcacaggtagcacttgagccggcaagaagtacggagcaggaaaccagtaggccgccagagagggcccagagaaggctcgcgcagaacagagaggctgctcggaagagtcgcctgcggaagaaggcctacatccagcagctagagacaagccgcatgaagctgtcgcagctagagctagagcttcaacgggcgcggcagcagggtgcatatgcgaatagtgggagcatgggagactcggctctcggctacagatgcccgatagatccaggtgtttctgtgttcgagatcgactacagccactgggtggacgagcagaaaaacacacggcggagctgacgtcggcgctccaggggcagcagacatcggagctg

SEQ ID NO: 839 - DNA, 461 bp, Zea mays
  Clone ID: TF_ZmC874_33
atcagctcgacgctcaagattgcgcaagcaggctgaatgggaggaagtagccaatcgtgcagatttgctaaagcaggaaaatagttcacttaaagaagaattgaaacaacttcaggagaagtgtgatggcttgacctcagaaaatacatctttacatgagaagcttaaagcgctcgaggatgagaaatcaaatggaaattggtacaaggattaaaggctgaaacttctctctctttctgactgctgatgtaaggttacttgtgagctgccgttaggcttacagaataccaactctgattgccggtgtaatgttctccatattttttttccagataatttggtggtaacctgataggacgacaactaaagaggtattcatatacggtattagacttttgtccgagggggtaaaattgtatcataggatttgacatggttgacggctacagattcttcttccc

SEQ ID NO: 840 - DNA, 1799 bp, Zea mays
  Clone ID: TF_ZmC9417_1
ggagatagctagggaagggcaaatctgcagggcctgagagggtgaggtagagcgcgccagccagaatgcaggagcaggcggcgagctcgcggccttccagcagcgagaggtcgtccagctccgggcaccacgtggacatggaggtcaaggaagggatggagagcgacgatgagataaggagagtgccggagctgggcctggagttgccgggagcctccacgtcgggcagggaggctggccctggcgctgcgggcgcagaccgcgcccttgcccagtcgtccacggcgcaggccagcgcgcgccgccgcgtccgcagccacgccgacaaggagcacaagcgcctcaaaaggttactgaggaacagggtgtcagctcaacaggctagagagaggaagaaggcttatttaactgatctggaggtgaaggtgagagatctggagaagaagaactcggagatggaagagaggctctcgcgatctagaactaccggacgcgtggccgggcccgcactcctacggcgctgctcctcttcctgtgtctctctcgtctcccaacgacgcgattggcgattccatttctaccccgagacctccagccgtccgcccctgaaccctcagccttctccgtcccgcctcggcactcgacggccgccggcacacaccgcgcagtctcgagacaggaaccggaggaacgaggatggaggatgactcgccgctgacgaagacgatgaagggtgcggtgacaggactcgccgcggggaccatctggggcaccgtcgtcgccacctggtacgacgtgccccgtgtggagcgccacgtcgcgctccctggccttatccggacgctcaagatgtgcggcacctacggggccaccttcgccaccatcgggggcctctacatcggcgtcgagcagctcgtgcagagccagcgcaagaagcgcgacttcgtcaacggggccgtcggcgcgttcgttgccggagcctctgtctgcggctacagaggaaagagtattcagtcagccctcatcggaggctcctgtctggctttcacatctgctgtgctggacattggcggcaatacgaccagagttgacaacggcaaagagtactatgcctacacaactgagaagaagcctgcaaattgattccaagtctgcacttctagcaaacaatcttgcacgccatcaactcagtgaatttgaagctgatgtgcagttttatgtttgttttgctgatgcaattagttcttaagcaaatccatggcaacttgtttatcgctgatgcttgagggatggaaatgacactcagaataaatctttgatttgctttcttgtgatcgttgatcacattaaacgcagtggcgcgatatactgtgtaattgtctattttcccgtagtaagtattgataggaacgttgacctgataaaatagataatctaattttggtttaaaaaaaaaaaaaaaaaaaaaaaaaaaaaaaatacctccaccctccagaacgagaaccagatgctccgacagatactgaagaacaccgctgtaaacagaagaggttcaggaagcactgctagtggagagggccacggccaatagcactgaatgacggaaaaatagtaatgaatcatgataaatatatgtttatatggagtggatttggtgagcttgctttgtggccaaaggagggaaccccaaaaactggggtcagacagccaagtgccgacggttcagggaaaaagaacttatggaattaatgcatttgattttaacatggtttacaaaaaaaaaaacaaaaggcgggcaa

SEQ ID NO: 841 - DNA, 908 bp, Zea mays
  unsure (1)..(908): unsure at all n locations
  Clone ID: TF_ZmC59181_4
gtccctngatgttggaccaagtgctattttggagtcatactctgatggccacatttcttcaccgatgatgggtgcactttctgattctccgatgcctggtagaaagcgtggttccccaggagatgtggctgataagttggtggagagaaggcagaagaggatgatcaagaatagggagtcagctgctcgttcaagggctaggaagcaggcatacactaatgaactggaaaacaaggtttctcgattagaagaggagaataagaagctaaccacgttaaaggagttggaaaatatacttttctctgagcctcttccggaacccaagtaccaactgaggagaaccggctcagcgactttctgattgtatgcagaatatcttgttttgctgtaggttgtaagtcctgtagcttgtaagtttttttgtctctttggtttagaatcatttgctagcttgggagtttttgtttatcctagctcgatggtttgctctctccctccctccctttttctagactagcaggagccgagcatgtgctgtccgaggccttgctaccagtatagtatgtaaaatcttcaggacacatgtaggtggtcggagcttgtttacatggtgtgacttaacagatggatagtatgggagccctttctttggtaaccggagtttcctgtagctagtaagtttttttgtctctttggtttaaaatcatttgctagcttgggagtttttgtttatcctagctcgatggtttgctctctccctccctccctttctctagactagcaggagccgagcatgtgctgtccgaggccttgctaccagtatagtatgtaaaatcttcaggacacatgtaggtggtcggagcttgtttacatggtgtgacttaaggggtgtttggttgctcccgcta

SEQ ID NO: 842 - DNA, 818 bp, Zea mays
  Clone ID: TF_ZmC585007_1
cttctcctcatctctacctgcttatgcattagagcccccggagttgccttcgattcgcagctaagtcctgctttctttctcccttcccgttcttacgtttcagtccctgtagcttcttttttccttagagtgtactccccgttccgttgcaaataagcccctgagctctgtcacattctagcctcgactccttggcctcgggaggagttcgtcgcagatccgatctagagagcctccccgcaccacccatgtttaccttccccttcctctgacggccgccgccccccgatgaagctgcgcgttcgctgccgctcccactccttctccgtcgccttcctctactggttctacgacttctcatgaactcctcgcccctcgagaccgccgcatatccatcctgcctctagttgatttgtagatctagctccgtttctccccctttcttgccttcttccttcccaccatcacagaaaagagaaattttttccggttcttggatcgagaacccgaccatgtcgtcgccatcgcgccggagctccagcccggagagcaacatcgacggcggcagcggcagcggctccgccggcgacgagcgcaagcgcaagaggatgctctccaacagggagtcggcgaggcggtcccgcgcgcgcaagcagcagcggatggaggagctcatcgccgaggccagccgcctccaggcggagaacgagcgcgtggaggcccagatcggcgcctacacgaccgagctgagcaaggtggacggcgagaacgccgtgctccgcgcgcgccacggcgagctcgccgggcggctgcaggcg

SEQ ID NO: 843 - DNA, 1815 bp, Zea mays
  Clone ID: TF_ZmC1757_1
tttctttttttttgcctctccagaagtttccgcagggaggcacagcaagagagagagcccagcactagataagtagggggggaaagaagagcatccaaccggggcgtactcctcgatctccttcaagcagctaacataattaactcatgggtgcatagagatatgccgccgacgacccatcatatctatgggtccctccccttgcactgcatctccttcaattcctagtgtttgcttctcccttccttgacctttgcttggaaccattgattgatagttacttattattgggcatggagcacgtcatctcaatggaggagatcctcgggcccttctgggagctgctaccaccgccagcgccagagccagagccagagcgagagcagcctccggtaaccggcatcgtcgtcggcagtgtcatagacgttgctgctgctggtcacggtcatggtggcggcgacatgatggatcagcagcacgccacagagtggacctttgagaggttactggaagaggaggctctgacgacaagcacaccgccgccggtggtggtggtgccgaactcttgttgctcaggcgccctaaatgttgaccggccgccggtgatggaagaggcggtaatgatggcgcctgcggcggtgagtagtgccgtagtaggggaccccatggagtacaatgccatactgaggaggaagctggaggaggacctcgaggccttcaaaatgtggagggcggcctccagtgttgtgacctcagatcaacgttctcaaggctcaaacaatcacactggaggtagcagcatcaggaataatccagtgcagaacaagctgatgaacggcgaagatccaatcaacaataaccacgctcaaaccgcaggccttggcgtgaggcttgctactagctcttcctcgagagatccttcaccatcagacgaagacatggacggagaagtagagattctggggttcaagatgcctaccgaggaaagagtgaggaaaagaaaggaatccaatagagaatcagccagacgctcgagatacaggaaagccgctcacctgaaagaactggaagaccaggtagcacagctaaaagccgagaattcttgcctgctgaggcgcattgccgctctgaaccagaagtacaacgacgctaacgtcgacaacagggtgctgagagcggacatggagaccctaagagctaaggtgaagatgggagaggactctctgaagcgggtgatagagatgagctcatcagtgccgtcgtccatgcccatctcggcgccgacccccagctccgacgctccagtgccgccgccgcctatccgagacagcatcgtcggctacttctccgccacagccgcagacgacgatgcttcggtcggcaacggtttcttgcgactgcaagctcatcaagagcctgcatccatggtcgtcggtggaactctgagcgccacagagatgaaccgagtagcagcagccacgcattgcgcgggggccatggagctcatccagacggcgatgggatccatgccgccgacctccgcctccggatctacaccgccgccgcaggattatgagctgctgggtccaaatggggccatacacatggacatgtattaggcactgcgggtttcgtgatcgctgggaacattttatttgcaggcgtcgctgaataaggctggttgtctcgatctcccttgacatgaaatccaaataactcacaattaaccatgagtgttccgtttggtcccagaaaaaaaaaaaaaagcggcctttcgaaggtattgttaatcataatagtgttgttctgtacttc

SEQ ID NO: 844 - DNA, 1588 bp, Zea mays
  Clone ID: TF_ZmC1757_2
cttcaagcagctaacataattaactcatgggtgcatagagatatgccgccgacgacccatcatatctatggttacttattattgggcatggagcacgtcatctcaatggaggagatcctcgggcccttctgggagctgctaccaccgccagcgccagagccagagccagagcgagagcagcctccggtaaccggcatcgtcgtcggcagtgtcatagacgttgctgctgctggtcacggtcatggtggcggcgacatgatggatcagcagcacgccacagagtggacctttgagaggttactggaagaggaggctctgacgacaagcacaccgccgccggtggtggtggtgccgaactcttgttgctcaggcgccctaaatgttgaccggccgccggtgatggaagaggcggtaatgatggcgcctgcggcggtgagtagtgccgtagtaggggaccccatggagtacaatgccatactgaggaggaagctggaggaggacctcgaggccttcaaaatgtggagggcggcctccagtgttgtgacctcagatcaacgttctcaaggctcaaacaatcacactggaggtagcagcatcaggaataatccagtgcagaacaagctgatgaacggcgaagatccaatcaacaataaccacgctcaaaccgcaggccttggcgtgaggcttgctactagctcttcctcgagagatccttcaccatcagacgaagacatggacggagaagtagagattctggggttcaagatgcctaccgaggaaagagtgaggaaaagaaaggaatccaatagagaatcagccagacgctcgagatacaggaaagccgctcacctgaaagaactggaggaccaggtagcacagctaaaagccgagaattcttgcctgctgaggcgcattgccgctctgaaccagaagtacaacgacgctaacgtcgacaacagggtgctgagagcggacatggagaccctaagagctaaggtgaagatgggagaggactccctgaagcgggtgatagagatgagctcatcagtgccgtcgtccatgcccatctcggcgccgacccccagctccgacgctccagtgccgccgccgcctatccgagacagcatcgtcggctacttctccgccacagccgcagacgacgatgcttcggtcggcaacggtttcttgcgactgcaagctcatcaagagcctgcatccatggtcgtcggtggaactctgagcgccacagagatgaaccgagtagcagcagccacgcattgcgcgggggccatggagctcatccagacggcgatgggatccatgccgccgacctccgcctccggatctacaccgccgccgcaggattatgagctgctgggtccaaatggggccatacacatggacatgtattaggcactgcgggtttcgtgatcgctgggaacattttatttgcaggcgtcgctgaataaggctggttgtctctcccttgacatgaaatccaaataactcacaattaaccatgagtgttccgtttggtcccagtttcgaaggtattgttaatcataatagtgttgttctgtacttcaga

SEQ ID NO: 845 - DNA, 1263 bp, Zea mays
  Clone ID: TF_ZmC3114_2
cccacgcgtccgcccacgcgtccgggaaaggcaaggggaagggcgggggcgcgtcgcctgagaagggcagctctggggcgccctccggtgaggacgactccaggagcagtgacagcggcagcgatgagtcgtcagagacgagagatgatgacactgaccataagggttcatctgcgcccaagaaaaggaaatctggtaacacgtcggctgaaggtgaaccgtctcaagctgctgttgtgcgctatgctacggttgagtcgccatatcccgcaaagggaaggtctgccggcaaagcttccagtgtctgcacctggcagggcagcgcttcctagtgccaccccgaatctgaacattgggatggacatttggaatgcttctcctgccttggctgttcctgcagtgcagggggaagcgaatcctgggttggcgcttgcccgacgtgatggcgttactcaactggatgaacgtgaattgaagagggagaggcggaaacaatctaacagggagtctgcaaggagatctaggttacgcaagcagcaagagtgtgaggaattagccaggaaggtagctgacctaacaactgagaatagtgctctcagagcggaacttgacaacctgaggaaggcttgccaagacatggaagcagaaaattcacgtctattggtgagcacggtaccaagtgtcacaaccacactgggaatgagcatcgagccgccaaaggcgcagcagcatcatgacgacgagggccagctccacaagaaatctagtaataacagcaacgggaaaggaagccacaaaccggaggctaacactaggtgagagacaggtgaatgagaaagtgacagagatgagatgaggtgtttcctatctaaccacaacacccatcatcaaccagtgcgttttcacagcccgctggggggccatgtagagtcgccccccactgcagccatgtattatttatggctcgccgcggtgtgcgttgtgtgtttttttgtgtgtgtgtcgtgtaaacctattgatgtagctattgtaacaaaaacctagagagcctagaatttttatgtctgctaactcctgatgaggggggatgtaaccggccaatttggtgcctggtcgatcgtttagatgaaatgcgagcaaatatcatttgatagcccgcctcacaaaaaaaaagttttggattttttttgcgactttgcgggagtcttttatacaggctattgaatttttaaaaaaaaaaaaaaaaaaaaaacccaaaccaag

SEQ ID NO: 846 - DNA, 523 bp, Zea mays
  Clone ID: TF_LIB4740-086-A1-K1-E10
acctcgagccggccgggaaagtgttggtgctccggcccggacctctctagctcgtctccttactaatagctagctatccgtcatggcggccaactaccaccactaccagatggcggtgcacgcggcggctgcggcggcggcgtggaggagggagccggacagcccgcagctgagcttcgtgagcgggtgcagctccctcttctccatctccacgctgcaggacgacgacgacgaccgagccgccgccgtcgtcatcgccgccggccacgcgctgccctccacgcccgtctcgctcgcgggcttcgtcgccgacgaggtcgacatggaggtgcagcaggccagcggcgacgatcggaggagcatcaggatgatgaggaaccgggagtccgcgctccgctccagggccaggaagagggtcagtatagtaaactcactacacaaaaacatgtacgtcggtctgtactataaagtatatatatacaaaacagatcgtacgtttgtatttggatacagtacgttttcg

SEQ ID NO: 847 - DNA, 1526 bp, Zea mays
  Clone ID: TF_ZmC3533_1
cctcgaggccggccgggcatcattttcataaggggaggttctgcccaagttttctcctgtgacgacgaccatcagttttccaggggggagattctgccaaaattttctgcactgaccatcagtcttccaggggaggttctgccaaaattttcttctctcactgtcacttctccaaggccaagccctgccaaaatttccttcatatatcacatgcatcgtagacatacagacaataaactctaatttgcaaaggtaacaaaaaaaagagagagagtgctttcctccttggccttgatggtaggctagtagagaaaaccgcgcgcagcatctgtttacatgttgttgctcgtcctgtccgagcaccttctttccagatttatggtcggttctgccctaacccgccttgtccagtccttctctgttgttttcctctactggttttatgtcttctcagtaagccgccagtagttggactcaccttttcaagttatctaggcatttcctatatatttaccacatataaaaattatactaaggcagtaacaaaagaggtgcctttatatctgacaaacagaagggagtgaaaaagtttagattacacctcagtttgcctgtggtgacaactatgtcaagtggcacttcgtccggatcgagccggtgggtccaaagttctagatccgaggatgacctagatctccaggcccagatggagaggaggagaaagcggaggaaggagtcgaatcgggagtcagctcggaggtctaggcaacggaagcaagaacaccttgacgacctcacctcacaggtaaatcagctgaaggaccagaacaagcagctcagcatggcactgagtataaccagccaaaaccttgtggcagtgcaagcgcagaactctgttctgcagacccagaagatggagctggacagcaggctgggtgccctgacggagatcctctggtacatgaactcaagcaccagcaccagcactgctcctacaaatccagccatagcgaacgacttcacagcatggagcagagcctctgatattcttggtggaaccagctacagcgccatagacctgtaccaatgcttctagctctaagctctagctctagaagagagaaggtggctgtggcatatgacatagtggtagggccaggaagaaaggaggcgggcaggcatcaagttctgttcaatcgtgtggggcctttgtgtcactgttgatgtgtgcagtgtgtgcttgatgcttctccctccactgtttattttcgaggcgacggcgatgttttggtttggtagagactcaaggacggacaaaatggcagaaagttgccttggctttgtgtgacgtaaatgcagttgttctccggtatttatatggcaaataatattgggccagctagtgaaaaagacaggcagatgatttgatgtggctcttgatatatagggaaataatatgcgtaacgatgattataatgtttattaagatgtcgatttgatgtcaattgatatccgtttccagtctc

SEQ ID NO: 848 - DNA, 696 bp, Zea mays
  Clone ID: TF_ZmC245141_1
ggcaggttcatacatggctagtgagtggcgcgctcagccattgtctattgctacaggtgctactttggattcaatttactctgatgaccagattacttcgccatcatttggtgcactttcggaccctcagacacctgggcgcaagcgtggtgccttaggggaggtagtggataaggtggttgaaagaaggcagaagaggatgataaagaatagggaatcagctgcgcgatcaagagcgagaaagcaggcttatactaatgaacttgaaaacaaggtattccgtctagaagaggagaataagaggctaaagaaacagcaggagttggatgagatactgagctctgctcctcccccagaacccaaatatcaactcaggagaacgggttcggctgccttttgagtttcggcgctgacaatgctcatagtgatttttgtacattatacaaggattctactttatatggtttccttccttttgtattagaaacatttgatagattgagggtatagctttttcccggcccggtaggtcagtgtatgtaggtcgctagcaagctgtagcatgtcctggcggatcatttccttggtgtctgtcagtgtgtacatcttctagacacatgtctaagtctgagagcttccttatacgagaaggtattcaggtatgtgttgcccaggtgtctcctgctgttctgtttc

SEQ ID NO: 849 - DNA, 1104 bp, Zea mays
  Clone ID: TF_ZmC773_12
acacagactctttctctctcctcccctctctcgtcctttctctctcgtccgatctgcatctgcttttctccccccttgtctgtctccctcctgtccgtggcgtgcgcaaagatttgattttttttttctcggggaggagccggagtccgagcagcagtggcggctggagggaggagatcctgatctgttgtcgcagcggggaggggaggaccggaggaggaagatggctgcgcaggagcaggagcaggagaagcagcaggcgaagacgagcaccacgagctcgctgccctccagcagcgagcgctcctccagctccgctcgcaacaacctcacggaaggaggggcggagagcgacgaggagatacggcgggtgccggagatgggcggcgcgtcggcgtcggcctcgtcgggcgccggcgcggatgagcgtcccaagggggaggacggcaagcaggggcaggtggcggcgggggcgcagcctccggcgggcgggaagaagcgcgggcgcaccgcgggggacaaggagcagaaccggctgaagcggctgctgcggaaccgcgtgtccgcgcagcaggcgcgggagcggaagaaggcgtacctgacggagctggaggcgaaggccaagggcctggagctccgcaatgcggagctggagcagcgggtgtccacgctccagaacgagaacaacacgctccgccagattctgaagaacacgacggcgcacgcgagcaagaggtccggcggcggcgccggcggcaagggcggagacggcggcaagaagcaccacctcgccaagagctagtgagaaatgagagagggagctggttcgtgccctgctcgcgctcgcctgatctgaccattgctggcgtgttgctgttcctgacgacgccttctctttttcttctttttctcctactgttacccgtgtttcgtctctcgcctcgctgatgcacactgttttaactgttagccatcccgtctactcaccagtgaacactgctgctagttaatttctcggtggtttagggtgccgtgccagaacgccgtgtaacttcgttcttgtactatcttgtagttcagccttgcggtttggcaattcgattc

SEQ ID NO: 850 - DNA, 1304 bp, Zea mays
  Clone ID: TF_ZmC773_19
gactctttctctctcctcccctctctcgtcctctctctctcgtccgatctgcatctgcttttctcccccttgtctgtctctctcctgtccgtggcgtgcgcaaagatttgattttttttttttctcggggaggagccggagtccgagcaggagtggcggcgggagggaagagatcctgatctgttgtcgcagcggggaggggaggaccggaggaggaagatggctgcgcaggagcaggagcaggagcaggagaagcagcaggcgaagacgagcaccacgagctcgctcccctccagcagcgagcgctcctccagctccgctcgcaacaacctcacggaaggaggggcggagagcgacgaggagatacggcgggtgccggagatgggcggcgcgtcggcgtcggcctcgtcgggcgccggcgcggacgagcgtcccaagggggaggacggcaagcaggggcaggtggcggcgggggcgcagcctccggcgggcgggaagaagcgcgggcgcacggcgggggacaaggagcagaaccggctgaagcggctgctgcggaaccgcgtgtccgcgcagcaggcgcgggagcggaagaaggcgtacctgacggagctggaggcgaaggccaagggcctggagctccgcaatgcggagctggagcagcgggtgtccacgctccagaacgagaacaacacgctccgccagattctgaagaacacgacggcgcacgcgagcaagaggtccggcggcggcggcggcggtggcggcaagggcggagacggcggcaagaagcaccacctcgccaagagctagtgagaaacgagagagggagctggttcgtgccctgctcgcgctcgcctgatctgaccattgctggcgtgttgctgttcctgacgacgccttctctttttcttcttttctcctactgttacccgtgggtttcgtctcttgcctcgctgatgcactgttttaactgttagccatcccgtctactcaccagtgaacactgctgctagttaatttctcggtggtttagggtgccgtgccagaacgccgtgtaacttcgttcttgtactgtcctgtgtagttcagccttgcggtttggcaattcgattcaagattactgtacgctgccagctcttggagagaaaaaaagaagttttcggtgcatgtaaataaccatgcgcgggaaagaaaaacgtgataacaatcacacgacgtcaagcggcgagggtctgaattaaggtcatggttgtttacctctagtagattatataatacaacttaaataaagtaacgatctgttt

SEQ ID NO: 851 - DNA, 1194 bp, Zea mays
  Clone ID: TF_ZmC2315_11
tgggaccctcgaggccggccggaacccccttccctcctctccgcctccaattggagtggctcgccttcttccccgcagccagcacgagcttgtcgagatttcagctcgtttctccgccagaggtcgagcaggccagcttcccaggaccgaagctctgcccggttcgccagtccaggaactctgctctcccggggccagagatccaaacaaatctctgcgttggggttctccggggttccttgcgctggagggaggtttcgttctcgccggccatggtttggctgagaagaaacagcagcagcagcatattgatgcgaaatctctgagctttatgaagatcgccacccacctgcgccgctcctgcttcctccactccttctcggtcgtcctcctctactggttttatgtgatctcgtaacttgccctcctccggatccgccattccccgtgccccctctctctctctctctccgtcccctcttgcttctcccttctttcttgccttcccgaacaaccgccgaataataatagcactagccagaccgaccgggggaaaaaaagaccgtgtcttgatgtcgtcgtcgtcgctgtcgccggcggggaggacgtccgggtcggacggcgactcggcggcggacacgcgccggcgcgagaagcggcggctgtcgaaccgcgagtcggcgcggcggtcgcggctgcggaagcagcagcacctggatgagctggcccaggaggcggcgctcctgcaggccgagaacgcgcgcgtggcggcccgcgccgccgacgtcgcgtcgcagcacgcgcgcgtcgagcaggagaacgccgtgctccgcgctcgcgccgccgagctcggcgcccgcctccgctccgtcaacgaggtgctccgcgtcgtcgaggagttcagcggcgtcgccatggacatccaggaggaagtaccgcccgcggacgacccgctgctccgcccctggcagctgccctgctacccggccgtcgccatgcccatcggcgccccgcatatgctccgctactgatgagtgatgaatgattgcccccgccaaccatacgaggcagacagagccggggctggtcgtgtgctagacaaagaagaattggctgcgtctcaacaacacatgattattgctgctgatctgttctctctgtgtgtatgagatgatgctcgtttacatatgtatc

SEQ ID NO: 852 - DNA, 745 bp, Zea mays
  unsure (1)..(745): unsure at all n locations
  Clone ID: TF_LIB4765-003-R1-M1-E5
ggccgcttttttttttttttttttaaccatcaaatcgacatcttaatcagcattttatcatcatcattacgcatataatttcccttatacatatatatgaggagctttcaaatcacctacctctctttcactatctggcccaatattattatttcctatatactccctcaactacaagagaacaactgcgctgcattcacgtcacagaaagccaaggcaaagttgccattgtccgtcctttaggctcgtccgcaatcaagaaaccaaaacgtcgccgtcgcctccaaaacaaacgatggagaagcaacaagcctcctttcctccgcattatctctattagcaccggtacgcgtctatgggctgctgctgctggttccatgcgctggcgccaagaatatcaccagaggcgtcgctccagctccatgtcgtcgtgatgccgtccgccatggctggattcgtaggagcagcagtgccggtgcttgagctgatgcaccataggatctcggtcagggctcccagcctgctggccagctccatcctctgggtctgcaggacagagttctgcgcttgcactgccacgaggttttggctggtcatgctcagcgccatgttcagctgcttgttctggcccttcagctgatctacctgtgacgtgaggtcgncgtggtgttgctgcttccttagcctagacctcccagctgactctcggttcgactcctttcttggcttcctcctcttctccatc

SEQ ID NO: 853 - DNA, 1363 bp, Zea mays
  Clone ID: TF_ZmC34339_1
cagcgacactgcggcgggggcggcggtcccgcgttccctgtcgtcgcctggcggctccgagcagcaagtgccgtccgcgtccggcctgccgccgcgcggggcggggcaccggaggtcccgtagcgatttcctcgtcgggttctcgcgcccgaatcagctctccctgccgatgactcctgcagctggggaatacaggtcgagggaagcctccgtactcgaggagctattccgctcgtacagggacccgaatctcagctcctccggggataacaacagtgaaaggaacgatcacttaggcagacaactcaccggccaaggcgcttggagccccggtgatagcagcgacaatgacgctgagagctgggcggctagtggcagcgcagccgcaggcaccagcgctagccatactcgccattgccgcagcctgtcggtggacagcatcatgggcaatctcaattttggaggcctggaccaggtttctctgagagtgccacctctgtctccggtggcagacgccagtgtcagcctctcgcgcactggaaccggagcatcgggcggtgcggttgcgactgcctcttctcaacctgccaacggagagttcagcgagtctgagatgaaaaagatcatggccaatgatcgccttgctgagctcgctcttgttgatcctaggagggtcaagaggattctagctaatcggatctcggcagcgaagtctaaggagcgcaaggtgaagtacatgggtgagcttgagcgcaaggttcgtgtgctgcagatggaaactagtacgttatcttcaaaagcagcatcgtcgcagagggaatgcgaggcacttagaattctgaacaatgagatgaagatcaggctgcaagcaatggagcagcaagcacagctgaaagatgctctgaatgaagcactgactgctgaagtgcagcgcctgaaacaaattgctggtgaggccagtgatcctcatgtgccgaatatgagccgcaagattgtcgaacagcagctgcagaagcagccatcggaggcccagctggctgagcagcagcagccacaggaatcagaggagttcaaagctcagcagaagcagtggaaccattaataagacgcgtttcacagaggacatgcttgaaggtctaatccatacagcagatccatgaagggacaccttgtgttctcccggacattcgttttttttttccttaggttttagaacgacagcggttggacatcctgtcttttgtggtttcttgcaaaggtatttggttggttggcagttggtaatgcatggtgtgggttctgtgttgtacaagcttccagtctctttagttttccgctagagctattcaaaccattttcaggt

SEQ ID NO: 854 - DNA, 1719 bp, Zea mays
  Clone ID: TF_ZmC3163_1
cttagcttttccatctccttttctcctccaccgaaaatgattcgatttggcgatttttttctctctctctctcactctaaaaccgcccattttttcagctataaatggccccctcgtccatgcttcgggggaaggccctttccccctctccccgaactcccttgctaggttaccacgttcttctgcccttcaggccctccctcatctgatcatctctctcactctttcagtagcagcgcagttttgttactgacacacgccccctgtcctgcctgtctgtgttgacctgatagtactagcaaagtttggagactccatccaacctcttgtctctgaaacttggacttgttgccgatcccaaggggaggttctgccaaaatttcggcttctgaacatccatttccagaggggatcgagggaggttctgccaaattttgctcctttgatcataagtttcccagggggaggttctgccgaaatttcatctcctgtgctgtgacgaccatcagctttccagggggagagggggagattctgccgaagttttgtgggctgaccatcagtcttccaagaggaggttctgccgaaattcccttctctcatcatcacttctccaaggccaagcagtcctcctggtcctgccgaagtgttctctgaacaagagggcatgcatgcactccttcttgtccctgatgttagactagctagctagcactagcagagactgaggccgcagcgtctgttgagaattcagatgttgttgttgctcgtcctgtccgagcacctcctcctgtccggatttatgatcggttccgccataacccgcctcgtccagtccttctctgtcgttttcctctactggttctatgtcttctcagtgagctgccactgccagtagtgccagtagttgatctcacctttttcaagtattaataactcggcactataacaaagaggtagctagctatgtcaagtggaagctcgtttgggtcgagccagtggactcagagatccaggtcggcggaggatgacgtggacctggacctccaggccgagatggagaagaggaggaagcgaaggaaggagtcgaaccgagagtcggctcggaggtctaggctaaggaagcagcaacaccacgacgacctcacgtcacaggtagatcagctgaagggccagaacaagcagaactctgtcctgcagacccagaggatggagctggccagcaggctgggagccctgaccgagatcctatggtgcatcagctcaagcaccggcactgctgctcctacgaatccagccatggcggacggcatcacgacgacatggagctggagcgacgcctctggtgatattcttggcgccagcgcatggaaccagcagcagcagcccatagacgcgtaccggtgctaatagagataatgcggaggaaaggaggcttgttgcttctccatcgtttgttttggaggcgacggcgacgttttggtttcttgattgcggacgagcctaaaggatggacaatggcaactttgccttggctttctgtgacgtgaatgcagcgcagttgttctcttgtagttgagggagtatatatagtaggaaataataatattgggccagatagtgaaagagaggtaggtgattttaaagctcctcagtagatatgtataagggagagttatatgcgcaatgatgatgataaaatgctgactaagctgtcgt

SEQ ID NO: 855 - DNA, 2020 bp, Zea mays
  unsure (1)..(2020): unsure at all n locations
  Clone ID: TF_ZmC31647_1
acgaatacggcagcagcagcggcctgcgtgcctgcctgcctatccacccttcctcctccggcctctggctcggacacctgcgctcgccctcgtgcggacagagccgagagcggcagcgacggaggcggggctgcgccggcctctcaatgcagcagcagccggagcctgccgatccgccgggccgggccttaccgccaccggcggtgccggcgccggcgcctgtcgccgcgcgcgcggcgcaccaccgccgggctagatctgaggtggccttccgcctcccggacgacctcggcatcggcggcggcggtggccctgacggcgacaccttcgatgatatcggctcggaggacgacctcttctccaccttcatggacatcgagaagatctcatcctccgggccctccgaccgcgaccgcgccgccgagacgtcgtctcccccgcgccccaagcaccgccacagcagctccgtcgacggctcgggtctcttcttctcgcccggcattggcggcggcgcgggcaaggatgctgcggcgtcgctggccgaggtcatggaggccaagaaggccatgactcccgagcagctggccgagctcgccgccatcgaccccaagcgcgccaagagaattctagctaacagacaatcagcagctagatcaaaagaaagaaaggctcgttatatgacagaccttgagcggaaggtccaaactcttcagactgaagccaccaccctgtcagctcaacttacactatttcagagggacacgaccggactttctacagaaaatgcagagcttaagataaggttacaggccatggagcaacaagctcaactccgtgatgctctgaatgatgcactaaagcaggagttggagaggcttaaacatgctactggtgagatgaccaattccagcgaggcatataacatgagattccaacatgttccatacaactcttccttcttcccgctttcccagcaaaatgcatccccacaccttggtagcacccagctgccactgccgttccacccaccccatcccaacgtgccaaaccaccagatggtgtcccaccgaaacactctcccggacataatgcagcaagagtctctcggacggctgcagggtttggacattgggaaggggccactggttgtgaagttagagagcagctcgatctctgcaagtgaaagcagcagcaccttctaacgaggcctacaagtgaaaacccaccgtttcagtaggttccattgttcatagtagcctgacatccttgtgctgcttcctgctctgtaagcccatttgttatttaattcattcaattagttgaaattatacgctgtcgcactggctgatcaatcatgttgtagaatggtccatgaacccttcaattctgtttgttttgggttcgtttcctgtttctgtgactggtatcatcagggcatttgggttttggagtgaatttctctggtggtactttgttgttgttttagctatgttccctcatggatcctctcattggaacacacatatgtatagggtttggacattggaaaggggccactggttgtcaagtcagagagcagctcgatctctgctagtgaaagcagcagcaccttctaacgaggcctaccaatgagaatctgccgtttcaatacgtcccattgttcataatagcctgacatccttgtgctgcttcctgctctgtaagcttatttgttatttaattcattcaattagttgaaattgttccttgtcgcactggcagatcgatccatgttgtagaatgatccaggaacccttctagtctgtttatgttttgggaccatttcatgtttatgtgttcggtattagggcatttggattttggagtgaaattctctgatgatacttttgttgtgttcaaaaaaaaaaaaaaaaaaaaaaaaattttggacatactcactctgtaccaaattcgttttaggccaatgnnnnnnnnnnnnnnnnnnnnnaaaaaaaaaaagaaaaaaaaaaaaggtgtgtgg

SEQ ID NO: 856 - DNA, 927 bp, Zea mays
  unsure (1)..(927): unsure at all n locations
  Clone ID: TF_ZmC99570_1
gggtacctcgaggccggcncgggaaccaaaccaaaccaaagcatcacaagcaagcaagtaatataagcgctaactagcaaagaagaagagaaccccgtcgagcaagactagaagagagagcaataattatgtaccaccaccatttccatggcgaggtggctagcctccgcttcctgtcccctccgaacgcctcgacgtccttcgcggcgcaccaccacatgaacatggcactgccgcctccgtcctacttccaagacgacgacgctacccttgcagccatcgacggcggcggcgacgcggcctgttttgatgagcttgacaccatcgtcgtcgtccgggaagcagatgccgcagccgcagcccgctgccacctcaccggcagcaacaatggcggcttgtcgggctccgaccagctgctggacgctgctgtgattatggcggccgacgaggagcgccggcgccggcggatggtgtcgaaccgggagtcggcgcggcggtcgcgcatgcgcaagcagcggcagctcagcgagctgtgggcgcaggtctcgcacctccgcggcgccaaccgccgcctcctcgacgacctcaaccgcgcgctcaggagctgcgccgacgcccgccgggagagcgccaggctgagggaagagaaggccgagctgacgaagaagctcgagcagctgctgcaggcggagaagggctcgttatcggaggcggccgagccatgcaagtcgtattgctgaatgaccaagaagatggagagttaattaattatcatccgcccgggcgacccagtttttagtcgagaggagttaattatttatatctcgataactaataagaacatgcatgtgtgatgatcaagctaattctgttctataaagggagttttggtaccctaattaaggataaggataagttaacgaggat

SEQ ID NO: 857 - DNA, 1636 bp, Zea mays
  Clone ID: TF_ZmC1391_4
ggttcgaactccaaaccaaacgccccagccccgccgcacgcatacggcatacgcatccctcatctccctctcctcgccttcccgccgcggcgccgcctctcctttccgaattccgactcccacctccccggagtgcgtgtttccgcatccggctcgtccgccgatcctcgcgaggcttcctcgaccccgacccggaccggcgcggccacaccggttcaagacattcacaaaaaaaacatgggtcatgatgaagctgtagttactcagaattcagtaaaagcaccatcaccacccaaggatcagccagctatttatccatgctttgattggtcgactatgcagactatgccaccggctgcctttggaaaatcatatgctgcaatatacccgcatgctggtggtttcctgcatcaactcatgcccctagtggtaaacccattgagtgcagagccagctaagtctgggaacagcaagcatgctagtttaaacatgaacctaaaggaaattcatggatctgctgtgtcaagttgcatcagtcagaaaacacctggtgatcctcgccttgcaggctccggagatggtgaatctttcgcgaagggcgtcaattccgtcggcgtcgaggcgactgcctccgcgcctgtctcccactgaaatcgccttgccaacatcactgctcccccagatctaggcctccctgcctcagccacgtgaacgtcgagtcgcttctgccacgcaaaaccatgtgtgagcaccggtagtgacttcaaagttagtggtccaacatcaaccgaatggccagctaaggccgacaaggaatcgaagcgtgaaaggaggaagcagtcaaacagggagtctgcccggcgctcaaggctgaggaagcaggctgagactgaagaactggctcgaagtgtatagctcctgtctgaggagaacacgtcccgcagaagctagataagcaggctaacggaaagcgcccagaaactaaggatggagaactcggctctgatggagaaactagcggacggtacatcagatcaagcacaagaagcttccgccggccaccagacgacaccaacggcgccatcgtcggcttgcgtcgtcaaaaacttactctggatgatggacggcgaagctgcgtcaagaggcggaggcgtcagcggcttcctaagccggcgcagggatcacggtgcgcccatgctccgccagctcctgagctcgggtcctctggcggctgacgccgtggccgcgagctgatcagtgccgtgcttcccttgtgccgagcgcgtgtggactggcgatttttgttaaaagagcgcacaagccgccccgcgagactaacgcacggacgacctgtaaattacagtagctatgcctatgtatgaggcatcgttccggccactctgctgagagccgatatacggatcccgtcactgagcttggtagctctctgtcgttagagtggctgtgccaaactgaatcaactgacacgattcagcagtactaataataaccatcaggatgtttgcctctgtatccgtcgtcgctcgtttcgtctcacctcccacttcgcctttgccggtgctgatcagcctagaagggaccagcgatggaaaaacccaaaggtgagcggaactcc

SEQ ID NO: 858 - DNA, 1636 bp, Zea mays
  Clone ID: TF_ZmC11253_1
acgaaaggccatgctccatcatcatcgccccttcgtgggccccacgcccgcttcggttggagacggcccatacggtccaccgagaaccgtgtccacgccagctcttcctcctcctcccctactctgacctatcggccaatgtcgacaaagaaaatggcaagcccccgcccggcctgtcttattcaggatcgcaaggagtggtaaacccgacctcgccgatgcatccagtgcggccgcgagcagtggtccctcgcgtgcctagctccccggcagctaacctgaatatcggaggggactactgggcagctccgggttgtgcggctgtccctgcagggcacgggaaagcgccagctggatcagctacctttcagcccattggtttcctcgagctgaaccagctgacgccaacaccacgaccctcgaaggcttcaaaggcgtcagaacaagatcaacctccagctaccaccacatccagtggaacagcttcagtgtaccctgaatcgcccagctttcaggcctactcagcaattccaccgcatgcgttcttcccccctaccgttgctgcaaatccacaggcccatccatacatgtggggggctcagcccatagtgccaccttacgggacaccgccgccaccaccttatgtgatgtatccacctggaacagtatatgcccatccctctacacctcctgccatgcatccatttggccattatcctatgccaacaaatgggcatgttgaaactcatggagctgcgccaagcgctccggaaatttcagggaaaagcgagcctggccgaacgtctgctccatccgccaacgggattacctcgcacagtgagagtggaagcgagagtgagagcgaaggaagtgacgacaattctcaaaacgattcacactcaaaggacaatgatgggaaggaagatggcaattctcagaacggcatgtcttattcaggatcgcaaggagtggtaaaccaaaccatggcgatgcttccaatgcaaccgggtgcaatggtcggaggagttcctagctccacggcagctaacctgaatatcggagtggactactgggcagctccgggttctgcggctgtccccgcagcgcacggcaaagcgccagctggttcagctcgaggagaccaatgggatgaaagggagctcaagaagcagaagcggaagcaatccaacagagagtccgctcgcagatcccggctgcgcaaacaggctgagtgcgaggagcttgggcaacgtgctgaggctctgaggtcggagaactcctcgcttagggccgagctcgagcggatcagaaaggagtacgaacagctactttcacagaacgcttccctaaaggaaaagctgggggctgccagtagtgattcgcttcctgatatgaacgaacagaacgaccagaacgacggcgacggcggctacaggaagcagcctgattccgatggccaccagcctgggagcgagtcctgacccgtttttagctcaggattcttttggaatgcacattgcttatatattcattctcttgaacgttgtggaacgcagcataggaaggaaatccaactttaattagaatcgatacgctgtcatccctcatgcatggcgggagaggtcaggagagggtt

SEQ ID NO: 859 - DNA, 580 bp, Zea mays
  Clone ID: TF_ZmC11253_2
cggagtggactactgggcagctccgggttctgcggctgtccccgcagcgcacggcaaagcgccagctggttcagctcgaggagaccaatgggaaaaatacatcctactcaccacagactgtgtttgtatcacgtgcaaattgttcaggatgaaagggagctcaagaagcagaagcggaagcaatccaacagagagtccgctcgcagatcccggctgcgcaaacaggctgagtgcgaggagcttgggcaacgtgctgaggctctgaggtcggagaactcctcgctcagggccgagctcgagcggatcagaaaggagtacgaacagctactttcacagaacgcttccctaaaggaaaagctgggggctgccagtagtgattcgcttcctgatatgaacgaacagaacgacggcgacggagacggcggctacaggaagcagcctgattccgatggccaccagcctgggagcgagtcctgacccgtttttagctcaggattcttttggaatgcacattgcttatatattcattctcttgaacgttgtggaacgcagcataggaaggaaatccaactttaattag

SEQ ID NO: 860 - DNA, 740 bp, Zea mays
  Clone ID: TF_ZmC5008_9
tcttccgggggcgcccaacacgtccccgtccagattgatccacccttccccttcgtctccctccctccatccaatccaccccctctcccccttctcgtcgtcgccgccgccgccgcccatccggggcttggactgtcctttccccgttctgctggtagcaaatggacgacggggacctggatttctccaacccggacacgtacctgtgtccggccctcggcaccgacccgcccagcagctgctccatggacagctacttcgacgagatcctcaaggacacggagcacctcgcctgcacgcacacccacacctgcaacccgccggtgcacgacctctcgcacacccacacctgcgtccacgtccataccaagatcgtcgcggcctcgccgggcgacgccgagtcgccgtccgagaacaacagcaacggcaacgccccctctaagaagcgcccgtcggggaaccgcgccgccgtcaggaagtaccgggagaagaagaaggcccacaccgcatcgctcgaggaggaggtggtgcacctccgggcgctcaaccagcagctcatgaaaaagctccagagccacgccgcgctcgaggcggaggcggccaggctccgctgcctgctcgtcgacatcaggggcaggatcgagggggagattggtgcgttcccgtatcagaggccagcagcggtcaagaacgtcgacctcctgtctagtgttgaccaggaaagccttcttggcagcgct

SEQ ID NO: 861 - DNA, 1388 bp, Zea mays
  Clone ID: TF_ZmC27955_1
cgccgttcaaccctcttctcgcctgatcgcctcccgcacgtacctctctatatttgtttctcccatccatgcgaagctccggcatctagctagcaggtcgctcgatcgccatgtccgacgatagcgacggccagcggcaatgccgccggggcgtcaccgtcgacgtcgagctcggcgccgccatggcgcttgccgacatggccggggtcgccggaccgggcggcgaacagccgccgcccgtgcggcgcgctactcccgctccttctgctcaccaggaggacgaggcgagcacgcggctgagcctggagctaggggaggtgagcatccaggcctccccgtgctccagcagctccagctttggcgggcacccgccgccgccgccgtcccaccaggcggcgtaccagcagcccgccgtaccggagccagcgacgactggctacggaccccggccccggcacgcggtcaccgaggccgagaaggaggcgaagcggctgcggcgcgtgctggccaaccgcgagtccgcccgccagaccatcctccgccgccaggccatccgggacgagctcgccaggaaggtcgccgacctgtcgtcgcagaacgagagcatgaagaaggagaaggacgtggtcatggaggagtacctgtcgctcaaggaggcgaacaagcagctcaaagaagaggtggcgaagacgtccaggaagccggcgatgccagcgcagcagcaggcggcagaatccttggtgccggcgccgccgcggccggggttcctgtactcagcggcaccgccggcaccagtgccggtgccctatgtctggggctcctggccgcccagcgccgccgccgggagcgagcagcacggcagcccgccgccgctctgcctgcagccctgcgcgtggtactacccggccgtagcggacccgcgcgggtcgccatcgtccgcgcacgcgcagcagccgccggcgttccaggacccgcgcgccgcaacgggcgaggaggacacggacgacgacccgtgctcgctcacgctcggcctcgaggtcgacaagcggagcgcgcccgtcggtatcgtcgcgggcccggcctccggctccggctccggcggcgggggagcgcagagcgacagggacagggcggcgcaggcgaggaggcggaggagggaccttaccaagctcaagcacacgcacgccgccgcccgccccggctcctccgagcagtggtaggcgcggcaaaaagcttggacaggcattgcgggcatgcacggcatcgcggtgccggtggtgactccattggttttcttctcggcggcgaactaaacagcttcgtgatctcttccgttttcttttcttagtatattctttgctgcaatatgtaactgaagaaattaaacg

SEQ ID NO: 862 - DNA, 1878 bp, Zea mays
  unsure (1)..(1878): unsure at all n locations
  Clone ID: TF_ZmC3163_2
cctcgaggccggccgggnaaaaaattcccaaaaaaaaaaaaaaaaaaaaaaaaaaaaaaaaaaaaaaacccttttccccctcctccccgaactcccttggctaggttaccacggttcttctgcccttcaggccctccctcatctgatcatctctctcactctttcagtagcagcgcagttttgttactgacacacgccccctgtcctgcctgtctgtgttgacctgatagtactagcaaagtttggagactccatccaacctcttgtctctgaaacttggacttgttgccgatcccaaggggaggttctgccaaaatttcggcttctgaacatccatttccagaggggatcgagggaggttctgccaaattttgctcctttgatcataagtttcccagggggaggttctgccgaaatttcatctcctgtgctgtgacgaccatcagctttccagggggagattctgccgaagttttgtgggctgaccatcagtcttccaagaggaggttctgccgaaattcccttctctcatcatcacttctccaaggccaagcagtcctcctggtcctgccgaagtgttctctgaacaagagggcatgcatgcactccttcttgtccctgatgttagactagctagctagcactagcagagactgaggccgcagcgtctgttgagaattcagatgttgttgttgctcgtcctgtccgagcacctcctcctgtccggatttatgatcggttccgccataacccgcctcgtccagtccttctctgtcgttttcctctactggttctatgtcttctcagtgagctgccactgccagtagtgccagtagttgatctcacctttttcaagttaataactcggcactataacaaagaggtagctaggtatatacctgccaaacaaacaagagggagtgaaaaaacttcagattacgcctcagtttgtgagctagaggtgaccatgtcaagtggaagctcgtttgggtcgagccagtggactcagagatccaggtcggcggaggatgacctggacctggacctccaggccgagatggagaagaggaggaaacgaaggaaggagtccaaccgagagtcggctcggaggtctaggctaaggaagcagcaacaccacgacgacctcacgtcacaggtagaccagctgaagggccagaacaagcagctcaacttggcgctgagcacgaccagccaaaacctcgtggcagtgcaagcgcagaactctgtcctgcagacccagaggatggagctggccagcaggctgggcgccctgaccgagatcctctggtgcatcagctcaagcaccggcactgctgctcctcctacaaacccagccatggtgaacggcggcgtcacgacgacatggagctggagcgacgcctctggtgatattcttggcgccagcgcatggaaccaccagcagcagcagcccatagacgcgtaccggtgctattattagctagctctacaagctagctagagagaaggcggtggtagggccaggaggaaaggaggcttgttgcttcgccatcgtttgttttggaggcgacggcgacgttttgttggtagagcggaggagcctaaaggacggacaatggcaactttgccttggctttctgtgacgtgaatgcagcgcagttgttctcttgtagttgaggagtatatatataggaaataataatattgggccagatagtgaaagagaggtaggtgatttgaaagctcttcatatatatgtataagggaaattatatgcgtaatgatgatgataaaatgctcattaagatgtcgatttgatggttacaacttgatatccgttgtgcctctctataaaccctacgtacgggtgcactctcg

SEQ ID NO: 863 - DNA, 1493 bp, Zea mays
  Clone ID: TF_ZmC3503_2
ccggccgggattgccaacccgctgctcacacactcacacacacacacacacactctacacgcgagcgagaccacgcgccggaccgccgcaagccggtcgccgccgccgcgacctggagcttgcgagctagctctggcctcgctgcctgcgccgactgagatggacccgcgctttccgctgccggccgcggcggcgccgtccacgggcggcggcggcggcgccagagggcaccaccggcgggcccactcggagacgttcctcagcttccacgacgcggacctgctcctcgacccggacggcgacttcttctccgacctcgacttcccctccctctccgacgactctccggccgcctccgaccccaccccgccgccgcatccgcagcagcagccgccgcaggcttccccggccccacgtccgcccggcgggacccacacgcggagcctctccctcgacgccgccttcttcgagggcctcgcgtttcagggacccagtgggagcgccgggggtggaggtgggcccggccacaagaggagcggctcgatggatggggacacctcgccgttcgagggcgagtcggcgctctccagcggcctgccggactacgccaagaaggccatgcccgccgagaggatcgccgagctcgcgctcatcgaccccaagcgcgcaaagaggattctggcgaacaggcagtcggcagcgaggtcaaaggagaggaagatcatgtacactagtgaactggagaagaaggtccagactctgcaaacggaggccactacgctgtcagcacagctgaccctgctccagagggatacaactggtttaactgccgaaaacagagagctcaagcttcggttgcagtccatggaagagcaagctaaactgcgggacgctttgaatgaagccctgcgagaagaagtccagcgacttaagatagccgcaggacaagtcgggaacatgaatgggaaccccttcaatggtggactccagcagcagattccatcctatttcgtgcagcagcagcacaggatgccgtactttggtggccaccaggctcagcttcacaatcaaaatcaaaaccatcgtcaccagatctcgtcaaatgttgggcagacgctcagtggtcagtccctaaacgactccatggatttcatgtgaggagtacaatatcagggccagtattacatcgtataccgactgcagttcagcactgtaaagatagctaaatgtacaatgtatgcatgtgcctcattggtagtgtgtagttagctcttctttgtatcattattctgaaaatggctcgtgtatgtcaaaatgatgtctcttttcttctttgctggtttctggagtaatgtgttagactgactagctacctttaacaatttatgtaaatctttagctttttttttaatggtggaaggttcttatacatacatacatacctgttaacttatttacagagtggagtttataagattttaccattttttaac

SEQ ID NO: 864 - DNA, 1625 bp, Zea mays
  Clone ID: TF_ZmC28236_1
ccgggctcccttggtgcctccactgcaattcgggaatgggttcgtgtcgggggctgtcggtcagcagcgaggtggtcccgtgccccccgcggtatcgcccaggcctgtgacggccagcgcgttcgggaagatggagggagacgacttgtcatccctgtcgccatcaccggttccgtacattttcggtggtgggttgaggggaaggaagccaccggctatggagaaggtagttgagaggaggcagcgccggatgatcaagaaccgggaatcggccgcgaggtcgcgccaaaggaaacaggcatatatgatggagctggaagctgaagtggcaaaacttaaagagctgaatgatgaattgcagaaaaagcaggtatgcttatacaatgtttgcatttttgtttcttggggcgcattaacttatgaaagtatttctcctgaaatagtgaaattcaaatagtttgttaatattcattcctgaattcgagaacctttggaattccagagaaccttttgtactttagcacattcttacatctttttcatcaatacttgtacattgtttactttattaggttttcaaaagtcaagttatcaatttttttacattttttgtcaatcatcacagtgcatttagtgttttttagcaaaaaggcactctggagcatttttggtgacgatgatttaatggtaaattggtaatcaccatagagcatttgacaaagtgaaatgcagtcgaagtccatctgataactgaaccatagatctttagtgtccatcagataaaaggcactatggagtagttcataagagttgtccttttcttctgtattttcttcttaaattagtttatcagacaaggaactgctgtaacttccatttgtgaatagttgcttcttggattctgatttatgacaatatagcttattgtcagcaatatttctgatgaactagaacatgtcagctttgcagccttatatgactaagttctatgtgtagtgagatcgcattctttatatctgctgttgtttagtaaatgactatcttttctaatttgcaggttgaaatgttggagaagcaaaagaatgaggtcctggagaggatgagacggcaagttgggccaacggcaaagagaatttgtctgcggaggacattgacaggaccatggtgagctgtagacccgtacggctgtacctattagcagtatatatgtagtaggtgaaggtgaacacacaaaggccagagttgccctggttgacacagccattaatccggagcttcggtctcgtaggcggatagattgcctgtgatttccacttcataggttttgcccatttgcaacaacaaaaaaggaaaaggaaagaaagaaagttcgggcgaatagaggagtttgtatgtagaaagaaagtttagattgtttgactcttataatgcgagatgaagacttattttgggacggagggagtatattgcttctttaggctttctggtttggtgatctcgggtataactgtatcatcagtccttgtgctttggaaaacgcaaaaccattttgtgatgtaaactttagatctgcagatgtccgctgtgcccatactgtagagattgcttaagatagaatacgttgt

SEQ ID NO: 865 - DNA, 2145 bp, Zea mays
  Clone ID: TF_ZmC7838_1
ccgccgccgccccccaccggccgccaccaccacgggaacccgctgcctttgccaaaacccaaagccaaatcctttgccaaacccaccgccgccgccgccaccacctccgccgccgccgccaccaagaccaccacccttgccgaatccggcacccatgccatgcccacttccaccgccaaggccatcgccgccgccaagaccaccacccttccctctccttcctcacatcttccttcgtcagccgcagatgcgccagcatctctcccacgggcaggaggaggaggagcgagaggcacagtgacagacagagagagagcgcgcgcggggggagcccagcacagcacctacactagctagccaccggccaccaccaccaccaccaccgaccgaatcgggtgcgcgcggcgcgctgctcgtcagctccggccggccggccgctttataaagccacccacccagccccgcccgatcgccatcgccatacccccgcctccgtccacggacacacacccgccttgccagccggcaccctcccggcctcccccacctgtgtcctccggcctcgccgccgcaaaacccgccgcgcaggccggttgctccgattgggagtgccaatcggagccaacagcgagggaagcacatgctgccgttcgtcctagagttcctcattgatgtcgcctgtgatcagtgagatcctcctctcggggtttatgatcaactccacactccggcgccgcacccacctggtccagtccttctccgtcgtcttcctctactggttctatgtcttctcatgaactactcgcccccatcatagccacgccccttctctcccactcctcctcctcctctttcccttccatctagtagcatctaccgtcctcctcttctctccgtgtcagtctctgccttcgtcgtcgccgtttcagtcgttccctaaaccttctttagcttgcatgcacttccctactgctgctagcaaagacctttattactagtgtcaattaagttacgaaagaagaagaaagaaagaaaatttcgaggccgagaaaaaagacggctttgatctctgctagtgtggtgtggtagtgtgtgcttctagtaagtaagcgagccagggatcaagaagcagagagctgctctgtctcttttgtctcttgcaagaatggcttcctccagcgggagcgggagctcgggctccctctcggcggcaacggcggccctggccgccgcggcgggcacggaggaggagctgcgcgcgctcatggagcagcgccgcgcgaagcggatgctgtccaaccgcgagtccgcgcggcggtcgcggatgcgcaagcagcgccacctcgacgagctgaccgcgcaggcggcgcacctgcgccgcgagaacgcgcacgtggccaccgcgctcggcctcaccgcgcagggcctcctcgccgtggacgccgagaacgccgtcctccgcacccagaccgccgagctcgccgcgcgcctcggctccctcaacgacatcctcgcctgcatgaacaccaacgccgtcggcgccgtcgccgtctccctcacagccgccgccgccgccgccgccgcttcctccgacccctgcctcgccttcgacggcgccaccgccctggacgacctcctcagatcctgccccgagaacatgttccagtaccagctctgctagctccagaccgcgcgaagtcaccatggcagcgcaaaacaccttcttttgttttgttttgtttttgtttttttttcttcttcttcttctggtgtttcaggtttagtaatctgctagtgagatggaagaactgaggtcagatcagacgtggtggtgactagccatgaaagtgaactttactgttactgtactgtgcgatcaactggtgggggtaattagctagctagctagctgctggggttatggttaatgcatgaactgctattagttaccaggtgtaagtgtaactctcgagtcctgctcttgttactgtttgtgtactgactgtgtcactccactactatgtaagaatcagagcagtaagtttactagtgtctctgctgtcaaacaaaggaagtgcaccatataatctacactttaattactcttgcctgtgtgccctgcagcgatcaaaaaaaaaaaaaaaa

SEQ ID NO: 866 - DNA, 738 bp, Zea mays
  Clone ID: TF_ZmC95773_1
cccacgcgtccggccgccagctccggcgccggggccagaggcggcggcggcgccgcggagatgacgctggaggatttcctcgccagggattcctgcgccatggcggcggtgatggagggggacatggcgctggggttccctgacggtgacggagatgcggcagggagcgtggcggggggagtgggcggcgtgaggggaggcgggaagcgggcgcttctggatcccgcggaccgcgccgtgatgcagcggcagaagcgcatgatcaagaaccgagagtccgcagcgaggtccagggacaggaaacaggcatacgtcgcggagctggaatcgcaggttatgcagctcgaggaggagcagacagaactgttaagggagcaggaggaccgacgccaaaagagacttaaggagctaaccgaaagggcagttccagtcatcaggaaaaaatcaccacaagatcttagaagaaccaactccatggaatggtagaaatgaccctgagccctgatgttcttctcttagaagttacagggtttgtttttctttgacttctgtttcttctagttttctttgatagctatttaggaatagtggaacgtgcgtgatcaagaagtcacgccatttagaattgatctgttgtcagattgacggttttcttgtgaatgtggccgggtgttgtataaataagaacaataaggttagcttgaagagtggaccaaaatatcctaattacaggcatct

SEQ ID NO: 867 - DNA, 1420 bp, Zea mays
  Clone ID: TF_ZmC1133_1
aggccggccgggcctcgggagaggtggtacttcctctcctccggataaaagataaggagtgtctctcctctctttcagctaagtccctgccccctctctttttcttacattcaggtcctcgcagctcctctcttttttcttgtttctttctttcgatctgcgagccgtccaggtccagtactctcctttccgtgaaggaactcttgcagccggcccctctggtttcctcgaattcttgttccccggtccctcctcctgtccccgcgtagatccgtccgtccgaggagcacaccgtccccacccccatgtttacccaccagttcctctgacggccgccgtgctccgatgaagctgagcgtgctccgtatccgccgctcccactccttctccgtcgccttcctctactggttctacgtcttctcatgaacgcatcgcccctctccacctgctgatccttcgccgtctctccctctctctttctctctctctagatagtctttcgaatccatctctagggctcttgtttctccccatcctccccccaccccaccccccaccaaacagattcaatccgacaagacaagcatccatgtcgtcgtcacgccggagctcgagccccgacagcaacgacacgacggacgagcgcaagcggaagcggatgctgtccaacagggagtcggcgcggcggtcgcgcgcgcggaagcagcagcggctggaggagctggtggcggaggtggcccgcctgcaggcggagaacgcggcgacgcaggcccgcaccgcggcgctggagcgcgacctgggcagggtggacggcgacaacgcggtgctgcgcgcccgccacgccgagctggccggccgcctgcagtcgctgggcggcgtcctcgaggtgctccagatggccggcgccgccgtcgacatcccggagatggtcaccgacgaccccatgctccgcccctggcagccgtccttccccccgatgcagcccatcgggttctgagaatctgagcctcagccggcgggagagagccaatttctgtcgtcgtgccgctgtctatctcgtattggtatatctattcataaatcatccttgtcatggtttgctcttcttgtcagtgttataaatttgcttcttgttagtgttataaatttggccatcggaaaggatgtgtttgtagttgtaatatcttgtttggagttgtaatatcttatcttgcttatgaaatcgaatatgcctatatatatatgttatgctgtacgagtatgtggctccaaatttgtgagccttctgtctgttatggtgaggcgatgaatccaatttgtgagcacacatgaaccaaaaaaaaaaaaaaaaaagcggccttctaactaccgggctcgtttctatataaaaaaaaaaaaaaaaaaaaaaaaaacccccccc

SEQ ID NO: 868 - DNA, 1371 bp, Zea mays
  Clone ID: TF_ZmC1133_2
ctccggataaaagataaggagtgtctctcctctctttcagctaagtccctgccccctctctttttcttacattcaggtcctcgcagctcctctcttttttcttgtttctttctttcgatctgcgagccgtccaggtccagtactctcctttccgtgaaggaactcttgcagccggcccctctggtttcctcgaattcttgttccccggtccctcctcctgtccccgcgtagatccgtccgtccgaggagcacaccgtccccacccccatgtttacccaccagttcctctgacggccgccgtgctccgatgaagctgagcgtgctccgtatccgccgctcccactccttctccgtcgccttcctctactggttctacgtcttctcatgaacgcatcgcccctctccacctgctgatccttcgccgtctctctctctctctctctctctctctctctcttagatagtcttttgaatccatctctagggctcttgtttctccccatcctccccccaccccaccccccaccaaacagattcaatccgacaagacaagcatccatgtcgtcgtcacgccggagctcgagccccgacagcaacgacacgacggacgagcgcaagcggaagcggatgctgtccaacagggagtcggcgcggcggtcgcgcgcgcggaagcagcagcggctggaggagctggtggcggaggtggcccgcctgcaggcggagaacgcggcgacgcaggcccgcaccgcggcgctggagcgcgacctgggcagggtggacggcgacaacgcggtgctgcgcgcccgccacgccgagctggccggccgcctgcagtcgctgggcggcgtcctcgaggtgctccagatggccggcgccgccgtcgacatcccggagatggtcaccgacgaccccatgctccgcccctggcagccgtccttccccccgatgcagcccatcgggttctgagaatctgagcctcagccggcgggagagagccaatttctgtcgtcgtgccgctgtctatctcgtattggtatctattcataaatcatcgttgtcatggtttgctcttcttgtcagtgttataaatttgcttcttgttagtgttataaacttggccatcggaaagtagtaataatgatcagttcgtcgtggttctcaactttgtgtggtgaatgtgaatgtcaaaaaagatgtgtttgtagttgtaatatcttgtttggagttgtaatatcttatcttgcttgtgaaatcgaataggcctatatatgttatgctgtacgagtatgtggctccaaatttgtgagccttctgtctgttatgaatccaatttgtgagcacacatgaatcaatttcgagattcgacatgtc

SEQ ID NO: 869 - DNA, 1316 bp, Zea mays
  Clone ID: TF_ZmC1133_3
ggcggcgagaatggcagcagcgtcttccgaaggagtgcgcagggaggagatgatggcggacggctgactgtagacagtggtcggcagggggcagccacgaacggggcccccgccagtcgtggtgacatgtggaaaaccgggcgctcgcagctcctctcttttttcttgtttctttctttcgatctgcgagccgtccaggtccagtactctcctttccgtgaaggaactcttgcagccggcccctctggtttcctcgaattcttgttccccggtccctcctcctgtccccgcgtagatccgtccgtccgaggagcacaccgtccccacccccatgtttacccaccagttcctctgacggccgccgtgctccgatgaagctgagcgtgctccgtatccgccgctcccactccttctccgtcgccttcctctactggttctacgtcttctcatgaacgcatcgcccctctccacctgctgatccttcgccgtctctctctctctctctctctctctctcttagatagtcttttgaatccatctctagggctcttgtttctccccatcctccccccaccccaccccccaccaaacagattcaatccgacaagacaagcatccatgtcgtcgtcacgccggagctcgagccccgacagcaacgacacgacggacgagcgcaagcggaagcggatgctgtccaacagggagtcggcgcggcggtcgcgcgcgcggaagcagcagcggctggaggagctggtggcggaggtggcccgcctgcaggcggagaacgcggcgacgcaggcccgcaccgcggcgctggagcgcgacctgggcagggtggacggcgacaacgcggtgctgcgcgcccgccacgccgagctggccggccgcctgcagtcgctgggcggcgtcctcgaggtgctccagatggccggcgccgccgtcgacatcccggagatggtcaccgacgaccccatgctccgcccctggcagccgtccttccccccgatgcagcccatcgggttctgagaatctgagcctcagccggcgggagagagccaatttctgtcgtcgtgccgctgtctatctcgtattggtatatctattcataaatcatccttgtcatggtttgctcttcttgtcagtgttataaatttgcttcttgttagtgttataaacttggccatcggaaagtagtaataatgatcagttcgtcgtggttctcgatgtgtttgtagctgtaatatcttgtttggagttgcaatatcttatcttgcttatgaaatcgaatatgcctatatatatatgccatgctgcac

SEQ ID NO: 870 - DNA, 1345 bp, Zea mays
  unsure (1)..(1345): unsure at all n locations
  Clone ID: TF_ZmC1133_4
gccggccgggccgggttccccatctccggataaaagataaggagtgtctctcctctctttcagctaagtccctgccccctctctttttcttacattcaggtcctcgcagccgcagctcctctcttttttcttgtttctttcgatctgcgagcagtccgtccaggtccagatccagtactcttctttccgtgaaggaactcttgcagccggcccctctggtttcctcgaattcttgttccccggtccctcctcctgtccccgcgtagatccgtccgtccgaggagcacaccgtccccacccccatgtttacccaccagttcctctgacggccgccgtgctccgatgaagctgagcgtgctccgtatccgccgctcccactccttctccgtcgccttcctctactggttctacgtcttctcatgaacgcatcgcccctctccacctgctgatccttcgctgtctctctctctctctctcttagatagtcttttgaatccatctctagggctcttgtttctccccaccccaccccccaccaaacacaagtccccttgttcaatccgacaagacaagcatccatgtcgtcgtcacgccggagctcgagccccgacagcaacgacacgacggacgagcgcaagcggaagcggatgctgtccaacagggagtcggcgcggcggtcgcgcgcgcggaagcagcagcggttggaggagctggtggcggaggtggcccgcctgcaggcggagaacgcggcgacgcaggcccgcaccgcggcgctggagcgcgacctgggcagggtggacggcgacaacgcggtgctgcgcgcccgccacgccgagctggccggccgcctgcagtcgctgggcggcgtcctcgaggtgctccagatggccggcgccgccgtcgacatcccgggcggggtcaccgacgaccccatgctccgcccctggcagccgtccttccccccgatgcagcccatcgggttctgagaatctgagcctcagccggcgggagggagccaatttctgtcgtcgtgccgctgtctatctcgtattggtatctattcataaatcatcgttgtcatggtttgctcttcttgtcagtgttataaatttgcttcttgttagtgttataaacttggccatcggaaagtagtaataatgatcagttcgtcgtggttctcaactttgtgtggtgaatgtgaatgtcaaaaaagatgtgtttgtagttgtaatatcttgtttggagttgtaatatcttatcttgcttgtgaaatcgaataggcctannnaaaaaaaaaaaaaaaaaaaaaaaaaaaaaagtaccttcggccggcgaccaccgctaa

SEQ ID NO: 871 - DNA, 981 bp, Zea mays
  Clone ID: TF_CC-ZMPO148024B07_FLI
tgcgttgattcctcgggtcgaaccaacgcgcggcgcggggtcccggtcgcggccatggcgcagctgccgcccaagatccccaccgtggcgccggcgtggccggagttcgggggcgggcaccagcagcagcgcagcccctccgtgggcacgttcctcgccgccgcgcccatgcagccgtcgtgggtggacgagttcctcgacttctccgccgccaagcgcggcgcgcaccgccgctccgtcagcgactccgtggccttcctcgagcccgtccgaccacaacagcatcaacgacgagaagacggataggggcgacgccgaggaggcacagagcaagtgccacggcgccgccgcggccaccgcggtggatcctaagcgcgtcaagaggatcctggcgaaccggcagtccgcgcagcggtcgcgcgtgcgcaagctgcagtacatctcggagctggagcgcagcgtcacgtcgctccagacggaggtgtcggcgctgtccccgcgcgtggcgttcctcgaccaccagcgctcgctgctgacgctggggaacagccacctgaggcagcggatcgcggcgctcgcgcaggacaagatcttcaaagatgctcatcaggaggcactgaggaaggagatcgagaggctgaggcaaatctaccagcagcagagcctgaagagcggcagggagcccgacgcggccccgtcggtccgcgacgacaaggacatgatcggcagcgaggggaccgccgcgcccggcccgccctcgtgatgaggaggaggtggtggggcgacacgtccagacatccgagtcggtcgctgtagtcggggatggccctgtcgcccgccctgcagcccatcacagcgaggttgccgctgccgctgctaggattggtgtgtgtgtgccgtgtgcgtgtccgtgtgtgcattctttgggggtgtgtaacgtgatgtgatgtaaagagaagaggaactgcatcggttcggttt

SEQ ID NO: 872 - DNA, 1277 bp, Zea mays
  Clone ID: TF_ZmC2362_1
agcccacgcgtccggtttccggcgttgcgccaccgttcccgcgtgttgcgttgattcctcgggtcgaaccaacgcgcggcgcggggtcccggtcgcggccatggcgcagctgccgcccaagatccccaccgtggcgccggcgtggccggagttcgggggcgggcaccagcagcagcgcagcccctccgtgggcacgttcctcgccgccgcgcccatgcagccgtcgtgggtggacgagttcctcgacttctccgccgccaagcgcggcgcgcaccgccgctccgtcagcgactccgtggccttcctcgagcccgagcccggccccggcgacggcaatgccggggcgcatgacttcgaccgcctcgacgacgatcagctcctgtccatgttctccgacgacctccaaccgccgccgccgcagccgcagacgcaggccgcgcccgcgccggtggcgagctcgtcgtcgccgtccgaccacaacagcatcaacgacgagaagacggataggggcgacgccgaggaggcacagagcaagtgccacggcgccgccgcggccaccgcggtggatcctaagcgcgtcaagaggatcctggcgaaccggcagtccgcgcagcggtcgcgcgtgcgcaagctgcagtacatctcggagctggagcgcagcgtcacgtcgctccagacggaggtgtcggcgctgtccccgcgcgtggcgttcctcgaccaccagcgctcgctgctgacgctggggaacagccacctgaggcagcggatcgcggcgctcgcgcaggacaagatcttcaaagatgctcatcaggaggcactgaggaaggagatcgagaggctgaggcaaatctaccaccagcagagcctgaagagcggcagggagcccgacgcggccccgtcggtccgcgacgacaaggacatgatcggcagcgaggggaccgccgcgcccggcccgccctcgtgatgaggaggaggtggtggggcgacacgtccagacatccgagtcggtcgctgtagtcggggatggccctgtcgcccgccctgcagcccatcacagcgaggttgccgctgccgctgctaggattggtgtgtgtgtgccgtgtgcgtgtccgtgtgtgcattctttgggggtgtgtaacgtgatgtgatgtaaagagaagaggaactgcatcggtttggtttggtttggttatccttgcatgcatatgcatctgcatcctctaaagctgccttccaccacctcccctgaattgtaatttttggtcgagcattttggg

SEQ ID NO: 873 - DNA, 614 bp, Zea mays
  Clone ID: TF_ZmC1049640_1
gcgaagaaggcgatgtctgccgcaaatcttgccgagcttgccctaatcgatccaaagaaagcaaagaggattataaataatagacagtcggcggcaagatcaaaagaaaggaagatgaggtacattgctgagcttgagcggaaggtgcagttcatgcagagagaagccacagcactggcaacccagctggcattgctacagagagacacggctgggctgactgttgagaacggcgacctgaagatacgtctggagagcacagagcagcagatccacctacaagacgcactgaacggggccctgaaatcggagatgcagcggctgaagatggcgacagggcaggcgggcaaccagatgatgaacttcgccgaaccgccgcacacgttcggcggtgcgaaccagcaggtcttccaccacccgggccaagcagtgccgccattcctggtggcgatgcaacagcagcagcagttgctgctgccgcacatgaaccagccgttgcaccctctgcagagccagccgctgcatcaggcggcgacgctcagcatcgacatggccgggctgccggcgcctccacctggccagtggcaatggggtggtgacacgtggtcggagag

SEQ ID NO: 874 - DNA, 640 bp, Zea mays
  Clone ID: TF_ZmC2315_10
ccggccggttccctgcgggaaaagaaagaaaagaacctgtcttgatgtcgtcgtcgtcgctgtctccgacggcggggaggacgtccgggtcggacggcgactcggcggcggacacgcacaggcgcgagaaacgccggctgtcgaaccgcgagtcggcgcggcggtcccggctccggaagcagcagcacctggacgagctggtgcaggaggtggcgcgcctgcaggccgacaacgcgcgcgtggcggcccgcgccgccgacatcgcgtcccagtacacccgcgtcgagcaggagaacaccgtgctccgggcccgcgccgccgagctcggcgaccgcctccgctccgtcaacgaggtgctccgcctcgtcgaggagttcagcggcgtcgccatggacatccaggaggagatgccggcggacgacccgctgctgcgtccctggcagctgccctacccggctgccgccatgcccatcggcgccccgcacatgctccactactgatgattgcctccaccaaccacaccaccatacatctgaggctgtcagctggggctggttggcaacaagacaagaagaattggctgcctctcaacaacattcaaagcagccaggtaggtagtagatgtgaacccacgcgtccg

SEQ ID NO: 875 - DNA, 1462 bp, Zea mays
  Clone ID: TF_ZmC2315_14
cccctctgtgcgagtttaccgaaacgacctcggcccggcattaaataagcctcccaggctcacctgatcccctcccccttccctctcttccgcctccgattgagtggctcaccttctttcccagccagcacgagcttgcaagcaagcgagctcctgagatttcagctcgcttctcctccagaggtcgagcagaccagactcctccgaccgaagctctaccacttcccagttagcctgtccaggaactgcttggccggagatccaaacaaacctctgtgttggggttctccggggttccttgcgctggagggaggtttcgttctcgctggccatggtttggctgagaagcagcagcggcagcatcttgatgccaaatctctgagctttatgaagatcgccactcacctgcgccgctcctgcttcctccactccttctcggttgtcttcctctactggttttatgtgatctcataacttgccctcccccggatccgccattcccccgtgccctctctccgtcccctcaaccttctccctcctttcttgcttccctcaacaatcgccaaataacagcactagcggcagcggtagaggatcttttcgaggtaagctaggccggccggttcccctgcgggaaaaagaaaagaaaaggaccctgtcttgatgtcgtcgtcgtcgctgtctccgacggcggggaggacgtccgggtcggacggcgactcggcggcggacacgcacaggcgcgagaagcgccggctgtcgaaccgcgagtcggcgcggcggtcccggctccggaagcagcagcacctggacgagctggtgcaggaggtggcgcgcctgcaggccgacaacgcgcgcgtggcggcccgcgccgccgacatcgcgtcccagtacacccgcgtcgagcaggagaacaccgtgctccgggcccgcgccgccgagctcggcgaccgcctccgctccgtcaacgaggtgctccgcctcgtcgaggagttcagcggcgtcgccatggacatccaggaggagatgccggcggacgacccgctgctgcgtccctggcagctgccctacccggctgccgccatgcccatcggcgccccgcacatgctccactactgatgattgcctccaccaaccacaccaccatacatctgaggctgtcagctggggctggttggcaacaagacaagaagaattggctgcctctcaacaacattcacatctactacctacctggctgctttgagaattacagggcctctactatctgctgctgtgttaaatctacctcctggtttctccaataattgtcgctgttctgtactcttctcttatgttctgtctgtcagtgtgtatgagatgatgctcatcttatgttataaggcttaatcatgtgtctagttgtactttctgtcttgtaatgttatcagttatatgaataataagtgttatgtaagctcct

SEQ ID NO: 876 - DNA, 1468 bp, Zea mays
  Clone ID: TF_ZmC2315_15
ccggccgggccgggcccccttccctctcttccgcctccgattgagtggctcaccttctttcccagccagcacgagcttgcaagcaagcgagctcctgagatttcagctcgcttctcctccagaggtcgagcagaccagactcctccgaccgaagctctaccacttcccagttagcctgtccaggaactgcttggccggagatccaaacaaacctctgtgttggggttctccggggttccttgcgctggagggaggtttcgttctcgctggccatggtttggctgagaagcagcagcggcagcatcttgatgccaaatctctgagctttatgaagatcgccactcacctgcgccgctcctgcttcctccactccttctcggttgtcttcctctactggttttatgtgatctcataacttgccctcccccggatccgccattcccccgtgccctctctccgtcccctcaaccttctccctcctttcttgcttccctcaacaatcgccaaataacagcactagcggcagcggtagaggatcttttcgaggtaagctaggccggccggttccctgcgggaaaaagaaaagaaaaggaacctgtcttgatgtcgtcgtcgtcgctgtctccgacggcggggaggacgtccgggtcggacggcgactcggcggcggacacgcacaggcgcgagaaacgccggctgtcgaaccgcgagtcggcgcggcggtcccggctccggaagcagcagcacctggacgagctggtgcaggaggtggcgcgcctgcaggccgacaacgcgcgcgtggcggcccgcgccgccgacatcgcgtcccagtacacccgcgtcgagcaggagaacaccgtgctccgggcccgcgccgccgagctcggcgaccgcctccgctccgtcaacgaggtgctccgcctcgtcgaggagttcagcggcgtcgccatggacatccaggaggagatgccggcggacgacccgctgctgcgtccctggcagctgccctacccggctgccgccatgcccatcggcgccccgcacatgctccactactgatgattgcctccaccaaccacaccaccatacatctgaggctgtcagctggggctggttggcaacaagacaagaagaattggctgcctctcaacaacattcacatctactacctacctggctgctttgagaattacagggcctctactatctgctgctgtgttaaatctacctcctggtttctccaataattgtcgctgttctgtactcttctcttatgttctgtctgtcagtgtgtatgagatgatgctcatcttatgttatgtaaggcttaatcatgtgtctagttgtactttctgtcttgtaatgttatcagttatatgaataataagtgttatgtaagctcctacgaaaaaaaaaaaaaaaaaaaaaaaaaaaaaaaaaaaagaaaaaaaaaaaaaaaaaagcggcc

SEQ ID NO: 877 - DNA, 776 bp, Zea mays
  Clone ID: TF_ZmC2315_9
gccgggttccctgcggggaaaagaaaagaaaaggaccctgtcttgatgtcgtcgtcgtcgctgtctccgacggcggggaggacgtccgggtcggacggcgactcggcggcggacacgcacaggcgcgagaagcgccggctgtccaaccgcgagtcggcgcggcggtcccggctccggaagcagcagcacctggacgagctggtgcaggaggtggcgcgcctgcaggccgacaacgcgcgcgtggcggcccgcgccgccgacatcgcgtcccagtacacccgcgtcgagcaggagaacaccgtgctccgggcccgcgccgccgagctcggcgaccgcctccgctccgtcaacgaggtgctccgcctcgtcgaggagttcagcggcgtcgccatggacatccaggaggagatgccggcggacgacccgctgctgcgtccctggcagctgccctacccggctgccgccatgcccatcggcgccccgcacatgctccactactgatgattgcctccaccaaccacaccatacatctgaggctgtcagctggggctggtcggcaacaagacaagaagaattggctgcctctcaacaacattcacatctactacctacctggctgctttgagaattacagggcctctactatctgctgctgtgttaaatctacctcctggtttctccaatattgtcgctggtctgtactcttctcttatgatgttctgtctgtcagtgtgtatgagatgatgctcatcttattttatgtaaggcttaatcat

SEQ ID NO: 878 - DNA, 646 bp, Zea mays
  unsure (1)..(646): unsure at all n locations
  Clone ID: TF_LIB3596-021-Q6-K6-F2
ggaattgcggacacgtcgtacgtagtgcaacggcaaccgtggggggagaagctacaaggagagatgctgtccgtgcaggaagcccttgagcttgcgtcgtccagctgcggcacgacgatggacgttaccacgtgcgggttcacgccgtgggggcccgagtcgtgccctagcctggagcaggtgatggcggcgtcgacgccggccgcggcagcgaggcacccggaccccgaggaggaggaggaggaggagcggcgccggcggcagcgccgcaagctgtcgaaccggctgtcggcgcgccggtcgcgcgcgcggaagcagcagcagctggaggagctccgcgcggaggcggcgcggctccgcggcgagaagcgggagctggaggccagcctgcaggccctggcgcggcacggcctcgccgtgcgctgccagaacgcgcggctccgcgccgaggccgncgcgctcgcgcgcaggctcctcgcgatcgcgtcgtacgccgcccagatgccgcagcataaggccggagtcgcgcccgcgcccgcgcccgcgccggcgggggcgctgctggggccgctggcgtcgctgacgacgtangcggctggcgagagggacgttcttctgcccgtggaacgagtctcgcgccactcgc

SEQ ID NO: 879 - DNA, 1370 bp, Zea mays
  unsure (1)..(1370): unsure at all n locations
  Clone ID: TF_ZmC13853_7
gggtacctcgaggccggcatcattcgcgcacgagggtcacggaactctatccactcgtcagcaccaagctagctagtcctcgtgcccttcggacgagaggcgcatgtgactcggtaacagtcttgaggctttgagctctcctcacctcgtatccgtgtctttctggtgctgagctgagtctgagagacaggtaaggaggaggagggaggagatggaattcaagaactgcgggtcgtcgtcgcagccccggccggcggtggtagtgggcgaggaggcggcgttggcgagacagggatcagtctactcgttgacgttcgacgaattccagagcgcgcccggcggggccgccgccatttttcgggcggtggcggcagcatccccaaggatttcggttccatgaacatggacgaactgctccggagcatctggaccgcggaggagacccaggccatggcctccgcttctggcgctggagcgggtggcgggatgccgccaacgtcgctgcagcggcaagggtcgtcgctcacactgccccgcacgctcagcaccaagacggtcgacgaggtgtggcgcaatctcgtgcgcgacgagccgcnnnnnnnnnnnnnnnnnnnnnnnnnnnngcagcaccaccgccagtcgacgctcggggagatgactctggaggagttcttggtcagagctggcgtggtcagggagaaccccgctccggctcctccagcaccaccacccatgatcccgccgcggccggtacctgtcgcccctaaaagctccgccnnnnncgggaatttaccgggtgccgacgccgacaccgccgcagctgcggcagcgctggggtttgcaccggtcggcatnnnnnatctggcccaaataccgcccagggcagcaggcatgggaggcggcgccatggctgtgcaagcagcggtgaaccagcttgattctggcgggaaggggtacagcgacctgtcgtcgccgacggagccgctcccgttttcgtttgaggggatgattnnnnnnnnnnnnnnnnnnnnnnnnnnagagaaagtggtggagaggcggcagaggaggatgatcaagaacagggagtccgccgccaggtcccgagcgcgtaaacaggcttatactatggagttagaagctgaagttcagaaactcaaggagcagaatcaggaactggagaggaaacaggcagagattatggaaatgcagaagaacgaggtaactgttaattctaaacttcgtgtgtttgacccctgtatattatcttgatgccctttctggtttgctnnnnnctatggcagagatagatagagaattagagaatagagattcaggctgtaagcataccattccttctattactttgccaa

SEQ ID NO: 880 - DNA, 1281 bp, Zea mays
  Clone ID: TF_ZmC3110_1
gcacgggcctcgaggccggccgggatcaggcaaacgatacagcccttccctcttcaatcctctcgtcatttcctctcgcttctgctcagctgcaacccagcgcgtagatcttattcttggacgagaacgatgaggagctcttctccatgttccttgacgtcgacaagctgaactcatcgtgcggggcgtcgtcggaggccgaggctgagtcctcctcggccgcgggtggcggcggtgagggggctgagctggccgacgcgcccaggccaaggcatcagcacagccagtccatggatgggtccatgtcgatcaaggcggaacagctggtgggtgcgccggggatggaggggatgtcgtctgcagaggccaagaaagcagtgtctgcggcgaaactggctgagcttgctcttgttgacccaaagagggctaaaaggatttgggctaatagacaatctgctgcaagatcaaaggaaaggaagatgcaatatattggcgaactcgagctcaaggtgcaaaccctgcaaacagaagccacaacattgtcagctcagctagcattgctgcagagagacaccactgggctaacaaccgagaatagtgagctgaagattcgcctgcagaccatggaacaacaagtccacttacaagatgctttgaatgacaccctgaaaacagaggtccagcggctgaaggtggcaacaggacaggtgggcaatggtggtggagggatgatgctgaactttggggccatgccacgcctggtcggaggcaaccagcagatgttccacagcagccaagcgatgcaatccgtgctggcgacgcaccagctgcagcagctccagctccactcccagcctcagcagcagcaactgcactcgctgcagctccagcaggtggcgagagacctcaagatgaaagggcatctgggcggccaaggccagtggggcgatgggaagtctgggagtgggagcaggagcagcggcagctgagcctactggcaccgtggcacgggagttttggtgtatgtggtgagcaggaatggtgatcccttgttttgggggatgttgctgtgcaggtgtaattatcgttaactcagttgtctatctataggcccagttcagcttgagttttatggttaactcggcgatctttataggctcagctcacctgcaacgcacttcagttcagaaactcggatggtggcagatgtttgtctgttggatgttgtttgtatctcttttgctagtttaagggtaaaaatggttggcatttcagtgtttc

SEQ ID NO: 881 - DNA, 1106 bp, Zea mays
  Clone ID: TF_ZmC69637_2
tctcggtaacggccgggccaccaatacaacatactagtatcatatccttggaaattataagcctctacatacaacaacttaattagtcagaggaaagctttcaagtctagatataaccccaagtatcttttgaggatgaccctgtccggtggggcctcgtctgggtctagtcatgggacccgtagcttggggtcagagggtgacatggtgcaccggatggagctcatgcgcaagagaaggatggagtcaaaccgggagtccgcgaagcgatcgaggcagcggaagcagcaacatctcgacgacctcaactcgcaggtgaatttgacacaaagcaaaagtcagatgaaaaaaacgagacttgtgcttcaggatatgctgaagcaagcaaactccgataatgcgcggtgccccttaatttctcagggtccaccacccaataaaattgattcaaaataggccattccaacctaagcaaagaacgatgcacgacgtgccaccgtcgaaatctttctcaaaaaaagggaaaaaagggaaaaaaaattccacaccaattcattggctgtctcggcaaaatcaacacggtcatatatatatcaatcattttttttcttcttcttctacccgacgtcgcgtttatatcggaataattgaatcgtcttctgtataaaataaaacaaaacaaaacaaacaggtggacaagttgaggacgacgaaacagcaactcatggtagcactgaacatgaccagccagaactacgcggcagcagcagctcagaactcggtgctgcgcacccagatgatggagctgcagagcaggctctgcgcactgcgtgagatcatatgccatatgtacgcaacaacaacgaatgtccatccagcaactgtcatgggcggtgctgctacctaccatacttttggcgaaactgcgtggaactctggcagctgcagcatgcaaatggtcgaccacttgttgcaccagtgcttctaggctctagctacgtacaaggaggtagaggccaagacaaacaaaggcatgcatatatatgtattccatgttttgtaagtagtgtgtacgtcatttgatttaatgtataaaagggtttgtg

SEQ ID NO: 882 - DNA, 1513 bp, Zea mays
  Clone ID: TF_ZmC2931_1
agcttcaaaatgtgccagtcaccaaggttccttgcagagagcgagataaaaaaaaaggtaatccgacggaaacgacaagggcgcggcgagggcggggacagggtcgggaaggccctgggcgcgggggcgccaagcgcatggcatcgtcgagggtgatgccgtcctcctcgccgtcgcacacggcctctgatctcgcgcgcctagcgcaggccgccagcaggcccggcggcgggggcagcgggctgggctccatgaacgtggaggagctcctccgcggcatctacagcgacatgcccaccccggcgccgcccgcgtcggagcccgaacgcccgaggtcgccggccccggcgccggaggtcgccacgcggaggacggcggaggaggtgtggaaggagatcactggcggaggtggcagtggggaagccgtggctcccgtggcggctcaggctgtcgctcccgatggtggcgccggcacaggcggcccggaggtgacgctggaggacttcctggccagggagagcgcggtgaaggaggatgaggttaagatttctgtcccccccgcgccggtcatggggttaccgggcggagcggagggcgtgagtgtgcctggcggcggaggcgggagggaacggaagcggcagctcatggatccagtggatcgcgccgcgatgcagcgacagaaacgaatgatcaaaaaccgcgagtctgctgcccggtcacgggagaggaagcaggcttatatcgccgagctagaatcgctggtaacgcacctcgaggaggagaatgccgagttgttgagagaacaggaagagcggcaccagaagcggcttaaagagctcttggaacgggtgacgccagtcattctgaggaaaaaaccatcaggagatcttagaagaacgaactcaatgcagtggtagattggagccaagctcagtcgccgtctctttacagttataacatagaatttgcccctgtatgtcatttttctatttatatatgcgccaactaagttgtagtatcttagctgaaatagcatgggcaattagccgacacaaaggttaaacgaaatcatattatgtaggagtgctcatgaccaagaaaggttgctgttcctgcctgctctcaactaaacatacaacttggatgatcatatccccagaaagatgatcccattcccatccaacctcgccttctaactaagcacactcttttatggctcttcagtttggctttggatttactgacttgagcaatgttaatttgcttttcttggggtagccgttttatatgtttctctaaagaatacatttggttgatgcagctcttggaacgggtgccccctgccgttctgagcatagaacctgcccctgttcgtcgttgttcgatctcaatgcaggcgccgactggggcctagctccgtcgccggctcttgcctgggctttcagccgactcgcccctgtatcgcattttcctattttgttgggcgccctcttggccgtagtaaaaaaaaaaa

SEQ ID NO: 883 - DNA, 1593 bp, Zea mays
  Clone ID: TF_ZmC2884_1
acgcactctgacccccgcccccgccgcagcgagacgagagcgcccgcaccaaggcaagccgaggcggcgagcgggacaggtagcggctgcctaccaccgccagcctccgcccacccaacaacagcaccaccaccacagtccggtcccgtgccttccaattcggtcgtcccacgcatcgattgagcccgcgcacgagcccatcgctttcgctttggcgtcttcgagaacccgcaagcaacctatatagcccgccgcgaattccgcctggcttcctcgtcgcccgcctcgtcgtcgcgccgcagtgagaggagggggaggcgatggatctcaacgaatgcgagaggagggggccggcggggccggatccgctgtcgaggcaggggtcgatctactcgctcacgttcgacgagttccagaacacgctcggcgggatggggggagggcttggcaaggacttcggctccatgaacatggacgagctgctgcggagcatctggaccgccgaggagagccaggccatggcgtcggcttcggcctcggcctcggcctcggtgtccgcgctgggggcagccgtcgacggcggggcggcgctgcagagacaggggtctctcgcgctgccgcgcactctcagcgtcaagacggtggacgaggtctggcgggacttcgtgcgggaggcgccgcccgggacggctggcggcgaggagccgcagcccaaccgacagccgactctcggggagatgacgctggaggagttcctggtcagggccggggtcgtccgtgacaaccctgccgcggcagctgctgctgtccctgcgcagccggttgctccacggccgattcaggcggtcagtaatggcgcctccatctttttcggcaactttgggggcgccaatgacgccggggctggagcgatggtgtttgcgccggtggggatcggggatcaggccatgggcaacgggttgatgcctggggtggctgggatggcaggtggtgcggtcaccgtgagtccggtggatacgtcggtggcccagctggattctatgggcaagagcgatgaggatctgtcatcgccaatggctccggtgccatacccctttgagggagtgataaggggaaggaggagcggtgcgggtgtggagaaggttgtggagcggcggcagaggaggatgatcaagaacagggagtctgcagctagatcccgtgcccgtaagcaggcttatacaatggagttggaagccgaagttcagaaactgaaggaacaaaatgcagaattgcagaagaagcaggaacaaataatggagatgcagcaaaaccaggtcccggaattggtcagcaatccatatgcacaaaagaagcgatgcctgcggagaacattgacaggtccctggtaactgagttgttgttgatcggactcgacaggatatttaacattatggtacttgtacattcttcaggatttggagaacccaaatttctgttgtatattagcgatcaacagagtcgaatgtaccagtgcataactttcttctcctgacactatgaaaaaaaaaaaaataaaaaaaaaaaaaaaagggcggccgccaccgcggtgga

SEQ ID NO: 884 - DNA, 299 bp, Zea mays
  Clone ID: TF_LIB5075-003-R1-XP1-H2
aacaaagactccagagaaggaagcaatccaaccgggaatcagccaggcgttcgagaagcagaaaggaggatcacttgaatgaactggaggcacaggtagcagaggtaagagtcgaaaactcttcgctgctaacgcggcttgctgctgttaaccacaagctcaatgaaactgctggtgacaatacggtgctaaaggcagacgtcgaaaacttactaccaaacgtgaacatgggagaggactcggcgaagaggccaacagggatgaaccccctgtaccctggcgagacggatatggcctcc

SEQ ID NO: 885 - DNA, 2683 bp, Zea mays
  Clone ID: TF_ZmC15321_1
cattggtactctcgaggccggccgggagggagtgacacgtcccgagcacgagctcgtcaacacccgaccccgtccgcactctagagtcgctacccgtgaatccgtgatttccattctaaaaattatccttcctcccgtgcctacagtcctacacctcgacgatgccaaaaccctagcgcagcagcgcgaactacacctctccccgtcctgttcctcgtggcgcggtagccatggcggagccggccatcctcgacccctcccccttcgatctccgccactatccggcgcacctcttcgacccggacatccccctcgccgccgccgacttcccactcggtgaattcgccggagatgacggctgtgatggcctagacttcgacgtgcccgtagatttctctatcgacgacttcctcctccggtctcctgaccgcgggcacgacggcgacgactccggcgagggctctgctgccggatccggccccaccgcatcttccttggcctccccggccacctccggcactaactccgccgtggccaacgtcggcaaccgcaaggtgaagcacgaggactcggacgagggaaggagcggcgccaccccgaattggagcctcaagcggaagcaggtgagtcccggagaagcaacctccgatggggccaagtgccgccgatccggcgatggggatgtttcgccatctgcatcggcgtcgcgtgcagccacggaggactccgatgagaggggcgtgggcggcgaggaagaggacaagcgccggactgcgcgcctgatgcggaaccgtgagagcgcgcagctctctcggcagaggaagaagcggtacgtggaggagctggaagagaaggtgaaatcgatgcactcggtgataaatgacctcagttgtaagatctccttcatcgctgcggagaacgccacactgaggcagcaactcggtggtgtgggggtgagtggaccaccacctggggtgtatccaccgccaccgccaggcattcatttcccttgggtttctgggtatgcaatgcggcctcatggctcccatgttccacttgttccaatcccgcgattgaagccgcagcatgcagcagctgcagtgaaggtatccaagaaaccagatgtcaagaagtctgtggagagcaagagtaagaccaagaccaagaccaagaccaagaaggtggcaagtattagccttcttggtttgctgtttgttgcatttgtctttggcgcttttgttccggggttcaatcatagtctcggactgagaggaaggagcgacaatgtgatgtttggaaattttggccagtctgatgctagggtgtttagtgtcactaaccatggtaaaggacctaaaggcagtttcaacagtagtgacatgatcagtactgatcatgacatgatgactgggcatgatgatggagcggggcagaaacaccgagctgcaaataactctagtgagatcttgcctgctttgttgtatgtgccgaggaatggaaaacatgttatgatcaatggcaatttgattattcattctgtgatggctagtgagaaagcagtggcacataagggctcaaatagtcagtcagttaaagatcacaaggagaccagtgttgctatagctcgctatctgtcaccacctggaaaggatatgaattcaaaagagatgttcccgccagatgcaccactgccacaatggttccgtgaaggaatggaaggacctgttttgaactcgggaatgtgcagtgaggtatttcagtttgatatttctccagcttcggccaaatctggtggcattatacctgcttcggccaaatctgcctcaagtgtcaatgctacccagaaaattctgaaaccttctcctgcttataggggcaagctgaaaaacaggaggatcatgtataacgaggcaattccacttactggaaaaacagcgaacaacacaaagcctcaggcttttaacagtactgctgaaagcagcaaggtacctgatactgatagcaagcctgcatcatcagttatcgtctctgtgctagctgatcccagggaggctggcaatggggatggtgatccaagagtatcaccaaaacccctctccaggatatttgtcgtcgttctgctcgatggtgtcagatacgtgacttactcgtgcacacttcctttcaagagtgccagcccacaccttgtggaactaaccttggggccggtgcagctttctggtccatgagcggctaaatagttggggttttctgatgcattggaggtagatgaatgaatacagtaatgtggtgttgcttgctaacaatgaaaacagacttcaagactcgcactcggcctgaggtaatttgagtttgtcgaaggtttgtagtgtggactggcgaaatgttgtgcaagttcaaccttaacccatgaggtttgtgcttctatgtagtcgagttattatactcacctctttctctggtactctttattgcggagctggaaaatataacagctgatgagagaagacaatatttggaaaataactttgtactagtatatattatatatatagtgtactatatatagggatgtaatatggttcggaaaatatccgtccggatccggattctaagatggtgaacactggttcagatggaattttcggaaaaaaaaaagaaaaaaaaaaaaaaaaaagcggcc

SEQ ID NO: 886 - DNA, 554 bp, Zea mays
  unsure (1)..(554): unsure at all n locations
  Clone ID: TF_LIB5025-063-A1-XP1-D12
gccggccggtccgggagttgaataatcaatttccattgggtggtggtttattcttttgttttgtttataaaaatgtcaagcaatagcagcaatactgatttaatcaatcaattattatctttacctgttgatttcactatggatccacttgttattcctacaaccacaaatgtagttcgtccaaagaaatcaagagttacacttgaagataaagatcaaaagacaaaagaaagaattttaagaaacagagcagcagctcaagagtctcgagataaaaagcgtcgttatgtttccgatttggaatcgtcaaataagagacttgaagaagaaaatggtcaaatgaagaaaaagatgaagcacttggaagaagaaaatatgtcgttggcttgtcaactggaatctatcagtaaacaatttgctgctctacaggctcaaatcaagtttaatacaaattctacttttctctttaatgacttttgcggntcagcacggatcgtanagaaggaaataatttgtggctaaagaaagaaaaaaaaaaaaaaaaaagggcccta

SEQ ID NO: 887 - DNA, 1742 bp, Zea mays
  Clone ID: TF_ZmC191_1
ccggccgggaaaaaaaaaaatcttctcttcttcgcctcttcggtttccctttcactttttttaatctccgcttccactgttccaccaaaccaagccgagaaatttctcctaaatttcagatcaaatcctcctcctcctcctccccctccccctctccgaggattctgcccagcagcgcggcgatccgcctcgatccggaatggagcgcgtcttctccatggaggagatccccaacccctactgggccccgccgcaccctcaaccggcggccggcggcgctgttgctgcaccaggtggagtaggaggagcgggggacgcggcgggcgcgatgaaccggtgcccatctgagtggtacttccagaagttcctcgaggaggccgtgctcgacagtccgggtcccgtcgccggcgtgggtagaagcagcggacaagctggagttgaggcggcggagagcaagccgctgggcgccgcggcgccggcgtccgtctcgagctcggtcgttgaccccgtcgagtacaacgcgatgctcaagcagaagctggagaaggacctcgctgccatcgctatgtggagggcttctggtgcagcacctccagatctttctgcgactgctgcttccttgccaagtgtcggtgttccgcatgcagctcctcttaaacccgtcggaggtactgaaagtctagttcaaaacatgctagctggtgctccagtaggggggtcaggtccacatgtagtacaaattgctgatatccctgttaagcaaaccactagctcttcctcacgagagcagtcagatgatgatgacatggaaggcgatgctgagacaaatggaaatggaaaccctgttcaacaaagacaacagagaaggaagcaatccaatcgggaatcagccaggcgttcgagaagcagaaaggcagctcacttgaatgaactggaggcacaggtagcacagttaagagtcgaaaactcttcgctgctaaggcgacttgctgatgttaaccagaagttcaatgaggctgctgttgacaatagggtgctaaaggcagacgtcgaaaccttaagagcaaaggtgaagatggcagaggactcggtgaagcgggtaacaggcatgaacgcattgtaccctgccgtgtcggatatgtcttccctcagcatgccattcaatggctccccttccgactccgcctctgatggcaccgtccccatccaagatgacctgaacagttacttcgccaacccaagcgaaatcggaggcaacaacggttacatgccagatatagcctcctcggttcaacaggacgacaattttgtcaacgggtatcaggctgctggcaagatgggcagaacagactcgctgcagcgggtggcaagcctggagcacctccagaaaagaatgtgcggaggcccggcttcatccggctcgacctcctaggtttcatatgaaaaagtccctggtgcctaacggcaagaatgctaaattaacaatttcaacatgctttgtactggacattgataatcctgcgatgcgcattagtgcgttatggacttgtgggtcaattgctatttggcgtgtgctggctgctcactgtagtgagcagaacaagttccagtttctatcgaagagcaccctctccttttcgctagtgacttatgaatggtcgatggtttattagcaacattgtgtctttcgcaagttcagtaatgaatggtcgaccagggatgaaaataaataacttataaag

SEQ ID NO: 888 - DNA, 1280 bp, Zea mays
  Clone ID: TF_ZmC191_3
ctgacgcgtgggcggacgcgagggggattctgcccagcagcgcggcgatccgcctcgatccggaatggagcgcgtcttctccatggaggagatccccaacccctactggaccccgtcgagtacaacgcgatgctcaagcagaagctggagaaggacctcgctgccatcgctatgtggagggcttctggtgcagcacctccagatctttctgcgactgctgcttccttgccaagtgtcggtgctccgcatgcagctcctcttaaacccgtcggaggtactgaaagtctagttcaaaacatgctagctggtgctccagtaggggggtcaggtccacatgtagtacaaattgctgatatccctgttaagcaaaccactagctcttcctcacgagagcagtcagatgatgatgacatggaaggcgatgctgagacaaatggaaatggaaaccctgttcaacaaagacaacagagaaggaagcaatccaaccgggaatcagccaggcgttcgagaagcagaaaggcggctcacttgaatgaactggaggcacaggtagcacaattaagagtcgaaaactcttcgctgctaaggcggcttgctgatgttaaccagaagttcaatgaagctgctgttgacaatagggtgctaaaggcagacgtcgaaaccttaagagcaaaggtgaagatggcagaggactcggtgaagcgggtaacaggcatgaacgcattgtaccctgccgtgtcggatatgtcttccctcagcatgccattcaatggctccccttctgactccgcctctgatagcaccgtcccggtacaagatgacctgaacagttacttcgccaacccaagcgaaatcggatgcaacaacggctacatgccagatatagcctcctcggttcaacaggacgacaattttgtcaacgggtatcaggctgctggcaagatgggcagaacagactcgctgcagcgggtggcaagcctggagcacctccagaaaagaatgtgcggaggcccggcttcatccggctcgacctcctaggtttcatatgaaaaagtccctggtgcctaacggcaagaatgctaaattaacaatttcaacatgctttgtactggacattgataatcctgcgatgcgcattagtgcgttatggacttgtgggtcaattgctatttggcgtgtgctggctgctcactgtagtgagcagaacaagttccagtttctatcgaagagcaccctctccttttcgctagtgacttatgaatggtcgatggtttattagc

SEQ ID NO: 889 - DNA, 1274 bp, Zea mays
  Clone ID: TF_ZmC3759_1
cgaacccgcttccttcctgtcccgactcggggcgggaaggcccacataagcggacgcgcgatcaggcacctgggctgcgatcatagcgacaaaatatctcgccgttcccatggacatcgacctcttccccgacatcgaccttgacgccctcctcgcctccttctccggcgaccccgccgccgtctccggcctcatcatcccgtccccgcctccgccggcgccggcgacggcgcacgatgcggaggcggggtcgccggagtcggtgacctcccggacgaacccgctcggggaggtggcgctctcggagatcgagaggctcctgatgcaggagggggaggcggaactgggcggggaggtcgatgggatcagcgtggaccagttcttcgacgcgctgtacgacggcgaggaggcgaaaggtgagcgggaggcgggggcaagcgcggatgtggactccggcagggacgatgtgctggaagtcgtgacgccagaggcggggacggtggaggtggatggcgatgatcccatcagcaagaagaagatgaggcaaatgaggaacagagattccgccatgaaatccagggagaggaagaagtcgtacataaaggacttggagacaaagagcaagcacttggaggcagagtgccgtcgcctcagctacgcacttcagtgctacgcagctgaaaacatggcactgcgccagagcttgctgaaggataggcctcttggtgctcccacagccacgcaggagtctgccgtactcacggaaaccctgccgctggtttccctgctttggctggtgagcatcgtctgcctgttcctgatgcccgttctgcccaaccgaagcccagctgctccaagcagcggcggaagagacctcgtgatggcagccggaaagacaagcagtgagaccccagagatactggaactcatcctccatggaaggcgttgcaagagcacgagggcgaagattaagctatgtattttaccatttcatgcaggagctgcttgctagtagttgctaggctttgagcctcttgcaagcttacctctatatgtagtgtacccgcaaatcttaccgtgctcgctatgcgcctgtcttgcagagaagcctgtcgatatccatggagtagtaccttttttttgtttaatagctcctgtgctacccagaatatgtttaaaatctggattttgtgttattttctatttcttcaccttatctgtagttgctcctgatataaagttccttcgctcgaaaaaaaaaaaaaaggccccta

SEQ ID NO: 890 - DNA, 788 bp, Zea mays
  Clone ID: TF_ZmC382380_1
gcagctagctagagctccattttagattttactaactcatatcatgaaagaatatagatacagcaagtgatctcctatatgctgatatatatatatgctccttctccttgcacaaatgcaccaccgaaattagtactaagtattttttacctacgtactcaacagtactactacagggctactgagcacggcatttctaagccacctcagggctcagggctgcagcttcggcctctcccatcagttccatctcgctgagtcttctctgcaggccagcagcttcttctctgagcttggcgttctcacgagccaggagagcatgcttggcggtcacgtggttgagctcgaccagaagcctctggttggtgcccaggagctcggcgacctgcaatgagagttcgtacaggcgcctctgcttcctcacgcgcgacctcctcgcggactcacggttcgacgctaaccttctcttcttcctctcgacgtcgttgccacgcctctcctgatgcttgtccgccgccgcggcagacactgagctgacggtggtagtagtaacgctgccattgcagctgcacggatatgggtcgagatcgaccatgtcgaaggtgctgaaatcatacataggatcgtcattctgtggtaggaaaaggctgcccaagtccaagccagggaggcaagctaaatcggctgcccagttttgttgcatctctgaatggagtaggcttggtggcttgcaatgtggagaaagaagggaagaggcagtacgtggtgttctactgcaattgcaaaag

SEQ ID NO: 891 - DNA, 1637 bp, Zea mays
  Clone ID: TF_ZmC3890_1
tacctcgaggccggccgggccgggctttcttcgcctccgaattccgatcaccaaaaaaaggcctttcttttcttttcgtcgccctctcggtgctctgcttcgctgcgtcgcccgcccgtctctaaaagccttgtgtggatcgtggacgccgacgcggccgcagcagcagccacgggacgggagtagaggcgcagagagagagaaagagagaaagagagagaggttgtgctcgctgcctgccgctgagagacggatgaagaagtgcccatcggagctggagctggaggccttcctccgcggccgggaggacgccacggcggcggcggcggcggcggcggtggccgagcagaagcctgcgcacgacgtcgctgcgctggcgccgttcggcgccggtggcgtgttcccctccagcgatctgtccgccttcagcttcgctgactcgaacaccctcaatggaactggaaacatccataatcacctttggtcccataaccacaacgtcaggcatcccgcagtctccacgacgatcgagtcgcagtcgtcgatctgtgcagctgcagcagcaagtccaacatcggctaccaacctgtacctgaaagagagccaggctctgggcggcacgagtggttccgactccgacagcgattcgctgctggacatcgagggtggcccgtgcgagcagagcacgaacccacaggacgtgaagaggatgcgacggatggtgtcgaaccgtgagtctgctcgacggtccaggaagaggaagcaagcccacctagctgaccttgagacacaggtcgaccagctgcgaggcgagaacgcgtcgctcttcaagcagctgacggacgccaaccagcagttcacgaccgcggtcacggacaacaggatcctcaagtcggacgtggaggccctcagagtcaaggtgaagctggcggaggacatggtggcgcgcggcgcgctgtcgtgcgggctgggcagcctggggctgtcgccagcgctgaacccgcggcaggcgtgccgcggccccgacgtgctgtccgtgtccggcctggacttccccggcgccgacgacgcctgcttcacggggctgtccccggcggagcagctgcagctccagagctcccccctgcagagcatcgccgccagcctcgagagcctggacaaccggatggccagcgaggtcaccagctgcggggggcccggcgtcgacgtctggccgtgggaccaccactccaacggcggcctgtccaagtgaagccggagacgccgggtgggagtggggtgagactcgcgccgctcgccgacggcacctatcctgtcctagtgtatgcgtatatcgatatgcatggcgggcgctagctatgaccatgagccgccgttatttctgtgttcgctggagtggtgaaagtgaacggacttgagtttttcagagtccctcgtctccgtcggtacatttactagttctgtaatagaactgactagcttaagctcgtgctactacatatatatatgtatgctgagagactgaactcgaagcataatcatgctaccatattatgtcatcattacatttctatctctaaaaaaaaaaaaaaactcgagactagttctctcctcgtgccgccgatatatttattccg

SEQ ID NO: 892 - DNA, 1236 bp, Zea mays
  Clone ID: TF_ZmC3890_2
gcaacaattagttcgaagatcattcagaacagtgcgcagtgccttctgtgctacggatttgaaaatcattcagaacttgtgctttttgaataaaaccagctgcagccgctaggcaactcgcggtttcgacagaaattagatgtttgcagcagacaagttgggcttaaataattgcagggcgtaatcctaggttctttctagtagctcacagtaccgactaccgagttcaatcattggcatgcagctgctgcagcagcaagtccaacatctgctaccaacctgtacctgaaagagagccaggctctgggcggcacgagtggttcggactccgacagcgattcgctgctggacatcgagggtggcccgtgcgagcagagcacgaacccacaggacgtgaagaggatgcgacggatggtgtcgaaccgtgagtctgctcgacggtccaggaagaggaagcaagcccacctagctgaccttgagacacaggtcgaccagctgcgaggcgagaacgcgtcgctcttcaagcagctgacggacgccaaccagcagttcacgaccgcggtcacggacaacaggatcctcaagtcggacgtggaggccctcagagtcaaggtgaaactggcggaggacatggtggcgcgcggcgcgctgtcgtgcgggctgggcagcctggggctgtcgccggcgctgaacccgcggcaggcgtgccgcggccccgacgtgctgtccgtgtccggcctggacttccccggcgccgacgacgcctgcttcacggggctgtccccggcggagcagctgcagctccagagctcccccctgcagagcatcgccgccagcctcgagagcctggacaaccggatggccagcgaggtcaccagctgcggggggcccggcgtcgacgtctggccgtgggaccaccactccaacggcggcctgtccaagtgaagccggagacgccgggtgggagtggggtgagactcgcgccgctcgccgacggcacctatcctgtcctagtgtatgcgtatcgatatgcatggcgggcgctagctatgaccatgagccgccgttatttctgtgttcgctggagtggtgaaagtgaacggacttgagtttttcagagtccctcgtctccgtcggtacatttactagttctgtaatagaactgactagcttaagctcgtgctactacatatatatatgtatgctgagagactgaactcgaagcataatcatgct

SEQ ID NO: 893 - DNA, 285 bp, Zea mays
  unsure (1)..(285): unsure at all n locations
  Clone ID: TF_700154561H1
gcggacctgagtacggccggaatccgggcgaccacgcgccgggacgctggttttataagggtttcggcggaggcgcccggtcgctggcgatggccgacgacggcgagaccacgagggcagcggcggcggcggaggcgtccgggagcaggaccggttcctgcccatcgccaacatcagccggatcatgaagaaggccgtcccggccaacggcaagatcgccaaggacgctaaggagaccctgcaggagtgcgtctccgagttcatatcatcgngtacagcgaggcc

SEQ ID NO: 894 - DNA, 549 bp, Zea mays
  Clone ID: TF_LIB4729-029-R1-K1-G4
gccaacccattcacactgacgaatccagcggcggcggatcacaccaacccaactgcaagccctagccatgtcccccgccaccgccgacgaacccagcgtcgcaatggaggagcagcccggaaaggagagcgaggaagccgccgatgcaatggaagagcaactcggaaaggagagcgaggaggcggcagagtccgccgaggcagcgcggcaagtcgaggtggagccagaggagggcgtcgaccccgccgaggcaatggagaaggctggagaggaggcggaggccgaagagggggcgtcgctgcggccggcgctgccggtggggagggtcaagcggatcatgcgggtggaccgggacatcaagaaggtgacgagcgaggcggcgctgctcatcgccgccgccaccgagctcttcctgggcagcctcgcgacaggggcccacgccgcggcggcgcggcgcagccggcgcactgtgcgtgccgtgcacgtccgcgccgcgggccgcgcgcacaggcccacggcggacttcctgcttgactgcctcgctgccga

SEQ ID NO: 895 - DNA, 614 bp, Zea mays
  unsure (1)..(614): unsure at all n locations
  Clone ID: TF_LIB4744-036-R1-K1-A1
gaggctggccgggaacgactcgcgccgcctccggtcgcgccgggtccaggtaaagcggcttccatctcctcggtctcagcgcgtcatcccctcctccttcctcttccgtttcccttagggttggagtagacacgtcggctcaaggatccttcgaggacacttattgattttgaacaaagatctagcatggaaccatcctcacagcctcaaccaatgatgggtgttgggtcacaaccttatcctgctgctgctccctatgtgccagtacctggatctcttgctgttcctcctggctcacagccagcagcagcattccccaatccaactcaactcagtgctcagcaccagatggtgtaccagcaggctcagcaatttcatcaacaacttcagcaacagcaggaacaacagctcagggagttctggactacccagatggatgagatcaagcaagcaaatgacttcaagatccacaccttgccacttgcaaggataaagaagataatgaaggctgatgaggatgtgcggatgatctctgcagaagctnctgttgtgtttgcgaaggcatgcgaggtattcatattagagctgacattgaggtcatggatgcacacaga

SEQ ID NO: 896 - DNA, 608 bp, Zea mays
  unsure (1)..(608): unsure at all n locations
  Clone ID: TF_LIB3689-246-Q1-K6-E11
gggggaggtcgacgagncagagagnagaggccaagaggcttcctctccccattcctcccttccgtgccctagccgagccagccgcgaggaaggaggcatcccgccgtctcgcctggcgcccgcccgtcggccgaccttctgccgcagcttccaattgtaaaaagatcatagatttttgggcaggagcgagtggatatggaaccatcccctcagcctatgggtgtcgctgccggtgggtcacaagtgtatcctgcctctgcctatccgcctgcagcaacagtagctttacagtcagggcagccattcccagccaatcctggtcatatgagtgctcagcaccagattgtctaccaacaagctcaacaattccaccaacagctccagcagcaacaacaacagcagcttcagcagttctgggttgaacgcatgactgaaattgaggcgacgactgatttcaagaaccacaacttgccacttgcgaggataaagaagatcatgaaggccgatgaagatgttcgcatgatctcagctgaagctcctgtagtctttgcaaaagcttgtgagatattcatactggagctgacacttaggtcgtggatgcacactga

SEQ ID NO: 897 - DNA, 799 bp, Zea mays
  Clone ID: TF_LIB4826-107-A1-N1-C9
gcgattgggttcctcgaggccggccgggataaggagtgaagccatggatttcatccggctttggattgggtgaatccatacctcacacccaatcccatggtgggattaaaaatccatgtactctaaaagaattggattggtgtgaaggaagtcctagtgatggtgtagaccgatgatatgtggacattgaaggtctagaccgttgctgagatgtcacgtcacacggttacttgctgccataactgaccttctttgtctgtagtgcaccagcaggtggcggcatcggcgccaccgaggaggcgctggtggtccccgctgccggtgcagctccatgccacagcgcgtacacgtcagtatcacgcgccagctccgtgacgtcaggcacggacggcaggcccagttgcagcgtgaggttcggcggcggcggcggcactgccgtcgtcgtccctctctgcacggtcggtgccggcggtgctacggcctgctgctggttattaacggcctcacggtacagacgtaggtacacggacatgggctgcacgtagtcagccagtccgaggttagcaaagccgacgatcaggtcgtcggcggtgatggtggaggcggcggtctcgccggcactcttgcgtggcggcgcgtacgagggccgtggagaattggacgatgcactggtccatggtctccttggcgccgccggtgaccctcgagtcttgcggcaggacttggcgcatgatacgcgttatggtgcctttcgggatggtgtactcttctagtgggtttgaccctgcagatatttttt

SEQ ID NO: 898 - DNA, 1454 bp, Zea mays
  Clone ID: TF_ZmC4739_2
accgagcgcggattcgttctattcctatcaggacttcaacgccttatttgtacccgccttaccgcgcgccctaaccctaggccctcaattccactctgcccgagcaagccgaattgtcgtccgaattcgctcgcggggagcacttgctacctcgcgcccgccttctgtcgcgcggattcgttgctgcgcctggagatggacccgatggacatcgtcggcaagtccaaggaggacgtctccctccccaaatagttgtttaaaatcttctactgctgattgaactttctgctttgcactttagcaacaatgtttaagataattaaggagatgcttcctcctgatgtacgagtggcaagagatgcacaggatcttcttgttgaatgctgtgtagagttcatcaatctcctttcgtctgaatcgaatgaagtgtgcagcagagaagagaaaaaaacgattgctcctgagcatgttatcaaggctctaagtgatcttggcttcagagagtacattgaggaggtttatgctgcatatgaacagcacaaacttgatactttggattctccaaaagctggcaaattcactgggattgagatgacagaggaagaagctgttgctgagcaacaaaggatgtttgctgaggctcgagcaaggatgaataatggagcccccaaaccaaaggagacagaacaagagccgccacagcaaccacaagcacaaccccaacttcagctgcatactgaaccacagcaacccgtgcaatctcaagtgcagttgcattcgccaacacagcattccctccaacctcaagtgcagctgcacccccagccacaacagctcccacaagtgcaggtgcactctcagacgcagctgcaccctcagccacagcagccccaagtgcaggtccatccgcagctgcagcaactcccacaattacaggcccactcgcagccaccgcaaccccaagtgcaaatccaccacagccgcagcagcccccacaagtgcagttgcagtcatcagtccagcagacctcccaaccccaacctcaggtacatctctacaatcacagggggggctcacaagcgcagctgcagccccaactgccaggtcagctgcagacacaggggcaaaccggacctggcattgacagttagagactactgctggcatatactaggaacctgtatgcttgcttgtgactcgttagatcctgatttaggtttctgtgcttcctgtacaatgtaaatccagtgtgattgcagttgccttgttgctaataatgcgaaaccgttagttactgatgatgtccttactgtgtcgaatactgaatgtcatggcgtggcttatgtgccatgctgaatgatgttctgtggtcattgtaatagcctaacttgacatctgtccatgatgatagtgattgatttgaatgagctcttggtgcaaaaaaaaaaaaaaaa

SEQ ID NO: 899 - DNA, 1578 bp, Zea mays
  Clone ID: TF_ZmC30175_1
ctcgaggccggccggggacacccttggtcccaacttacaaagcacagagaagacctacaccgcacctgcacacaaggtagcaacatgaataatccccaaaaccctaaagccagtgctccttgcaccttgccatcggagcttcccaaagaagcagtggcgaccgacgaagcaccgccgccaatgggcaacaacaacaacacggaatcggcgacggcgacgatggtccgggagcaggaccggctgatgcccgtggccaacgtgtcccgcatcatgcgccaagtgctgcctccgtacgccaagatctccgacgacgccaaggaggtgatccaggagtgcgtgtcggagttcatcagcttcgtcaccggcgaggcgaacgagcggtgccacaccgagcgccgcaagaccgtcacctccgaggacatcgtgtgggccatgagccgcctcggcttcgacgactacgtcgcgcccctcggcgccttcctccagcgcatgcgcgacgacagcgaccacggcggtgaagagcgcggcggccctgcagggcgtggtggctcgcgccgcggctcgtcgtccttgccgctccactgcccgcagcagatgcaccacctgcacccagccgtctgccggcgtccgcaccagagcgtgtcgcctgctgcaggatacgccgtccggcccgttccccgcccgatgccagccagtgggtaccgcatgcagggcggagaccaccgcagcgtgggcggcgtggctccctgcagctacggaggggcgctcgtccaggccggtggaacccaacacgttgttggattccacgacgacgaggcaagctcttcgagtgaaaatccgccgccggaggggcgtgccgctggctcgaactagcctagcttctcagttccccgtgtacaataagaggggcggtcgcggcgccgcgccgcgcccttgggttgggccgggcgctatgctgcagtttggtttgtaaactaacgagcctagggtagctggtgcacgcgcgccacctcgccggacgtcgccgtcgtcgtcggcatggacttaaccggcgggccctgttgttatttctcaagtttgtagccaacgcactgttcggtgcgttccataatttaatttaccatgttgctctcgaaaaaaaaaagaaaaaaagaaaaaaaaaaaaaaaaaagcgtgggcggcgtggctccctgcagctacggaggggcgctcgtccaggccggtggaacccaacacgttgttggattccacgacgacgaggcaagctcttcgagtgaaaatccgccgccggaggggcgtgccgctggctcgaactagcctagcttctcagttccccgtgtacaataaagggggcggtcgcggcgccgcgccgcgcccttgggttgggccgggcgctatgctgcagtttggtttgtaaactaacgagcctagggtagctggtgcacgcgcgccacctcgccggacgtcgccgtcgtcgtcggcatggacttaaccggcgggccctgttgttatttctcaagtttgtagccaacgcactgttcggtgcgttccataatttaatttaccatgttgctctgg

SEQ ID NO: 900 - DNA, 1424 bp, Zea mays
  Clone ID: TF_ZmC2163_1
ttaagaacctagtaggcagacccggccggctaggaggggactagggggaggtcgacgagacagagagagaaggccaagaggcttcctctccccattcctcccttccgtgccctagccgagccagccgcgaggaaggaggcatcccgccgtctcgcctggcgcccgcccgtcggccgaccttctgccgcagcttccaattgtaaaaagatcatagatttttgtgcaagagcgagtggatatggaaccatcccctcagcctatgggtgtcgctgccggtgggtcacaagtgtatcctgcctctgcctatccgcctgcagcaacagtagctcctgcttctgttgtatctgctggtttacagtcagggcagccattcccagccaatcctggtcatatgagtgctcagcaccagattgtctaccaacaagctcaacaattccaccaacagctccagcagcaacaacagcagcagcttcagcagttctgggttgaacgcatgactgaaattgaggcgacgactgatttcaagaaccacaacttgccacttgcgaggataaagaagatcatgaaggccgatgaagatgttcgcatgatctcagctgaagctcctgtagtctttgcaaaagcttgtgagatattcatactggagctgacacttaggtcgtggatgcacactgaggagaacaagcgccgcaccttgcaaaagaatgacattgcagcagcgatcactaggactgacatttatgacttcttggtcgacattgttcccagggatgagatgaaggaggacggaattgggcttcctagggctggtctgccacccatgggagccccagctgatgcatatccatactactacatgccacagcagcaggtgcctggttctggaatggtttatggtgcccagcaagggcacccagtgacttatttgtggcaggagcctcagcaacagcaggagcaagctcctgaagagcagcaatctgcatgaaagtggctgagaatattgctcagaagctatcacctgattcagagttctcattttaggttgtccaaactgcaggttttcttagtaatatcgttggttatcaaactgaaacaggcgattctaagtagggtgtagcatcatggtagtttcatttctgcttgtgatgttagttgaaaggataatgattagtggctagtggattaaagttaccataccatttccttctattccgaaagtttgcctccatgaggcctctgatataaaaatgctgggtgttaatgcttcaaagcaaagcatgtgttgtgccgttcatgcttctttattgattcgcgtggaaggtgttctgttaattcatggaaattctgttccgcttgtgttgggcggttaaaaaaaaaaaaaaaaaaaaaaaaaaaaaaaaaaaaaaaaaaaaaaaaaacaaaaa

SEQ ID NO: 901 - DNA, 673 bp, Zea mays
  Clone ID: TF_LIB4764-066-R1-K1-E2
attgggtacctcgaggccggccgggagccgccagcgatcccaacccccgactcctccggcagcccgcaacgactcgcgccgcctccggtcgcgccgggtccagggtcaggacacttattgattttgaacaaagatctagcatggaaccatcctcacagcctcaaccagtgatgggtgttgggtcacaaccttatcctgctgctgctctctatgtgccactacctggagctcttgctgttcctcctggctcacagccagcagcagcattccccaatccaactcaactcagtgctcagcaccagatggtgtaccagcaggctcagcaatttcatcaacaacttcagcaacagcaggaacaacagctcagggagttctggactacccagatggatgagatcaagcaagcaaatgacttcaagatccacaccttgccacttgcaaggataaagaagataatgaaggctgatgaggatgtgcggatgatctctgcagaagctcctgttgtgtttgcgaaggcatgcgaggtattcatattagagctgacattgaggtcatggatgcacacagaggagaacaagcgccggaccttgcagaaagacgacattgcagctgccatcacccagactgatatatatgacttcctggtggacataatcccgagggatgaaatgaa

SEQ ID NO: 902 - DNA, 523 bp, Zea mays
  Clone ID: TF_LIB3732-044-Q6-K6-C4
cccagcgtccgaggaaggctacgggcaccagggccacctgttgagccccgtgggcagcccgctgtcggacaacgagtccggcgccgcggcagcggccggcggcggcgggtgcgggagcagcgtggggtactgcggcggcggcggcggtgagtcgccggccaaggagcaagaccggttcctgccgatcgccaacgtgtcgcgcatcatgaagcgctccctgccggcgaacgccaagatctccaaggaggccaaggagacggtgcaggagtgcgtgtccgagttcatcagcttcgtcacgggggaggcctccgacaagtgccagcgcgagaagcgcaagaccatcaacggcgacgacctgctctgggccatgaccacgctcggcttcgaggcctacgtcgccccactcaagtcctacctcaaccgctaccgcgaggccgagggcgagaaggccgccgtgctaggcggcggcgcgcgccacggcgacggcggcggcgcggcggacgacgccggcccactcgccggg

SEQ ID NO: 903 - DNA, 825 bp, Zea mays
  Clone ID: TF_ZmC10894_3
gcacgagtgaccgccggaacaccctaggcaatggagcccaaatccaccacccctcccccgccccccgtgatgggcgcgcccatcgcgtatcctcccccgcccggcgccgcgtaccccgccgggccgtacgtgcacgcgccggcggccgcgctctaccctcctcctcccctgccgccggcgcccccctcctcgcagcagggcgccgcggcggcgcaccagcagcagctattctgggcggagcaataccgcgagatcgaggccaccaccgacttcaagaaccacaacctgccgctcgcccgcatcaagaagatcatgaaggccgacgaggacgtgcgcatgatcgccgccgaggcgcccgtcgtcttctcccgcgcctgcgagatgttcatcctcgagctcacccaccgcggctgggcacacgccgaggagaacaagcgccgcacgctgcagaagtccgacatcgccgccgccgtcgcgcgcaccgaggtcttcgacttcctcgtcgacatcgtgccgcgggacgaggccaaggacgccgactccgccgccatgggagcagccgggatcccgcaccccgccgccggcctgcccgccgccgatcccatgggctactactacgtccagccgcagtaacgaatttgcttccttatcatggtttcgcttccatgcagcctttgcgggtttttagtaaactattattattactgagagtgccctgttgttacccattgctctgttgttgccacccaataactcgatgacctgatgattgatgtgcccgttccgtaacaagtgtaaaaaaaaaaaaaaagggcggaaaagaaa

SEQ ID NO: 904 - DNA, 1079 bp, Zea mays
  Clone ID: TF_ZmC11482_1
cgagcccgcgtccggagagagcaagggacggggcgactattagctagtactagtagcgaaaaattaaggccaaacgacaacgacgcacggcggcatggcggccggccaccacgggcagccgccggacggggacgacgggcgcatcccccagtcggtcgtcggggggtgagccagaccggctgctgcccatcgctgaacgtcgggccggatcaatgaaggaaatcgctaccgcccaacgccaagatctccaaggaggccaaggagacgatgcaggagtgcgtgtccgagttcatctgcttcgtcaccggcgaggcctccgacaagtgccacaacgagaagcgcaagaccatcaacggcgacgacctctgctgggccttcggcgccctgggcttcgacgactacgtcgaccccatgcgcggctacctccacaagtaccgggaggtcgagggggaccgcgctgccgcagccgcgtcctcctcccgcggcggcggagaccaccaccccgcgtccgcgtccacgtccacctcgccccccgccgcagccccacccgccggtcatttcatgttcggcgccgcagccatcgaccgccccgacaacaacacctcatccgccaggcccttttgatccaacttctacttcgccagctgctctttaatttgcttgttattcgtcagatcaacaacaaaagctacgcgcttatcttattattttttactactgctcattttttgagaggtgaatcgtcataccaaatccaaattactagctatctctatctatctatctatgttccacagttccacacacataaatagcttatttgccttattccttattagtgctagctagccacaacaaaagctatgagcatgcatgtacccagtagtagctagctagaggaggtggactagagttcttgctgctaccgattcatctctggggtacgtatcatcggtgaataaggacttggggttgggacgatggtggatgaagacgaagaccctgccgcctactataccgcgagtcgatgtaactacttcgagtgcccatcatcgatgaatttgattcgattttttatt

SEQ ID NO: 905 - DNA, 806 bp, Zea mays
  Clone ID: TF_ZmC587803_1
acgtttcaccctaaccctagctacgatccccttctgcaacccggtcgtgtctcagggcgcatcgccgaaggccaagccctccctccctagcagcgcccggacccatcgatcccggcgggacgcgccgtcggcgccccaggctcaagctccatcgcgcgctcgacggcgagggatggatccgatggacatcgtgggcaagtccaaggaggacgtctccctccccaaatcaacaatgaccaagattattaaggagatgctaccgcctgatgttcgagtagcaagagatacacaagatcttcttgttgaatgctgtgtagagttcatcaatcttctttcttcggaatccaatgacgtgtgcagccgggacgacaagaagactattgctcctgaacatgttattagggctctgcaggatcttggcttcaaggagtacgttgaagaagtttatgcagcctacgaacagcacaagcttgaaactctggactctccaaaagcaaccaagttcactggtatagagatgactgaagaggaagctgttgcggaacagcagagaatgtttgctgaagcccgagcaaggatgaacaatggagctgccaaaccaaaggagcctgcattagaaccacagaatcaaccccaacagcccccacaacctcaactgcagctgcatcctacagcacagcagcctccacaaccgcaatcgcaactgcatcatcctcaatcacagcagcccctgcatcctcaactgcaaccgtatactcaggctgcaccacagcaacccctgcatcctcaactgcaaccgtatactc

SEQ ID NO: 906 - DNA, 1075 bp, Zea mays
  Clone ID: TF_ZmC11482_2
ctcagtctcaaactccccgctctcccccgcccgtccagctcgtgctccgcctccgctgctctgtcctcttccctcctctgcgtttctcctcagagctgtttgacttgaccggacagtgctgttcggtggctcggccgcgatgccggactccgacaacgagtccggcgggccgagcaacgcggagttctcgtcgccgcgggagcaggaccggttcctgccgatcgcgaacgtgagccggatcatgaagaaggcgctcccggccaacgccaagatctccaaggacgccaaggagacggtgcaggagtgcgtgtccgagttcatctccttcatcaccggcgaggcctccgacaagtgccagcgcgagaagcgcaagaccatcaacggcgacgacctgctctgggccatgaccacgctcggcttcgaggactacgtcgagccgctcaagctctacctgcacaagttccgcgagctcgagggcgagaaggcggccacgacgagcgcctcctccggcccgcagccgccgctgcacagggagacgacgccgtcgtcgtcaacgcacaatggcgcgggcgggcccgtcgggggatacggcatgtacggcggcgcgggcgggggaagcggtatgatcatgatgatggggcagcccatgtacggcggctccccgccggccgcgtcgtccgggtcgtacccgcaccaccagatggccatgggcggaaaaggtggcgcctatggctacggcggaggctcgtcgtcgtcgccgtcagggctcggcaggtaggacaggttgtgaccgtcgccgtccatgcttgcatggccatggcatggctcagtcccgccgccggcttcttgcttggtgtcggtaattagcgctggttaagttaaccttcggtttttccccccttttcttttcgtggtaagtaatgttgtgctgaatggagacagtgatatggttaagatagctccataacctctcggtaattaatcctgtgatttgtactcctaagctgctgctaaactgagctatgacacaatacaaatgctgccattaacccaaaaacaaaaaaaaaaaaggagg

SEQ ID NO: 907 - DNA, 1128 bp, Zea mays
  unsure (1)..(1128): unsure at all n locations
  Clone ID: TF_ZmC9362_1
attgggtacctcgaggccggcctggactctcccgtcgcagcctgaagctgtgcgccccggttcggtgggcgtgaaaggggagaaaagagggcgggaaggaccgcggattttgctagggtttgcggtttctgcttcacactgcctcctcagtcctcaccaccacagccgtcgcgcgcaggagggtagggaggatgccacgtaagatcaccttggtcaaggagggggagccgcagccggtggacgctgctcaaggggagcccgctccggcaccggcggcaccgacggccgcgttgacggaggcggaggtggacgagctgcccagggccatcgtgcgccgccttgtcaaggacaagctttcccacgtcgccggtggggaaggagccgaggtcatcgtcaacaaggacgccatggccgcgttcgccgagagcgcccgcatcttcatccactatctctccgccactgccaatgatatgtgcaaggaatcaaagaggcagaccatcaacgctgatgatgtcctcaatgctcttgatgacatggagttttcggagtttgtagagccccttaggacttcactgcaagagtttagaaacaaaaatgcagacaaaaggtcagaagcaaagaaacaacagaaggaaaagagaaggaaattaaatgaagagacacttccgcagaaagaaaatgatccagctgatgatgccaaggagaatggagtagcttaatcgcaagaaaaatgaagaatgaatacaattaacttctctgctggaggggcagtaacacgcagaatcaaaaccatggcagtatttgttggtagttgtatttgcttttgctccatgtagcctctactccaaaacactttcttgacttgatatgatgctgtataattctagtgtcctatcagttttcagcttgcttatggtgcaattaaaattctatgtgcctgatgaaattgttcttatgaatgaagaatgataccagcactatgttcgttggcaaattaaaaaaatttattcttccagtatgtaacatcacattccctccacagtcccaccatctctgattagatccagattacccccagntactgtgattcttatcctctngtgctctgtttggggttggaatttggaa

SEQ ID NO: 908 - DNA, 1560 bp, Zea mays
  Clone ID: TF_ZmC10894_1
accacacgtccgcccacgcgtccgcctacgcgtcggcggactcgtgtgccgaccacgcgtccgggcttggcttgggactgggccgcccggccgcgaggaataaactcactcctgccttcatacgtatccatagccgcggcagtacgtgtatgtggttagctatacgcgacctcagctcgggcgcaagctacaaccccgaccaggcgagaagaagcatcgatagtgtgacgagctaacccaccagcagcaacgtaatccaaatccatggacaaccagccgctgccctactccacaggccagccccctgcccccggaggagccccggtggcgggcatgcctggcgcggccggccggcacgagaagcaccttcctcttcctcttcctccgccccccaatccccctcgtctcacaaccctagctgcccccgaatccatggatcctaacaaatccagcaccccgccgccgcctccagtcatgggtgcccccgttgcctaccctccgcctgcgtaccctcccggtgtggccgccggcgccggcgcctacccgccgcagctctacgcaccgccggctgctgccgcggcccagcaggcggcggccgcgcagcagcagcagctgcagatattctgggcggagcagtaccgcgagatcgaggccactaccgacttcaagaatcacaacctcccgctcgcccgcatcaagaagatcatgaaagccgacgaggacgtccgcatgatcgccgccgaggctcccgtggtgttcgcccgggcctgcgagatgttcatcctcgagctcacccatcgcggctgggcgcacgccgaagagaacaagcgccgcacgctccagaaatccgacattgccgctgccatcgcccgcaccgaggtattcgacttccttgtggacatcgttccgcgcgacgacggtaaagacgctgatgcggcggccgccgcagctgccgcggctgccgggatcccgcgccccgccgccggagtaccagccaccgaccctctcgcctactactacgtgcctcagcagtaatgtatcatcatcacgttattgttccgtctatgtgcctgagcaataatgtatcatcattgccttattgttccggggcagttgtgttatttgtgtctgtttagttgctgctgctgttaccgcgtaatagcatatgtgttatttgtgtctgtttagttgctgctgctgttgccgcgtaataaaacttggtcatttacggggctccctcaagattaagaattgagttgtttgatggtagaatcctggtaaggttgttgtaactggggggcgcctttgtttgggctggtagtgtatgcctaggcctcacttatctgatgctgtaatgcgacaagtattatgtggttgtctggtaattattgtccaattactgctcttcaaaaaaaaaaaaaaaaaaaaaaaaaaaattcagaacgaataaggcggggcgtgtgaggccgtaagagtacgtagtactaatatgtagatgcacgtgacgtgcctattaatcaaaccattaactatgctagttaattaaattagatcctctct

SEQ ID NO: 909 - DNA, 479 bp, Zea mays
  Clone ID: TF_ZmC10894_4
cggacgcgtgggtcactctctcactccactgcctccggaacaccctagcaatggagcccaactccagcatccctcccccggtgatgggcgcggcggtggcgtaccctccggcggccggcgccgcgtactccgccgggccgtacgcgcacgcgcacgcggcgttgggcgcgctgtacccgcctcccccggcgccgggtcccccctcctcgcaccagggcggcgcggcggcggcgcagctgcagctgttctgggcggagcagtaccgcgagatcgaggcgacgacggacttcaagaaccacaacctgccgctggcccgcatcaagaagatcatgaaggcggacgaggacgtgcgcatgatcgccgccgaggcgccggtggtgttcgcccgcgcctgcgagatgttcatcctggagctgacccaccgcggctgggcgcacgcggaggagaacaagcggcgcacgctgcagaagtcggacatc

SEQ ID NO: 910 - DNA, 1528 bp, Zea mays
  Clone ID: TF_ZmC598014_1
ttttataccaatgcgctattgcaccactgcagctgctttaagatggatttttgcttaagatggaattttacaagcaagcatctttagtaacttcagttcgattatttgctgctctcaagagtagcgtccaagctacaagaataaataagataaaggccagcgatttttttcatacacaaaaggcattcccaatcccatccatcaacatagatctgagaatttttagtgttgtaccctgaaatacatcttttgcattgacggcaggagcgatcccaatccccgactcctccggcagcccgcaacgactcgcgccgcctccggtcgcgccgggtccaggtaaagcggcttccatctcctcggtctcagcgcgtcatcccctcctccttcctcttccgtttcccttagggttggagtagacacgtcggctcaaggatccttcgagggactgactggttgtgcaaatacctacttttaaattattgaaagtgggagcatgaaagggtcaggacacttattgattttgaacaaagatctagcatggaaccatcctcacagcctcaaccaatgatgggtgttgggtcacaaccttatcctgctgctgctccctatgtgccagtacctggatctcttgctgttcctcctggctcacagccagcagcagcattccccaatccaactcaactcagtgctcagcaccagatggtgtaccagcaggctcagcaattttatcaacaacttcagcaacagcaggaacaacagctcagggagttctggactacccagatggatgagatcaagcaagcaaatgacttcaagatccacaccttgccacttgcaaggataaagaagataatgaaggctgatgaggatgtgcggatgatctctgcagaagctcctgttgtgtttgcgaaggcatgcgaggtattcatattagagctgacattgaggtcatggatgcacacagaggagaacaagcgccggaccttgcagaagaacgacattgcagctgccatcaccaggactgatatatatgacttcctggtggacataatcccgagggatgaaatgaaagaggaggggctcggacataatcccatagttggcctgccgcctgctatgggggctccagctgatcatggttctcatccatattactatgtgccagctcagcaggtgcaaggagcaggtatgatgtatggtggccagcagggtcacccagtgacttatatgtggcagacgccgcaagggcaagcggcagagccccccgaagaggagcagcagcagtctgcctgaatgtagcaaatagacgagaacagcaaagcaattacatcttgatctgaagttctgaacttagggcctgtttggtgtggcgccgaaaccgccgcaccgcgtctaagccgcgacgctcgatttggtcgccacaactgcggcacaaaatctgtggcgcgtgtgggcgtgggcggcggtcaaccaaacatgctcttagttctctaaacaaacaaatatgatttggttatgttaattgtgc

SEQ ID NO: 911 - DNA, 1400 bp, Zea mays
  unsure (1)..(1400): unsure at all n locations
  Clone ID: TF_ZmC10894_2
aaaaaaagaagcttgccatttcgctcagggccctgcaacgcgcggcagctacacgcgggagagagtcttgggactgggccgcccggccgcgaggaataaactcactcctgccttcatacgtatccatagccgcggcagtacgtgtatgtggttagctatacgcgacctcagctcgggcgcaagctacaacgccgaccaggcgagaagaagcatcgatagtgtgacgagctaacccaccagcagcaacgtaatccaaatccatggacaaccagccgctgccctactccacaggccagccccctgcccccggaggagccccggtggcgggcatgcctggcgcggccggcctcccacccgtgccgcaccaccacctgctccagcagcagcaggcccagctgcaggcgttctgggcgtaccagcgccaggaggcggagcgcgcgtccgcgtcggacttcaagaaccaccagctgcctctggcccggatcaagaagatcatgaaggccgacgaggacgtgcgcatgatctccgccgaggcgcccgtgctgttcgccaaggcctgcgagctcttcatcctcgagctcactatccgctcctggctccacgccgaggagaacaagcgccgcaccctgcagcgcaacgacgtcgccgcggccatcgcgcgcaccgacgtcttcgatttcctcgtagacatcgtgccccgcgaggaggccaaggaggagcccggcagcgccctcggcttcgcggcgcctgggaccggcgtcgtcggggctggcgccccgggcggggcgccagccgccgggatgccctactactatccgccgatggggcagccggcgccgatgatgccggcctggcatgttccggcctgggacccggcctggcagcaaggggcagcggatgtcgatcagagcggcagcttcagcgaggaaggacaagggtttggagcaggccatggcggcgccgctagcttccctcctgcgcctccgacctccgagtgatcgatcggcgcgtctcttggtcctggcctcctggcttagctacatgtgcatgatgtcaatcgttcaatgtgccatgctgtgtatactctacagcaaacgtggtaatggagctgctatgcatatacagaacgaataaggcgtgacgtgtgagaccgtaagagtacgtagtactaatatgtagatgcacgtgacgtgccaattaaccaaagattaacatgcagttaattaattagtcctcccnnnnncnnncnncnnnntcnncnctttctgcnnccccnnngccgnctgggtcnnnccgncgccctgctcctggncggcnncnccctcngctttttcggcnncngcgtccccctcnncctggtggtcgccgtggtcgcggnggtcgtcctcctcggcggcgcc

SEQ ID NO: 912 - DNA, 385 bp, Zea mays
  Clone ID: TF_uC-zmflteosinte066e07b1
tttcggacttcaagaaccaccagttgcctctggcccggatcaagaagatcatgaaggccgacgaggacgtgcgcatgatctccgccgaggcgcccgtgctgttcgccaaggcctgcgagctcttcatcctcgagctcactatacgctcctggctccacgccgaggagaacaagcgccgcaccctgcagcgcaacgacgtcgccgcggccatcgcgcgcaccgacgtcttcgatttcctcgtcgacatcgtgccccgacctccgagtgatcgatcggcgcgtctcttggccctggcctcctggcttagctacatgtgcatgatgtcaatcgttcaatgtgccatgctgtgtatactctacagaaacgtggtaatggagctgctatg

SEQ ID NO: 913 - DNA, 361 bp, Zea mays
  Clone ID: TF_uC-zmflb73001e01b1
tcgtccacgcgtccggccggaccgtcacgtgtacttcaggggccgatcttacgctgacatccctgaccgagggtctcacagcgtggacctgccccggtacgcggtcgacggcgctgggtggcgtgcacagagatagcacccgggctgatatgaatgcgggaggagcagatgggggaagcttgggggagccatggcggtagcggtgggagccacaagagcgggagccccaggggcggaggaggcggaggcagccgcagggagcatgacaggaacctgcccataggcaacatgaggcgcatcatgaagaaggccatgccgtataacggcacgatcgcctaggacgctaaggagaccgtgctag

SEQ ID NO: 914 - DNA, 1527 bp, Zea mays
  Clone ID: TF_ZmC4739_1
ccggccgggatagctctactcctatatcttagtggtgacaatttccccgtgcggcagccagaaaactgcactcgaatccgagcagccacaattgtttttatgacaaagaaaaggaccggccgggccggtccggatatcaacccctcccctcgtattaggccccacctccccgcgcgccctaaccctagcttctcgattcaactctgcgcgagacgaattctctcccgaattcgctcgccgaaagcacctgctacctcgcgcccgccttccgtcgcgcggattcggtgccgtgcgtggagatggacccgatggacatcgtggggaagtctaaggaggacgtttccctccccaaatcaacaatggttaagataattaaggagatgcttcctcctgatgtacgagtggcaagagatgcacaggatcttcttgttgaatgctgcgtagagttcatcaatctcctttcgtctgaatccaatgaagtgtgcagcagagaagagaagaaaacaattgctcctgagcatgttatcaaggctctaagtgatcttggcttcagagagtacattgaggaggtttatgctgcgtatgaacagcacaaactcgagactctggattctccaaaagctggcaagttcactaggattgagatgacagaggaagaagctgttgctgagcaacaaaggatgtttgctgaggctcgagcaaggatgaataacggagcccccaagccaaaggagccagaacaagaaccgccacagctaccacaagcacaaccccaacttcagctgcatactgaaccacagcaacccatgcaatctcaagttcagttgcattcgcaaacacaacactccctccaacctcaactgcagctccaccatcagccacaacagctcccacaagtgcagctgcactctcagccgcagctgcaaccccaagtgcatctgcaccctcagccgcagttgcccccacaattgcaggtccatcagcagctgcagcaatccccacaagtgcaggtccacgagcagccccaagtgcagccccaagaagcgcagttgcaatcatcagcccagcaaacctcccaaccgcaacctcaggcacaactacaatcacaggggcactcacaagcgcaactgcaagccggactgctgggtcagttgcagacacaggcgcaaaccggacctggcatggatagttagagactattgtgtagcctgagtataagcaaaaaagggaaaaaaaaccaggcacttttgctgcatctactagaaacctgtatgcctgcttgtgactcattagatcctgatttaggtttccgtgcttcctgtagaatgtaaatgcagtgtgattgcagttgccttgttgctaataatgcgaagccgttagttactgatgatgtcattattgtgtggaatactgaatgtcatggcgtggcttatgtgacgtgctgaatgatgttctgtggtccattgtaatagcctaacttcgacatctgtccatgatgatagtgattgatttgaatgagctcttgct

SEQ ID NO: 915 - DNA, 1395 bp, Zea mays
  Clone ID: TF_ZmC4739_3
attcggctcgagatttcactctgcccgagtttgccgaattgtcgaccgaattcgctcgcggggagcacttgctacctcgcgcccgccttctgtcgcgcggattccttgctgcgcctggagatggacccgatggacatcgtcggcaagtccaaggaggacgtctccctccccaaatcaacaatgtttaagataattaaggagatgcttcctcctgatgtacgagtggcaagagatgcacaggatcttcttgttgaatgctgtgtagagttcatcaatctcctttcgtctgaatcgaatgaagtgtgcagcacagaagagaaaaaaacgattgctcctgagcatgttatcaaggctctaagtgatcttggcttcagagagtacattgaggaggtttatgctgcgtatgaacagcacaaactcgatactctggttggtaccacttgttactcacagggctctgcatatcattccctctaatctgtgtactatgcttgacaccaatatgttttgagcaggattctccaaaagctggcaagttcactaggattgcgatgacagaggatgatgctgccgctgagcatcaaaggatgtttgctgtggctcgagcaaggatgaataacggagcccccaagccaaaggagccagaacaagaaccgccacagctaccacaagcacaaccccaacttcagctgcatactgaaccacagcaacccatgcaatctcaagttcagttgcattcgcaaacacaacactacctccaacctcaactgcagctccactctcagccgcagctgcaacccctcagccgcagttgcccccacaattgcaggtccatcagcagctgcagcaacccccacaagtgcaggtccaccagcagcccgaagtgcagccccaagaagcgcagttgcaatcatcagcccagcaaacctcccaaccgcaacctcaggcacaactacaatcacaggggcactcacaagcgcagctgcaagccggactgctgggtcagttgcagacacaggcgcaaaccggacctgacatggatagttagagactattgtgtagcctgagtataagcaaaaaagggaaaaaaaaccaggcacttttgctgcatctactagaaacctgtatgcctgcttgtgactcattagatcctgatttaggtttccgtgcttcctgtagaatgtaaatgcagtgtgattgcagttgccttgttgctaataatgcgaagccgttagttactgatgatgtcattattgtgtggaatactgaattcgtgacaagtgtcatggcatggttttatgtgacgtgctgaaagatattccgttgccattgtaatagccgaacttcgacatttgtccatggtgatagcgactgatttgaatgagttcttgctgc

SEQ ID NO: 916 - DNA, 705 bp, Zea mays
  unsure (1)..(705): unsure at all n locations
  Clone ID: TF_ZmC29745_2
tgggacctcgagccggcgggacaccctccgtagcctcctatttaacgtatcctcgcacatcacaagaaggacactctccaccagccagccagagccagtagccagtagcccccaccagatcggcctccccgttgctcatcaccagcaagagcaactcagcaacctagctagctataggtttaggtagcaagagccaatggactccagcttcctccctgccggcgcggacaatggctcggcgggcggcgccaacaatggcggcgcggctgctctncaggcgccgccgatccgcgagcaggaccggctgatgccgatcgcgaacgtcatccgcatcatgcggcgcgtgctgccggcgcacgccaagatctcggacgacgccaaggagacgatccaggagtgcgtgtcggagtacatcagcttcatcacgggggaggccaacgagcggtgccagcgggagcagcgcaagaccatcaccgccgaggacgtgctgtggcccatgagccgcctcggcttcgacgattacgtcgagccgctcagcgtctacctccaccgctaccgcgagttccagggcgaggcgcgaggcgtcaggctcgccccggcccctccgtgcagcgaccaccaacaccaccactccgcggcgccaccgaagctcaataagacccgcgagcccgcctccggagccgccatgttaccgcacccccacga

SEQ ID NO: 917 - DNA, 780 bp, Zea mays
  unsure (1)..(780): unsure at all n locations
  Clone ID: TF_LIB4172-014-Q1-L1-H5
tggtacgcctgcaggtaccggtccggaattcccgggtcgacccacgcgtccgaatgtggctaggataatgaaaaatgccatacctcaaacaggaaagatcgcaaaagatgccaaagaatgtgttcaggaatgtgtgagtgaatttataagcttcatcacgtcggaagcaagcgaaaggtgtcatcaggagaagcggaagacaatcaatggggaggatattctgtttgccatgtccactctaggctttgacagctacgtggagcctctgaaactgtaccttcagaagttcagagaggccatgaaaggagagaagggtatcgggggagcagtctccgccacagatggactaagcgaagagctcacggaagaggcattcactaaccagttaccagctggcttaataactgcagatggtcaacagcaaaacgttatggtttacacaacgtcttaccaacagatttctggtgtccagcaaattcagttttcatgatcggaaggacggacggaaccgggcttgtgtggagagagtctgatggagtctgaagcagaggcatgggcggaagtgagggtgaagctgcctccttgtaccataagtagctgtaatgtagcttcctgatgcttgactaattgaggtgttaattctgacttgagaatctttttcatgaatgattntaaaagaaaaaaaaattggattttaaaggtattaaaatatttttggtttgtacgagagtttgntgctctgtatgacgcctgtatgcattgtatattgcaatttatact

SEQ ID NO: 918 - DNA, 1201 bp, Zea mays
  Clone ID: TF_ZmC29745_1
tgggcaccacgcgcccgccaccagccactactcctcctccaccacgagcgcgcgataaccctagctagcttcaggtagtagcgagagccaatggactccagcagcttcgtccctgccgccggcgcggagaatggctcggcggcgggcggcgccaacaatggccgcgttgctcagcagcaggcgccggcgatccgcgagcaggaccggctgatgccgatcgcgaacgtgatccgcatcatgcggcgcgtgctgccggcgcacgccaagatctcggacgacgccaaggagacgatccaggagtgcgtgtcggagtacatcagcttcatcacgggggaggccaacgagcggtgccagcgggagcagcgcaagaccatcaccgccgaggacgtgctgtgggccatgagccgcctcggcttcgacgactacgtcgagccgctcggcgcctacctccaccgctaccgcgagttcgagggcgacgcgcgcggcgtcgggctcgtcccgggggccgccccatcgcgcggcggcgaccaccacccgcacccccactccatgtcgccagcggcgatgctcaagtcccgcgggcccgtctccggagccgccatgctaccgcaccaccaccaacaccaccacgacatgcagatgcacggcgccatgtacgggggaacggccgtgcccccgccggccgggcctcctcaccacggcgggttcctcatgccacacccacagggtagtagccactacctgccttacgcgtacgagcccacgtacggcggtgagcacgccatggctgcatactatggaggcgccgcgtacgcgcccggcaacggcgggagcggcgacggcagtggcagtggcggcggtggcgggagcgcgtcgcacacaccgcagggcagcggcggcttggagcacccgcacccgttcgcgtacaagtagctagttcgtacgtcgttcgacttgagcaagccatcgatctgctgatctgaacgtacgctgtattgtacacgcatgcacgtacgtatcggcggctagctctcctgtttaagttgtactgtgattctgtcccggccggctagcaacttagtatcttccttcagtctctagtttcttagcagtcgtagaagtgttcaatgcttgccagtgtgttgttttagggccggggtaaaccatccgatgagattatttcaaaaaaaaaaaaaaaaaa

SEQ ID NO: 919 - DNA, 2542 bp, Zea mays
  Clone ID: TF_ZmC16020_1
cgaccaatcccgcctcccccgcccacggccgcgcctggagcggcgggccgcgcgcggccaccctcgcggcctcgccgtctcgacgccaccgctgggagcgcgatgcccacccgcgcaccgtgcgcaccctcccccacgtgtcccccctgccgcccgagggccccgcctgtcacccaccgtccccggggtgggcagccgaaagcgacgcgtgaagcgctctgccctgcctgctgccctcagcgctcgcctctcgtcacgcgccccctccacaacccccgatgcgatgggtgcccctgcccctcgatagccgcgccgctctcctgcccccgttccccatttgcatcctcgtccacctccctgccctagcaccgtcctcccctattcgacccaacgccgccgccgcctccgccgccgcataggcctcgccgcggcctctgctccgccccgcggcctccggaggttctactcgcgcgcgatccgccgctgcgtccgttgctccgccatcgattcggtggcgcgtggagtatgtctctggtgcaagagtgctgaagatgaaggagaggagctctttatgcgaaagtgcagccgatggaaactggggtttgaaatataaaaggaaaagaagcaagttaacagttagcccatctaatgagaatgaggctacctcaccaacatctgactctccaatgagccatggttccaccaaaaagaagttgaagcatgacactaacatttctccatcagccaagaagataagaggacacgatgggtatttttttgagtgtgtagaatgtgatcttggtggcaatttgctatgttgtgatagctgtcctcgtgtttaccacttggaatgcctcaatcctcctcttaagcgtctaccccctgggaagtggcaatgtccaagatgccgtccgaaaaaaggtagcttgaagatgttaggtaatgcagaggttggcacttctaaacatgaaaaaagtacaaggacatatgcaggtacgacatcaggtagtccaccttcgcatacaaaagtctcctttaagaccaggaactccacacaagacaaaactggatcaaaaaaaaaaaaaaagggcggcgctcgcgatctaatgaatgggggtgaaaccaatacgaagaataatgaagttgagaaaaagaagacactgatattacatttgaagaagcgttcaaccaaggaattgtcagagaacactaaaccctcgaagtcagaatttgttgaactttcagaagagaaaattgtaaaacatggaagtgttttgaaactcaagaaacatccacatcgtatggacttgtctccaagtaaatctaaaaccaggaggcaaagtagccagagagagagtaaaagatctggcacaaaaaagattaaatattccatgtctgatgatgacagtgtttcctcatcagaaccatcgacatctcttgataacagtgaatcaccaccaaaaagaaaacactcagatggaaaagcaccttcatccagtaccaagaaagggaaaaagaaagtgaaatttgttgagaaaaagcactctgaggagcagggcgtggtaggtgacaaaatgatgactacccaggaggatcagcaggtcgatcgcatcctaggctgccggcttcagatgagccaaatcaacccgccgtcccatgcttcattggagcagtttgaatcagctaatctccaggtggatggtatggttcttccacatgcttccgctggcattcctaataggcctcatgatggaacagagtcttctagaaatggtacaattgaggatatatgtgctgatgaatcagccaatcatagtggtcacaatttagaaatgcgaaaggatacggacagtaaatcccatgaaaaggagtcacataagcgagaacaagtcaagaagatattatcagtatgttctggtgatgagaccaatataatgagagatgatcaagtagtcagagaaaatgtttcagcttccaaaaaaggtgaagatgagacatctgatttgccagcagaaaaggatgataccatacttccagtcaccagagcttgtacaatgatcaggaccaatcaagatcatacagatgaaagtaaacagcatgggaaaatagaacaaataacaaataaggactacaatgatgctggatatgagttcttgatcaaatgggttggaaaatcaaatattcacaacagttgggtttctgaatccgaggtaaaaatattagcaaaaaggaaactagaaaactacaaagcgaagtatggaatgagtttgataaacatttgcaaggaacagtggtgccagccacagcgagttattggtcttcgtgcttctgtagatgaagtggaagaggttttaatcaaatggtgtggtcttccttatgatgaatgcacttgggaaagatcagatgaacctaccctgatgaaatatagccatttggtcactcagttcaagaattttgaatgccaggctttggataaagatgtggtaaaagattatgcaaatgcaaggaaccgacatgagcttaatgtgttagttgatcagcc

SEQ ID NO: 920 - DNA, 546 bp, Zea mays
  Clone ID: TF_5108360
acacgttgatcagagagtagctagaggaatataattctgttacatttcataaccctctctctcatgcactcacgcctttatgcagccaggcaacacgccggcatctcacctcccataggccacgcacacgttacatggagttcacccactccgggcccaacagcctctggttcaacttacgctcacgtgtacctctccttggcccagctggctcctctttctcctttgaacggcccacattgtccagtttagctcccgcgccttcaggttcagcagcttgtggcgccctgctggtaacatccccccggcgacgagaacctgcttgcccccaagcaggtgcattgggaaatgtttgcttcaatgtctcaagatcttcccaagttgccaacgacgatgacaatcctgaccacttgataagcccttgagccacaccactggtattcatccgacgttgtaacacttgtacagggatttgtagaccttggtggtgttggggagcaggctgcggagcttggcgaggtggccgttgatgcgctggcggcggct

SEQ ID NO: 921 - DNA, 657 bp, Zea mays
  Clone ID: TF_LIB3060-107-Q1-K6-E10
gattagcccaccatccggccgcagccggccaaggttctccaaatcctccacacccgctcaaggttcccctgttctctttttaatcccctctccaatctcactggcaaacagaacgcacacaccctagtgggtccattccagcccactcaaccttgagttgggcctctttcacgtcttggcctgctcctcactgttggttcattagatgtcatgacattctcccctccttcagtgacggcttgtccccaagccgcgacttccgggaatctggcgatgatcgcagcttcgtcttcccatgttgcaagttcttcaggccagtcagtccattgtatcagcagttggggtaccactcctgtgtgtgtttgcatctggcgacgctgcaaaatcctcacaggtttctgtaatgaatctggtaaaggtggtagagtggagcttacttgcatattggaccccaaagcctttttcagaagtgaaacatggaataccgggtgtatagatgaagaaggtgggagacccaatttataagcgactgacccgattttggcaattactggatatggaccaaaaaacttgaatgccaatttgtgatttgcccgcttgaccaaagacgattggacgtaaggttgtagtttcaaatataccatatcacccaccatg

SEQ ID NO: 922 - DNA, 4299 bp, Zea mays
  Clone ID: TF_ZmC1278165_1
tcagtccgcgtcttcagtcatgacatctccccgggcctcagataacgcttgtccccaagcgtttgcctctggaaaccgtgccctggccactgcataatcctcccatgttgcagcttccttaggtaccccactccatttcaccagcacttgaacaatagctcgattgccctttctcaccatccttcgatcaaggacctgctctggctctatacccccttgagacaaatccaccgcaggaggtagctctgagaaaactggagaataacagggcaggaatggcttcagttgtgacacatgaaaaaccggatgtacttgtgcatccccaggtaattcgagcttgtatgccacctccccaatccttgatatcaccttgaaaggaccaaagtacttaaatgccaatttaggacaggatcggttcaccacagtcttttgtgcataaggttgtaacttcagcaaaaccagatcgcccacttgaaattccctgggagttctgcccttgtcagcatactgcttcatgcgaagctgagctcgtgctaactgctcctttagcatgactgaaaatgcattcctttcagcaaaccagtcagctatctccctatcttccatgcccagcgtttttggtgcaacaagcaatggtgcttcatagccatacaacaccttgaagggcgtacatcccagcaccgaatgatatgtagtattataccagtactcagctaaagcgagccagctcttccacttgttaggttggtcatgtacagcacacctgagatacatttccaagcactgattcactcgctcactctgaccatccgtttgagggtgatatgcagtggacatcagcaacttcactcccataagttggaatagatttttccaaaaggcactggtgaaaaccttgtctctgtcagacactatagatctgggaaccccatgcaacttcaccacattctcgagaaatacttgggcaactcctttagcagtaaaggggtgctttagaggaaggaaatgactgtatttcgagaatctatccaccactaccagaatggtatcaaacccctcagactttggtaacccttctatgaaatccatagtcacatcttcccaaataccttgcggaactggtaaaggctgtagcagccctgcggggtgcaccctctcagccttggccttttgacagattgcacattgctgcacatactgtgtcacatcattttttaaacccttccaccagaacaccttctttaccctctgatatgttgcttgaattccagagtgccctccaactgcactatcatgcagtgctgcaattagtttagtgcgcagagctgagttgcacccaatccagatccggtttgcttttctgataataccttgctgcaaagaaaacccctgttcatccgggctctgaattaacagttgagtgatcaattgctgtgcatcctcatctgtggcatacgagttcactacttcttgaatccatataggctgaatttcagagagaacagacaaccccatcatatgctccacccttgataatgcatccgccactacattctctgtgccctttttatacaccacctgaaactgcaagcccataagcttggtcatggctttcttctgcagatcagactgtaactgctgatctccaagataagtcagagatttgtgatctgttttaatcacaaaggcacccctctgcaaatattgtctccacctgtccactgctaggatcagagccaaaaactccttctcataaattgaaaggtgtttgttcttctcacccaatgccttgctgatgaaggctatgggcctgccttgttgcatcagaacagcccccaatcctatatctgaagcatcagtttctaccgtaaatggcaagtcaaatcttggtaaagccagaactggagtagaggccatagcttgtttcaagttttcaaaagctatctgagcttcttctgaccatgcaaacccttgctgtttttgcaacagccttgtgagaggtttagccaacaacccatagttcttcacaaatcttctatagtaacctgtaaggccaagaaatcccctaagctcagtgacattcctgggcatcacaaattttctgaggaaactctgcaatattgaattcatggcacactgaaagctagctggagcattggtgagcccaaatggcatcaccctgaactgataatgaccatggtgtgtcttaaaagcagttttgaactcatcctcagcccccattcggatctggtgataccctgaggtcatgtcgagacttgtgaaaaatttagttccagctaattcatccaatatctcctccaccaaaggcattggaaatctgttcttaattgtcatgtcattcaattttctgtaatccacacaaaacctccaacttccatccttcttttgcaccaataacacaggagaggcaaaaggactcacactaggaactatcaatcccgcagccaatagttccgacacttgcttttcaatctcagttttgtgatgtggtgaatacctgtagggtctggaattcactggtatagaacctggcaagagtgggatatgatggtcatatggtctagtgggaggcaactgggtgggcaccgcaaacacatccgcaaactcttccagaattcctgttagtgtctcatttccagcctcatcttcctctcctttaacctcctccagcatcacaaacacccatacttcatctcccttcacccacttttctaactgcaaaacagacacctgttgcacctctctctttaggtctgcttccccttgaagtttaacctccaccccttgatcacagaaggttagcaccttgttgatccagtcacaatgcattgggctatgctgtttcaaccagtcataccctaatatcacatcataagcctccaacgccaacaccctcatggcagttctataaacatgccccccagccttccacttcacctctctgacatttttttcacacaccatgatctctccattagctaccttcaccttcacaggaggacaatcttctgtgctcaaccccagtttagtcaccatcctctgactaataaaagttgtggaactcccggagtcaatcagcataaccagcacctgatcttgaatcagagatagcaccctcatacaaccatcacactctgtcccctttatggcattccaggacagctgatgtaatccttccactatatgctcctcctcctgttccagcttcagcaacacttcgtcagttagaactgtgctcatatcctccactgtcaactgatgtatttgagtcactactcgcttgggacatttggcttgatgcccaggttcaaatttgtctccacatatgtaacatagcccattggcccttctataatctcttaactgcctttccttattcaattcaggattcagaattccacttctactccctattgcttgagtcttgattcccataactcccttctgacttctcatcctattcttctcggcaatttcctgatataattgggctaatctcatggccttatccactgtcttgggcgtccgggccatcacttgggactgaatctcaggcttcaaacccctcacatagtgggtcacaaacaaagtctcatccaactccggattatgcaaagtagctgcatatctgatatcattgaaagcctgggaatattcttctaccccatgctgttgtttcacattgaccagcgctctcatggcatgagggtactcttccaccccaaacttctccctcaccgcatgggtgaactgctcccagtctcccaaaccatgtttcagtttatacacctgcagccacttcgacgcatttccctccatgtgcgtcgaggcagtgcttgcccagatccattcgggcacctgataaactgtgaaatattccacacacctatcaaaccagattcctggatcattcccatggaacttaggaaacgaccacttcggtagagaactgggcctgaactcccttccttcaccccattgctccctccgttctctacctccttccctgccgaatcctccgcccctctcatccccgcgatggacacggtgttctcgctcagagttggattcgttaccttccaaatccttcgccagcagctcgagtcgaagacgcgagacagtctgctcggtctcctgcagttgacgagccatgagcgcccgatcctcctcagccttcctctgaccgacctccatcgcctccatcttgcccgtcaggcgctccaccgctgtcaacatgcgctcccatcgctcttctcctttctgctcagctcccgccat

SEQ ID NO: 923 - DNA, 226 bp, Zea mays
  Clone ID: TF_700168802H1
cttaaacatcacatctgataaatggagctgcccagaatgtgtaagtccattaacagagatggagaggattctagatattgaagtgctggaagcacctcgtgaagattctagttccacagagcctcgatcaaagaagatggagcgatatcttatcaagtggaaaggattatcatacattcactgctcttgggtttcagaaaagagaatattcagaagccgcgaatat

SEQ ID NO: 924 - DNA, 2217 bp, Zea mays
  Clone ID: TF_ZM4892.C1.o1.fg
atggaggagcatgttcttcaggtgaaacaagtgtttcagaaactaaaggatcatcagctgaaactgaaactgtcaaagtgtcggtttgcacagaccacccttgagttcttgggacacatcatcagtgcagaaggcattgccactgacccagaaaaggtgcaggttattcgagactggcccattcccaacaacgtcaaggaggtgaggagttttctcggcatggccgggtactaccgtcgatttgtcgctcactacggcataatcagcaaaccccttactagcttgctcaagaaggaccaaatttttgtgtggaatgatgaagctcagaaagcctttgaagctctgaaggcagcattggtgcaagcaccgttgatcactggcgcccttacctccaacatggagaatttttttatcaagactgatcagcaaagcctaacccatctagaagaccaaaagttgtcgactatctggcaacaaaaagccataaccaagctattgggtctccaattccgcattatatataagaaaggggtggaaaaccgtgtggcagatgctctttctagacggccaaacctatgcactgatggttccaaactgcaactcaacgtgttagcaacttcgacagtggtaccaagttggctcaccgaggtgactaacagctatgaggagaatgaggaagctaagagcattctgagtacgcttgctgcaggggatacaatagagccattcactttggtatcaggagtgatcaagcataaaggaaggatttggctgggtagcagtaaccaagtgcaattaaaggtgatgactgcccttcatgacagtcctataggaggtcattctgggttcccggtaacctatcatcgcatcaagaagctgttttactgggctggcatgaaaggacagatcaaggagttcgtgcagtcttgtgagatttgcacaaaggccaaggccgacagaaatagataccccggtctgctattgccattacccataccggatcaggcttggcaagttattagcttggattttatttctggattacctacatcccgacgcttcaactgcatattggtggtagtagataaattttcaaaatatgctcacttcctagccatgtcccatccttttactgctctatctgtggccaagctgttcctatcacaggtctacaaactccatggcctaccattgtctatcatctctgacagggatccaatattcaccagtaacttgtggcaggaattgtttaagttggtgggcacaaaattatgcctcagtagcgcatatcacccccaatccgatggccaaactgaatgggtcaaccaatgtgtggaagcttatcttcgatgctttgtccatggctgccctaaacagtggtccaattggctatctcttgcagagttttggtataatacttgttttcacactgcactgggtcagtccccgtttgaggttttgtatggccacactccatcccagttaggactgtcaactattgaacaatgtcaaagtgctgatctgcaaacatatctggcaacaagacaacttatgctccaacgggccaagttacatcttcaaagggctcaagatcggatgaaaaaacaagctgacaaaggaagatctgaaagggtgtttcaagtgggacaacgtgtatttttgaaactgcagccaatttgtcagagttcgatggggagcagattgaacactaaattgtcatttcgctattttggatcgtttctgatcacaaaacaggtgaatcccgtggcttataaactggcattaccagaaggaagtgcgattcatccggtctttcatgtgtcccaacttaaatcagccgaagaaactcgtatcacaaccgatgcaaccatgccagacctgctgcaggagctgaaaatacccacagaggtgctggagtctaggctgcttcgcaaaggtaacaaggtaatacctcaactcctaatccgatggtctaactggccggcttcattgtctacctgggaagatgaacacgccatcaagcagcagttcccacgggctccagcttggggacaagctgtctgtcaaggggaaggggatgttagcagcacagggcacctgaacaccgggaaggatgctgcgatggaagaggcggacgctgaggttcaggaagcaaagaggagcactcgggctaaaaggccgaatccaaagtatatagaaaatgtgtggatgaattag

SEQ ID NO: 925 - DNA, 1396 bp, Zea mays
  unsure (1)..(1396): unsure at all n locations
  Clone ID: TF_ZmC1646_4
gcgaccaagtggaactgatggacaaaccaatacaggttcgggctcgggttgatgatggaggtatcatgtggagtgagaatatagttccaaactgtaactgggagtctggagaaaccatgttttattctgaattcaaggtgctgctacttaagggaattacttctgacattgagtgggctggtgacgaccacctcatttacattacaacggagagtatacttcggccaggccttcaagcttccgaaagcaagagatatttatttgttaaatctggaagcaaaaatacaaggtttatattctacctggacatattaaaacaaaacaaggaacttgctgttttgacaccttgtgtgtatggcgttgatacaacacctagtcattgtggaaatcatgtctttatgaagagacggagtgatgaattgtataattctgaattggttgcttgtccactggataatgttgctgagatcacttctcctgaccactgctctagccctgagttgcaggacctgttgcatacccgacaacagatgttacaacaggtacagatgcatttgcagagagctcaagttcggatgaaacgccaggctggcaaaggaaggatggaacggtccttcagtgtgggtgatcgagtgtatgtgaagctccagccatactgccagtcatcagcagccgagagagtgaaccacaaactggcgtttaaattctttggccccttaagcatggtcaggaaggttaacccggtagcgtatgaagtcgctttacctgaaggaagcaatgtgcaccctgtctttcacgtatctcaattgaagtcatttgttcctgcaaatgttatttccagctcggttttaccagctctgactccagactaccagatccctgaagaggttatggactcacgactgcaacgaagggcaggcaaggaggtacctcaactgctggtacgttggactagttggccgccatctctggccatctgggaagatgagcactggatcaaggagcaatttccaagggcgccagcttggggacaagctgtctctgaaggaggaggagatgtgaacgacgctggtattcaggatggcatgggtaaagctactcaagggggcgcgggagaatcaccagcaggaggcgagggcgacgctgttccagcagctcaggcgcggcctgcggaccacaaggcccaacaagaggaggtgcacaggccttgagtgggtgaattagacctatgactatgtatcgtggctccactatatatgggttgttcgtagacagggagagggtgtttttttggctgtaagaactcaggcggcggcggcgatccgaggtgatcgtcttccgaatcggaccgtactttccacaccaccataatcaagcgtgtgctccgtcttaanna

SEQ ID NO: 926 - DNA, 482 bp, Zea mays
  Clone ID: TF_uC-zmromo17027b12a1
ggattacaagcattttataagccacaaaatttgttacaaggcggttatgccaactataaacaggtgtcaaccccaatccaattggttacaagggtgttaagccagttatcaccagttgggtcacatgcaccaaatgctaatgctattaaggaaatctttactgacttactaatctccttcagctgggacatttgcccctcctggaatacttgcttgtccccaaggaagtgcatttggaaacctagcccgaatcacattatagtcctcccaggtagttgctgttactggcaaacctgaccatttaatcaacacttgggtaagggccgcccctccctttttgacgagacgtttgtccagaatatccattggttgaacaatttcatgtcccaaatccagcacctttggtaattttgagaagactggcccataattgggagtaaatggtttgagttgggaaacatggaaaaaaggggggttttggg

SEQ ID NO: 927 - DNA, 938 bp, Zea mays
  Clone ID: TF_ZmC925537_1
cttcttttttttttttagcgaggaaggagccagttcattgtattccttgatagtccatacctccagtcattacactccttataacccacaccagacagggctcagtcgaccccacacacatggtgccattacagaacccagttcccattgtggaaacgagagttcgaaatctttgtgcgcatgctccgtctggtcgtaacattccccccttattgcgccgaagcttgaccccaagccggcgccgaaggaaactggcgacgaaggaggtcttcatcttcccatgtagccagagattcaggccactgcgaccacttcaccaatacctgatggtgggggcgaagtccgtgagacaagagccgtcgacgaagaaaagactctggaacccgcaaatgagtgatgtcagatggaacagctgcaatgacctaaacatccctgggcgccgacttcttgagctgtgagacatgaaaaactgggtggaggaagaagacgctggcaagtcgaacttgtaggccacagaaccgattcgagcaatgactttgtagggaccaaagaacctgtgagcaagtttctggttggcccttggcgctagtgaagactgaatatacggctgcaatttgacccaaaccatatcaccctcctggaacctgcgttctgaatgatgcttatcagcttgacgtcgcatacgtgcacgagaacgagctaaatgttgtttgatcagtgctgtcatagcttcgcgatcgcgtagctaggtgtccagatccgaagacgccacaacagtgtctggctggataccgaaatgtcggggctcatagccatagagggcgacaaacgaagaccgtccaatagcagagtgaggcgaagaattataccagaactctgcgagatgtagccaagaaacccacttcgatggacaggcattcacgaagcagcgaagaaag

SEQ ID NO: 928 - DNA, 4881 bp, Zea mays
  Clone ID: TF_ZM4576.C1.o6.fg
atggcggctgccgatgtcgccgtgtcgcttccagctctggcaggctccctcgttgtcatgacccaggagatcgccagagccttctcgccacggacatcacaattggtatcagaggctcgtcgccatccttctcgttctcggatccaggcgggtggctcggttgctgtcaagcgttggagagaagttgcagacacggctcctaacaagccatccgcgcaggcgcgacatctggttgccgcgatggaagatgtagagaaacgcctggccgagaagttccagcaagcactggattcctcagcgacaactttgatggaactatctaagaagatggacggcattggagtgctggcaagcaagttgggagaaatcgagagtcgacaaatggagagcgacaagatggtgcagtatctacaggcaaagatggacctctctatgaagtccttggctcaggtgtcgcaggagcagaccaagttggcgaatatggtgactaatgctgcaagaggaatggcgtcgacctcaaaatcccccgctggagacggattgatgggagctcatcccataggccctcaggtatggcagaatgttccacccaagcagacactcaatgtggaaggaggatttaaaagggtggaagatcttgggaatattggggaagtggattctgcaaacaagagggtgtggctacctaaaatggattttcccatatttgaaggagaggatgctagagtatggattgatcattgcgaggcttattttgcattatattcgattcctgaggagtttaaagtcagtgctgcttatttgcacttgaaagggagagcagcacattggttccagtcttgtagagagagtgtagagttgtttgaatggttccagtttaggctggctgttcttaatgagtttgaagtatctacacatgcagataagatgttggagttactcactctgaaacagactggaactgcattggaatataagattcaattcgaaaagttggtgtatcacatcaggctgtttgacaaatccattagcgagacattcttggtcacacagttcgtgttgggtctcaaaatggaattaagggcttgtgttgaagtacaatttcccaagtcggtctctatggcagcacaacttgcactgaaacatgaggcatttcagtctagacagggaacagggaacaagaggtttggcctggtgaaacctgcatttgtttctcatgtgaacaacagggaatcatctgatttgcatggagaggtttggaaggccaaacagttgaaggagtataggagagttaatggactatgttacaagtgtggtgaaaagtttgtgccaggccacaagtgtaaaactgcagtccaaccacagctgaatgttattgccatagaggaagggggtgatgggggtccaattctggatgatgaagtgttggactatttggaaactggtattcaccaagatggggatgaggtgactctatctctcaatgctatgagaggaacagataattctaagtgcattaagctcagagcactaatcaacaaccaagtgatactgcagttgctggattcggggagttccaatacatttgtcagtaatatgactttagccagactacattgtgagctacaacaaattgaaccagtggatgttaaggtggctaatggacaagttttgcgttgcacccagaaggcaatacaacttgagtggtggagttgtggcagaactttccatgctgatgcttttgttattccagtagctgcttatgatatggtgttgggaatggactggctagagcagtacagccctatgttgtgtgcatgggaccagaagtgggtggaattctattatgaaggaagtataattaggttgcaaggagagaaagacaaaagaaacaaggagatattggaagtttctggagaccagattcaaggttggactaaaagaaatgatatatgggccatggccttattacaaaaggtggaggtggaagagaaaaaaaatgctgagacagttcctcctgtggttgaagatctattggaacaattctcaggggtgtttaaagtaccaaactctcttccaccctacagagattatgatcatgctatttctctacttccagggtcagctccagtgaattgcagaccttatagatattctccattgcaaaaggatgagatcgaaaggcaagttaaagagatgttgcaaactggcctgattactagaagtgtgagtccgtttgcttcccctgtacttctggtaaagaaaaaggatggtagctggagattttgtgtggactataggaaactgaatgacattacagttaaaaacaaatttccaatgccaattattgatgagtttcttgatgagttggttggagctacctgtttttctaaactagacatggcctctggatttcatcagattagaatggctgcaggtgatgaggagaagacagcattcaaaactcatcatgggcattttcaatttcgagtcatgccttttgggctcactaatgctccagctacgttccaatgtttgatgaatgccatttttcagcattgcatgagaaagtttgtcctcattttcatggatgatattttggtgtatagttctagcttggagcaacatgttaatcatttacaggaagtttttagtgtgttgcagaagcatcagttgtatgccaagaggagtaaatgctcttttgcagtgaagcacattgaatacctggggcatgtaatttctgagaatggtgtttccactgatccctccaaaacagcagtgatgcagaaatggccaatccctacatctcacacagatcttaggggttttttgggactcacaggctattacaggaaatttgtgcaacattatgggatattggcaaaaccacttacaatggttctgcagcaaaaacagtttgtttggccacctgctgctcaagaggcttttgaggcattgaaggctgctatggctactacaccggtattagctcttcccaattttgcagaaacatttgtggtggaaactgatgcctgtgataagggagttggagctgtgctgtctcagaaaggacaccctatagcttattacagcaaggcattgggagtccagaatagtaaactttctatatatgagaaggagtttttagctatattgatggcagtggacaagtggaggtgctacttacaaagggggctcttcattattaagactgaccacaagagcttaactcatttgcaagatcaaactctagcaactgagctgcaaaagaaggcaatggctaagctagctggactgcaattcaagattcaatacaaaaagggagctgaaaataaggttgctgatgctttatccagggtggctccaaacatggaattaactgccatatctgtaggcactccagtctggattcaagagatagtgaagtcctatgagttggatgttcagtctcagaatctgttgagagagctggcagtgcaaagtccaaattctcagggtttcagacttaaggatgggctaatctataagaatcatcaattgatggtgggacagaatgtgggcttacagactaagttgattgctgctttccactcatcagctgtgggaggtcattctgggatacaagcaacttatcagagaattaagaggttgttttactggcaaggcataaaaaacgacgtggaaacatttgtcaaacaatgccaagtctgccaaagagctaaacatgagcactgtaagtacccaggattattacagcctcttcctattcctcaaaactgctggcaggacatttctatggatttcatagaggggttgcccaaatctagtggttattctgtcattatggtggtggtggacagacttaccaagtatgctcatttcatccctatcaagcatccctacacagcccacagcatagctcacacattcttttcaaatgtggtcaagttacatgggttgccaaagtccatagtttccgatcgagacaaaatttttacaagtttgttttggcaagaattgttcaagttgactggcacccaacttcatctaagctctgcctaccacccccaaactgatggacaaacggaacgcgttaatcagtgtttggaaatgtttctccgctgtgcagttcatgacaccccttctcagtgggcaaagtggttggattcagctgaattgtggtataacagtagttaccacacttctctgaaatgctccccatttaaagcattatacggtgttgatcctaatgtgggcatgatgccattcgagatgggggaaagggagaatgatgcttctattacttttcagaatagacatcattacttggagatgatcaaggcacatttggcggcagcacaaaataagatgaaatattatgctgaccagaacagatcattccggcagtaccaagaaggagacatggtctatgtcaagctgcaaccatttgctcagtcctctgttgctcatagaccttgtgccaagctgtcctttaaatactttggaccatttcagattttatctcgcattggttccgctgcttacaaactcaatatgcctgaatcagcagctgttcatcctgttttccatgtatcacagctgaagactcatgttcccaacaataccccagtgtactcccaattgccatctgctgcttttgctgaaggagtgtcacctgaacctgaagtcattctggatcgtcggttggtgcaaaagggcgcagccgctgtggttcaagtacttatcaaatgggtcggtcttccagcagagatgtcatcttgggaagactatacagtgctgaaagatcgatttcctgatgccatcatctggagtccagatgctgctcgagggggggaaaatgtcatgacccagggtgcgtga

SEQ ID NO: 929 - DNA, 639 bp, Zea mays
  Clone ID: TF_LIB5075-002-R1-XP1-E11
gccggccgggccgggatttcaattccagcttcttcctcgcggcgtactgcttgttcggtttgttcgaggccacaaatggtcatcgtgagtggcagcaacttccaaacggattcgtgatccttccgctatggatcccgtctccaaaggtgcgtggcagaagcgattcttcagcgtcgcgccgccggcggcgctggtcttcttcttcgtgctgatattcgtcgccggtgcagccgtcacgctagatcataaggagcctcaatgcattctccaacgccgactggtcaagaaaggtggcgcggctattgtacaagtgctggtgcgatggcaaggacttccagctgattcggctacatgggaagactggacggtgatgcaagctcgtttccctgattcaagcgcttggggccaagcttccattccaggagggggtgatgtaacaccggcgccaaccatcaccggagttacggcataagtgtaatacgtgtttcattgtcgtttacgtatttgtaataatgttggtccactgtcaggccgtagggctttctgttaagacttgtataaggtgaacctcgtggagagggacgaacagaaaagaaaaatagaaatacctgctccaaaaaaaaaaaaaaaaaggcccta

SEQ ID NO: 930 - DNA, 688 bp, Zea mays
  unsure (1)..(688): unsure at all n locations
  Clone ID: TF_LIB4172-012-Q1-L1-E4
tggacgcctgcaggttccggtccggaattcccgggtcgacccacgcgtccggtttgcggtggagagcatccggaagaagcgcgtgcggaagggcaaagttgaatatctggtgaagtggaaaggatggccccccaagtatagcacctgggagccagaggagcacatcttggaccctcgccttgtcatggcctacgaggagaaggaggagagagaccgagcctcagggtataggaagagaggtccgaaacccaggcggcttctgctgcaggagtcagcagccccagacgttgtgcagacccccggagactgggagcctatggagcaggcccctgaagaggaggcagaagcagacctgaccaatgggccgcctccctggacacccacgctcccctcaagtgaagttaccgtgactgacatcaccgccaactccgtcaccgtcaccttccgcgaggctcaagccgccgagggcttcttccgagaccgcaacgagaagctgtgaatagcggcttcccctcttaaaactgtgcttcttggggcttgggtgaggatttccagagacaggaagggctgggagcagggtaaatatttttattttttaaaaaaagcagaatcacggngaagaccccagcacccgcccttgctccccgatggttgtttacaaagaggcctcanaacngggtgtgggggg

SEQ ID NO: 931 - DNA, 1239 bp, Zea mays
  Clone ID: TF_UC-ZMROTEOSINTE048H12_FLI
gaaggtcttcctcgctctgatggcttcaattgcattttggtggtggtggatcgtctcactaagtacgcccattttattcctctacgtcaccctttcactgccaatcaagttgcttcagccgtgctcactcatgtggttaaactccatggtgtgcctgcttctattgtctcggatcgtgaccggattttcactagtgccttttggaaagggctgttcaaactgttggacacaaagctgttagtcagtacagcatatcacccacagacggatggccaaaccgaacgcgttaatcaatgtctggagatgtatttgcgttgcactatctacaactctccagccaagtggaaggcatggctgcctctggccgagctgtggtacaactcttcgtatcactcatccttgcaatgctccccattcaaggcattgtatggatatgaaccaaaattaccttcttttcctgtgctggctgatgtttccactactgatctttcctcactgatcaaggaaagggatcttcatctggaattattgaaacacaatttgctggctgcacaaactcgtatcaaacttcaagctgataagaagcgtattgatcggcagtttgcagaaggggagatggtacttctgaaactgcaaccttacacccaatcctctgtggccagtcgaccctttcctaaattggccttcaaatactttggtccttataaaatacttcagaagattggcgtggcagcttataaactggagttaccggctgggagtttggtgcaccctgtttttcatgtttcccaattgaagccctatactgctgactactctccagtatatgctgaccttcccaagatacctgatcttactcaaagggacctgcagcctcaatgcattctccaacgccgactggtcaagaaaggtggcgcggctattgtacaagtgctggtgcaatggcaaggacttccagctgattcggctacatgggaagactggacggtgatgcaagctcgtttccctgattcaagcgcttggggccaagcttccattccaggagggggtgatgtaacaccggcgccaaccatcaccggagttacggcataagtgtaatacgtgtttcattgtcgtttacgtattttgtaataaggttggtccactgtcaggccgtagggctttctgttaagacttgtataaggtgaacctcgtggagggagacacacagaaaaagaaaaatagaaatacctgctccac

SEQ ID NO: 932 - DNA, 1759 bp, Zea mays
  Clone ID: TF_ZmC38719_1
tttttttttttttttttttttttttaacttagcatataatacacgcaataatgttttgaagtcgtacaacttgctagtcattctagctaaccgatttgtacgattaatcatgattaatcaccattagtcggatgactttgacgattaatcatgattggtccaaatcgacttgaacgattaatcatgattatcacgattaataagacaatttgaaaacagtgacaatatcgagcagttagtttgacaaaccatgctatcatgtttcacttgcactcagcattggctacttactaattatctacttactcaaataatactacaaatgcatctagcacaaaaaatgctacatttaaatacatttccatttgttccaaacataggtgcagcacatgcaactgaaacccagcagcgtcaatgcatccttatcacgaggtggggttatagcgaaggtgttgctcatagtaatcaataagcaccaggggctccttagctttcaactgcttatcgtccacgaataccatttccccgtcagacctgagagccttgaatgttattgcaacttgctgcacaccatccataactgtggcaaaatagcgcactggcttaatgatcttaatgatcttaggcatatgaatttggttaccagagtcctcccctttgttcttatcaccaggatctccttctgtggaatcaacagtctcgttgcctggcttgtcacttgttcgatcacggatatctccttgctcctgtgttacttcatcctgcttgaaccttcttacacatccagacttgcgcttcttagcacctgtcacctgtccaccctgaggtgtgattgctcgtatttcattgtccatcttcaatgaaccattagcagggtgctgcacatcttgttgatcagtcaagctaacagataagggagcctcttgagatggaaacccagctgagaccacaccagaactaccctcctgtactattctttgcccaagcaagttcactgctgcgccaaggcccccaggtgaggtcttgttactattattatttgctctcctactacttgtcctgcagggcagtttcttcacttctgaggcatgtatgctatgcatgctccgggcctccgaccgaggtggtcgaccacgtttgccacgagaagcgttaggatcggatgttggagttgttggagtcttgcgctttcgctttccacaggatctgggcgaccttgaccgcttattgaaagcatcaacaatgtcagaacaggccttcaggttttcaaggggttcccatgtgttagcactctctggccacccacgccacttgacgaggtactggagctgacccttgcggaggcggcggcggcggatggcctcgatctcgaagtagccctcagccagcttcggcggctccacagcttcctgcgccggtgtctccgcttcaacttcgtcctcctcaccacatccctcctccgtctgttcctcctcttcctcgtcgccctcctcagtcagttcctccgcctcatcctcctcccctagagccgccgtcggatagccggaatccttcctgttccgccgcatggcgaatcttgtttcactcgacggcccaccacacgttagctcgtgttatccaaatcaagggcggatcttgtacagattttgctgatgagatctggtttttggagccgccttttctcggagggattcggaaggaacaaggctcgttcaccccaggggcgccccaggctagcagcaccgaattccgagttatt

SEQ ID NO: 933 - DNA, 664 bp, Zea mays
  Clone ID: TF_ZmC290186_1
cagaggtacaagagggcactatcacgtgaagaggttgaggtacatgacgtgggcaaggagatggagctggatcttattaaacaatatagtcaggttgaacggatatttgctgatagggtcagcaaagctgatggagatgatctggttcccgaatatttagtaaaatggcaaggacttccttatgcagaatctacctgaaatttaagagacagatattgattttgctcaagatgcgattgatgaatataaggctcgtgaagctgcctcagatatacttgggaaaacagtagatttccaacgaaagaaaagcaaagctagtttgaggaggcttgatggtcagccagaatggctaaaagctggcaagcttcgtgattatcagctggaaggactaaactttctcgtcaatgggtggagaaacgatactaatgttatacttgctgatgaaatgggtctgggaaaaactatccaatctgtatccatgcttggcttccttcataatgctcaagaaatcaatggcccatttcttgtagtcgtgccactgtcaacattgtcgaactgggcaaaggaatttcggaagtggctgcccaacatgaatgttgttgtttatgttggcaaccgtgccagcagaaagatgtgccagcagcatgaatttttttcagacaaa

SEQ ID NO: 934 - DNA, 4155 bp, Zea mays
  Clone ID: TF_ZM3648.C14.o2.fg
atggggcgcctcctccttcctcagaggaggcggcgagggtgggaggtgggggacgaatggggctccacctggtccaccggcctcaccaaggaccactttgacggatcctctgtcagcaaaccagtatcagcagagcgacgtcaaggagtgatggatcctaatacgaagatgatccttgatgaaatggagaagaagttttcggctatggatctcaagtgggagaaacgtttctcggcgttcgctgatgccaaggaagaacgcctcagtgctgtggaggtggccgctgaggatttggcggtgtggcgtgtcaagatggacaccaccatggaggacgtcaagttggatttgaggaagctcaacaagcactgggatcgggcatccctcgaggccgcgacagaaccaggattgttgcagaagcctgttgcagctatcggtcgagcactcggtggtcctgagggagaaggttttggaggcatccgtgaggaacccatcctgccggagcagggttttggctccgtcacgacctacgttccaaccagcaacaagggtatgcatcacttcgtacctcctcctgtccagtccagtgcctgttgtcctggtcttgcgtttgatgtcggtggatctcgtcacaggaattttgagtctggttttcattcgttgggtaaattaccacaactaccatttccaacgtttgagggtgataatccccgtctctggatttcacggtgtgaaaattattttgatatgtactttgttgatcctgattcctggattcggtcactgcttgatcgctatggcaagaaccagcatcaggcgttgctacgccaactgttcaggattcgacaaacgaattctgtgtccgactatattgctcgattctccactctcatggatcaattgtctgcctatggtgctgtgtctgatccgttatattttactacccgattcttggatggtttacgggacgaggtccgtgctgttgtgattatgcagcgaccgggagatttggacgcagcatgctctttggctctgttacaggaagaggttgcggactcggggcgacgtcgtgcgttccctcggtttgaatcgggttcgtggtcgaaatcagagggcaaggggccttttcccttaccttctcctccttctggggatcggaatgtgtcatccaactctgataaacgtccagtgtcaccgtctaagtcagtggatgagcgactgggtgcactgcgggctttccgtagggccaaaggcttgcgtgacagatgtgcagaaaagtggcataagggccatacttgtgcagcaacggtgcagcttcaggccatgcaggagggttacatttttcaccaggatttgaaggtccttcccctgcagcattatgacatgattttgggaatggattggttggaggttcacagacctatgcatgtgcattggcgtcacaaatggctttctattacatatcatggatcttttgttacattgtatggctcagactatggggctagtgagagcttgctaattcagatatcatcagtgtatgtacccgagcctgcaagtgagagctccaagttttaccctgagattgagtccttactgtcccagttttcttctgtgacttcagctccaacttcgttgcctccagtaagaagttgtgatcatgctataccattattggtgggagccaaaccagtaaacatccgcccttacaggtacccacctgcacttaaggatgaaatcgaagcacaagtcactgttatgttacaacaaggccttattaggcccagttcctctcccttcagctcccctgttttattggtcaggaagaaagatggctcttatcgtttttgtgtggattatcgatatttgaatgcactaactgtgaagggcaaatttcctatacctgtttttgatcaattgatggatgagctagcagggtctagttggttttccaccttggatttggtctcgggatatcatcaggttcgtctaaagtcaggtgaagaatttaagactgcttttcagactcatggtggacattatgaatttgtggtcatgccatttgagctggctggcgctccagggacgttccaaggagctatgaacaccacactggctacattattgaggaaatatgtgttggtattttttgatgacatattggtttacagtagaacatttgaggagcatcttaatcatttgagagatgtgttgttgctattgcagcaggatcattggcacattaaattatctaaatgccagtttgcccaacgaactatctcatatttggggcatatcattagtgagcaaggtgttgcaactgattcagccaaagtggctgctgttcgggattggccatctcctctcaatgtgaaagagttaaggagctttttggggcttgcagggtattataggaagttcattcgtcactttgctatcttgaccaagcctttaaccgagttacttcgcaagggtgtcttgtatgtttggacttctgatcatgaaatttccttcactgctgtcaaacaggccctatgtactgcacctgtgttggcccttccggatttcaacaaaaccttctgtattgaaactgatgcttgcaagtctggtgtgggagcagttttattacaagaggggcatcctttgacatttattagcaaggcactcggaattaaaactcaagggctttcaacttatgaaaaagaatatttggctattttaatagttgtggagcagtggcgaccttacttgcttcacgcagagtttattatctttactgatcaaaatagtttggtccatcttaatgatcagagattacatacaccctggcaacaacgagtttttactaaactactaggcttacagtacaaagtagtttacaaacaaggcatccagaatagagtgactgatgctctttctcggaggacacatgaagagaagagtatccaggagtttgtggcctcatgtgatatctgccagcaagctaaaccggatagaagcaagtatccggggtcacttcaaccattggctgttccagctggtgcctggcagacaatcactcttgattttgtggaaggtcttcctctatctcgtggtaaaaactgtgttttggtggtggtggacaagttctccaagtacggacacttcatacctttgaagcatccttttactgctgcttcggtggctcatgtgttcatgcaacaagtataccgtttgcatggcttaccatttgctattgtgtcggatcgagaccgaatttttacaagtcaattgtggaagagtttgttctccttggcaggcgttgcattgaatatgagcagtgcttatcacccacaatcggatggacaaacggagcgggtcaatcaatgtctggaaacgtttctgcgctgttttgtgaatgcctgtcctcataaatgggtgcagtggatttatttggccgagttctggtacaatgctgcttgtccagctcctcagttagctgattggctccaggagaaatctgtcatgtccgcattggtacatcagcacttggcgcgggctcaacagcgcatgaaaattcaagctgacaagcaccgatcagagcgacattttgcagtgggtgacagcgtctacctcaagttacaaccttatgtgcagtcctcgttggcacctcgctccaatcagaaacttgctttccgtttctttggacctttttcggtcatcgccaaagttgggtcagtggcctacaaattgacgttgccagcttcatcacatattcatccagtttttcttgtgtcgcagttaaagaaagcagttccttcttctgtgaccgtggatcagctgccggtgtcgttggcaggtttccagatccctgaactggtgttgcaaaggcgtcttgattccaaaggcaatactcaggctttgatcaagtggtcgggcttaccgccttcgttggcaacttgggagaacttggaggttgtgcagcaggcttttcctctgtcccctgcttggggtcaagcaggacttcgtcgaccggggaatgtcagcaaaccagtatcagcagaggtaactgaagtgttgggccaggaagataagactgaaagtgtccataggctgaaaaggagcgacagaattaggaggaagaacgtgcggctgtctgggccagagtggatggcgtga

SEQ ID NO: 935 - DNA, 2086 bp, Zea mays
  unsure (1)..(2086): unsure at all n locations
  Clone ID: TF_ZmC5789_3
cccagatcatgcctggcaagtcgtgacgatggactttatttctgggctgcctgtgtcccacaagtacaattcggacgcgtgggcggacgcgtggttggacgcgtgggcacatttcctagcactagctcatccgttcacagctttaaccgtagctaagctttatctgtcagacatatataagttgcatggactgccatcgtcgattgtgtctgatcgggatcccatattcactagcaagttatggcaagaactgttcagattggctgggacaaagctgtgcatgagtagtgcctatcatccacagtctgatggtcagacagaaagggttaatcagtgtttggaagcttatctgagatgcttcgttcattcttgccccaaacagtggtattcttggctctcgctggctgaattttggtataacacttgctatcataccgctctgggtaaatctcctttcgaagtgttatacggtcatgctccttctcagcttggattagacaccgttgatcagtgttcggttcctgatttacaaacttggttgcttggtcaccaacagatgctacagcaagtaaagttccatcttcagcgtgctcaggacagaatgaagaaacaggctgataagggtcgagtggaacgtacttatactgtgggcgatcaagtttttctgaaacttcagcccttctgtcaacgatcagtggctgacagaccagtttctaaactggcatttcggttttttggtccctttgaggtgattgagcagatcaatcctgtggcctatgaactagcgttaccatctgggagtgctatccacccggtctttcatgtatcgcagttaaaatcggccaacggcgtgcgggttcctagcactgactctcttccagatatctttactgggttgcaggtgccggaggaagttctggagtccaggcttcttcgtaaagggggtaaggtgatttcgcagttgctcattaagtggtccaattggccggtgtcactgtcaacctgggaggatgaagaggccattaagcagaaatttccacaagcaccagcttggggtcaagctgtcgttaaagaagggggaaatgtcagcagagcagatcacatggaccatgcagaggagcggactcaagcagtgcaacagaaggcacagacagagggagtcaaggaagacaatcagagcccgcgcagccgtcgtgtaccaaagccaaataccaagtacatcggtgcagagtggcgcgtataggtatacggagttatacgtattgatgagggcaggtgtgccggtataaataatattgtaatcgtttctaaactcagtctggaacatgttattgccgagtcggcaagaaaggaatagataccagagaaattcctggcgtgaaccacgggtgttgttcacactcgctgtccctgcctgactcttaaaaagggcggcgtgtcaccgcctggttactcacagtcatagattcacgccgcggaacgcggattccaagaacccaagtgaatcgcggctcctcgagtccggcggtgccgtccggagaggtagagctagactgctagagcacagccccgccatggtcgcaacatttttagagcacagccccgccatggcggccgcggcgcgcgcgatcatctgcgagctggcgccgcagaagctgtcgtcgacggcgtcggggcccgcggcgccgaagaagcgtgacgccgggacgaaggtggtgctgcagccccgcctctgcacgctccggtcgtacggcgccggcagcggcgtggtgacgcggaggattctggccggggaggaggacggcagcggggccgccgactcgggcggctccgcggcgttgccgttcttcgcctcgctcgctgactacatcgagagctcccgcaagagccaggacttcgagaccatctccggccgcctcgccatggtggcgttcgcggcggcgatgaccgtgcagacgacgacgggcagctccctgctcaagaagctggacaccatgaagatcgaggacgcggcggntatgtgcgtggcggtggtcgacagcgccgcggcgttcgcatgggcctccagcgcgcgcaataggatcgg

SEQ ID NO: 936 - DNA, 217 bp, Zea mays
  Clone ID: TF_LIB3245-566-P1-K1-F10
accgggcatgcggtgagagactggctggggagaggaaaaaaaaatctaaccgtagcatacgcagcgctagggtttggaggttgcgatggcggctgcggcgagacacctacggacggtgaagtggttcaacgacaccaagggcttcaggttcatctaccccgaggacggaagcgaagatctcttcctgcaccagtcctggatcaagtaggagggcttc

SEQ ID NO: 937 - DNA, 271 bp, Zea mays
  Clone ID: TF_LIB3070-015-Q1-N1-A3
cactatagaagagctatgatgcacgctgaccttagacgtgaactcggaatgaggctcgtgactgtgaatcggttcaacggaaccaaaggctgtcatattcatcactcgcgacaacgggagcgatgacctattcatccatgaagcctacatcaaggacgacggcttccgtagtcttaacgacggtgatgacgttgaatacaccgtcaggagcggctgctactgtctgagctcgggctcctcgatgtcacttgttcccggctagtggtgaagc

SEQ ID NO: 938 - DNA, 318 bp, Zea mays
  Clone ID: TF_LIB3354-053-P1-K1-D1
ctgagagccggtcaggggaggaaaaaaaattctaaccttagcatccgcagggctagggttagggggttgcgaagtcgggggtggggatgcaccgcgaggcggtgaagaggttcaacgacaccaagggcttagggttcatctaccccgaggacggcagcgaggatgtcttggtgcaccaggcgttgatcaagtcggagggcttccgctcgctcgctgagggcgaggaggtggagcttctcctattgaacggcgaccccggtcttattcaggccgttgacttcaccacaccccactagacatacggggggggccatatga

SEQ ID NO: 939 - DNA, 262 bp, Zea mays
  Clone ID: TF_LIB3332-019-P1-K1-B4
gaacggtcagggatatgtataaatttctctaactttagcatccgcagtgctagggttcgtgtgtggggaatgcgtttgcggcgagacatctatgtactgttaagtgttttaacgacaccaagggctttggtgttatctcctccgaggacggaagcgaagatctctttgtgcaccactcgtgtatcaagtcggagggctttcgttcattcgcggagggctaagacgtgtagttccttgtttcagagggtgacgactgttgcac

SEQ ID NO: 940 - DNA, 343 bp, Zea mays
  Clone ID: TF_LIB3180-013-P2-M1-D2
gaaaaaaaaatctaaccctagcatccgcagcgctagggttcgggggttgcgatggcggcggctgcgagacatcgggggacggtgaagtggctcaacgacaccaagggctttgggttcatatacccctaggacggcagcgaagatctatttgtgcaccagtcgttgatcaagtcggagggcttacgctcgctcgcggagggcgaggaggtgcagttttccaactttgatggagactacggcccgtctaaaggcggtcctaccaatcaccgctctggctgcattcaataaggtcggcgcttagcttatatttggcgctgacagccctgctattcaggagaatagg

SEQ ID NO: 941 - DNA, 344 bp, Zea mays
  Clone ID: TF_LIB3137-035-Q1-K1-C7
ggaaaaccgcggccgacgcacgcgtccggcgagagactggcagggtagtttaaaagtttatctaaccctagcatccgcggcgctaggggtcgggggttgcgagggccgcggctgttacacaacggaggacggtgaagtggttcaacgacaccaaggtcttcggcttcatctgccccgaggacggcagcaaacatctcttcgtgcaccagtcgtacatcaagtcggacggcttccactcgctcgcggacggcgatgatgtcgagttttccatctaccacggtgactacggccgcactaaggccgtcgacctgaccatccccgacggatcctttctcaggggctgc

SEQ ID NO: 942 - DNA, 566 bp, Zea mays
  Clone ID: TF_ZmC519941_1
cctaccgatctagggtttcctgctagggttttggtcctttgttttcggcggcgcaagatgggggagagggtcaagggaaccgtgaagtggttcaacgtcaccaaggggttcggcttcatctccccggacgacggcggcgaggaccttttcgtccaccagtcctccatcaagtccgacggctaccgcagcctcaacgagaacgacgccgttgagttcgagatcatcaccggcgacgacggacgcaccaaggccaacgacgtcaccgcaccgggaggaggggcgctctccggcggctcccgccctgtcgaaggcggtggtgaccgcgggggccgtggcggctacggaggcggcggcggtggctacggcggcggcggtggcggctacggaggcggtggtggcggctacggcggtggcggtggcggctacggtggcggtggctatggaggcggcggtggcggcggccgtgggtgctacaagtgtggcgaggagggccacatctccagggactgcccccagggcggcggtggcggctacggcggtggtgaatacggaggacgcgatcgtgc

SEQ ID NO: 943 - DNA, 306 bp, Zea mays
  unsure (1)..(306): unsure at all n locations
  Clone ID: TF_LIB3587-283-Q1-K6-B1
actcccccgggacggcagcgaggaggggttcgtgcaccagtcgtcgatcaagtcggagggcttccgctcgctcgcggagggcgaggaggtggagttttccgtctcggagggtgacgacggccgcactaaggccgtcgacgtgaccggccccgacggatccttcgtcaggggcggcggaggcggangaggccngcngcngcngctactgcggtggcggcggcggtggtggtggcggctgctacaactgcggccaggccggccacatggccagggactgcccaagccgtggcggccgtggcggaagga

SEQ ID NO: 944 - DNA, 306 bp, Zea mays
  unsure (1)..(306): unsure at all n locations
  Clone ID: TF_LIB3245-117-P1-K1-D5
acggcagcnagagactggcagtggattaaaaaaatctaaccctancatccgcggcgctggtggatctttaggggtgttggcgacnnncaacnaggcancnnnngacggtgaagtggttcaacgacaccaaaggcttcgggttcatctcccccgaggacttcagcgaggatctcttcatacaccagtcgtctatcaagtcggagggcttccgctcgctcgcggagggcgaggaggtggagttttccgtctcggatggtgacgacgtcctcactaaggcccactacatgaccagcccctacaaatcct

SEQ ID NO: 945 - DNA, 1409 bp, Zea mays
  Clone ID: TF_ZmC218_40
cgcagcgctagggttcgggggttgcgatggcggcggcggcgaggcagcgggggacggtgaagtggttcaacgacaccaagggcttcgggttcatctcccccgaggacggcagcgaggatctcttcgtgcaccagtcgtcgatcaagtcggagggcttccgctcgctcgcggagggcgaggaggtggagttttccgtctcggagggtgacgacggccgcactaaggccgtcgacgtgaccggccccgacggatccttcgtcaggggcggcggaggcggaggaggcggcggcggcggcggctacggctcccgcggcggtggcggatctggcggcggcggtcgcagctacggtggtagctggggcggcggccggagatccgcgcccgacgccgctttcggctccgtcctctccggcaccgccggcgacgccgcccccagcgaccagtggttcgtcgacgcgctcaacgcccccgcgccgcaccccatcgagcgcgtccgatccgagtcctcctcgatcgtctccgacgtccccgactacctcttcagcctcgacagcccgtccgacgaccccagccccggcccctcggcggctcgcgccaagtccgacgccacggagactccgcaccaccacggcgacgacgtgccgccttccgctcgacagataccgcacgtcgcaggaggagcgtcatcgtggcccgccccgccgccgccgtacatggcgcagcctatgtactacttccccgtgccgccaccggtccactatctcgaccagtctgcgcagagtggctacatgcctcgcccgatctaccacattgtcggtggcggaggaagcgaggcgcctggcggagatcttcacgcggccggcggagtctacggcgtctcgcaccacatgcaggggttcccgccgatgatgtacgcgccgccgcgcgcggtcatctacaactacaagtcggaggggatgccatcgctgcctccggaaggtggggcacactcttcctaggtgcatcggctacttcacatctctgaatcctgattattgttgcagatgcctaagctaaggagttttgcgtggtaatttttttatcgattcgtctagagtcttgttcgttgttttgtatagatggaggggttgatggtgatggatagatattaatgcagttttcgtctagtggaaatatattcgtgaaatgtatatcatactaaatagtatagtatttggtgtgattaattaatattctagttaatgtaatgtgggattcatataatctaggtggttctggtcttatagaaaccatttttgggcattttatatttacataaactggatgttgggtgaatgttctaagcagtatgtgctgtgttgaacctcaatcacttatgagtggttactaaatttgaatttgatgtcttc

SEQ ID NO: 946 - DNA, 1327 bp, Zea mays
  Clone ID: TF_ZmC218_88
cccacgcgtccgcccacgcgtccggcgagagacgggcaggggagagggaaaaaaaaatctaaccctagcatccgcagcgctagggttcgggggttgcgatggcggcggcggcgagacagcgggggacggtgaagtggttcaacgacaccaagggcttcgggttcatctcccccgaggacggcagcgaagatctcttcgtgcaccagtcgtcgatcaagtcggagggcttccgctcgctcgcggagggcgaggaggtggagttttccgtctcggagggtgacgacggccgcactaaggccgtcgacgtgaccggccccgacggatccttcgtcaggggcggcggaggcggaggaggaggcggcggcggctacggctcccgcggcggtggcggatctggcggcggcggtcgcagctacggtggtagctggggcggcggccggagatccggcggcgggggcggtcccggcgcgtgctacaagtgcggcgagcccggccacatggcaagggactgccctagcgccgacggcggaggcggctacggcggaggcggctacggcggcggcggctacggaggaggaggcggcggcggcggtggctgcttcaagtgtggcgagcctggccacatggccagggactgctccagcggcggcggcggctacggcggtgggcggcggcggcggtggaggcggctgctacaactgcggccaggccggccacatggccagggactgccccagcggtggcggcggtggcggagggaggttcggcggcggcggcgggggtggcggcgaccgctcctgctacaactgcggcgaggccggccacatcgcccgcgactgccccacgtgaggtgtgtccgcgtccgtccgtccagccagatcagatcggatcgctccaccacctgctggtctgatggcgccgcccccttctagatctcgcttaaaaaacacccccctctcgctgtgtgtcggagtaccgctttagttttgccgatccgggcacgagtgcccgctgcctctttcctctcatgcgtaagaggatcccgtccgccgttttcagatttcgttcggttcgtagaagaactctcaagttaagttaagttatcatggtgtgtgcttggtcgttgttcgtcgtcgtcgttaaggttttaagagatgatttggtcctgtgttgccgaggggaagtcgaatctgcttttttctttttttgtggtttgttccaccagactgaggaaggagatgagatgattattctcccagattataatcctgcctgcttgtgcttgatttggttaaaaaaaaaaaaaaaaaaactcgagacctcgtgc

SEQ ID NO: 947 - DNA, 1274 bp, Zea mays
  Clone ID: TF_ZmC218_73
aattcggcacgagggagacgggcaggggaggaaaaaaatctaaccctagcatccgcagcgctagggttcgggggttgcgatggcggcggcggcgaggcagcgggggacggtgaagtggttcaacgacaccaagggcttcgggttcatctcccccgaggacggcagcgaggatctcttcgtgcaccagtcgtcgatcaagtcggagggcttccgctcgctcgcggagggcgaggaggtggagttttccgtctcggagggtgacgacggccgcactaaggccgtcgacgtgaccggccccgacggatccttcgtcaggggcggcggaggcggaggaggcggcggcggcggcggctacggctcccgcggcggtggcggatctggcggcggcggtcgcagctacggtggtagctggggcggcggccggagatccggcggcgggggcggtcctggcgcgtgctacaagtgcggcgagcccggccacatggccagggactgccctagcgccgacggcggaggctacggcggaggcggctacgggggaggcggctacggaggaggaggaggcggcggcggcggtggctgcttcaagtgcggcgagcctggccacatggccagggactgctccagcggcggcggcggctacggcggtggcggcggcggtggtggtggcggctgctacaactgcggccaggccggccacatggccagggactgcccaagcggtggcggcggtggcggagggaggttcggcggcggcgggggtggaggcgaccgctcctgctacaactgcggcgaggccggccacatcgcccgcgactgtcccacgtgaggtgtgtccgcgtccgtccagccagccagatcggatcggatcgctccaccacctgctggtctgatggcgccgcccccttctagatctcgcttaaaaaaacatccccctctcgctgtgtgtcggagtaccgctttagttttgccgatccgggcacgagtgcccgctgcctctttcctctcatgcgtaagaggatcccgtccgccgttttcagatttcgttcggttcgtagaagaactctcaagttaagttaagttatcatggtgtgtgcttggtcgtcgtccgtcgtcgtcgtcgttaaggttttaagagatgatttggtcctgtgttgccgaggggaagtccaatctgcttttcttttctttttttgtggtttgttccatcagacttgaggaaggagatgagatgattattctcccagattaaaaaaaaaaaaaaaaaagcggcc

SEQ ID NO: 948 - DNA, 1300 bp, Zea mays
  Clone ID: TF_ZmC218_80
ccattagctttatctactccagagcgcagaagaacccgatcgacaccatgagggtgttgctcgttgccctcgctctcctggctctcgctgcgagcgccacctccacgcatacaagcggcgagacagcgggggacggtgaagtggttcaacgacaccaagggcttcgggttcatctcccccgaggacggcagcgaagatctcttcgtgcaccagtcgtcgatcaagtcggagggcttccgctcgctcgcggagggcgaggaggtggagttttccgtctcggagggtgacgacggccgcactaaggccgtcgacgtgaccggccccgacggatccttcgtcaggggcggcggaggcggaggaggaggcggcggcggctacggctcccgcggcggtggcggatctggcggcggcggtcgcagctacggtggtagctggggcggcggccggagatccggcggcgggggcggtcccggcgcgtgctacaagtgcggcgagcccggccacatggcaagggactgccctagcgccgacggcggaggcggctatggcggaggcggctacgggggcggcggctacggaggaggaggaggaggcggtggctgcttcaagtgcggcgagcctggccacatggccagggactgctccagcggcggcggcggctacggcggtggcggcggcggcggcggtggtggtggcggctgctacaactgcggccaggccggccacatggccagggactgcccaagcggtggcggcggtggcggagggaggttcggcggcggcgggggtggaggcgaccgctcctgctacaactgcggcgaggccggccacatcgcccgcgactgtcccacgtgaggtgtgtccgcgtccgtccagccagccagatcggatcggatcgctccaccacctgctggtctgatggcgccgcccccttctagatctcgcttaaaaaaacatccccctctcgctgtgtgtcggagtaccgctttagttttgccgatccgggcacgagtgcccgctgcctctttcgtaagaggatcccgtccgccgttttcagatttcgttcggttcgtagaagaactctcaagttaagttaagttatcatggtgtgtgcttggtcgtcgtccgtcgttcgtcgtcgtcgttaaggttttaagagatgatttggtcctgtgttgccgaggggaagtccaatctgcttttcttttcttttttgtggtttgttccatcagactgaggaaggagatgagatgattattctcccagattataatcctgcctgcttgtgcttgatttgggg

SEQ ID NO: 949 - DNA, 1284 bp, Zea mays
  Clone ID: TF_ZmC218_90
cccacgcgtccggcgagagacgggcaggggagagggaaaaaaaaatctaaccctagcatccgcagcgctagggttcgggggttgcgatggcggcggcggcgagacagcgggggacggtgaagtggttcaacgacaccaagggcttcgggttcatctcccccgaggacggcagcgaagatctcttcgtgcaccagtcgtcgatcaagtcggagggcttccgctcgctcgcggagggcgaggaggtggagttttccgtctcggagggtgacgacggccgcactaaggccgtcgacgtgaccggccccgacggatccttcgtcaggggcggcggaggcggaggaggaggcggcggcggctacggctcccgcggcggtggcggatctggcggcggcggtcgcagctacggtggtagctggggcggcggccggagatccggcggcgggggcggtcccggcgcgtgctacaagtgcggcgagcccggccacatggcaagggactgccctagcgccgacggcggaggcggctacggcggaggcggctacggaggaggaggcggcggcggcggtggctgcttcaagtgtggcgagcctggccacatggccagggactgctccagcggcggcggcggctacggcggtggcggcggcggcggtggaggcggctgctacaactgcggccaggccggccacatggccagggactgccccagcggtggcggcggtggcggagggaggttcggcggcggcggcggcgggggtggcggcgaccgctcctgctacaactgcggcgaggccggccacatcgcccgcgactgccccacgtgaggtgtgtccgcgtccgtccgtccagccagatcagatcggatcgctccaccacctgctggtctgatggcgccgcccccttctagatctcgcttaaaaaaacacccccctctcgctgtgtgtcggagtaccgctttagttttgccgatccgggcacgagtgccccgctgcctctttcctctcatgcgtaagaggaacccgtccgccgttttcagatttcgttcggtccgtagaagaactctcaagttaagttaagttatcatggtgtgtgcttggtcgttgttcgtcgtcgtcgttaaggttttaagagatgatttggtcctgtgttgccgaggggaagtcgaatctgcttttttctttttttgtggtttgttccaccagactgaggaaggagatgagatgattattctcccagattataatcctgcctgcttgtgcttgatttggttaccacatatgcctt

SEQ ID NO: 950 - DNA, 940 bp, Zea mays
  Clone ID: TF_ZmC218_74
cccacgcgtccgcacacgcgtccgcgcagcctacgggttcggaggttgcgatggcggcggcggcgaggcagcgggggacggtgaagtggttcaacgacaccaagggcttcgggttcatctcccccgaggacggcagcgaggatctcttcgtgcaccagtcgtcgatcaagtcggagggcttccgctcgctcgcggagggcgaggaggtggagttttccgtctcggagggtgacgaccctggccacatggccagggactgctccagcggcggcggcggctacggcggtggcggcggcggtggtggtggcggctgctacaactgcggccaggccggccacatggccagggactgcccaagcggtggcggcggtggcggagggaggttcggcggcggcgggggtggaggcgaccgctcctgctacaactgcggcgaggccggccacatcgcccgcgactgtcccacgtgaggtgtgtccgcgtccgtccagccagccagatcggatcggatcgctccaccacctgctggtctgatggcgccgcccccttctagatctcgcttaaaaaaacatccccctctcgctgtgtgtcggagtaccgctttagttttgccgatccgggcacgagtgcccgctgcctctttcctctcatgcgtaagaggatcccgtccgccgttttcagatttcgttcggttcgtagaagaactctcaagttaagttaagttatcatggtgtgtgcttggtcgtcgtccgtcgtcgtcgtcgttaaggttttaagagatgatttggtcctgtgttgccgaggggaagtccaatctgcttttcttttctttttttgtggtttgttccatcagacttgaggaaggagatgagatgattattctcccagattataatcctgcctgcttgtgcttgatttggttaccacaaatgccttcaccact

SEQ ID NO: 951 - DNA, 1189 bp, Zea mays
  unsure (1)..(1189): unsure at all n locations
  Clone ID: TF_ZmC353770_1
tggacgcctgcggtaccggtccggaattcccgggtcgaccacgtgtccggtatttgtacaccagactgccataaagaagaataaccccaggaagtaccttcgcagtgtaggcgatggagagactgtggagtttgatgttgttgaaggagaaaagggtgcggaggcagcaaatgttacaggccctggtggagttccagttcaaggcagtaaatacgcagcagaccgtaaccattatagacgctatccacgtcgtaggggtcctccacgcaattaccagcaaaattaccagaatagtgagagtggggaaaagaacgagggatcggaaagcgctcctgaaggccaggcccaacaacgccggccctatcgcaggcgaaggttcccaccttactacatgcggagaccctatgcgcgtcgaccacagtattccaacccccctgtgcaaggagaagtgatggagggtgctgacaaccagggtgcaggagagcaaggtagaccagtgagacagaatatgtatcggggttacagaccacgattccgaaggggccctcctcgccaaagacagcctagagaggatggcaatgaagaggacaaagaaaatcaaggagatgagacccaaggtcagcagccacctcaacgtcggtaccgccgcaacttcaattaccgacgcagacgcccagaaaaccctaaaccacaagatggcaaagagacaaaagcagccgatccaccagctgagaattcgtccgctcccgaggctgagcagggcggggctgagtaaatgccggcttaccatctctaccatcatccggtttagtcatccaacaagaagaaatatgaaattccagcaataagaaatgaacaaaagattggagctgaagacctaaagtgcttgctttttgcccgttgaccagataaatagaactatctgcattatctatgcagcatggggttctttattatttttacctaaagacgtctctttttggtaataacaaacgtgttttttaaaaaagcctggattttctcaatacgcctttaaaggcttttaaattggttcatatctggtcaagttgagatttttaagaacttcattattaatttgtaataaaagtttacaacttgattttctcaaaaaagtcaacaaactgcaagcacctgttaataaaggtcttaaataatgncttaannatat

SEQ ID NO: 952 - DNA, 606 bp, Zea mays
  unsure (1)..(606): unsure at all n locations
  Clone ID: TF_LIB4762-117-Q1-K1-E3
cattgggtacctcgaggccggccgggggacctagctatttctagctcgacgttcccacacccctcaccgcgtccgcctcccctaccatctagggtttctagggttttcgaggaggaggaaatggcgtctgatagggtgctcgggactgtgaagtggttcaacggaaccaagggcttcggtttcatcacccccgacgacggtagcgaggacctattcgtccaccagtcctccatcaagtccgacggctaccgcagtcttaacgacggcgatgccgtcgaatacaccgtcggcagcggcaacgacggccgcgccaaggccctcgatgtcaccgcgcccggcggcggcccgcttgccggcggggaacgtcccgacggcggcaacggcggtgggcgaggcggatacggcggcggcgaccgcggttaacggcggcggcggtgaccgcggcttacgggggaggaggcgaccgtggctacggcggcggcgaccgtggttaccgggtgggaggtggggcgaccgcggctaacggcggcgaccgtggctttacgggggaggcggcggcttatggcgggtgggntacggtggaaggcgggcggntgggaggcggcc

SEQ ID NO: 953 - DNA, 1312 bp, Zea mays
  Clone ID: TF_ZmC3007_1
agcaggggtaacaacgcagagtacttttttttttttttttttttttttttttgatcattttttctttttttggcgtatcccctcgaaaaaaaaaaaaaaatacctcgaggccggccggggttcccacacccctcaccgcgtccgcctcccctaccatctagggtttctagggttttcgaggaggaggaaatggcgtctgatagggtgctcgggactgtgaagtggttcaacggaaccaagggcttcggtttcatcacccccgacgacggtagcgaggacctattcgtccaccagtcctccatcaagtccgacggctaccgcagtcttaacgacggcgatgccgtcgaatacaccgtcggcagcggcaacgacggccgcgccaaggccctcgatgtcaccgcgcccggcggcggcccgcttgccggcggggaacgtcccgacggcggcaacggcggtgggcgaggcggatacggcggcggcgaccgcggttacggcggcggcggtgaccgcggctacgggggaggaggcgaccgtggctacggcggcggcgaccgtggttacggtggaggtggcgaccgcggctacggcggcgaccgtggctacgggggaggcggcggctatggcggtgggtacggtggaggcggcggtggaggcggccgcggctgcttcaagtgcggcgaggagggccacatggcaagggactgctcccagggcggcggctacggagggggaggcggcggcggccgcggcagcgagtgctacaactgcggccaggagggccacatctcccgcgactgccccaacaaaaggcgttaggcgcggcgccaccgtcgcgtcggatccggcggagtcccatgtcgcctctcgccgcttccctacccctccaaaggtatcgctcggctgactcttgcgtgaagtcgtcggagcaaactatctatcagtagtactagcagtgtcgtttcgttttggtctgtcgtggcgtggtagtaagaaatgcaagtgagcagcaccagtatctttccgtttgaatcagttgtaaggcagtcatggtcatggttggctctgccggatctatctgtcatgaactatctatattatatcattatcaatgttatgcaatgagtctttggcattgagttaaggtaaaaaaaaaaaaaaaaaaaaaaaaaggcaaaaaaaaaaaaaaaaaaaaagcggaggaccatgtgctggaagatggtcaacaagactaaggataagttaaccaaggggtgcctctgggggttcctccttacggcgccggccccccccatttttggagggggggccaaag

SEQ ID NO: 954 - DNA, 435 bp, Zea mays
  Clone ID: TF_LIB5116-059-A1-PF1-B9
atatagatcgatcgcggccgcgccagagagagagagaaaaaaaatcttctcgtcggtagggtttcgggggctgcgatggcgatggaggcgcggatgaaggggacggtcaagtggttcaacgacaccaaggggttcggcttcatctcccccgacgacggcagcgaggacctcttcgtccaccagtcctccatcaaggccgacggcttccgctcgctggccgagggcgaggtcgtcgagttcgccgtctcggagggcgacgacggccgcaccaaggccgtcgacgtcaccggccccgacggatccttcgtgcagggcggcgcgggcggtggcggtggcgggggcggcttcggatcccgtggcggtggcggatctcgcggcggcgggggcttcggcggccgcggcggggacggatctggcggctacggaggtgggtac

SEQ ID NO: 955 - DNA, 548 bp, Zea mays
  unsure (1)..(548): unsure at all n locations
  Clone ID: TF_LIB4764-069-R1-K1-C6
acctcgaggccggccgggtccccatccccttcattgcgtgctggagccctcctccgcgcgctttctctggtgacgccgtccatgtctcctcctctcttcctgacactgattgagggtcactgaaaggagcggaagagcccaagtagttcttcgccaccggtaccgccgcatcgatcatcatggtgttctcctcgctcccgatcttcctagaccctcccaattggggccagatgcagatgcagatgcagccaccgctccagtgtctcctcggcagcggcggtggcagcgaccaccaccacctcatgcctcctccgtccggnctggcgccgctgccgggaggtcctgctgacacagcggcgagcgctccggcgggaggagtctcgtccacctcggtctcggtgcaagccgcggcgggagcgggggcaggggcgcagcctcgcccggtggtgtcgatggcggagcgcgcccggctcgcgcgcgtgccgctgccggagcccggcacgctccgatgcccgcgctgtgactcgaccaacaccaagatctgctac

SEQ ID NO: 956 - DNA, 287 bp, Zea mays
  Clone ID: TF_LIB3159-016-Q1-K1-C5
cactttttcaagaaccgcctaatgtaccggactgccggcggttccatgcgcaaccttcccaagggggcagggccgcacaaaaacaacaacgcgtccgccactttccactttcttcagaaggtcaaggccggtctgcccgtcgacccgctcgtctgcgcggcagccaatactaacggcaccgtgctcaacttctgctctgccatgttcagcttaaacctcacggagcataataaacacctcaaggaaaagctcgttcccatagcgggggaccagccctcaaatgggtc

SEQ ID NO: 957 - DNA, 586 bp, Zea mays
  Clone ID: TF_LIB3689-248-Q1-K6-G7
cccactcgattcgaccacccatccgccagctaatggaataaccagaatgagggaactatgcaacggcgaatggccggagctgctgcaccgatgctgtccgtgggtccggcggaaggtacatcggctgctaccgaacaagggggttaggctagcaagctcatcactggctaatgccaacgtagttgcgcaccccacgcccatctcactggcgcagcgcgcgcagctggcgctgatgccgcatccggagccatccatcaacagcccgcgttgctgaataccaccaacaccaatttctgctactacaacaactactgtatgacccacccccgccacttgtacaagcacgtgccgccgttactggacgcgcggcggatccctttgcaacgtccacaagcgtggaggctggcgctgaaacaagcgtgctggcaattcctcatcctacattgctgggtcttgatgcttaaagatgggtccatcaggaaggctactgagcagcccatgaactacaccggccaccatcacaggcactactcagtgctatcattactcagtggctgatctctttctctaagcacttgccggtgtt

SEQ ID NO: 958 - DNA, 461 bp, Zea mays
  unsure (1)..(461): unsure at all n locations
  Clone ID: TF_LIB4739-052-Q1-K1-F6
cgggaatctgtcactccccgacacgcgcacgagctccactccccactccgcacccaacccaaaggcgccactgccatggacgcgggcggtccgccgccgctgttcctcctgggcgccgtgctggccgcggcgctggggtggctgctcgtggtctggcgggcggcggcggggcggcggcggtccgcgtcggcgcggctgccgccggggagcacggggggtggggtcatcggngagacgctgcggcacatcacggtgtacaagtcgacgaaccccaagccgagcaaggaccagcacttgtggcaggactgacgccgctactgaaccaagggtgggtccctcagcaacgtgcccgtcggaggcggctgccggaagaaccgcagcaggggcaagccggttcgagccgtgcccgtcgattccgtggcgcccagcagcggtggcgcggcggcgttcacgcaccgggc

SEQ ID NO: 959 - DNA, 509 bp, Zea mays
  unsure (1)..(509): unsure at all n locations
  Clone ID: TF_8368141
ttgttgaatgcggacgcagctcgcattctctcctcccagtcccctagtccttactccttaccatcccatatnatccgctagctagcgctcntcggccgcatncgccggacgtctattaaacccgccgctcgctcctccnntcggcatgcgcgggtgtgttttttttgttgacatgagcgcctgcagncttccatgcctctcgcgccacccgccctgccgcctccgctcaagtctgcccggccccacttccgacgtctgnnatgagnnctcccgcaccgacgaccctcctccgnncgccccacccagcagangtgcaggggcgacgaggccgcgctgcaagtgtgccagcaacccgcggcatgcagctagctgngagtgcgccgcgncctgccgctccannccaacaccaagttctgctactacaacaactacagcacggcgcagccgcgccacttctgccgcgcgtgccgccgctactggacgcacgggggcacgctgcgcgacgtccc

SEQ ID NO: 960 - DNA, 639 bp, Zea mays
  Clone ID: TF_ZmC511329_1
cggtcggatgggcttcctctcctagtccttcccatgatcccatcccatatatcccagccaggtcacccagagagcgagaagctgattgcgccgcgccctagctagcgctctcggccgcatcgccggacgtctattaacccgccgccgctcgtcctcggcatgcgcggttctgctcgcctgcgagatggcgcctgcagtttccatcctctcggccaccgcctccgccaagcgaaagcgccccgccacttccgacgctgatgagctcccgcacgacgactcctccgcgccccaccagcaggtgcagggccagggccagcaaccgcggcagcagcagcagcttgagtgcccgcgctgccgctccaccaacaccaagttctgctactacaacaactacagcacggcgcagccgcgccacttctgccgcgcgtgccgccgctactggacgcacgggggcacgctgcgcgacgtccccgtcggcggcgcctcgcgccgcgccgccactggcggcggcggcggcaagcggcgcagggtctccgccgagccctcatccccgccgccgtcggtcgcggacgcgtgcctgccgtccgccttcccgttcctcagcgacggcagcttcttcccgcagctcgacctcgtcgg

SEQ ID NO: 961 - DNA, 684 bp, Zea mays
  Clone ID: TF_ZmC564558_1
ggccgggtcaccaacgtcccgatctcgaatccgcagcgtgcttactataccatggcggcaccaagcgatggaagctcagacgtgccggctgcagcctcccaccatggcgccgttcgcgccactacctcatcagtacaacaacacctgcaagcacctaaacacgacgacgatggccgccacttccggcaacaacaacagcaacggcagcaccgctaccgcggctggcggtgcggcggccgacggcatggccgcctacctccagcacctgcagcaggcgggcgccgaggcggcggccaagagcggcggcggcggcggcgcggcgcgcggggagcagtgcccgcggtgcgcgtcgcgcgacaccaagttctgctactacaacaactacaacacgtcccagccgcgccacttctgccgcgcctgccgacgctactggacgctgggcgggtcccttccgcaacgtccccgtcggcgggtccacgcgcaagcgcccgcgcctggcgcaccaccaccagcacgccaggctcgctcctccggcgccgcacgtcttcggcctcacgccgatgatgcctcctcccttgcaaccgtcgtcgtcgacatcgtcgtcgcagggacagggacagggacagggacagagcggcggcctcctcggctcactgttcgcgctcggcgccgcgcgccgggggg

SEQ ID NO: 962 - DNA, 762 bp, Zea mays
  Clone ID: TF_ZmC241107_1
gggggtccgcttttttttttttttttttgacacaaacttaattttattgtcacgataaatcactgcacagatcttacattctggctctagctacagatcaagatgcactgatctaactagcagccccaccatttcattcgcagtaaggacgagaagaaacagtggaggcgacataggagaattgtgagagctctgcatgctaggaactgaactgaactgaacctgacgaggccgcactgctaaaaccggagcccctcaagacgcgcgacggcggctggcactcagttccccggcagtgtccagctgaggtcgaggccaccgatgtcgccccacgtgcccgccgttgctccgtcgtcccacggcgcgagcccgtcgtacaagtccgggaccagcaccgactgccacgaggaggagaaggccgggggtgcaagcgcaacgccgccgacgaggtcgagctgcgggaagaagctgccgtcgctgaggaacgggaaggcggacggcaggcacgcgtccgcgaccgacggcggcggggatgagggctcggcggagaccctgcgccgcttgccgccgctgccagtggcggcgcggccggacgcgccgcggacggggacgtcgcgcagcgtgcccccgtgcgttcagtagcggcggcacgcgcggcagaagtggcgcggctgcgccgtgctgtagttgttgtagtagcagaacttggtgttggtggagcggcagcgcgggcactcaagctgctgctgctgccgcggttgc

SEQ ID NO: 963 - DNA, 1037 bp, Zea mays
  Clone ID: TF_1061305
ccaagggctaccccgtgccggttgccaaggaggagaggccggcgccgggcggcgacccgtgcccgcggtgcgggtcgcgggacaccaagttctgctactacaacaactacaacacgtcgcagccgcgccacttgtgcaagtcgtgccgccgctactggaccaagggcgggtccctccgcaacgtccccgtcgggggcggcacccgcaagagcagcagcagctcctcatcatcctcggcggcgacgacgacgacgacgacgacgtcaacctcgcccggcgccgcgcccaaggccacgaaacggtcgaagaactctaagcgccgccgcgtcgcgcctgccccggaccccgccgcgcccggcacggacgcctccaccgccgacgtcgcgagcacggcaccgtccgcagcgacggtggctgcctcggagaagccgagcgcgacggagcacgcagcggcggctgtcgccactgagaagccgccggccgcgcctccggtgtccgtcggcgctttcgcggacacgtccccggcgccagatgctgggagcggcggcgttagggagctgctgccgcacccgagccgcttcgagtggccgtcgggctgcgacctggggccgccctactggggctggggcaccagcgtgctcgccgacaccgacccggcgctgttcctcaatctgccgtgagtgacccgtgacaacgccatggcgcccatggttaactagtcaaccatcatcacacggtcgacgagatgagaggaacagagcacgcagtgcgtcgggctcttgaagctaggtgctgtagtagtctcctaagcttactgttgtctagaccgacagtctcgcgtacttgtgtagttgtgttgatggtttttaatcgccgctttgtactgcaattctagtaaaaaggctagcatgggatagccgggctctgcacggatctgtgcttgctttgacagtttgatctgattggggtgctttcttattttaaggccatgagaatcgcaagaacagggagcggcgaacttcgaagaaaaaaaaaaa

SEQ ID NO: 964 - DNA, 1194 bp, Zea mays
  Clone ID: TF_ZmC13570_1
aagctcgaggtcgcggctgggctgaaactgaaacagcccgtcatctaccattcgcccgccgcaacgctccctgctcggaacagcctgcgttgctcgcccacacgacgccacgcatgcaggaggagccagggcgtcgtcccgtgccgccgttcgcgggcgtggacctccgccgccccaagggctaccccgtggcggttgccaaggaggaggagaggccggcgccgggcggcgacccgtgcccgcggtgcgggtcgcgggacaccaagttctgctactacaacaactacaacacgtcgcagccgcgccacttgtgcaagtcgtgccgccgctactggaccaagggcgggtccctccgcaacgtccccgtcgggggcggcacgcgcaagagcagcagcagcagcagctcctcatcatcctcggcgacgacgacgtcaacctcgcccggcgccgcgcccaaggccacgaagcggtcgaagaactccaagcgccgccgcgtcgcgcctgccccggaccccgccgcgcccggcacggacgcctccaccgccgacgtcgcgagcacggcaccgtccgcagcgacggtgactgcctcggagaagccgagcgcgacggagcacgcagcggcggctgtcgccacggagaagccgccggccgcgcttccggtgtccgtcggcgctttcgcggacacgtccccggcgccagatgctgggagcggcggcgttagggagctgctgccgcacccgagccgcttcgagtggccgtcgggctgcgacctggggccgccctactggggctggggcaccagcgtgttcgccgacaccgacccggcgctgttcctcaatctgccgtgagtgacccgtgacaacgccatggcgcccatggttaactaatcaaccatgatcacacggtcgacgagatgagaggaacagagcacgcagtgcgtcgggctcttgaagctaggcgctgtagtagtctcctaagcttactgttgtctagaccgatagtctcgcgtacttgtgtagttgtgttgatggtttttaatcgccgctttgtactgcaattctagtaaaaaggctaacatatgggatagccgggctctgcatgaatctgtgcttgctttgacagtttgacctgattgtggtgctttcttagtttaaggccatgagaatcgcaagaacagggaacggcgaacttcga

SEQ ID NO: 965 - DNA, 1330 bp, Zea mays
  Clone ID: TF_ZmC1074_1
aaccgcccccctcctttcaactcgctcgctcgctcgccttccatctttctccctctgtcggcagtctgcagcagcccagcgccgtcgcgcatgcaggaggcgtcatcggcggcggcggcgggggccgagcccggccgtcgggcggcgcagcatcagttcgccggcgtggacctccggcggcccaaggggtacgcggcgccggcgccggcgccggcggtgggcgagggggacccgtgcccgcggtgtgcgtcgcgggacaccaagttctgctactacaacaactacaacacctcccagccgcgccacttctgcaagggctgccgccgctactggaccaagggtggcacgctgcgcaacgtccccgtcggcggcggcacccgcaagaagccctcctcctcctcctcgtcgtcgtcctacgtggccgccgcggacgccgacaggcagcccaagaagaagcccgccagcaagaagcgccgcgtcgtggcgccggccccggagctcgccaccgcggccgacccaggcaagacggcgaccaccaccacgacgacgagcgagatcaccacggagactggcgcgctggaggactccgactccctggcgcacctgctgctgcagcccgggacagaggacgcggaggccgtcgcgctcggcctcggcctctccgacttcccctccgccgggaaggcggtgctggacgacgaggactcgttcgtgtggcccgccgcgtcgttcgacatgggcgcgtgctgggccggcgcagggttcgccgacccggaccccgcctgcatcttcctcaacctcccgtgacagccacacacggtcacggcgccgaggcgtacgtcctcctgctctgctctgctctgcgcctgatgatgagtgcaaggaaatggagcgctttgattcttcagctatttgatgcatctgctaattgatttggcagtggtggtaaggtacacgcacgatgagctgactgcgtggttcttggtttgggccttagtatatgatgacgatgacgatgatactagttgtatgtgtgacgtgagagacgatcgcgacgacgaccttgaattttagtttctgagatgaaaaaggtcaactagtggcctctgtatgactttagttttactcatgaactcatcagatggctggctatggctgtggctgtggctgtggctaactcatcgtcaagtgtttctaccggctgcctataaactagactgagctttggtctggtattcttccttgttcttatgataagttctgttgtgctgtcatgcttgttttcttcttttctgtaaagattatgggggatttcctcggctctcaatct

SEQ ID NO: 966 - DNA, 581 bp, Zea mays
  unsure (1)..(581): unsure at all n locations
  Clone ID: TF_LIB4744-032-R1-K1-G1
gtaccctccggnctggccggggatctccactgacaaacgaagctctcctcgccgcactcgcgcctgctcgatcgctccaacaagaccctctcgcgccaccgcagcagcgtcgtcgtcgctacgcggatgctgtcttctcaccgcgagagcctgctgccctacgcgccggggcggcgggcggcggtgctgctcgaccaccggcggtaccgcccgaacgtcgaggtggcgcccagctgcccgcgctgcgactcgcccaacaccaagttctgctactacaacaactacagcctcagccagccccgctacttctgcaagggctgccgccgctactggaccaagggcggctccctccgcaacgtgcccgtcggcggcgggtgccggaagaaccgcagcaggggcaagccggtccgagccgtggccgtcgattccgtggcgcccagcagcggtggcgcggcggcgttcacgcaccgggcgtcggcgtcgtcgtcgtcggcgtcccccgccacgctgcggccggacatgctactgggaggcatgctcggcagcccaagcgagctgtgccagctgacggtgacggacga

SEQ ID NO: 967 - DNA, 852 bp, Zea mays
  Clone ID: TF_ZmC25364_3
cattgggtccctcgaggccggccggggatcaccctatattccactgacaaacgaagctctcctcgtcgcactcgcgcctgctcgagagctccgatccaacaagaccctctcgcaagtcgcaccaccgcagctagcaccgtcgtcgctacgcggatgctgtcttctcaccgcgagagcctgctgccctacgcgccggggcggcgggccgcggtgctgctcgaccaccggcggtaccgcccgaacgtcgaggtggcgcccagctgcccgcgctgcgactcgcccaacaccaagttctgctactacaacaactacagcctcagccagccccgctacttctgcaagggctgccgccgctactggaccaagggtgggtccctccgcaacgtgcccgtcggcggcgggtgccggaagaaccgcagcaggggcaagccggtccgagccgtggccgtcgattccgtggcgcccagcagcggtggcgcggcggcgttcacgcaccgggcgtcgtcgtcgtcgtcgtcgtcgtcgccccgccacgctgcggccggacatgctactggaaggcatgctcggcagcccaggcgggctgtgccagctgacggtgacggacgacgacgcagcggaaaacccggctgtggcgcccgatggacccaggatcgacctggcgttgctgtacgccaagttcttgaaccaacagccgccggcgcccgagcggcgcgccgtcctgccggaatcgctcgtcgtcgacaccttgagcgggtcgtcgtcgagcgacgtgggtcccgtcgtcccatcgcgggatcatcagccgttcacgacgcaagacgacgggctgggcgagctgtccgcggcgcg

SEQ ID NO: 968 - DNA, 1526 bp, Zea mays
  Clone ID: TF_ZmC14032_1
ggcggcctccgcgcccccccctccccggcgttcccgggcctccggtgctgcttcgtcctgtgcgttgttaaactgacttggtcctgataatcctccgcgttctaatgatgtgctgtcgctgcaccatgcgcgtgttgtcgtcagagcctagggctggtgaagcccctggaggagatgctgatggcggccagcgcgggggctgcaaatccgagccaaggctcgaatccgaacccgccgccgctggcggcgcccctgacggacgcgggtagcaccgagcggcgcgcgcggccgcagaaggagaaggcgctcaactgcccgcggtgcaactccaccaacaccaaattctgctactacaacaactacagcctccagcagccacgctacttctgcaagacgtgccgccgctactggacggagggcggatccctccgcagcgtccccgtgggcggtggctcccgcaagaacaagcgctcctcgtcctcgtcctcgtcctcgtcctcgtcggcggcggcggcgtccgcctccacctcctcctcggccacgagctcgtccatggccagcacaccgggggcggcgtccaagagtccggagctggcgcacgagggcgcgcacgacgacctcaacctagcgttcccgcaccacggtggcctgcacgccgccgagttcgcggcgttcccgagcctggagagcagcaacgacatgtgcgaccagggtggcgggatgacgagcaatggccggggcggcggcgcggggcccgcggtcggcgcgctctcggcaacggagctgttgcggagctccggctgctacatgccgctgcagatgccaggaggagattacacggcggcagggttcgcgctcggggagttccgcacgccgctgctgccgccaccatcgtcacagagcccgctcgggttctctctggacgcgcacgggccggggtcgtccggtgctgccgcagcggcggggtacggttccagcgcggggctgccgcagggcgtgccgggcaacgcgggcaggttgttgttccctttcgaggacttgaagccgccggttagccctggaggtggtggtgtgggcggaggtggtgcaagtgcaaccggtggcgccggcgacggaaatagcagccacgatcagtttgaccacaacaaggagcgaggcggaggcggcggccgcggtgccggtgccgggcacgacacgccggggttctggagcagcatgatcggcggcagtggcgcttcttggtaatggagaatgacgcacacgggggcggcgccatgcatggtttcatgcatgcaaagtgttggtgacttgttctcaaatgctatgagttaagaacaaggcaacatagaaaagtgttaatcgttaaggtccttcgtcctccaaagcattatttcccttaggatataatggtttacggacgaaggttatgaaggacgtaccttcataaatttattaaacaatgacgaaggatggaatataaaggatataaaagacaacattaacaattatatattattattaagtat

SEQ ID NO: 969 - DNA, 1414 bp, Zea mays
  unsure (1)..(1414): unsure at all n locations
  Clone ID: TF_21216063
gcacgaggcagcatcggctcccatcaacaaccagcaggaggctgtggtgtcatccccaaccagaaaggagcaagccaggaaccccaagnnnnnnnnnnnnnnnnnnnnnnnnnnnnnnnnnnnnnnnnnnnnnaggccgcggcctccgccggacgcggcgcacagctgcccgcgctgctcctccaccaacacaaagttctgctactacaacaactacaacctgacgcagccgcgctacttctgcaagacgtgccgccgctactggacacacggcggcaccctccgcaacgnnnnnnnnnnnnnnnnnnnnnnnaggaacaagcgcgcctccagctcctcgtccccgtttccgggcccctccnnnnnnnnnnnnnnnnnnnnnnnnnnggagaagaccgtcagcacgcggctgatgctgatggcgaccagcaccatggcgatgccctccccgacggcaggcctgtttgttcccgatgacatgtccccggcattnnnnnnnnnnnnnnnnnnnnnnnnnnnnnnngacctcgccggcatggacgagcagcaccagcagggcttcctgcccttctcgccgctgtccctgtccgaccaggcgccggagctggctcctggaggannnnntgacacgacgccgtctttcctggacatgctgacaggagggtatctcgatggcggcggctacggcggcatgagcggtggcagcgatgcgatggacatgccgttctcgctgcctgagatggggnccccgacaactgatccaatgccgtttcagctccagtggacgtcatcagagcttnnnnnnnnnnnnnnnnnnnnnngtggttatgcagcaggaccagccgccggagtgcagcagcagcagattaatggtggtgatcaccagaagcagnnnnnnnnnnnnnnnnnngacgagaacaaagaggcggggaacggcaaaggcaacgacgannnngnnnnnnnnnnnnnnnnnntgtacagcttctggatgaacaccagcagcagcgacggggcacaggggtagtgcgccactgccagtgccagccacaggaggaggcgaaagtgctgctgcaaactccctcgcatcatctggtcggtgcaagtgcagcagacatccttcgtcgacgcaatcaaatcatcaaaaggtggcaannnnnnnnnnnnnnnnnnnnnnnnncaccatccagcgtagaggatagggtgcatgttcatgtttgatttatctgcattgtggtcggtcgtggttgcaagtcatcttgcaccaccctttgttttggttcagtttgcatgcgttcgttcgtcagagttttacttgcagcagtctttggatcgccggcagagattagttaggtatctatgctttgttttcgtcagttcgttctggataatgtcttaataattcctcagtttattt

SEQ ID NO: 970 - DNA, 311 bp, Zea mays
  Clone ID: TF_14645985
cagtgtctcctcgacggcggtgctggcagcgaccaccaccacctgatgcctccgccgtcctgcctggcgccgctgcgcggaggtcctgctgacacggcggcgagcgctccagcgggaggcggctcgtccacctcggtgccgacgacggcgggagcaggggcaggggcgggggcgacgtcagcctcgccccgtcgtgtcgatggcggagcgcgccaggctcgtgcgcgtgccgctcccggagcccggcacgctccgctgcccgcgctgcgactccgccaacaccaagttctgctactttaacaactactcgc

SEQ ID NO: 971 - DNA, 1562 bp, Zea mays
  Clone ID: TF_ZmC2150_2
cctcgagccggcggggccagtctactagatcccatccacctgattggaataaccagcagcagcaaggtcagcagccgagggcgagtgggggagccgatgcaccgctgttgcccatgggtccgatggctgccacagcggcggcttcggagcccggcggcttgccgagaagctcgtcaacgtccagtgccgccttggccatgcacgcaaggcccaactcgatggcggagcgcgcgcggctggcacgaataccgaatccagagccggcgctcaagtgccctcgttgtgactccaccaacaccaagttctgctactacaacaactactccctctcccagccccgccacttctgcaatatgtgccgtcgctactggacgcgtggtggatctctccgcaacgtccccgtaggcggaggctgccgtcgcaacaagcgttcgtccaagtcctcatcctcctctgctgggtcttcctcctcaaagatgtctccctcaggaaggctactgggtggtccatcagctacaccgtccaccaccccaggcactaccggtgcgatcattactccgggtctcagctctttctctcaccacttgccgttcttgggctccatgcacccgtcagggcccaacctaggtctagctttctccgccggactgccgctagtcggcatgcagcacctggacacggtggatcagtttccggtggcaagcggcggcggcaccaccataggtgcatctctagagcagtggagagtgcgacagcagcagcagcagttcccattcatgactgggggaatactggatctgtcgcagccgccgacgtaccaattcggtttggaagctaaccgaggaggcagcggctcagctgcggtggcgttcaattcaggacagaccacgacgaccagtgctaccacgggaaggcaggaagggtcatcaaagaagatccgggattgtaaaggagaagaggtgagcttacagaagcagtacatggtacctctacgccacggatcaggatcacacggtgtctgggatgggagtgctggtggaactggcagcaacggtggtggtactggcaatggcggttcaagttggccaatgaacatgattcctggattccattcttcgtccactagcggttgcaatgacagtggcttgtcgtagtactctctagctaggggctggggcaatgtcctatcaagaaaaatattttggagatgcatggttgagtctgagcaaatgctagctatagctaggacgatggaggaacaggcgatgaccaatccacaggcatgttcatcatctgctattcttcatcggaattgtagaagcacactgctacctcatgatggtcacaggtaggagtttaaagtaaagctgctctttgtttaaacctttttctgtcatttggttttgaacttaaaggtgttctctgcattgtgtccatagcggtcgccacttttctacttttcacactattgttcacagggattaattaatcaaatttggtgcctggtatactatgtgataaggtatatttgacatggacgaaactgattaagttgtttcatc

SEQ ID NO: 972 - DNA, 2118 bp, Zea mays
  Clone ID: TF_ZmC24704_1
ggccggccgggcccttctcctgcagccatcagaaaagggggcaaaaaggcccccgaattctcctcgcccgggcacaacctcgctccagagtccaggccagaccagcaggccgcctttccgctcgagcacccacgcaatcatcaccgccgtcttcctctcgctcttctcttccccttccattcctcggcaccacgtcctcgggaacgccgcatgccctccgcacaaggcgccgcctgttcccggtgaccgcggggccgagatcggcgcgccatggccgcgcccggaggcctggaccaggactgtgcacaggacgccgccattaagctcttcggccgcagcatcccggttctccactcctccgtcttcgccgccaccgccgcggccgaatccgaggttagcaccaaattagcaaatgatgttagaagcaaagatggcatgccatgccttccaaacatgtctttgattgtcaaaacaaatcccttcccttccaagagcaatatgaagaatggtttacaggcaatcagcagtcagcatgggaaaatggaagctgattccaactctgaggaagctaagaatagtttacaagctatcatcagtcagcctgggaaaagatacgattccaagtctgaggaagctaagactgaatctggtggatctggccaagagaaggtactcaagaagccagataagattctgccttgccctcgctgcaatagtatggaaacaaagttctgctacttcaacaattacaacgtgaaccagcccaggcatttctgccgaaactgcaagaggtactggactgccggggggactatgagaaatgtccctgtaggttctggtagacgcagaaataaggatccatctcatcaccatcatttcaccaaggtgtgtgattataccatagctactaatggagatgtttctgatgcaactcagcgccagtccgttgcagccaagctatgtctccttcaaggttcagggaaacaaaatgaaacagcgtgcaagtctgtatctccagtcagtaatattaaagagcagaacaatgctgaccttatttccttggtctctggtgataataaggaagagaaatcatgtgcatcctctgcagtggtatctggttcctccgaaaattggatgccagaaaatacagttaaaaaggaggaggataatacttcagcgtatggtaatggtgtgaaattacctgatcacaaaatgcagtctcaccatgctggacccgtttcggtgttctccagaaatcctgctgcagtcatggcgactaatcagtgctcagaagatggtattcatacgccgggaaatggtacggtcagtcctctttcactgccaccactacccatggtaccaaccccaggaatttgtgcacctgctgttccattccctttccctctcgtgccagccttcgtgagctgcattcctggctggccaagtggactatggggtgcaccatggcctggaagtagtgcccctacattactatctcttcctccaaacggtttagctggaagcaactctggggtgttaggaaagcatacaagggtagctaatttgcaggaagaacagaaggcagaaaagaagttttgggtccctaaagctctccgaattgacaacccagaagaggcagcaaagagttcgatctgggcctctcttggtatcaagcctgatgacagaatcatattcaagtctttccagtccaaggatctgaaaaatagtgcgactaagatgccagaatccctgcaggccaatccagcagcgttttcccgctctcagacatttcaggagagggcctgatacaaaaataaagtgtcctcaaaacaaaggataccagaggatggtcaatgttcctatttaagctttttcttgagttgatctgtcgctaagcgcagcagtttggcaatcaactcaggcctggccaagatttacattttttttctttctagcgatagctaggttggtgtgaagattctgactgctcaaggagcgcttatgtaaatacagtaggcctgtgaattgatgttgaatgttgatagtcttttaccctggcaccggttaatgttttaaaaaaaaaaaaaaaaaaaaaaaaaaaaaaaaaaaaaaaaacaa

SEQ ID NO: 973 - DNA, 1032 bp, Zea mays
  Clone ID: TF_ZM4161.C1.o10.fg
atggtcttttcttctgttcctgtctaccttgatccatccaattggagccagcaccaccaggcacaggagcagcaacaacacgctcaacatggtcagcttccaagcgacggcggcatggacgcgcatgcacatcatcatcatgatcagccgccgccggtgcgaccacctcatggcggggctctcatggcacctcgccctgacatggcagttgtggtctcggcgagcggcaatgggccaactggcggtggctctgctatccgggcaggctccatgtctgagcgggccaggctcgccaagatcccgcagtcggagccggggctcaagtgcccgcgatgcgagtccaccaacaccaagttctgctacttcaacaactactcgctctcccagccaccaagtcgtctaagtccaactcccttgatgcagcaccccctcgtcggcggggatcactacaacatcagcgcgtcaaggttagggttcctaggactaagctcactagaccccatggattaccaccagttcggcacgggcgccggcgccagcagcgctacaattgggctagagcagtggcgcttgccacagatacaacggttccccttcctaagcggccaacctgacgtcgtgcaaccgacaatgtctggtatttacccattcgacatggaaggacagagtggggacactcccgtcttacctggcgggcacatgctgggtggctcgaagatgcccggctcagccggcctgatcacgcagctcgcatcggttaagatggaggacaacccagcgtccgtggcgatggcgagcagctcatctagggatttccttagtgtcactgggaacctccaattctgggtcgacgacagcgacaacgacggtgcaagtggcaacaatgaaggaggcgttggcaacgccggaggtggcagtggcggtggcgcggtcgctccaggcaccagctgggtggacctgtcaggatcaactcgtcttcatccgggaaattgctgtgacgaacccttcggtctgcatgctagctgcagttga

SEQ ID NO: 974 - DNA, 669 bp, Zea mays
  Clone ID: TF_LIB4744-008-R1-K1-G4
cggggttctgctactacacaactactcgctgtcgcagccgcgccacttctgcaaggcgtgcaagcgctactggacgcgcgggggcacgctccgcaacgtccccgtcggcgggggctgccgcaagaacaagcgctcctccaggagcggcggcggcgggaggaatgggtcctcctcctccttctcctcctcctcggcggactcgacggcgctgcccctcccgccgcctccgacgacgatggggtccctgccgtcgtcgctggggctgcccgggggcgcgtcgctcctcctcgggtccgcgctccctggcggtgccggtgaccaccaccacctcggccttttccaggcggccatgcagtcggtggtctcctccgacgcgaccgcctacgacgagatgcagcagcaacagcagacgcagctggaccacctgctgggcctcggatacggaggaggcgccggcgcgcagatccagctcaagccgtggatgcaggaggccgccggggcaagcggcgcgcccgggatcatggacagcttctacgcgccgctgctgtccagctccctcgtgccggggctggaggagctgcacgtcaaggcggaggccgccggagccggggatcaccagcagaagccgtcatcaagggaacagcagagcgccagctgggactgggagct

SEQ ID NO: 975 - DNA, 654 bp, Zea mays
  Clone ID: TF_ZM4642.C3.o6.fg
atgggcctcgctgccggcgggttcaagctcttcggcaaggtcatcacgcagtgcgccgagagcgctccgccggcctccttggtcgcgcgggagagggacgatccggacgagcgcgaccagccggtggtgaagcgggaggcagcggcggcgtcggacagcgactcggccgtcgtactcgtagacaagcagcggcgctccggcgggccggccgagagcgaggacagcaaggggcagcatcacccgcgcccgcggcagccgcagcagcaggacaccgcggaggcccgcgccgcggcgtcggcgccgccgctgccgtgcccgcggtgccggagccgcaacaccaagttctgctacttcaacaactacaacgtcaaccagccgcgccacttctgcaaggactgccaccgctactggaccgcgggcggcgcgctccgcaacgtccccgtcggcgccggccgccgcaagaaccggcccctcggcgccgcacccatccccttggccgtgtccgtgccggcccagcacctgcagcacccgcagcaccccgctgcggcggcgggccacggcctcggcctccccggccagcacccttcctgcccgacgtcgccgtccccggcctacgccgggcggtggccggtctgcccggaccgccggttctga

SEQ ID NO: 976 - DNA, 533 bp, Zea mays
  Clone ID: TF_LIB4730-013-R1-K1-B6
accccgtcatctcctactgtctatgccatacgccggccgccgcgacgctccctaggctccgagtcactccgagctgggaaggaagagcccgcgttgctcactcgctcgctcgcatgcagctttcccacacggcgccacgcatgcaggagcccgggcgccggcccgtaccgccgttcgcgggcgtcgacctccgccgccccaggggctaccccgctccggcggcgaaggaggcggaggaggagccggccccagctccggcgccgggcggcgacccgtgcccgcggtgcgggtcgcgggacaccaagttctgctactacaacaactacaacacgtcgcagccgcgccacttctgcaagtcgtgccgccgctactggaccaagggcgggtccctccgtaacgtccccgtcgggggcggcacccgcaagagcggctcctcgtcctcggcaacggcaacgccaacctcgaccggcgccgcacccaagagcccgaggtcgtccaagaactccaagcgtcgccgcgtcggccccgccccg

SEQ ID NO: 977 - DNA, 981 bp, Zea mays
  Clone ID: TF_ZM4824.C3.o2.fg
atggcccccggcgggttcaagctgttcggcaaggtcatcacgcagtgcgccgagagcgccccgccggcgccgccggaggctgctgccgcggcgtcgagggccacggccttcgcgcgggagagggacgacccggacgagcgcgaccagccgatggtgaagcgggaggcggcggcgtccgaccacgacttcgccgccgtggacaagcaccaccagcactccggcggcagcggcgggccgggaccgggaccggacgagagcgacgacagcaaagggcagcagcagcagcagcaccacccgcgcccgcggcatcatcagcatcaccatcagcagcagcaggacaccgtggaggcgcgcgccgcggcggccgcgtcctcggcgccgccgctgccgtgcccgcggtgccggagccggaacaccaagttctgctacttcaacaactacaacgtcaaccagccgcgccacttctgcaaggactgccaccgctactggacggcgggcggcgcgctgcgcaacgtccccgtgggcgccggccgacgcaagaaccggccgctcggccccgtcgtcgccggagccgtgcccgtgcccgtgcccgtgccggcgcaccaccaccaccaccacctgcaccccgctgctgctgctgctgcggcggcggcgggcttcgtcctcgggttccccggccagcagcacccttcgtcgccgacgtcgccgtcgccgtcgccggtctacgccgaccggtggcctaccagggacaggtcaaaaactcgaggtcagcgtgcgtgctcaactagtgccgacgaaggtgatgcgatcccatgctgtccagtccagtccttagctcgcatcccgggagtcgttggtgatcatcgcacgaccaaccccgcgttgtacattccttcctgggaaaaggtgacgacggacggagtgctgatgctctgcctctgcgcgcagatggagctcacggcattggcttcgcagcgctag

SEQ ID NO: 978 - DNA, 1936 bp, Zea mays
  Clone ID: TF_ZmC3845_1
tgcggcttcgctagctgattcccgtcaccatcaagcctcatctccccggcctcccactatctccgcgtcggggtcccatccacagtccggcgcgcccagcaccatccatccgtccgcaagggggaaagcacgctagctgagctgagctgctgagagagagagagaggcaaaccctatcacgcacaagcacagcaacgtatacgcttccccccgccgattcatccatccatcgcagcgcgcaccgggcgggcggtccgggacgacgacagctaagctagcacatcgcaatagcatagcatctatctccgtcgcagtacccaccaccaccaccaccatgatcttcccccctgccttcctgcaggatactctctacctagggcttgcttgctatcctgatccaacgtcacactgatactatatactcatcgactgctgctagtatatactagctgcgcagtttgaacgacgaattgaaatcttcagctttttatttattattgattgactcgatccaccagcagcagcagcaccaccaccagcagcaaggccacggccacctgcagattgccgtcagcggcagcggcgacgccaatcatgagctcctccagcaaccaatcatggggggagcgcttcccgatggaggaggaggaggtggtggcggggggcaggttgggggccccgccaagcccatgtccatggcggagcgcgcgcgcctcgcgaggatcccgctgccggagccggggctcaagtgcccgcgctgcgactcaaccaacaccaagttctgctacttcaacaactactccctcacccagccgcgccacttctgccgggcctgccgccgctactggacgcgcggcggcgcgctccgcaacgtgccggtcggtggcggataccgccgccacgccaagcgcgccaagcccaagcagcagcagcagcacgcggccgccgggaccggagctgccaacggcgcgatgcagcagcctcccgctgggtctatggcgtcgtcggccgccgcctgcaccgcgaccacgacgatgacgaccaacgcgctggatgccgggcccggcggcggcatgctgcccatgctgccgccgctgctgcgcctagccgacttcgacgcaatgagcctcggctccagcttctccgggatatcgtccatggggaagcccggctccatcggcgcggcctgctacccgcactcggtcggcgggctggagcagtggagggtgcagcaaatgcagagcttcccgttcttgcatgcgatggaccagggcccgctggggccacctctggccatggcgatggcggcgccaggagggatgttccagctaggtctagacaccaccagtgataacagccgtggcggtggcggcggcggcggagaagacgggtcgtctgccggagaggcgctccatatgatgcaagcagccaccaagagggagagctacccggcaccaccaagagccatgtacggcgaccaacaccacaatcacctcgctgctgctggtggctacacttcctattccaccaatgctgctgcaggtaaccatctcttgtaatggccggccgatcgatcgatcgagagctcaacaattcaagtgtcctgctatagctagctactacgacgtcgtgctacgatcgtatcggtttgcgttcctacaaatatagcctagagatagagtgtctctgtctgtgtgatcgatggtattgttatgatcatatagaaaagaccagtagcatgcatgcacttgttgcaatgtttgctttcaagaagaaactctggagggaggagaggctcggtttggatgctgatcatgcgcaaatattactagtgtctacagctgctacttcattataaaaaaaaaaaaaaaaaaagctgctagcatggtcacttgttttaaaaaaaaaaaaaaagggcggccgccaccgcggtgga

SEQ ID NO: 979 - DNA, 1135 bp, Zea mays
  unsure (1)..(1135): unsure at all n locations
  Clone ID: TF_ZmC8312_1
cgagtatcgtcacctcctctctgtgtgcgtgccgtctcttctccattggctttgagctggggggactccggggcctttaattcccccttgtctcctccttttaatccttgaaaggagcacacggccgcctttatcttcctttgtgttcctgcctttctttctatcttatcccccctttccaagctctcatctcctttatccctccttttctttctcgtatggagaggagctttaccctccctctcccacaccttgcatcaaaagagcagccatgtcttgggtgatggagtgagtagaagtgctacgccacagatgcaaccctacaagagcacaagcaaagttgagtttatgtggtgcgctgcgatgtttctctctcatcttttccttgttttttttcacctttttatttgccttttcccattctctttaatctcgcctttgtatccatgtgcttggttctttgttgcactgcactgcagttgttgcaccataagaatccaaagtcctccacgctcataccccctctgatatgtgcttgctatatccatctcttcaatctcccatacatactacatgttcttgcttcgtagtagttgtcagttaccttaacaatcatcattcaggtttgcagtggtatcatctaacgatgagcaatatgtgtccatcaccaggggctagggctagggaagcccatggaggagatgctcatggctggaaacgcaaatctaaaccagaatccaaacccaccgccggctgcgccctcggctcccggcgcccagagggcaggcgctcccgccgcggttgcggcagcgccgcctagcgctggcgcgaccggaggagcggggccggagcggcgggcgcggccgcagaaggagaaggcgctcaactgcccgcggtgcaactccaccaataccaagttctgctattacaacaactatagcctccagcagccgcgctacttctgcaagacgtgccgtcgctactggaccgagggcggctcgctccgcaacgttccggtgggcggcggctccaggaagaacaagcgctcgtcctcggccgtgtnncgtcggcggttgcggncgccgccgcctccacctccgcggctatgtctggcacggtccccgtggggctcgcg

SEQ ID NO: 980 - DNA, 1638 bp, Zea mays
  Clone ID: TF_ZmC22467_1
taccctcgaggcctgccgggctctttctcttcctccttccccaagtcggcgcggtagcttcccgtgtaccgtacacagcaggatcctccgccttccttgtgttccgcgcttccacaacagtttaccgcaaggaaggaaccatggacatgaactccaacgccaacaacagcactgccgcagcagcatcggctcccatcaacaaccagcaggaggctgtggtgtcatccccaaccagaaaggagcaagccaggaaccccaagaaggcgcgggcggcgccgcagcaggcgggcggcagcggggagcctaggccgcggcctccgccggacgcggcgcacagctgcccgcgctgctcctccaccaacacaaagttctgctactacaacaactacaacctgacgcagccgcgctacttctgcaagacgtgccgccgctactggacacacggcggcaccctccgcaacgtccccgtctgcggcggctgccgcaggaacaagcgcgcctccagctcctcctccccgtttccgggcccctccagcaccgccgccaccagcgccgcgatggagaagaccgtcagcacgcggctgatgctgatggcgaccagcaccatggcgatgccctccccgacggcaggcctgtttgttcccgatgacatgtccccggcattcacgccgacgacgggcggtagcggcttcgacgacctcgccggcatggacgagcagcaccagcagggcttcctgcccttctcgccgctgtccctgtccgaccaggcgccggagctggctcctggaggaggaggtgacacgacgccgtctttcctggacatgctgacaggagggtatctcgatggcggcggctacggcggcatgagcggtggcagcgatgcgatggacatgccgttctcgctgcctgagatggggcccccgacaactgatccaatgccgtttcagctccagtggacgtcatcagagcttgacaactacatcaacgacgacggtggttatgcagcaggaccagccgccggagtgcagcagcagcagcagcagcagcagcagcagattaatggtggtgatcaccagaagcaggacgagaacaaagaggcggggaacggcaaaggcaacgacgacggcggcggcgggtcgtcgtcggtgtacagcttctggatgaacaccagcggcagcgacggggcagaggggtagtgcgccactgccagtgccagccacaggaggaggcgaaagtgctgctgcaaactccctcgcatcatctggtcggtgcaagtgcagcagacatccttcgtcgacgcaatcaaatcatcaaaaggtggcaacagggagtgaaagggggaagaagttcaccatccagcgtagaggatagggtgcatgttcatgtttgatttatctgcattgtggtcggtcgtggttgcaagtcatcttgcaccaccctttgttttggttcagtttgcatgcgttcgttcgtcagagtttacttgcagcagtctttggatcgccggcagagattagttaggtatctatgctttgttttcgtcagttcgtcgttctagataatgtcttaataattcctcagtttctttctttgttaactagtcgtcgtctaaaccttttcgtgtgtagtatttagttt

SEQ ID NO: 981 - DNA, 1822 bp, Zea mays
  Clone ID: TF_ZmC2150_1
gtgggatcctcgaggccggccggggccttcgacttggtgggatgtgattctccaccacctccgagcttgcaagaggactccacctctttcttctcgcatgcctccttctctttccaaacacaaagccgcagcaaagaaagtgcaaattataaaggaagatcagaattcaaagcagccgaaaagctgactagctagaagagtaaagagagagaagtatatctcagcaagacctccatggtcttcccttcaccttcagtgcaggtctacctagatccacatccacctaattggaataaccagcagcagcaaggtcagcagccgagggcgaatgggggagctgatgcaccgttgctgcccctgggtccggcggcagctacatcggcggctccggagcaaggtgggttgcctagaagctcatcaatggctaatgccgccgtggctgcgcacgcgaggcccaactcaatggcggagcgcgcgcggctggcgcggatgccgcatccggagccagcgctcaagtgcccgcgttgcgaatccaccaacaccaagttctgctactacaacaactactccctctcccagccccgccacttctgcaagacgtgccgccgctactggacgcgcggcggatcccttcgcaacgtccccgtaggtggaggctgccgtcgcaacaagcgttcgtccaagtcctcctccgccgggtcttcctcctccaaagatgtctccctcaggaaggctactgggtggtccatcagctacaccgtccaccaccccaggcactaccggtgcgatcattactccgggtctcagctctttctctcaccacttgccgttcttgggctccatgcacccgtcagggcccaacctaggtctagctttctccgccggactgccgctagtcggcatgcagcacctggacacggtggatcagtttccggtggcaagcggcggcggcaccaccatcggtgcatctctagagcagtggagagtgcgacagcagcagcagcagttcccattcatgactaggggaatactggatctgtcgcaaccatcgacgtaccaactgggcttggaagctagccgaggaggcagcggctcagatgcagtggcgttcactttagggcagtccacgaccagtgctgctaccataacggcaaggcaggaagggtcagcaatgaagatgggggacgatagcaaaggacaagacgcgagcttacagaagcagtacacggcacctctacgccacggatcaggatcacacggtgtctgggatgggagtgctggtggcactggcagcaacggtggtggtactggcaatggcggttcaagttggccaatgaacatgattcctggattccattcttcgtccactagcggttgcaatgacagtggcttgtcgtagtactccagctgggggttaggccagtgtcctatcaagaatatgaagatattggagatgcatggttgagtttgagcaaatgctagctatagctaggacgatggaggaacaagagatggtcaatcagccggcctattcatcaactgctgttcctcatcagaactgtaaaaaacactgctctagctcatgatggtcacaggtaggagtttaaagtagaccctttaaagtaaggttgctctttggttaaccctttttctgccatttggttttgaacttaaaggtgttctctgcattgtgtccatagcggtcgccacttttctacttttcacactattgttcacagggattaattaatcaaatttggtgcctggtatactatgtgataaggtatatttgacatggacgaaactgattagttgtttcatc

SEQ ID NO: 982 - DNA, 1231 bp, Zea mays
  unsure (1)..(1231): unsure at all n locations
  Clone ID: TF_ZmC25364_2
atgctgccgtacgcgccggggccgccgccatcgctgctgctagaccggcggtacaagcagggcggcgaggcggcgcccagctgcccgcgctgcgactcgcccaacaccaagttctgctactacaacaactacagcctcagccagccgcgctacttctgcaagggctgccgccgctactggaccaagggcggctccctgcgtaacgtgcccgtcggcggcgggtgccgcaagaaccgccggggcaagtcgtccttgcggtcggcggcggactccatcgcgagctgcggcggcggcggccgcgacgcggcgttcggccaccggttcccgggccctgtccgccccgacctggtcctggaaggcatggtgggtaatcacccgtcgaacccagctggccaggcggcgatgcccggcggcgtgcccgctgcggctgatggctccaccattgatctcgcaatgctgtacgccaagttcctcaaccacccgccggcggtggaaggcgtcggggccgtggcgccggagtcggcagggcaggtcgacgaggcgttcgacgcgtccagtgacctgatgagccctggtgctctggcgccggtgcagttcgatccgtgccagccccaggacgggttcggtgagtggtctggcgtgccagtcagcagcgctggcccctcgagtacggctagtactaccgccgcaaccaccatgctgtgcactgacgtgagcgtgcaagctgcattcggcgagctcaacttcgccatggaccagaactgcttcgactcgctagggttacccacggacgacgtcggcaacctctcgtcgtcgtggtgttcgatcgtgccaggcttgtcgacgttagaggacgccaagtatgacttggattcgttcccagatgacgccctcagccttcacgacgagggcatgattagcgggactgatcatgattggagcgtggattgccaaggattggagactctctacatgccgtaactatacacacgaccaaaattcttcttcttctcttcttgctaatttgttcttgttcttgtgatgattggtttcctacatatttttctctttcttttctttcgntaaattcggtttggaagaaatatatatagagatatatatatatctatggatctatgttttgaagagaggtacgtgagggacaagtcgcgcgctcatgtaattgaattaatgattcggtatacttgtgagatagatcgatgcaatacat

SEQ ID NO: 983 - DNA, 1897 bp, Zea mays
  Clone ID: TF_ZmC914_1
gggtacctcgaggccggccggggccggccgatcccgatcgatccatccatcgatcgcccacgcttccgtccatccagactccagagagataaaatctaattcctggacctggagtgcagaccgatcgccgccgccgccgcgttgtttcttgtgtgcgcagctgtggtgatggtgcggtaaaagaaggctgctccatcgctccaacaaaaaaaaaggtcgagatcgcacgcggcaggcgacaagcagtttccaaagagaagggaagcctagaggaagggagctagagatgggggagggcagagcaggagacggcctcatcaagctgttcgggaagaccatccccgtgccggagacggccgccgtcggcgaggctgccaaggacatccaacaaagcggcggcagcggcagcggcacgactgatccgaaagggcaagagaacaacgttcaggactccacaggctcgcctccgcagcaggaggtcgcggacaccgaagactcgtcggcagacaaacagcagggcgaggcgggcaacccaaaggagaagctcaagaagcccgacaagatcctgccgtgcccgcggtgcaacagcatggacaccaagttctgctactacaacaactacaacatcaaccagccgcgccacttctgcaagaactgccagaggtactggactgccggcggtgccatgcgcaacgtgcccgtgggcgcaggccggcgcaagagcaagagcgcgtcggccacttcccacttcctccagagggtcagggccggtctgcccgtcgacccgctcgtctgcgcggcagccaagactaacggcacggtgctcagcttcggctctgccatgtccagcttagacctcacggagcagatgaaacagctcaaggagaagctcgtcccgatagcgggggacgagcgctcagttgggtctcgcactcaaggaccttctgccaaggcagaagacccggaccggaaggagaatgttacagcagataaatccgcgagagttgttcagcatccatgcatgacgaacggggtggccatgtggccatttagctgcgcgccaccagtaccggcctctgcctgttacggcccaggcagcatcgcaatcccgttctacccggcagctgctgctgctgctgcctactggggttgcatggttccaggagcttggagtggcgcatggccgcctcactccggccagtccgagacgggctcatccattacctccgcctctccagcagcatccaccaagtccaacatctgcttcacgccaggaaagcaccctagagaccgcgacgaggaaggaggcgccaaaggaaatggcaaggtgtgggtgcccaagacgatccggatcgacgacgtggacgaggtggccaggagctctatcctgtcgctaatcgggatcggcggcgacaaggcaggcaaagatggcggcagaggctgcaagctcgcaagggtttttgagcagaacgaagaggcggcaaggacggcaactcctcactcggcagccatcagcggcttgccgttcttgcaggggaacccagctgcgctctcgcggtcactgaccttccaggaggggtcttgagcctctcgctcgattcacagctgagaattttgtacattagagggttgtatgtaatctaatctaggtggggggtggggctcatagctgccagcggacattgaaactatacaatagatagatatttgtagatagccaatatatatgggtcgggggaggaaaaaaaggataatgagagcaagtccccttatttgtatatattataatggattggaatatttggttgccaagtggtcttccagcaatagcgccagatgttctgatccaaaaaaaaaaaaccatcgatttcaatggacaagaggggggggccccggg

SEQ ID NO: 984 - DNA, 359 bp, Zea mays
  Clone ID: TF_LIB3245-209-P1-N1-A3
ccgcccccctactttcaactcgctcgctcgcgcggcttacatcagtcttcggcgggcggcagactgcagcaacccagcgccgaagagcatgcaggaggcgtcatcgacgacggcggcgggggccgagcccggccgtcgggcggcacatcatcagttcgccagcgtggacctacggaggcccaaggggtacccggcgccggcaccggcgccgacgacgggcgagggggacccgtgcccacagagtgcatcacgagacaccaagttctgctactacaacaactacaacacctcccagccgcgccacttctgcaagggctgacgccgctactggaccaagggtggcacgctgagcaacgtcc

SEQ ID NO: 985 - DNA, 638 bp, Zea mays
  Clone ID: TF_ZmC3039_27
ccgggcgaggcgatgaccatctccactccctctcctccctagtagtgtataaaaagccggcgccggccgtcgtcccctacccacccacccaccccgggcccctcctcccgctccatccatggccgccaacctcccggacgccgacgccgcggggttcaagctgttcggcaaggtcatccagccccccgacgcgcaaaaacgcggggcggacgagggcgacgacccgacgccacagacggcccttcctcctcctcctccccctcccccgcccccgcccccgcagcaggcgcccgcggctgggggtcccggcgccgagccgctgccgtgcccgcggtgcggcagccgggagaccaagttctgctacttcaacaactacaacgtgcggcagccgcgccacctctgccgcgcctgccgccgctactggacggccggcggcgcgctccgccgcgtggcctccgcgtccccgggccgccgcaggccgcgccccaccgcccgatcggcgcccgtcgctgccgccgcgtcgtccgcccccgcagccgccgaggaggtgggcgggccgcgttgactcggcggtcgtaggggggcgcggggtagggctccgccttccttcccgcgtgatgccggacggccggaagctt

SEQ ID NO: 986 - DNA, 2125 bp, Zea mays
  Clone ID: TF_ZmC3039_2
aaccaaaatactataattatatcaagagcaaggatattcacgcctcgaccaagatttgtagtaataatgaaacaattagcaatgagactgtttctggatcaaacaccccaatccaaacaaggaatatccatgtctttttgtcttgctgttccacggctacataacagaccgcagtgccatgcaatcccagcttccttcgtttatcttgcaccggcagtgtactgaggtagcgctaatctcggttctagagggaatgtaaataaattacaataactcaaaaaaaaatctgaatacgtggctgcaaagttcaaagacacaaggctttacagttccaccttggttcttgttggacacgtgcatgtaaaagaggaacacgattcagcagttgggagctcacaccttcatgccagcgttcgacaaccaccgcctatcaccgctgaggtttcacaaatggagggtttcggcatgctgctgactaagaaagcaggtatccagtggacgcaacgcgaagatgtgtcttagggcaggccagcagtgttggtgtgttgccaccgtatgcaggagacagcctgtgggcctggtcaggcagggtagcttcattggagagattaacaatgggtacacatcaccagagagggtcagaggtgatcactgatcagccagcggagacggcattggagttggaagttgggaacgcatgagagatggagagacgagagattcaaaacccggtctctgtcatcgtggacactcggatctccatccgacgtcccccgcgctgcctgaagctaaaccatatttcaggcacctgacatagagtgcctctcgaaaggaatagagtgcacgggaaacacaaaacacacacacagatagagactatgcattggctgtagaccaccccagaaataattgattgaatcatcaaatctaaatgaactataatctggaacatagggagtacccgcttcctaagcatccttccgactcaggtttgttgatgaatttcctttccaaatcacgattttcctttctagggacctacagatcacatggccatcagggtaatgttatgctttaaaggtgatggacagatgatattccaggaagaatcacaatagccacagatgtcaaactagtacagatgcacattgagaatgcaattgagaagccagtgtttaggaaaacagagaaaccaaacaaactttgccttgaaacgacattggggactataaatgtaacaaaaattactctactgatgttctgtcgattcagactacacgttgagaggtttgctaagattgtaaaaatgtttataatttcggtcattaaatttatattataacatggtaatagcttttggtgccatatatatttattttccttttctctttcttttctgtttattgtgctcatgtagaagttgcaactctaagctatgctaacttgcttaggactaaaaggctttgtttttttctcaaatggctgttcctaaggtattttttgttggtccaaatattagcatgtaaataaaacaggtatgttatccccaaatccaaagcatgaggaacttattgagtattgatttatctttaacaatgtattactagactttgttgtacatttctaaattatttttctaaacttatagcttgtttgtagctcggaaactgacagtacttcctgttttaccgatagctctggcaaagggaggcagcaagcttgaggcaacaactgcacaacttgcaagaaagccacaagtatgatcttgcaatggattctaagataatgtgagaaactcttttccaatgttgtaggcaactaatgggagaggagctttcaggcctaggtgtaagagacctccaaagtttagagaatcagattggaatgagcttgtgactttcttgcaagtaatgcagttcctgcctcatgcttggtgccaccatatgcaatacaccaatggcttcgcatcctcccgcaatttccttccccgccctagccaatgagcaaggggctgtgtggtcatggcccggatgcgccggcctttataacgggcgcgtcgaagtgtctagaaggatcgtatccgcgagtctactaccaagtcgccaacaagtgcccgggccggctc

SEQ ID NO: 987 - DNA, 1537 bp, Zea mays
  Clone ID: TF_ZmC3039_11
aagaagtcaggcgcacgaagcaaaaagcgacaagagctgggaggcgatgaccatctccacttcctcgacctcgagtccttgacccgtgtataaaagccggagccggccggcgtcccccctacccacccggagccccgcctccgcctcccgctcctccactccacccccacccatggccaacctcccagacgccgacgccgcggggttcaagctcttcggcaaggtcatccagccccccgacgcgcagcgcgccgcgggcgatggcgatggcgctggcgcccctccgccgtcgccgccggtccttcctcctcctcctcctcctcccccgcccccgccgcagcctctgcccctgcagcaggcggccggggccgggggcaccggcggcgagccgctgccgtgcccgcggtgcggcagccgggagactagggatgaaaacggtcggaaacggtatttattcggtaatcagttttttagtcgtttgcgaataaatagaatatataatatacaatacaaatttgtattcttgtttttaacatccagcttgttaagattcataaaaggtaaacctcaaattcattctatattttctcaaataatagatataaacttcggtatggattcggaaacaaattcggtaaatttttcaactttttgtgttgtagggagcaaataatacataaaacaatttatgtaatattttattcatatttttactaatgtgcttgataacataagaaaagatcaacatcaaattttatacatatctattttaaaatattaaatttgttctaacagtttggattaccactttcatccctacgggagaccaagttctgctacttcaacaactacaacgtgcggcagccgcgccacctctgccgcgcctgccgccgctactggacggccggcggcgcgctccgccgcgtggcctccgcgtccccgggccgccgcaggccgcgcccgaacgcccgatcggccgccgccgccgcggcgccgtccgcctccgcagccgccagggaggtgggcggggagcgttgactcgtcggcggtcgtaggggcggcgggtggccaggtgtgctccgcacgcttcgcttcgcttcgcacggggccgggggcttccttcccgcgtgacgccgtgacgtgatgccgcgcgcccgggccccaagcctcagtgacgggccggccggttcgcggtggggaccccgcgcctcgtcgcccttttcacacctactggtcctctccttttggtttgttagattctgttttctatataccattttaggattcttttggtggccaaaaaagatgctgccggcctgctgcgcttgcgagcgagagttcagttcggtaggccagtcaaaaagtggtagtcgtactagagcagtagtagtagactggtagtgctgctgctgaatgctgatgcaaaattcggcagcggtgaattggtgcctggggtcggtcaggtcaggtggcagatttcagccatggtttgttggaaaggaaggaaatcaatcatcctcttggttcacgtgatctc

SEQ ID NO: 988 - DNA, 1498 bp, Zea mays
  Clone ID: TF_ZmC12646_1
cattgggtacctcgaggccggccgggagggcaaggaaagtgtggtttccaagtcctcacctcacacactctcttcttctctccttcgttctccctcgcaaagtcagggtcactgaaaggagcggaagagcccaagtagttcttcgccaccggtaccgccgcatcgatcatcatggtgttctcctcgctcccgatcttcctagaccctcccaattggggccagatgcagatgcagatgcagccaccgctccagtgtctcctcggcagcggcggtggcagcgaccaccaccacctcatgcctcctccgtccggcctggcgccgctgccgggaggtcctgctgacacagcggcgagcgctccggcgggaggcgtctcgtccacctcggtctcggtgcaagccgcggcgggagcgggggcaggggcgcagcctcgcccggtggtgtcgatggcggagcgcgcccggctcgcgcgcgtgccgctgccggagcccggcacgctccgatgcccgcgctgtgactcgaccaacaccaagttctgctacttcaataactactcgctgtcgcagccgcgccacttctgcaaggcgtgccgccgctactggacccgtggcggcgcgctccgcaacgtgcccgtcggcggcgggtgcaggcgcaacaccaagcgctccagcaagaagtcgtcccgcggcggcggcgcgggcgccacggcggccacctcctcgtcctcgaccacctccacctccaccacggccaccaccaccaccaccacgagcgcggccatggcggcggccgaggccatcgccggcatgcaggcgcagctgccccacctcggcctcccgcccgcagcagccgccgcggcgcttgaggcctcgctggagggctaccaccactacctcccgctccagatgcagccgcagttcctgcagcaggctggcctgcacggctaccatttcgccgacgacggcaccggcgtcctcgcagctgacgggttcccgaggggcgtcgtcgcctcggggctgctcgcgcagctcgcggcggtgaagatggaggagcacggcagcaacggcggaggtgccatcgcggcgcatcatgagcagcagtcctactggcccggcagcaccggcggtggcggtgggtggccggtggagttcttgtcggggttcagctcatcctcgtcggggaatgtgttgtgagttgcatgtggccgcgaccaggtccacctgggcatgcatgatggggggcatgcatgcatggatgctgatgaagctgaactagctcaccatcctcaattagttctagggtttatgtggtgtttggaacttaattggcgtcgtcttcttcaattaggctggtgatgatcttgtgttggggtaaggtttttacatgtttttttttcttatgagttttaagctggttaatgtcgtgcagttggtagttttgcatgtagtgggaagtgcatgtgttgactcatggaggttatatgtgtcaggttacttaact

SEQ ID NO: 989 - DNA, 669 bp, Zea mays
  Clone ID: TF_LIB3116-015-H12_FLI
gctctagccacgcccacgctcccgcctccccggcaaacacactcacgcccgccgaggccacatcctagcacgttgtagacgccgccaccgccaccgcctgacgccatgcaggagttccagtccatccctggcctggccgggcggctgttcggcggggccgcggcacccggcgacctccggcgcgcgcaggcggcgcagcatggccccggcggggcgcgatgcggcggtgcctcgcccgcggcgcccgaggcggtgaagtgcccgcggtgcgagtctaccaacaccaagttctgctactacaacaactacaacctgtcgcagccgcgccacttctgcaagagctgccgccggtactggaccaagggcggcgtcctgcgcaacgtccccgtgggcggcggctgccgcaaggcgaagcgcgcctcgccgtcggcgtcggcgtcggcgtcctcgcccgcctcgtcgtcggcgccgtccacgcccgcgtcggccgacgcggccaagaacccgcgccgcgcctcggcctcgccccgctccaacagcggcagcgcgagccccacggccgccgccgcgacgaccccgaccccgaccgatccgagcacctccgccacgccgtcgtcgaacggcgtcgccttcacgggcagccaccactcgtcgaaccccttctccacg

SEQ ID NO: 990 - DNA, 1605 bp, Zea mays
  Clone ID: TF_ZmC1430_11
ccggccgggaggcgtcgccaactccagttgtcagatcttgcccgtatggtatggagctcgccggagcagcctcccctcacccgccgccggaatcccacgtggcgccgccccgcccacctccgcagccgccggaagaggatgtatgtgaagatagagggaacatgagtgtcaccggcgaaaagccatgcacacatcgggaatcagatgttggtcagacaaatagttgtagccttaacaattccagtgagtgtgagaatcatacacccagcaacgacgaaatatcggaaccagagtccaatttggagatggccaagactgagggcggcgatgtgccgagcggagagaaggtcctgaagaagccagacaagatcctgccgtgccctcgctgcaacagcatggacacgaagttctgctactacaacaactacaacatcaagcagccaaggcatttctgcaagagctgtcagaggtactggaccgcaggcggaagcatgagaaacatccccgttggtgctgggaggcgcaagagcaagagctccagcgcgagttgccgcagcgtgttgattcccgttccaggcagcagcagtgtagctaatcctggcggagaggcttccctgtttccgttgtccgtaaaagcaaaccaagcagcagttagcttcgggcctgattcccccctctgcacctccatggcctccgtgctgaagatcggaggaggaggagagcaggttaagagctgcagccctgcctcagcagcagcacagcccaggaacggagaaacccagacccagacgtgcgcaccttcttctgctgctacaacaccatcagatggtccagggaatggatcgcagaaaggagcagagagcgcacaccaaaaccaaaaccaaaaccaaaacggaatcattgggcacagcaacggagtcactccagtgcatcctataccgttcttccccggaccgcctttcgtgtacccctggagtccagcatggaacggcattcccgccatgggcagcggcggggtgcgcagccccagcgacaaacggcgcagcgatttcatcagacgggaggacctcgagcagcggaggacaacggatgcacaaactggcgacggaccatctgaaagttccgcagaagttggtttgttttgtgcacatccttatcaacgattggcagaaacatgtcgcaggatactgctgaacatcacgttggctcaaagcaataatgatgtaacgaacacacttccttctttgaaaaatgcacaggaaattgcacagaagacgatatgatgcagcggtccatttgacaactgacatattcttcatcagtgtgaagggaacttatcaggtatcatgtacctttttttgctacggaggatccctaatggtggtaagcattttgctggagccgtttgtgtaacccatactctgccaggatagcgtggttaagcattttggtcacaactcaaagcagtgccagtgtgtagttggagtgaactccgtgatatatactggagtacttagtatgtaactctatattccgttcattaatttatctagaactcgtttcgttgatgtaaatgcagagaagggatgcgtttattttttttat

SEQ ID NO: 991 - DNA, 892 bp, Zea mays
  Clone ID: TF_ZmC1430_18
cattgggtacctcgaggccggccggggtcgccaactccacttgtcagatcttgcccgtatggtatggagctcgccggagcagcctcccctcacccgccgccggaatcccacgtggcgccgccccgcccacctccgcagccgccggaagaggatgtatgtgaagatagaggggacatgagtgtcaccggcgaaaaggcatgcacacatcgggaatcagatgttggtcagacaaatagttgtagccttaacaattccagtgagtgtgagaatcatacagccagcaacgacgaaatatcggaaccagagtccaatttggagatggccaagactgagggcggcgatgcgccgagcggagagaatgtcctgaagaagccagacaagatcctgccgtgccctcgctgcaacagcatggacaccaagttctgctactacaacaactacaacatcaagcagccaaggcatttctgcaagagctgtcagaggtactggaccgcaggcggaagcatgagaaacatccccgttggtgctgggaggcgcaagagcaagagctccagcgcgagttgccgcagcgtgttgattcccgttccaggcagcagtagtgtagctaatcctggcggagaggcttccctgtttccgttgtccgtaaaagcaaaccaaacatgccatatatgttctgtacaatatgattggcaacataggtgctgctgctgtacaaggcagcgggcaccgttactgtaactgtaaccattggaagagtgcatcctcaaacagtgtgttgtttccatgtagagcgtgcccccaacatgttgggttggaggtgatcaggttttccagcgcgtgcgtgcttggttgtacaagaataactgtcaatagcttcccttcgcttccctcg

SEQ ID NO: 992 - DNA, 2103 bp, Zea mays
  Clone ID: TF_ZmC1430_2
cattgggtacctcgaggccggccgcattgggggcctcgaggccggccgggaggcgtcgccaactccacttgtcagatcttgcccgtatggtatggagctcgccggagcagcctcccctcacccgccgccggaatcccacgtggcgccgccccgcccacctccgcagccgccggaagaggatttatgtgaagatagaggggacatgagtgtcaccggcgaaaagccatgcacacatcgggaatcagatgttggtcagacaaatagttgtagccttaacaattccagtgagtgtgagaatcatacacccagcaacgacgaaatatcggaaccagagtccaatttggagatggccaagactgatcagggcggcgatgtgccgagcggagagaaggtcctgaagaagccagacaagatcctgccgtgccctcgctgcaacagcatggacacgaagttctgctactacaacaactacaacatcaagcagccaaggcatttctgcaagagctgtcagaggtactggaccgcaggcggaagcatgagaaacatccccgttggtgctgggaggcgcaagagcaagagctccagcgcgagttgccgcagcgtgttgattcccgttccaggcagcagcagtgtagctaatcctggcggagaggcttccctgtttccgttgtccgtaaaagcaaaccaagcagcagttagcttcgggcctgattccccgctctgcacctccatggcctccgtgctgaagatcggaggaggaggagagcaggttaagagctgcagccctgcctcagcagcagcacagcccaggaacggagaaacccagacccagacgtgcgcaccttcttctgctgctacaacaccatcagatggtccagggaatggattgcagaaaggagcagagagcgcacaccaaaaccaaaaccaaaaccaaaacggaatcattgggcacagcaacggagtcactccagtgcatcctataccgttcttccccggaccgcctttcgtgtacccctggagtccagcatggaacggcattcccgccatggcagcggcggtgtgcgcagccccagcgacagccgaagcagcgatttcatcagaacacggcaccgcgagcagcaccgtccagtggaacgtgccaccagcgatcgtgcccgtgctgccaccgggattctgcggcccgatcccagtcccggtaatcccgccgccttccgtctggccactgatcactccctggcccaacgcagcatggagcgcgccgtggctcgggcctagcgctagcgtgccgccggggtcatctcggagcagcggcagcagcacgtgctccgacagcggctgcggctccggctcccccgtcctgggaaagcactcgagggagtcgaggccgcagggcgacgagaaggcggaacgacggtgcctgtggatccccaagacgctccggatcgacgaccctgtcgaggccgccaagagctcgatctggacgacgctcgggatcgagcctggcgaccggggcatgttcaggccgttccagtcgaagcatggacggcagcaggagctgcaagcgtccggcgccgctcgcgccctgcaggccaacccggcggctctgtcgcgctcgcagtcttttcaggagacgacgtgattactacactacagagcagagcgttgctgaaacctgtgtggcattactattcagagacgattgtatttcaacttcaaggggggaaatgagagagagagcgcgagagagagattggcctgtttggttcactacctcagttgccacactttgcctaacttttctgactaaggttagttattcaattcgaacgactaacattaggcaaagtgtggcatatttagtcataaaccaaacatgccatatatgttctgtacaatatgattggcaacataggtgctgctgctgtacaaggcagcggacaccgttactgtaactgtaaccattggaagagtgcatcctcaaacagtgtgttgtttccatgtagagcgtgcccccaacatgttgggttggaggtgatcaggtttccagcgcgtgcgtgcttggttgtacaagaataactgtcaatagcttcccttcgcttccct

SEQ ID NO: 993 - DNA, 1776 bp, Zea mays
  Clone ID: TF_ZmC8284_3
ttgcttcattccattccattccaatacccatctccccgccggcctttcccctcccgcgtgccgatctgcctccggaggctagctcgaccggccgatctagctcgcgtgccgccgctttcagctcgatcagctgccgcacgtcgtccaccgacccgccgtcctgtgagcgcgatcgacagattactaagatggctggcgcggggtgtgcgacagctgtgcagcggccggcggcggcgggggcgccggctgctgtggcaaggaccggggtcggggcaggcggcgcggtcgccgacccgcgcgcggaggcgctgcggtgcccgcgctgcgactcggccaacaccaagttctgctactacaacaactactcgctgtcgcagccgcgccacttctgcaaggcgtgcaagcgctactggacgcgcgggggcacgctccgcaacgtccccgtcggcgggggctgccgcaagaacaagcgctcctccaggggcagcggcggcgggaggaacgggtccttctcctcctcggcggattcgacggcgctgcccctcccgccgcctccgacgacgacggggtccctgccgtcgtcgctggggctgcctgggggcgcctcgctcctcctcggctccgctctccctggcggtgccggtgaccaccaccacctcggcctcttccaggcggccatgcagtcggtggtttcctccgacgcgaccgcctacgacgagatgcagcagacgcagctggaccacctgctgggcctcggctacggaggcgccggcgcgcagatccagctcaagccgtggatgcaggaggccgccggggctggcggcgcggccgggatcatggacagcttctacgcgccgctgctgtccagctccctcgtgccggggctggaggagctgcacgtcaaggcggaggccgccggcgccggggatcaccagcagaagccgtcatccagggaccagcagagcgccagctgggactgggagctgccgacgccgtcgtcgtccaacgtcgacgccaacgtcacggcgtctgacgcgctcatggccgccgccgccgccgctgccgccgcgtccatgaaccccgctgttagtgttagctccacgccctccgcggcaccaaccgccccctcctcgttcttatactggggcaacggcggcattggcggcgctgccgcggcctggccagacctcgccaactgcggatcctccattgccacgctcttctagcccaagccgccctggctgtcctgctggcctcgttaacttcgtttttttaccttaatttctggttaattttttcttgactgaaataacatgtaatttgcggggaaaagaaaactgagatgagagagggagaacgcgctgtgaaagaagagagctagaccatctcaccacctcatagggcagaaacttagacaaatcaaacaaatgatccaatccaatatttcaagagaattccttcgccgcgactatgatcttcatgggatctacggtcttggccgtcaagcgatgatcaaggccggccgtccacaactggcatgcatggatttaggaggaggaggaggagatcctgagaccatggcgagctagagatcgatcgagactcgagagcaaagaaggcaagaagttgtaagtgccgtgctgccctgacactactccttgatttgctactttcttggctagcttctccgatccttgggtgttttgtacatagggcatatggtgtggggggtaatacaatatatataaggcggtggcccatgtgagatcatggtgc

SEQ ID NO: 994 - DNA, 963 bp, Zea mays
  Clone ID: TF_ZmC8284_4
ccccgcgtccgcggccgctgggcggctataaactaggttagacgtcgagcgaccggccccttgcttctctcccccggcccgcccgcccgcccgctcgctcgccgctggatcagtttcgtggcgctttggagcagcgaagtggttgctgtgcttggtatttctagtgcgtagtatcgccatcagcgctcaataatactactcctcttcctctatgctgcacgccccggcccctttgttttgtagctcttgtcagcgaaccttccccctgaaaaccccacccacccttcctctccgatcctcctagtagcgcctcacttgcttcattccgatccattccaccacccatctccctcctcagctcccctctccgctctccctccctcgctcgcgctctccacgcggatcaccggaggctagctagcaagctcgaccggcgcggccgatctagctcgcgcttgttggccgcttcagcttagcagcggcggcacgtcgtcaacctgtgctgtgagaaagactagtagagagagatacgtgtaaggatggctggcgcggggggtgcgacggctgtgaagcagccggcggcgggggcgcccgacgctggggccagcaggagcggggtcggggctggcgccgccggggcgccggtcgccgacccgcgcgccgaggcgctgcggtgcccgcgctgcgactcggccaacaccaagttctgctactacaacaactactcgctgtcgcagccgcggcacttctgcaaggcgtgcaagcgctactggacgcgcgggggcacgctccgcaacgtccccgtcggcgggggctgccgcaagaacaagcgctccaggagcagcggcgggcccggcgccggcgggaggaacgggtcctccgctgctgctgctgctgccgccgccgccgtcgtcgtgacgttctcctcggtgcctgtgacgctggccctgccgctgtatacgg

SEQ ID NO: 995 - DNA, 1268 bp, Zea mays
  Clone ID: TF_ZmC752_1
atctatctctttaccccttcttcccagcgacaagagaaaggattagaaaaaggaaagatccatggacatgatctccggcagcactgcagcaacatcaacaccccacaacaaccaacaggcggtgatgttgtcatcccccattataaaggaggaagctagggacccaaagcagacacgagccatgccccaaataggtggcagtggggagcgtaagccgaggccgcaactacctgaggcgctcaagtgcccacgctgcgactccaacaacaccaagttttgctactacaacaattatagcatgtcacaaccacgctacttttgcaaggcttgccgccgctattggacacatggtggtaccctccgcaatgtccccattggtggtgggtgtcgcaagaacaaacatgcctctagatttgtcttgggctctcacacctcatcgtcctcatctgctacctatgcaccattatcccctagcaccaacgctagctctagcaatatgagcatcaacaaacatatgatgatggtgcctaacatgacgatgcctaccccaacgacaatgggcttattccctaatgtgctcccaacacttatgccgacaggtggaggcgggggctttgacttcactatggacaaccaacatagatcattgtccttcacaccaatgtctctacctagccaggggccagtgcctatgctggctgcaggagggagtgaggcaacaccgtctttcctagagatgctgagaggagggatttttcatggtagtagtagctataacacaagtctcacgatgagtggtggcaacaatggaatggacaagccattttcgctgccatcatatggtgcaatgtgcacaaatgggttgagtggctcaaccactaatgatgccagacaactggtggggcctcagcaggataacaaggccatcatgaagagcagtaataacaacaatggtgtatcattgttgaacctctactggaacaagcacaacaacaacaacaacaacaacaacaacaacaacaacaacaacaacaacaagggacaataaggttagtgtgccagaccgtggaagcgttgctgctataaataatgcaattgggtagtagtacccagtgaaatcaggagagactagtagcctagggtgcattttgatttatttagttttggtcaagatgacaagtcatcatgaatcaccctttttattcatttgcatgttttgatgagagttcatttgcagtaagctatatatcattggataattaaaccaa

SEQ ID NO: 996 - DNA, 1288 bp, Zea mays
  Clone ID: TF_ZmC604766_1
ataccatggtcttttcttcggttcctgtctaccttgatccacccaattggagccagcaccaccaccagccgcagcagcagcagcagcaacagcacgctcaacatggccagacttccaagtggcggcaacggcggcggcggcggcggcatggacacgcatgcgcatcatcatcatcatcagctgccgccagtgccacctcctcctagcggggctctcatggctcctcgccctgacatgtcggctatggtcgcctgctgcgagcggtggtggcgggccgactagcggcggcaccgctatccgtccgggctccatgaccgagcgggccaagctcgccaagatcccgcagccggagccggggctcaagtgcccgcgctgcgagtccaccaacaccaagttctgctacttcaacaactactcgctctcccagccgcgccacttctgcaagacgtgccgccggtactggacgcgcggcggcgcgctccggaacgtccccgtgggcggcgggtgccgccgtaacaagcgcaccaagtcgtccaagtccaactcgtcatcggccgccgcctctgcttcaggcggcgcgggcgggacgtcgtcgtccacctcgtccaccgctaccggcggcagcagcagcgcgggcgccatcatgccgtctcatcaggggcagctgcagccgttcctggcctcgttgcaccaccctcttgccggcggcggcggcggcggggatcactacagcaccggcgcgtcaaggttagggttcccaggactgagctcgctggaccccatggactaccaccagttcggcgcgggcgcgggcgccggcgccagcagcgctgccatcgggctagagcagtggcgtctgccgcatatacagcagttccccttcctaagcggccgccccgaccccgtgcaaccaacaatgtctagcatttacccgttcgacttggaagggcacggcggggacgctcccggcttccccggcgggcacatgctaggtgcctccaaggtgcccggctcagccggactaatcacgcagctggcatcggttaagatggaggacaacccagcgtctgcggcgatggcgagcagctcgccgagggagttccttagcctccctgggaacctccaattctggggcggcggcggcaacaacaacggcggtgcaagtggcaacaatggaggaggcgctggcaacggcggtggtggtggcggcggtggcgctgtcgctccgggcagcagctgggtggacctgtcaggattcaactcgtcttcgtctgggaacgtcctgtga

SEQ ID NO: 997 - DNA, 1369 bp, Zea mays
  Clone ID: TF_ZmC25364_1
caacattctcggcgaatcctccgtcccagctcgctccagcctccatccaagctcccgcgcgcgcgcgtggtggtctcgatcgctaccatgctgtcttcgcaccacgaggccatgctgccgtacgcgccgccgccgccgccgccgtcgctgctggtggaccgtcggtacaggcagctgcaacaagccggagaggcggcgcccagctgcccgcgctgcgactcgcccaacaccaagttctgctactacaacaactacagcctcacccagccgcgctacttctgcaagggctgccgccggtactggaccaggggcggctccctccgcaacgtgcccgtcggcggcgggtgccggaggaaccgccgggccaagtcgtccttgcggtcggcggtcggcggcggcggcggcggccaccggttcccgggccccgtcgtccggcccgacctggtcctggaaggcatggtgtcgaacccagcccaggagatgcccggcgtgcccgccgctgccgacggctccaccattgatctcgcgatgctgtacgccaagtttctcgatcaccaccctccggcggaggaaggcctcggtagtgccgtgacgccggagctggcggtggcactggctgggccagggcgggtcgacgaggcattattcgacacgttcagcgacctgagcccaccagctggcgttctggcggcgccgccggtgcagttcgatccgccgtgcggccacgacgacgggttcgacgactggtcatccggcgcgccagtgcgcagcgccgggccctcgagtacggccagtactgccaccgcaaccaccaccatgccgccgtgcgccgacgtgagcgtgcacgctgcgttcggcgaggagttcaacttcgccaaggaccagagctgcctattattcgactcgctagggctgcccacggacgacgtcggcgacctctcttcgtcgtcgtggcgttcgatcgtgccgggcttgtcgacgctggaggacaccgagtatgacctgctggactcgtcgttccctgacgacgccctcagccttcacgagggcatggttagcgggactgatcatgactgctggagcgtggtggattgccaaggattggaggctctctaatccgccggtggtgttcttgtgatgattggtttcctacatttatttttctccttttcttttctttcattcaattcggtttggaagaaatatatatagagatacgtatgttttggaagagaggtactacgtgagggacaagtcgctcatgtaattaaattaaggaattcggtatacctgtgagatagatcgaggcaatacaataatgaaagcttgggaatactagtcgctataagtatctcatgcatgagacatg

SEQ ID NO: 998 - DNA, 567 bp, Zea mays
  Clone ID: TF_LIB4738-118-A1-K1-G10
tgggacctcgagccggccgggagactaccagacctagctacgattctctcctcccagtgatctagtccttactccataacatgacctatatcactagatagtactctcgggcgaatcgccggactcttatgaaagcggcgtcgatcctcctcggcaagcgcggctctgctcgcgtgctagatgctgcctggactttccatcctgtcggccagctccttcgcctccgccaagtggccacacacatttcgacattgatgagctccagcacgacgactcactccgcttgcaccaccaggcaggctgcatgacgcatgagctcgagcgcaagggccagctaacgcgcggcagcagcagctggagtgcccgcgctgccacaccaacatgaccaagttctggtactacaacaactacagcacggcgcagccgcgccacttctgccgcgcgtgccgccgctactggacgcacgggggcacgctgcgcgacgtccccgtcggcggcgcctcgcaccgcgccgccactggcagggtaggcaagcggcgcaggaagctccgccgagacctcataccc

SEQ ID NO: 999 - DNA, 1537 bp, Zea mays
  Clone ID: TF_ZmC604766_2
ttcttgtggtccatccggcggttcgggaataccttgatttgctttcgcgcgtcctcctcgcgatcccatcttttttcttcccttacctttagtttctcctcctcctctctccgggtggcagacccggccttctctccgccctcttcgtcttccagttcgaagctgtagcggcagctagagctagccacgtgtagagcggcacgactgcagcgtgcgaagaacaaacaaaaccaggaaaagaagctctcactcactcacaagtagcaaaagatcaaagggaaatcaatcatataccatggtattttcttcggttcctgtgtaccttgatccacccaattggaaccagcatcagcaccagccacagcatgagcaacagcaagctcaccatggccagcttccaagtgacgccagaggaggtggaggcggtggcgtcgacgcgcatgcacaccatcatcagctaccgccgatgccaccttctgctcctggtggggctctcatggctcctcgccctgacatggcggctgtggtcgccgcgagcggtggcagcacgagcggcggcggtgggccgactggcggtggttcccctatccgtccgggctccatgaccgagcgggctaggctcgccaagatcccgcagccagagccggggctcaagtgcccgcgttgcgagtccaccaacaccaagttttgctacttcaacaactactcgctctcccagccgcgccacttctgcaagacgtgtcgccggtactggacgcgcggcggcacgctccggaacgtccccgttggcggcgggtgccgccgcaacaagcgcaccaagtcgtccaagtccaactcgtcgtcagccgcctccgcttccagcgcgggtgggacgtcgtcgtccacctcgtccaccgcgaccggtggcagcggcagcgccgccagcatcatgccgcctcaccaggggcacgggggacagccgcagttcctagcctcgttgcaccaccctctcgtcggcggggaccactacagcaccggcgcgtcaagattagggttccccgggctgagctcgctggaccccatggactaccaccagttcggcgccggtgccggaggtgccatcgggctggagcagtggcgcctaccgcagatacaacagttcccattcctaagcagccgccccgacgccgtgcaaccgccaatgtctggcatttacccgttcgaagtggaaggccacggcggggaaggttccggcttcgctggtcacatgcttggtgaccccaaggtgtccggctcagccggactgatcacgcagctggcgtcagtgaagatggaggacaacccaacgtccgcagcgatggcaagcagctcaccgagggagttccttggtctccctaggaacctccaattatggggcgctagcggcaacggcggtgcaagtggcaacaatggaggaggcaccggcaacgctgccggtggcggcgacactattcctccgggtagcagctgggtagacctgtcaggattcaactcgtcttcgtccgggaacgtgctgtga

SEQ ID NO: 1000 - DNA, 720 bp, Zea mays
  Clone ID: TF_LIB3078-017-G3_FLI
ctccttcgccttcgctagctgattcccgtcaccatcaagcctcagctccccggcctcccactatctccgcgtcgccgtcccagccacagtcccacgcgcccagcaccatccatccgtccgcaagggggaaagcacgctagctgagctgagctgctgagagagagagagaggcaaaccctagcacgcacaagcacagcaacgtatacgcttccccccgccgattcatccatccatcgcagcgcgcaccgggcgggcgggccgggacgacgacagctaagctagcacatcgcaatagcatagcatctatctccgccgcagtacccaccaccaccaccaccatgatcttcccccctgccttcctgcaggattcctcgagctggaacgataaccagcagcagcagcaccaccagcagcagcaaggccacggccacctgctggttgccgtcagcggcagcggcgacgccaatcatgagctcctccagcaaccaatcatggggggagcgcttcccgatggaggaggaggaggtggtggcggggggcaggttgggggccccgccaagcccatgtccatggcggagcgcgcgcgcctcgcgaggatcccgctgccggagccggggctcaagtgcccgcgctgcgactcaaccaacaccaagttctgctacttcaacaactactccctcacccagccgcgccacttctgccgggcctgccgccgctact

SEQ ID NO: 1001 - DNA, 1046 bp, Zea mays
  Clone ID: TF_ZmC3039_32
cctgcaggctccggtgcggaactcccgggccgcctccgcctcccgctcctccactccacccccacccatggccaacctcccagacgccgacgccgcggggttcaagctcttcggcaaggtcatccagccccccgacgcgcagcgcgccgcgggcgatggcgatggcgctggcgcccctccgccgtcgccgccggtccttcctcctcctcctcctcctcccccgcccccgccgcagcctctgcccctgcagcaggcggccggggccgggggcaccggcggcgagccgctgccgtgcccgcggtgcggcagccgggagactagggatgaaaacggtcggaaacggtatttattcgtttggattaccactttcatccctacgggagaccaagttctgctacttcaacaactacaacgtgcggcagccgcgccacctctgccgcgcctgccgccgctactggacctctcgcggcgcgctccgccgcgctgtcgatgcgtctcctgtccgtagtcttaatggttgcagcgccgcataccgaatcattagacttgttccaaatattgagaattttcgcacggcattaggatgtctgcagtgctgggcaaacagtcgtagggtttactctaatgttactggctttcttggtggtgtcaactgggctttactggttgcacgtgtctgccagctttatcccaatgctgtgccaagtatgcttgtctcacggttttttagagtttttacacaatggcagtggccaaacccggttatgctttgttccatagaagaggatgaacttggcttccccgtttgggatccacgtaaaaatcctcgagataaatgtcatcacatgcctattataacccctgcatacccgtgcatgaactcgagctataatgtttccacaagcacgctgagggtcatggtggaacagttccaatttggtaataaaatttgccaggtaatctttgcaccattgaagttactatttcaaaaatacttaccctgacaatgcattgtatgccttctgggtcaggaaattgaaatgaat

SEQ ID NO: 1002 - DNA, 1772 bp, Zea mays
  unsure (1)..(1772): unsure at all n locations
  Clone ID: TF_ZmC1430_6
aggcgtcgccaactccacttgtcagatcttgcccctatggtatggagctcgccggagcagcctcccctcacccgccgccggaatcccacgtggcgccgccccgcccacctccgcagccgccggaagaggatgtatgtgaagatagagggaacatgagtgtcaccggcgaaaagccatgcacacatcgggaatcagatgttggtcagacaaatagttgtagccttaacaattccagcgagtgtgagaatcatacacccagcaacgacgaaatatcggaaccagagtccaatttggagatggccaagactgatcagggcggcgatgtgccgagcggagagaaggtcctgaagaggccagacaagatcctgccgtgccctcgctgcaacagcatggacacgaagttctgctactacaacaactacaacatcaagcagccaaggcatttctgcaagagctgtcagaggtactggaccgcaggcggaagcatgagaaacatccccgttggtgctgggaggcgcaagagcaagagctccagcgcgagttgccgcagcgtgttgattcccgttccaggcagcagcagtgtagctaatcctgggggagaggcttccctgtttccgttgtccgtaaaagcaaaccaagcagcagttagcttcgggcctgattcccccctctgcacctccatggcttccgtgctgaagatcggaggaggaggagagcaggttaagagctgcagccctgcctcagcagcagcagcagcacagcccaggaacggagaaacccagacccagacgtgcgcaccttcttcctttcagacaccaccatcagatgggacacaagtaggatcggaactgcggcctgtatgcgtgccactcatacagaaagtaaaggcagtatagcccagccaatctttggtgcagtgaactttgagaagtcaaataaccaatacaatgcagaaagagggactgcatgaataaacccgagtttgtcttaggcctgccttcatagatataagaaaatttcttgcccatccatactcgtttgaattcaaagagtgacgtacagttctccttggaataatcagctatcagctcatcaatatccagcttgaacagatcaatatctatatttaaaggcatggccaagcctcaaactgatcttattgatgaggaacttgtggagcttcttgcacgatccgcacaaggccctccaccgttgacatgaggatggcagcctggagcagcaacatcgcgaggagctctaggacgacgacgcgagttccatggtcacgatcttcagcaacagagggcagaaccagcaacgaccggtgatgagggcctgtccatgcttcagatcaagccggcggattggcgcttctctgtgcctctgtcgccggccacagaacgggtggaatcagtgacggagccacacaaaaattataggtggagcgagttctaacgccgctcgcaagtcgcaactccaggctccagctagccaccgactgaccgccagccacgggttgctcctgctcactccgcgccgaccgcgcactcgcgtggccgcttgctgactacacggccccaggggcggggccgctgagggatgaggcgccgggccgctggttcggctgctcctcgcgtaactcgggcctcaggcctccgggctttggcagtccggcgggtggcgggtggcgggcgaaggacggcggagcgagcaggacggggtcgggactcgggagggtagggtcccggcccgacctactncgaggtacccaa

SEQ ID NO: 1003 - DNA, 545 bp, Zea mays
  Clone ID: TF_LIB4315-019-R1-K1-G5
ccgcccccggccgcagacgcttcccacggcttcgggaacccctccctggccgttctggcttcggcccccaccaacgaaacgccccacggccaatggccaggggaatggactcctctggggccgttcgttccccgttggccgccctttccccgggccgttggaacctcccgcccccccccagaggccacccccgtggcggtttcccaagaagaggagatgcccgcgccgggccgcgacccgtgccccgcggtgcgggtcgcgggacccccaagtttcttgcttcttccaccacttcaacacgtcgcagccccgccacttgtgcaagtcgtgccgccccttctggacccaaggcgggtccctccgcaacgtccccgtcgggggcggcacgcgcaagaacagcagcagcagcagctcctcatcatcctcggcgacgacgacgtcaacctcgcccggcgccgcgcccaaggccacgaagcggtcgaagaactccaagcgccgccgcgtcgcgcctgccccggaccccgccgcgcccggcaacggacgcc

SEQ ID NO: 1004 - DNA, 734 bp, Zea mays
  unsure (1)..(734): unsure at all n locations
  Clone ID: TF_21216762
ggctgcgcattctttctccagctctctgataagctagccagcgtcgcgcggtcttgttgttagttattagctctatctcgccgccctgcagctgctgatcgagtgagggaattnnnnnnnnnnnnnnnnnnnnnnnnnnnnntagatatgacggcggcggaggtggaggccgccaaggacatcgccgaggagaaggccgtcgtgccgttgccaccgtcgcccgccaagccggccgacgacgactccaaggccatcgtcgctcttgtcgtcaaggatgcttacctcgccaagatcgtgtccgagaagaggctgagtctgatcaccgcctgggaggagagccagaaggcgagagccgacaacaggagcaactgcagaagaagaaggcggcgtacgaggagaagctcaagaacaagctggcgatgctgcnnnnnnnnnnnnnnnnnnnnnnnnnnnnnncggaggccaggcccggcgaggagaccatcctggcggaggagatggccgccaagtaccgagccaagggcgagggccccaccaagctctttggcctcttgaaagcgtgacctctgctatggagaatgccctgtttcgtgcgtgtattaatttcgtattctcaacaagtgcactnnnnnnnnnnnnnnnnnnnnnnnnnnnnnnnnntattccaaggctgcttgacaatatctgttgtattgtattagtataggagaacagtgcagtgcagtgcgacgcgg

SEQ ID NO: 1005 - DNA, 706 bp, Zea mays
  Clone ID: TF_ZmC1128497_1
aataaatccatcataagagaaaaatagagaccacatatttgtcatcgttcaggtagaagaatgagaagcaccatgttgaagaggaagaatttgaagttgagttggactatcttcattgtattatttggactaataattgttattctgttactcaaagctcgagccgcacaggccagaaatcctgaaggaggacggcaggtgcccagtcctcctgatgtagttggccttctccgatgtcctgttcgcacgctcattgagcttcgcctcagcgctcgcccgcttctcctcagccatccgacgcgtggtggccagccggttggacagctcctcttggccccgtgctttcatctgatcagccttcatctgcattttcttcatctttgtctcggcttttctcttctcatggttctcccaggcctgtatctttacctcttcacgtttatacctcgccatgaacttggcccgttcagcctcatcccaggctgccgcgcgagactccagagagttcacgctgggcacatgaccagccacggggcgctcgtccccgacgcaagcgacctcgtctgctgccgctacctgctcggtcagcgtccctgctacaatggccgtggtcacgcccacgggcccttcctggcgtcttctcaccggggtggacgaccttgaggccatcgggctcagcgcaacgggcgtgcaggcgcgccggggc

SEQ ID NO: 1006 - DNA, 503 bp, Zea mays
  Clone ID: TF_5791336
taagtactacattcacatttatatgcttttcattttggtcaatgatggtctaattatacaccaatagtatcatttgtgcaccataaatagtagtctatacagacaattaaaaagggtaacaattacataagttgataaagttgcaccatggcattttaatgcacaaataagaaagcataaaaatcaaaccttccttatgctctaaagcacctaagaaatttctttggagctaccctaaaggcaccgggacttagctgccatctcctcagtcttgagaatttcttcaccatgctgggccataaccatcgctctcttttccttggccttcttatggatgattgccttcttgtttttcatcttctcagcatattcagccattttcttctctagttcttcctgatcagtagctcaaagagattaatatttttttattttcattaaaaagcacacaatttcccacaccatattttatgatatacctattacattaacatcaatataat

SEQ ID NO: 1007 - DNA, 653 bp, Zea mays
  Clone ID: TF_LIB3587-206-Q1-K6-C5
gtccaaaatcgccgcgtggcagatcgccgaggtggccaaggtcaacaaccgcttcaagcgcgaggaggtcgtcatcaacgggtgggagggcgaccaggtggagaagtccggcgcctggctcaacaagtacgagaggaagctcgaggagaagcgcgccaaggcgatggagaaggcgcagaacgaggtggccagggcgcggcacaaggcggaggcgaagcgcgcgtcggcggaggccaagcggggcaccaaggtcgcgcgggtgctggagctcgccaacttcatgagggccgtggggagggcgccctccgccaagcgctccttcttctgaaccctcccccaccgcccaccgggcctctcctccttcaccaattcctctgccctgcctgctctgctcgtcgccgcccgccgcctgtgcagttcagttgcatcgttcaccgcttcactccacgggatcagacagagtgatcagtgccgtgcttagctgtgtggaacgcttgttttagtgctgtgtccacatgtatgatttgtaaccttttcttcttcctcctgtttatgtcattgtcagtacgaaggatgtgctctgcccgagtcttgagggcaagagctgcctgtattttgttgatatttcgtcataacagctgtgtatgtcagta

SEQ ID NO: 1008 - DNA, 498 bp, Zea mays
  Clone ID: TF_LIB4766-035-R1-K1-A8
ttgggaccctcgaggccggccggcgacgtgacgaccaccaccaccacatgttgcatgagcagcaggcaccgccaccggcgcaaggcggaggagaagcgggcgtcggcggaggccaagcggggcctcaagctggccaaggtgctggagctagccaacttcatgaaggccgtcggcagggtgcccaccaagcgctccttcttctagccagccgactacccctgccacctccgtctctccctgcctgcgtgtgatcgatgtacgctcgctgctgcatccgagaacctaactgtaaagaaaaaaaactgtaagctgtatacgtactgcgcctgctggttcccctgtgatgtctgtcagtgtcatccatcacagggtgccagttgttctcttctctttcttttcttttctcttctcttggcttgtatatcggatccatatgctactggtggtgcttgaacgagctgttgttgtttgctgaaaaaaaaaaaaaaaaaagcggcc

SEQ ID NO: 1009 - DNA, 2459 bp, Zea mays
  Clone ID: TF_ZmC145_1
caacgtagaggggaccgagcaccgaggcgctcggggaaatccgtaggttaggggacggctgccgcaaaccactccccgttttttctccgcaccgccctgctccccgaccccaactgctgtctccttcctcgggtaatgcgaccgcgcgccagagcatgctccgcccggagcccgcgctagggttcctcgccgccggccccgtgcgcgcgtgcaagccgccgcccgagcgccgccgcaagaagcagccaccgacgcggcggaggcgaccggccagtgccgcaacggtggtgggactgggaccacgcggcgcggccgatccagatcccgcgcactcgtccgcgctgctgcctctcaccagcggcggcagcggcagcggctttgcctcgcggggcacggttgcgccagacgaggaagaggggagagacggggcgagctcggctgaatcgcaggaagtggcagaagcagcaaacgattcgttctcctactcactaagagagtgccagaagcagcggcgtctcaagtcagagaggtctgcactggtgcggccaccggcctcgcataagctcaataatgccggaggtattgagcttctagtgctctcgccgaggtgcttgattggtggtaacccgggaggaatgagcaagagctcaacgacatcatcccggagcagatcaggcacaggcacgttcccaagccctgggactccgagctgcaaccggcattgtgcaggcagcatgcagtactccaagggttggagttcagagcgcgtgccactgggcactggtaggaatagaaggtatgggggcagtggggttgtgcttccatttaacaatgggaggaagctgccatcgaaatgggaggatgcagagaagtggatcctaagtccggtttcctgtgatgggatggggaggatgtctgcaccagctccacatcatagacggcccaagtcgaagagtgggccacttggccatccagctggcattccaggggcttatgcggctgtttcaccgcttgttccttgctttgatggtgtgctggcagcagctaatttcgcagcacattcacctttctctgctggggttctcataccagagcacgggcgcattggcgacttcagcagtggaagagacagatgtggtgatgacggtagcagcagatcctactccgctgagaaagagtcctatatattaagatctgcaagcatacatgcatggacagaaacacttatggaggcatctgcttttgctaatatctcagaagaaaccgtacaagatgataaactgcaacgccagacagaagcaacttccatgatttccagtccaatcataaagaaagacatcggcacacagatgagtcctgaggatagtatatcttctccaaaagcgaggcattcctgctccagtctgccttcaaggcatctgataaaagaaacaaatagtcatatacctaaacctgaaattagggacgtgcaggttgatgaccaagtaactgtgacccggtggtccaagcgacatgtaacacgaggctctgataagaggtcaacaaatattattgaatggaggaagaagactgttgaaacccgagctccatcttttgatgaaaaagaaagagaaggatgcatgtcaaagtgcaaaagggaggaagcaaagatcacagcttgggaaaatctacagaaagcaaaagcagaggcagctattcgaaagctggagatgaaacttgaaaagaaacgatcatcatcaatggacaaaattttaggcaaactccgctctgctcagaagaaagcacaagacatgcgaagtgtagtttcttctagtgaaggtcagtgtagtgtgagggcaaccaagaagacatcttcctctgtcaaaactggcaggcctttcagctgctgctttacctaccgtgcttgctagttgtgatacacagttggtgcctgtggctacagcaatggatatagttctactcgttatggacgcgaagggaagtcagttgggttttgactgcaaggcctaattgttaatgagatttgcactgatgaatgagatatcgttatggagcagcagacgaagacagccacgcgaaatccactcatgtaactgatggagtggactaatgcagtctagtatgcgacgatcaatctctgtacacccggtagaaaaagttcatgagcttcatggcagttagaatcaggattgagctgatattcatcccgcttgatgtgtagctagcattcttgtaactggaattgtgtgtgtaatgcaaatcatgggcgcattagactttaatgaagaaaaagtcagggctgcgcctttagaatgcagcttgctcactttttgggtttagtactgagacttggcttgcttgttaaaaaaaaccaataatataaataaaaactttaaaaaaaaaaaagggcggccctttttgcctggcagcaattggaactgtgacgaagtataatttcc

SEQ ID NO: 1010 - DNA, 1495 bp, Zea mays
  unsure (1)..(1495): unsure at all n locations
  Clone ID: TF_ZmC1445_2
tgcacgcgggggtaaggctcgaggttgggcgggagcagctgacccgagccgcagatggtctctcccggccgctactagaggcttagcgttgagagccacatgttgagtgaacagacggcggctagcactagcagcggcgagcatcaggagaggagcgtcgtcgaggacaggcggctacagccggtgggggagaacgaggaggcggagttcagggacatccacgcgctgagcccgccgccgagccagccttcgtcgtaccgccggagcaggcacgcgtccgtcgggagcgacaccgcgcccagcgagcccttcccgaccatgagcagggagttctcggccatggtcgccgccgcagcagccatcgccaacggtgccgccgccgacaggctcggggaggccgaggacgaggagaccaacccgctggccatcgtgccggacagcaaccccatcccgtcgccgcgccgggcccggggcccgcccaccccaggcgccggcgccgcccacgccaacggcgacggtggggtgtccgtggggcaggtcaggaaggaggaggtggagtccaagatcgccgcgtggcagatcgccgaggtggccaaggtcaacaaccggttcaagcgcgaggaggtcgtcatcaacggctgggagggcgaccaggtggagaaggccggcgcctggctcaacaagtacgaggtagtcagtccatcgcatcgatctacacctccacactcactgactagcgtcgtccgaactgtccagtgcttgctgactgataccaacgcatgtaatgtgcagaggaagctcgaggagaagcgcgccaaggcgatggagaaggcgcagaacgaggtggccagggcgcggcacaaggcggaggcgaagcgcgcgtcggcggaggccaagcggggcaccaaggtcgcgcgggtgctggagctcgccaacttcatgagggccgtggggagggcgccctccgccaagcgctccttcttctgaaccctcccccaccgcccaccgggcctctcctccttcaccaattcctctgccctgcctgctctggtcgtcgccgcccgccgcctgtgcagttcagttgcatcgttcaccgcttcactccacgggatcagacagagtgatcagtgccgtgcttagctgtgtggaacgcttgttttagtgctgtgtccacatgtatgatttgtaaccttttcttctccctcctgtttatgtcattgttacgaaggatgtgctctgcccgagtcttgagggcaagagctgcctgtattttgttgatatttcgtcatcaacagctgtgtatgtcagtacgaacaagataatggaagtccattaccactgtgtaaaaaaaaaaaaaaaaaaggcccctagggatgcaccgacgagcttcactacttggaacttcagttttgctgttgagctagaaaaaaaaaaaaaaaaaaaaaaaaaaagtgttttctgctntagaggtccaccgacttacgtacgcgtgcat

SEQ ID NO: 1011 - DNA, 636 bp, Zea mays
  Clone ID: TF_ZmC1586_1
gcgacggtggatcgccaccaggcctagcggcagcggaccgcgacgagacggcgcccggtgcgccgacgacgacggccgtgtcgcccgcggcgacgtgggacgccgccgagcgcgccaagcacatggccaggtatcggcgcgaggagatgaaaatacaggcctgggaaaaccggcgacggcaaaaggcggagctgcaaatgaaggtggccgaggccaaggcggagaggatgaagctacgggcgcaggagaagacggcgagcaagctggcctcggcgcaggcggctgcgagggagaagcgcgcgcaggcggaggccaagctgaaccggcgcgccgcgcgggtcgacagggcggacgcgctcaggcggaccggccacctgccgtcctcctcctccgtgttctcgctcaagctgccgctgatgtgcagatgagagccgaccgaggggggtgtggcacagcagttcacacggatgctgttcagagtttcagtcaactgtcctgttagaattggtcgggacgctgctcgcgtccttgtgtttcagccgagcggtttgcgatgcacacaggcacatggcacttagaattgtagacatttgtttttttatctgcacaaatcagtgaagaacaaaaatattttat

SEQ ID NO: 1012 - DNA, 674 bp, Zea mays
  Clone ID: TF_ZmC1445_3
ccgggaaaaatcgccgggtggccaggtcaacaaccgcttcaagcgcgaggaggtcgtcatcaacggctgggagggcgaccaggtcgagaaggccagcgcgtggctcaagaagtacgagaggaagcttgaggagaagcgtgccaaggcgatggagaaggcgcagaacgaggtggccaaggcgcggcggaaggcggaggagaggcgcgcgtccgcggaggccaagcggggcaccaaggtggcgcgagtgctggagctcgccaacttcatgagggccgtggggagggcgccctccaccaagcgctccttcttctgaacccacggatcagttcagttcagttgtcctgtgggtcggaccgttcaccgcttcactccacgggatcaggcacagtgatcagtgccgtgctagctgtgtggaacgcttgttttagtgttgtatccacatgtacgatttgtaacgtttccttgcttctcccgtttcgtgttttcgtatggtatctatggtattgcaaagtccatggccacgatagacagggaaagcatatgtatacaccattagaaggatgtgctctgcgcctctgcccgagtcttgaggacaggagctgcatgtatttttcaccaatataatggttgtgtatgtcaattacgaaaagatatgaacaccattaccaccgcgt

SEQ ID NO: 1013 - DNA, 1307 bp, Zea mays
  Clone ID: TF_ZmC145_4
aggcatctgataaaagaacaaatagtcatatacctaaacctgaaatagggacgtgcaggttgatgaccaagtaactgtgacccggtggtccaggcgacatgtaacacgaggctctgataagaggtcaacaaatattgttgaatggaggaagaagactgttgaaacccgagctccatcttttgatgaaaaagaaagagaaggatgcatgtcaaagtttaaggtgcaaaagggaggaagcaaagatcacagcttgggaaaatctacagaaagcaaaagcagaggcagctatccgtaagctggagatgaaacttgaaaagaaacggtcatcatcaatggacaaaattttaggcaaactccgctctgctcagaagaaagcacaagacatgcgaagtgtagtttcttctagtgaaggtcagtgtagtgtgagggcaaccaagaagacatcttcctctgtcaaaactggcaggcctttcagctgctgctttacctaccgtgcttgctagttgtgatacacagttggtgcctgtggatacagcaatggatataggtctattcggtgagtcccactggcatttgtattatgtgtaatttaacatctaaaactcacactagttcagcattaatgctttactgcttgtaattttgtatttgtgtaattttatcgaatttattaacttttaacctattatctcaatagtttctaatgctagaagtggctatctttctcaagacctcttctcaggcaacagttatggacgcgaagggaagtcagttgggttttgactacaaggcctaattgttaatgagatttgcactgatgaatgatatatcgttatggagcagcagacgaagaaagccacgcgaaatccactcatgtaactgatggagtggactaatgcagtctagtatgcgacgatcaatctctgtacacccggtagaaaaagttcatgagcttcatggcagttagaatcaggattgagctgatattcatcccgcttgatgtgtagctagcattcttgtaactggaattgtgtgtgtaatgcaaatcatgggcgcattagactgtaatgaagaaaaagtcagggctgcgcctttagaatgcagcttgctcactttttgagttttaactgggcccagtattttgaaacttgtttggtacagttctgaaggctttcggtccagcacttagacttggcgtgtttgtttattggttcgcagcgagtggaaatttgtaactgagactacagaacccctatttcccctcctttttggtgaacattataaacgtctccaacaaccgttagggc

SEQ ID NO: 1014 - DNA, 2245 bp, Zea mays
  Clone ID: TF_ZmC145_2
aagacatcggcacacagatgagtcctgaggatagtatatcttctccaaaagcaagacattcctgctccagtctgccttcaggacatctgataaaggaaccaaatagtcatatacctaaacctgaaattcgggacgtgcaggttgatgaccaagtaactgtgacccggtggtccaagcgacatgtaacacgaggctctgataagaggtcaacaaatattattgaatggaggaagaagaccactgaaacccgaactccatcttttgatgaaaaagaaagagaaagatgcatgtcacagtaagatattgcctatttctgcccatcagctaacaatcccattttgcaccactgcccagttttgaattggatttacacaaaaagaatatattgctccaattgtcatcttgtaactttcaatactccaagctgtcgttgtcgtttatcatgtttattaagaaaggtcagctcaatgttgaagtgaagctactatggctgtaatacctgttcaaattcacagaaaggagtaagtataaaaggtgctgaatgttgattagactattatatgacttgctaatatgctcttagtgttattgagaaatctacataacttgaagtcagggtcagatggtataagttgcagatattgagcttatgtgatgatacactagaaatattttacccattttcatcctacagctagtggtacatgctgacatgcagaatatcgcttaacatggggtcattatgttgaattgagaaccgaacagatgtttgtatattagagcgcctacctgagctttgaaccatggcattcaaagactggtcattgagaactcattgagaactctgattttagcaaaattttcctggccagcgagggtctggtaatcccctcttttaagaatgtcttcggtggactgtgtaaaatagtggacgtggtactgtagatgacaatgtttgcagaatgaattttgtttgcagcgtgaagtttgaaatagaggatgccataggagatgtcataggggagctggcgagctgctgaggacaacctaagaggaacccaagtggatatttttctcgcatggtctagtttttttcccccacaatccattagaagctcagtctataaagtgttgttcattttctagttttcttactgatgaggtggtaaaataaaaaaagcatgggtcaattagaaagtctagtaattcatagaattgatgcgctagtcttacacaatatttttctttgccatttcgaaaaaagagaactcttatactgaggatataaatctgctacattttgtatttagagacctgtttatttgtgttttaaggtgcaaaagggaggaagcaaagatcacagcttgggaaaatctacagaaagcaaaagcagaggcagctattcggaagctggagatgaaacttgaaaagaaacggtcatcatcaatggacaaaattttaggcaaactccgctctgctcagaacaaagcacaagacatgcgaagtgtagtttcttctagtgaaggtcagtgtagtgtgagggcaaccaagaagacatcttcctctgtcaaaactggcaggcctttcagctgctgctttacctaccgtgcttgctagttgtgatacacagttggtgcctgtggctacagcaatggatatagttctactcgttatggacgcgaagggaagtcagttggggtttgactgcaaggcctaattgttaatgagatttgcactgatgaatgagatatcgttatggagcagcagacgaagccatcgagcaccgcgaaatccactcatgtaactgatggagtggactactgcagtctagtatgcgacgatcaatctctgtacacccggtagaaaaagttcatgagcttcatggcagttagaatcaggattgagctgatattcatcccgcttgatgtgtagctagctttcttgtaactggaattgtgtatgtaatgcaaatcatgggcgcattagactttaatgaagaaaaagtcagggctgcgcctttagaatgcagcttgctctacgttttgggtttagttctggaggcttgcggtccagcactgagacttggcttgtttgtttattggttcgcagcgagtggaaatttgtaactgaggcgacaaaacccctatttcccctcctttttggtgaacatgataaacgtcgccagcttccgttagggcaaaaaaatgcacaaataacaataaagggcggccgccgactaatagcc

SEQ ID NO: 1015 - DNA, 539 bp, Zea mays
  Clone ID: TF_ZmC1445_6
ccggccggaaaaaaaaaaaaaatgtatctggattgcccagttctgatatcgtcagtgttgtatggcacagaggaagcttgaggagaagcgtaccaaggcgatggagaaggcgcagaacgaggtggccaaggcgcggcggaaggcggaggagaagcgcgcgtccgcggaggccaagcggggcaccaaggtggcgcgagtgctggagctcgccaacttcatgagggccgtggggagggcgccctccaccaagcgctccttcttctgaacccaccgcccaccggcctcttcttcaccaccagttcctctgtcttgccgccgccgccgcctgtgcagttcagttcagttcagttgtcctgtgggtcggaccgttcaccgcttcactccacgggatcaggcacagtgatcagtgccgtgctagctgtgtggaacgcttgttttagtgttgtatccacatgtacgatctgtaacgttttcttgcttctcgcgtttcgtgttttcgtatggtatctatggtattgcaaagtccatggccacgatag

SEQ ID NO: 1016 - DNA, 1881 bp, Zea mays
  Clone ID: TF_ZmC509_1
ctcgagccgcacaactacaagacccacacacccgtcggtaaatgcaaagatcgcaagtccacggcccaccccccaaatcggccaatctccacttcttaagctccctgtcgcctccgcctcctcgtcgtccggcctcccgcgccaccaccggggcctcgccgccacgaatggagtacgagcgcatccacgagccactcccgcgccgtcagtccggcggattctccccagctaagctgcgagcgatgcttcgcgggctagagaaacaccagcgcaacagcggcgaggacacgtcgccggaggccaacgactccggcgagctcgacgaccggaggagcttggaatgctccacctccaccgagatgtcgagcaacagcggccacaggtcaaggaaccgggccccggacgacgacagcttcgactcggagagcagctcgtcggggccgcccacggtgaagaggtcggccgcggtggccgctttgctgccgcccttctctcggccaacgccgtccaagtgggacgacgccgagaagtggatttccagccccacgtccaaccgtactggccgtgccgggcctaccgctggaactatgccaaagaagtccgcattggcatttcctgaacatggagcccgccagccagccgttgctaaggtggtcacggatgtgcctactatcgctggaccattggttaagaattcagatggtctcgcccatcctgatttgcttaaacctgcacacgatgcttcaatagttgatggaccagctcctgcagttaggtctgtctctatgagagacatggggaccgagatgactccaattgccagccaggagccttctcggaccgcgactcctatgattgcatccagtccaacctcctctcggacaccaactcctcaacgcaccacagaattcagtgtgagcaatatagattctaacaagatggcgatgtctgaagaggaggtccatataagtacaagacaggaaattatggatcttggcgaaaggttaggcaagactactatagctgcatgggcaagcaaggaggagaaagctgctgcacgttccacggatactgcagccgataatgctgttgatgtcaacagggagaatcgagcggcagattggcaggaggcagagaaggcaaagtatcttgcaaggtttcatagggaggaggcaaagatccaagcttgggaaaatctccagaaagcgaaaattgaagctgaaatgaaaaggatagaggccaagatcgagcggaaacgggcgcgcgagcaagacaggctcgccagcaaactggcagcggtgagccaccgagcggaggcgaagagggaggccgcggaggcgaggcgggaccaggaagccgcgagaacggaggagcaggcggctcagatccgagaaaccgggcacacgccttcctccttctcatgctggtgctggtgcctgtgactctggttccttcactgcatgaccagcacagcacgtcacccaactgtaacatagcatgacccgtgagactgatctccggccatggtagaaaaatttgctcactgtacgacttgtgtagttccttggtctaatggtgtccagttttttggtgcctcgcggttggcggcccggatccgatacaccgggcatacgccttcgtccttctcctgctggtgctggtgcccgtgacacccagcatggacagtggtagaaaaattccaacggttctatctttccccatgcatgaacatggagaaggaaaccttcccgttatcgcgtcgtcgtcactcacgcggttgcatggagtggactggggtagtagggtggcgccacctgtcctcgtccaccttccacccctctcgcccggggctataaatggttacgagatccggatagcgcg

SEQ ID NO: 1017 - DNA, 1506 bp, Zea mays
  unsure (1)..(1506): unsure at all n locations
  Clone ID: TF_ZmC2853_1
ctcgaggccgcccgggtcgcccatcccatccgcctctccttcggcgataaactccgtggtccgcagccaccgagccgagcccggcacagacgctactggcacgcacgcaccagcaccagcaccacaccacatgaatggtggagcctagcacgggcagctagctcccggccggcgacgtgacgaccaccaccaccacatgttgcatgagcagcaggcaccgccaccggcagtagcagcgccaccgccatccatcaaccccgacgacgacggcgcccgcgatgtcgaggtcaccacgttccgcgacatccaccctctgacgcccgacgcgccgccgcccgcctccgcgtcctgggacaccgccagccaccgctccttgtcgtcgtccgacgaccagcagtacatgacgatgagccgcgagttcacggccatggtcgccgccggggcgaccatgcagcccggcggctacgacggcgccgccgaccagctcaccagcatcggcgaggacgagctggaggagaccaacccgctggccatcgtccccgacagccaccccatcgccacgcccgccaggtccagggcgtccgggctggaggtcgtgcccgcgggcccggcgccgcagccgcagccgcagccgcccgcgcacctggaggccagccaggtcaagaaggaggaggtggagaccaaggtcacggcctggcagacggccgaggtcgccaagatcaacaaccgcttcaagagggaggatgtggtcatcaacggctgggagaccgagcaggtggagaaggcctccgcgtggctcaagaagatcgagaggaagctggacgagcaacgcgccaaggcgctggagaagacgcagaacgacatcgccaaggcgcggcgcaaggcggaggagaagcgggcgtcggcggaggccaagcggggcctcaagctggccaaggtgctggagctcgccaacttcatgaaggccgtcggcagggtgcccaccaagcgctccttcttctagccagccgactaccgctaccacctccgtctctccctgcctgcgtgtgatcgatgtacgctcgctgctgcatccgagaacctaactgtaaagaaaaaaattgtaagctgtatacgtactactgcctgctatggtcccctgtgatgtctgtcatccatcacagggtgccagttgttctcttctctttctcttctcttctcttctcttggcttgtatatcggatccatatgctggtggtgcttgaacgaactgtcgttgtttgcttaaccgtgcaaacatatacagtggtatatagtatatacactacattcaacaccccgtggaaaaaaaaaaaaaaaaaaaaaaaaaaaaaaaaaaaaaaaaaaaaagggcgggccggtcttaaagagatccaagacttaccgtaccccgtgccatgcgcacgncatagatttcttctatagtggtcaccctaaatttaattnacctggcgcgccgcgtttacaacgtccgcgactggggaaaac

SEQ ID NO: 1018 - DNA, 558 bp, Zea mays
  Clone ID: TF_LIB3689-224-Q6-N6-G2
ttttttttttttttttttttttttttttttttttttttttttttttttttttttttttttttttttttttttaaacaacaccaacaacggggggccctttaaactacacaaaaaaaggtttttggccaagctttcaaaatgtcccccaccaaaccccggcctgggaagcgatttcagtttttacaggagcagcggtgggctttacaaactttgaaagaccccctccccacttgatggaggggggggcccaagcaatcccggggggacgtttttaacttttggctcggcctgactgggaaggttttttaggctccaaagcaaccgatgagctttttaggagcggggccgggggcccggtacttggaaaccatttcctgggccttaaggacctcctaaccgggtttggcctccaccatcgttcgctttttttgggcttccttgggtataatggaaaccttgttcttaatcttctctgaaaattaagccttttttttttccagtggtccctaaatctttttaagttaagcttttatgttggctttcttggggtttccccat

SEQ ID NO: 1019 - DNA, 583 bp, Zea mays
  Clone ID: TF_LIB3632-055-Q6-K6-C12
gacacacacacacactcatcaacagcagttaagcctctcccaccaagacaggaacattggtgaagaggaggtcaaaaacgtggaggtggatggtcaccaatgagccccaggcgggggagaaagaggacgtaggcgatgacaaagccgtaatcctcgagagcgacccggcgtctcccgcgtcaccggactactactgcaaaggcctgggcattccatataaaattacgaatgagacctggtcgcgagaacactgcctgtgcgaaatatggtggctgcaatgacaagcatctaactattgcaaaggtgtaaacagagaagaggaactctttcatcaaaccttgggaagagaatgaaaagacaaaagctctgaacaaggctgctaataaagaattcgctattctttcttgggaaaacacaacgaaagcaaacatagaacttttactgaacaagattgaagaacaactgtaaaagatcaatgctgtatatgcatgacaacatgaagaacaaggctgccctgatacacaggggagcccaagagaagcgagctatggtggaggcaaaacgcggtgaggaggcttctgaa

SEQ ID NO: 1020 - DNA, 576 bp, Zea mays
  unsure (1)..(576): unsure at all n locations
  Clone ID: TF_21214887
gtgactccttaactatacatnnnnnngtttcacatcaagcatccaacatgtacacgtcttggaagcgatatctatatatacaggagcagtaggacttacacactttcgaacacacactacacacttgatagagcgaggtgaccaagcaatcactggttgaggtttctcactttctgctcggtgggacttggaacatttcttaggctccgaagcacccaatgggcttcttaggggcgtggccggtggcccgatacttggcagccatctcctcggccttcaggacctcctcgccgcgctttgcctccaccatcgctcgcttctcttcggcttccctgtggatcattgcaaccttgnnnnncatcttctcagcatattcagctttcttcttttccagttgttcctcaatcttcttcatttcagcttctnnnnnnnnnnnnnnnnnnnnnnnnnntgaaagaataacagatactttcttagtagccttgttatcagcttttgccttctcattatcttcccatgctttaatcagagagtcctcttctccgtttccacccttcaagagcagatctctgatac

SEQ ID NO: 1021 - DNA, 410 bp, Zea mays
  Clone ID: TF_LIB4764-010-R1-M1-F7
ggccgcttttttttttttttttttcttttttttttttttttttttttttttttttttttttttttttttttttttttttttttgtttttcatgtcttgtaatacaagagagactataacaaccttggattacaaaaagagcactagatgagaatacgaaactaatacacacacgaaacagagcataatccatagcaacggccacgctaggaagaggccaaagagattggagaggccctcgaccttggcgcggttcttggcggccatttcctccgccaggaagatgtgcttgccttgcctggcctccgtctgctccctggtctcctccggcgtcctgtgcaccatcgccagcttgggcttgatctgcacatcatacaccggcttctttttctgcagccgctccacgagctt

SEQ ID NO: 1022 - DNA, 1611 bp, Zea mays
  Clone ID: TF_ZmC509_2
cattgggtacctcgaggccggccggggaagatctcaagtccacggcccaccccccaaatcggccaatctccacttcttaagcctccctgttgcctcgcacggcctccgcctcctcgtcgtccggcctcccgcgccaccaccggggcctcgccgccacgaatggagtacgagcgcatccacgagccgctcccgcgccgtcagtccggcggattctccccagctaagctgcgagcgatgcttcgcgggctagagaaacgccagcgcaacagcggcgaggacacgtcgccggaggccaacgactccggcgagctcgacgaccggaggagcttggaatgctccacctccaccgagatgtcgagcaacagcggccacaggtcaaggaaccgggccccggacgacgacagcttcgactcggagagcagctcgtcggggccgccgacggtgaagaggtcggccgcggtggccgctttgctgccgcccttctctcgcccaacgccgtccaagtgggacgacgccgagaagtggatctccagccccacgtcaaaccgtactggccgtgcggggcctaccgctggagctgtgccaaagaagtctgcattggccttccctgactatggaggccgcccgccagccgttgctaaagtggtagcgggatgtgcctaccaacgctggaccagatgtgggtttatattttcaggtctcgcccatcctgatttacttaaggctggacacaatgcttcagtagttgttgacggagcagcacctgcagttaggtctgtctgtatgagagacatgggaacagaaatgactccaattgcgagccaagagccttctcggaccgcgactcctataatcgcatctagtccaacctcctctcggacaccaaccccgcaacgcaccgcagaattcagtgtgagtaatatagatcctaacaagatcgagatgcctgaagaggaggtacagatgagtacgagacaggaaattatggatcttggtgaaaggttagggaagaccactatagccgcatgggcaagcaaggaagagaaatccgctgcacgtttcacggataccacagcctacaaggctgtcgatatcggcagggagactcgagctgcagattggcaggaggcggagaaggccaggtatcttgcaaggtttcagagggaggaagcaaagatccaagcttgggaaaatctgcagaaagcgaaaattgaagctgagatgaaagggatagaggccaagatagagcggaaacgggcgcgcgagcaggacaggctcgccagcaagctggcagccgtaagccaccgagcggaggcgaagagggaggccgcggaggcgaggcggaaccaggaagccgcgaggacggaggagcaggcggcccggatccgatacaccgggcatacgccttcgtccttctcctgctggtgctggtgcccgtgattttgacggatattttccgccaagtcacccagcatggacagtggtagaaaaattccaacggttctttctttccccatgcatgaacatggagaaggaaaccttcccgttaaaaaaaaaaaaaaaaaaaaaaaaaaaaaaaaaaaaaacaaaaaaaaaaaaaaaaaagcggcc

SEQ ID NO: 1023 - DNA, 1056 bp, Zea mays
  unsure (1)..(1056): unsure at all n locations
  Clone ID: TF_ZmC1422_1
ctccccctcctgccaggctgcgcagtctttctcctactagcttgtttgttaagccattcacttcccttgtttgttaagagctgagctacatttattctcttcttcttgagcccctggcctccccctcctgccaggctgcgcattctttctccagctctctgataagctagccagcgtcgtcgtcgtgtcttgttagttattagctctatctcgccgccctgcagctgctgatcgagtgagggaattcagcagcagcagcagcaggtagcatagcatagatatgacggcggcggaggtggaggccgccaaggacatcgccgaggagaaggccgtcgtgccgttgccaccgtcgcccgccaagccggccgacgacgactccaaggccatcgtcgctcttgtcgtcaaggacgctgctgctgggaaaccttctacagctattattggaggctcaactgaaagagatgcttacctcgccaagatcgtgtccgagaagaggctgagtctgatcaccgcctgggaggagagccagaaggcgagagccgacaacagggctgccaagaagcttgccttcatcacgtcctgggagaacgccaagaaagcggagatggaggcggagctcagaaagatcgaggagcaactgcagaagaagaaggcggcgtacgaggagaagctcaagaacaagctggcgatgctgcacaggacggcggaggagaggagggcgcagacggaggccaggcgcggcgaggagaccatcctggcggaggagatggccgccaagtaccgcgccaagggcgagggccccaccaagctctttggcctcttgaaagcgtgacctctgctatggagaatgccctgtttcgtgcgtgtattaatttcgtattctcaacaagtgcacttggtgtgtgtgctgtttgttattttctctcttgtattccaaggcttgcttgacaatatctgttgtattgtatttgtataggagtgcagtgcagtgcagtgctattctttctcaaaaaaaaaaaaaaaaatcttcataanacaacacananagggcgacgg

SEQ ID NO: 1024 - DNA, 642 bp, Zea mays
  Clone ID: TF_ZmC1422_4
gacgacgactccaaggccatcgtcgctcttgtcgtcaaggacgctgctgctgggaaaccttctacagctattattggaggctcaactgaaagagatgcttacctcgccaagatcgtgtccgagaagaggctgagtctgatcaccgcctgggaggagagccagaaggcgagagccgacaacagggctgccaagaagcttgccttcatcacgtcctgggagaacgccaagaaagcggagatggaggcggagctcagaaagatcgaggagcaactgcagaagaagaaggcggcgtacgaggagaagctcaagaacaagctggcgatgctgcacaggacggcggaggagaggagggcgcagacggaggccaggcgcggcgaggagaccatcctggcggaggagatggccgccaagtaccgcgccaagggcgagggccccaccaagctctttggcctcttgaaagcgtgacctcttgctatggagaatgccctgtttcgtgcgtgtatttcgtattcccaattgcacttggtgtgtgtgtgtacgtgttgtttgttgttttctcttgtattcgatggcttgcttgacatctgttgtattgtatttgtatagaagtgcagtgcagtgcagtgctattctttcttcccc

SEQ ID NO: 1025 - DNA, 400 bp, Zea mays
  Clone ID: TF_LIB3159-017-Q1-K1-G7
gacccacgcgttcgctatggttgaagcaaaacacggttaggaagtccttattgcccttgagatggctgcctatttctgggggggctaccactctcctaagaagctcatcggttgctttttagcctaaaaaaccttccaagtcagaccgaacaaaaagtgaaaaacttcatccagtgattgcttggtcctttcgctctatcaagtgtgtaatgtgtcttcgaaagttttgaaagcctactgctgcttgtgcatatacttatatcactttcaatgcaagcctatcgttgtgttcatttttaatgcttgacgagaaacattcttgttttttatttaatatgtcaccctttttgttgttgttgttgacatttaatacagacattttctttttcttttttgtgtt

SEQ ID NO: 1026 - DNA, 2086 bp, Zea mays
  Clone ID: TF_ZmC4686_1
gatatctcagctgtaccagtgcctcttcctgcgatctggtcactggtattttgaccactggtgcccactgcccagacccggtgctcgccttctcccctcccctcaatctccagcctctctttctcgctcgctggccacccgccgcaccctccccatcaggccagcagcgaggaagaatggagtacgagaggattcatcagaaagcccagcctggtgctctttctccaacaaagctgaggatgaagatcctgggagcccacaatcgagttagagtcatcaccagcaactcgtcatcgcggacgtcgcctgcgaaaaccatcgaggcttcacaggcgcagaacaggctactagtttgtgatgttcttgaagaagacagcgcagatagcacaaaacacccgtcggcaactaacaaaaccgaagccgtagaaaaggttcaaaaggatccagcagtggacatcagtcaagtgcagaacgcttccaccagttcggctgctaagccagcgacaggcagctcgagtatgatacagatacacccactgagacccgcggaagaagacagcactaccgaatgcgacagtggtctcgacaacgccagcactagcagcttcgagttccacggagtggagaaggcggcggcgacgcagaatccagcagccgggtacttgtccaggcagacttccatttcctccaagtggaatgacgcagagaaatggatcgtgagccgccagaatgtcagtcagaagaacaacgtcgccaagggcgcgttgcagaaccagacagtaaaccagatgagctccgccgcagccaggggcgccgttgtgcccaaaatctctgctcgtcccgtgcagaaaatgaagagagtgaatccagctttgtctgctccgcgcagcatactggagaggttgtccttcgcttcgtatcagcctaagttggttaggcatgcagatgtctgtccagttagtaacgctggtgctaactcagagcatcacaaggcaactgatactggttcatcgattgaagtgaagccctgcaacgatacgaatgatattccaacagtccagtcgtcggtgtccgtgagagatgtgggcacagagatgactccaatacctagccaggaaccttcaagaactggaactccactagggtcaaggacaccaactcgaagccctaactgttcagtaccgtcaacacctgtaggggggaggtcaatagcatctcctcctggagaagactgcacagacgatggcccatttttccacaggaaatgcggcgtacatgcaaatgaattgtcagatactgagacgaggcttaaaacaaggcaagaaatcgctgcgcttggcatacagctaggaaagatgaacattgctacgtgggccagcaaagaggagctagagctagtctctgcggcaccgagcatcgctgatttggagcgcatcaggaaggaatatgctgctcgtgctgcatcgtatgaggaggcagaaaatactaaacatacagcaagattcaaaaaagaagaggtgaagattgaagcttgggagggtcgtcaaagagcaaaaattgaatatgaaatgagaagaatagaggaatttgctgagagaatgagaagtgaggccatggaaaagatggccgaaaagctagagatgacgcgccgcatagccgaagagaaacgagcttcggccaacgccaaaatgaaccagcaagcagctatagcggttcagaaggccgagaagattcgccaaacgggacgagtcccaggatcgagtatcctacgctgcggtggctgcttctgtggaccgtagtagatcatacataggattcgacagctagtatgttggtctgggatatatagtggtgggaaacctgaactccaccctctacaagtcagcattccttgattttagcatgaaaaaaggaatgtctctaaggtattcagatgcaaacgtgttcttgtttgtcatgtatgtaaattattccaatgattttaacttgggtcggtgtacaaggtaaccagctgttcgttggttaacgaagaagtcacgaatcgttcaaacattatgtttattattatgcctaaaattctaaccgt

SEQ ID NO: 1027 - DNA, 1766 bp, Zea mays
  Clone ID: TF_ZmC4686_2
gtgatcttcttgaagaagtttcagacagcgcagatagcgcaaaacacccgtcggcaagtaacattaacaaaaccgaagccgtagaaaagtactcagcagtggacaacagtcaagtgcagaacgcttccaccagttcggctgctaagccagcgacaggcagctcgagcatgatacagatacacccagtgagacccgcggaagaagacagcactaccgaatgcgacagtggtctcgacaacgccagcactagcagcttcgagttccacggagtggagaaggcgacggcggcgacgcagaatccagcagccgggtacttgtccagacagacttccatttcctccaagtggaatgacgcagagaaatggatcgtgagccgccagaatgtcagtcagaacaacgtcgccaagggcgcgttgcagaaccagacagtaaaccagatgagctccgccgcagccaggggcgccgttgtgcccaaaatctctgctcgtcccgtgcagaaaatgaagagagtgaatccagctttgtctgctccgcgcagcatactggagaggttgtccttcgcttcgtatcagcctaagttggttaggcatgcagatgtctgtccagttagtaacgctggtgctaactcagagcatcacaaggcaactgatactggttcatcgattgaagtgaagccctgcaacgatacgaatgatattccaacagtccagtcgtcggtgtccgtgagagatgtgggcacagagatgactccaatacctagccaggaaccttcaagaactggaactccactagggtcaaggacaccaactcgaagccctaactgttcagtaccgtcaacacctgtaggggggaggtcaatagcatctcctcctggagaagactgcacagacgatggcccatttttccacaggaaatgcggcgtacatgcaaatgaattgtcagatactgagacgaggcttaaaacaaggcaagaaatcgctgcgcttggcatacagctaggaaagatgaacattgctacgtgggccagcaaagaggagctagagctagtctctgcggcaccgagcatcgctgatttggagcgcatcaggaaggaatatgctgctcgtgctgcatcgtatgaggaggcagaaaatactaaacatacagcaagattcaaaaaagaagaggtgaagattgaagcttgggagggtcgtcaaagagcaaaaattgaatatgaaatgagaagaatagaggaatttgctgagagaatgagaagtgaggccatggaaaagatggccgaaaagctagagatgacgcgccgcatagccgaagagaaacgagcttcggccaacgccaaaatgaaccagcaagcagctatagcggttcagaaggccgagaagattcgccaaacgggacgagtcccaggatcgagtatcctacgctgcggtggctgcttctgtggaccgtagtagatcatacataggattcgacagctagtatgttggtctgggatatatagtggtgggaaacctgaactccaccctctacaagtcagcattccttgattttagcatgaaaaaaggaatgtctctaaggtattcagatgcaaacgtgttcttgtttgtcatgtatgtaaattattccaatgattttaacttgggtcggtgtacaaggtaaccagctgttcgttggttaacgaagaagtcacgaatcgttcaaaaaaaaaaaaaaaaaaaaaaaaaaaaaaaaaaaaaagaaaaaaaaaaaaaaaaaaggcccctagggcc

SEQ ID NO: 1028 - DNA, 630 bp, Zea mays
  Clone ID: TF_ZmC262_9
cccacgcgtccgcggacgagtgggaacacaccaaagctagcctccgctccctccccttccagcttcgtctagacagagtccagcagacacggccaacagttaaaaccggttgctattagtacgcgcccgccaccacgctcgcacagacacacacacacacacacacacacacactcaacagcaacagctaagcctctcccacaagacagcaacatggctgaggaggaggccaagaaggtggaggtggaggtcaccaaggagcccgaggcggcggcgaaggaggacgtagccgatgacaaggccgtcatccccgcgaccgacccgccgccgccgccgccgccggccgacgactccaaggccctggccatcgtcgagaaagttgcagatgaacctgctcccgagaagcctgcccctgcgaagcaagggggctccaatgacagggatctcgctcttgcaagggtggaaacagagaagaggaactctttgatcaaagcttgggaagagaatgagaagacaaaagctgagaacaaggctgctaagaaagtatccgctattctttcatgggaaaacacaaagaaagcaaacatagaagctgaactgaagaaaattgaggaacaactggaaaagaag

SEQ ID NO: 1029 - DNA, 443 bp, Zea mays
  Clone ID: TF_LIB3137-040-Q1-K1-F12
attcggctcgagtcggaacgttgttataaacgttgctgttttcagataagcacgtaactcactatctatctatcaatcgatatctccgagttcagccgaaccaaactccgaagctatggcagagctccaaaccaaggttgaacctgttacggtcccggctccggtggatcccgagccaccgctagctgaggctccgccgctcgagaagaaagcggtggcggtgccaccacctgttccggctgcggcagaggaaaccaaagctcttgttattgtggagaaggagaaggagaatgagaagataccagaacctgtaaaaaagaacgcctcacgtggatcccttgatagagacattgctcttgcagaaatagagaaagagaaacgattgtctaatgtgaaggcttgggaagaaagtgaaaaatccaaagcagagaataaagcccaaa

SEQ ID NO: 1030 - DNA, 3389 bp, Zea mays
  Clone ID: TF_ZmC262_7
gcaaagtgtttaaataatgcactaagattcgttagtaagtgtttaaaaatgcattccttactgtttagctcaattgttggtaaccagtttgtactatttgtgatttggttatatttattggtccagcttgacgaagttgatgaggcggcaattgaaaaggaagataatggaaagatggaggacatcgattgcaatcatgacatccggattcatgaagatttgggtcatgtatgccgtgtgtgtggtatgattgtgagaagagctgattcaataattgattatcagtggaaaaaggcttcaaggagaagaacgaatggctatggaggacattcaaaagatgctgatgagatagattgtggtactgttaaactgtctgaagatttcatagtcgcagatattgctattcatcctagacatgctcggataatgaaaccacatcagttgggaagggtttcaactttttggttaagaatttgattggagacaagggccggccggcgcttctagctccgcccacaggtacagggaactcccacccccttacagcaaccattcagcttctcctagcagacagcaacatgacttcggcacgaggccaaaaaggtggaggtggaagtggaggtcaccaaggcggcgccggcgaaggagaacgccgccgaagagaaggccgtcatccccgcgaccgagccgccggccgcccaggagaagccgccagcgccggccgacgactccaaggccctggccatcgtcgagattgcagataaatctactcctgagaagcctatcgctgagaagcaagggggctccagtatcagagatctcgctcttgcaagggtggaaacggagaagaggaactctctgattaaagcatgggaagataatgagaaggcaaaagctgataacaaggctactaagaaagtatctgttattctttcatgggagaacacaaagaaagcaaacatagaagctgaaatgaagaagattgaggaacaactggaaaagaagaaagctgaatatgctgagaagatgaaaaacaaggttgcaatgatccacagggaagccgaagagaagcgagcgatggtggaggcaaagcgcggcgaggaggtcctgaaggccgaggagatggctgccaagtatcgggccaccggccacgcccctaagaagcccattgggtgcttcggagcctaagaaatgttccaagtcacaccgagcagaaagtgaaaacctcaaccagtgattgcttggtcacctcacacccaaacagaaagacattatttataagttggaagcacatgatcggttcaaaagaaatgcagtagggagtgcactgtacattcatccatgtctttcagaactttcagaggttaatgctgagcatagggctaacacctttagagatgatttagttgatagtctggtagattctatcactgtgagagatggcgtgaaggccaattttttcatgaatatcctgtcacttgctaattctgcaggagagaaagtgctagctttcagtcaatatatatctcccatgattttctttgaaaggctgctggtgaagaagaaaggctggcatgtggggaaagagatctttatgatctctggtgatactagccaagaagacagagaattggcaacggaccattttaacaactctgctgacgcaaaaattatgtttggttctatcaaggcatgtggggagggtatctccctcgttggtgcgtcgagagttgtcattctggacgtacacctgaacccatctgtcacccgtcaagcgattgggcgtgcattcaggcccggacagcagaagaaggtgtttgtgtacaggcttgtagctgccgattctgacgaggtaaaggtccatgagacagcattcaagaaagaagtcataccgaagctgtggttcgaatggagcgagcactgtactacggaagacttcaaacttggtcaaattgatattgatgactctggtgacgaactgttggatactaaagcaatccgcaaggatatcaaagcgctgtatagaaggtaggtaacaagctttgtggccactggacaccatgtacatattgcagtgctgaccgtcgagctgatccttaaactgaagaaagaggtgacgggtgttgcggtggctacattgcgcggtcattcccagctatatccgtggaatggcggcttcttttgttcgtagtatgtgccaacttggggcagcagtcagctgatccccagacacatttctagactcttttttaggctcaagtttctgagaattaacctgctatggcgtttagccttaagtaaatatttcgttcgcaacaataataacccagtaaacctaatttgttcttgtgcgtttgtggtggtggttcttgaaatttacctggcgccttcttcctgggctagatgctatgcaggtgtcacaggttggtttgttggcatgtagaatcgggaaatgctaatctcgaaagctcgtagtttccttttcccccccgggtgacatgtttattcacctcttactagttaccacgtccatttccaactataagatatgatactttggcttttgaagatacattacttttattacgtatagtgtatatcgccgccgccgccggccgacgactccaaggccctggccatcgtcggagaaagttgcagatgaacctgctcccgagaagcctgcccctgcgaagcaagggggctccaatgacagggatctcgctcttgcaagggtggaaacagagaagaggaactctttgatcaaagcttgggaagagaatgagaagacaaaagctgagaacaaggctgctaagaaagtatccgctattctttcatgggaaaacacaaagaaagcaaacatagaagctgaactgaagaagattgaggaacaactggaaaagaagaaggctgaatatgcagagaagatgaagaacaaggttgcaatgatacacaaggaagccgaagagaagcgagcgatggtggaggcaaaacgcggtgaggaggtcctgaaggccgaggagatggctgccaagtaccgggccaccggccacgctcctaagaagctcatcggttgcttcggagcttaagaagccttccaagtcagaccgagcagaaagtgaaaaacgtcagccagtgattgcttggtcctctcgctctatcaagtgtgtagtgtgtcttcgaaagtttgtaaagcctactgctgctgctgtatatactgatatcgcatccaaggcaggcgtttggtggtgtacatgttgaatgcttgacgagaaacattcttgtgtgtagttaagaggtcacgctgttgttgttgttgttgttgacattcaagcagacattttgttctaaaaaaaaaaaaaaaggccggccgctcgcgatctagaactagt

SEQ ID NO: 1031 - DNA, 832 bp, Zea mays
  Clone ID: TF_ZmC1422_2
tctctctctctctctctctctctgataagctagctcgcctgctgccgagtgataggaggagcgagatatatacatcgatctgaatccagcagcagcaggtagcatagcatagcatagcatagatggcggcggaggtggaggccgccaaggacatcgccgaggagaaggccgtcgtgccgttgccaccgtcgcccgccaagccggccgacgacgactccaaggccatcgtcgctcttgtcgtcaaggacgctgctgctgggaaaccttctacagctattattggaggttcaactgaaagagatgcttacctcgccaagatcgtgtccgagaagaggctgagtctgatcaccgcctgggaggagagccagaaggcgagagccgacaacagggctgccaagaagcttgccttcatcacgtcctgggagaacgccaagaaagcggagatggaggcggagctcagaaagatcgaggagcaactggagaagaagaaggcggcgtacgaggagaagctcaagaacaagcttgcgatgctgcacaggacggcggaggagaggagggcgcagacggaggccaggcgcggcgaggagaccatcctggcggaggagatggccgccaagtaccgcgccaagggcgagggccccaccaagctctttggcctcttgaaagcgtgatgacctctgtttcgtgtgtgtatttcgtattctcaacaagtgcacttggtgtgtgtgctgtttgttgttttctctcttgtattccaaggcttgcttgacaatatctgttgtattgtatttgtataggagtgcagtgcagtgcagtgctattctttcttccc

SEQ ID NO: 1032 - DNA, 1560 bp, Zea mays
  Clone ID: TF_ZmC1445_1
ttcaccgcacacccggcggcgccaagcccttcgaccaggtagctgaccagcgcgccccaaggcggtggagaaggcccagccgcagatggtctcacccggccgccactagaggctcatgttgagtgagcagacggcggagagcactagcagcagcggcggcggcgtcgagcgtcaataaagacaggagcagccggtggcggagaacgaggaggaggaggaggaacaggaggagttcagggacatccacgcgctgagcccgccgccgagccagccgtcgtcgtacggccgggcgcgcggcggcgagccgtgggggtccgccgcgggcgggagcaggcacacgtccgtccgctccgtcgggagcgacaccgcgcccagcgagcccttcccgactatgaccagggagttctcggccatggtcgccgcagcagccagcgccgcagcagccagccgtgacgcggacagcgacgtcgtgggcagggccgaggaggaggaggaggaggagctggaggagaccaacccgctggccatcgtgccggacagcaaccccatcccgtcgccgcgccggggcccgccgcccgccgccccgggcgccgacgcggcggcgctggtggccgccgacgggcacggaagccgcgaaggcgggggggtgtccgtggggcaggtcaggaaggaggaggtggagtccaagatcgccgcgtggcaggtcgccgaggtggccaaggtcaacaaccgcttcaagcgcgaggaggtcgtcatcaacggctgggagggcgaccaggtcgagaaggccagcgcgtggctcaagaagtacgagaggaagcttgaggagaagcgtgccaaggcgatggagaaggcgcagaacgaggtggccaaggcgcggcggaaggcggaggagaagcgcgcgtccgcggaggccaagcggggcaccaaggtggcgcgagtgctggagctcgccaacttcatgagggccgtggggagggcgccctccaccaagcgctccttcttctgaacccaccggcctcttcttcaccagttcctctgtcttgccgccgccgcctgtgcagttcagttcagttcagttgtcctgtgggtcggaccgttcaccgcttcactccacgggatcaggcacagtgatcagtgccgtgctagctgtgtggaacgcttgttttagtgttgtatccacatgtacgatttgtaacgtttccttgcttctcccgtttcgtgttttcgtatggtatctatggtattgcaaagtccatggccacgatagacagggaaagcatatgtatacaccattagaaggatgtgctctgcgcctctgcccgagtcttgaggacaggagctgcatgtatttttcaccaatataatggttgtgtatgtcaattacgaaaagatatgaacaccattaccaccgcgtaaaaaaacaacaaaaaaaactcactaacactaggtggacaaacgccccgcacgacctcataacttgacctctgtgccattagtcgtgtaaactttgtgcttgtctgctgcatgcaccgacgagcttcactacttggaacttca

SEQ ID NO: 1033 - DNA, 3606 bp, Zea mays
  Clone ID: TF_ZmC119_1926
atatacacatatattgaacaacattataattaatataatataaataagtaccattcaatatatcataaataagcattgtcaaacaacgcatacataagtgtactctaaatctaaactaaaatacaactgtttgcactaatgttaagcctaactttatatatgaattaaagtctccacacttttgtgaccaccaaatttgaattctattctaagttttcctgtacaacaaataggagaaaactagacatagcaaaaagctccaagcagcaaaagctgcccttgtgcttctccctgttcttgatgactcctacacgctcggtgttcctcccgccagtcaccatgaccatgttgtcgacgtcaaacttgatgaagtccatgatcttgttggtctccagatcgattttgatggtgtcgttggccttgatgagcgggtcgaggtagcggatggcgcgaccatcgtaggtgttcaggtaggggatgcctttttggccaaactgaacaaacctcaccttgcagagcttgaacatattggtctcgaccgaagctgagtccattgtaatctgctcgattgtcttcagtccctcatattgatccttcaacatcttcttatgataatcgttaaggtacactgtttgatcataaataggatatttaacagaagacactgcttgacatctagctgcacattcttcccgatgaacagctagatattcattaagctttggaagatcctgcctgcgaaatacatcccagacagcagcaccagccagggatccttctgaattattagtgtttggctcctcgatgtgtgaaatcgagtgtttgtgtgattgctcttcaatatccagattcaaattttgaacatgagtatttacatgaacactagttccattagcaatcctttcagatacatcagactgtacccttaccctcttgggacattggtaatgcacttcagttgcatgcattaacatgtgaaccacatcgcacatgttaatcattagatttgtcattgaatcacctttaccaagttcttggtgacttccatgtgcaattagcagtttcatccctaattcaggttgtaaggcatctggtattgttttctctttccttttccaaaattatccttattcccaatcactgctccgtctgggatttctagcttgacgccaggttttgcagtgatggtcactttccccttcagtacaattccagaaccgaaccaaacatcaccggaaaccttcaagctgtcaagctcaacaatgctaggtatggacttgaagcgaccaaggaagctcccaaccttcttgaactcaggaccaagttcaattgagggatttgatggatttgttctggctgaattacgtgtaacgaagccatcaaccaaggtatatagatcagactgtactagctgcaaatctgatgtcgccttaactggtaggaagcgggaccttggaacgttgataccaatggcatggtcaaagaactggtccaataaaactttatttgttatatttatatatatagtcacataaaagcatggtgatgtacatagtactttggctcaaatgcttccctgataataataggctccgtgtttttccaatgcaagattgataagaatcactctggagagggtcgcccatgctggggcctttagggctcatttggcagcctggtgaattgcacaccggccagccacagccagcgggggcaatacctgcattacctatcccacgtgttgtgcaatcctgtgggggcataggttccctgtgtccgtttggcaaagattgctgcaggtaacagacaagcagtgcaagagggacaagcatgcacatctacgaacaagcagtgcaggtggacaaaaggcaggtcacatgataatacttcttaaccttaacaaataagcatagtaattgaaatatgtaagaatcacagataattataaacatgaacatggaggtaccattgctggtgcttttatttgacaatataaatatttaattatttttagaaaaattctattttgcaccaaccaaagaattttacgaatcacaaagtctgcaaaatggaaacaatagccctagcagctagcaagagatagattggttgagctcttcctgattgtgttctttgtgtatggtgattcattgatcatcagaattgattctctgtaattctctaaagtaaactcagtgacacatataggattccatgcatcaactaaatgagaagaagctgcttttttaactctcagttccatggtttattttagagaactgctagaaaaagtgtggaaaaaatatttctcaataaaaaattgtttgatgatagagcttcttctaaattcagcgtgaaagattctaatgcttttcttcctttttctttaaagaaaaaatatagagctaggcacaaataattactagaacctacactcttcgggtctagaaacaacaagtaatctaaaaatggaggtcatcaacattgcgcagcgcttgctaaatcgcagttcctctgttggtgatggaaaaatgtttttttgattgacacaaccaccacatcaaacaacagatgagattattgttgtcagtaactcagcatctagcactaatcgtatgaccatagtcctagtgctgctcatcaaaatatgcatcagtttgatagcaccagagaatgaatgcatgtgtttgtgagaaatgcaaactgacatataattgaaaaccaagaaatgctaatatactctggcacaagaagaagaaatttactctcacagctacatgagggttcctttttaacataccagtatttagtaaactgtaacttgatctcagcttagctagttgctcagttcttaataggaacaagaatataaagcaagcctaaagtgcaatgtttaaaaaaactaagcctgaagtgcactgtttaaaaaaaactaagctatgtttaaactgcatgcacggatgcaccgaccaatttatcagaaaagacctaatcaaaagagaaagatttctaggtggagttctagattgcaagtttagattgcacgcatggatgcaccgatcaagctatcaagctaatctatcctaccagcagatcctcagcgatgatgcaagcaagcactagcagcttcttccataacgagaatcaaatatagacaacagatctaaacggaataagctaaaaaggtggaagctcaccagatcctcagtgtcttcttctacaatgagagaggtggcgatatagaagcggtgggtgaaggcgacgatggagggggactaggggaggtgccatagaagctgcgggtgatggagttgaccaccagatccagaggaggagcaccggctgctgaatccaaaggaagagacgagacgttccatatccgaccattggagggcaacgactggatctggaggaggtttgacggtgagcttcttcctatgtgtattcttcttcgccaaggactccagccccaacgctagcgggcccgggggacggcggttcactgaagatggagacgaggacatggtggcagcggtgctagggttatggggtttgtggaagacgaatgagagggaagttggctcgccgctcgcctcgtgccgaatt

SEQ ID NO: 1034 - DNA, 3409 bp, Zea mays
  Clone ID: TF_ZmC220_3
gccaccgaggaaagtggcgaggaaaacctccgggagaaggtgcaggttggtggcaaggtaaacctcacggaggtggggcaggaaggtggcgaggaaaacctcacggagaaggtgcaggaaggtggcgaggaaaacctcacggcaaaggagaatgaagggctagtggaggtctcaaaacccccccaaaggcgccggaaggatcctgttgcagacccctcttctcttgagtctagtggtttcatgcgatttcgggagaggaggaatgcttcagcgggtcaggagcaggggcctaagaagagaaggattactgaggattcaaacatgtgccatcagtgccagaggaatgatagcggaagagttgtacggtgccaaggctgtgccgtccgaaaaagaaaatacagatattgtgtgaagtgcattaaacgctggtatccacatttatcagaggatgattttgcgaacaattgcccagtttgtcaaaataattgcaattgtaaggcttgtctgcggggagacataacccgagccaactcgaggaaaaaaaagaagttactgcaaataaattctggaggatatagtgtatctgaacaagataaaattaaattctcaatgcgtatcgtgcactttttgcttccttggctgaaacaattccatcaagagcagatgcaagagaaaagtgccgaggctgcaactaaaggtattgatgcagacaaactggaggtccctctaaccatttgtggaaaaaaggaacggatatactgcaacaactgcaggacatctattgttgacttccacagaacctgcaataaatgtaactatgatctctgtctccagtgctgccaggagcttcgtcgaggccttgtttctggtaatgatggcaaggttgatggtggaggcaagcaagattttctatcgggagttagtcatgataaaatcataagcaaagggccatccgatggacagaatgacatgttgatagatagtgtagttcctggtgaaaacaacacttctagcttgagacagtggagtgtgaataaagatggaaccataccttgcccaccaaatgcatttggtggttgtgggagctctcttcttgaactgaagtgcttgtttaaagagaagtttattgctgaattactggagaaagctaattcagcgctcaataatgaaatggaggtgaagatagaaggatcaaaatgtccctgcttcactgaatccggtgacatggatgatggtatatcacggaaatcatcttgcagggagaattcctgtgataactacatatattgcccaaccgctacagatgtccaaaatggaagtttagaccatttccaggagcattggttgaagggtgaacctgtaattgtccgtgatacacttgcgttgacttctggattaagctgggaaccgatggttatgtggcgtgccttacgagaaaagaaagagaaagttgagaggctctcagttcttgctcttgaatgcttgggttggtgtgaggtttgtaatattctcatgactgttaatagctcgaaataataagacattctgggtccagacgatttgcccctgttgcttaagcttaaagattggccaccacatagttcttttgaggagcggctcccaaggcatggtgcagagtttatgtctgcattgccatttcgtgaatacactgatcctaaatggggacctcttaatctggcagtaaagcttcccgataatgttaataagccagaccttggtccaaagacttatattgcatacggtgtttccaaagagttgggaattggtgattctgtcaccaagcttcactgtgatatgtctgatgcggtcaatatcctcacacatactgatgaaataaaactcaaagcaaaaaggattgccgcggtggaaaagaagaagcggtgtttaggaatgaagattctaatctaccaaggaagcaagtggaggccttcaacggtgtgcagattatgttggtatgccaacagctcccagtgaatctaacaaggagccaaggcctgaagagtgtgtaaatgaactgggcattaaacaaccagtacagcatgttgcttccgaggagcaggaaggagttcaagatgatgccaaggcagatgcaaatgttatgaatgtttcttttggtaagggaaaatcagaagattcttttggcacaattaatggtaccaacagtggagataaaatagaatctcctagtggtttagcagaaagaacattgactcagcctaccactaagggttgcagtaagcagcgtggccgtagttctaatggtagaggaaacaggactaaaaaaatagaagaggggaatgcgtctggactaattgctgtggctcccgagtcagaagatgatgatgatgccccatttatagatggaaaccaagcagagggtggtgcactgtgggatatttttcgacgggaagatgtgagcaaactgcatgattatctaatgaagcatgctgatgagtttagacattgcaactttgagccagtgaagcaggttactcatcctatacatgatcagtgtttttatctaacaattgagcacaagagaaagcttaaggaagaatatggagtcgagccttggacatttgaacagaagctaggtgaggcagtatttatcccggcaggatgtccccaccaggttagaaatttgaagtcttgcataaaggttgcactagattttgtttctccggaaaatgtccgagagtgcatcaggttaacagaaggtttccgtctgctgccgaagtggcataaggtgaatgaagataaactcgaggttaagaagatagctcttcatgcattcaatcaagctattaaagatatcactgatgaatcatctaatagcaatgaaagaatgaagccaaatggttacacttggagcagggctcacaaaatattgatgtgctggtgaacaaaggtgtagggttttctccaagatgtcggatttgacactgaagaagattgagtattggaagaggtccgattgaacatttggcactgacattcaccaacttgttcaaatagaggaaaaggatatggaaatggagaaagagcgcatgtatgcatgtgtaggtcagggagtggctcggatcagccttgagtcaatttccactgcgttttcttcggttatggatgagcacgaggagtaaaagaaacagaagaaggctgagtgtgattctcatatgcttattttcttgtcctgtgtaatggatgtgtgtatgtgaaccatatgcgaacttaaacgtctttgtttgtaccggtcaggccattctgagtgagggttccgtctcttctttttaggactccactgcgaggtgtcggtgtgtgagaaatggtgcaaacaagtttctgagaaatggtgcaaacgtgtgtatgaaactctacgaggcatactctt

SEQ ID NO: 1035 - DNA, 956 bp, Zea mays
  Clone ID: TF_ZmC119_1493
ggtgaaaatgtagtatttgaatcttgaaccctgtgttcacaatgtaacaatttcggtctaattattcttcagatgctaccaacagagattattgtgctaacaattctacatgagctttccagcgcctttttatcttgttctcaggagcttaactgttactcttcctaacccacaatatacaggtaaagtcaatgtctaacccaataagaattagaatgtgttcctttcatatgacacaatataatacatgtacaagcactatatctacttcaatcttctgaatggcatgtcataatttcaccaggcccccacaatctcaactgcaagataccttccgtttgtttactcttgccaagttctctgaaaccgccctagtcaaattttgatcctcaaaactagcatcaagattgaacttgggatcaagggttattctctgaatttctctaacagcagaacttgctgcatataaggagatcttttttacctcaagcatcttcagttttgcaagatgaccatttggcaggcaacggatctcttgggacagccggactgactctggcaaactctcaggtgacaaaaaattgagagccaattgaaccgtggactggaggtttttcaattggaaaggacacccagctggaatgaaaacagcctcaccaatatgttggtggaatgtgaagggttcaattccatattgatccttcaacaccttcttatgataatcgttaaggtacacagtttgatcataaataggatacttaacagaagacactgcttgacatctagctgcacaatcttcccgatgaacagctagatattcattaagctttggaagatcctgcctgcggaatacatcccagacagcaccagccagggatccttctgaattattagtgtttggctcctcgatgtgtgaaatcgtgtgtttgcccgctactctgcgttgttaccactgt

SEQ ID NO: 1036 - DNA, 308 bp, Zea mays
  Clone ID: TF_LIB3115-030-P1-K1-C5
cgggtctggaattccgggtcggaccacagccgtccgccaacgcttccggggccccttggccacagattaaagtttagggaggagtttggaatcaagccatggacttttgtccaaagactgggaaatccggttttaatacctgttgggggtcctaataaagaccggaatctaagagtttgcaccaagatagttttggattttgtttaaccagaaaacattcataaatgttttactttaaccgaggttttccggagacttcaagggggccccagggcaaaaaaggaaaaactagaggtgataaaaataat

SEQ ID NO: 1037 - DNA, 1179 bp, Zea mays
  Clone ID: TF_ZmC1114_1
ccggattgggcgatagccgtactggtcgcgtccgtctttcacgcccgcgcgatattaaaaggtgagagggtgtcagcttgggaaccatcatgcccggtataccccaccacaatataaacctattcgatctagctttgctcacatttgtctgatgcagttaatgttttaatgcataccatccgtgttgtgccttctgaagaacaaaaagaggggataagagatttgaaaataaggcatgcagaacaagataaaaaggaatgcttggggaattcatcaatagatggaaataaaacaagcatggagcatgctcatatatcatcagtttcctgcgaggatggtggaggtgcactatgggatatttttaggagggaggatgttggaaagctgaaagagtacctcacaaaacattccaaagaatttcgccatatgtactgttgtccagttgaaaagatatttaaccctgtacatgatgaaacattttatctgacgagtgggcacaagagaaagctcaaggaggagtatggaatcgagccatggacctttgtgcaaagacttggagatgcggttttcatacctgctgggtgtcctcatcaagtacggaatctaaagtcttgcaccaagatagctctggattttgtatcaccagagaacattcagcaatgtctcagcttaaccgaggatttccggagacttccagtgggccacagggcaaaagaagataaactagaggtgaagaagatgatcgtctatgccgttgagcatgctttggcgattctgaaagagccttgcacaccccgcgagtccgcctgaacaagctggcatcatatctgggtttctgctagtcaacgagggaaactagagaacatgatgcgatgttgtgcgacagtagacgtggggtagcgctagttgctttgcttgtcggcacaaataataatcttggaaatattactaataagggctcggttaggaagggattggaggagattaatttttttttattttaactgaatagaaagagatttgatgagatccctatacaatcgaaaaaggcctaaaatggtagattttgctgatggtgtgcatcactgaaaagctgggcatgctgaaaaaaatagatgtcatactgtaaatctacaaaatgtggcttcgtttccaaaaggccttgcccctgttatctat

SEQ ID NO: 1038 - DNA, 1345 bp, Zea mays
  Clone ID: TF_ZmC119_1806
gaacaacattataattaatataatataaataagtaccattcaatatatcataaataagcattgtcaaacaacgcatacataagtgtactctaaatctaaactaaaatacaattgtttgcactaatgttaagcctaactttatatgaattaaagtctccacacttttgcgaccaccaaatttgaattctattctaagttttcctgtacaacaaataggagaaaactagacatagcaaaaagctccaagcagcacgtggatggtctcaaagctgcccttgtgcttctccctgttcttgatgactcctacacgcctggtgttcctcccgccagtcaccatgaccatgttgtcgacgtcaaacttgatgaagtccatgatcttgttggtctgcagatcgatcttgatggtgtcgttggccttgatgagcgggtcgaggtagcggatagcgcgaccgtcgtaggtgttcaggtaggggatgcctttttggccaaactgaacaaacctcaccttgcagagcttgaacatattggtctcgaccgaagctgagtccattgtaatctgctcgattgtcttcagtccctcatattgatccttcaacatcttcttatgataatcgttaaggtacactgtttgatcataaataggatatttaacagaagacactgcttgacatctagctgcacattcttcccgatgaacagctagatattcattaagctttggaagatcctgcctgcgaaatacatcccagacagcagcactagccagggatccttctgaattattagtgtttggctcctcgatgtgtgaaatcgagtgtttgtgtgattgctcttcaatatccagattcaaattttgaacatgagtatttacatgaacactagttccattagcaatcctttcagatacatcagactgtacccttaccctcttgggacattggtaatgcacttcagttgcatgcattaacatgtgaaccacatcgcacatgttaatcattagatttgtcattgaatcacctttaccaagttcttggtgacttccatgtgcaattagcagtttcatccctaattcaggttgtaaggcatctggtattgttttctctttccttttccaaaattatccttattcccaatcactgctccgtctgggatttctagcttgacgccaggttttgcagtgatggtcactttccccttcagtacaattccagaaccgaaccaaacatcaccggaaaccttcaagatgtcaagctcaacaatgctaggtatggacttgaagcgaccaaggaagctcccaaccttcttgaactcaggaccaagttcaattgagggatttgatggattt

SEQ ID NO: 1039 - DNA, 447 bp, Zea mays
  Clone ID: TF_LIB4172-054-R1-L1-D4
aattcggcacgaggcatatattgcccaaccgctacagatgtagttatcacaagtttagaccatttccaggagcattggttgaagggtgaacctgtaattgtccgtgatacacttgcgttgacttctggattaagctgggaaccgatggttatgtggcgtgccttacgagaaaagaaagagagagttgagaggctctcagttcttgctcttgaatgcttgggttggtgtgaggtcgatgtaaatattcatatgttttttgcggggtattcaagtgggcttgttggtccagacgatttgcccctgttgcttaagcttaaagattggccaccacatagttcttttgaggagcggctgccaaggcatggtgcagagtttatgtctgcattgccatttcgtgaatacactgatcctaaatgggggtctcttaatctggcagtaaagcttccc

SEQ ID NO: 1040 - DNA, 2279 bp, Zea mays
  unsure (1)..(2279): unsure at all n locations
  Clone ID: TF_ZmC3861_1
ctgaaagcaaatcagtaagggaggctgcaagcaggaagggctcaagcgataacttcctatactgtccagttgctactggtattcaagatgatgacatagtgcattttcagatgcattgggcaaagggtgagccagttgttgtttctgatgtccttcagttaacctctggtctgagttgggagccaatggtaatgtggcgggcattgcgggaaagatccaaaggcaaagcagaagatgagcaatttgctgtttgggcgatagactgccttgattggtgtgaggtggaaattaacatacataggttcttttcgggatatacaacaggcagaactcatgctaggactcactggcctcagatgcttaagctaaaagactggcctccttctagttcctttgacaagcgattgccgcggcatggtgccgaatttattagcgcattgccatttcgtgagtatactgatccacggtatggcccgctaaatcttgcagccaagcttcctgctggtgtcttgaagccagatcttggacccaaaagttacattgcttatgggttctacaaagaattgggcaggggcgattctgtgaccaagcttcactgtgacatgtctgatgcagtaaatatcttaacacacacagctgaagtcacttgtcagactgatattggcttaattgaaaaaatccaaaaagacatgagagagcaagatctgcaggaactatatgggggtctaaattcccgctctgagctcaagttgtcaccagctccaactgaatgcagggatgaatctgttgatgaaggattgaagacctcatatagtagagaaggcaattgtgtaaatagagacaattataatggtttggacatcaatgcattaccacctgatgacgatggagatattgcaaaggataaagaatcatctcctggatcagagtggcaaagtgaactaggtcagagttcagatcacaacaatggggtcaacacaactgatgagatgtacaatggagctcattacatttcacacaatcaaaaaagcactggcaggaaagttggcattaaacctcaagaagagaaatctgaaaaggctgattgcagtggcacatgtgcttatctaaaaggaagttctgaagataatccggaaatgcctattgtggagagctcagaggagcagagcaccggtggtgctctatgggatatcttccgcagacaggattctgataaattgcaagattatcttaggaagcattgctctgaattccggcatatttactgcaatccagtcaaaaaggtatttcacccaattcatgatcagtccttttacttaactgaggagcataagagaaagctcaaggaagaatatggtattgaaccctggacgtttgaacagaagcttggtgaagctgttttcattcctgctggatgtcctcaccaagtgagaaatttgaagtcctgcatcaaagttgcgcttgattttgtttccccagaaaatgttggtgagtgtgttaagctgacggaggagtttagacgacttccatctttccacaaggctaaagaagacaaactagagatcaagaagatggctgttcatgccctgaacgaagctgtaaacttcctggatcctcgttcctcagaagagttgaaaattggggttggtgagaacatctgtgaggatgaatctgtagatgagaaggagctgccgcctagaagaggagttgaagtgtcaggcgttgatgagaagcctaaatagaaggcgagggaggcatcaagtccaaaagtgaagctgctgatgaggtcgcccattttaggttctcggaatcgtggttaattgatttgtcaaagcccctgttcatgtatggtgatcgctggctgacaccgatggatgaagagaagcaggacacgtgtgtgctgctgatatgtcgtgtcggcgagtgacatgaatagcatccctatccctatggtattattggtcttttatgtttatgtttgatcatttgtcttattcagttttttttacaaataataaaacaagaggttaaaagtaaatgacgtcatttatttaattttaagacggggcaaatgcaaaacaaaaaatagccgagagggaagcgtggtcacagaatcgcgcctgccgcattctttgtggaacccataagcgntgcgtcttttgggtcgaggatctggcttcaagacaccagctggaagcttggctgcaggatttagcgggccatatcgtggatcagtatactcacgaaatggcantgcgctaataaattcggcaccatgc

SEQ ID NO: 1041 - DNA, 1942 bp, Zea mays
  Clone ID: TF_UC-ZMFLMO17207D05_FLI
gccaacttccctctcattcgtcttccacaaaccctataaccctagcaccgccgccaccatgtcctcgtctccatcttcaatgaaccgccgtcccccgggcccgctagcgttggggctggagtccttggcgaagaagaagacacatacagccggtgctcctcctctggatctggcggtcaactccatcacccgcagcttctatggcacctcccctagtccccctccatcgccgccttcacccaccgcttctatatcgccacctctctcattgtagaagaagacactgaggatctgggaacctatgccccacaggactgcacaacacgtgggataggtaatgcaggtattgcccccgctggctgtggctggccggtgtgcaattcaccaggctgccaaacgagccctaaaggccccagcatgggcgaccctctccagagtgattcttatcaatcttgcattggaaaaacacggagcctattattatcagggaagcatttgagccaaagtactatgtacatcaccatgcttttatgtgactatatatataaatataacaaataaagttttattggaccagttctttgaccatgccattggtatcaacgttccaaggtcccgcttcctaccagttaaggcgacatcagatttgcagctagtacagtctgatctatataccttggttgatggcttcgttacacgtaattcagccagaacaaatccatcaaatccctcaattgaacttggtcctgagttcaagaaggttgggagcttccttggtcgcttcaagtccatacctagcattgttgagcttgacatcttgaaggtttccggtgatgtttggttcggttctggaattgtactgaaggggaaagtgaccatcactgcaaaacctggcgtcaagctagaaatcccagacggagcagtgattgggaataaggataattttggaaaaggaaagagaaaacaataccagatgccttacaacctgaattagggatgaaactgctaattgcacatggaagtcaccaagaacttggtaaaggtgattcaatgacaaatctaatgattaacatgtgcgatgtggttcacatgttaatgcatgcaactgaagtgcattaccaatgtcccaagagggtaagggtacagtctgatgtatctgaaaggattgctaatggaactagtgttcatgtaaatactcatgttcaaaatttgaatctggatattgaagagcaatcacacaaacactcgatttcacacatcgaggagccaaacactaataattcagaaggatccctggctagtgctgctgtctgggatgtatttcgcaggcaggatcttccaaagcttaatgaatatctagctgttcatcgggaagaatgtgcagctagatgtcaagcagtgtcttctgttaaatattctatttatgatcaaacagtgtaccttaacgattatcataagaagatgttgaaggatcaatatgagggactgaagacaatcgagcagattacaatggactcagcttcggtcgagaccaatatgttcaagctctgcaaggtgaggtttgttcagtttggccaaaaaggcatcccctacctgaacacctacgacggtcgcgctatccgctacctcgacccgctcatcaaggccaacgacaccatcaagatcgatctgcagaccaacaagatcatggacttcatcaagtttgacgtcgacaacatggtcatggtgactggcgggaggaacaccaggcgtgtaggagtcatcaagaacagggagaagcacaagggcagctttgagaccatccacgtgctgcttggagctttttgctatgtctagttttctcctatttgttgtacaggaaaacttagaatagaattcaaatttggtggtcgcaaaagtgtggagactttaattcatataaagttaggcttaacattagtgc

SEQ ID NO: 1042 - DNA, 2584 bp, Zea mays
  Clone ID: TF_ZmC220_2
tgcatacggtgtttccaaagagttgggaattggtgattctgtcaccaagcttcactgtgatatgtctgatgcggtcaatatcctcacacatactgatgaaataaaactcaaagcaaaaaggattgccgcggtggaaaagaagaagcggcgtttaggaatgaagattctatggatttctgatatcagaggagctttgtcagtgggggttttgacatattaccttcagctttgggatttgatatctggcatcgagctgcagccggaggttgacgacaagcatatcttcagtattgccccgaatggtgtgtactcagccaaatcaacatatgaaggtctatttctgggatctgtgacatttggacactataaaagaatctggaaatcttgggcattgccaaaatgtcgtttcttcctttggttggttgcccataagagatgctggacaactgatagattggcaaagcgaggcctaaatcatccagagcaatgtcttctatgtgatcaagaggaagaaaatatggaccacctccttgtgcaatgttccttctcacgggaattctggtaccttttactcaggaaattcggtcttcactctcttgcaccacagccgactgcaaactccttcctgggatggtgggaagtggtgggaggagcagtccttggtctcacaaaaaagggccttaactcatcattttgggagcttggactttatggaatcatcgaaataaatgcatttttgatggctgcaatccaagtatgtccttatgtctcagagctgctgatgggaaataagaagatgaaagagctggggcaaaagcctcgcttagggttttctccaagatgtcggatttgacactgaagaagattgagtattggaagaggtccgattgaacatttggcactgacattcaccaacttgttcacacagacgtccgtatctaccaaggaagcaagtggaggccttcaacggtgtgcagattatgttggtatgccaacagctcccagtgaatctaacaaggagccaaggcctgaagagtgtgtaaatgaactgggcattaaacaaccagtacagcatgttgcttccgaggagcaggaaggagttcaagatgatgccaaggcagatgcaaatgttatgaatgtttcttttggtaagggaaaatcagaagattcttttggcacaattaatggtaccaacagtggagataaaatagaatctcctagtggtttagcagaaagaacattgactcagcctaccactaagggttgcagtaagcagcgtggccgtagttctaatggtagaggaaacaggactaaaaaaatagaagaggggaatgcgtctggactaattgctgtggctcccgagtcagaagatgatgatgatgccccatttatagatggaaaccaagcagagggtggtgcactgtgggatatttttcgacgggaagatgtgagcaaactgcatgattatctaatgaagcatgctgatgagtttagacattgcaactttgagccagtgaagcaggttactcatcctatacatgatcagtgtttttatctaacaattgagcacaagagaaagcttaaggaagaatatggagtcgagccttggacatttgaacagaagctaggtgaggcagtatttatcccggcaggatgtccccaccaggttagaaatttgaagtcttgcataaaggttgcactagattttgtttctccggaaaatgtccgagagtgcatcaggttaacagaaggtttccgtctgctgccgaagtggcataaggtgaatgaagataaactggaggttaagaagatagctcttcatgcattcaatcaagctattaaagatatcactgatgaatcatctaatagcaatgaaagcaaatggatccggagatagtgaggatcatgaaggccattgaatccatgcttgatgtcatggaagttagcaccacccgcattcgacatcttgctatcgagaacctgaatgaaaaccgtagtggcttatcggatgccgacaagataacaaaacctgattttagtgtattatgcatgatattagtaccttatataatacgtagcttggagaaaaggccattcaccgtttctcattgttgggaggttctaaagaatgaagccaaatggttacacttggagcagggctcacaaaatattgatgtgctggtgaacaaaggtgtagggttttctccaagatgtcggatttgacactgaagaagattgagtattggaagaggtccgattgaacatttggcactgacattcaccaacttgttcaaatagaggaaaaggatatggaaatggagaaagagcgcatgtatgcatgtgtaggtcagggagtggctcggatcagccttgagtcaatttccactgcgttttcttcggttatggatgagcacgaggagtaaaagaaacagaagaaggctgagtgtgattctcatatgcttattttcttgtcctgtgtaatggatgtgtgtatgtgaaccatatgcgaacttaaacgtctttgtttgtaccggtcagatcattctgagtgagggttccgtctcttcttttttagactccactg

SEQ ID NO: 1043 - DNA, 1155 bp, Zea mays
  Clone ID: TF_ZmC3861_2
cgggaaggactggccgccatctagttcttttgatcagagattgcctcgccatggtgctgagtttatcagtgcattgccatttcctgagtacactgatcctcgatatggtccgctgaatcttacagtcaagctacctgatggtgcattgaagccagatcttggaccaaaaacttacatcgcttatggattttaccaagagttaggcaggggtgattctgtgaccaagcttcactgtgacatgtctgatgcggtaaatatattgacacacacagcacaagtgccctatgcgcgttatcaacttgagaagatagaggaaaccagaaagaaaatgaaagaacaagatcttcaggaactttatggtgtttcagaactaaacctatcatcaccttttactgattccaggaatataagtgctgatgaaatgtcaaagacctcatgtttggacgtcaatgatgtaccacctgttaatactgaatctgaggtacaaagtggggcaggccagtgttcagattacattgacaaggatagaagttatgctgggatgcataacggggagagaaccggtggtgccttatgggatattttccgaagagaagattctgacaagatacaagattatcttaggaaacatgccacggaattccggcacatcttttgcaatcctgtgaagcaggttattcacccaattcacgatcagactttctacttaaccgaggagcataagagaaagctcaaggaagaatatggtgttgaaccctggacgtttgagcagaagcttggtgaagcggttttcattcctgctggatgtcctcaccaagtgaggaacttgaagtcttgcattaaggttgcgatggactttgtctccccagaaagcgtcaacgagtgcatgaaactgactggagagtttaggcggcttccacctgatcacagggctaaagaggataagctggagatcaagaagattgctcttcatgctctgaaccaagtagtaaatttcttggatccttcctcggagtggtcgaagagttggtttgcccaacccaagaacaaaaaaaaggctggagctgaagaacaggagaagcctaaaaggaagcgtggccgcccatgtcgcaagtccaacgatgaagctgctggcgataggcacagaaagaagaa

SEQ ID NO: 1044 - DNA, 1223 bp, Zea mays
  Clone ID: TF_ZmC220_4
gtgaggcagtatttatcccggcaggatgtccccacctagcttctgttcaaatgtccaaggctcgactccatattcttccttaagctaggtgaggcagtatttatcccggcaggatgtccccaccaggttagaaatttgaagtcttgcataaaggttgcactagattttgtttctccggaaaatgtccgagagtgcatcaggttaacagaaggtttccgtctgctgccgaagtggcataaggtgaatgaagataaactcgaggttaagaagatagctcttcatgcattcaatcaagctattaaagatatcactgatgaatcatctaatagcaatgaaagcaaatggatccggagatagtgaggatcatgaaggccattgaatccatgcttgatgtcatggaagttagaacaacctgcattcgacatcttgctatcgagaacctgaatgaaaaccgtagtggcttatcggatgccgacaagataacaaaacctgattttagtgtattatgcatgatattagtaccttatataatacgtagcttggagaaaaggccattcaccgtttctcattgttgggaggttctaaagaatgaagccaaatggttacacttggagcagggctcacaaaatattgatgtgctggtgaacaaaggtgtagggttttctccaagatgtcggatttgacactgaagaagattgagtattggaagaggtccgattgaacatttggcactgacattcaccaacttgttcaaatagaggaaaaggatatggaaatggagaaagagcgcatgtatgcatgtgtaggtcagggagtggctcggatcagccttgagtcaatttccactgcgttttcttcggttatggatgagcacgaggagtaaaagaaacagaagaaggctgagtgtgattctcatatgcttattttcttgtcctgtgtaatggatgtgtgtatgtgaaccatatgcgaacttaaacgtctttgtttgtaccggtcaggccattctgagtgagggttccgtctcttctttttaggactccactgcgaggtgtcggtgtgtgagaaatggtgcaaacaagtttctgagaaatggtgcaaacgtgtgtatgaaactctacgaggcatactcttacctagtattgtgtctagtgaaaaatgggacacatccgatgctactgtaaactcacttgttgcactcactttttgagttggatttttctttc

SEQ ID NO: 1045 - DNA, 455 bp, Zea mays
  Clone ID: TF_uC-zmroteosinte038a09b1
tcgtatattgtaatgctgcttatgatatacactagagatgcttaattcggtaggatatctctcatttttgtaataatggtagatttatttttgtaatatctgcgcccgtcccaccgcaagggggtaagccaacttccagctttttttagggtcatcatgttgatatcgcggctgttagtacttgttggattaggtgttagttttgaccatagccaagcttttgattcatcataatctgatcccattaccaatttctcttcctatgtgtacatgttcacccttcaaccaatgctcctggaaatggtctaaacttccattttggacatttgtagcggttgggcaatatatgtagttatcacaggaattctccctgcaagatgatttccatgatataccatcatccatgtcaccggattcagtgaagcagggacattttgatccttctatcttcacct

SEQ ID NO: 1046 - DNA, 2337 bp, Zea mays
  Clone ID: TF_ZmC119_1620
gcaaaaccgtggtgaaaatatagtatttaaatcttgaaccctgtgttcacaatgtaacaatttcggtctaattaattattcttcagatgctaccaacagagattattgtgctaacaattctacatgagctttccagcgcctttttatcttgttcctcagaagcttaactgttactcttcctaacccacaatatacaggtaaagtcaatgtgtaacccaataagaattagaatgtgttcctttcatatgacacaatataatacatgtacaagcactatatctacttcaatcctctgaatggcatgtcataatttcaccaggcccccacaatctcaactgcaagataccttccgtttgtttactcttgccaagttctctgaaaccgccctagtcaaattttgatcctcaaaactaggatcaagattgaacttgggatcaagggttattctctgaatttctctaacagcagaacttgctgcgtataaggagatcttttttacctcaagcatcttcagttttgcaagatggccatttggcaggcaacggatctcttgggacagccggactgactctggcaaactctcaggtgacaaaaaattgagagccaattgaaccgtggactggaggtttttcaattggaaaggacacccagctggaatgaaaacagcctcaccaatatgttggtggaatgtgaagggttcaattccatattgatccttcaacatcttcttatgataatcgttaaggtacacagtttgatcataaataggatacttaacagaagacactgcttgacatctagctgcacattcttcccgatgagcagctagatattcattaagctttggaagatcctgcctgcggaatacatcccagacagcaccagccagggatccttctgaattattagtgtttggctcctcgatgtgtgatttcgagtgtttgtgtgattgctcttcaatatccagattcaaattttgaacaggagtatgagcatttacatggacactagttccattagcaatcatttcagatacatcagactgtacccttaccctcttgggacattggtaatgcacttcagttgcatgcattaacatgtgaaccacatcgctcatgttaatcattagatttgtcattgaatcacctttaccaagttctcggtgacttccatgtgcaattagcagtttcatccctaattcaggttgtaaggcatctgggggtaacttggcagcaaggtttaggagaccccatctaggatgaataaaatcaacaagaggaaagttgacaataaattctggcctttggcacaacagaaacgcctccaagacactgggtcggggccactctttcaatttcagcatcaacaagtggccatctcctcctttgctgccatctgagtagcctttgataaactgtttgagctcgatatctctgattggttcgagcagtccacagccttgactatgacatcttcatccatttcttcatccatgatctcctggatacctctccaaatactcaagggatcccagcttgatgatagagaaggctcaaatgcttccctgataataataggctccgcgtttttccaatgcttacgaaaatgaatgatgccttcatattttaagtcctccaatacaggagagtacaaacaattcctaccaatcccatcactgtttgagcattttgagagaccgaggttttgctgaccagtaaactccgatcttctgccatcactgcaagacaagcatccatcctccaaatcatgtactttgcaaccattgaccatttcttcagaactttttacaagtttagcaatccaatttattttgaatatccgccttaataccaactttgaggagccacaaccaccagcctcgtgaggtccacaagtgatgctgccatcattgttgactctccatgtagggaataaagatttaatgtcaatattatttatatctattggccaagataatgacttgtcattgacactctcagcagatggttccaaccttgctcttctattaaaagaatctctacctttatcttcaacataaccttcagtatattctcctcgtgcaacattggcccgagaatgacgtatgtcatgacagcaatcaaggcataaatcatatgaacatcttgggcagtatcggtgataatcaaacactggcactttgcaaaagtcacagcacatctgctcatcagaagttatctttgctctgaggacatctgtctttggtccagaagatcttgtttcaacacctatttcaaagcattggtcagaataaattcccttcagtactggaagaacataaaccaaaaggcaatgaag

SEQ ID NO: 1047 - DNA, 823 bp, Zea mays
  Clone ID: TF_ZmC3788_1
gctgcaagtactgcttttatgatctgtgccttgactgctgtgtggagatccgcagaggtgagattcctggaggagaagagataatgagagtaaagcctgaagatagaggccgagcatatctttttggtactactaactcaaaggatgggagtaaaaggttctccatgaggaggcacagctcatccctggagaatgagccttccaatgtagtaggttctagtgagggggcaaataactctctggagctgtggaaagcagaaagtgatggtagcataccttgcccaccaaaggagctaggaggctgtggcggttcgattttggatctcaagtgtttttttccagaaaagatgctttcaaatttagaagaacgagctgacagaattatgaggagcgaagtatttgcaaaagcagtagccaaaagaagtgaccagtgcccttgttatgaccattcaggaaacataagaactcaggacgtgcgagagactgcaaatacgaaaggctcaagtgataaccatctctactgcccagttgccactgctatcaaggaggatgacttggcgcactttcagatgcactggacaaaaggcgaaccagttattgtttctgatgttctgcatttgacttctggtctaagttgggaaccattagttatgtggcgggcattgcgagagaaaaagactaatggtgacgtagaagatgagcactttgctgtcagggcattagattgccttgattggtgtgaggtcaggagttatatttcattgaatgtttgagtgcattctgtgaccttttatatttatgtatatatttaaatgtttccgtt

SEQ ID NO: 1048 - DNA, 662 bp, Zea mays
  Clone ID: TF_ZmC3523_1
gcagaagacgccgcagtggcgcgcgggccccgagggcgccaagacgctgtgcaacgcgtgcggggtccgttacaagtccgggcggctgctcccggagtaccgtccggcttgcagccccaccttcgtgagcagcatacactccaactcccaccgcaaggtgctggagatgcgccgcaagaaggatggcgaccttggtcagctcccgctcccagtcccggccgcgcttctgcttgggccggccgtcgagtcgttctagccggcgctgtacattttttcgtccgcgggtggagctgtttaacctgctgtaccgtacttggtttttttttctttctcttccacttctatatttagtagttgtgctgtactatttagctagagctctgaattgtagaagctttattaggtcgagttaggtagtagagattaagatttccatggttgattaggattgttagggtatgtatggccatagtacttgtggtagtagttaagaacttggtgaggtgtttggcctgacctacgaggaatgatgttgtcatgtcgaggcgctgctggcaccagtgacaagaaagttaggcgtgccttggcgcggaacatggaactgtctgccttgttgtaatcgagagtgtcaggcgagtaagaaagtgattgtttgcattgcc

SEQ ID NO: 1049 - DNA, 280 bp, Zea mays
  unsure (1)..(280): unsure at all n locations
  Clone ID: TF_LIB3245-468-P1-K1-F6
cggacccctgggccgacgcgtgggcttacgcttgggagagaacagaccanaccgtgcaggccgacatagtatgggtttagttctccaancaatcctatcnccaacccttccactgatcgttgctgccctctgtttcctccggcgcgggcgccgacgcctattttctccgccgatcgcagaaagatcgacgggatcgtggtgacggagaaaggcgccaggagctgcgtctaatgccgcgccaccaccacgcccatgtggcgcaatggccccaccgttccca

SEQ ID NO: 1050 - DNA, 495 bp, Zea mays
  Clone ID: TF_jC-zmXLIB3526P034dh01a1
aacaaaaaatctacgcgtaaaattaaattcaaggtattgggtgagaccatcaccaagtcatcattcaagtttcaggttatacatccagagatcaatggttaatgccatagatccaaccatataaacacaaagttcttgcattgatgggagtatcgctatgtctgtacattcctatcggtcaatctgaatggaagaactatagacctacttatgccagagtaaactacttcaacattttctgagactggaaaactttatgatcagctaccaaagctggattatcatgctctgagaaagcatgaagattgttatgtgcagggtctgcagtggcagtccgacagtccgagtcattaccttcatcaacctgctcaactggcggaagagagtgttcctgatgtctcttagaaaggtctcgcaaagcacccctatttgcccaaaaaagcccacaagcgttgcaaagtgaccttggaccagatggccctagccgatcattgg

SEQ ID NO: 1051 - DNA, 1163 bp, Zea mays
  unsure (1)..(1163): unsure at all n locations
  Clone ID: TF_ZmC151453_1
gggtaccctncnagtcctgccggggatgtagctagcgcatctattgtttgctctccacatctctctcgtgcgtgtgtccatgaaaaggatcacacacgaatgatctacacagcctaggcgagctctctcctttgtctctttataaaagggacatccctcgggccggccgggatgatcgctacctcgctttccctcttgatccctggctgcaaattgccattccgacataataaccactgcaccagccgcttcggttcgcctcttcctactctccatatatctcatcctgatcttcactcatcacctaaccatacgagatctgcatatatagctccatcagatcttgagcgcaaattcctctcagtgcatcccatgtctgcaatctacatgagccagctctccactgccctccctctcatggagggagatcaccaagatcatcatcaccaccaccaaggccacttccaggccttcaccctgccaaaggaaacaccgatccttttcccctttgtgatcagcaatagtagcgccagcgaaggcagtttgagctatggatcggctgcagaccatcacttgttgaggcagcgtcatcaagctatgctggagccccaacatatgattggaggatcatcaactgcgactgggaatagtgtcttctcgacgccgttcccgaccgtggagagcatccgcgacgacatgatcgagcctgcctcgtacgatccatacgacatggggaagctgcaggtcggcgggtcgatggatgcttgcagctggacgccggcggcagccaagatgaggatcacgaggaaggccactgccgatcccagtgcggggaagaagccaaggagaagggcgcaagcagggtacgacgacaccatgagcggccaaccgaatttgggtgttattagggtgtgctccgactgcaacaccaccaagacacccttgtggaggagtggtccttgcggccccaagtcgctctgcaacgcgtgcggtatcaggcagcggaaggcgaggcgggcgatgatggccgccgcctccggctcggtgtcagcagttcccactgacagcggcaaggcctcgcccagcaacgccgccgtggccgcagcagcagcacaccccaaggtgaagaaggagaagagagtggacgtggaccggtcgctgcc

SEQ ID NO: 1052 - DNA, 1075 bp, Zea mays
  unsure (1)..(1075): unsure at all n locations
  Clone ID: TF_ZmC175881_1
gtcgtatcgagctaaaacccttgctctccctgcccgcccattttcctttccccttggcattcggctccactgcttctccggcgaattggatcggcgatccatcgtcgtcggatcgcaactcctgactagcttgttgctgcaggatcgttatccgccgcgcctgctgcttgggtttgttttccctgcccacggaaatggggatggagatagacatggagacgtatcccaatcttaatacttccccctcggccgccactgcctcaggcgacgccaaggcctgcgccaactgccacaccaccaagacgtcgctctggcgcggaggaccggagggccccaagtccctctgcaacgcctgcggcatccgctaccgcaagaggaggcaggcgatcggtctcgacgcaggagcggctgccgccgccaactcacagcaagatctgcagcagccaaagaagaaggccgccgtcgatccgcagcagcaggaccagcatcagctgagaaagaagacaacagcggtcgctaatccacagcaggatcggcatcagccgagaaagagagcagctgccgctgccgctgccaccgatccacagcacaccagcatcaccaagaaagacacggacaagaaggatcagcaagtcaccgtggatctccacgtggtggggttcggcaaggaggcgacgttcaagcagcgccgccggatgcgccacaataagtgcatgagcgaggaggagagggccgctgttcttcttatggcgctctcatcgggcgtcatatatgcatcatgagaagtccgctctcctgattccaactgttccgttgcagatggagatatagatccgccttcccttccattcatcatccccctgcttcctatccctatcttcctcttcctcctaggtcatccatcagtagtactgtagtgataggtctagctagactctcatcaatcaatctatcgcttgacccttcactcgtcagtcaatctctctctctctctcttgaaaaattaatccatcctctatctctctctcttgaaaaattaatccatcctctatctctctctttttagnttttttgg

SEQ ID NO: 1053 - DNA, 1956 bp, Zea mays
  Clone ID: TF_ZmC2051_1
cattggcgtcctcgatgcgggccggggcctgctggccccgcgcaccgcgacgcttccgctagcgccttcttcgctgccgcggggaacgatgtgttcggcactaggggggttgtcggcgcacacatcggctcgtgcggcgagattgatagtaactttgcgcagccggagtggttttcaggcctcttcgacgacgcatccatcccgcacgagccggtgttcccgggcgcgacggcgggcggcgcgccgcccatcatgacgagctttgcgctggcggccggcgcgctggtgttgccggacgaaatggaggacccactgctgttccacagctccgcctccatctcggtgctgttgcacggcagttctcgcagcgccggcgccagcgccaccttaccttcgttctcttcctcctcttcgtcaatcgcttcctcggagtccttcttcgggagtgggagtgggagagaaagagggcggagtgggacggcacaggcaggagcaagcccggcgccggagtggttgctccatttccgggggcgcggcctgcacgatcgctcccgtgcgtcagcgagcactagcgccgcagcaggcgccggcggatctagagaggacatcctcgtgccaacgcccatgtactcctccgggtcggcccactcggaccccgagagcatcgccgagtccagcccgcacccggcgccgcccatgaagaagaagaagaaggccaagaagcctgcgccccccgcgccagctgcctcttctgacgacaacgatggcgacgccgactacgaggaaggtggcgagctagcggagccgcagggcggcgccgtcaggaggtgcacgcattgccagatcgagaagacgccgcagtggcgcgcggggccgctggggcccaagacgctctgcaacgcctgcggcgtgcgctacaagtccggtcgtctgttcccggagtaccgccccgcggcgagccccaccttcgtgccgtccatccactccaactcgcacaagagggtggtggagatgcgccagaaggctgtccggagcggcgacccgtcgtgcgaccttctccatttcatccgccgccgggattgacgtcccggcacggcgtcgccggactgtcggtcggtctcgtcccccatatagctatatatgtatgcatgcatggttgcttcatcagtcgtcgtcgcccatcatggtcatcatcaccgcttcaccggtcaccgccatggatcgtctcccgcccatcatcacatgcattggtttgtgtcagcatccatccaatcccaatccatcgccgggcgtcccggcgttgttagttcattaggtcttttttttcctcatcgggggctagtgttattttacctttgatccttttgtctattggttaattggttccccctggatgttttttgtttgtatagagagtgaaaaagagagaagaaatagatgagtcagagtggttgctgcattgcaattgcagttgcttgcaagctaggtaggtgagaaggagagctaaaccagcagcagagggagacagatttagagaggaaactttgcagctagtcagtcagtcacttagaaaaaaaaacaaggagagtgcttgaagcaggtgaaagggcaatttgttggtttgctaattagaagagaggttctgtcaggtcaggtcaggtagttgctatcattattcatgaggattttcaaacttaatagggggacagccatcatccatcatagtttgtatttggaacttggtatactgaactctgaaaattctttttgcagttcatctatgcttagggattgataagtgttgtctggtttcttctatattgatagtgctaccttttagccaataattagttatgtatgatttgctcttggtcttgctctgcctgctacaggcattcctacgaaaaaaaaaaaaaaaaaaaaaaaaaaaaagtactctgcgttgttaccactgct

SEQ ID NO: 1054 - DNA, 544 bp, Zea mays
  Clone ID: TF_LIB4172-036-R1-L1-E10
aattcggcacgaggcgcttctactatctaagaaacaacgcacacgggccgaaactaaatttctccaagcgcgcaatcctgtcgccaaccccggccacggatcggggatgtcgtctgctgcgggccgcgcgccggcgccgacgccgatgggctccgccgatcgctgtaaggtacatccatcggctctcgtctccgctctctcttcctctcctttgctccgagctctgtcatcccggtctgcttcctgcgacccgccgttgcagatcgacgggatcgtggcggcggagaaagccaccaggagctgcgtcgaatgccgcgccaccaccacgcccatgtggcgcagcggcccgaccgggcccagggtaagctagctcatgatcgccctccctcctctcctcttgttagccaggctagcagctccgtgcgtatagcgttcgtccgcaccagattggggattcctggtcgctggtttggttgctgatcttgatcaacttagctatgtatacacacgactccaatagtcgtcctgcgtatacttactactc

SEQ ID NO: 1055 - DNA, 879 bp, Zea mays
  Clone ID: TF_ZmC33566_2
cggaggaggcaccacctcggccggtcaagacagcggcgtcgccgcggcgcctggccgcggcgcgcgcagcaggcggtcccgcgcgaccgccgcggctgccgcggcgtggcactccctcgtgccgcgcccgccgtctcagtcgtccccgtcatcgtcgtcctgctcgtcctcggacttcccgtcgtcgaacaagccggcgcgcccgaacggcggcggcggcagccgcggcaagaaggtcccggggccacccggcggcgggcccgctggcggggaggcgggcctggagggcggcggcgtgcggcggtgcacgcactgcgcttcggagaagacgccgcagtggaggacggggccgctgggccccaagaccctctgcaacgcgtgcggcgtgcggttcaagtccgggcggctgatgcccgagtaccggccggcggccagccccacctttgtgctcacgcagcactccaactcgcaccgcaaggtcatggagctgcgccgccagaaggagctcatcctcatccgcggaagccaccgcgacgccgccgcaggatccccccccggcgggccgaggccggagctcatgttccgtgactacggcgtgtgttagcccgctgcccggcaaaccggcaccgaggaggctcgcgtcgtgcgttgcatgcatggagctttagatccttttgcgaaattctgccgtttctgccttttttttaatctttccctgcgcgttccagatatttccgtttctttctcttttgttaattcttaaattgttggtacctacctacctcatccctgcttgagagatcaatgaattctgttgtataaaaaaaaaaaaaaaaaaaaaaaaaaaaaaaaaaaactcgaggaagggccgcgtgtacc

SEQ ID NO: 1056 - DNA, 1064 bp, Zea mays
  Clone ID: TF_ZmC154_1
ctcgaggggccggccgggccgggagactctagtactctacccggacacatcccccttcccttcccttccccgcaactaccctctactctctactgcacgcttctactatctaagaaacaacgcacacgggccgaaactaaatttctccaagcgcgcaatcctgtcgccaaccccggccacggatcggggatgtcgtctgctgcgggccgcgcgccggcgccgacgccgatgggctccgccgatcgctgtaagatcgacgggatcgtggcggcggagaaagccaccaggagctgcgtcgaatgccgcgccaccaccacgcccatgtggcgcagcggcccgaccgggcccaggtcactttgcaacgcctgtgggatccggtaccgaaaaaagaggaggcaagagcttggcctagaccgcaagctgcagcaacaacaaaataatggcgaggcgaagacggatgaagcaaaagacagctctagcaacagcagcagcgggagcagcaacttgcaggtggtgcagaaacggaggctgctaatgggagtggaggaggctgctctgctgctgatgaccctatcttcttcgcccacatccacgttgcttcatggataaggaccctcctccaacgccagatcagcagtgtacatacaacgtaccccctgcacagtgactgccgaacgattgcaggcctatctcagggttgtgtgatcttgtgattggggcggattattagtgccaagctaatcactccgttgatcgtcttgtcttcctctgttttcgccgcacccgtagatcttgatgccagccagccatatatcttctacgtgatttgtggtaggctccataatcagaggtctgttgatcccattccccccgcacatcttttttctcttgtcttttctctttttggttttttgtatgtactttgatgttgccccatttgtgagggatgggtgatcaaagaggagacgccatcccttctcgttctggaataatggtccaaataataaaggatttgagctgttttgttttgaaaaaaaaaaaaaaaaagcggccaaaaaggtgac

SEQ ID NO: 1057 - DNA, 1043 bp, Zea mays
  Clone ID: TF_ZmC154_2
aattcggcacgaggcgcttctactatctaagaaacaacgcacacgggccgaaactaaatttctccaagcgcgcaatcctgtcgccaaccccggccacggatcggggatgtcgtctgctgcgggccgcgcgccggcgccgacgccgatgggctccgccgatcgctgtaaggtacatccatcggctctcgtcttcgctctctcttcctctcctttgctccgagctctgtcatcccggtctgcttcctgcgacccgccgttgcagatcgacgggatcgtggcggcggagaaagccaccaggagctgcgtcgaatgccgcgccaccaccacgcccatgtggcgcagcggcccgaccgggcccaggtcactttgcaacgcctgtgggatccggtaccgaaaaaagaggaggcaagagcttggcctagaccgcaagctgcagcaacaacaaaataatggcgaggcgaagacggaggaagcaaaagacagctctagcaacagtagcagcgggagcagcaacttgcaggtggtgcagaaacggaggctgctaatgggagtggaggaggctgctctgctgctgatgaccctatcttcttcgcccacatccacgttgcttcatggataaggaccctccaacgccagatcagcagtgtacatacaacgtaccccctgcacagtgactgccgaacgattgcaggcctatctcagggttgtgtgatcttgtgattggggcggattattagtgccaagctaatcactccgttgatcgtcttgtcctcctctgttttcgccgcacccgtagatcttgatgccagccagccatatatcttctacgtgatttgtggtaggctccattatcagagggctgttgatcccattcgccccgcacattttttttttctcttgtctttttttctctttttggttttttgtatgtactttgatgttaccccttttgtgagggatgggtgatcaaaaaggagacgccatcccttctcgttctggaataatggtccaaataataaaggatttgagttgttttgttttga

SEQ ID NO: 1058 - DNA, 487 bp, Zea mays
  Clone ID: TF_LIB3354-090-Q6-K6-E5
ctctgaacggggtgagtacccccgccgcctccgaggacggtacccgcggtggcgccgtcgttagcgccagcggtgtacctcgtcaagaagaagaaaaatcggtttcggcgaggaagccgtggcggcccccgaagtcggcgaagcagtgcttgcactgcgggtcgtcgtggacgccgcagtggcgggaagggccgttgggccgcagcacgctgtgcaacgcgtgcggtgtgcggtacaggcagggtcggttgctgccggagtaccggccgctggcgagccccaccttcgagccgtaggagcacgccaacaagcacagtcaggtgatgcagtttcaccggtagtggaagagccagggtcagtaccaccctgtgtccgtggagcatacgtgagccatggacgtgcttcagttttcccagcggtggcaggtgaaggaggagtaccttgtgagggcgattcaccagactttgccgtatccggtggtggacgg

SEQ ID NO: 1059 - DNA, 893 bp, Zea mays
  Clone ID: TF_ZmC33566_1
gcacgccgcattggcggttgtggcagcaggcaacggaggaggcggcacctcggccggccaagacagctgcgtcaccgcggcgccagctggccgcggcgcgcgtagcaagcggtcctcccgcgcgcccgcggcggcggcgtggcactccctcgtgtcgcgcccaccgtcgcagccgtcgccatcctcgtcgtcctgctcgtcttcggacttcccgtcgtcgtccaacaggccagcgcgcggcaggaagagcccggggcccggcggggacgcggtggcgggctcggacggcggcgtgcggcggtgcacgcactgcgcgtcggagaagacgccgcagtggaggacggggccgctgggccccaagaccctgtgcaacgcgtgcggcgtgcgcttcaagtccgggcggctcgtgcccgagtaccgccctgcggccagccccaccttcgtgctcacgcagcactccaactcgcaccgcaaggtcatggagctgcgccgccagaaggagctcatcctcatccgcggaagccaccgcgacgccgccgcggctgcaggagcaggatccgccgggccgaggccggagctcatgttccgcgactacggcgtgtgttagttagctgcggcactgaggaagctcgatcgcgtcgtgcttgtgcattgcatgcgtgggagcttctttagatccgcctcttgcgaaattctgccgcgtttcttttcctcctttctttcccttccgatccctgcgtattccagacattttcgttttttcttttgttaattattacattgttggtacgacctacctcctccctgcttcttctaagttctaatgagagagcaatgaattctgttggtacaaattgtggtcgttttgtgagtaatcatgctcctaaacccat

SEQ ID NO: 1060 - DNA, 2418 bp, Zea mays
  Clone ID: TF_ZmC3086_1
gagtagggagcaccagtggtccgggaggctttatcaaccggactttgtgaatcccctcaaggctgcttctgcattccttcgttcctctattatttctccacccctttccccccgtctctctctcctcacccctctctctctaaaagactgaaaacaatagaaaggaacaaggggggaagaacaccaaccaagcaggacttggtttttgggaactccatgggctgtggaattgtccccaggaatcccctctgggtttgacgagattcatacagatacatatatttaattttttcccctttcgtttgctcaaaaaatcaattgtacaggcgaaactgcttgtttgtgctttgtttcttccgtgtttgtttccttgggattttcctctggtccgttcttcttcacctgtggggtgggaggagcagagacaatcatgggaaagcaaggaccctgccgtcattgcggagtcacaagtactccgctgtggcggaatgggccaccagataagccggtgctctgcaatgcgtgtggctcgaggtggagaacgaagggttcattggcaaactacactccaatgcatcgcaatgacaatattgatgatgatgaacccagagttagcaagctgaagccaccgacgtcaaagttgaagtcacagaagaaaaaaacaaatcacattataatggagaatggaccattctctagtcagaatttccgaaagatgggggatgatgacccaagctatcggtctagttcaggatctgcagtatcatactctgggagttgtgccccatatggtgctgctgatgcaagtgaaatgactggttcagcacagtcacatgcttgggagtccctagtgccatcaagaaagaggagctgtgtcacccgtccgaagccttcacctgttgaaaagcttgcaaaagagctgaactctatcatgcatgaagagaagttatattacctttcagaatcatcagaggaagacctactataccatagtgaaactcctatcggttcctttgaaataggctctggaagtgtgcttctaagacatccaaactcgaaatcactggaggaagaatcaaaaacaagctcaattcctgcagataataaatcatatattacaagtgaatcctattcagactctgcctcatttgtcgttcacagtggaaacaaggcagcaattaacttaaatcttccaactgcaaggtcgaagaagtcgccgctgcatatggaagacaatgctagaagggataaacttcattatgagaatcagcatgtcctggagagtgttgattcgcctttagtttcagtagatttagaggatgttataaactatactaacttcatgaaatatctaactaaagaggatcgacgtcagttgctcaaatttcttcctcctgtggactccttaacacctcctgaaagccttagaagcatgttcagttgtatccaattctctgatgctattgacagctaccagatgctgcttcgagagggaattctcgacccatccttatgtggtgatgaggaatggaagaaagtgaagacgcttgccttaactaatttaacaaaatgcagttggctggagtgctataaacagaaaaagggagctaaagaaaccgggggagtggggggcatcagtggaccggaaggctttaccaagtctactatgaaaccactcaaaagaccccgtgacacccactttcagagtgacgcagaactagatggtaccatgaggagtcctctaagagttctaaaatccggggctttggctcttcagtttgaaagttcatctttgccaaaatctagctatgccaccgaagattcaacctgcactggaggagcacctaatctattcatgttacccctagaaaagctaccattactggtcccttctcagtatgccgtctctgatcaagacttgctgctggaaatacctctcaacgcacgacacccagaggcagaacttctctgtcaaccatctcagctgatgagctctataaccagcagctccacctctatgggcggggttgctgaaggagaagggtacctgaagcaaccatagtctcaggtcacatcagcaagcagcttaggaacagccagtagttgcagtttactttaacctcctggatcgtgtcgcctctctgtgccgatcaccaatgggcctaagtgtccttatttacataacaatgtgcttcgtatgccaacttggcgaattgtcggttcagctaatatttgtagcatgcttttggatcggctttctgctggttttctgtaacatatggctcatggagaaagcattaacttatctctgtatggaaaaaaaaatatcaccatattgtaggaaaatgaaaaaagaggataatggagagttgtttatgtaaaattgaattttgctatggatgttgatatattaactat

SEQ ID NO: 1061 - DNA, 820 bp, Zea mays
  Clone ID: TF_ZmC3086_2
agggggaaaattagaggaaattatttctcctaccctttcccctctctttctctctctgatctaccctctctctaaaagactggatacagaacgaggaaaacaaacacccgaaaagaaaggaagaagaggagaagaacaccaaacaagcagaacttttttttgagaactccataggctgtggaattgtctccaggaatcccctctgggtttgacgagattcatacagagaaatacttcttgattttccccctttcttttgctcaagaatttacctgtacaggcgaaaccgcttctttgttcccttttttttctgtgtttgttttattgggattttcctctggtccgttcttcttcacctgtgaggtggtgagaagcagagagaatcatggggaagcaaggaccctgccgtcattgtggagtcacaagtactcccctgtggcgaaatgggccaccagataagccggtgctctgcaatgcatgtggctcgagatggagaacaaagggttcattggcaaactacactccaatgcatcgcaaggacgatattgatgacgatgaacccagagttagcaagctgaagccaccgacatcaaagctgaagtcacagaagaaaaaaccaaatcacattataatggagaatgggccattttctggtcagaatttccgaaagatgggggatgtcgaccaaagctatcggtctagttcgggatctgcagtatcatactctgagagttgtgccccatatggtgctgctgatgcaagtgaaatgactggttcagcacagtcgcatgcttgggggagtccctagtgccatcaagaa

SEQ ID NO: 1062 - DNA, 492 bp, Zea mays
  Clone ID: TF_LIB3637-245-Q6-N6-D4
caggaacaacatcgagaaggtattgaatccgacgtctaaaaacaccgagcaaatcagtctgagctaaaacaccgctagagctaacgacgatggcctactactactataaccaaaggctcggttctcatcctctctgagcatcgactaagctacggtctaaaaaaccccctaacgcgcttccaacgatagatttcgggaaacgttctcggccggccggccggccatcggggcctcactgttgctgcgcgacggcctgccgaatctgcatgacctttttgggggagttggagggcaagcagctcacaaaggggggcgttgttggcgggccggtactcgggcagcagcctgccggacttgaacctgacgccgcaggcgttgcacagggtcttgggccccaaaggccccgccctccactggggggtcttggaggacaggcagggggcgcaccgcttctcttgctggcccaacaacgggggggcgtccctgctctcg

SEQ ID NO: 1063 - DNA, 846 bp, Zea mays
  Clone ID: TF_ZM4332.C3.o2.fg
atgcgtcagctctcgtacctctctggtctcgacggcctggacgacggcgtcgcggactgcgacggctcctgcggcctccgcgacgacggaccgccgtgcctcctccacagcggtctctgctgccccatcggtccgctggacgacgaaaccgacaccgtcgccatagcaatcgacaacgacaaggagttgttgcaggaccttgccgtggccgccgggcgcgttgccgcctccccgctgtcgtcgggcaatagcccatccagttcggcggtcgagaccacgacgacgctgccgccgacgccctggcgtttcgtcgtgcccaggaggaaacggaggaaacgacgggaccgcaggcccgtcgtcatgcgcggcagcattaggccaggcatccctacacttcacgcggcggctatgtcgtcgtcttcgtcgtcgtcgggcaataacaggccatgcagtttgacggccgagacgagttcgccgccgcagctctggcgtcttgttgtgcccacgaggaaacgggacagaaggcccgtcgtcatgcgcggcagcattaagcggccgtgctcgctgggcacgacgccaggcatccctacacctcacgcggcgggtaatagcaaccctagcagcagcagcggcggcggcagtacaggagcccgccggcagttggagagcctgcaggtgcggccgcggccgccgccaacgaacaggcagcgagttcagagagtgtgcagcaactgcggcagcacggagacgccgctgtggcgcacggggtccgacgggtctgccaccctgtgcaacaagtgcggcctacggctatcaagaaatcgacaagccgcccaagcttcctga

SEQ ID NO: 1064 - DNA, 1558 bp, Zea mays
  Clone ID: TF_ZmC30321_1
gccggccgccctaccagcttccaccctccaaatcgaaaccagattgaaatcctaggggctagggttaccctccatcccatcgtccgatccgatccgatcccgccgctcatccatgtcccaccacgacggaagcaagccataccagccgcgccgggggcccgagcggcacccgcagccagcggatgggatcgccgccccgcctcccgccgccgttgccccgtcggtggagcacctcgtggcggccgccgccgaggcggaggcattgaaccgcttcgccgcggaacaacagcagcagctgcaggggcacgagcaggaggttggggaggaagaggaggaggaggacgagcaggaagacgagatggaggaggaggacgaggatgagcacgaaggggcgcacggcggcatcggtggggagcacgttcccatggacgcggatgctgctgccgcggcggcggcggccgcagtctcgcagatggacccgcactcggcgttggtggctgggaccgtgccacccatggcgaccaaccagctcaccctctcgttccagggcgaggtctatgtgttcgactccgtctcccctgataaggtccaagccgtgcttttgctgcttggaggcagggagctgagcagcctgggcggagcgtcgtcctctgcaccttatagtaagaggttgaattatccacatcgggtggcatctctgatgagatttagggaaaagcggaaggagcggaactttgataagaagatccgatactctgtccggaaggaagttgcacttaggatgcagcgtaatcgaggtcaatttacatcttcaaaaccaaagcctgatgaaatagcagcatcagaaatggcatccgcagatggctccccgaattgggcattagttgaaggccgacctccatctgctgccgaatgtcatcactgtggtactaatgcaacagctacaccaatgatgcgtcgcggacctgatggaccaagaacattatgcaatgcatgtggcctcatgtgggcaaataagggtctcctgagggacgtaacaaaatctcctgtacctctccaagctacgcaatcagctccgcatctagatggtggtaatggaagcgccatgtctgcgcctggctctgagctagagaatgctgcagcagccatgaccaatggccacgagtcatcgagtagtggtgtttaatccagcgatggggtaaaagccacgaggagcatcatcccggagtgatctctgcagtaggcggtcagctgctgtactataattgagttggaggctgcttagatatggaatccttccatttaccttggtgccctgtagttaagagctatgacagtgctttatcccgtgtcatgtttgcagccgctgcgtctataacgaagctatttcttgtcttgaggcgtgactgttaagaaccgttgaagtccactcagttttaaccgtgcaaaaaacaaacgaaaaaaggaggaaaaaaaaaaaaaaaaaaaaaaaaaaaaagggcgcttatcttctgggcgccttgtgttttggttgcggtcgcgtgggcggtcgcgtggg

SEQ ID NO: 1065 - DNA, 737 bp, Zea mays
  unsure (1)..(737): unsure at all n locations
  Clone ID: TF_LIB4719-002-R1-K1-E6
gaccctcgggcttgccggggaatcaaaccagctgacgctggtcttcagggcgaggtttacgttttcgaatccgtcacccccgagaaggttcaagctgtgctgctacttttaggacgtggtgaactaccacctggtttagctggcatggttttacccaatcaaaatgacaacaagggctatgacgatatacttcagaggacagacattccagcaaaaagggttgcttcactaattaggttccgtgagaaaaggaaggaaagaaattttgataagaaaatacgttatgctgttcgcaaagaagtggcactcaggatgcagcgtcggaaggggcaatttgctggaagagccagtctggagggagaatctccagctcctggatgtgatcctggttctcagggctcaggcctagattttgcatctcgagaatcaatgtgccagaactgtggtactagtgaaaaaatgaccccagcaatgcgtcgtggtccagcgggtccaaggactttgtgcaatgcttgtggattgatgtgggcaaacaaggtacaattacatgcttaaacatgctggattctttctttttggtggttgacatgattataggttcataatttcatgtcatattcatttcgacttattaggcgatactttgnatgtcttctcttggacttctttcagtgtcgtgaatatgaaaagagcctctagaccacatctttgaccaataattttattttaaaactatg

SEQ ID NO: 1066 - DNA, 620 bp, Zea mays
  Clone ID: TF_LIB5116-045-A1-PF1-C5
acccctcccccattcgaacccaaaccaacccgagccgccgcccgcggaatcgaatcttcgccccctcccgccttcctccttcccttcccttcccttctcttcccttccccgcgcgatcaatcaagcgatcggagccctcctcctcatacaagatgtcgccggcggagatggagtcccacaagatggttgaggtggaggcggcggcggatcctgaggagcgcaccgcctccggtgaccccaaggcctgcgacgactgcaacaccaccaagacgccgctctggcgcggcggacccaacggaccaaagtcgctgtgcaacgcgtgcgggatccggtaccgcaagaggcggcgggtggccatggggctcgacccggaggccaagaggaagcccaagagggacgacgccatcctatccaaggcggaggcttctagtaccaaggaggaggaggaggaggacaacaaggccagcaccaacaagatcaagaccaagacgactactcacaccgtggagctccacatggtggggttcgccaaggacgcggtgcccaagcaacggcgcaggatgcggatgcggcggaggaagccgtcgtgcctgggcgaggaggagcgggccgccatcctc

SEQ ID NO: 1067 - DNA, 612 bp, Zea mays
  Clone ID: TF_LIB4727-001-R1-K1-C3
gacttgtactgtattatagctttgcctccgttttactgccttccgttttgtcgtcgactgcttcatttttaaatttaaacgcgacaaatagaaaaaaaaaaaaaaaaaaaaaaaaaaaaaaaaaaaaaaaaaaaaaaaatccttcagaggacagacattccagcaaaaagggttgcttcactaattaggttccgtgagaaaaggaaggaaagaaattttgataagaaaatacgttatgctgttcgcaaagaagtggcactcaggatgcagcgtcggaaggggcaatttgctggaagagccagtctggagggagaatctccagctcctggatgtgatcctggttctcagggctcaggcctagattttgcatctcgagaatcaatgtgccagaactgtggtactagtgaaaaaatgaccccagcaatgcgtcgtggtccagcgggtccaaggactttgtgcaatgcttgtggattgatgtgggcaaacaagggtaccctgagaagttgccccagggcaaaagttgaatctcctgcggttgcaactgagcagggaacaagtgacaacaaagccctggcaacactgaataataacaatgttgctgcaagcaatggc

SEQ ID NO: 1068 - DNA, 1482 bp, Zea mays
  unsure (1)..(1482): unsure at all n locations
  Clone ID: TF_ZmC42806_1
caccacggcaccccgacagctcccccccggcctcatggggcttcattccccatctagggttgctgagctccccaccaccgccggtcatgcccgacgcggatgttgacaccgtgattcgcgaagccgccgcggccgcggccccagccggcgacgacgacagcgagggtgacaccgaggaggaggaggaggagggggacgaggtcgacgaggacgaggacgacgacgaggaggagttacccgccgaggcgccggcgccggacgaggagcaacctgctccagcgcccatctcgaccttgccggggaatccaaaccagctgacgctggtcttccagggcgaggtttacgttttcgaatccgtcacccccgagaaggttcaagctgtgctgctacttttaggacgtggtgaactaccacctggtttagctggcatggttttacccaatcaaaatgaaaacaagggctatgacgatatacttcagaggacagacattccagcaaaaagggttgcttcactaattaggttccgtgagaaaaggaaggaaagaaattttgataagaaaatacgttatgctgttcgcaaagaagtggcactcaggatgcagcgtcggaaggggcaatttgctggaagagccagtctggagggagaatctccagctcctggatgtgatcctggttctcagggctcaggcctagattttgcatctcgagaatcaatgtgccagaactgtggtactagtgaaaaaatgaccccagcaatgcgtcgtggtccagcgggtccaaggactttgtgcaatgcttgtggattgatgtgggcaaacaagggtaccctgagaagttgccccagggcaaaagttgaatctcctgcggttgcaactgagcagggaacaagtgacaacaaagccctggcaacactgaataataacaatgttgctgcaagcaatggcgaagccacaagtgcagcagagaaaggagtgccaaaggcgccgtgacagtatatagacattattgtcagagacaaagatttcggattctttgcctatagctagacaagacaccccgttagaaatatttggtaatgataatgattgtcatcaagtgtacattcattcttgcttgacagtgttagacgtgtaattaatataagctgtccgattgtgtaaacagtaaacccatatggcatctgttgtgttacaacttacactttctaacttcattctcataacatcatgatcaaagattcgatgctacccattaaaaaaaactaaaaccctagccgcctgcctctcctcctccagagctcgtcgccaccggccaccgccaccctcgatcacgccgtccgtcgaggtaaggtcagcatggtgagggtcggtttagtcggggattcgctcaagtccatgtacaacgctgagaagatcggcaagaggcaggtcatgatcaggccgtcgtccanggtcttcatcntgttcctggcggccttgcctg

SEQ ID NO: 1069 - DNA, 725 bp, Zea mays
  Clone ID: TF_ZmC11827_1
cttcaaaaccaaagcctgatgaaatagcagcatcagaaatggcagctgcagatgggccgctgaattgggcactagttgaaggccgacctccatctgctgctgaatgtcatcactgtggtattaatgcaacagctacaccaatgatgcgtcggggacctgatggaccaagaacactatgcaacgcttgtggcctcatgtgggcaaataagggtctcctgagggacctatccaaatctcctgtacctcttcactctatacaacaatcagctccaattctaaatggtggtcagaacggaagtgccatgtctgcgcttggctctgagctagagaatgctgcagcagccatgggcaatggccacgagccataaggtagtggtgtttagccatgtgctaaagccacgagcatcatcgcgcaatgatctctgcagtaggcggtcagttggagcctgcttagatatatggaatcctgcgcctgtaggttttaagagctgcgacagtgttttgtcccgtgtagtcatgtttgcagccgtcgcagctatagcaagtttgtttcttgtcttgagtcgtgactgttaagaactgatgaagttcattacttacgtgcgtgtagttatacttagatatgagatgttctagccatgcagcaacgttttctatcaatgccagcaattagggagcgagcgtttggcacaaaaaaaaaaaaaaaaaaaaaaaaaactcgaggg

SEQ ID NO: 1070 - DNA, 1147 bp, Zea mays
  Clone ID: TF_ZmC3131_1
ctgtgcggcgctcgagccggccggtccgggacggacagcccttcctccccattccgagttctgacccacgctcagaatccatccatttctatccccccacacagatacacatcccccttcccttccccgcaactactctgtgctctctactacacgcttctatctaagagaacagaccagaccacgcacgccggcagagaaaaaccagaattctccaagcaatcctatcgccaacccggccacggatcggggctgccgtctgtttccgccggcgctggcgccgacgccgatgggctccgccgatcgcagtaagatcgacgggatcgtggtgacggagaaaggcgccaggagctgcgtcgaatgccgcgccaccaccacgcccatgtggcgcagtggcccgaccgggcccaggtcactttgcaacgcttgcgggattcggtaccgaaagaagaggaggcaagagcttggcctagagcacaacaagcagcagcaacaacaacaaaataatggcgaggcgaagactggagtaaaagacagctctagcaacagcagtagcagcgggagcagcaactttcacgtggtgcagaaacggaggctcctaatggaagtggaggaggctgctctgctgctgatgaccctatcttcttcgcccgcatccacattgctacatggctaggaaccctgcaacaccaaatcaacgatgtacatacacacacaggcttccccaccccacaccttgcacagtcaccatccaacgattccagtccaaatcgtacatgtttctcacaccagtctgagatagggaaggagggggcctatctcgggattgtgtgatcttctgataggggtggatgattagtgccaacctaatcactccattgatcgtcttgttctctgtttccgtcctacctgtagaccttgatgtatctgctatgtgagttgtggtaggctccataacaagaggtcctgttgatctcacttccccacacatctttttctctgtccttttctctctttttttttatgttctccctctttcggttttgtatgtactttgatgttgcccctttgtgagggatggatgatcaaaaggagacgccatcctttctcattctggaataatcaaggatgtgagctctttcatttc

SEQ ID NO: 1071 - DNA, 858 bp, Zea mays
  Clone ID: TF_LIB5116-002-A1-PF1-G8
atatttctccatccctttcccctctccaccccccctcccccctctctctcctcaccctctcgccaaaagactggatacagaacagaaggaaaaggaaataaagaacagagaagaagaaagaaagaaagaaagaacagcacctaccgagcaagccttctccgacttcacatgggctgcggaattgttcccacgagccccctccgggcctgaacagattcatacaccaccggagaaccgccccttgatttccccctcccccttttttctgctcgcgaattacttgctagtactaccacagaagaactgctctgtttttccgtgtttttctggttgggaattcctccggttcttcctggttttgcttgcggggggcgaggggaggaggaggcatgggaaaggaaggtccttgctgccattgcggcgtcacgagcactccactttggcgaaatgggccaccacataagccagtgctctgcaatgcatgtggctcgagatggagaacaaagggttcattggagaattacacaccaatgcattctcgtgatgatatcgatgctgatcaacctagagttagcaagctgaagccgccgacattgagactaaaggaacagcggcagctcaagaaaaagccaagccacagcataagggagaatggagcattttctgatcagaacttctggaagatgggggatgccgacccaagtcgatctagttctggatcagcactatcatattcagagagttgtgctccatatggttctgctgatgctagtgaaatggggtcagcgcaatcgcatgcttgggagtcatgggtaccatcaaaaagaagagctgtgtcactcggaccaagtcttcatc

SEQ ID NO: 1072 - DNA, 265 bp, Zea mays
  unsure (1)..(265): unsure at all n locations
  Clone ID: TF_LIB3594-007-P1-K6-G4
aagcatcctatcgccacccggcccggatcggggctgccgtctgtttccgccggcgctggcgccgacgccgatgggctccgccgatcgcagtttgtttttttttttctgnatcgtgnnnactgtgggggggggggggggctgcttctaatgccgcgccaccaccacgcccatgtggcgcagtggccccaccgggcccaggtcactttgcaacgcttgcgggtttcggtcccgtaagaagaggaggcaagagcttggccttgagcac

SEQ ID NO: 1073 - DNA, 571 bp, Zea mays
  unsure (1)..(571): unsure at all n locations
  Clone ID: TF_LIB4171-052-R1-K1-B5
ccctcggttttttcttttttttttttttttttttttttttttttttttttttttaggcaacaacaattttaatagtaataattaacaaaaaaagagaaataatggaaatatctggaatatttcgcaaaaggatctaacaagctccgatccatgcacgcaaatgcacgacgcgagagcttcctccgggccggttgccttgccgggcaggcagctaataatcaacacacgccgtagtcacggaacatgagctccggcccgggggatcccgccgctgccgccggggggtcacggggggttccgcggatgaggacgagctccttttgggggggcagctccatgaccttgcggtgcgagttggagtgctgcgtgagcacaaagggggggctggacccggggcggtactcgggcaccagccgcccggacttgaaccgcacgccgcacgcgttgcacagggtcttggggcccaacggccccgtccgccactggggngtcgtctccgacgcgcagtgcgtgcaccggngcacgccgccctccacgcccaccgncattacctccccggggggccccgggc

SEQ ID NO: 1074 - DNA, 645 bp, Zea mays
  Clone ID: TF_ZmC34296_1
aattcggcacgagtctccactccacccgcgcacaacagatcgcacgcctcggttccctccactcgacgcttctcccgctcctaacccctagtaccttcgctcgctctgccgcctccgccgacgacgcgccagatccgcgcagcagtggtgtcctccgccgcggatcgagctcccgatccgcgcagtgggagtggcggcgagcgcaggagcgctcggccgggggttccgcgaggctggagacggaggaggaagggagcggtagttccgcggtggtagatccgccggtcctgtcgccggagatggactcatctgtcgagaagcaggggagcgtggcgctggatccggacgagcgcgcgccggcgtccggcgaaaccaaggcctgcaccgagtgccacaccaccaagaccccgctctggcgcggggggccctgcggacccatgtcgctgtgcaacgcgtgcgggatccggtaccggaagaagagacgggaggccatgggcctcgagtccagcagcaaggccgccaccgccggcggcagcgagcaccagcagcagcagcggaagaagaaggccaccgcggcggcgcgcgggtaagcctcaaagggagagggagctagggagcggggaccgggaccggagcggaacaagg

SEQ ID NO: 1075 - DNA, 1355 bp, Zea mays
  Clone ID: TF_ZmC3304_1
ccggccgggaagaaaaaagctcccgaaatcccctcacctactcctctccctctccctctggcagcgccgcctcgccggcggttgcctgcctgcaccttcgccccccgtctcgacctcgacgcggcctccgttcctccgcgagacgcagcatggatgtgcgccctgcgaatgcggccgacgactcgtctctcggagacctgttcccgcaccagcccgccggtttggagagtgacgagagcaacacagaatggctctctggttacgtagaggactgcttttcgagctccacgtcgtacacaaatcccgtctctgcaatggcaagcgagggtgtcggaaaaccaaagctacctccaccaccatcctccaacggcaggagaaagaaacggagcttggcctccgtcatgaccaacggcgactaccaacaattcgtcctcccgctgtacgtcgagccaccgctgatcctgatcgaccagaaacactggatggcagagagcgagctgatccaccccaagaaggacgacgacgaccgagaggtttgccagcaacaagggcaggagcaagagaagggcgtgcggcggctggtgaagatgtgcagcaactgtctgtcaagccaaacgccacggtggagggacgggccgtcggggcgccagatgatgtgcagcgcatgcggcatgaggctcaagccagagaccaggttgtcagccgagcagcagtgcggccaggaagaacccaccaggaaggagcaagagccagacaggaagaggaagaaggcggccaagaagacgtgctacgagagcagcgacgccccgccgtcgtcggaccagcaagagaagcggtgcgcccactgcctgtcctccaagaccccgcagtggagggcggggcctctggggcccaagaccctgtgcaacgcctgcggcgtcaggttcaagtccggcaggctgctgcccgagtaccggcccgccaacagccccaccttcgtgagctgcttgcactccaactcccacaagaaggtcatgcagatgcggcaggccgtcgcgcagcagcagtgaggcccgacgtctcccggaatctatcgttggaagcgcgttaggggatctcttagatcgtagcttagtcgatgctcagagaggatgagaacagagactttggttatagtagtagtaggcaatcgtcgttagctctagcggtgttctagctcagactgatttgctcggtgtttttagacgtcggattcaatacaatctcgatgttgtcctgaattgtgctatgggttttcggtccattagatgttcaaggtttcaattgggaactcggtgtttaaagagaattgctatgaaaaggcatcagttcctggg

SEQ ID NO: 1076 - DNA, 933 bp, Zea mays
  Clone ID: TF_ZmC736_1
gtctgctttgcttaatcaaatgttaggctacggatctgtttctctttctcatagagtcatgtagtcttctcttgttgttgcgtgacgcttgcttgcagaggcgactcccaagggcattctgaagctgatgaacactgatggcctcacaatctaccacatcaagagccaccttcagaaataccgcatagccaagtacatgcccgtgtcatcgacgtccgaagggaaagaggagaaacgagctgctgccgccaatgacgtgcagaatctcgacctcggcaccgggatgaagatcacggaagcgctacgcgtccagctcgacgtgcagaggcgcctccacgagcagctcgagatccagaggaatctgcagctgaggatcgaggcgcaaggcaagaagctgcagaagatgttcgaggagcagatgaagacgagcaggaccgtgatggggccgccgcagggcgccgacgtcgccttcatcggcgccggcgagcaggaggaggaggtggaggtggaggacgcgttcgacgacgtgcagctactggcggccgtgtccagcgccagcgtcggctaccgcgacggcggattccagtcgaagataagctagcctgtcgcctccagcctccaggcttcagctggcttgtcggcattgtaattgtagggtttgactacaaatgccatcgtagctatccatggaagatgatgcctacaatgtttgggacgacgacgacgagtgttttggagggaaaaaaaggaaactaaattgttggggatgtaggcaagggacgatcctcgtcgtccacttatgtcgttgattggaaggtgtgatcgtgcacctagcctaaccacttagttttaaaagttctctctgaactttagaatgtgagtgtctatttttgcttatttatttttaataaaaaaccatcaggtctcttatag

SEQ ID NO: 1077 - DNA, 416 bp, Zea mays
  Clone ID: TF_ZmC80080_1
tcgagccggccgggccgggatctggcattcgatcgatcttgctgctgctgctgctgtcgtcgctggttggccaggagcacaccagcttcttgctgtgtcgccgtcatagaagtagccgcgcgctgtcgtcgtcgtctcgtccgcgacgcgaccactccggcggctgctgctgcctctcatgctggccacgccaccgacgcttttgtgataccatacgaagcgccgcggcgggcacgttggagatgtcgtcgctgggtgggcaacagcagcacgggcgcggcgacgaggccagggcgcggctcaggtggacgcgccagctgcacggccgcttcgtgctcgccgtggcccagctcggcggcgcggacaaggcgacgcccaagtccgcgatgaggtcgatggccgcgtcggggctcacg

SEQ ID NO: 1078 - DNA, 825 bp, Zea mays
  unsure (1)..(825): unsure at all n locations
  Clone ID: TF_ZmC2322_2
cagcagcancagcagcagcagggnaaggcaggncggtgctggtcaccggagcttcancgggcggttcgttgccgctttgcacganctgggtggccctcaaggtcagagtgtgagaccgatcgcctagctttaccgccataaattgtccaaataaaaaaaagtcccccactcgactgcaagagaaagtaagtatgaacctcgggtctctcatggaatttgcagtggctactccgaaacagatcagggaggtgatgcaagtggacgggcttacaaacgatgaagtgaaaagccatctccaggtgcgcgcgcgctttaatttgtctagggctctattttcttcgtccctgtatatcttagtagaactagtgcctgttcctttccgtcatccttcggggtgatatggtatcttttgtctggaaacttattgttggatcgttcgtgttcagaagtaccggttgcacaacagaagatcctcccccggcgcggcggcggctccggtgagccagtcgatcatgctggtggatggcgtctgggctgctcaggagcaaagcagcggctcgcagtccgggtctcggcagggcccgctccagttctccagggcaggtatggccgtcggtggcggcgacgacagcagcagcagcaacgacgacgaagacgacgacaagtcggaggatggctacagcctgaaatgcgtgtgaggctgaggcaggctgcgtttgcggaagatcggatgagagtgtagagagatagcgttgtcgcggcttgagcatgcatcggtggattcttgagtctgtcccccggccggcctcgagaaacccaatcgcc

SEQ ID NO: 1079 - DNA, 1790 bp, Zea mays
  Clone ID: TF_ZmC1401_1
ggatccatcaccctgctgctgctgctgctgtcgctggttggccaggagcaacccgctgagcttgcttgttttcctgccgcgggcgctgcttggccaggaccagctgcttgctgccgtcgtctcgtctgcggctactccggcctctcatgctggccacgccaccgacgctgcgatacgaagcgccgcggtgggcacgtcggaaatggcatcgtcgctgggagtgggtggtcagcagcaggggcacgggcacgggcacggcgaggccagggcgcggctcaagtggacgcgccagctgcacgaccgcttcgtgctcgccgtggcccagctcggcggcgcagacagtgagtcctctcttctgtccacccctccattcacagtcacagcctcacaggcagtcctttgtctgatgctaccgaccgacgacgtcggctttcccgttccttgccattggctgcagaggcgacacccaagtccgtgctgagggcgatggccgtgccggggctcacgctgtaccacctcaagaggcacctgcagaagtaccggctggtggcggtgagccgaggcgtcgcttccccgctgggcgacagcggagatggcaccgacgagcgttcgtcctcgtcctcggagaaccagccggcggacgagtgcgacgacggtaccgtcgccgagccgcatggcgattcttccaggagcgtggcgcggatgcagaggaagctgcaggagcagatcgaggtaaacgaaacgatagagtccggtcggtcgatcaccattgtcccgaccttgtggttgtggcagtgaaatccattaggtttcaggctttcagccgattgtgtgccgccggttcgtgcttggctgctgatcaagccgagctcggccattcatgaccacacacatccatacatggtggcaggtgcagcggcacctacagctgaggatcgaggcgcaggggaggtacctgcagtccgtgctgcgccgggcgcaggaggtcctcgccgaccacggcctgggctcggcagccggcgcggaggcggagctggcctccgcggtggacaccgggtccctgtcctcctcctgctgctgctccccgacgcgccgccgctccgccgacagctgcgtgacgtcctcctcttcggaggccgagagccaggcccccgtcggcggcgccacgtggctccacacgtgcgccggtacgcgcgactgctccgttgagcaacagccggtgcagggggagaagagtacattcctgcagaggcacggggcagcagaggacggcacttcgtctgagatcgatcccaacggcaacaggtaggggacggagtcggagatcgtgatcggaagcatctctctgctctgcatgtgcccagcgtcggagaacagggaatgaatgattggcggggtggccttcaaggttgggacttggggaggggggccaggcttttgagcaatgtctgctgctgaaacagctacctgctctgctcttcgttccagaatatgatgtgcatgtttattttcgtttatgcgaatggttcttgtgtttcatgtaaaaaaattatgactgcaactcgaggaagggccagctgcaaatgatgcatgcagtgtgcttgaggtagcagtacaatgcaaggatgattgcatggtacagaactgtagtagctactatattattagtaagattgtatgccatcagtgagattgatgccttaagagggtaatggcatgagaactggaaaaggtttagaatgtatattaaggcctcatttgaaatagaggattagtaaaaatgtgtgtgg

SEQ ID NO: 1080 - DNA, 1350 bp, Zea mays
  unsure (1)..(1350): unsure at all n locations
  Clone ID: TF_ZmC18574_4
attgggtacctcgaggccggccgggcaggggcaccacccaaaggcgggcgggctataaatcgtccctgtcactcctcgtcgcggtcctcgtccctgcgctcgacgacgacgacgacgtctcccgccgtggctccccccgcggagtcctcggacctctcgccgtccgcgtaccaccggatgctgtcgagcaccagcaggctccgcctccagggcgtgctcgccgacacgctccggggctacggggtacaccaccaccagcagcagcacttggacaggctcgccgcggtccgctatatgccgaggttcctggcctccatgcgcgtgatgcgcgcaccgcggatgctgtggaccagcagcctgcacgcgctgtttcgtccacaccggcgagctcctcggcagtccacgagtgggcgacgcccaagtcggagctcgagctgatggacgtcaaggatctgacgctagcgcatgtgaagagccacttgcagatgtacaggaccgtgaagagcactgacaagtctgcaacgacctcatcgggcgggccgcctgtggacggtggcggcgacgacgatgatctcccgagtgcccggcgggctcagtcgtcgtcgtcgtcgccagctggacgacgggacggcagcagcccgcaggcgttcaccagacaccggtcggctgcctcctcggagggcgcggcgagcctcgcgggcggcgacgacgtcgaatgctcctcctcggccgacgattccgactgcggcagggcgcgcagtgcttcgtcgtcaagagatcagttgctaccaccaagtgcaggcagtgcaggcacccttccttcagttggcgtatcatcatccactactgaggatatggagccagcttatcgatcagtaggcttgcaacaggcacccaaccatgaaatgagctgccctcctagcctggagttcaggctagggcgaccgatctggaacggagcagaacattagtagctaacactatctgcaacagcttattcaaactccactatgtaaacggtacagtctacaatgtagaacagtgcaaaacaatgttttaggtaaccatatgggtaaatgttggacacggtctaagcaacactagttacacacatgaatggcacattattagttcaacacttccactatacagtttactatatataccttgattggtccttgcatcatctagaatttaggaatgtggtgaaacgaaatgtggaattaatgatattagttttgtgttggccccaagatcgtcacaacatgaacttgctttgggttttgtttccttttttacattttggcttttgttgtggtcatataaaacaaaggntatatattgttgttt

SEQ ID NO: 1081 - DNA, 390 bp, Zea mays
  unsure (1)..(390): unsure at all n locations
  Clone ID: TF_LIB3150-031-Q1-N1-H9
cccctaataccaaggaggtcttttttcaactctgggcgcccctaattnntnctnnccnnntattttccatcactttcctgggaaaaaaaagcataaaatgaaaaagtttcaggacaaatgtactcagctattcgttcgttaccgttcaatggaagtgtaagatattatcaacggtcgtctgatggaaccaacttgcctaacgatgcttgtttggttttaacaacggatcccaagcctctactccttttgacagctgagctccatgaacgtttcgtcgatgctaatactcaactctgtggccctgacaaatcaaccccaaagactattttgataacaatacgatcaaaaagccttaccctttattacttaaaatcacacctttataaatac

SEQ ID NO: 1082 - DNA, 368 bp, Zea mays
  Clone ID: TF_ZmC2861_1
ggcatcagctgagctgagctgagctggtccatggagagggattactcgtccacggacggcgggggctgcgagatgcccgggaagaaggcgaggaagccctacaccatcaccaagccccgcgagcggtggagcaccgaggagcacgcccgcttcgtcgacgcgctgctcatgtttggacgcgactggaagaagatcgaggagcatgtcggcaccaagacgacagtccagatacggagccacgcgcagaaatacttcctcaaggtccagaagcttgggctggccgccgggctgccgccgatgtacccgaggcgccacttcgccatacagcagcagcagagctcggtggccgatggtagcagcgcggccgc

SEQ ID NO: 1083 - DNA, 425 bp, Zea mays
  unsure (1)..(425): unsure at all n locations
  Clone ID: TF_LIB4738-030-R1-K1-D12
ccggggcgctacacgcccgtgccgcctcctcctcggactcgtctgcggtggacggaggagggccgcaagcccgcctgcaccgagtgccgcacgcccgcctgtggtggacggaggagctgcatcggcagttcgtcaaggccgtcgagtgcctcggtggccaggacgatctccctggcctctccggaagcaagaacgcctacctgctttaagcaaggagggggggctttgtgaaaagctcaaccggtcggacagtatgcctcagggtaaacccagcagataccgtgcataccgtgaagacaaagattcaggaacagcaataccttgtgtatgatggagtgcagctngaggacgatcgtacgctggctgactacggtatggaacataaatntgtgcttgacctttaataaaagatgcaaatatttata

SEQ ID NO: 1084 - DNA, 659 bp, Zea mays
  Clone ID: TF_ZmC761_1
ctcgagccgcactgatggataggagcaacgccaaagctggtgcttcagacgatgaacgtgagggggctcagcattgctcatgtaaaaagtcacctgcagatgtacagaagcaagaagctggaccacgagtctgctggagctggacacgatagagcagccatctactccggttctcaattctcatctcaattctctctcccctccgcctccccccacccccgcctccaaattttagtttagttttatctactccacagaagcatactgcacacgtacatagaaaacgccatggactacgtactgcatcatttccttaaccatcgtcgctgctcaattttggcagttttcaagcccatggatttgcacatgatgatgaggagaggagaccatcgcttccatgacatgtttctccatcgagctgccgctgccggctcggtcatctcctccccgctgctccacaacggggatttgttcgggtcacgggacgccgtctcgccggaggccagcaggctctacgcgctcctccaacgccggcagcagccttcctccacgcaaacgttcgccctcatgaactacagtagtagcctgatagatatgatgtacttaatcaaccaccagatcgaaatgaagaacaccatgcatgcatgcgcactgcactc

SEQ ID NO: 1085 - DNA, 758 bp, Zea mays
  Clone ID: TF_LIB4738-122-A1-K1-D8
cgccgcgctcacgcccgtgccgcctcctcctcggactcgtctgcggtggacggaggagcgccgcaagcccgcctgcaccgagtgccgcacgcccgcctgtggtggacggaggagctgcatcggcagttcgtcaaggccgtcgagtgcctcggtggccaggacgatacttactacttgggacgagagatttgaacgtcgcgcgcggtggttataaaattgcattgttcccctgtccacctctttcacttcttcagatctccctggcctctccggaagcaagaacgcctacctgctttaagcaaggatgaagatctttgtgaaaagctcaaccggtcggacagtatgcctcagggtaaacccagcagataccgtgcataccgtgaagacaaagattcaggaacagcgataccttgtgtatgatggagtgcagctcgaggacgatcgtacgctggctgactacggtatcgaacataaatctgtgcttgacctcaaagaaaagatgcaaatctttatagtggaaacactagcagggacaaccatcactcttgagggtgaaaggtcagagactatcgacaacatcaaggaaaggattaaagaaagtgaggggctttcccaagggtcaggagggtctcatatttggacacaaggaggtagagacaacaggaccttgtgggacaacacatttccgaggggtctaccctcctccttggcctccggcacatgcttctcagaggcactatgcatatctccatatacat

SEQ ID NO: 1086 - DNA, 867 bp, Zea mays
  unsure (1)..(867): unsure at all n locations
  Clone ID: TF_LIB4767-071-Q1-K1-C2
gggtacctcgaggccggccggaagcatgaaagagaccaggccatgcagtgtagagcaggagctgtctagcaacgcatgaaggactaccaaggccacagcgctaccacaccgtgtggcagtggcactggcaccacgggagaggggcgaggcgactgactgataaggaagaagcaggtccgagctcgccagcagctagccgagcgcacgtggccgagatgggtggcgccggcggcggcgggaggaacggggcggcgacgaggcggtacaacaggtccaaggtgccccggctcaggtggaccagcgagctccatcgcaacttcgtccgagccgtcgactgccttggcggacaggacagtacgttctgttcctgtcttctcacctctcacgctaagcatgcatgcatacatacatacatgtctnttggtttggtgtcctctctatatctctctttcctcgtcggccaaaatggccctgggctcattcatgtgctctcttcgtggtcgatgtcgactgcatgcagaagctactcctaagctaattctccgnctcatggnatgtcggagggcttaccattgcccatgtcaagagccaccttcagatgtacagaagctcaggacaagacattagggaggagagaggtgcaaccgcggcggctaggacatctggtggagcactactcattcgccattgatggaggagggaggccccaaagaattcgtctgctgcccacacatgaanaggggcggaggcagggccagaagctgcggccacggncacggncacgcacgaanagcgtggcagggggacaggtgacatgggggctcctggcacccgggggctgcggcgatgattacacgcgagcgatcc

SEQ ID NO: 1087 - DNA, 1153 bp, Zea mays
  Clone ID: TF_ZmC4296_2
attgtatgaacgtcgacgaacagtctcggttgactgttcgcatgatatgctgaaaggacaattcaagcgcaaatcacgttgagaagcattgctagctggacgcacatgcatgacctgatcaagggcacactggaaaatcagaggaatttcgtctgacatgtgcacggtgcaatcgttcacccatcctacagctggtcgagtcagaccgggttaattactgccgtcgcccagctcggcgggcctgataatgtacaccgaaagctgtcatgaggacaatgggagtgaagggcctcaccctttttcacttgaaaagccatcttcagaaatacagattgggaagacagtctggaaaagagttaacggagcattcaaaagatgcttcttaccttatggaagctcaaagtggaacaactttgtctcctagaggttctactccagatgtgaaagagagtcaagaagttaaagaagcactcagagcacaaatggaagtgcaacgaagattgcacgaacaagtggaggtccagaagcatatgcagatccgaatggaggcgaaccagaagtacatcgacacgatactagataaggcgttcaagatagtatctgagcaactgagtggcttcagcatatctgaccaagacctaccgattctcacctctgctagggccatgcttagccctgcagatcacttgagttcgtctgtcttcccccagctctccgtcagctccgttagccttcacaatcctggtcctggaggagggaaaggccttccgcatgttgccgacagccacgtgttctcccagaggccacctgaacaattcaagcgcaaatcacgttgagaagcattgctagctcgacgcagatgcatgacctgatcaagggcacactggaaaatcagaggaatttcgtctgacatgtgcacggtgcaatcgttcacccatcctcccgtagcacatctgtgaaaatcaaggttatcttggtctatttcggtacatctagactgacctttattaatatctaatgtaatgcctaagtggactagataagtaattcgcttgatgtaaactgcccagctgtaggatccagttttaaagtcctgttccacgcactttgaatcaggttcccctcagtgccaacgtttgttggacgaaacgga

SEQ ID NO: 1088 - DNA, 1144 bp, Zea mays
  Clone ID: TF_UC-ZMFLB73117F06_FLI
gatcgatcccaacggcaacaggtaggggacggagtcggagaccgtaccgacgacgtcggctttcccgttccttgccattggctgcagaggcgacacccaagtccgtgctgagggcgatggccgtgccggggctcacgctgtaccacctcaagaggcacctgcaggtccgtccggccaccgccgaattatttctctcttggttggttgatgacgatcgcgcgctcaactctgccttgcctcctccttcctgatccatcgaccgtgtgcatgcggtgcacgcgcaccacactgccgctgcagaagtaccggctggtggcggtgagccgaggcgtcgcttccccgctgggcgacagcggagatggcaccgacgagcgttcgtcctcgtcctcggagaaccagccggcggacgagtgcgacgacggtaccgtcgccgagccgcatggcgattcttccaggagcgtggcgcggatgcagaggaagctgcaggagcagatcgaggtaaacgaaacgatagagtccggtcggtcgatcaccattgtcccgaccttgtggttgtggcagtgaaatccattaggtttcaggctttcagccgattgtgtgccgccggttcgtgcttggctgctgatcaagccgagctcggccattcatgaccacacacatccatacatggtggcaggtgcagcggcacctacagctgaggatcgaggcgcaggggaggtacctgcagtccgtgctgcgccgggcgcaggaggtcctcgccgaccacggcctgggctcggcagccggcgcggaggcggagctggcctccgcggtggacaccgggtccctgtcctcctcctgctgctgctccccgacgcgccgccgctccgccgacagctgcgtgacgtcctcctcttcggaggccgagagccaggcccccgtcggcggcgccacgtggctccacacgtgcgccggtacgcgcgactgctccgttgagcaacagccggtgcagggggagaagagtacattcctgcagaggcacggggtggccttcaaggttgggacttggggaggggggccaggcttttgagcaatgtctgctgctgaaacagctacctgctctgctcttcgttccagaatatgatgtgcatgtttattttcgttt

SEQ ID NO: 1089 - DNA, 421 bp, Zea mays
  Clone ID: TF_LIB3354-025-P1-K1-G1
cccacgcgtccggaagaacacagaataattaaagaatcgcacgggtagacagaattaaagaaccaagacctcatcggccggaactcaacctgcaaatgactcttcacatgcgctagcgtcagatccttcacgtccatcagctccagcaccgacttgggcgtcgcccctgttgtgcgcgcgcagagaggccggccgccggccgtggagagggagattaatcacatcccgcatgaaatgatccaagcagatctctgtgaactgcatggttttttttggggggagttgtggagctgaggatggaatggatgcaaagcggaggaattaacgactcacgctcgtggccgccgaggagctcgacggcgtggacgaaacgcgcctgcaggctgctcgtccaccggatccgcggcgcgcgcatgccgcg

SEQ ID NO: 1090 - DNA, 1248 bp, Zea mays
  Clone ID: TF_ZmC424_12
gtcccgctgctcggccgccgaccgagccgcgcgcttccgggactgcgtccgcagcctcgaggccgagaaggccaagatggaggtcttccgccgggagctccccatcagcgtccacctcgtcgccgacgtgatcgactggctcaaggaggagctcgggcaggaccgccgccgcccgtcggacctcttcgcgccaccagcgccgccgccgccggcaaaggacggagccgtcttggcggacgcggacgcggacgccaacgacaagcgcagctggatgagctccgtgcagctctggagctgcggtagccacgacgacagcaccgccaacaccaacggcgccgccgccgccgtgcagtcgccacgccgaagcagatcagggagctgatgaaggtggacgggctcaccaacgacgaggtcaagagccacctgcagaaatacaggctgcacacgcggcgcgcgtcgtcggacggcggcgaccagcacgcgggcgggctgtggtcgtcggcgccggatcagcagtacacgacgtcgcagcacagcacgtcgcagtcgcagtcgcagtccgggtcgccgcaggggccgctgcagctggcggtgtcgagcagggccatgtcggccaccgccggggacagctgcgacgccggcgacgaggcccagggcggccggtcggagagctacggctgggagatgccgcagcacgggacgaaggcgtcgtcgtcttgatgatccttgtccttggacgggatcacaattcacaacagtatagaagacggtgcggcgtggggcatggtactgaggacaactgcggaagaggcggcatttttttgtacaggcgttgagatgatttcatttttcccccttcctttttttctggtagagggaggaggatgtgatggtgaagatgaactgatctggtgttgttgatcgagagtgaggcatatgagatgagatgttattttttacatcccattgtacaatctggaggctggatcgcgttgttttaacggggatggatcggttttcgcatcaaaaaaacaaagaaaaggattgccgctgtcgatctagaacgtggtgatatgcgtctgcggtgtctgctgttcttgccagctcgtgtgctttgatccgtcgtggattcccgccacagttgtgtattgcccgtgtggttgtcgtgtggctcttaaacatagtcagacgtggcggccgatgtactagtgtgcttgtcgagtgcgggcgttgttccggctccggtac

SEQ ID NO: 1091 - DNA, 828 bp, Zea mays
  unsure (1)..(828): unsure at all n locations
  Clone ID: TF_ZmC34324_3
aaaaaaaatcttgaataaatccgtgtgatggtgattgctctacttactnggaagtactagtaaagggccttagactttcctgcccgcttgaagtgtcttttgggtcaattacatagctcacctgcagaatcttgagactcttcttcaaatcgagagtgatagtaggcatggggcatgtcgaacctgaagatggcttttcacttcgtcgtttatcaggccgttcaccttcatcagctccctaattttctttggcgtggcaacatgggggccaccgagctgattcatggtggctacgaactggctatatagatctgtaaccatatcaatatgaaaatatctcaatatgaaaatatcacaatacaacaaagtttataaatatcacaaaaacacaagtacacgaccaccctcactaaaagcatattctgaactgtggagaaggccttccacactgttgtagccgagatctactggataatcagcaagaagcccctgtcttcggaggagtctggtttggggtccagtaacctcagagagggacaatccattcaagtgtcagccacaaattctagctcccttacgtcgcggtgctgctcttcttagagccacgcccaccaggatcattggattggggccttgggggcagtgcatccgttcgtggtctgcacgtgcaacctagcagagaggagaggaggaagatgagtcacgccgtcacagaatttgggggcacgccagctgagcagtggcgactggcggtggcggctatgcttgctgtgcggctgtgcctgggcgaggggcgagggcgatgcctgccgacttcgagtggaagag

SEQ ID NO: 1092 - DNA, 557 bp, Zea mays
  Clone ID: TF_ZmC761_2
gcggtgaggcagtacaacagatccaagcttccccggctccggtggactccggacctgcatatggcatttgtccacgccgtggagaggctgggcgggcaagagagagcaacgccaaagctggtgcttcagacgatgaacgtgagggggatcaccattgctcatgtaaaaagtcacttgcagatgtacaggagcaagaagctggaccaagagtccgctggacacgagagagcagcaacctcctccgttttctcgcccatggacttccacatgatgaggacaggggaccatcatcgctaccatgacatgttcctccatcgacctgcagctggctcggccatctcttcgcggctgctccacggtggggagttcttcgggtcacgaaacgccgccgtctcgccggaggccagaaggctctacgagctcctcctacgccggcagcctaccatgcaaacgttcgacttcaagggctacagtagtggtagtggcctcagggatcaagagtggagattcagccagcatgcagcggcgacagcaagggctgtgtccatcaatgacca

SEQ ID NO: 1093 - DNA, 1063 bp, Zea mays
  unsure (1)..(1063): unsure at all n locations
  Clone ID: TF_ZmC12579_2
agagtttgctgcagtcccagactctcgttctcgttcctgctcttcttcttcctccaccatttgtgcttgtgctgtttcagtggtctgcttgggaaccgaaccaccatgaacctaaccttgcgtgggctctgcattcctttccttccgattcctgctgcctctgtgtctcctccaatccatgtgacgtgaagcagctatgatatatatatatatatatattccagagtcttgactcttcaggcccagaggctccgcaatgaactttttggaatctattgcggtgaatggacacagagaccgacagcatggaggcgtcatgagcagacagagcatggtcgccgtggagcagctcatcggccctgccagtgccagacccgctcacacgtgcgctgctcagcctcatgctcaccagctgctcagtgctcgatacgatcaccgtggcgggttgaattaccggaccggatctcgccatccaacgcttccacgttctgcacgagcatgtactcgtcgtcgtcgtcgtcgtcggcggcggcggattcctccaagtcgtgccggcgggcaggcgctctgccgttcctgccccatcctcctaaacgtgagcagcagcagcagcagcagtcatccagctctccatcactgctcgtctgtactgacctcggcaacggtggtcaagacgaggctgaagctgaacatccggctgagctcaaggacttcctgaacctctctggagaagcttcatggagaggcggtttccatggagagagcagcggcgtcgctttcagattcggagagcaggtggagtttcagttcttgtctgaacagctcgggatcgccatcaccgaccacgacgagagccctcgactagatgacatatacgacaggccgccgcaaacctcttcttgtccggtactgtcttgctccgaccaagaagaaggtctccagagggcagggtctcctgttaaagctcagccgagttcatctcgagctgcatcatgtaataacaagccaagactgaggtggactctggagctccatgagctnttcgtgaaggctgtcaacaagc

SEQ ID NO: 1094 - DNA, 722 bp, Zea mays
  Clone ID: TF_LIB4739-003-Q1-K1-F8
cgggaaacccaaacacccatacaagaatgatatgccactcatgacctgatcactccagtcgaccgcagccggccattgctacctctgtggcttagtcttctgcaagctttcctcttccttctcggctttgaacaaccaagaagctcagctagcacaccgtcgtcgacgttgcaacaaaccccaaccgctaccatgaccaccaccacgatgacgacgacgacgacagcagctcctgatctctccctccacatcagccctccgtcgccaccggagccgaggctgctgctggggttggagctcgacgacgacacggcggcggcggtggcggcgaaggccgcgacgaagaaggcggacgacgcggcgatgcgggagtacaacaacctccgccaggtgcagcggcgccagctgcaccagccgagccagacggcgggccacgggttcaagaggggcacgtcgggcagcgccgccgccggcgccggcgggaggagaagttccagggcgccgcggatgcggtggaccaccgcgctgcacgcgcacttcgtgcacgccgtcgagctccttggcggccacgagagagcaacaccaaagtcggtgctggagctgatgaacgtgaaggatcttacactggcacatgtgaagagccacctgcagatgtacagaacagcgaagcagcagggcgcagacagaccatgtgtagcagttgcaggccatgggcatgccag

SEQ ID NO: 1095 - DNA, 1694 bp, Zea mays
  Clone ID: TF_ZmC1401_4
ggcgcggctcaggtggacgcgccagttgcacgaccgcttcgtgctcgccgtggcccaggtcggcggcgcagacaaggcgacacccaagtccgtgctgagggcgatggccgtgccggggctcacgctgtaccacctcaagaggcacctgcaggtccgtccggccaccgccgaattatttctctcttggttggttgatgacgatcgcgcgctcaactctgccttgcctactccttcctgatccatcgaccgtgtgcatgcggtgcacgcgcaccacactgccgctgcagaagtaccggctggtggcggtgagccgaggcgtcgcttccgcggacaaggcgacgcccaagtccgtgatgagggcgatggccgtgtcggggctcacgctgtaccacctcaagagccacctccagaggtaccggctggcggtgagccaaggcaccgcgtccccggtgggcgagggcgacaacggaggtggcgccaacgagcggtcgtcctcctcggagagccagctggacgagtacgacgacggttccgtggccgacctgcatggtgattcttccgggagcatggcggcgcgggtgcagagagaggcgaaaaggaagcggcatgagcagatgcagatcgaggtgcagcggcacctccagctgaggatcgaggcgcaggggaggtacatgcagtccgtgctgcgccgggcgcaggaggccctcgccgaccacatactgggctcgccggccggcgcggaggcagagctctcggagctggcctccgcggtggagaccgggaccgggtgcctgtcctccacctcctgctgctccacctcgccttccccggtgcgccaccgctccgccgacagctgcgtgacgtcctcctcctcctcctcctcggaggccgagagccaggcccccgccggcgccaacacgtgcgctggtacgcgcgactgctccgtcgagcggccggtgcaggacgaggagagtacattcctgcagaggcacgaggacgaggacgaggcagaggaagccgacgttggagctgcagctgcagctgaggacgaggacggcacttcgtcagagattgatctcaacaggtaggcgacgaagatcctgatcagaagcatctgtgctgcatgtgcccagcatcggatgattggcggggtggccttcaaggttgggacttgcttgggagggggcaggcttttgagcaacgtctgctgctgaaacagctggctacatacactgcaagtctgcagcgaccacactgctcttcattccataatatatgatatacataatattccaatttatgcaaaaaaaaaaaaaaaaaaaaaaaaaaaaaaaaaaaaaaaaaaaaaaaaaaaaaaaaaaaaaaaaaaaaaaaaaaaaaaaaaaataaaaaaaaaaaaaaaaaaaaaaaaaaaaaggatctttgcctattcaccattgttaaagggcaaattttggaaaaattcaaaaaaatgagggcggatcaaacaaacatataatagggcccaatttccctaaaaggggattggaaaacaaaaaaatggcaactgattaaaaaaaatacaaaattggaaaaaactttaattacccaaaattaaaggaatggaaaaaaataccacctttaccagcagtaaaaaaagaaaaaagatctgcacaatgaggccctttcaaagatggactcaatcttaaggggaa

SEQ ID NO: 1096 - DNA, 956 bp, Zea mays
  Clone ID: TF_ZmC2088_2
gactcatgacctaatcaccaagatccaatccctcccccttcgagcaagaacaggcgacaaggctggacctgctgccaattcacaagtgcagcagcagaagcttgtcgttgcacaatggctactactgctgctgcagcccccgacctctcgctgcatatcagccctccctcgccgcccgatgatgctaggagcagtgacatgctcttctccaagcagacgctgtgcctcggactcgttcagacgacgacggcggcggcggcgcatgatcaggatggccaatgcgacgacgtccagcagcagcagcggctgcaccagcctagccagatccagaggttcaagaaaacctcgtcatcgtcggcgccgttgttatctgccggaggaggcacgacgagatctgggaacggcaacagcgggggcgggaagaggagctccagagcgccgaggatgaggtggaccacggctcttcatgcacacttcgtccatgccgtagagctccttggcggccatgagagagcaacgccaaagtcagtgctggagctgatgaacgttaaggatctcacattggctcatgttaagagccacttgcagatgtatcgaacagtgaagggaacgacggcagacagatcatgtgctgcaggccatgtccagatgagagacatgggctttctgcacaggggttgtgaactgaatggcttcgaagcgtttagcaacggtacttctaatgctaccgccaataatagggatggaggaccagcagaggcgcgcatcagcaagacgctgccgcccccccgccgctcgtcctaggccagcaggacagtgcgcggcgtctgcatccaggcttccccgacacggccatcagcagcagcagaccgtcatcctggagcgcaggcgtggcaagccgctggtcgtcgacgacggcggcggcgccttcgccgtcaagtggcaggagtagcata

SEQ ID NO: 1097 - DNA, 1327 bp, Zea mays
  unsure (1)..(1327): unsure at all n locations
  Clone ID: TF_ZmC637236_1
ccggccggatcggctttgctcagactctcttcacagatatttatatataacgagcgcagctagctatgatggctagagcctgacagaattgacaacctatagatagaggctaagctagggtgcgaaccaccggatctagatgagctaggcagtgagaatgacacgtttgagagaaaaggatccggctgtacaatcgctcataggtgtcgcggatgcggtggacggaggagctgtaccgcttgttcgtcgaggccgtctagtgcctcggtggccaggacgaatgaactccgaatagaattcttcagctgatgggcgcgaagggagctaccatatctcatatcaagagccatcttcagatgtacagaggctccatctcctgcagtagcagtacccatcatcagtccagcctccagaagtcttacatcaaccgctagcgagcaacaactagcgcgtgttcttcacgcgtgaagattgtgcgtcacaggaaggcaacgctccagcttcagacaagaacatctataccaccacgctccgtggttgcggccagtactcatcaccgtaccaaataccttcgctacagcaagtgttcacaagctgttaacaaaagagagggcgtgtttggagctccgacgtgctatcaacagagaaccggccgggtattaggccaagtcacactaggaagcacgagacgcagcagcacacgggatgcgacctcacgctgtcgatcgggctgtgggaggacgcgagcagcagcgacgacgccgacggctcgagctccatcagcgaggagctgctgcctgctccggtagcgggcggcgctcgccgcgtcgccgccgtagtgaaggaggaggaggagagcaagccggcggctctgaacctggacctgaccatctcgtcgtcctggctggcctgacgacgcacgccggcggccggctggcggtgttatgcgtacgtggccggcgtaggtacaaatacgtacatactatacgtggactcttgcagatcgagcagcagactgtgtgatcagggcatcggtactaggactgtatattttcgtgtcgtcctgcccactccgttctagtcactctttttttttcttattagatcatctgtacaacattttcgggtccgttcgattaggaacggccgcctgggcttcagacgacggtgggtgaggaatttctgcggccctttttccttgtccggngagaaggcgctgtatacctcagttcctcacatgtcatcgtctgatcgattgagcatatacagtatgttattagttctggcaaaaaaaaaaaaaaaaaaggggcggccctcgagctccagc

SEQ ID NO: 1098 - DNA, 1000 bp, Zea mays
  Clone ID: TF_ZmC1230639_1
gttttttttttttttttttgaagacatgcgtccatataaatactcagacttggagtacatgcataagctaacagctatatgtaagtacttgtttacttaattattggtggtacatactagaataataacttaatctgagaagacatttaaattaatgcagcaatgcgaacctatcagtagtgttgactgagtttttgttgcagatttaaattagtagccgccgtccccttcaccagcgcctcttcttctgagaatgaccatgtctcccgcatggccgccatggcctgctgctgctgctacacatgatctgtctgtactacccttcactgttctgtacatctgcaggtggctcttgacgtgcgctagtgtaagatccttcacgttcatcagttccagtactgacttcggtgttgctctctcgtggccgcccaggagctcgacggcgtgcacgaagtgcgcgtgcagcgcgggggtccacctcatccgcggcgccctggagcttctcctcccgccgccggcagcggtgcccgacgagctcttcttgaacccgtgggccgtctggctcggctggtgcaactgcagccggagccgctgcgcgtgaaggttgtgctcccgcgccgccgcggccgcgtcgtcgtcgtcgtccaccttcttcgtcgccacggcggcgtcgtcgtcgtcgagctccagccccggccccggccccagccccagccccagcagcagcctcggctccggcagcacctcgacgccgccggccggtggcgacggagggcttatgtggagtgagagatcaggaaccgccgccgccgtcgtctgcacacccacgccgccgccggtggaaacgccccagcagcagcctcggctcatggtagctcccaacgggtttgcagacggtgagctgagcttcttggtggttccaaagttagaggaaaggatggaaaggagaacctgcagcaggaagaggtagtagtgggctggggtagagttattaggtcat

SEQ ID NO: 1099 - DNA, 844 bp, Zea mays
  Clone ID: TF_ZmC519380_1
ctctctctccctgctccctgcctcccctctcccctgctttgaccctgctgcccggccggctgcctggctttatctgcccgccgcgcctttccccgccgcttggatttgtaggatccagcgacgcccgtccccgcgccgctcgccggggcattaggtggcccggccgtgccgtgtgggactcgcgggggaaggaagatgaccgtggaggggagggtcggcggcggcggcaaggacaagttcccggcgggcatgcgcgtgctcgccgtcgacgacgaccccacctgcctcaaggtcctcgagaacctcctgcgccgctgcgactaccatgtcacaaccactgggcaggcagccaccgccctcaggatgctcagggagaacaaggaccagtttgacctcgtcatcagcgatgtccacatgccggacatggatggtttcaagctcctcgagcttgtcggtctggagatggacctcccagtcattatgttgtctgcaaatggggagacgcagacagtcatgaagggcataactcatggagcatgtgactacctgctaaagccggtgcgtcttgagcagctgaagacaatatggcaacatgtgattaggcggaataccaagaaccgtggtagtgacaatgatgatgccggtcagaaggggccaaatgctgaaggtgagaatggtggtgctaaccgcaacaagaggcagtcacggagggatagagatgacaatggagatgatggtgacgattctgatgagaacagtaatgacaacggcgactcgtcatcccagaagaagccaaagggttgtgtggtctgtggagctgcaccggaagtttgttgctgctgtc

SEQ ID NO: 1100 - DNA, 442 bp, Zea mays
  Clone ID: TF_uC-zmflteosinte056b03b1
ttctatctctttacctgatgatgactggtggagctcaaggaaggaatcgcctatcctaagatgagcaagaaacgtactgacctggagttctgcaggctgacagcagcagatgtatcatcagcaacagctccacacccataaccagcacctgtcctcgtcaaggccgggcttacctcctgagaagcagttcctcctgcacggagcaggaggcggcggagatgcagggctcgtcctctccaccgatgctaagcctcgcctgaaatggacacccgagctgcacgagcgttttgttgaggcggtgcatcagctcggaggcccagacaaggccacgccgaaaactatcatgaggctcatggggatccctggactcaccctgtaccatcttaagagccatctccagaaatacagacttcagcagaatttccaggcccaagctcatact

SEQ ID NO: 1101 - DNA, 325 bp, Zea mays
  Clone ID: TF_LIB3597-003-P1-N6-G6
gcctctccgagcgccgccagcagcgccgtcacggacgcggccggggcgcaccgccggcaacatgcgcagcagaggaaggcgaggaggtgctggtcgcccgggctgcaccgccgcttcgtcgccgccctgcagcggctcggcggcgcgcaagtcgccacgccgaagcagatcagagagctgatgaaggtggacgggctcaccaacgacgaggtcaagagccacctgcagaaatacaggctgcacacgcggcgcgcgtcgtcggacggcggtgaccagcacgcgggcggtctgtggtcgtcggcccctgagcagcattacacgacgt

SEQ ID NO: 1102 - DNA, 798 bp, Zea mays
  Clone ID: TF_LIB5117-022-A1-PF1-A5
atcgtcccgagtcctgacctcgccacacttcgttttctgagccaaacttctttctgttccgttgttcagagtagattttgctctagtactctagatgaacaccaagaagttcaggccgcccggcgacgtcgtcggctcggcagcgctctgcgatccttcgtcgccgcagcagctatcgtcgtcgctccatcaggaggagctcgagaattctgctactagtagccagcagcactgcgcgggttgcaggctgcacgaggactacacgccgtggtcggctctcgcgcagagctgccttggcacagacaacgccgcgttcgactgcgccgagagcctgttcgactacccccccggaatgctcctgatgccgatagccaggacgcactatcagtatcagtcgtcggagaacgaccgctgccggccacggccgcagcgggatgcaatggagacaacacctgcacaactccacaagcagccactgccgccgccgccgcagcagcagcaagagagggatcatgggttgttcagcttcagcaacgcttccaccacttggtctcgtggtggcgagccaaagacatgctcgttctcacctcttgtggccgcgccggacacaattctcccggcgatggagaaccagaaggtgccgctgccaggaaactgcatggacgcgcctgtgaccccccgtcggcgacggcgccgccagggcgccagctgctgaatccagcaccgcgccgaggaagacgcggatccgatggacgcaggacctgcacgagcggttcgtggagtgcgtgaaccagctcg

SEQ ID NO: 1103 - DNA, 371 bp, Zea mays
  Clone ID: TF_LIB3355-001-P1-K1-E9
gcgccggcgttcgcgccgctctgcttgagaacggacgacaaggctgcggctgcgcgcgtcggggtgccggatctgtcgtccttgctgtcgtcgccggcgaccatgcctcctgcggacgccggcgccgaggagagccgtcgccaggttgtgggatttgcgcaagctgcggccagggcggctgccatggcgccgtctgcccctgcgcttgggctccagtcgcagcagcagcagcagcaggcaaggaaggctcggcgttgctggtcgacggagctgcatcgcaagttcgtcgccgccttggatcaactcggtggcccccaagttgccacgccgaagcaaatcagggagctgatgaaagtggatgggctgacaaa

SEQ ID NO: 1104 - DNA, 2656 bp, Zea mays
  Clone ID: TF_ZmC10296_1
ggtaccctcgggttcggccgcacctcggacccatcaggtgctgctgtgctgggcgagttctcccccccttccttgcttttgtctggcattcgctcgctctagtttcgcgcaacccggccgccgccgccgcctcgggtttctcgcctgtggctttgagccgagaggttggggactcggtttccttcctgctctgagttgggtttcgcgcggctcggactttggccggcgggcgaataaaccggccggatgcttctgggcgctgcggccgcgaggatggaggagaagcgtgtgatcacggggagggagcgggaccagttccccgtcgggatgcgggtcctcgcggtcgacgacgaccccgtctgcctcaaggttctcgagaccctgctgcggcgctgccagtatcatgtaataacgaccaaccaggccatcaccgcgctgaagctgctaagggagaacagggacatgttcgatctggtcatcagcgacgtgcacatgcccgacatggacggattcaagctccttgagcttgtagggcttgagatggacctacctgtcatcatgttgtcagtgaacggggagacgaaatccgtgatgaaggggataacccatggcgcctgcgactatctcctgaaacccgtccgcatcgaagagctaagggacatatggcagcacgtcgtcagggacgcgtggggcaagcgagagcgcagcaaccttgacgtctacaaagatttcaacaggctgccaggcgcggatccatgccacagccacggccacggccacggccagaccactgccggggcttccgaccagagcgggaggatcggcaggaagaggaaggaaatgcacagcgacgaggaggacgacggcgaggagaacgatttccaggagggcgacgagccctccgcggctaagaagccgagagtcgtctggtcgattgagctgcaccggaaattcgtcgcggccgtcaaccagcttgggattgataaagctgttccgaaaaggattcttgagcttatgaatgtggagaaactcaccagggaaaatgtcgcgagccatctacagaaatacaggctctatctgaaacggttaagtgctgtggcatcacagcaagctagcattgtcgccgcatttggaggtagagacccctttctccacatgggagcctttgaaggccttcagagctaccaacctttcgccccctgtgctgctctatcgtccttcatcccacaccacggctcgcttggtagaactaccgcggcagcattcggggtcccggagcttgctcctgccatcacagttcaagctgctgccagcaatggcatgataagccactgtgctggcgacgcaagcaagtttcagctctccggtatacaagaaaaccagcaaccaaatctgggacaaggctcggccacctctcttgggctgccccagctccaacagaagtggatccagcaagaaactggcgacttgtctgctgtcttctctgggagtgcactggctaacactctgtctggtgcactccagagagttgcgagcagtccattgccaccgcaagaacttttggagggcgtacaaaccaaagttagtgcccagccaccaataacaatggcatctgtgagttcagaacttgttgagaggactgttggagtttcggctaatttgcaggactccggtatatccccgcagggcactcttccaataaatgatggatttactgctgacaagttacagctgcaagatccattcgacagcaatggtggaacaaatttttcagtaaacatgcctgtttgtccctctggtagccttacagcatccagcaacgccaagggtggtgctagttcgtgcagtccagtgctgctcgctcctgatactgggagacattcaaactacttgcagtttggagttgcaggcaactctggacatgacatgaacgatattaaacaggaccatctgcatcaaggattgagcactggaggtttcaatcacgattttggcacctgtatgactgaacaaacagatccaaatgtgccgtatcttatgccacaaatgaagcctaacaccttgtcatcagaggataaactgaagcagaggaatatttatgatttggggattccaaagctccatggtggttttagctctagtagctgcaattttgatggtcttctcaattccatgatcaaagcggaaaaggatgatctctcattcacggatagcgacctggggtgcgacttctttccactcggtgcttgcatatgagacctcttaacaacccctcgtgcagattggccctcgacgggatgggatgggactacggcctacgggagaggttgtaaagtacactgcttaggagcattggccagtttatgctgcctaatgtgttactatgcttggtactgtgcacactagaaatgctagggatacaggtagctacggacatgccttgtaatctacatttcctcctcttcgaatgggaaatgaaagtgattatggttaggtaaaaaggagcaagtataatgctccaaattaacatcatcttcatcttaaaattttaccaaattttgtttccaagtgtcattagctcaaaactagaccattaggtgcattgatgacacgtataatcgaaaatattgtaatagtccttcctttggcagtgatt

SEQ ID NO: 1105 - DNA, 2289 bp, Zea mays
  Clone ID: TF_ZmC21783_1
cctgtcgtctcgagagagcggaggccctaatactattgtcaccctccacatgttagggggaccatcaggcgtcttgcattgtagctagtccattgctctcatcttctcttcttcttcccccagtcctccccccctttcccctcttcggcctctctcgctcagctcgctcttcattaagcgagctcacgtcgttcctcccttcttcttcttcttatccgttgttcaattcgttcagctagccggccagagatcgagcatcatctccatcatcgattcatccatctcatctttctcttcttctattctatgtcgtcgtcgtcccagattagatcgaagctgctagcagtctatccagtctctagctagctagctagatcaagcccgcagactatataatataatacaagctagctacgtgcttattattgctttattagtctagaataatcttgatatatacgatcgaacatatatctcgatctccaccgatacacacccggccctatccatgcttgaggtgtcgacgctgcgcggccctactagcagcggcagcaaggcggagcagcactgcggcggcggcggcggcttcgtcggcgaccaccatgtggtgttcccgacgtccggcgactgcttcgccatggtggacgacaacctcctggactacatcgacttcagctgcgacgtgcccttcttcgacgctgacggggacatcctccccgacctggaggtagacaccacggagctcctcgccgagttctcgtccacccctcctccggacgacctgctggcagtggcagtattcggcgccgacgaccagccggcggcggcagtagcacaagagaagccgtcgtcgtcgttggagcaaacatgtggtgacgacaaaggtgtagcagtagccgccgccagaagaaagctgcagacgacgacgacgacgacgacgacggaggaggaggattcttctcctgccgggtccggggccaacaagtcgtcggcgtcggcagagggccacagcagcaagaagaagtcggcgggcaagaactccaacggcggcaagcgcaaggtgaaggtggactggacgccggagctgcaccggcggttcgtgcaggcggtggagcagctgggcatcgacaaggccgtgccgtccaggatcctggagatcatgggcacggactgcctcacaaggcacaacattgccagccacctccagaagtaccggtcgcacagaaagcacctgatggcgcgggaggcggaggccgccacctgggcgcagaagcgccacatgtacgcgccgccagctccaaggacgacgacgacgacggacgccgccaggccgccgtgggtggtgccgacgaccatcgggttcccgccgccgcgcttctgccgcccgctgcacgtgtggggccacccgccgccgcacgccgccgcggctgaagcagcagcggcgactcccatgctgcccgtgtggccgcgtcacctggcgccgccccggcacctggcgccgtgggcgcacccgacgccggtggacccggcgttctggcaccagcagtacagcgctgccaggaaatggggcccacaggcagccgccgtgacgcaagggacgccatgcgtgccgctgccgaggtttccggtgcctcaccccatctacagcagaccggcgatggtacctccgccgccaagcaccaccaagctagctcaactgcatctggagctccaagcgcacccgtccaaggagagcatcgacgcagccatcggagatgttttagtgaagccatggctgccgcttccactggggctcaagccgccgtcgctcgacagcgtcatgtcggagctgcacaagcaaggcgtaccaaaaatcccaccggcggctgccaccaccaccggcgccaccggatgacatactatctcgtcgacaatacatgcatgtacaatagacggatgtctagtagtatagtagattgctgctagctagctagccgctagagtgtagtagcatatgcatgccttttttttcttcttctttttttgcccttattattaagctggctaatagcgattgagatggagcttgacacagatctgctagctagctatttgagggtttctcttgtatgctacctattgctgctgcttgctgctgagacaagtaatgtacgtacgcctgtgcaaacgacacatcggattgtattgtattactagttatatgaacaacaacaataataataggcacatgcatgcctgcctagtatgtgagctgctagctagctacatgcatgttgcgcattcctttcc

SEQ ID NO: 1106 - DNA, 564 bp, Zea mays
  unsure (1)..(564): unsure at all n locations
  Clone ID: TF_LIB4744-075-Q2-K1-H12
accacttgcctgtacactcctcgttccgcgtgcgagcgaaccctgttcctgttcttgaatcttctgagcccagtccttgtagctagcagatagatcgctcaggcggaaagatcgagagaaggtcgccccaggatcgagatctagagcgagaaaggtttaagagggaaaggcgcggcaaggagtcgagagaatagaatgttcccttccgccagagaagcaggccagcaccggtgccgcgaacccaaatgatcggcctatgtgcgggcaaggcggcgactccggcggtctcgtcctcaccaccgaccccaagccccgcctccggtggacacccgagctccatgaccgcttcgtcgatgccgtcgcccagctcggaggcccggacaaggcaacgcccaagaccatcatgagggttatgggagtcaagggcctnaccctctaccacctcaagagtcaccttcagaaattcaggctagggaagcagcacaaggagttgggtgaccatacagcaatggagatgcaacgtatcgtggcctctttttcaggcatgatagccagaagcatgaa

SEQ ID NO: 1107 - DNA, 567 bp, Zea mays
  Clone ID: TF_LIB3632-054-Q6-K6-E9
cccccccccccccctctccagcggcaaaagtgttgcactgcagcactgctagctaggagtatactatgagcttgctagctagcctggctgatggatggtcactactcatgtgcataaacgtgcatgtgaagtggctgggcatccaaccaaatatataagctactggcaaccggctgccggctgctggcaggtcgttcttcgtgttgtatgtagcttgaggctgaggccgggagatgaccactgcttcgtccacgccatccacaagctcggaggccaggacaaggctacgccgaagcgagtcctgcagctgatgggtgtgggaggactcaccatatctcatgtcaaaagccatctgcagatgtacaggaacatgagaaatgatattggaatgcaagggacgacgatgcagctggtgcaccgggcggaggagcacgtatacggccgaggcggcatgcatatggaactctgcgccgatacacagcgacgacgacagccgcagccgcagccgcagtgcggtcatgatgagtgcgatggcccggcctgctgctgcatcgtcgtctgccgctc

SEQ ID NO: 1108 - DNA, 1789 bp, Zea mays
  Clone ID: TF_ZmC2322_1
cattgggtccctcgaggccggccgggctcagtcacccacccccaccccaccccaccggcaccctcaccctcaggcctccgcctctttctcagcttctctccggttccttccttccggtcgccgattcttctacgcgaaagattcctggctgcctctcgtctctcgtctcgtttctcgcgtgcatggggctggacgtcggggagatcgggatgggcctggatctggggctggacctcaggctgttcgccgcgcggagcgccggagggatggccaagggcgctgcgccggcggggatccagtcctgcatcaggagcctcgaggtggagcgcaggaagatcgaggtgttcaggcgcgagctcccgctctgccttcgcctcctcgccgacgtgatcgacgagttgaaggaggaggctgccaagagaggagaggacgacgacggggcgacggtggtggacgacggcgacaaacggaaatggatgagcaccgctcagttgtgggtggacagcgacgccaaatcggacgagtctgacaaagagcaacagagtgaaatcacgtcgccgccggagcccaagttgttgggtggtggcgcacccacgccgataagggcggccgtttcggcggtggcggtgccaccacccctaccgccgccgttgttcagaagagaagacagctccgccagctctggcctgtcgttggtatcgttgtcgccggcaaccaaggcggcggtgccgatttctcctccggtggtggctgccagcggtactaccaccagcgccagattttgtggcaccaccatgccaccatctggctccgaggtcatcaacatgcactcgcaggctcagcagcaagccagcaggaaggcaaggcggtgctggtcaccggagcttcaccggcggttcgttgccgctttgcacgaactcggtggccctcaagtggctactccgaaacagatcagggaggtgatgcaagtggacgggcttacaaacgatgaagtgaaaagccatctccagaagtaccggttgcacaacagaagatcctcccccggcgcggcggcggctccggtgagccagtcgatcatgctggtggatggcgtctgggctgctcaggagcaaagcagcggctcgcagtccgggtctcggcagggcccgctccagttctccagggcaggtatggccgtcggtggcggcgacgacagcagcagcagcgacgacgacgaagacgacgacaagtcggaggatggctacagcctgaaatgcgtgtgaggctgaggcaggctgcgtttgcggaagatcggatgagagtgtagagagatagcgttgtcgcggcttgagcatgcatcggtggattcttgagtctgtccgagagagtggttgtagtgcaggcaggcatgtatacagggagattaggcgcgcgcggcccgtgtgcgcccaagagatgaactgatcatgcggcgtttggaaagctgataggcgttttgtttgagtctttgctgacttctgttaacttccgggcagatcacaaaattttcgccctgagaataacttattaataataatattactgcggcggctgctgttattttttaaaaaaaaaaaaaaaaaaaaaaaaaaaaaaaaaaaaacccacacaacattgtcactcagaactgctgatcgacgatttgcaggcagggtgcctgccttcgcccaacgtgcacaagactacgaggcgcttggagcccccctcttggcctgatgacttgcacgacatttattgagaaaaacctggacctgcacccgctgacgatgga

SEQ ID NO: 1109 - DNA, 754 bp, Zea mays
  Clone ID: TF_LIB4740-007-R1-K1-F4
attcctccaccggcctcatcccccaactccgtcgagcattaccgccctctgggctggcgcggcgtggaggggacagctggagatccgcccgtctctgcttggattgcttccttctcccgcagagggtatgagcaatgtactcaccaaaaccagagtctagttttggcccaaatcccaactcaggtacacaccagcagcaaatggaattaactggggccaacatgggtcctggtaatggagcaaataacaataccaacatggctgggaggcaacgcttacgctggacaaatgaactgcatgaaagatttgttgaggctgttactcaacttgggggtcctgatagggcaactccaaaaggagttctgagaattatgggtgtacaaggattaacaatataccatgtaaaaagtcacttgcagaaatacagactagcaaagtatattcctgatgcttcaactgatgggaacaagaccgataacaaagacccaggagatttgcttgccggacttgagggatcctctggattgcagatatctgaagccctcaaactgcagatggaggtccaaaagcggctgcacgaacagttagaagtacaaaggcagctgcagttacgaattgaggctcagggaaagtacctccagaagatcatcgaagagcagcagcgcttaacaggtgtgaaatctgaaactcctgctgggaggtgcttctgtcactgtatcaagtgatcaattcccagactcggagcggactgagc

SEQ ID NO: 1110 - DNA, 2088 bp, Zea mays
  unsure (1)..(2088): unsure at all n locations
  Clone ID: TF_ZmC785_1
nnnnnnnnnnnnnnnnnccggccgcacaaacaaactcatttcccgtctccacttgttcctcctctgtgctctcgcctttccattcctccaccggcctcatcccccaactccgtcgagcattaccgtcagagggcggcggcgcggcgcggcgccgccgccggcgacggggaccgcgtgaggcaggctcccctcaaggctcgtcctcctcgtcgggaggcgtcgccgttgccccgccctctgggctggcgcggcgtggaggggacagctggagatccgcccgtctctgcttggattgcttccttctcccgcagagggtatgagcaatgtactcaccaaaaccagagtctagttttggcccaaatcccaactcaggtacacaccagcagcaaatggaattaactggggccaacatgggtcctggtaatggagcaaataacaataccaacatggctgggaggcaacgcttacgctggacaaatgaactgcatgaaagatttgttgaggctgttactcaacttgggggtcctgatagggcaactccaaaaggagttctgagaattatgggtgtacaaggattaacaatataccatgtaaaaagtcacttgcagaaatacagactagcaaagtatattcctgatgcttcaactgatgggaacaagaccgataacaaagacccaggagatttgcttgccggacttgagggatcctctggattgcagatatctgaagccctcaaactgcagatggaggtccaaaagcggctgcacgaacagttagaagtacaaaggcagctgcagttacgaattgaggctcagggaaagtacctccagaagatcatcgaagagcagcagcgcttaacaggtgtgaaatctgaaactcctgctggaggtgcttctgtcactgtatcaagtgatcaattcccagactcggagcggactgagccctccacacctgcaccagcatccgagtctccaactcaagttggtgcttccaatagggacactggagaccgaactgaagcaaccaagagcacctgtcatggtgattctctttcccgcaacgagccactaacccctgattccaactgccagaacggttctcctgtcgctagtccaaaccatgaaagggcagccaagaggcagcgaggcagtggtactgaattcttagattctgaggctgagttttcccttccgcgccacatcttcgagtcgagttcaggctcagagttccaacaatactcaatgtcctactcaggacagtagcttctgatgttcacatcatctctgcaccgttgctagcttgttcagcacgatgcgcatggtccgtaggtctgggtaggttgatgtctcaaggagcgtgttgttggtaaacaaagctgtaggtgttcagtgattgtctacatggtatacgtgaccagctatttaagttcctaggtttgtaacatgtatgtccgcctgcagttcagttgagatgcttcaaggctaaggttctgttgtgtgacctgtagacacgaggctgtcagcttgtattctcttggtaatgtgtgtcagcagagcgttagcattaagtctaattgaacagtgctgttatctgtaacgtctgagtttgatcagaaactgaagttaattgaggaagacatcaacaatgtcaatactcaatgtcctactcaggacagtagcttctgatgttcacatcatctctgcaccgttgctagcttgttcagcacgatgcgcatggtccgtaggtctgggtaggttgatgtctcaaggagcgtgttgttggtaaacaaagctgtaggtgttcagtgattgtctacatggtatacgtgaccagctatttaagttcctaggtttgtaacatgtatgtccgcctgcagttcagttgagatgcttcaaggctaaggttctgttgtgtgacctgtagacacgaggctgtcagcttgtattctcttggtaatgtgtgtcagcagagcgttagcattaagtctaattgaacagtgctgttatctgtaacgtctgagtttgatcagaaactgaagttaattgaggaagacatcaacaatgttctgatactaaaaaaaaaaaaaaa

SEQ ID NO: 1111 - DNA, 529 bp, Zea mays
  unsure (1)..(529): unsure at all n locations
  Clone ID: TF_LIB4744-062-R1-K1-C9
ctcgcccctccccctcccctnctcccctcccctcgccgcccatctcctccgcccctttttgaccccggttacgaatccgcaccagggcctgcggcggtatactcggttccctgcccccccacgaccacgccgtcgactactccccacgcccgaccggcgctcccggaaccgccggaagtgggaaacaacggctacggaggacatcggatcttgataatcgctttaaggatgccatcgcccagattggtggaccagacagagctacacctaaaggggttctaactgagatggatgtaccaaggatcacaattaatcatgagaagagccatctgcagaagtatcgacttgcaaaatatatacccgacactagggatgaaggtcccaaggacgaaaagataaattatagtgattccctttcgaacacggattcggaacgagaatagcaaatcactgaggcactaaaaatgcaaaaggaggttaagaagctactacatgaacaaattgagggttaaagacaaatggaactaat

SEQ ID NO: 1112 - DNA, 1415 bp, Zea mays
  Clone ID: TF_ZmC34044_2
agagggaggctgcccattattaaccctccctccccacacgcagaagacgacgaccggaagcaaaacagccagccaaccaaccaaccagaccagggatggatggtgcgcaaccgagccaatgatctgtaccggtccggaattcccgggtcgacccacgcgtccgttagccagcttaccaaccaaccagaccagggatggatggtgcgcaccaagaaagggggcaccgcaccgagccaatgatctggaagaagagaggtaggatttaggcacggcacctatagcccctgacgagagagagagggagagagatttggtcttggataagagtggagagactggagacgggtgggtggagtgagagaagtcactcggggagcctccagattctgaatctcccgcaacccgtctcatcgccggagtggagttccaggcgagtgattatcgagccagtaagccatttgcaagcactgaactgaaccctcagagcgttgttgcgatggaccaaatcgctacccccgacgaaacagcacatgcctctgcaccttcagttcataagctgtttgatgctaaattaggccaccatagcgtgatggatggcaccttggcatccacgagtcagtcatcaaacatcaagacccagctgatccggtcatcaagcttgtcaaggagcatatcagttaaccttgagaagaggagccctgaatctgatcctgaaagcccacagtctcacgtctcgcatcctaaatttgcagaacccatgttctcgaattcttcgacgttctgcacaagcttgttttcgtcatcttcgacaacagagccatgccgtcaaatgggcactttacctttcctgcctcacccccctaagtgtgagcagcaggtttcagctggtcactcatcgagctcctctctgcttttaagtggtgataccggtttagatgtggctgaacagtcagatgatctgaacgacttgctcaatctttcgggagatgcttctgatggcagcttccatggagaaaacaatgccttagcttttgacgaacagatggaatttcagttcctgtctgagcagctagaaattgccatcactgacaatgagaagaatcctcatttagatgacatatacggcacaccaccacagctgtcatcacttccagtatcatcttgctccaatcagaatctagggtcaccagttaaagtccagcttagctcatctcagtcatcttctagctctgcaacagctaacaagtcaagattgaggtggacacttgagcttcatgagcgttttgtggaggccgtgaaaaagcttgaaggtcctgaaaaagcaactcccaaaggtgtgctgaaactaatgaaggtagaaggtctaacaatttatcatgtgaagagccatctgcagaagtatcggcttgcaaaat

SEQ ID NO: 1113 - DNA, 645 bp, Zea mays
  unsure (1)..(645): unsure at all n locations
  Clone ID: TF_LIB3603-002-P1-K6-E9
ccagggcctgcggcggtatactcggttccctgcccccccacgaccacgccgccgcctcctccccacgcccgcccggcgctcccggaaccgccggaagtgggaaacaacggctacggtggacatcggatcttcataatcgctttgtggatgccatcgcccagcttggtggaccagacagagctacacctaaaggggttctcactgtgatgggtgtaccagggatcacaatttatcatgtgaagagccatctgcagaagtatcgccttgcaaagtatatacccgactctcctgctgaaggttccaaggacgaaaagaaagattcgagtgattccctctcgaacacggattcggcaccaggattgcaaatcaatgaggcactaaagatgcaaatggaggttcagaagcgactacatgagcaactcgaggttcaaagacaactgcaactaagaattgaagcacaaggaagatacttgcagatgatcattgaggagcaacaaaagcttggtggatcaattaaggcttctgaggatcagaagctttctgattcacctncaagcttagatgactacccagagagcatgcaaccttctcccaagaaaccaaggatagacgcattatcaccagattcagagcgcgatacaacac

SEQ ID NO: 1114 - DNA, 1396 bp, Zea mays
  Clone ID: TF_ZmC11254_1
cgaaaaaaacaccaaatttctcaggcctccctccccgcgtcgctttcgccggccccaccacctgccgctttcccctcgcccctccccctcccctcctcccctcccctcgccgcccatctcctccgcccctttttgaccccggttacgaatccgcaccagggcctgcggcggtatactcggttccctgcccccccacgaccacgccgccgcctcctccccacgcccgcccggcgctcccggaaccgccgcattcacatgatgtatcatgcgaagaatttttctgtgccctttgctccgcagagggcacaggataatgagcatgcaagtaatattggaggtattggtggacccaacataagcaaccctgctaatcctgtaggaagtgggaaacaacggctacggtggacatcggatcttcataatcgctttgtggatgccatcgcccagcttggtggaccagacagagctacacctaaaggggttctcactgtgatgggtgtaccagggatcacaatttatcatgtgaagagccatctgcagaagtatcgccttgcaaagtatatacccgactctcctgctgaaggttccaaggacgaaaagaaagattcgagtgattccctctcgaacacggattctgcaccaggattgcaaatcaatgaggcactaaagatgcaaatggaggttcagaagcgactacatgagcaactcgaggttcaaagacaactgcaactaagaattgaagcacaaggaagatacttgcagatgatcattgaggagcaacaaaagcttggtggatcaattaaggcttctgaggatcagaagctttctgattcacctccaagcttagatgactacccagagagcatgcaaccttctcccaagaaaccaaggatagacgcattatcaccagattcagagcgcgatacaacacaacctgaattcgaatcccatttgatcggtccgtgggatcacggcattgcattcccagtggaggagttcaaagcaggccctgctatgagcaagtcataaggcaaacttcaccttgacagaaaattttcagagttgacctctccacgagatgagcattctcatgtgaatatatattatcttaacaacagaatgtacgggtttttgaccctgcacctgatcccttcagccacgtccagttattcttatcactgtagtatccatcaacaagtcctgtaattatgaggatggtgttacagagtttctagcaagcatttccatcgagggaatggccctgagttgatccatgtagcaagaaagagaacatgcttacaagcaatatatttgctgtgaaaagggcacgcccctggatcttcctgaaaaaaaaaaaaaaaaaaaaagattatggcaaaaaaaaaaaaaaaaaaaa

SEQ ID NO: 1115 - DNA, 1770 bp, Zea mays
  Clone ID: TF_ZmC2322_6
ctcgaggccggccgggccgggctctcagtcacccacccccaccccaccccaccggcaccctcaccctcaggcctccgcctctttctcagcttctctccggttccttccttccggtcgccgattcttctacgcgaaagattcctggctggctctcgtctctcgcgtctcgttctcgcgtgcatggggctggacgtcggggagatcgggatgggcctggatctggggctggacctcaggctgttcgccgcgcggagcgccggagggatggccaagggcgctgcgccggcggggatccagtcctgcatcaggagcctcgaggtggagcgcaggaagatcgaggtgttcaggcgcgagctcccgctctgccttcgcctcctcgccgacggtgaggactagaggcctctcgttctcctctcttgcggttgcggccttgcctttctctcctacagtatacgcgtcgcgctctgtcttgctccgtttctcgctgacgcgctggtctgtgcggccctggattgcgctggctgcagtgatcgacgagtttaagttggaggctgccaagagaggcgaggacgacgacggggcgacggtggtggacgacggcgataagcggaaatggatgagcaccgctcagttgtggctcgacagcgacgccaaatccgacgagtctgacaaagagcaactgagtgaaatcacgtcgccggagcccaagttgctcggtggcgcacccatgcccataagggccgttgcggcggtgccacccctgccgcctccattcttcaggagagaagacagctcttccggcagtggtctgtcgctggtaccacccgcagctaagccgccgattcctcccatgtctgccagcgacaacgcgagcggcagattctgtgccactatgccaccgtctggctctggggtcaacttgcactctcaggctcagcagcaagccaggaaggcgaggcggtgctggtcgccggagcttcaccggctgtttgttgccgccttgcatcaactcggcggccctcaagttgctactccgaagcagatcagggaggtgatgaaggtggacgggcttacaaacgatgaagtgaaaagccatctccagaagtaccggctgcacaacagaagatcccccggcgtcgtggctccggtgagccagtcggtcatgctggcgggcggcctctgggctcctcctcatcaggagcaaagcagctcgcagtccgggtctccccagggcccgcttcagttctctggatccggtgtagcggccaccgtcggcggcgatagcagcagcagcgacgaggacgacaagtccgaaggctacagccggaaatacgtgtaaaggccgcgttcgacggatgagagtgtagagatagcgtcgcggcttctgcttgcccgtctgtggcaataacagattcatcagtcttgagagaggttgtagtgcgtgcgcccaagagctcaactgatcatgggttggattgtttgtttgtcatgtacgtacatggaaagctgatggcttcctgacttttaatttctgggcaggtcccaaaattttcgccctgagaatgagatattatatagataacataaatacataccaaataacaaaactaaaaacaagggataaaatataaataacaatagaagacataaaaaacgtcacacgtgtggaacaatgcggtacaagttttggcccaacaacaagagcaaaaatgtatctactgggggggcgcccgggactttgttcgttccaaccagctacattatttggat

SEQ ID NO: 1116 - DNA, 1907 bp, Zea mays
  Clone ID: TF_ZmC1122_1
gattgggtacctcgaggccggccgggggctcgccatatggcaccaacagcaaaacagcgaaacagtgcagagacaagctacaacaacctaccctaacaggccattccttccactgcacttcattcgatcctgagctatagctggctgcctgagctcgctccaagaagtgtatctatagtatagacactaggcttcgtgtggcgtgctcgagatatgcttgcagtgtcgccgtcgccggtgcggtgtgccgatgcggaggagtgcggcggaggaggcgccagcaaggaaatggaggagaccgccgtcgggcctgtgtccgactcggacctggatttcgacttcacggtcgacgacatagacttcggggacttcttcctcaggctagacgacggggatgacgcgctgccgggcctcgaggtcgaccctgccgagatcgtcttcgctgacttcgaggcaatcgccaccgccggcggcgatggcggcgtcacggaccaggaggtgcccagtgtcctgccctttgcggacgcggcgcacataggcgccgtggatccgtgttgtggtgtccttggcgaggacaacgacgcagcgtgcgcagacgtggaagaagggaaaggggagtgcgaccatgccgacgaggtagcagccgccggtaataataatagcgactccggtgaggccggctgtggaggagcctttgccggcgaaaaatcaccgtcgtcgacggcatcgtcgtcgcaggaggctgagagccggcgcaaggtgtccaagaagcactcccaagggaagaagaaagcaaaggtggattggacgccggagcttcaccggagattcgttcaggcggtggaggagctgggcatcgacaaggcggtgccgtccaggatcctcgagatcatggggatcgactccctcacgcggcataacatagccagccatctgcagaagtaccgttcccacaggaagcacatgcttgcgagggaggtggaggcagcgacatggacgacgcaccggcggccgatgtacgctgcccccagcggcgccgtgaagaggcccgactctaacgcgtggaccgtgccgaccatcggtttccctccgccggcggggaccactcctcgtccggtgcagcacttcgggaggccgctgcacgtctggggccatccgagtccgacgccagcggtggagtcaccccgggtgccaatgtggcctcggcatctcgccccccgcgccccgccgccgccgccgtgggctccgccaccgccagctgacccggcgttctggcaccatgcttacatgagggggcctgctgcccatatgccagaccaggtggcggtgactccatgcgtggcagtgccaatggcagcagcgcgtttccctgctccacacgtgaggggttctttgccatggccacctccgatgtacagacctctcgttcctccagcactcgcaggcaagagccagcaagacgcgctgtttcagctacagatacagccatcaagcgagagcatagatgcagcaataggtgatgttttaacgaagccgtggctgccgctgcccctcggactgaagcccccttcggtagacagtgtcatgggcgagctgcagaggcaaggcgtagcgaatgtgccgcaagcttgtggatgatccccggggctgcatagctgctagctcgtccctgcacgcagtgcaacaaaagaaatttgtcgacatgccttttatgttttgaattcccgtgaaccgtttatggagcactcacagctcgttcagggtcagatgaacagaacattataggagtacattctttgaggtttcaggtttgagggaaatcaacctgagtgcatccaagtacagtgtactgccacagtgccacgtcggaaaatgaagtcttgacccgaataaaagggggggcccgg

SEQ ID NO: 1117 - DNA, 1590 bp, Zea mays
  Clone ID: TF_ZmC24081_2
ccggccgggaagagtagccatagtttgttagagcattcccccaaggaatataacaccattgtgtgacgagcaacccttcaccaaaaactaaggactgataaactgcaagagaccgttcctatcaggattgtggagtctgcaaccagatatcaatgcataacagaattgaagagatgtatcatcatcaacaacagcttcagagccacagtcatttcctgtcttctaggcagacattccctccagaaaggcacatgcttctgcaaggagggagcattccagcagagccagggcttgtgctttccactgatgctaaacctaggttaaaatggacacctgaactacatgagcgttttgtggaggcggtaaaccaacttggtgggcctgacaaagctacaccgaagacaatcatgagactcatgggtgtccccggactaacactataccaccttaagagtcatcttcagaaatacaggctaagcaaaaacatccatgcccaagctaatggtgtaaatgcaaaaaatgtgattggttgcaccatggcaatggacaaaccacttgaaggaaatgggtcaccagctagccacttaaaccttggaacccagacaaacaaatctgtgcacataggtgaagcccttcagatgcaaattgaagtacagcgccgactgcatgagcaactagaggtacaaagacatttacaactccgcattgaagcacaagggaagtacctacaatctgtgctagaaaaggcacaggagacactttcaaagcagaatgcagggtcagtcggtgtagaaaccgcgaagatgcaactgtcagaattagtctcaaaagtatcgacagaatgcctccagcatgcatttacaggctttgaggagattgatggttcccaaattctacaaggccataccatccaacttggcgatgggtcagttgacagctgcttaactgcctgtgacggctcacagaaagatcaagatatcctgtcaatcagtctttccgctcacagaggaaaggagataggaggcatgacctttgatatacaagagaaagaaagaggaagagaggatttgtttcttgacaagctaagcatgacgcctccaggccaactagacaggcgtgagagaggaagttttagtatgacacggaaggcagcaaaactggatctgaacatcaatgataccactgatgggccacagaactgcaagaaaattgacttgaatgggttcaactggacctaggaagagttagcaaaagaccttgcaaattaaatctgacttgattcatcaagagtgacaagcttataagcttgagattggctccttctgccaagatagcagcaaagagaggaagtgaaaccgaatgagttattccaaagaccagcagcatcgacatatcctccatggcaggacctgggtgatcctcggaacagctgcgctgtcggcccatcacgattcagcgaaataagtgatgaaattacaataagtagggcatgtagattggtagagtgtatttgagagagtctagtgttctcctccggctataccttattgtgattctgtacacaagcatataaatacaacgatttttgtt

SEQ ID NO: 1118 - DNA, 1133 bp, Zea mays
  unsure (1)..(1133): unsure at all n locations
  Clone ID: TF_ZmC1401_5
gtcgatcacccgctgagcttgcttgttttcctgccgcggtcgctgcttggccaggaccagctgcttgctgccgtcgtctcgtctgcggctactccggcctctcatgctggccacgccaccgacgctgcgatacgaagcgccgcggtgggcacgtcggaaatggcatcgtcgctgggagtgggtggtcagcagcaggggcacgggcacgggcacggcgaggccagggcgcggctcaggtggacgcgccagctgcacgaccgcttcgtgctcgccgtggcccagctcggcggcgcagacaaggcgacacccaagtccgtgctgagggcgatggccgtgccggggctcacgctgtaccacctcaagaggcacctgcagttggttggttgatgacgatcgcgcgcttcaactctgcctcctccttcctgatcgatcgaccgtgttgcatgcggatgcggtgcacgcgcaccacactgccgctgcagaagtaccggctggtggcggtgagccgaggcgtcgcctccccgctgggcgacagcggagatggcaccgacgagcggtcgtcctcgtcctcggagaaccagccggcggacgagtgcgacgacggtaccgtcgccgagccgcatggcgattcttccaggagcgtggcgcggatgcagaggaagctgcaggagcagatcgaggtaaacgaaacgatagagtccggtcggtcgatcaccattgtcccgaccttgtggttgtggcagtgaaaaccattaggtttcagccgattgccggccggttcgtgtttggctgctgatcaagctgagttcggcccatcatgaccacacacatacatacatggtggcaggtgcagcggcacctacagctgaggatcgaggcgcaggggaggtacctgcagtccgtgctgcgccgggcgcaggaggtcctcgccgaccacggcctgggctcggcagccggcgcggaggcggagctggcctccgcggtggacaccgggtgcctgtcctcctcctcctgctgctccccgacgcgccaccgctccgncgacagctgcgtgacgtcctcctcctcggaggccgagaaccaggcccccgtcggcggcgccacgtggcttcacacgtgcgccggtacgcgcg

SEQ ID NO: 1119 - DNA, 619 bp, Zea mays
  Clone ID: TF_LIB5117-031-A1-PF1-G6
aagcgctccgctctcgcggcgtcgctttcgccggacaccaccacctgccgctttcccctcccattcccaccaccaccgctcccatcctcgccccgcccggaccccgccccgattgggccatccatccgcctccgcctgattggccccggccaccagctcgcagcctcgcacgcttgcacgcacgcagcatttgattccctccctctctccccgacgagcgcggcgcacctgcgaggagacgacgccgggtcccgctcgcggcggcgctcttccgtgccgtactctcatgatgtaccatgctaagaagttttctgtgccctttgcaccacagagggctcagaatagtgagcatgtgagtaatattggagctttcggtggatccaacataagcaaccctgccaatcctgtagggagtgggaaacaacgtctaagatggacctctgatcttcatagtcgttttgtggatgcaatcgcccaacttggtggaccagatagagcaacacctaaaggactactgactgtaatgggtgtaccggggattacaatttatcacgagaagagccatttgcagaagtatcgccttgtcaagtacataacacaatcgcctgctgaaggttcc

SEQ ID NO: 1120 - DNA, 1607 bp, Zea mays
  Clone ID: TF_ZmC21090_1
ggagcgagagagagagagacagaaagagacacagtcacacagcgtagggcgctgcggcctgcggggaggaagggcaccagcttggtctttctcatccattcgcaaatcgcaacaaatcttgcatcttatcttaccctagaaaaacaaatcttgcatcttcagctgtctgtacgtgtgtgagagagagagagagactgcgtgccgcagcagcagctctggacaggcttacagtcagagagcgagggaggagccgggaagaggaggccggagggaacaaaaggggaagtttggttctttcctctaccacctggagcgtccccttgctagcgcccggtccggtgagctccataccatccagggagtgtgaggaaccgtcgtcgttgctggcgatccaagagaccaggagatgggcagcggcaggaacggcgctgtggtgaggcggtacgttcggtccaaggagcccaggatgaggtggagcgccgacctccaccgcagcttcgtgcaggctatcgactccctcggcggccaacacaaggctacgccgaagctcattctccagttcatgggcgccagggggcttaccatatctcatgtcaagagccacctccagatgtacagagctgcaagccttggcgcagaaagaggaggagggacgccagcccagctgctgcaaaggaggtactcatgcagcggtgatgagcgaggaggccccaaggaggagttcctgtgctgcccaccaccaccacctctgaaaagggcccggatgggatacgagagcatgcagggaagccatggagtcagtgatgcgaggactactgctgggggagggggactgtactgcatcgatgattacatgcaagccatggccgtgggctggagaataaaggaggagggcctcatcagatggcagaggagagatgcggctgctgctgctgctgcgccttccaacctccaagccatgggatgtttggtgcaagaatctgccccctttaaggtacgccgaccagaagcacaccgtcttggttctgcgctgaagcagcaggacgacgacgactccagcaaagaggacggaaacggacggccccagtccagcaatgcagcgaaggaggacgggccatctgagcagtgctcgctctcgctgtccctcggtaatctggacgcaaaatgcgggcgtggcacggcggcagcggcctcctcgcgaagcggcgagagcagttgcatcctcacggcctcgccggcgaggaggagctccagcgacgactgctccggccactcaggctgcttcgtcgtcggcccgggtggtgttgttagcctggagctttccctgtccatctgtggatcttagctagaccactccggccacttctggacgacgattctgtacatcagtgggcggcgttggtgatcgccgcgtttgtttttggtgttcgtgggcaggcacatcatgaccgtgttagaaagtttagtaaccttagaaccatagcgcatgttacttctagctaagctagtattatgttacctctctacctctagccctagctggtatgtgtaagtggcaaagtcaccaggcagcctccctttcagatccagagtagtaccattgtggc

SEQ ID NO: 1121 - DNA, 1591 bp, Zea mays
  Clone ID: TF_ZmC12579_1
ggattataggaataggagcgggggagtccgaggataggcaactcattgcttctgaatctctctctcctcgtcgcgacgagatcctctgcatctctacttccccggggaagtagctgctggcgtgtgtatctgactctcctcatcccgagttcttcactttcaggcatggtcgccgtgaagcagctcaccggccctgccagacccgctcacacgtgcgctgctcatgctcaccagctgctcagtgctcgatacgatcaccgtggcgcgtctcaagctgaattaccggaccggatttcgccatccaacgcttccacgttctgcacgagcatgtactcgtcgtcggcggcggattcctccaagtcgtgccggcaggcaggcgctctgccgttcctgccccatcctcctaaacgtgagcagcagcagcagcagtcatccagctctccatcactgctcgtctgtactgacctcggcaacggtggtcaagacgaggctgaagcggaacatccggctgagctcaaggacttcctgaacctctctggagaagcttcatggagaggcggtttccatggagagagcagcggcgtcgctttcagattcagagagaaggtggagtttcagttcttgtctgaacagctcgggatcgccatcaccgaccacgacgagagccctcgactagatgatcaggaggacatatacgacaggccgccgcaaacctcttcttgtccggtactgtcttgctccaaccaagaagagggtctccagagggcagggtctcctgttaaagctcagctgagttcatatcgagctgcatgtaataacaagccaagactgaggtggaatctggagctccatgagcttttcgtgaaggctgtcaacaagcttggagggccagaaaaggcaactcctaagggcgtgttgaagcttatgaaggtagaaggcttgaccatctatcatgtgaagagccatttgcagaagtatcgctttgccaagtatcttccggagacaaaagaagacatgaagtcctcttcagaagacaagatgccaggaagcaatcctggcagaaagaagattctcaaaagcttacaagtagcagaagctcttcggatgcaaatggaggttcagaaacaacttcatgaacaattagaggtgcaaaggcagctacaagtgcgcatagaagaacatgcaaagtatctgcagaagatattagaacagcagaaggcaaggaattccttatcagctacgacaagttcaatacaaacagagctttctgaatctacaaaggaagagaaacctgagacacaagcggatacttcttcagctcagttgccaaataaaaagaactcagatactgacatggaatgactcataaccaaagaactcattatgttcatagccgtgatgaacaactgaacatgttgactcgccagacactttccttctctaaccttgtagaatacaagcacttctgcctagatgcttctctcttgtatcatcatccctagtgcttgaaagagttctagctagccattgtatatgatttattttcagatgaaaatgctacaaaaaaaggaggaggaccagccattcatct

SEQ ID NO: 1122 - DNA, 654 bp, Zea mays
  Clone ID: TF_LIB4764-010-R1-K1-G5
ccctaccactcctcgtcgtcgtggccctcgtacctgcagtcgacgacgacgtcgccccttggcgccgtggcgccgccggcgtccgaccccacggcgtcgtcgtacctctcgccgtccgcgtaccaccggatgctgtcgagcaccggccggctccacctccagggcgtgctcgccgacacgctccgcggctacggcggcgcgcaccaccaccgccagcacttgggcagcctggccgcggcccgctacatgccgaaactcccggcttcccggcgcggcatgcgcgcgccgcggatgcggtggacgagcagcctgcacgcgcgtttcgtccacgccgtcgagctcctcggcggccacgagcgggcgacgcccaagtcggtgctggagctgatggacgtgaaggatctgacgctagcgcatgtgaagagccatttgcagatgtataggaccgtgaagagcactgataagccgcctgcagcaacctcatcagtaggagggggagggccgcctgtggacggtggtggcgggtccggcgacgacgaccacccgagcgattggcggcgggctccatcctcatcagctggtcgggacgtcagcccgcaggcgttcactggacaccggtcagccttctcggacggcgcggcaagccatgcgggc

SEQ ID NO: 1123 - DNA, 2157 bp, Zea mays
  Clone ID: TF_ZmC21783_2
ccacgcgtccggagagagagaggaggaggagaaggagaggtttttatgtatgtgtggtggacatgcgtcctcctgtcgtctcgagagagagagagagagagcggaggccctaatactccaatcaccacgcaccaaactagctagctagcagtcgtcttgcattgtagctagtccattgctctcatcttctcttcttcttcctccaatcctcccccctttcccctcttcggcctctctcgctcagctcgctcttcattaagctcacgtcgttcctcccttcttcctcttcttcttcttatccgttgttcaattcgttcagctagccggccagagatcgagcatcatctccatcatcgatcgatccatctcatctctttctcttcttctattctatgtcgtcgtcgtcccagattagatcgaagctgctagcagtctatccagtctctagctagctagatcaagcccgcagactatataatataatacaagctagctacgtgcttattgctttattagtctagaagaataatctagatatatacgatcgaacatatatctcgatctccaccgatacacacccggccctatccatgcttgaggtgtcgacgctgcgcggccctactagcagcggcagcaaggcggagcagcactgcggcggcttcgtcggcgaccaccatgtggtgttcccgacgtccggcgactgcttcgccatggtggacgacaacctcctggactacatcgacttcagctgcgacgtgcccttcttcgacgccgacggggacatcctccccgacctggaggtagacaccacggagctcctcgccgagttctcgtccacccctcctccggacgacctgctggcagtggcagtattcggcggcgacgagcagccggcggcggcagtagcacaagagaagccgtcgtcgtcgttggagcaaacatgtggtgacgacaaaggcggtggtgtagcagtagcctccagaagaaagctgcagacgacgacgacggaggaggattcttctcctgccgggtccggggccaagtcgtcggcgtcggcagagggccacagcagcaagaagaagtcggcgggcaagaactccaacggcggcaagcgcaaggtggactggacgccggagctgcaccggcggttcgtgcaggcggtggagcagctgggcatcgacaaggccgtgccgtccaggatcctggagatcatgggcacggactgcctcacaaggcacaacattgccagccacctccagaagtaccggtcgcacagaaagcacctgatggcgcgggaggcggaggccgccacctgggcgcagaagcgccacatgtacgcgccgccagctccaaggacgacgacgacgacggacgccgccaggccgccgtgggtggtgccgacgaccatcgggttcccgccgccgcgcttctgccgcccgctgcacgtgtggggccacccgccgccgcacgccgccgcggctgaagcagcagcggcgactcccatgctgcccgtgtggccgcgtcacctggcgccgccccggcacctggcgccgtgggcgcacccgacgccggtggacccggcgttctggcaccagcagtacagcgctgccaggaaatggggcccacaggcagccgccgtgacgcaagggacgccatgcgtgccgctgccgaggtttccggtgcctcaccccatctacagcagaccggcgatggtacctccgccgccaagcaccaccaagctagctcaactgcatctggagctccaagcgcacccgtccaaggagagcatcgacgcagccatcggagatgttttagtgaagccatggctgccgcttccactggggctcaagccgccgtcgctcgacagcgtcatgtcggagctgcacaagcaaggcgtaccaaaaatcccaccggcggctgccaccaccaccggcgccaccggatgacatactatctcgtcgacaatacatgcatgtacaatagacggatgtctagtagtatagtagattgctgctagctagctagccgctagagtgtagtagcatatgcatgccttttttttcttcttctttttttgcccttattattaagctggctaatagcgattgagatggagcttgacacagatctgctagctagctatttgagggtttctct

SEQ ID NO: 1124 - DNA, 1246 bp, Zea mays
  unsure (1)..(1246): unsure at all n locations
  Clone ID: TF_ZmC7194_1
cccgccgccgccggttgaatcgacggagggaggcgttgatggattgctcgattcctggtgggaattgattgatttcagctgcatgtgcttgtgcttgtgctgctcaatcgaattcgagtccgaattggattaggcaggtgggttgggtaggtgcgggatccagcgagcggaggatgggcgaggaggcggtggacgactacgagctccacatggtgtgctacggcagcgacgaggacgagcgcgtgatggagtgggagtcggggctccctggcgccgacgagctgaccccgctctcgcagccgctggtgccgccggggctggccgcggcgttccgcatcccgccggagcccgggcgcaccctgctggacctgcaccgagcgtccgaagccacggtggcgcggctgcggcgcgcgccgccgtcgtcgccgggcacctcctcctccccccacggccaccaggaggcgagggggggcgaaggggcggactcggcggcggcgactaccacgaacagcaacagacggccccggctggtttggacgccgcagctgcacaagcggttcgtggacgtggtggcgcacctggggatcaagaaggcggtgcccaagaccatcatggagctgatgaacgtggaaggtctgacgcgggagaacgtggccagccacctgcagaagtaccggttgtacgtgaagcggatgcgggggcagggtccgtccccgtccgaccacatcttcgcacccacaccggtgcacggcgtcgccgtcggcatggtgcccatggtcagcggccaggcgtaccactacctgtacaacggaggagggggaggagacagatgacacccgcttcggcgacgactccagaatctagtttcctcttggggaagaccggaagacaaatccaaaacggaacaagcgattgcctgcctcactctatactctactccctccaaattatccaaagcttctactgtactccgtccgtcccgttccaaggtattcggtatttttaaagccaaagcttttgttcaagtttattagagaataaatttcgaagcttttggtgaaggggaaagtaatgagtttttagtcccatacagaaaattgaagagaaataaaattaacttaaatagctaaaaaaaaaaaattgcttaacagttaaaagcgcgttttacagaacgtgtgattgctcgtgtgactttgggtgtggagacagacactaattccgtttctatctactacatnttgtctta

SEQ ID NO: 1125 - DNA, 448 bp, Zea mays
  unsure (1)..(448): unsure at all n locations
  Clone ID: TF_LIB5116-072-A1-PF1-H11
ctcgtggaattctctctccactgctcgccggaaaccaagaaatcgccaacccacgaatcttccctcacaaccagtncacaccgccgcgccaagtcccgatcttgccggncgagctgcactccggccgtccccagttccccgcctcgaccctcccgccaccaattcggacggctcgtccaccctggcagtatatccaccagcactagagtctaatcgtagcaactcagtcgctcacctgcagcaaatggaatcacgtgaaaacaacatgggctcgaatgatggaccaaacagtctttgctagcttgcctgcgaggcaacgcttacggtggacagatgagttcgcatgaacaatttgtcggaggctgttactcaacttggcggtcctgatagagcaactcctaaaggagttttgagaattatgggtacaccaggattaacaatataccat

SEQ ID NO: 1126 - DNA, 2027 bp, Zea mays
  Clone ID: TF_ZmC2593_1
attggggccctcggggccgggcgtaacataacatctcggcaagaggagacaggaggtcggtagtttagttttcagaagccaaattaaattaaaggctgtctgtctcactcactcactcactcccagaagagagaagaccacaccacacaaacaaacacctctttggtttctacaaatagaggacgcactgactgagctacaccggtaaaagctgccaaggatatatatcccaccagtcaggaatgcccgcaaccagacatttcagtacataacaggagctgaacaactaacgtacaggctgacagcagcagatgtatcatcagcaacagctccacacccataaccagcacctgtcctcgtcaaggccgggcttacctcctgagaagcagttcctcctgcacggagcaggaggcggcggcggcggagatgcagggctcgtcctctccaccgatgctaagcctcgcctgaaatggacacccgagctgcacgagcgttttgttgaggcggtgcatcagctcggaggcccagacaaggccacgccgaaaaccatcatgaggctcatggggatccctggactcaccctgtaccatctcaagagccatctccagaaatacagactcagcaagaatctccaggcccaagctcatactgccagcgcaaagaatgcgttggtaggctgccggacgggagcagacaacgccctatgccaagggagtgcttcaccgccgccaccaccgccgccgccgcacctgaacctagatccgccgcagataaacaggtcaatgcacataagtgaagccctccagatgcagatcgaagtccagagacggctgcatgagcagctagaggttcagagacacctgcagctgcggatcgaagcgcagggcaagtacctgcagtccgtgctggagaaggcgcaggaggcgctggccaagcagagcggcggcgctgacgagacaacgacgacgcagcagcagatgctgccggatctcatctcgagagccacggcgacgaggcgcggccatgtccagcaggagcacctccacctgcagcaccacctcggaggcgacgggtcggtggacagctgcctgaccgcgtgcgaggggtctcggtgccagagggagagggaccaggacctgctgtccatcggcctctcgtccgctccgcctcccactcccagcagaggctacaacgacagaggaggcggcggcagcgccagctgcgaggagttcctgcagtttcttgacgagcccagcagaagaggagcaggaggaggaggaggtcctcggatgagcagcaggagcttgacctcagcatcagcggcggcaggagcaatccaaggcctcgcggcagccaaagccaaaggatcgacctcaacggatccagctggaactgaatggtcgtccttttagcaatggtctccttcctcgtagctttagctgcagtagggaaaatggccagggtcacagcaggtgccctgtgtgtgggtgcacttccatgccctgcagccatttgcagcaaataactaagcagtgactgatgatgatggtgaattggcatgcgagaaagagaacccagatgcacgttctcctttgacgtctgattgattagttaactctatagatctgtattccagacatggaaaagtacacggctgagatcctctcatcagtttcaggaatgtacagaactcgcagcggatgcacacgaatccatgctgctgcttctgccttggcccaccagtcagtaagctattcctcgctcggccaagccaacacaagcgatggaaatatccagctcggagctcgctattccactgtagcatgcttcttgtttcgtttgtctgtgcgtggccatcttcgtcccactagtcgctttctgtattcttttcttcctcttttcaactgcccattgctggtttgacacacaacgttgctcatgtatttcatgaaataataaaatggaaaacaaaaaaaaaaaaaaaaaaaaaaaaaaaaaaaatataaaaaaaaaaaaaaaaagcggcc

SEQ ID NO: 1127 - DNA, 444 bp, Zea mays
  Clone ID: TF_uC-zmroteosinte018b06b1
ccaagtcagtgctgcggctgatgggaatgaaagggctcaccttgtaccacttgaagagtcacctccagaaatacaggcttggaaagcagaccaagaaagacacgggtttggacgccggcagagtggcattcgcggcgcagggcataaatttctccacaccagtacctcctcctagcattccatctacggccagtgataatacggggtgagtagagtaggtgtcaaaacccaaaatcatatcctgcatgtttttgcttcctttaacatcagtacaaaagaacatgcattcgcggtctccctgagacagcaatagttctttactaacaatctagaagctcgattctgttgcattagcaaaactaaaaagaaccatgggcatgatgtacaatagaacggaattagcagcagcatgcagtcggcatgctctgaaataagatttttttt

SEQ ID NO: 1128 - DNA, 604 bp, Zea mays
  Clone ID: TF_LIB5116-037-A1-PF1-G10
cgctctcgcggcgtcgctttcgccggacaccaccacctgccgctttcccctcccaccaccgctcccatcctcgccccgcccggaccccagcgccccgattggggcatccatccgcctccgcctgattggccccgggcaccagctcgctcgcacgcacgcagcatttgattccctcccgcactgtctccctccctctctcccggacgagcgcggcgcacctgcgaggagacgacgccgggtcccggtcacgcggcggccctcttccgtgccgtactctcatgatgtaccatgctaagaagttttctgtgccctttgcaccacagagggctcagaatagtgagcatgtaagtaatattggagctttcagtgggtccaacataagcaaccctactaatcctgtagggagtgggaaacaacggctgagatggacctctgatctccatagtcgttttgtggatgcaatcgcccaacttggtggaccagatagagcaacacctaaaggagtactcactgtaatgggtgtgccagggattacaatttatcacgtgaagagccatttgcagaagtatcgccttgcaaagtacataccagaatcgcctgctga

SEQ ID NO: 1129 - DNA, 723 bp, Zea mays
  Clone ID: TF_ZM4583.C7.o5.fg
atgcaggggagctacggctacgacggggcggcgtcacgggaccccaagccgcggctgcgctggacgccggacctccaccagcgcttcgtcgacgccgtcaccaagctgggcggaccggacagagcaacacccaagtcggtgctcagattgatgggcatgaaagacctcactctttaccagttaaaaagccacctccagtacttcgctcacagggcttcggttcaaccacagcgcatcctcctccaggtgttcctgatcaagggaagaacacaagaccatgtactattggactgcgagtatgggactgtagaggtgcaaaagaagctgcagatgcgaattgaggcccaagggaagtacttaaagacaatactagagaaagctcagacaaatatttcctttcacacaaatgcatccaatggcatagaatcaaccagatcacagctcatggacttcaacctagatggtttcatgaacaatgcaactcaagtatgcaaagaacatagggagcaattggtgaaagctatgtccgatgaaaacgataaagatagtctaggccttcagctctaccatctaggaagtcaggaggctaaggaagtcaaatgcacaccaaaaactgaagactcgctcctactagacttaaatattaaaggaggatatgacctctcttctagaggaatgcaagcatgtgaactagaattgaaaataaatcagcagatagtataa

SEQ ID NO: 1130 - DNA, 1112 bp, Zea mays
  Clone ID: TF_ZmC3576_1
ccggccgggaacgtacattcattctctcttggcaagagctcgtctcactcgagcctagattagccgtgtctttggccaccggatagctaggaagcggcgatcgccaggaaggaacgacgatgcaggggagctacggctacgacggggcggcgtcacgggaccccaagccgcggctgcgctggacgccggacctccaccagcgcttcgtcgacgccgtcaccaagctgggcggaccggacagagcaacacccaagtcggtgctcagattgatgggcatgaaagacctcactctttaccagttaaaaagccacctccagaagtatagactggggatacagggcaagaaaagcacaggcctggaacctgccagcggcggcgtacttcgctcacagggcttcggttcaaccacagcgcatcctcctccaggtgttcctgatcaagggaagaacacaagagaaatagcacttagcgatgcactaaggtatcaaattcaagtccaaaggaaactacaagaacaaactgaggtgcaaaagaagctgcagatgcgaattgaggcccaagggaagtacttaaagacaatactagagaaagctcagacaaatatttcctttcacacaaatgcatccaatggcatagaatcaaccagatcacagctcatggacttcaacctagatggtttcatgaacaatgcaactcaagtatgcaaagaacatagggagcaattggtgaaagctatgtccgatgaaaacgataaagatagtctaggccttcagctctaccatctaggaagtcaggaggctaaggaagtcaaatgcacaccaaaaactgaagactcgctcctactagacttaaatattaaaggaggatatgacctctcttctagaggaatgcaagcatgtgaactagaattgaaaataaatcagcagatagtataaatttgttcacaaagctgacagttttgggaagttcactctttgctattagattactatttttcccctgtggctcctgagcatgcttgtccaatgcccacaagctcacaagttttatttactatctgctcatgttatatttgctgaaagaagcttttgaataaatgtgggcattgtttt

SEQ ID NO: 1131 - DNA, 772 bp, Zea mays
  Clone ID: TF_ZmC359589_1
tgttactgagccatctgatcctgatactccattgttagcaacacattcatcattaatggctaattcaacgcccctagtcatggacttttcagaagtatctgaacagatatgtttgaaccaagaccaacttttaggtttatttgattatccagcaagtgttgatttttacaaatcaaaaaatatgaccatctttggccaacaagttcaagacaccattacagtcgatcctaacactcaccttacaccacaaaatgagttgttctcgtctgggagttcaatgcagcttcagaaaagtgtaggttatgctgaagctgtgctgaagttgatgcaagaagtgcaacacctcaaagttatttatgcttccatactgagagtgagaggagtgtaccagatcctttcaactgtgataaacttggcgccgacaacctcccttcttcaaacactgctccaaagccaaggatgcgctggacacctgagcttcatgagcgttttgttgatgctgttaacaagctcggtgggagcgaaaaagcaactccaaaagcagtccagaaggttatgaaggtcgatggattaactatataccatgtaaaaagccatctgcagaaacaccgtatagttcaacatcattctgaaacatcgtgtgcaggtgtgactggaaggaggggcagacatacccaagcagatgatgactccatcccgcaatcaaaaggcgaagggggcattgaaggaggactagtgtcccagattggcttgcagaaacaacttcatgaac

SEQ ID NO: 1132 - DNA, 835 bp, Zea mays
  Clone ID: TF_LIB5023-008-A1-XP2-F4
gccggccgggctgcgagctcccaacctttgttttgctacccccatttcttctttaatttgagcttgctagatagatctcggtgacgtccgtccgcgggagacggtggcatcagtaaagacttagacgatgagggctctgcagaccagctgatgatgccgtcgtccgacggcggggagggtgtcgccgatgtgccccgcgggcccgacggccggagctcaccaagcaatagcagcacggtggagctggatggggacggcggtggcgccaggaaggccggtgcctcgccgtcgtcgtcggtgcggccctacgtccggtccaagaacccccgcctccggtggacgccggagctccacctctgcttcctccgcgctgtcgacaggctcggcggccaagaccgtgcaactccaaagctcgttcttcagttgatgaacgttaaagggcttagcataggccatgtcaagagccatctccaaatgtataggagcaagaagatcgacggctcgggccaggtgataggtggtggtgggtcatggagaggtcgtcttcatcgtcagttgcaggacggggggcaagcggcgtacagcctcggccatctctccttgcatcacggcgccggccagacgactgctgctagcagtgccatattgtcagcaaggtctggcgcatggccccattggaacagtttccacgatgatccatcgtattcgatgcttcttcacggcggtcaccatcatcttcttggatcaaaccctactgctactactactactcatcaacaacagctgaagctgcagcagctgctgcatcccctgacaactgtgctgcgctcccgct

SEQ ID NO: 1133 - DNA, 587 bp, Zea mays
  unsure (1)..(587): unsure at all n locations
  Clone ID: TF_LIB3600-022-Q6-K6-H5
gttgtcccccaggccgcgctccggctcgcggcngaacggggcgcgcgcgcgccccggatgcggtggacgacgtcgctgcacgcgcggttcgtccacgccgtcgagctgctcgggggccacgagagagctacgcccaagtcagttcttgagctaatggacgtgaaggatctgaccttggcccatgtcaagtcgcacttgcagatgtatcgcaccatcaagaccaccgaccacaagccagctaattctgcttcatcctacgggcaagcagcagccgcgaaaccggtcatcgacatccccgaccccgacgacgacagcctgttcgacctcatcaccaccagcgccgggtctgatcagtcgtcgtcgtcggctcagcactctaaccctgacggcggcggcggcaacgagcatggctccagcatgtgcgctctgtggtgcagctcctcgacaagcatcagcagggggggctggttccatgacagaccaagagacgatgatgccgccactcccggtcccggcgacgacatcaaatccttcgaggacgtgcaatcacacagccttcttgacgatgtcgccgacctcaactcgtc

SEQ ID NO: 1134 - DNA, 662 bp, Zea mays
  Clone ID: TF_LIB4758-020-R1-K1-B5
ccggccggaaaaaaaaaatccatcctgctcagctctagaccccccaaaaaaaacagtgcatttcatgtagatctgccaggatcatttcatgcgggatatgattaatctccccttctctccccggccggactcctctctcggcacacaaacaggggcgacgcccaagtcggtgctcgagctcatggacgtgaaggatctgacgctagcgcatgtgaagagccacttgcagatgtacaggaccgtgaagagcactgacaagcctgcaacgacctcatcgggcgggccgcctgtagacggtggcggcgacgaggaccacgatgacctcctgagtgcccggcgggctcagtcgtcgtcgtcgtcgccagctggacgacggggcggcaggagcccgcaggcgttcaccagacaccggtcggccgcctcctcggagggcgcggcgagcctcgcgggcggcgacgacgtcgaatgttcctcctcggccgacgattccgactgcggcagggcgcgcagtgcttcgtcgtcaagctcatgtgtcgtctcatgcaacactaccaccccctccatgatatttctaccagggatgaaagctatctagctcatgtgtcgtctcatgcaacactaccactccgtccatgatatttctaccagggatgaaagctatc

SEQ ID NO: 1135 - DNA, 774 bp, Zea mays
  Clone ID: TF_LIB4570-003-R1-K1-G3
acaattcggagagcgaaaaggcggacgccaagggaggcagcaagtcagaggtgagcggtgagcagagggttccgtcggtgcggcagtacaaccggtcgaagctgccacggctccggtggactcctgacctccacatggccttcgtccatgccgttgagaggctcggtgggcaagagagagcgacccctaagctggtgcttcagatgatgaatgtccggggcctcagcattgctcatgtaaaaagccacctgcagatgtacagaagcaagaagctagaccaagatggccgcccgaggggagcagtttcctcagtgtattctccaatggatttccatttcatgagagctgatcatcggcgcttccacaacatgtccttcttccaaagagcagcagcctcggcctcctcctccggcgggcaggaacgcggcggcttcttcgcgtcgaggaacttcagcactccggagttgagccggctctatggactcctccaccatcgcccggctccgacccaaactttcgacttcagaaattccagtttcagaaatcatgagtggccgtgggccgcgtcgtcgaatcagcaggaggcgatgacaatctccaggaagcacgttgtcatgccaccctcgacatcgccgcagacacacgcatcgcttgcatcttccgcagcgctgaggagcgatcggcggtggtggcctttcactgaggccggcgctgctgtcgccgccggcgagcacagggcagggacaggagttaccagtgtaaaattcgacaact

SEQ ID NO: 1136 - DNA, 628 bp, Zea mays
  Clone ID: TF_ZmC306667_1
cgggtggtgctggaggtggtgcaccgcggcgggggacgggtagtactcctgcgccgccgccgtgtagtgcggctgcgtcgccgggtgcgcgccgtagatggcctgccccgccgcctgcgacgcgtactccggcgggacccagatgccgccgaggaccaccagctgcggcgcggcggtcgccggtgcgggcggcgccggcatcggccgccgcgtgtgcagcctgtacttctggagatggcttttcacctcatcattggtcaatccatccaccttcatcagctcgcggatctgcttcggggtcgccacttgagcaccgccgaggatctggagggcattgacgaagcggcggtgcagctccggcgaccagcaccgccgcgccttgcggtgcgtctgcggcggtgccgcctgctgcccttccggcgcgggcttgacgaccccgctctggacgacgtctctccgcgcgctcaggacgccaccgttgttgctgccggccgcggcggcgtcaaggtacggcttcctgtcagcgtcggccgcgtccttgtctgcgggcgcgagggcgagctccggcagcgccgccgcctcgccttccgacgcggtctattccttggcgaacgggagggacgcgccg

SEQ ID NO: 1137 - DNA, 1259 bp, Zea mays
  Clone ID: TF_ZmC13106_1
gatctctctccccccggccccgagcgcaccagattcacaccgcgcccgcataggtgcgtgtgcctgcggaagctggttgctgctcgcgctactagctgtttcgcgcggtgatcaacaatccggccgcgggagcggagctaggaggccgagagacacaatgaacatgttcgatgggatggagagtgctgggtacggtggcggcgctgggccgatgggcggggtggtgctgtcgcgggaccccaagccgcggctgcggtggacgcccgacctgcacgagcgcttcgtcgaggccgtcaccaagctcggcggggccgacaaggcgacgcccaagtcagtgctgcggctgatgggaatgaaagggctcaccttgtaccacttgaagagtcacctccagaaatacaggcttggaaagcagaccaagaaagacacgggtttggacgccggcagagtggcattcgcggcgcagggcatcaatttctccacaccagtacctcctcctagcattccatctacggccagtgataatacgggagaaacgccacttgcagatgcgctgaagtaccagattgaagtccaaaggaaattgcacgagcagctcgaggttcagaagaagctgcagatgcggatcgaggcgcaaggcaaatacttgcagacgatactcgagaaggcccagagcaacctctcgtaccacgcgactggagccgcaaacctagaagcaaccaggtcgcagctgacggacttcaacctcgcgctctcaggcttcatggacaacgtgacccaggcgtgcgagcagaacaacggcgagctggtgaaagccatgtccgaggacggtctcagagcgaacaatctagactttcagccgtaccatggagttcatgacggggacgatgtcaagtgcgctacggacgaagggttgctacttctggacctgaacatcagaggcgggtacggtcatcggatttcgacggatctgaagatgaatcaacacatgcggtgaaaagttcagtagaaagaaaggcgaggacagtagtttaatcttgggtaacccatcaatctaagagaagaggtgcccttgtgtttgtgagaaattctttcggccatcttgattcctaacgatgcttctttatggtgatggtcagcgtattgcttatgtaaaatttggtgagaggctccgaataagggtaactaatcttatacaagatctttatatatacttggatttgtatggatctagggtacgaagtgaaagcatttgtcat

SEQ ID NO: 1138 - DNA, 1296 bp, Zea mays
  Clone ID: TF_ZmC4296_1
caattcaagcgcaaatcacgttgagatttattgctttttcgacgttgatttttgaacgccgcgggtgcccgggctgcaagtttttaagtgcgttgaacaggacttaaaaactggatcctacagctgggcagtttatacatcaagcgaattacttatctagtccacttaggcattacattagatattaataaaggtcagtctagatgtaccgaaatagaccaagataaccttgattttcacagatgtgctacgggaggatgggtgaacgattgcaccgtgcacatgtcagacgaaattcctctgattttccagtgtgcccttgatcaggtcatgcatctgcgtcgagctagcaatgcttctcaacgtgatttgcgcttgaattgttcaggtggcctctgggagaacacgtggctgtcggcaacatgcggaaggcctttccctcctccaggaccaggattgtgaaggctaacggagctgacggagagctgggggaagacagacgaactcaagtgatctgcagggctaagcatggccctagcagaggtgagaatcggtaggtcttggtcagatatgctgaagccactcagttgctcagatactatcttgaacgccttatctagtatcgtgtcgatgtacttctggttcgcctccattcggatctgcatatgcttctggacctccacttgttcgtgcaatcttcgttgcacttccatttgtgctctgagtgcttctttaacttcttgactctctttcacatctggagtagaacctctaggagacaaagttgttccactttgagcttccataaggtaagaagcatcttttgattgctccgttaactcttttccagactgtcttcccaatctgtatttctgaagatggcttttcaagtgaaaaagggtgaggcccttcactcccattgtcctcatgatagctttcggtgttgctttatcaggcccgccgagctgggcgacggcatcgacgaagcggtcgtggaggtcggccgtccagcggagcctaggcttgggatcggccgtgagcaccacgctgggcccgccgccgtgcccgggcagccctaacccgcagccactgcgtggtgcgtcctcggcgacggcgacgtcgggtcggccgtggctagcgtggtggatcaggctggggaacatcttccccgcccggagctcacctgcgctttagagtctttgcgcccgggtccctcctccgaaccgcgagagggcgagaaagattggagctttcttctgatggctgctcgcgcccctccccgctttcgtgttccgc

SEQ ID NO: 1139 - DNA, 1471 bp, Zea mays
  Clone ID: TF_ZmC1401_2
cctataagagcccccgcgcggctcgcggtggcatcgaccgtcggtcgatcacccgctgagcttgcttgttttcctgccgcggtcgctgcttggccaggaccagctgcttgctgccgtcgtctcgtctgcggctactccggcctctcatgctggccacgccaccgacgctgcgatacgaagcgccgcggtgggcacgtcggaaatggcatcgtcgctgggagtgggtggtcagcagcaggggcacgggcacgggcacggcgaggccagggcgcggctcaggtggacgcgccagctgcacgaccgcttcgtgctcgccgtggcccagctcggcggcgcagacaaggcgacacccaagtccgtgctgagggcgatggccgtgccggggctcacgctgtaccacctcaagaggcacctgcagaagtaccggctggtggcggtgagccgaggcgtcgcttccccgctgggcgacagcggagatggcaccgacgagcgttcgtcctcgtcctcggagaaccagccggcggacgagtgcgacgacggtaccgtcgccgagccgcatggcgattcttccaggagcgtggcgcggatgcagaggaagctgcaggagcagatcgaggtgcagcggcacctacagctgaggatcgaggcgcaggggaggtacctgcagtccgtgctgcgccgggcgcaggaggtcctcgccgaccacggcctgggctcggcagccggcgcggaggcggagctggcctccgcggtggacaccgggtccctgtcctcctcctgctgctgctccccgacgcgccgccgctccgccgacagctgcgtgacgtcctcctcttcggaggccgagagccaggcccccgtcggcggcgccacgtggctccacacgtgcgccggtacgcgcgactgctccgttgagcaacagccggtgcagggggagaagagtacattcctgcagaggcacggggcagcagaggacggcacttcgtctgagatcgatcccaacggcaacaggtaggggacggagtcggagatcgtgatcggaagcatctctctgctctgcatgtgcccagcgtcggagaacagggaatgaatgattggcggggtggccttcaaggttgggacttggggaggggggccaggcttttgagcaatgtctgctgctgaaacagctacctgctctgctcttcgttccagaatatgatgtgcatgtttattttcgtttatgcgaatggttcttgtgtttcatgtaaaaaaattatgactgcaactcgaggaagggccagctgcaaatgatgcatgcagtgtgcttgaggtagcagtacaatgcaaggatgattgcatggtacagaactgtagtagctactatattattagtaagattgtatgccatcagtgagattgatgccttaagagggtaatggcatgagaactggaaaaggtttagaatgtatattaaggcctcatttgaaat

SEQ ID NO: 1140 - DNA, 1177 bp, Zea mays
  Clone ID: TF_ZmC2088_1
agctgatgaacgttaaggatctcacattggctcatgttaagagccacttgcagatgtatcgaacagtgaagggaacgacggcagacagatcatgtgctgcaggccatgtccagatgagagacatgggctttctgcacaggggttgtgaactgaatggcttcgaagcgtttagcaacggtacttctaatgctaccgccaataatagaatgcaggcagctgccgggtcgccggcagggaagcatgctgaggtagcctggttcttgcggccacccttggcacaccagagtagtggtggtggtggtggtggtggtggggcggtgccgcttccgctgccgctgccctgcccctacctcatgtctgcccaccacaaccgctacttgctctcacagaatcagggatggaggaccagaggcgcgcatcagcaagacgctgccgcccccccgccgctcgtcctaggccagcaggacagtgcgcggcgtctgcatccaggcttccccgacacggccatcagcagcagcagaccgtcatcctggagcgcaggtgtggcaagccgctggtcgtcgacggcggcggcggcgccttcgccgtcaagtggcaggagtagcatcagcagcggcacggaacagccagcagcatgcagctggacgatgatgacgacgaacaagcagaagcagcagcagcagccgccgtcgacgtcatcatcatcaagggtcgtcgcggtaccgaacctggagatgagcctggggaggcaggggtggcaacacgacctgcaggatcaccatccgcagcagcagcagcagcagcgcagcggggagtccacggcgccaaaagagctgaccctcctcaagtgcttgtgaaataataatgatagctaatacttgatcggctaataatcacttatataattccaccgtcgagatgagcttgcgagaggtgttcaaggcttggaagcaaattatcgaccgcgacgttagctagagacgacgttgtactcgtttggtgctaccggcttcacgtacgtagttgttttctactcctcccatctatatccattattagctatatatttagcttcattttctggtatatgcatgtaatttgagctgatgtggagacgacgactgttagaaataaacgagctacctttctcaatatatatacggtgactaattttttt

SEQ ID NO: 1141 - DNA, 284 bp, Zea mays
  Clone ID: TF_LIB3227-031-P1-K1-F10
cccacgcgtccgcagaatgttcccttccaagaaggccactagtagcgcagccgcagccgctgccgccgtgagctcaaatgatagcaggcagcaggcgatgtgcgtgcaggccgactcggggtcgggcctcgtcctcaccaccgaccccaagccccgccttcgctggaccgtcgagcttcacgagcgctttgtcgacgccgtcacgcagctcggtggccccgacaaggcgacttccaagaccattatgagggtcatgggagtcaaggggcttaccctctaccacc

SEQ ID NO: 1142 - DNA, 2264 bp, Zea mays
  Clone ID: TF_ZmC4646_1
gtgttcaaattcgaacgtcctccgccgccccaacgataccatcttccccagttccccacgccggcacacccaagctcggccactcgtcttgttgcgaccaaacccaaaatccgaacaccctctcgttccccatccccggcgtccggcgctgaccgcgtgatcctcgccccgatggcggccgcctccacacccgcccgttcttccgcgcacctttcgcagccggtgcgcgtcgtgctgcgtgtgcgcccgttcctgtcgtcggaggccgcctcagcgacagcgccttgcgtctccctcctcggctgccaccccggcggtggggtcaccgtccagctcaaggaccagcacacaagtcggagtgaacagtacaaactggatgcgttcttccgtcaagaggacagcgtcagccagatatttgaccaggaggttcgtgcagtgatcccaagcatcttcgaggggatcaacgcgacggtctttgcctatggggcaaccggcagcggcaagacctacacaatgcagggcacagaggattttccagggctaatccccttggcagcttcgaccatcctagcactctgcactggcacatggtgctctgttgagatctcgtactatgaggtgtacatggagcggtgctatgacctgctggagcctaaagcgaaggagatcatggccttggatgacaaagatggtaacatgcagctgaaaggcttaagctgggtccctgtgcgatccatggaggaattccaggagctctattccataggcgtgcagaggagaaaagttgcccacactggactgaacgatgtttctagtcggagccacgctgtgctctcactcagggtcagcagcactgatgtggtgaaagggaagcttaatctcattgatttagctggtagcgaggacaacaaaaggactttgaatgagggcatacgccttcaagaaagctccaagatcaaccagtcattgtttgcgttgtccaatgtcatttcagctctaaataagaatgagcatcggataccatatagacagagtaaactgactcggttacttagagattctctaggaggcggtagccgcactgtgatgatagcttgcctgaatcctgcagaataccaggagtcggccaacacagtaagtctggcggctcgttcatgccatattgagaatttcaccagttcaagcaaacaagaaactcccaaacttaagatcgacatggaagccaaattacgagcatggttggaatcaaaggggaaaacaaagagcatccaaagaatggatggtcttttctccccaattgccagcaagactccattgtctgtgagccatatgaagcaaccaacatcttcaagaattccttgtagagttaaggcaatggatcaggatggtggtaaaatcaagaagatactttttgatccagtagtccatgttcccactgaaaatataccacgagagcacaggcagacagaagtaaatacaccaaagaaagtggtgcttccttcagttactccatgcaatgaaaaacatgaagcttctctcaggaaagctctttctccaatttcttcaaacatggtgcctgtagagcagcaaatacctgataatggcaattgccccgttttattggagccccaaactccaatagaaaaacgtaatatagtcgaggagactcctggtgcaacaccactagagagatttaatgcactagggtctaacctaaaggaagctctagttcagcagtaccttgaccttttaaatgttgcaaacaaggaagagctacagcagctgaaaggaattggcgcgaggagagcagaatatattctggaattacgggaggactcaccaaaaccattcaaaactcttgaagatttgggaaacatcggcctctcgtcaaagcagatccgagacatccttaagaagacggccactgggatcttcaaatgatgacctcaatggatgatgatgtattggcgctagacattcataggtgtaacagctaaatgactggcttgtgttgctgacggagaagttagttcaatgtttgtgttggtgacttcaggcagtgccctgctgctactttcaactagattcccttgattgtgtgtagaattgcagttgaagtgttgaacaagtaaactatcggagttgtgatgctacttttacgtccaggggagtttttatggaacgagctattcgaacattttatatgatgaagtggagcatcagttttgctcatttgaataatgataacaagcagagtttttatc

SEQ ID NO: 1143 - DNA, 1568 bp, Zea mays
  Clone ID: TF_ZmC39584_1
ggcacgagattttttgccgcttcggaggcaccttcgaacaaagcccaaaagcagccagcgcaccgcatgtcctcgtcttcggcgcaccagaaggcgtcgccgccgatagaggaggaagcgacggagcacggacccttccccatcgaacagctacaggcatctggaatagctgcacttgatgtgaaaaaactcaaagatgctggtctctgcacagtggaatctgtagcatactctccaaggaaagaccttttgcaaattaaagggattagtgaagccaaagtcgacaagataattgaagcagcttccaagttggttccactcggatttactagtgctagccaacttcatgcacagagacttgagatcatccagcttacaactggatctagagagcttgatcaaattttggacggtggaatagaaacaggatctatcacagagatgtatggtgaatttcgctccgggaagactcagttgtgccacactctctgtgtcacatgtcagctcccattggaccaaggtggtggtgaaggaaaggctttgtatattgatgcagagggtacattcaggcctcaaagaattctccagatagcagacaggtttggcttgaatggcgctgatgtactagagaatgtggcttatgccagagcatataacactgatcatcaatcaagacttttgctagaagcagcctccatgatggtagagaccaggtttgctctcatggttgtggatagtgctacagccctttacagaactgatttctctggtagaggggagctatcagcaaggcagatgcatctggcgaagtttcttaggagccttcaaaagttagcagatgagtttggagtggcagtggtaatcacgaaccaagtagtggctcaagtggatggtgctgcaatgtttgctgggccacagatcaagcccattggagggaacatcatggctcatgcttccacaactaggctctttcttcgcaagggaagaggggaggagcggatctgcaaagtaatcagctctccctgcctggctgaagctgaagcaaggtttcagatatcatctgagggtgtcactgatgtcaaggactgaaagcatcctcatttgcagtccacagcataacttgccaattcagacgaatctctgatctgctgcactcgtgtcggtcccttgtacaatcaaaataccagtacaggcttccagaatgcgaatgcaaatccgttggagtgtggcactgtcatcctgttgtctttaggtaccatctaaagttggcattgttgtaaagtggtagagcgcaaggctctactttgtagccgtggattcgagccctatggtgggcgttatttaatttttttggcgaaaaagcctttaattgagttgtttaggtgatatgaataactctttaggtcatggagttcgactccatgggagtttaagctgggttaaaaaaaattatggtcacgatctttttcacatgggctactgtaacatctcgtctactcctgaaccgatgttaagctttttaggactatagatcatcttcatatatcaacaaaaaaaaaaaaaaaaaa

SEQ ID NO: 1144 - DNA, 1719 bp, Zea mays
  unsure (1)..(1719): unsure at all n locations
  Clone ID: TF_ZmC4042_1
ctcgagccgcaattcgcttcgaacagggcagaggtgagacttgagagaaggaagaaggccatgtcgtcggcggcgcagcagcagcagaaggcggcggcagcggagcaggaggaggtggagcacgggccattccccatcgagcagctccaggcttctggaatagctgcattggatgtgaagaagctgaaagattctggtctccacactgtggaggctgtggcttacactccaaggaaagatcttctgcagatcaaagggataagtgaagctaaagctgacaagataattgaagcagcatccaagatagttccactgggatttacaagtgccagtcaacttcatgcgcagcgactggagataattcaagttacaactggatcaagagagcttgataagatattggagggtgggatagaaacaggatctatcactgagatatatggtgagttccgctctggaaagactcagttgtgtcacaccctttgtgttacatgtcagcttccactggaccagggtggtggtgaaggaaaggctctatatattgacgcagagggtacattcagaccacaaaggctcttgcagattgctgacaggtttggactgaatggtgctgatgtgttagagaatgtggcttatgccagagcttataatacggatcatcaatctagacttctgctggaagcagcttccatgatgatagagaccaggtttgctcttatggttgtagacagtgccacagctctgtacagaactgatttctcaggaagaggggaactatcagcgaggcaaatgcacatggctaagttcctgaggagccttcagaagttagctgatgagtttggagtagctgtggttatcaccaatcaagtagtggcccaagtggatggatctgctatgtttgctggaccgcagttcaagcccattggtggaaacatcatggctcatgcttcaaccacaaggcttgctcttcgcaaggggcgaggggaggaacggatctgtaaagtaataagctctccctgccttgctgaagccgaagcaaggtttcagttagcttctgaaggtattgcagatgtcaaggattgagaccatacctgctttacaggcatcttcagatccattggtctgctatttgctttgtcattccttgggccaactttcgtgttgcctcaccttgatgtacaaaacggtttcgttcacatatgtgaatgcacgcctgtgactgatttaggcgtcctgttgtaaataaaacgatgcctgttgccctgttgtgtgttgcatgtaatcgacaactctacatatcacaattatgatgtattttaggttttattgttcgcttagcacagccattgctggatgtgcaatgtgggattatagacaagaatccacacaacaacaatggccaatcctgataaagtagttagtgacttgggcaaatagcattgtggtgatctttgagttcacttgtgataagaacagggctggtggctggtggtgaaaactaacttgtgatcggaacaggtttaatagggaaactaaggattctataaaaaaaaaaataaaaaaaaaaaaggggngnccgcnnttngggtnnngcttcgtcgcgtncttggcggnattncnttnttttgngnnccatactttntttccnggcggntggttttnncgctgnnccntgggacccctgggnttccnccttttttnnttagggnnntccttttt

SEQ ID NO: 1145 - DNA, 1565 bp, Zea mays
  Clone ID: TF_ZmC9705_1
tgtatttcctcgccggccggcgcatctctccgggcagaccggcccggcggcccccatgggttccgtgcaggtgagcgtgtcgccactgactccggagcgtccgtccgtcccccatacggccacgcctctgggtctcccgcgctgccatggacgggggaagagagcagcaggcgccgccggagtcgcagcccggtaagaacctcatcaagatcccgtcctatcaggaggtcttcggcaccggcgcctccacctcttcctcgaagccgccatcctacaaccctcctgtagccacctccgccgccgccgccgcttcatcctcctcgtcgtcctcgggatcattctcgcaggctttttctttcctcaagtcctccgagttctactcacctccgccgccgcctccccagcccaccaccaccccgaggccgactcaagctagcccctcagcgccgactccccaaagcaagaactccattctcgtcagtcataggcagagagggaaccctctgctgaagcacattaggaatgctagatggacgttcgccgatgtcgtgccggactatgtgcttgggcaatcgtcatgtgccttgtacttaagtatcaggtaccatcttctacatccagactacttgtactatcggataagagagctgcagaagaatttcaggctgcgtgtcatcttgtgccatgttgatgttgaagatgtaatcaagcctttgcatgaaattacaagaacagcgctgcttcatgactgcacccttttgtgtggttggagcctggaggaatgtggtcggtacttggagactattaaagtatatgaaaacaagccagctgacagtattcgtgagcacatggataacgactatctatcacggttgacgcacgggcttacatccattcggcatgttaataaaacggacgttgtcacactcggttcatgtatttgcagtcgctctcacagatcatgaatggttctatggacgagctggctcgatgcccaggaatcggtgagcggaaggtaaggcggctctatgataccttccatgagccgttcaaacgggttcctgcccgaccacgaccaaacctcgtagtacccgataccccggaccgggagaaagcaaaaggccaaccttcgtctacagatggcagcagtttgcaagatgcggtagagaagccagatgcgtcgaagaagacgaagaaaggctctgatgtaagatcagccctcaccgttgcctttgccaagtattcggagaagatccgcagtcagggccgcgatgcgccaaacgaggccggtgagagtactggcggctcgaccgtggaagctgagagggcgggagactagatttagctgtaggatggttaacggtgctggagtaatgctagtttgttccttcctgttgggtgcttgttgttgtgactgggccgccgatttgcgcgtgcggcaccagtatttcccgcggcgtcctaggcatgtgtgttttttttaggctaaagaggggccagagaatcttcaacgatatcgaaacatttaagtgagcttcctagacggtggcagccattccatcacc

SEQ ID NO: 1146 - DNA, 673 bp, Zea mays
  Clone ID: TF_ZmC490976_1
aatctcgagcctcggtcacagacgttgaagcatcacgaactaccgccgataactccggcggtcgccgccgatggactcctcttcgtcctcggtccctgctgctgcggctgcggagggggcgcctccggcgggggagaatctggccgtgttctggcacgagggcatgctggcccacgacgccggccgcggcgtgttcgactcgggccgcgacccgggcttcctcgacgtgctcgaccaccacccggagaacgccgaccgcgtccgcaacatggtctccatcctccgccgcgggcccatcgcgcccttcctctcttggcactccggcacccccgcccacgccagcgacctcctgtccttccactccccagaatacatcgaggagctcgcgcaggcgaatgccagtggacccaagaagttatgtgagggcactttcttgaaccctggttcatggggtgccgcgcttctggctgccggaacaaccttatcagctacgaggcacatactagatgggcatgggaagatagcctacgcattggtccgtccccctggccatcacgcgcaaccggaccatgccgacggttactgctttctgaacaatgccggacttgctgtgcagctggctctggattctggccgcgcaaaggttgccgttgttgacatagatgtgcactat

SEQ ID NO: 1147 - DNA, 569 bp, Zea mays
  unsure (1)..(569): unsure at all n locations
  Clone ID: TF_LIB3960-017-Q1-K6-C4
gggcgactttgattttcntgctcccgctgccaggccgtcaggagtgaagcgatgctggagaaagaccggatatcctacttctacgacggagatgttggcaatgtctactttgggccaaatcaccccatgaagccacatcgtctctgtatgacacatcaccttgttctttcatatggacttcatcaaaagatggagatatatagaccacacaaagcatatccaatagagcttgcccaattccattctgctgattatgtggaattcttgcaccggataactcctgattcccagcacctatatgcaagtgaactaactagatgtatggatgctggagttttctctttccaaactattcttcaggactgctaatttcacaatgaaatacatgccatacaatcttggagaagactgtccggtctttgataatttgtttgagttctgccaaatctatgcgggaggaactttagatgctgctcgcagattaaatcataaaatatgtgacattgccattaattgggctggtgggctacatcatgccaaaaagtgtgaggcttcaggcttctgttaca

SEQ ID NO: 1148 - DNA, 2964 bp, Zea mays
  Clone ID: TF_ZmC1898_1
gcctgctcactatcgcacttggttttttttttttttcatcaaataacagattcactttttctagagaatcactcgaaatcactctattagagaatcatgtagcggagctatatgccaaacgagccactctctgtacaatcaaagcatgcatttgaaacggatctcggtacacgtacgtacacgtcagcatgatctctccgtacaatcaaagcaacacaagtggccttaatttggcagtctttcaattcaccatgatctgaagaagagcacgtcttatataattaaccatgcacacgtttggtttcttaacgaacaagacagatcgatcggattgatggatcgtgcagtgagtcgttctcctcgtcatcgatcagaggtcacgatggccggcggcggcgggcgctggcagctggccgctgttggctatgacgaccttggccttgggcacgccggtgagctggccctcggcttcgatcttgcgcacgacgtccatccctttcaccaccttgccgaacaccacgtggcgcccgtccagcttcttgggcaaccggttttcgtctacggtggtgatgaagaactgggagccattggagtcgggcccgtagttagccatggacagcgtaccggctttagcgtgggtgtgcttgaagttctcgtcggagaagatggtgctgccgtagatggactcgccccccgtgccgttgccgttggtgaagtcgcctccctggatcatgaaccccgggatgatcctgtggaacgtcgaccccttgtaccacagaggcttgccggacttggcaattcctttctcccctgtgcaaagtgctcggaagttctctgctgttttaggaacggtgtccccaaacagtcccagcacgatccggcctgcaggcttgccgtcgatctcgatgtccaagaaggtctcggccgtgaccttgtccaggtccgccgccgatgccgatggtcctcctccttgcgccccgtgggccagcgccagcgtggccgcggcgagagcgaggcacaggcacgtcgccgccgatgagctgcgcggagccatcgatcgccgccgccgggtatctggttcctccctcctcgatcgtcgccggcggtcctgcgtctctctctctctcttcgctccttttcctgcaggctccccccgccgggtgggccacgggttcgccgcgttttttatatcgcttccgtctcgtttggacctccatccgcggccgccgccgccgcgctgagtttgggccgggctctgttaatctgggcgactttgattttctctgctcccgctgccccggccgtcaggagtgaagcgatgctggagaaagaccggatatcctacttctacgacggagatgttggcaatgtctactttgggccaaatcaccccatgaagccacatcgtctctgtatgacacatcaccttgttctttcatatggacttcatcaaaagatggagatatataggccacacaaagcatatccaatagagcttgcccaattccattctgctgattatgtggaattcttgcaccggataactcctgattcccagcacctatatgcaagtgaactaactagatacaatcttggagaagactgtccggtctttgataatttgtttgagttctgccaaatctatgctggaggaactttagatgctgctcgcagattaaatcataaaatatgtgacattgccattaattgggctggtgggctacatcatgccaaaaagtgtgaggcttcaggcttctgttacattaatgatctagtattaggaattctggagcttctcaagtaccatgccagggttctttatattgacattgatgtccatcatggagatggagttgaagaagccttttatttcactgacagggtaatgactgtgagtttccacaagtatggtgacctgttctttcctggaacaggtgatattaaggatataggagaaagggaaggaaaatattatgccatcaacattccacttaaagatgggatagatgacactagctttactcggctttttaaaacaattattgccaaagttgttgagacatatctgcctggtgctattgttcttcaatgtggggctgattcattggcgagggatcgtttaggctgcttcaatctctctattgaaggccatgctgaatgtgtaaagtttgtcaagaaattcaatattccccttctggtaactggaggtggtggatacaccaaggagaatgtagcacggtgttgggctgttgaaactggggtccttttagacacagaactcccaaatgagattccaaaaaatgaatatattgagtactttgctccagattatacattgaaagttccaaatttgaacatggacaatttgaacagtaagacctatctcagttcaatcaaagtgcaagtgatggagagtttgcggtacatacagcatgctcctggtgttcaaatgcaagaggttcctcccgatttttatatcccggactttgatgaagatgaattggatcctgatgaacgtgttgaccagcacactcaagacaagcagattcaccgtgatgatgagtactatgaaggtgacaatgacaacgatcacgacgacggcacacgctaatctgcttcttctgaggccctggtgtaaatggaaacctgagattcttcactgttgtgtgtagttcagcagccttgagatgtaatagtttgtcagttgacagcagggatctaatttagcaggtcaaagtggtttagacttttataagggattctgacccctcctgaattacacattgtagtacaagtctgcatatttttaagcatgcaaaaattcaaatttctcagtggtattagtatctcaagaaaatacaaaaaaaaacctcgctcagtaacattgctcataaaaaaaaaaaaaatgggaaaacgcgtgggcggacgcgtgggcggacgcgtgggcggacgcgtggttcgccc

SEQ ID NO: 1149 - DNA, 2044 bp, Zea mays
  Clone ID: TF_ZmC29703_3
ccgcccttcgattccctactcaaacgcagccgccgagcgcctctcgcctctcgccctacaggaggcaccctacagaacccaaccaaaaagcgccggcggcaaacagaacccaacccaaagcgccggcggcaagcgaagagaaagcgccggcactaatccgacgatggacgcgtcggccggcggcggcggcaactccctgccgaccactggcgcggacgggtcgaagcgccgcgtctgctacttctacgacgcggaggtgggcaactactactacgggcagggccacccgatgaagccgcaccgcatccgcatgacccacgcgctgctcggccgctacggcctcctcgaccagatgcaagtgttccgccctcaccctgcccgcgaccgcgacctctgccgcttccacgccgacgattacgtctccttcctccggtccgtcacccccgaaacgcagcaggaccagatccgcgcgctcaagcgcttcaacgtcggcgaggactgccccgtcttcgacggtctctacagtttctgtcagacgtacgcggggggctctgttggcggcgccgtcaagctcaaccatggccatgatatcgccatcaactgggccggcggactccaccacgccaagaagtgcgaggcctccgggttttgctatgttaatgacattgtcctcgccatcctcgagctcctcaagtaccaccagcgcgttctgtacgtggacattgatatccaccacggggacggcgtggaggaggctttttataccacagaccgggtgatgacagtctcattccacaagtttggagattatttccctgggacaggggacattcgtgatgttgggcactcaaagggtaaatattactccctgaatgttcccctggacgatggtattgatgatgagagctaccagtcgttgttcaagccaataatgggcaaggtgatggaggtcttcaaccctggtgcagtcgtgctccagtgtggtgcggattcattgtcgggtgacaggttgggctgtttcaacctctctattaagggtcacgcagaatgtgtaagatttatgaggtccttcaacgtcccgctgttgctgcttggtggtggtgggtataccataagaaacgttgcacggtgttggtgctacgagacaggagttgcccttggtcatgagctcactgacaagatgccacctaatgagtactatgagtattttggtccagattacactctacatgtcgctccaagtaacatggagaataaaaacacacggcatcaattggatgacataaaatcaaaacttctagataatctttcaaaactccgacatgctcctagtgttcagtttcaagagcgacctcctgaggctgagttacctgagcaagatgaagacaaagagaatcctgatgaaagacatgatgctgattctgatgtggagatgaatgatgccaaacctttgcaggactctggaaggatgtcaatagtgtagctgcagaacattctagaggcactggacctgtggctgatggagttggttcctcgaaacaaacctttccgaatgccactagtcgaatggccatagatgaaccaaacgctcttgagagttgagcaagagggttcaaacaaattgcaggaccaaccatcgatgcacctcaagtagctaatgtcatctgtagcctgtcgattcttttgcgcaaattcattaactgtaggcaagccatgcgtggactgaagcagggagcagaagcaagtgctcgaccaagaagttgtgcatctgaaatctatattttttgcgcgtcatatttgtattaccgacagttgcaaacgatggtttaatcatgaaaaatttgtctttccacccttggcttctgcagtggaaggggttgatatcgtagtatgcatcaattatgcattttgtccattccccatccccaaatgagaagtgggtagtccccgacgggttttgaatggccaacagttttaagggagggaagcagcccggaggccaaaaaaaaagcaacgagatgtacggcaaaaaaaaaaaaaaaaa

SEQ ID NO: 1150 - DNA, 363 bp, Zea mays
  Clone ID: TF_LIB3150-049-Q1-N1-F11
ggctgaatggcggcttctggtgagggcgcgtaactcccgactacgacgggcggcgaggatgcccaccgaccgagattgagctatttatacaagccaccgatcgtaaactactactacagccaaggatacccgatgaagcccgaactgatacaaatggatcactcaatagtcgtctaatacgaccttcagcgactacataagctctaacgatcgtacccgaactctgaggcctacattcgacgattacactccgacgactacgtctcctttgttgcgtacgccaccggaaacgcaggtgtgctcgacccacgcgccaataaccactttaacgtccgtgaggactgcaccatgttcgacggactc

SEQ ID NO: 1151 - DNA, 416 bp, Zea mays
  Clone ID: TF_ZmC1028609_1
cccacgcgtccgaaacttttaacttaccattactgatgcttggaggaggtggctacacaatccgtaatgttgctcgatgttggacatatgagactgcagttgcccttgattgtgagattcccaatgagttgccatataatgattacttcgagtattctggaccagacttcaaactgcatattagtccctcaaacatgacaaaccagaacactccagaatatatggaaaagataaaacagcgtttgtttgaaaatctgcgaatgttaccacatgcgcctggtgttcaaatgcaagctattccagaagatgctgttcatgaagacagtggtgatgaggatggagaagaccctgacaagagaatttctattcgagcatcagacaagcggatagcttgtgatgaagagttctcagattct

SEQ ID NO: 1152 - DNA, 350 bp, Zea mays
  unsure (1)..(350): unsure at all n locations
  Clone ID: TF_LIB3245-437-P1-N1-C7
catattcttaccaacgcacccaaaaaaaaacgaggcaaaaaacaaattgtccggggcatcccccaaaaannaaaaaaaaaggagagagaacacacacacacaaaccccaatcccctgcggcggcgatagacccgtcatcgccggcctccggcggcaactccctcccgtccgtccaccccgacgggcagaaacggcgcgtgaactacttctacaacccagatgtggacaactactactacggacagggccatccgatgaaaccgcaccgcgtgcggatgacacactacactctggcacgctacaacctcctcaaccagatgcaagtgtaccgacccaacccgccccgcaac

SEQ ID NO: 1153 - DNA, 250 bp, Zea mays
  Clone ID: TF_LIB3152-001-Q1-K1-B2
acgaaccatgctaagcggaatggcggcttctggtgagggcgcgtcgctgccgtctcctgcgggcggcgaggatgctcaccgccgtcgcatcagctatttttactagccgtctatcggaaactactactacgggcaaggctacccaatgaagccccaccgcatcctgatggcgcactcactggcggtccactacggccttcaccgacttctctagctctaacgcccctacccagtctctgaagccgacatt

SEQ ID NO: 1154 - DNA, 1871 bp, Zea mays
  Clone ID: TF_ZmC1898_5
tcgaggccggccgggccgggtctgcggccgccgccgccgcgctgagtttgggccgggctctgttaatctgggcgactttgattttctctgctcccgctgccacggccgtcaggagtgaagcgatgctggagaaagaccggatatcctacttctacgacggagatgttggcaatgtctactttgggccaaatcaccccatgaagcctcatcgtctctgtatgacacatcaccttgttctttcatatggacttcatcaaaagatggagatatataggccacacaaagcatatccaatagagcttgcccaattccattctgctgattatgtggaattcttgcgccggataactcctgattcccagcacctatatgcaagtgaactaactagatacaatcttggagaagactgtccggtctttgataatttgtttgagttctgccaaatctatgctggaggaactttaggccttttatttcactgacagggtaatgactgtgagtttccacaagtatggtgacctgttctttcctggaacaggtgatattaaagatataggagaaagggaaggaaaatattatgccatcaacattccacttaaagatgggatagatgacactagctttactcggctttttaaaacagtaagctcactgcactttatcccttgttattttgtcatttttttagtcctgccatgttatctgagtttgtcatgcagattattgccaaagttgttgagacatatctgcctggtgctattgttcttcaatgtggggctgattcattggcgagggatcgtttaggctgcttcaatctctctattgaaggttctccagtttttaacagatatatacacacatagaatctacaagactcatgtgtgtatataatatttatccatcggctgctagagtgtcttttgtgggaatgggaagccccatgtccttgattatccattttttctgtttttgctgagtttcctcgcattattggaggtttagagttccttcggacaagtcacctagtttcctgaagctaagcctactatatttgtccattagtgcttaactgcttacttgccctatctgttttcataaacaggtcatgctgaatgtgtaaagtttgtcaagaaattcaatattccccttctggtaactggaggtggtggatacaccaaggagaatgtagcacggtgttgggctgttgaaactggggtccttttagacacagaactcccaaatgagattccaaaaaatgaatatattgagtactttgctccagattatacattgaaagttccaaatttgaacatggacaatttgaacagtaagacctatctcagttcaatcaaagtgcaagtgatggagagtttgcggtacatacagcatgctcctggtgttcaaatgcaagaggttcctcccgatttttatatcccggactttgatgaagatgaattggatcctgatgaacgtgttgaccagcacactcaagacaagcagattcaccgtgatgatgagtactatgaaggtgacaatgacaacgatcacgacgacggcacacgctaatctgcttcttctgaggccctggtgtaaatggaaacctgagattcttcactgttgtgtgtagttcagcagccttgagatgtaatagtttgtcagttgacagcagggatctaatttagcaggtcaaagtggtttagacttttataagggattctgacccctcctgaattacacattgtagtacaagtctgcatatttttaagcatgcaaaaattcaaatttctcagtggtattagtatctcggctttttaaaacaattattgccaaagttgttgagacatatctgcctggtgctattgttcttcaat

SEQ ID NO: 1155 - DNA, 2735 bp, Zea mays
  unsure (1)..(2735): unsure at all n locations
  Clone ID: TF_ZmC19940_1
ctcgagccggccgggnnnntgccggccgggacggacgtcgagtcgtcgatacgcctgaaccccagctttccactcgcctcgctcgcccctttcgcgtccaccgaccccgaccccgatccccgccggtgcttcgccaccccgatccccaccgcgcgatggcggagccggctccggctcccccggtgaccgcgccgctggtggggctgctgtacgacgagcggatgtgcgcgcacgcgacgcccaacggggaggaacacccggagaaccccgagcggctgcgctccatctggcgcaagctcaacgccgcgggcgtcgcgtccaggtgtgtggcccttaaggcaaaggaagctgaggacaagtatatagcttctgttcacagcaagaggcatataaagctgatgaaggaaattagctcaacaatatatgatgccagcaggaacaagattgctaggaaattcaattccatttacttcaataagggttcctcggaatctgctgttcttgcagctggttctgtcatagaggtagctgagaaagttgctgcaggtgagttaagttctgctattgctctagtcagacctccaggccaccatgcagaacatgatgaggctatgggattttgcctcttcaacaatgtggcagttgcagctaattatctcttaaacgagaggcctgatttaggtatcaagaagatattgattgtcgattgggatgttcaccatggaaatggcacacagaaaatgttttacgatgatcctcgtgtattgttcttctcagttcacagatttgattatggaagcttctatcctgctgaaggggatgcttctcattgtttcatcggggaagaagctggtaaagggtataacatcaatgttccctgggagcatggcaagtgtggtgatgctgattatattgctgcatgggaccatgtactgcttcctgtcactaaagtttttgatcctgatataattctggtatcagcggggtttgatgcagcattgggtgatcctctcggtgggtgctgcattacaccaaatggatatgcactgctactaacaaagttgttaggatttgctcaaggaaggatagtgatggcccttgaaggaggttataaccttaggtccatagcgaactcagtttgtgcttgtgcaaaagttctcttgggagacaaattcacattcaacactccagagatgcaaccatttgaatctacatggagagtaatacaagcggtacgcaatgaattgaagacatgctggcctgttctgagtagcaagttgccagaaaatgtatcattgaggattaagcctgcaccaagcgagctctacgcttcttctgattccgaatctgatagtgaagatgttgatgagctccttggcactgttgcatctgtcaatgttattgaagctactggtgttgctataagtgaacacctctcaaagatgaaacttgatgatgacagccttgcagtgaagactaactcaagttgctcagcagcagaacagcatccagttgattcagtaaaagtacataacaatgcatctgttgtgctgaccaaaaaaatatctgatttatctcttgagtggcgatcagatttatcgaaaactgatgtctggtatgccagttttggatcaaacatgtggagaccaagatttctatgctatattcaaggagggaaggctgagggtatgaatataccatgctgcggatcacgtgacacaagctcaccaaagggaaccgtgtggaagactgtacctcacaggttgcttttcggtagatcgtctaccccttgttggggaactggtggtgtggcttttctcaaccctgagataaactacaatgagaagttgtatgtctgcatgtacaaaataacgttggagcagttcaatgacatcttgtttcaggagaatcgtttagtgctggaggatggcaaagacggaaacactgtgtatcctgactctcctttgattggttcatctgaaatcaagtttatatctacaaacagagctgttcatcttgaacctattaaggatagctggtactccaatgtactttatcttgggaatgaggatgaagttccaattctaactatgacgtgccccgcatcagatattgagaggtataaatctggtgagctgcgtttagcacctccatcagagacgtatgcggccactctgataaagggactagtggaaggcaagcaaatggatgcggacggagctgccagctacatcaacgctgctgctgcaagagccttgtgaaggctgcttcagcgtgtgcttttgtacagccagtaaggagtagtaaggatacactatctgttagcgtggcgacaccaggaaaccttcattgtccgcaaatggagaacttggatccaatttgaattgggcagcatgattcgagctcgccctagcttgattactggtgaacggtgatctcccctggctggttgattctgggagaaacactagctgtgtcggggtggagcaacactagttggcggttgcaacaggtgctctcactgcactggtatcgtgcttgtctgacataccgtagtatttgcatggcatgctggtgatgttatttgtgcaattactgcattatgttctgttgccaaaaaaaaaaaaaaaagcggccccatatcccatccatcacagctagctagcgttcctaatcaccgacgaataatctcttcttcacctcactaacaccgagctagcagctcgctctgtcct

SEQ ID NO: 1156 - DNA, 888 bp, Zea mays
  Clone ID: TF_ZmC2148_2
gcagtggcagctcggtacgctcagcatcaacatggactaaagcgtgtgatgataatagattttgatgttcaccatggcaatgggacgtcagattcattttatgatgatccagatatcttcttcttgtcaactcaccagcttggaagctaccctggtactggtaagatcaatgaagtcggacagggtgatggtgaaggcacgacactcaaccttcctctgcccggtggcgcaggtgactacgcaatgagatgtgcatttgatgaggtcattgctccatcggcccatcgattcaagcctgatataatccttgtatcagctggatacgacgcacacgcgctggaccctctggctggccttcagttcacaacaggcacgttctacatgctggcatccagcatcaagcaggtgaccaaggaactctgtggtggccgctgtgtcttcttcctggaaggcgggtacaacctgcagtcgctctccagctccgttgccgacacgttccgtgcattccttgatgagcccagcctcgcagcacagtttgatgatccagcgatacttttcgaagagccgactcggaagatcaaggaagcaatcgagaaggccaagagcatccactcactctaggctgtcagctaattttccccccaatccccagaaatcccggaggggtagccctaaattgggaaaaggtgctgtcagcagtgtgcactgcagaactgcaagatcttgtggcaattggcattttgcaggtaggtagtgcatagtttgaacttggaaggcatggtcattttaatttagccaattctcaccagaaaatggaattaccgttctctcaatactagctgtatatattgaccaaaagttatgtgctacattattaattttaaaact

SEQ ID NO: 1157 - DNA, 1317 bp, Zea mays
  Clone ID: TF_ZmC1898_2
ccgggatccgcggccgccgccgccgcgctgagtttgggccgggctctgttaatctgggcgactttgattttctctgctcccgctgccacggccgtcaggagtgaagcgatgctggagaaagaccggatatcctacttctacgacgagaccacacaaagcatatccaatagagcttgcccaattccattctgctgattatgtggaattcttgcaccggataactcctgattcccagcacctatatgcaagtgaactaactagatacaatcttggagaagactgtccggtctttgataatttgtttgagttctgccaaatctatgcgggaggaactttagggtaatgactgtgagtttccacaagtatggtgacctgttctttcctggaacaggtgatattaaggatataggagaaagggaaggaaaatattatgccatcaacattccacttaaagatgggatagatgacactagctttactcggctttttaaaacaattattgccaaagttgttgagacatatctgcctggtgctattgttcttcaatgtggggctgattcattggcgagggatcgtttaggctgcttcaatctctctattgaaggccatgctgaatgtgtaaagtttgtcaagaaattcaatattccccttctggtaactggaggtggtggatacaccaaggagaatgtagcacggtgttgggctgttgaaactggggtccttttagacacagaactcccaaatgagattccaaaaaaatgaatgtattgagtactttgctccagattatacattgaaagttccaaatttgaacatggacaatttgaacagtaagacctatctcagttcaatcaaagtgcaagtgatggagagtttgcggtacatacagcatgctcctggtgttcaaatgcaagaggttcctcccgatttttatatcccggactttgatgaagatgaattggatcctgatgaacgtgttgaccagcacactcaagacaagcagattcaccgtgatgatgagtactatgaaggtgacaatgacaacgatcacgacgacggcacacgctaatctgcttcttctgaggccctggtgtaaatggaaacctgagattcttcactgttgtgtgtagttcagcagccttgagatgtaatagtttgtcagttgacagcagggatctaatttagcaggtcaaagtggtttagacttttataagggattctgacccctcctgaattacacattgtagtacaagtctgcatatttttaagcatgcaaaaattcaaatttctcaaaaaaaaaaaaaaaaaaaaacaaaa

SEQ ID NO: 1158 - DNA, 672 bp, Zea mays
  Clone ID: TF_LIB4739-063-Q2-K1-C9
aaactatctcacctaaactgcatgtcctgggggggcaatggacattctatagcatgggatcctgggtgaactccctaccgtccttcagaccctacgggaagaagtgtggcgcgcgctacttctacaacccggaggagggaaactactactacggagaggggcataccatgaagacggaacgcatccggatgatccactcgttgctgaggcgctaccgccgcctcaaacagatgaaggtgaaccggcccaacccggacagctaccgcgagctctgccggaaccacgtggactactacctcgacttgctgttgtcctccaggccgggagcacgcagcatgaccatacccgcctgctcaagcgcttcaactgcctggaggactgccccgtgttccacagcccctacagtttctgccacagctatgggatggactacccaacacggagtcggcgagctcaactcacagttcaagacctctcaatgccactggttcctcgggcctgcacgacgacaagaagcgcgaagggacgggcttctgctaccccactgacgtcgtgctcgccatactcgaactgcgcgagcatcaccacagagctcggcatgctcatagctatatcctacatggggacgaagaggatgatgcttgctacactacagagacggcgatgactgcc

SEQ ID NO: 1159 - DNA, 1576 bp, Zea mays
  Clone ID: TF_21207384
agctcctgctgtctttcaaataataaagttcgaatttatgattgctagcttaccaatttattttatcacacccattgtaggagatgttggcaatgtctactttgggccaaatcaccccatgaagccacatcgtctctgtatgacacatcaccttgttctttcatatggacttcatcaaaagatggagatatataggccacacaaagcatatccaatagagcttgcccaattccattctgctgattatgtggaattcttgcaccggataactcctgattcccagcacctatatgcaagtgaactaactagatacaatcttggagaagactgtccggtctttgataatttgtttgagttctgccaaatctatgcgggaggaactttagatgctgctcgcagattaaatcataaaatatgtgacattgccattaattgggctggtgggctacatcatgccaaaaagtgtgaggcttcaggcttctgttacattaatgatctagtattaggaattctggagcttctcaagtaccatgccagggttctttatattgacattgatgtccatcatggagatggagttgaagaagccttttatttcactgacagggtaatgactgtgagtttccacaagtatggtgacctgttctttcctggaacaggtgatattaaggatataggagaaagggaaggaaaatattatgctatcaacattccacttaaagatgggatagatgacactagctttactcggccttttaaaacaattattgccaaagttgttgagacatatctgcctggtgctattgttcttcaatgtggggctgattcattggcgagggatcgtttaggctgcttcaatctctctattgaaggccatgctgaatgtgtaaagtttgtcaagaaattcaatattccccttctggtaactggaggtggtggatacaccaaggagaatgtagcacggtgttgggctgttgaaactggggtccttttagacacagaactcccaaatgagattccaaaaaatgaatatattgagtactttgctccagattatacattgaaagttccaaatttgaacatggacaatttgaacagtaagacctatctcagttcaatcaaagtgcaagtgatggagagtttgcggtacatacagcatgctcctggtgttcaaatgcaagaggttcctcccgatttttatatcccggactttgatgaagatgaattggatcctgatgaacgtgttgaccagcacactcaagacaagcagattcaccgtgatgatgagtactatgaaggtgacaatgacaacgatcacgacgacggcacacgctaatctgcttcttctgaggccctggtgtaaatggaaacctgagattcttcactgttgtgtgtagttcagcagccttgagatgtaatagtttgtcagttgacagcagggatctaatttagcaggtcaaagtggtttagacttttataagggattctgacccctcctgaattacacattgtagtacaagtctgcatatttttaagcatgcaaaaattcaaatttctcaaaaaaaaaaaaaaaaaa

SEQ ID NO: 1160 - DNA, 479 bp, Zea mays
  Clone ID: TF_uC-zmflteosinte76f08b1
cccacgcgtttttggacgctgagtcagacccccaccgatggcgtccgaatcctccccgcccccggcgggggcgccaccgcctggtctgggagacaagctagcggtgttctgggacgagggcatgctggcccacgacgccggccgcggcgtgttcgactcgggccgcgaccccggattcctggatgtgctcgaccaacacccggagaacgccgaccgcgtccgcaacatggtctccatcctccgccgcgggcccatcgcgcacttcctctcctggcactcgggccgccctgcccacgcctccgagctcctctccttccactcctcagaatacatagaggagctcgtccagacgaacgccaccggagccaagaagaagctctgtgagggcacgttcttgaacccgggctcctggggtgcggcgcttctagcggacgggaccacgctctccgccgcgaagcacatactagacgggcagggga

SEQ ID NO: 1161 - DNA, 2155 bp, Zea mays
  unsure (1)..(2155): unsure at all n locations
  Clone ID: TF_ZmC29703_2
ctcgagatccattgtgctggaaagccgacgcgcccgttttctcctgaaaacagaaggctccggcctccggcatccgnnnnnnnnnnnnnnnnnnnnnnnnnnnnnnnnnnnnnnnnnnnnnnnnnnnnnnnncggcggcgatggacccgtcatcggcgggctccggcggcnnnnnnnnnnnnnnnnnnnnnnnnnncgggcagaaacggcgcgtgtgctacttctacgacccggatgtgggcaactactactacgggcagggccatccgatgaagccgcaccgcatccggatgacgcactcgctgctggcgcgctacggcctcctcaaccaaatgcaggtgnnnnnnnnnnnnnnnnnnnnnnnacgcgaactctgccgcttccacgccgaggaatacatcaacttcctgcgctccgtcacgccggaaacgcagcaggaccagatccgcctgctcaagcgcttcaacgtcggcgaggagtgccccgtcttggacggcctttacagcttctgccagacctannnnnnnnnnnnnnnnnnnnnnnnnnncaagttcaaccacggccatgacatcgcaatcaactggtcnnnnnncctgcaccacgccaagaagtgcgaggcgtcgggcttctgttacgtcaatgacatcgtgctcgccatactcgagctgctcaagcatcacgagagagttctgtatgtcgatatcgatatccaccatggtgatggagtggaggaggctttctacacaacagatagggttatgactgtctcgttccacaagtttggtgattatttcccaggaacaggggatatccgtgacattgggcactcaaaagggaagtactactccctgaatgtccctctagatgatgggattgatgatgaaagctaccagtcccnnnnnaagccaatcatgggcaaagttatggaggttttccgccctggtgcagttgtgcttcagtgtggtgctgattccttgtctggggataggttgggctgcttcaacctctcaatcaaaggtcatgcggaatgtgttaggtatatgaggtctttcaacgttccattgttgctccttggtggtggtggatataccataagaaatgttgcacgctgttggtgttatgagactggagttgctcttggccaagagcctgaagacaagatgcctgttaatgagtactatgaatacttcggtccagattacactcttcatgttgcaccaagtaacatggannnnnnnnnnnnnnnnnnnnnnntggatgatatacgatctaaacttctggataatctttcaaaacttcgacatgctcctagtgtccactttcaagagagagttcctgacacagaaatacctgagcaagatgaagatcaagatgatccagatgaacgacatgatcctgactctgatatggaagtggatgaccacaaggctgtggaagagtcatcgaggaggagcattctaggtataaagatcaagagagaatttggtgaaaatgcgaccagagtacaggatggtggcagggttgcatctgaacatagaggactggaacccatggcagaagacattggttcctccaagcaagctcctcaggcagatgccagtgcaatggccatcgatgaaccaagcaatgtcaagaatgaacctgagagctcaactaaattgcaaggccaagcagctgcgtaccacaagccatagctgcgaccatcaagagttgctgggtttctgctaggcaacttcctgcttgatttggacagtccagaaaacagaagtgaatccgcaatacgtccctgccatttcaaatttgacttggttacacctatctgtgacaatgttaatgtaatgagatcccatggcactagtgaagttcccaggtgtccacctgggattgcttgcggttgagagagacgatagtctgatgacccatgtatacatgaagcccatgatctcagttgtacagtcattagccaatacaaatatgcagtggactaaagggtgattcattgcgtgttcttaatggttttgtgtcctgactcgtccttctttttgtgcggaagcaaggtaggcagttgctgtgccgcaaatttgccgagtttgtagaatgctgatgcaaatacatgcgctatctgcctgttaaaaaaaaaaaaaaaaaagcggcc

SEQ ID NO: 1162 - DNA, 705 bp, Zea mays
  Clone ID: TF_ZmC515833_1
aaaataccgataaccctcaaagagagaagaaattccccgaaatggcggcgtccggcgagggagcgtcgctgccgtctccggcaggtggcgaggacagccgccgccgtcgtgtgagctacttctacgagcccacgatcggcgactactactacgggcagggccacccgatgaagccccaccgcatccgcatggcgcactcgctagttatccactatggtctgcaccgcctgctcgagctctcacgccccttccctgcctcggaagccgacatcagccgcttccactccgacgaatatgtctccttccttgcctccgcgaccggcaacccgaccatcctcgacccccgcgccgtcaagcgcttcaacgtcggggaggactgccccgtctttgacggactcttccccttctgccaggcctccgccggtggcagcatcggcgccgccgtcaagctcaaccgtggcgacgccgacatcaccgtgaactgggctggcgggctccaccacgccaagaagggcgaggcctctgggttctgctatgtcaatgacatcgtcctcgccattcttgagcttctcaagttccacaggcgtgtgctatatgtagacattgatgttcaccacggagatggtgtggaggaggccttcttccctacaaccgagtcatgacggtttctttccacaagtatgaagacttcttttcctggaactg

SEQ ID NO: 1163 - DNA, 1771 bp, Zea mays
  Clone ID: TF_ZmC13115_2
attgggacctcgagccggcgggaagaagaaaaaaagggttgaattttgctgggagcctgggacgctgagtcagacccccaccgatggcgtccgaatcctccccgcccccggcgggggcgccaccgcctggtctgggagacaagctagcggtgttctgggacgagggcatgctggcccacgacgccggccgcggcgtgttcgactcgggccgcgaccccggattcctggatgtgctcgaccaacacccggagaacgccgaccgcgtccgcaacatggtctccatcctccgccgcgggcccatcgcgcacttcctctcctggcactcgggccgccctgcccacgcctccgagctcctctccttccactcctcaggtcaactcccaaagccgaaatcccctcactaacttcgttttctggaatcttgattgaccaaacgctcgcgttttcccgggggttccgttgtaaaatatattcgtaaacggacgccggccaaaatcttcttgtggtttgaagaatacatagaggagctcgtccagacgaacgccaccggagccaagaagaagctctgtgagggcacgttcttgaacccgggctcctggggtgcggcgcttctagcggccgggaccacgctctcctccgcgaagcacatactagacgggcaggggaacctggcctacgcgttggttcgcccccctggccaccacgcgcagcccgaccacgccgatggctactgctttctgaacaatgccggacttgctgtgcaactggctctggattccgggcgcgcaaaggtcgccgttgtggatattgatgtgcactacgggaatggcaccgcggagggcttctatcggacagacaccgtgttgacgatgtctcttcacatgatgcatggttcttgggggccatcgcatccgcagagtggctccgtcgatgagattggtgagggcaaggggcttgggtacaatctcaatatacctttgcctaatggaagtggagatgctgggtatgaatatgcgatgaacgagttggttgttccatcgattgataagtttcagcctcaactgttgtttcttgtggtcggccaagattccagtgcgtttgatcccaatggaagacagtgcttgaccatggaaggctacaggaaaattggacaaataatgaggcgcctggctgatcgccattgcaatgggcaaatactggttgtccaggaagggggttaccacatcacttattcggcatattgtctgcatgctacactggaaggagttttggatctggaagccccgctgcttgatgacccaatcgcttattatccggaggatgataaatacactatgaaagtcgttgacatgataaagagctactggaaggaatcggttcctttcctaaaggaaatttagaggaaataatgttcgcgccctcaatgttcaaattgcaggaaactccacattcctggacatcttcaattgaattgggaagaacattgcacgtctacgttttcaggccgtttaagattatctgattgacagtttcacgcctaacattgtacaggatagattaagaacattgtttgctgctgctcttgaatttctgcaatcaggatctcgtcagcctatttttgataaacagtcgatcttttttttttccctgagatgcttttggcggcagtagaaggtaggcggtgcttgagagtgacagagggccatgtaaccaggggataaatcttgattgactagtccaagcaaagggtgatgctcgctaccagaacttg

SEQ ID NO: 1164 - DNA, 2321 bp, Zea mays
  Clone ID: TF_ZmC29703_1
cccacgcgtccgactgtatgcattgctagtgtagtattctgtgacaaaaccaataatcaaaccagcccacatggcctactttgtatcttcgagtctcttcttccactttctcccgtcccgttcatttatttatatataaattctgctaagctgtgctctgcttctcgccctcccatcgcctgaccgacgcgcccgttttctcctgaaaacagaaggctccggcctccggcatccgccaaaaaggggaaaaaaggagagagaacacacacacacacaaaccccaatcccctgcggcggcgatggacccgtcatcggcgggctccggcggcaactccctcccgtccgtcggccccgacgggcagaagcggcgcgtgtgctacttctacgacccggatgtgggcaactactactacgggcagggccatccgatgaagccgcaccgcatccggatgacgcactcgctgctggcgcgctacggcctcctcaaccagatgcaggtgtaccgccccaacccggcccgcgaccgcgacctctgccgcttccacgccgacgactacatcaacttcctgcgctccgtcacgccggaaacgcagcaggaccagatccgcctgctcaagcgcttcaacgtcggcgaggactgccccgtcttcgacggcctctacagcttctgccagacctatgcgggcgcctccgtcggcggggccgtcaagctcaaccacggccatgacatcgcaatcaactggtcggggggcctgcaccacgccaagaagtgcgaggcgtcgggcttctgctacgtcaatgacatcgtgctcgccatactcgagctgctcaagcatcacgagagagttctgtatgtcgatatcgatatccaccatggtgatggagtggaggaggctttctacacaacagatagggttatgactgtctcgttccacaagtttggtgattatttcccaggaacaggggatatccgtgacattgggcactcaaaagggaagtactactccctgaatgtccctctagatgatgggattgatgatgaaagctaccagtccctttttaagccaatcatgggcaaagttatggaggttttccgccctggtgcagttgtgcttcagtgtggtgctgattccttgtctggggataggttgggctgcttcaacctctcaatcaaaggtcatgcggaatgtgttaggtatatgaggtctttcaacgttccattgttgctccttggtggtggtggatataccataagaaatgttgcacgctgttggtgttatgagactggagttgctcttggccaagagcctgaagacaagatgcctgttaatgagtactatgaatacttcggtccagattacactcttcatgttgcaccaagtaacatggagaacaaaaatacacgacaacaactggatgatatacgatctaaacttctggataatctttcaaaacttcgacatgctcctagtgtccactttcaagagagagttcctgacacagaaatacctgagcaagatgaagatcaagatgatccagatgaacgacatgatcctgactctgatatggaagtggatgaccacaaggctgtggaagagtcatcgaggaggagcattctaggtataaaaatcaagagagaatttggtgaaaatgcgaccagagtacaggatggtggcagggttgcatctgaacatagaggactggaacccatggcagaagacattggttcctccaagcaagctcctcaggcagatgccagtgcaatggccatcgatgaaccaagcaatgtcaagaatgaacctgagagctcaactaaattgcaaggccaagcagctgcgtaccacaagccatagctgcgaccatcaagagttgctgggtttctgctaggcaacttcctgcttgatttggacagtccagaaaacagaagtgaatccgcaatacgtccctgccatttcaaatttgacttggttacacctatctgtgacaatgttaatgtaatgagatcccatggcactagtgaagttcccaggtgtccacctgggattgcttgcggttgagagagacgatagtctgatgacccatgtatacatgaagcccatgatctcagttgtacagtcattagccaatacaaatatgcagtggactaaagggtgattcattgcgtgttcttaaaaaaaaaaaaaacgaaaaaaaaaaaaaaaaaaacaatggcggccgcatgggttcccagggcccgtgccgcgttcccgccgggcctcctgggtgcgcttgcggttgcgtgcgccgtctgcctgatgacccatgtatacaaaaaaaaaata

SEQ ID NO: 1165 - DNA, 804 bp, Zea mays
  Clone ID: TF_LIB4730-005-R1-K1-C11
ctcgaggtcccggcccgggaaaaaaaaaaaaaaaactgactccttgtctggggataggttgggctgcttcaacctctcaatcaaaggtcatgcggaatgtgttaggtatatgaggtctttcaacgttccattgttgctccttggtggtggtggatataccataagaaatgttgcacgctgttggtgttatgagactggagttgctcttggccaagagcctgaagacaagatgcctgttaatgagtactatgaatacttcggtccagattacactcttcatgttgcaccaagtaacatggagaacaaaaatacacgacaacaactggatgatatacgatctaaacttctggataatctttcaaaacttcgacatgctcctagtgtccactttcaagagagagttcctgacacagaaatacctgagcaagatgaagatcaagatgatccagatgaacgacatgatcctgactctgatatggaagtggatgaccacaaggctgtggaagagtcatcgaggaggagcattctaggtataaaaatcaagagagaatttggtgaaaatgcgaccagagtacaggatggtggcagggttgcttctgaacatagaggactggaacccatggcagaagacattggttcctccaagcaagctcctcaggcagatgccagtgcaatggccatcgatgaaccaagcaatgtcaagaatgaacctgagagctcaactaaattgcaaggccaagcagctgcgtaccacaagccatagctgcgaccatcaagagttgctgggtttctgctaggcaactt

SEQ ID NO: 1166 - DNA, 1657 bp, Zea mays
  Clone ID: TF_ZmC13115_1
ccctccgaggctcggccgggaaagaaaaaaaaaaggggttgcaattttgctgggagcctgggacgctgagtcagacccccaccgatggcgtccgaatcctccccgcccccggcgggggcgccaccgcctggtctgggagacaagctagcggtgttctgggacgagggcatgctggcccacgacgccggccgcggcgtgttcgactcgggccgcgaccccggattcctggatgtgctcgaccaacacccggagaacgccgaccgcgtccgcaacatggtctccatcctccgccgcgggcccatcgcgcacttcctctcctggcactcgggccgccctgcccacgcctccgagctcctctccttccactcctcagaatacatagaggagctcgtccagacgaacgccaccggagccaagaagaagctctgtgagggcacgttcttgaacccgggctcctggggtgcggcgcttctagcggccgggaccacgctctcctccgcgaagcacatactagacgggcaggggaacctggcctacgcgttggttcgcccccctggccaccacgcgcagcccgaccacgccgatggctactgctttctgaacaatgccggacttgctgtgcaactggctctggattccgggcgcgcaaaggtcgccgttgtggatattgatgtgcactacgggaatggcaccgcggagggcttctatcggacagacaccgtgttgacgatgtctcttcacatgatgcatggttcttgggggccatcgcatccgcagagtggctccgtcgatgagattggtgagggcaaggggcttgggtacaatctcaatatacctttgcctaatggaagtggagatgctgggtatgaatatgcgatgaacgagttggttgttccatcgattgataagtttcagcctcaactgttgtttcttgtggtcggccaagattccagtgcgtttgatcccaatggaagacagtgcttgaccatggaaggctacaggaaaattggacaaataatgaggcgcctggctgatcgccattgcaatgggcaaatactggttgtccaggaagggggttaccacatcacttattcggcatattgtctgcatgctacactggaaggagttttggatctggaagccccgctgcttgatgacccaatcgcttattatccggaggatgataaatacactatgaaagtcgttgacatgataaagagctactggaaggaatcggttcctttcctaaaggaaatttagaggaaataatgttcgcgccctcaatgttcaaattgcaggaaactccacattcctggacatcttcaattgaattgggaagaacattgcacgtctacgttttcaggccgtttaagattatctgattgacagtttcacgcctaacattgtacaggatagattaagaacattgtttgctgctgctcttgaatttctgcaatcaggatctcgtcagcctatttttgataaacagtcgatcttttttttttccctgagatgcttttggcggcagtagaaggtaggcggtgcttgagagtgacagagggccatgtaaccaggggataaatcttgattgactagtccaagcaaagggtgatgctcgcaaaaaaaaaaaaaaaaaaggcttttattcccatcaggt

SEQ ID NO: 1167 - DNA, 1945 bp, Zea mays
  Clone ID: TF_ZmC29909_1
cggggaagcctaaaccccgaaattataaagcggccgggctcggccgcaaggcggggatcttcgtgaggaccttcaaccatctcaggcggaatggcggcttctggtgagggcgcgtcgctgccgtctccggcgggcggggaggatgcgcaccgccgccgcgtcagctatttctacgagccgtcgatcggagactactactacgggcaaggtcacccgatgaagccccaccgcatccgaatggcgcactcgctggtggtccactacggcctccaccgcctcctcgagctctcccgcccctacccggcctctgaggccgacatccgccgcttccactccgacgactacgtcgccttcctcgcgtccgccaccggaaacccgggtgtcctcgacccgcgcgccattaagcgctttaacgtcggtgaggactgccccgtgttcgacggtctcttccccttctgccaggcctccgctgggggaagcatcggcgccgccgtcaagcttaaccgcggggacgccgacatcaccgtcaactgggcgggcggcctccaccacgccaagaagagcgaggcctccgggttctgctacgtcaacgacatcgtcctcgccatcctcgagctcctcaagttccacaggcgtgtgctatatgtagacattgatgtccaccatggagatggcgtggaggaggccttcttcactacaaaccgagtcatgactgtttcctttcacaagtatggggattttttccctggtactggacatatcactgacgttggggcagccgaagggaagcattatgctctgaatgttcccctgagtgatggtatcgatgacaccacctttcgtggtctgtttcaatgcatcattaagaaagttatggaggtttatcagccagacgtggttgtcctccaatgcggagctgactctttggctggagacaggttaggttgcttcaacctgtctgtgaagggtcatgctgactgcctccgtttccttaggtcgtacaatgttcctatgatggttttaggtggtggaggttacaccatcagaaatgttgcacgctgctggtgctacgagaccgcagttgctgttggagttgaacctgataacaagctgccttacaatgattactatgagtactttggccctgattatactcttcatatccaaccaaaaagtgttgaaaacctgaataccacaaaggacttggagaacataaagaacatgatattggagaacctgtcaaagatagaacatgttcccagcactcaattccatgacagaccgtcagaccctgaagctccagaggagaaagaggaggacatggacaagaggccacctcagcgcagcagattatggagcggaggagcttacgactctgatacagaggatcctgacagcctgaaaagcgagggtaaagacgtaactgctaacttccagatgaaggatgaaccaaaagatgatctgtagaagtttcagaagtgcccccaaagttactgagttgtcaatgggatcgtcgacatgcatgttgaagagtggggacgcatctgaacctgtccgtgctgatatctgccgctgtgcatctgtaacagactgaacgttttgctggttccagctttcctgcgtgttggtaactagactagatatatggccctttggtgggtcccaaactgttgagctggagaaatgaagtgattattctcgcatgatttactgtagcatgcatgtaatcattacccattagttcattaggctatcaacagtagtttactcatccccatattcaaacttcactatgcgcgcatacagtgatttgagtgaccatatggataaactttgaagatgaattttgggtagtgtttggtttcgaagtgtaatggaatagagccgccccgctcttaattcagcgccgtgatggcggacggcggctacggcggggggggcggtt

SEQ ID NO: 1168 - DNA, 1514 bp, Zea mays
  unsure (1)..(1514): unsure at all n locations
  Clone ID: TF_ZmC29703_5
cattgggtacctcgaggccggccgggctgaactacctatggtactgtcatcaatttgagactcccatggttgacaactttaaaaaaaaaaaaaaaaaaaaaaggggaaaaaaggagagataacacacacacacacaaaccccaatcccctgcggcggcgatggacccgtcatcggcgggctccggcggcaactccctcccgtccgtcggccccgacgggcagaagcggcgcgtgtgctacttctacgacccggatgtgggcaactactactacgggcagggccatccgatgaagccgcaccgcatccggatgacgcactcgctgctggcgcgctacggcctcctcaaccagatgcaggtgtaccgccccaacccggcccgcgaccgcgacctctgccgcttccacgccgacgactacatcaacttcctgcgctccgtcacgccggaaacgcagcaggaccagatccgcctgctcaagcgcttcaacgtcggcgaggactgccccgtcttcgacggcctctacagcttctgccagacctatgcgggcgcctccgtcggcggggccgtcaagctcaaccacggccatgacatcgcaatcaactggtcggggggcctgcaccacgccaagaagtgcgaggcgtcgggcttctgctacgtcaatgacatcgtgctcgccatactcgagctgctcaagcatcacgagagagttctgtatgtcgatatcgatatccaccatggtgatggagtggaggaggctttctacacaacagatagggttatgactgtctcgttccacaagtttggtgattatttcccaggacaggggatatctncatgctgaactaaacatatatcatttatgccaacatgaacaaaaactggatgagatcatttattttagttcgttttatcttccaagtcttcaactatctacataaagtgattggaagctatcagaaatgtaacttcacaaatgatctttagtgtcggttgaatttgccctggtattctattggaaatgattagtcaaaacctgattgttttttggacatgtttggtgtacagcaagatgaagatcaagatgatccagatgaacgacatgatcctgactctgatatggaagtggatgaccacaaggctgtggaagagtcatcgaggaggagcattctaggtataaaaatcaagagagaatttggtgaaaatgcgaccagagtacaggatggtggcagggttgcatctgaacatagaggactggaacccatggcaggagacattggttcctccaagcaagctcctcaggcagatgccagtgcaatggccatcgatgaaccaagcaatgtcaagaatgaacctgagagctcaactanattgcaaggccaagcagctgcgtaccacaagccatagctgcgaccatcaagagttgctgngtttctgctaggcgacttcctgcttgatttggacagtccagaaaacagaagtgaatccgcaatacgtccctgccatttcaaatttgac

SEQ ID NO: 1169 - DNA, 1640 bp, Zea mays
  Clone ID: TF_ZmC2148_1
ggggtggcagagtactgtggcagcgcggtacgctccgcatcaacatgctacgaagcgtgcgatccgattagaggaccatgttcggcatggcacactaaccagggaggcattttatgatgatccagcactcttctgcttgtcaaagtcatcatttggatgctataatgtggaggaacagattcatgacatcgcgaagagaacaaaaacaaatcaggagttgggatgcacagtgctcagcaaatcaggatcaagcttctatagagaaatgcaatgctccaaagaatttaccaatacctgataattcacttctcgatgctcgtattctctattgtacctctcctgccctgggtcataacaaagaagcacacccagaatcgaacaaaagagttcctgtgatagttgatactcttgagaaattggagcttagtcccaagcatcgtggttcacaggttcttgaaattcaaaatttcaaccctgcttctctagatgatgttgcacgagttcattcaagatcttacatcactggactcgaaaaggctatgggcagagcttcagatgaaggtctgatattgattgaagggacaggaccaacatacgctacagaaactactttccgagaatcacttctatcagctggtgccggaatcacactggttgattcagtggccaccaggacatcatgctgttcctcaaggtcccatgggtttttgtgtctttgggaacattgcagtggcagctcggtacgctcagcatcaacatggactaaagcgtgtgatgataatagattttgatgttcaccatggcaatgggacgtcagattcattttatgatgatccagatatcttcttcttgtcaactcaccagcttggaagctaccctggtactggtaagatcaatgaagtcggacagggtgatggtgaaggcacgacactcaaccttcctctgcccggtggcgcaggtgactacgcaatgagatgtgcatttgatgaggtcattgctccatcggcccatcgattcaagcctgatataatccttgtatcagctggatacgacgcacacgcgctggaccctctggctggccttcagttcacaacaggcacgttctacatgctggcatccagcatcaagcaggtggccaaggaactctgtggtggccgctgtgtcttcttcctggaaggcgggtacaacctgcagtcgctctccagctccgttgccgacacgttccgtgcattccttgatgagcccagcggacgcgtggggtttgatgatccagcgatacttttcgaagagccgactcggaagatcaaggaagcaatcgagaaggccaagagcatccactcactctaggctgtcagctaattttcccctcaatccccagaggggtagccctaaattgggaaaaggtgctgtcagcagtggcactgcagaactgcaagatcttgtggcaattggcattttgcaggtaggtagtgcatagtttgaacttggaaggcctggtcattttaatttagccaattctcaccagaaaatggaattaccattctcagtagaagcagtgtatagtataatactagctgtatatattgaccaaaagttatgtgctacattattaattttaaaactatgttaaaggttctaaa

SEQ ID NO: 1170 - DNA, 984 bp, Zea mays
  Clone ID: TF_ZmC22838_1
gtccaccgcaaccattcggcttctcccaaatcccggcacggcggcacgggacctctccctctctctcccgctggcgggcgatggcctcctcctcctcttcctcacctgcgcccgccttggccggggaggcgctacgccagaaacgcatcctctccagcaagctctacctcgaggtcccgtcctccaaggcgccggtggtttactcgccggcatacgacatctccttcctcgggcttgagaagctgcacccgtttgaatccgccaaatggggccgcatctgtaggtacctcaccagggaagggtacctcgacaagaaacggatggtggagccattggaagcctgcaaggaggatttgctagtggtgcacacggaggcgtatttgaacagtctcaaatgcagcttcagagtttcctccattgtagaggtccctcctgtgtcgcttgtccctaattggattgtgcacagaaagctactacaccccttccggaagcaggtgggtgggtccattttatcagccaaacttgcatttgagagaggttgggctattaatgttggtggaggatttcaccattgttcggcagatgaagggggtggattttgtgcatacgctgacatctccctctgcatccattttgcttttgtccgtctaaatatctcaagtgtattgatcatagacctggatgcccaccaaggaaatggacacgaaaaagattttgctaatgatgcatttagatgatgtaattgttcacagatcgaaattgaaaaacagcagtttttttctcgaacgaagctggagagatacgtgtctttgcatatagaagagaaaaaatagtacaaggagagatcaaaagacctctccaagagaaaaacagcagttccatccaactgttatactgcaatgaattccgacggtctcatgctatcagttttgtaacagtccacattaatatgatgtagacaccaaaataaaggacgggttttgt

SEQ ID NO: 1171 - DNA, 2138 bp, Zea mays
  Clone ID: TF_22135464
cttccgctttctcccttactcgcgctcagcacgcaggcgacggcgtcggcgctcaggtcgggctctgggcgacggcgtcatcggcttctcctcccgcctctctccagtcgcctcgcgccctcgcctccggtcctccgcacaccggccggtgaccctgctcacactgatgtggaggcctcaaaagagaaccgtggagcatgcagtttgaacaatgatcgtgctgatgctctagaagaagaggccaatgtttccacagctaggataggtcatgttgagagtgctgaccctggtggctctgtgggtgtagaaaaggaaattttcatggctgttaatgaggagtctgagggggagcaagctggggcaacactggaggatctgtttttctttaatggtgaagaggatgatgacagtgattgggaacctgctagtcgccttgttgtgaatagatggttttgcttgaactgcacaatgccaaatgtggacaagattacatattgcatgaattgccgtgagcttccaggatctgttgtagatggatatgatgtcttcaaaaagcaaattgcacaaacagctttgttatctgctgacacagggttgctgccagtgtctacggcgattggttttgatgaaagaatgctgctccacagtgagctagaagttaaaccaaatccacatccagaaagaccggatcgccttcgcgccattgctgcaagtcttgctgctgcagggatctttccctcaaaatgtgctttggtacctcctcgagaaatcacgaaggaggaacttcttatggttcatagtccagaccacattgaaagtgtcgagcagacaaagaacatgctttacagttacttcacttcggatacttacgcaaatggacattcagcatgtgctgccaaacttgcagctggattatgtgctgatcttgctagtttgatagtatctgggcgtgttcgcaatggctttgcgctggtaagacctcctgggcatcatgcaggggtgaagcaagcaatggggttttgtcttcacaacaatgcagcagtagctgcgttagctgcaaaaagagcaggtgccaagaaagtcctcatagttgactgggatgtgcaccatggaaatggcacacaagagatattcgacggggacaaaacagtcttgtacatatcattacatcgtcatgaggatggaaacttttaccctggaactggagctgctcatgaggtgggagttcttgatggtcaaggattctcagttaatataccttggagccgtggtggtgttggagatgatgactacatctttgcttttcagactgtggtgcttccaatagcttcagagtttgccgcagacatcactataatatctgcaggattcgatgcagctagaggtgaccctctgggttgttgtgacgtcactccaactggatactcttggatgacatccctgctagctggttcctcaaatggaagattgttggtgatacttgagggaggatacaatctccggtcgatatcctcatcagctactgaagttgttaaggtcctacttggggagggtcccaatcgtgcttcatttgtagtttcaccatcaaaagaggccttgagtactgtttctcaagtcctgaagattcaacaacagttttggccagttttaggtccaacatacgcatcactacaggcgcagcaggggtcggtttcttccaatcatagtaatgagctgaagaaaaggaagcgtccaggaggaggaccagggcccttctggtggaagatgggaagcaaaaggcttctatacgaagcgcttattgagcctcgcagccgtccgaggaaactcaaggggtcaactggttcagcagcgccttagacttagatgggcagtttgctggccgttgatcttctagacatgaacagggtagctcgctgaccgcgtttcctcaagcagagtaggctgcgtttacctagaaaacctagttttggctggttacttgcatgatggtcgaccgtttcagatggagtttgacagcaaacccgttgtgttaaccatgcgtggcgtatcagccgatgtttcatgcatgctactgtctttttctttggttggtttcgtaccatagatagacgtgtgtagcgaccatcgatgaagggcga

SEQ ID NO: 1172 - DNA, 1989 bp, Zea mays
  Clone ID: TF_22135466
cttccgctttctcccttactcgcgctcagcacgcaggcgacggcgtcggcgctcaggtcgggctctgggcgacggcgtcatcggcttctcctcccgcctctctccagtcgcctcgcgccctcgcctccggtcctccgcacaccggccggtgaccctgcaaaaggaaattttcatggctgttaatgaggagtctgagggggagcaagctggggcaacactggaggatctgtttttctttaatggtgaagaggatgatgacagtgattgggaacctgctagtcgccttgttgtgaatagatggttttgcttgaactgcacaatgccaaatgtggacaagattacatattgcatgaattgccgtgagcttccaggatctgttgtagatggatatgatgtcttcaaaaagcaaattgcacaaacagctttgttatctgctgacacagggttgctgccagtgtctacggcgattggttttgatgaaagaatgctgctccacagtgagctagaagttaaaccaaatccacatccagaaagaccggatcgccttcgcgccattgctgcaagtcttgctgctgcagggatctttccctcaaaatgtgctttggtacctcctcgagaaatcacgaaggaggaacttcttatggttcatagtccagaccacattgaaagtgtcgagcagacaaagaacatgctttacagttacttcacttcggatacttacgcaaatggacattcagcatgtgctgccaaacttgcagctggattatgtgctgatcttgctagtttgatagtatctgggcgtgttcgcaatggctttgcgctggtaagacctcctgggcatcatgcaggggtgaagcaagcaatggggttttgtcttcacaacaatgcagcagtagctgcgttagctgcaaaaagagcaggtgccaagaaagtcctcatagttgactgggatgtgcaccatggaaatggcacacaagagatattcgacggggacaaaacagtcttgtacatatcattacatcgtcatgaggatggaaacttttaccctggaactggagctgctcatgaggtgggagttcttgatggtcaaggattctcagttaatataccttggagccgtggtggtgttggagatgatgactacatctttgcttttcagactgtggtgcttccaatagcttcagagtttgccgcagacatcactataatatctgcaggattcgatgcagctagaggtgaccctctgggttgttgtgacgtcactccaactggatactcttggatgacatccctgctagctggttcctcaaatggaagattgttggtgatacttgagggaggatacaatctccggtcgatatcctcatcagctactgaagttgttaaggtcctacttggggagggtcccaatcgtgcttcatttgtagtttcaccatcaaaagaggccttgagtactgtttctcaagtcctgaagattcaacaacagttttggccagttttaggtccaacatacgcatcactacaggcgcagcaggggtcggtttcttccaatcatagtaatgagctgaagaaaaggaagcgtccaggaggaggaccagggcccttctggtggaagatgggaagcaaaaggcttctatacgaagcgcttattgagcctcgcagccgtccgaggaaactcaaggggtcaactggttcagcagcgccttagacttagatgggcagtttgctggccgttgatcttctagacatgaacagggtagctcgctgaccgcgtttcctcaagcagagtaggctgcgtttacctagaaaacctagttttggctggttacttgcatgatggtcgaccgtttcagatggagtttgacagcaaacccgttgtgttaaccatgcgtggcgtatcagccgatgtttcatgcatgctactgtctttttctttggttggtttcgtaccatagatagacgtgtgtagcgaccatcgatgaagggcga

SEQ ID NO: 1173 - DNA, 1795 bp, Zea mays
  Clone ID: TF_22135468
cttccgctttctcccttactcgcgctcagcacgcaggcgacggcgtcggcgctcaggtcgggctctgggcgacggcgtcatcggcttctcctcccgcctctctccagtcgcctcgcgccctcgcctccggtcctccgcacaccggccggtgaccctgcaattgccgtgagcttccaggatctgttgtagatggatatgatgtcttcaaaaagcaaattgcacaaacagctttgttatctgctgacacagggttgctgccagtgtctacggcgattggttttgatgaaagaatgctgctccacagtgagctagaagttaaaccaaatccacatccagaaagaccggatcgccttcgcgccattgctgcaagtcttgctgctgcagggatctttccctcaaaatgtgctttggtacctcctcgagaaatcacgaaggaggaacttcttatggttcatagtccagaccacattgaaagtgtcgagcagacaaagaacatgctttacagttacttcacttcggatacttacgcaaatggacattcagcatgtgctgccaaacttgcagctggattatgtgctgatcttgctagtttgatagtatctgggcgtgttcgcaatggctttgcgctggtaagacctcctgggcatcatgcaggggtgaagcaagcaatggggttttgtcttcacaacaatgcagcagtagctgcgttagctgcaaaaagagcaggtgccaagaaagtcctcatagttgactgggatgtgcaccatggaaatggcacacaagagatattcgacggggacaaaacagtcttgtacatatcattacatcgtcatgaggatggaaacttttaccctggaactggagctgctcatgaggtgggagttcttgatggtcaaggattctcagttaatataccttggagccgtggtggtgttggagatgatgactacatctttgcttttcagactgtggtgcttccaatagcttcagagtttgccgcagacatcactataatatctgcaggattcgatgcagctagaggtgaccctctgggttgttgtgacgtcactccaactggatactcttggatgacatccctgctagctggttcctcaaatggaagattgttggtgatacttgagggaggatacaatctccggtcgatatcctcatcagctactgaagttgttaaggtcctacttggggagggtcccaatcgtgcttcatttgtagtttcaccatcaaaagaggccttgagtactgtttctcaagtcctgaagattcaacaacagttttggccagttttaggtccaacatacgcatcactacaggcgcagcaggggtcggtttcttccaatcatagtaatgagctgaagaaaaggaagcgtccaggaggaggaccagggcccttctggtggaagatgggaagcaaaaggcttctatacgaagcgcttattgagcctcgcagccgtccgaggaaactcaaggggtcaactggttcagcagcgccttagacttagatgggcagtttgctggccgttgatcttctagacatgaacagggtagctcgctgaccgcgtttcctcaagcagagtaggctgcgtttacctagaaaacctagttttggctggttacttgcatgatggtcgaccgtttcagatggagtttgacagcaaacccgttgtgttaaccatgcgtggcgtatcagccgatgtttcatgcatgctactgtctttttctttggttggtttcgtaccatagatagacgtgtgtagcgaccatcgatgaagggcga

SEQ ID NO: 1174 - DNA, 2616 bp, Zea mays
  Clone ID: TF_ZmC6866_1
aattcggcacgaggttccgctttctcccttactcgcgctcagcacgcaggcgacggcgtcggcgctcaggtcgggctctgggcgacggcgtcatcggcttctcctcccgcctctctccagtcgcctcgcgccctcgcctccggtcctccgcacaccggccggtgaccctgcgtgcgtgcctctctctctctctctctctcccttcccgcctccggtggatcgtcaacgccgcccggcccgggtggcagcaccgcgcgcgacctgaggggtgagggcagcgggagccagcagccgctgctccaccaaggcggtcgcgccgcttttggagcgcttatgccccccggtccgctgagcgcttagtgcagtttttttggaacatgagacctcctagcagtggcaaaaagactgaggtctcccatagcgtggggaaatgtggggtttctgatcaagcttgtcatggcaaatgccaaagctgtggcattgatgcaaaacctttttgtgctggagtgaacgaagtctccttgttgactggcagtcacactgatgtggaggcctcaaaagagaaccgtggagcatgcagtttgaacaatgatcgtgctgatgctctagaagaagaggccaatgtttccacagctaggataggtcatgttgagagtgctgaccctggtggctctgtgggtgtagaaaaggaaattttcatggctgttaatgaggagtctgagggggagcaagctggggcaacactggaggatctgtttttctttaatggtgaagaggatgatgacagtgattgggaacctgctagtcgccttgttgtgaatagatggttttgcttgaactgcacaatgccaaatgtggacaagattacatattgcatgaattgccgtgagcttccaggatctgttgtagatggatatgatgtcttcaaaaagcaaattgcacaaacagctttgttatctgctgacacagggttgctgccagtgtctacggcgattggttttgatgaaagaatgctgctccacagtgagctagaagttaaaccaaatccacatccagaaagaccggatcgccttcgcgccattgctgcaagtcttgctgctgcagggatctttccctcaaaatgtgctttggtacctcctcgagaaatcacgaaggaggaacttcttatggttcatagtccagaccacattgaaagtgtcgagcagacaaagaacatgctttacagttacttcacttcggatacttacgcaaatggacattcagcatgtgctgccaaacttgcagctggattatgtgctgatcttgctagtttgatagtatctgggcgtgttcgcaatggctttgcgctggtaagacctcctgggcatcatgcaggggtgaagcaagcaatggggttttgtcttcacaacaatgcagcagtagctgcgttagctgcaaaaagagcaggtgccaagaaagtcctcatagttgactgggatgtgcaccatggaaatggcacacaagagatattcgacggggacaaaacagtcttgtacatatcattacatcgtcatgaggatggaaacttttaccctggaactggagctgctcatgaggtgggagttcttgatggtcaaggattctcagttaatataccttggagccgtggtggtgttggagatgatgactacatctttgcttttcagactgtggtgcttccaatagcttcagagtttgccgcagacatcactataatatctgcaggattcgatgcagctagaggtgaccctctgggttgttgtgacgtcactccaactggatactcttggatgacatccctgctagctggttcctcaaatggaagattgttggtgatacttgagggaggatacaatctccggtcgatatcctcatcagctactgaagttgttaaggtcctacttggggagggtcccaatcgtgcttcatttgtagtttcaccatcaaaagaggccttgagtactgtttctcaagtcctgaagattcaacaacagttttggccagttttaggtccaacatacgcatcactacaggcgcagcaggggtcggtttcttccaatcatagtaatgagctgaagaaaaggaagcgtccaggaggaggaccagggcccttctggtggaagatgggaagcaaaaggcttctatacgaagcgcttattgagcctcgcagccgtccgaggaaactcaaggggtcaactggttcagcagcgccttagacttagatgggcagtttgctggccgttgatcttctagacatgaacagggtagctcgctgaccgcgtttcctcaagcagagtaggctgcgtttacctagaaaacctagttttggctggttacttgcatgatggtcgaccgtttcagatggagtttgacagcaaacccgttgtgttaaccatgcgtggcgtatcagccgatgtttcatgcatgctactgtctttttctttggttggtttcgtaccatagatagacgtgtgtagcgaccatcgatggaaaaaaaccttgcacatctggaacggcatgcatctcagttattagccaaaaaaaaaaaaaaaaaaactcgcggcgcggattttctgtgcgacttgactgccctgtgcc

SEQ ID NO: 1175 - DNA, 590 bp, Zea mays
  Clone ID: TF_LIB4730-068-R1-K1-E12
gggtaccctcgggctcgccgggatcaactcacaattccgcattcgatccaactcctgagcactttctcctcgtccccgacaagccaatcgaagccgagatacggtcatggactccaccggcaccggagcagggggtaaggggaagaagggagcggccgggcgcaaggtcggcgggccaaggaagaagtcggtgtccaggtccgtgcaaggccgggctccagttccccgacggtcgcatggggccctacttgaacaagggcccttacccgcatcgtgtcggaaccggcgaccccgtctacctcggacgctgtagttgaatccttcagcgccttgtccgtgagatgtgcgtaggactgctagaccgacctccacttacagtcctactacgtcgccacgctgactgaggctgacgtggcctacctcgtggttctgtatgaggacaccaacctctgcgccatccacgccaagcgcgtcaccatcatgcccaaggacatgcagctcgcccgccgcatccgcggggagcgcgcataggcggtccggcggataggcctggggcccgttgcgcagtctcttctcggaagtttatacta

SEQ ID NO: 1176 - DNA, 370 bp, Zea mays
  Clone ID: TF_LIB4315-045-R1-K1-H10
cccaggcgtgcgaatctccctagcaggagaaccgcgggcaacgacaagcgctagccttcctactgtcccgatggcccgcacgaagcagacggcgaggaagaacactggcggtacggcgccaaggaagcaactggccaccaaggcggcgcgcaagtctgccccggcgaccggccgattgaagaaggcggagcggtaccccccgtcccttcacgctacgggagagccgcagtacccgaagagcacggagctgctgatcccctcgctgccgttccagcgcctggtgcgcgagaacgcccaagacttgcagaccgaccttcaggttccagagctccgcccgcgccgagctgaaggaagcgttcgaggcctacct

SEQ ID NO: 1177 - DNA, 454 bp, Zea mays
  Clone ID: TF_LIB4730-025-R1-K1-G11
tctgatcctcactcgttcggtggcccgcccgaataccacgccgacgaagtccagcggcgtcagcgcgccgaggaaccagctggggactaaggaacccctctactctgcccctgtgaccggcggagtgaagaaggcacaccgtttccgccccggtaccgtcgtgttcagatatatccgcacgtaccacaccactcaggagctgctgattaacaacatgtccttcagcgcctggtgttccagatcccagaggactccaggacctgacctgcggcttagatgagctctgctgtatctcttctgacggacgcttatggagggctacctcgatcccgcacttcatcgagggtaccctctgatgccatccactacacgcgcaacaccgtcatgtccaaggacttgcagctagccccactaatacgaggacaaaaggcctaagctgcatactttctgccat

SEQ ID NO: 1178 - DNA, 1417 bp, Zea mays
  Clone ID: TF_ZmC11101_1
cctcgaggccggccgggaaaaaaactacggcccatccgctaattttggctcggcccataacaattctgattacgcgactcgctgatcgccagcttgtggtacgcgagccgtacgcctcgacggccccggatatcctctagcgccttcccacaatcgcgcttctgcggttctgccgccgacgtccgcgccgccgacgtccgcgcccgcgtccctcgctgctttgccctctccaccctccgccatcaccgccgcggcgtccttctgtaccggatccgtcgcagccaccactccgcagatccgctgggttgacgtccacggagctgctccggggatgtcgtcctccgcttccagcgtcgagggcgacgccgccggagagttcacggaggtcgtaatcgtgcgtcacggcgagacgtcatggaacgcctcgcgcatcatacagggacacttggatgcagagcttaatgatattggaaggcagcaagctgttgcggttgctcatcgtctttctaaagaagtgaaaccagttgccatatactcttctgatctgaagcgagcagcagagactgcgcaaacaattgcaagaatttgcaatgtgccaaatgtcgtgttcgatccagcactgagagaaagacacattggagatctgcaaggcatgacgcttcaagatgctgctacagagaggccagaggcatacaaagcttttatgtcccacaagagaaatcaacaagttcctggtggtggagagagtcttgatcaactgtcggagcgatgtgtgtcttttctgtacgacattgttggtaaacacaaaggggagcgagttatcctggtttcacatggcggcaccatcagagagctctacagacacgcgagtcccacgaagccgctccacggcaaaatacacaacacgtcggtgagcgtcatcctcgtgtccgacgccaccggccggtgcatcgtcaagatgtgcggggacgtcagccacctccaggagacgggcgtcctggagaacgccttcggtggcgacaagacctccgcctgagattccaacattcatcacgcgccgagagctctcggcaattatcacgcgccgagtgagcgctcgtttcggccgtctttttttccactgtaccaatcatcctgttgctaccagtagtggtctagcggagaatgatgcacacttccccccgctgggaacgcggcgatttttgctggaacagttgaaggccgagccggggcgaatccttttggcctggccgtgcactgcttgctgaactgcacgtacgcatgtggagctgaaacgatctgcgttcgctcaaaaaaaaaaaaaaaaaagcggccgaggggggccgaggcctacctcgtggggctctttgaggacactaacctctgtgccatccacgccaagcgcgttaccatcatg

SEQ ID NO: 1179 - DNA, 395 bp, Zea mays
  Clone ID: TF_LIB3180-021-P2-M1-B6
ttattcctcgcgcggcgaccacccaattcgaagcgttctgagagaccgaagaagcggtagaaatggctcgtaccaagcagactgctcgcaagtccacgggagggaaggctcccaggaagcagcttgccaccaaggctgtccgtaagtctgcccccaccactggtggagtgaagaagcctcaccgctaccgtcctggaactgttgccctccgtgagatccgcaagtatcagaagagcactgagctgctgatcaggaagctgtccttccaaaggctcggcagggaaattgcacaggactttaaaactgattttgcgtttccagagccattcggtgcttgcccttcaggaggcttctgaagcataccttgttgtcctgtttgaggacaccaacctttg

SEQ ID NO: 1180 - DNA, 699 bp, Zea mays
  Clone ID: TF_LIB5027-070-A1-XP1-H5
tcgggctaatactagccgtcctctgttgatcgtaccaccaccgctcacctctgtgttggctttctcacctcttccaacacgattctcactccgggttgcgattgccctcggctctgtccctaacgaatgtagcgtggcggggataggaaggcgatcgattcacgcgccgacgagaaagccacggacagcagctccaagtctgatcttcgagtgccccgcgataaggatcgccagtctactcaagggccgcaagtatagacacagagagtgcaagccggcgcccctgtgtacctccctgccgtgctccagtatcttgctgctgagggtcttgaactgtgcgggaatggcacactggacaacaagaagacccgccatcgtaccgacgtcctactttctctatctacgtactaaactagcataataagatctcccacttgatgagcaccgtgagcatcgctatcgtcgatgcaatgcccaacatccataacctgttttgtcccgaagaatgacgatggcttgcatctatcaaggtctcgtcttcgtcgacgaatactatgtccttgactacgcctggtggcacctccagaatagctgccgcatacgacatgtgctccgtgtactacgctaggcgtgccctgtacctgcctatgtgggtttctgctacactgcataactaagttactcttgcgcttgctaacg

SEQ ID NO: 1181 - DNA, 440 bp, Zea mays
  Clone ID: TF_LIB3595-050-Q1-N6-G7
aataaccagcggagtagatcatctatgttccacagcagggtaataatgatctaggagggccattacatatccggcgcgccggatttattgggcaggccacctatctactaggacagaaaaggtggggcgctctggggaaaggacacagcaaataacccttctaacagatccgctgatcccgcatcgcgctcagttgctggtgaacttggcgacggtcttggtttcctcttgaacggcgtgcttggcgagctctccagcgaggactatgagcacggggggctggatctcgagggacatgatggcgggcttgttgttgtaccacgccatgttggcgggcttgccggccagcttcttaaaaatggcgatgatgcaaggtagttcatgatggaaactggtcttggatgatatgccgatgacggggtgcacctgctttagcacct

SEQ ID NO: 1182 - DNA, 385 bp, Zea mays
  unsure (1)..(385): unsure at all n locations
  Clone ID: TF_LIB4730-034-R2-K1-E1
ggcgagagnagnacnaaggagggggaccncctgggaagcccncggggngcanncccggggaaaaaaaaaaaaaaacacgggaggagaaggggggaccccagcaancccnaagcagaagccggccanccncacncgcncgagggcccgcacgaagcagacggcgaggaagnccaccggcggcaaggcgccgaggaagcagcnggcgaccaagggggcccgcaagnccgccccngcgaccggcggagagaagaagccccaccgcnnccgccccggcaccgncgcgcnccgggagaaccgcaaggaccagaagagcacggagcngccgaaccgcaagcagccganccagcgccgggggcgggagaacgcgcaggaagncaagaccgac

SEQ ID NO: 1183 - DNA, 299 bp, Zea mays
  Clone ID: TF_700086025H1
cccgagtctccagccaaccacatccagtccaccccatccccctcgaccccgacaaccccgagtcccgacccgatggcgcccaaggccgagaagaaaccagcggagaagaaaccggctagccgaagagtaagctgagaagacgaccgcaggcaagaagcccaagtccgagaagcgcctgcccggctcgaagttctccggcaaagaaggcggcgaaaagaaggggaagaagaatgccaataagaacgtggagacctacaaaatctagatcttcaaggtcctaaagcaggtgcaacccgaca

SEQ ID NO: 1184 - DNA, 533 bp, Zea mays
  Clone ID: TF_LIB4827-018-A1-N1-G11
attgggttctaaaggcggcgggatacttctgtcctaatcctccaaaatacggggaagacggcccggtgataccaactgatcaagagaaaggcccccaaccgctatcaaccggagtattgatggcgcctaggggggaacgaagcaggggctatgataccgcacgacgaggagcctgtcccgagaaggtgagaatcgtccggaagggaagaagtactaggaggagaagcgcctcccctccttcaagtacgaccccggcgaggtccacaacggcaagaacaaagacaagacgagcgtggatcacctacgagatctacatcttcacggggatgaagcaggcgcaccccgacatccgcatctcgaccgagggcatgtccatcatgaattccttcatcagcaacgtcttgctgacgttcaccgcgtagtccgccaagctcaccctgataccacaggacgcccaccatcacctcccgggagatccagacctccgtccgcatgcaccctaacggcgagctctccaagtacgccgtctctga

SEQ ID NO: 1185 - DNA, 488 bp, Zea mays
  Clone ID: TF_LIB4764-069-R1-K1-F8
cattgggtacctcgaggccggccgggaggcaccaccaggtgattaagctctcacgcgcatacgcctagtttgctctcctgccatgaaggatatcgcatcagagtgtacccatagcaaggcagcgtagccggtagaaaggccaacaacgaagggcgtcgagacaaggctgccaggcccacgaacaagtatctgttacggcctgcgaaagccgggctgcatcttcccgctggtcggatcggtcgttacctcaagaatgttcgtcactcgaagcgagtggtcactgtcgcccccgtctatcttgccggagtgcttgagtactctctctcgctctgaggagctggacctgggcgccaacgcggctaaggacaacaagaagacgcgcatcgtcccgcgacacttgctcctgtcgattcgtaacgacgttgagatcggcatagctgatgactggcgtcaccatcgcgcacggcgactgtcctcctcaacatcaa

SEQ ID NO: 1186 - DNA, 293 bp, Zea mays
  Clone ID: TF_LIB3245-260-P1-N1-C6
gtccttagcctaaattcctggaacaatgattgggagggttcttactttattcaagtccactgtcggaactgccctatcgtagcctgtacataccaatgcttccctcgagtatgtctaatcgaccggctgcttgaagaagcctcacctctttctccctgtcaccgtgttgctgctctagatccgcatgtaccagaagagcacggatctgctcatacgcaagctgcccttccagctcctggtccgcgagatctttcatgactttaagaccgacctcctttttcagtcctccgtct

SEQ ID NO: 1187 - DNA, 433 bp, Zea mays
  Clone ID: TF_LIB4740-076-R1-K1-A9
ggcgccctcctccctggcgctcgctccctgcagggagcagtttcccgggggcgacggcccagccatggcgcctttcttagtcgggcagagcctcggttctccctgcagaaggtccaggagtgatggaaaggcagggtactgaggaagcaggtcggcaccagggaggcgaggaagtgggagccgatgagcgtcggaggaaagaggggggggggggacagggcgcgaaatcgtggcgctgcgcgagatccgaaagtaccagaagagcacggagctgctgatccgtaagctgcccttccaggcgcctggtgacacgagatcgcgcaggacttgaagacagacctgcgattgcagagccacagcggtgctggggctcaaggagggccgccgagggctatctttgtacggtctctttgaggacaccaacctgtggagc

SEQ ID NO: 1188 - DNA, 506 bp, Zea mays
  Clone ID: TF_LIB3637-204-Q1-N6-D3
tttttttttttttttttttttttttttttttttttttttttttttttttttttttttttttttttttttttttttttttttttttttttttttttgggggaaccaggcattaaagagggggccccttttttgggaacaaatacagaacttaatccttagcagggacaaggagtaacttagtttagcgggggtacagaaacccaaatacccaggtacaaagaaaacctaagggactaaaaaaacacatggtgatacgggagcatccggggggggccaccagggggaggaaaggacttagtcctgggaaccagccgaaaccttggggctgccgccgccggcctttttggggagaaaaagggtatgggtggggggcattacaccaccggtggggaggggcaccgggcccagaaagggggaaagctttttgtcgttgcggacgggaaactggatgtggcccggaacaaagggggtttttttggtgtcacgggccgaattggcggccagct

SEQ ID NO: 1189 - DNA, 268 bp, Zea mays
  Clone ID: TF_LIB4148-023-Q1-N1-H1
gaaagatcagcacattgctttaattcaatcacacgcaaatcataataagccatcgctagcagtcatcacataaactgagccacgcgtaccggcgacgcccatcatgaccattacaaggatcctaggacgaggtgaactaccaaacgggcttagtgccctaggagaccgtgtgcttggggaggtccccggagaggaccaggcgcaccgaggtctggaactaccgggaggtgaaggagggcttcttgttgtagctcgccaccgaccccta

SEQ ID NO: 1190 - DNA, 460 bp, Zea mays
  Clone ID: TF_uC-zmroteosinte016h05a1
gcaggaacaagttcattgataaattggagaaatgagcaatcacagttcattgcactgaaaccaatacatctagaacattactcctacaggataaggaagccacgaaacgaatgccaccatctacttttagtaacaatacaacgacgagcagcacgacgggcgctcaagccctctcgcccctgatgcgccgcgcgagctggatgtccttgggcatgatagtgacgcgcttggcgtggatggcgcaaaggttggtgtcctcgaagagacccaccaggacgcctcggcggcctcctgcagcgccgcgacggcggaggactggaacctcagatcagtcttgaagtcctgcgcgatctcgcggacgaggcgctggaaggggagcttgcggatgagcagctcagtgctcttctggtacttgcggatctcgcggagcgcgacggtgccggggcggaagcggtggggc

SEQ ID NO: 1191 - DNA, 251 bp, Zea mays
  Clone ID: TF_LIB4300-003-R1-M1-B5
caccgcgccacatccagctcgccgttcgcaacgaccaatagctctcccgtttgctgggcacggtgaccatcgctagcggtggtgacactgcccaacattcataaccttttgctcccgaagacacgacgagcagcaggcagcgtctcaagggtgcgtgattggtgacaggagactaagtccttgactacacctggaggcaccgttcacaatgctgtcgtgtctacatgtgtctagagtagtacctttggcct

SEQ ID NO: 1192 - DNA, 389 bp, Zea mays
  Clone ID: TF_LIB3227-021-P1-K1-E2
ctcttatttttttttttttagaacctttatatttttttttattcttcagttgtatgagtttttgtttttttttactccagagaaaccggaaaaaggcgaagaagggtgccggcggggcaagggagtcggacccagtacgaactaagagacgccgtccgtaaaaaacgggctgcaattccccgccggccgcaaaaaacgcgggctgaagaaggcccgccactcgcagcgcgtgggcactggcacccccgtataccgggacaacgccctgaaaaacctcgccctcggggaactggagtaggcaaggaacgcggccaaagaaaacaagaagacgcgcggggggccgcgccacaagcttctagcgatccgcaacgacgaggagcttgggaagc

SEQ ID NO: 1193 - DNA, 425 bp, Zea mays
  Clone ID: TF_LIB4758-140-A1-K1-E2
ttgggtacctcgaggccggccgggaatttatgccctaagattgactaccctagccctcaccctactcgatagccgtgccgacaccaccgaagacaggccctacatgagtcagctccgatgacactgcttccgagctacccggactccacgatcccactcatcctccatgtcaccaaggctgcccggaagactagcccccaccattggcggatcgaataactctcaccgctactcgcactgcaactgaagccctcagggagatccgaaagaatcacaaaagaactgaaatgctgatctccaagctgcccttccagaggctcggcgggtaaattgtgcagcactccacaactgacatgcgatgccaaagccatgcggtgattgccctctaggaggctgcagaggtataccttgctactactgtttga

SEQ ID NO: 1194 - DNA, 267 bp, Zea mays
  unsure (1)..(267): unsure at all n locations
  Clone ID: TF_LIB5026-053-Q1-XP1-C6
cctgtgcggcgctcgagcggccggtttcgatcactcgcattcccattcgttccactcctgagcactttctcctcgtcccagacaagccaatcgaagccgagatacgaccatggactccaccggcaccggagcanggggtaaggggaagaagggagcggccgggcgcaaggtcggcgggccaaggaagaagtcggtgtcgaggtccgtgaaggccggtctcccgttccccgtcggccgtatcggccgcttcttgccccagggccgcta

SEQ ID NO: 1195 - DNA, 197 bp, Zea mays
  Clone ID: TF_LIB3150-077-P2-N2-B2
cccaaggtcccttttttttctcgatctggaagcgcgcgcagtagcagccatggacgtgagcggagcatgcgggaaggcgaagaagggcgcggccgggcgcaaggccggcggtccgacgaagaagtcggtgtcgcggtcctccagggtcggtctgcagtttcccgtcagccgagttgggcggtacctcataaagggcc

SEQ ID NO: 1196 - DNA, 349 bp, Zea mays
  Clone ID: TF_LIB3357-024-P1-K1-D4
ctcgcattttccttgcaaccgattgcctatccccctcccaaccaaagaccgatggcgcccatgggcgagatgtatgcccgcggcgaagaagccggtggaggaggagcccgcggccgatatgactaccgtcgggaagaagcccatggcggagaagcgggtccccgctgtctagtccgtcggcttggatggcggcgtgggcaagcgtggcatgaagtagggcatgattagcgtggagacgtacatgatctacatcttcaaggtgctgatgctggtgcacccggacatcggattcttctgcaaggccatgttcatcatgaactccttcatcaacgacattttctagaagctg

SEQ ID NO: 1197 - DNA, 289 bp, Zea mays
  unsure (1)..(289): unsure at all n locations
  Clone ID: TF_uC-zmroteosinte032e10a1
ctctagggggnatgcgcggttttttcctttcaagcggggaaagggaccgcttacacaatacagttactttcttacataaaagacatcaaccgggcccaaaaagcaaacacagtgggaactaccaccgcggctacacagctaaccgttctactttggtactactgcaagaagaggagactagtgcacgtcacattgtttggcttggagctggtgaacttggtgacggctttggcgccctcggagaccgctggcttggctagctcgccgggtaggtcaaggcggacggggg

SEQ ID NO: 1198 - DNA, 278 bp, Zea mays
  Clone ID: TF_LIB3150-071-P1-N1-E2
ctctagttttggcgcccacaggcaaattctcgtgcactcaatcgcgagcataggcagcactgcatgcatggacgccagcggagccggtagcatggcgattaacggggcggctgggcgcaaggctggcggccccatggaagaagtcggcgtcgcggtccagcaaaggccggtctggagttccccgtgagccggatcgggcgctacctgatgaaggggcggggcgcgcagcgcgtgggcaccgtcgcccgcgtgtatctaggcgacgtgcttgagtacct

SEQ ID NO: 1199 - DNA, 412 bp, Zea mays
  Clone ID: TF_LIB4185-034-R1-K1-G10
cccctcgagttttttttttttttttttttttttttttttttttttttttttttttttttggaacaaacggaaggtcacaatgggctttttttaaaacacgcacaacaggctggatctagggctacataaaccagcattttccccgtcaagccacaccttgggaattgcaaaaacaaaaaccgcagcgacaacagggaggcgcgagcgcaaccgggatagcctacccgccgaacccgtaaagggggcggccctggcgcttgagcgcgtaaacaacgtccatggctgtgacggtcttgcggggcgcgtgctcggggtaggggacggcgtcccggatcacgttctccaagaaaaacttgaggaccccgggggtctcctcggaaaagaacccggagaagggctttaagccgcccct

SEQ ID NO: 1200 - DNA, 463 bp, Zea mays
  unsure (1)..(463): unsure at all n locations
  Clone ID: TF_LIB4975-015-R1-K1-D7
cngtacacaaaactgctccctctgcaatgctgtactcgcactgctcagatgcgcgcctcgcaatttctccactgttccaagacgctactcgcttcgtatcccgaacgccatctgctctttcactaacgatatgtagccatgtcggcagagaggtaaggcgatcggatcaggtgccgacaacaacgccacgttcagcagctccaaggctggcctcgagttccccgtgggaaggatcgccaggctcctcaaggccggtaagtatgccgagagagtcggagccggcgcccctgtctacctcggtgccgagttcgaatatcctgcagctgaagctgttgagctgatcgtcctcgccgaatgggagagaaagaagatcctgaacgtaccatgcctgatccccacggcgccagggagaggaagactccccgcacgggctgcttatgcgagacatcagtagccctggagg

SEQ ID NO: 1201 - DNA, 1009 bp, Zea mays
  Clone ID: TF_ZmC2089_41
aatcacctcagcagcacagctcagcttccacccactctcaacccctcccgccggagcccaagcaaggaagcgacgatggacggcagcaaggcgaagaaggtggcggcgaagaagttcggcgggccgaggaagaagtcggtgaccaagtccatcaaggccgggctccagttccccgtcggccgcatcgggcgctacctcaagaagggccaccacaccccctcctcccccaccctccgctcccctctcgccgcccattgttctgcctgcgggaaccatctcatatctcggccaagatgagggaaatcctgcacatccagggtgggcaatgcggcaaccagatcggtgccaagttctgggaggtggtgtgtgatgagcatggcattgacccaactgggcgctacaccggtacctctgacctgcagttggagcgtgtcaatgtctactacaatgaggcctcctgtggtcgctttgtgccccgggctgttcttatggaccttgagcctggcaccatggacagtgtccgcactggcccttacgggcagatcttccgccctgacaacttcgtctttgggcaatctggtgcgggtaacaattgggccaagggccactacaccgagggtgctgagcttatcgattctgttttggatgttgtgaggaaggaggctgagaactgtgactgtctgcaaggattccaagtatgccactctcttggtggtggtaccgggtctggcatgggtaccctgttgatatctaaaatcagggaggagtaccctgaccgcatgatgctgacgttctcagtgttcccctcaccaaaagtatctgatactgtggttgagccatacaatgcaactctctcagtccatcagctggttgagaatgctgacgagtgcatggttcttgacaatgaggctctctatgacatctgtttcaggactcttaagctgaccacacctagctttggggacttgaaccatttaatctctgctaccatgagtggagtcacatgctg

SEQ ID NO: 1202 - DNA, 438 bp, Zea mays
  Clone ID: TF_LIB4730-062-R1-K1-C2
ctgcttacaaggaaggcggactgggccccaacaaggaatacagccctaggcaaagaaagcgcctatccgatgggcaaaacctccagcaaagcgagatgatagggcaatatggggaaaagagaaggctaaaaagtccacggtagtaccttgacaagaactacatcttcaatgtgatgaaccaggtgcaccctgacataggcatctacttcaaggctcatgtccataatgaactccttcatcaacgacatcttctagaagctcagcgtggcgagtccaccaagctgtcgcgctataacaagaagcccaccgtgacctcccgcgagatacagagctcggtgcgcctcttgctaccaggctagcttgccaagcacgccgttctgcgaggtcaccaagagccgtcaccaagatcacattgtgagtacgtgcatagtactaggc

SEQ ID NO: 1203 - DNA, 646 bp, Zea mays
  Clone ID: TF_LIB4732-087-A1-K1-B7
gctattcttgtcctggcatccgcagagatgttgttctgttctgctgaccatttagctgttgccccgccgcgcatgaggaagaagagagcagaggaggatggctcgtacgaatcataccgcccgcttgtccgcgggaggcaatgccccccgcttgctgctcgtcaccaaggcggcgaggaagtcggcgtcgactaccggcggagtgtagaaggcccacaggtacaggcccgtgaaccgtggcgctgctcgagatccgcatgtaccataatagcactgagctgctgatccgcaagctgcccttccatggcctggtgcgcgagatcgcgcaagacttctagacagacctcgcggttccatgagcctagctctgttatggtgctccaggaggccgtcgaggcctacctcgtcggtctcttcgaggacatcaacctctgtgtcatccacgctaagcgtgtctccagtcatgcccataggacattgagttcgtccgccgcatccgtgttgagcgcgcgtagacatcatctccggtgatctgatgaatgtctagttaccaatacaatgtatgctgtattagcgtctctgttctgtattcgatattttggattcggatgcagtgaacaactgctttacctatgaaaaagaagaa

SEQ ID NO: 1204 - DNA, 438 bp, Zea mays
  Clone ID: TF_LIB3632-044-Q6-K6-D7
cgactgagccaagctcagccatcgacttgctgtctgagtcctctatagccgcttcgatggactgcacgatgcaaacagctgggaagtcgaccggcgagaaggcccccagtaagcagatggccactaatgctgcgcgcaagacggccagggccaccggcggggtgaagaagccgaaccgctggcgccccgagaccgtcgggctagcgcgagatgcgcaaggaccagaagagaactagatctgctcatccgcaatctgcccttccagcgcctcgtcgcgcgatatcgcgcaggactgcaagactgatctgaggtcacagtcctccgctcgcaagacgctgcaggaggccgacgaggcgtacctggggtggcttttataggacaccaaccttagggccctccacaccaagcgcgtaactatcatgcccaacgtcatccatc

SEQ ID NO: 1205 - DNA, 341 bp, Zea mays
  Clone ID: TF_uC-zmflteosinte39a06b1
gcctaatctcgccttccgaggaaacccacctgtttaccacagacccgagcggaagaagccatgtccgggcgcgcaaggggtggcaaggggctcgtcaagggcgggacgaagcgtcaccggaaggtgctgcgcaacagcatccagggcatcaccaagccggcgatccggcggctggcgaggaggggcggcgtcaagcgcatatatgggctcatctacgaggagacccgcggcgtgctcacgatctcactccagaacgtgatccgtgatgccgccacctacaatgagcacagtcgtcttatgaacggcacagccatggacgtcgactacgcgctcaagcacca

SEQ ID NO: 1206 - DNA, 323 bp, Zea mays
  Clone ID: TF_LIB3227-021-P1-K1-A10
ctttaccaaatacaccgccggctctgtttgcccatcttcacgccaagcacggaatgtccgatggcttgtttcgaagcatacagcgctcaagtcgacgggcggtaaggcgccccctaagcagctgtccaccaaggcattacgcatgtctgtccccgcaaccggtggcattaagaatcctaaccgcttccgtcccgacaccgtttcactacggaagattctcatgttccatatgagcacggagctgctcatgtctatgctgaccttccagcgccttttccgtgtgatcgcgcaggattttaagaccttccttctcttccagtcct

SEQ ID NO: 1207 - DNA, 343 bp, Zea mays
  Clone ID: TF_LIB3279-011-P1-K1-F2
cagaacttaatttcttgcgcccacagccaatgttttttcaactcaatcgtggtttaagcgtggtgctgcacacatggacgccagcgtagcaggtagaacggcaaataaaggggcgcctgcgcgcaaggttgtcgcccccaggaagaaatcggtgtcgagaatcattaaggccgcactgcaatgtctcatacgacggatcgggcgctacctcaagaagggtgaggcactcacagctcagttggcactcaggcctatgtgtatcttggcaacgtgctagaatacctggccactcatgtgcttgagctcgccgggaacgcggtgaaagacaacaagaagacgcgca

SEQ ID NO: 1208 - DNA, 487 bp, Zea mays
  unsure (1)..(487): unsure at all n locations
  Clone ID: TF_LIB4730-068-R1-K1-G9
ccgttctcaaaccaacctagcaattcgccgcagcctctcaccctntgtagggcggacctcccgcagccgccgcacagatggcacccaaggcggagaagaagccggcggccaagaagcccgcggaggaggagcccgcgacagagaaggtggagaaggctccggcggggaagaagcccaaggccgagaagcgcctcccggcgggggggggggggagggcggcgagggcaagaaggggaaaaagaaggcgaagaagtccgtggagacctacaagatctacatcttcaaggtgctgaagcaggtgcaccccgacatnggcatctcggccaaggccatgtccatcatgaactccttcatcaacgacatggtgggagaagctcgcgggcgagcccgtttaagttggcgcgctacaacaagaagcccaccatcatctcgcgggagatccagaccttggtgcgcctggtgcgccgcggggagctcgaaaagaacg

SEQ ID NO: 1209 - DNA, 415 bp, Zea mays
  unsure (1)..(415): unsure at all n locations
  Clone ID: TF_LIB3279-194-Q1-K6-F7
ccgggncgacccagcgnccggnnctagnacgcgagcggccgcgngacgngcgngaggagncnggagncggacgggaacgaaaaggcgaaaacccagnggcncgaggnnccccggagcggaggcganggcngggaagggagggaaaggcnngcncgccgcgaagaccacggcggccaagnccgccgngaaggacaagggggagaagggcccaancncacgcnccncccgcgccggcccccagnncccnngggggcggnnccaccgncagcngangcaaaggacgcaggcaaangggcgcgnnggggccaccgcagccgncnaccccgcngcccccccggaggacccgaccgccgaggggcnggagccggcggggaaggcnngcaaggagcngaaggggaagcggggcaccccncgc

SEQ ID NO: 1210 - DNA, 417 bp, Zea mays
  Clone ID: TF_jC-zmshLIB3587P023b04a1
ggtaacagccaaacccatacccagtggggattaacaccacataatgtggggtaatcatcccaaatggactatatagtactagggatcaactaacagaaatgacaagcatgttcgttgcggttttaatccaccggtttctgttttttctacagacagcagtagtccgaacggttttaattcagcagcagtgaacaacccaactcaggcattttgcaaaacatgcaccacattgtttgcctaaactttaaacctgcataaaggaactttttgggcgacttggcggaggcggccttcttgggagacttcttctctttgccttccttggcagcagcgacagcggttttcttggggagcagcacagggttgatgttgggcagaaccccgccgtgtgcgatggtgacgccggccagtagcttc

SEQ ID NO: 1211 - DNA, 369 bp, Zea mays
  Clone ID: TF_LIB3079-024-Q1-K1-D7
gattagaacctctaaaatttcccccactcgcctgtcgaagcagaacctgtagcattcatggaggccagctgtacacggtagcaaggggaagatgggtgcggacgatctcacggcacgctgttccaggaagaagtttgtgacgcggtccttcaaggcctgtctgcagttccccgtcaacctgatcggactctacctcacgaagggccagtacgtgcagcgcgtgaacactgtcgcgtacgtctacctagtcgccgtgctggaatacctcgtcggcgaggttctcgaattggcaagaaacgccgcgaacgacagcattaacacgcgcatcatcccgctccacgtgctattggcgatccgcatcgacgagga

SEQ ID NO: 1212 - DNA, 502 bp, Zea mays
  unsure (1)..(502): unsure at all n locations
  Clone ID: TF_LIB4744-058-R1-K1-C4
ggtaccctcgggttcggccggnaaccaagcagtatgacttctctgaggagaggcctgctcgtaattcctcgtgggagcgaggacgtgtacgccttcgtgacgcaaaaaaacagaagcatcactagagttataccggacgggaaggatcatgcgcggtgagaacggggaagagactcgacaaccatgtctccaatctgtgtgccccggtacagctcgatgatcaggagcccaagctttgcctacgacgaccctatggtctactttggatccgactaccgcagaggattactgcatggaagatcggaccactggggatcgacggactgccgcgggagaacactcaggatttagagacagacctgagctaccagagtgttagcgggctccccgctgcaaggggcgttacagggctacctcgtcgggctcttcgaggacaacaaactttgcgccattcacgccaagcgcgttaccatcatgcccaaggtcatgcagctcgcccgcc

SEQ ID NO: 1213 - DNA, 448 bp, Zea mays
  unsure (1)..(448): unsure at all n locations
  Clone ID: TF_jC-zmX700043548a1
ggaattcggctcgaggcattccccatttccgattcccaatttagttttttcctaccagcctctngcaaactcaggagagggacccgatggcacccaaggcggacaacaacccggcggcgaagaagcccgcagaggaggagcccgcggccccggcggagaaggcccccgctgggaagaagccgaaggcggagaagcggctcccggcgggaaaatccgccggcaaggaaggcggtgttgacaagaaggggcggaagaaggccaagaagagcgtggagacgtacaacatctacatcttcaaggtgctgaagcacgtgcacccggacatcggcatctcctccaaggccatgttcatcatgaacctcttcatcaacaacatctttctagaagctcgccgggaaggcgccaagcttgcccgttacaacaagaagcccaccttacctcccgggag

SEQ ID NO: 1214 - DNA, 697 bp, Zea mays
  Clone ID: TF_LIB4975-035-A1-K1-G6
attggtacctcgagccggcgggcgggatcgctctcccacgatcgagccgctccggtcatcttccctctcgcctctgccaccacttccactcccctatcgtcctgtcgtgataaggaatgttgccactcgcaccagtgattgttgctggcggctctaagaatgcgaatcccaggtgctctctcggttgctttgctgattcccgtgctgaggatcgctcggctcctcaagggcggcaagtactaccgagcgcgtgggatccggcgcccctgtgtacctcaccgctggactccagtacctcgacgctgaagtcctgtagcttgctgggaacgcatcgaggatatacacaaaaagacccgcgtcgtgccgcgacacatccacatcaccgagagctacgacaaggagtctcgacctacctgctgtgtcgatgcacaccatcgctgcagaagttcctgcttatgcccacacatctctgcagcacctcctccccaagaatgctggctcgtctcgaggcttccaccgtcgatgacgatgacaactcgtgaactggcccactggataataagattcgctaccgacgtgtatcctatgtatatgacgtgagtactacaacatggctttgaaagctcgatgcgtttgccaatgataatacatcctttcttggatccctaacatcggtgattcatatgtgaatacgggt

SEQ ID NO: 1215 - DNA, 367 bp, Zea mays
  Clone ID: TF_LIB3079-035-Q1-K1-D5
gtacgcctccaattcgttctgaacaggcatgggttaaatcgagcaagcaatgacacgaggagagggatcatacgaagcatagcgccaacaagaccaccggaagctaggccgcacgcaagcacctgggcacgaaggtggccaggaagtcggcgccgacgaccgcacgcacgaacaagcccgacaagtacaggcacaggaccatggccctgaccgagatcctgaagtacaacaagagctcccagctgatcatccagctgttgatcttgcagcgcctgttccatgagatcgttcacgacatcaatacggatttgcagatgcagatgcacgcccagatggacgtccaagaagccgtcgaggaatacctcga

SEQ ID NO: 1216 - DNA, 395 bp, Zea mays
  Clone ID: TF_LIB3070-005-Q1-N1-G9
acccaaacttcttacaaaggaacccaattccgcaaccgtcagcctatttcaatagccccccttgcctatactataccctccatcaatgaaaccttcttatgatacacctcaagctaagaccgtcttcctatacaacaaatccaacgccgaaatactcctccctcatcacaagtccacaagcatagatggtggcgagaagaaggctaagaagaaggcaaagaagtcggtggaaacgtacaatatctacatcttcaaggtgctgaatcaagtgctcccggacattggcatctcgtccaaggccatgtccatcatgaactccttcatcaacgacatcttcgagaagctggctgcggatgcaatcaatctgtcgctctacaactagaagcctaccatta

SEQ ID NO: 1217 - DNA, 479 bp, Zea mays
  Clone ID: TF_cC-zmle18900030g11d1
gcggaaccccgggtagacccacgcgaacgaagcccgattcccaatccagcaaaccctaccagcctctagcaaactcagagagggacccgaaggcacccaaggcggagaagaagccggcggcgaaaaagcccgcagaggaggagcccgcggccccggcggagaaggctcccgcagggaagaagcccaagggggagagccgcacccggcgggaaaatgcggcggcctggaaggcggagttgacaagaaggggcggaagaaggccaagaagagcgtggagacgcacaagatctagatcctgaaggcgctgaagcaggtgcacccggacatcgggattcctgcaaggccatgtccaggatgaactccttcatcaacgaccaactcgagaagctcgccggcgaggcggccaaactcgcccggaacaacaagaagcccaccagacctcccgggagagccagaacctcgatcggctcgatctaccc

SEQ ID NO: 1218 - DNA, 366 bp, Zea mays
  unsure (1)..(366): unsure at all n locations
  Clone ID: TF_LIB4730-002-R1-K1-C8
tatgtcgccggtcctatggcccgaacgaagcaaacacctggaagcgcaccgacggagcgtgacccccgaaagtcagcttcctctaaggctgaacgcaagcggggccccaccaccggcggtgtgaagaagccagaccgtttgcaccccgataccgcgcggcttcacgagattctctcgtaccaaaagagcactgagctggtcatccgacagctacaataacatggtctctttcgagagatcgcgcaagactaccagactgatctgacgttgcaggactccgccgcagctgtgtctgaagaggccnagcgaagaagacctggagaagctcttccaggacaccaacctttgtgtcatgcactccaagcg

SEQ ID NO: 1219 - DNA, 494 bp, Zea mays
  unsure (1)..(494): unsure at all n locations
  Clone ID: TF_LIB4744-070-R1-K1-D6
gcgcggcgatttcccganncgaagcgngcggagagaccgaggaagcgggagagaaggctcgnaccaagcagactgctcgcaagnccacgggagggaaggctcccaggaagcagcttgccaccaaggctgcccgtaagtctgcccccaccactggtggagtgaagaagcctcaccgctaccgccctggaactgttgccctccgttttttttcaaggagcagaagagcacngagcngccgancaggaagggggccnncagaggggcggagggaaanngacaggacnncaaaacggannngcgnnnccagagccaaagcggagcnnaaccnccaggaggcngcngaggcanaccnngnnggccngnnngaggacaccaaccngngcgccanccangcnaagcgngngaccancangccaaaggacanncagcnggcaaggagganccgcggcgagagggccnaancgccaccncaaacancgngacaaaaacangaa

SEQ ID NO: 1220 - DNA, 283 bp, Zea mays
  Clone ID: TF_LIB3227-024-P1-K1-B11
cgcaacgaccaggagctcgggaagctgctgaccggcgtgaccatcgcccgggtgttggtgttgcccaatatcaacccggtcctgctgcccaagaagacggcggagaaggcgtccagcggcgggagcaaggaggccaagtcgcccaagaaggccgtcaagtcccccaagaaggcatagggtttggaggcggatccaatgttgtcatgtgtacgctgtaagcgggcaatgtgattggctatgtattctgtttgctcaagatgctttatggcattcctaaaggaat

SEQ ID NO: 1221 - DNA, 312 bp, Zea mays
  Clone ID: TF_LIB3067-018-Q1-K1-F2
atcctcgcatttcttcccatcccccttcgcaacccaaaccccaactcgccccgcatcgatggcgcccaaggccgagaagaagcccgcggcgaagaagccggcggaggaggagcccgcggtcgttaaggcgcccgccgggaagaagccgaaggcggagaagcgggtccctcctggcaagtccgctgccaaggagggcggcgagggcaataagggcaagtaaaagggcttgaagagcgtttaaacctacaagacctacatattcaaggtgctgaaccacgtgcacccggacattgacatctccttcaaggccat

SEQ ID NO: 1222 - DNA, 1774 bp, Zea mays
  unsure (1)..(1774): unsure at all n locations
  Clone ID: TF_ZmC4285_2
gggtacctcgagccggccgggtctcctccagatgtcatccgcgacgctgtgacctacacggagcacgcccgtcgcaaaaccgtcaccgctatggacgtcgtgtacgccctcaaacgccagggccgcactctctatggcttcggcggctaggttaggtgtgggtaattgcctgtccaggtgtctcggatctgtggnactagtttggntgccttcctgtgntcgtnttgtagnanntgnngtatctggcttgcttttttttcatgatgaaaatactgtttgccgtgtagttctgtaatattttttttgtataatgttaagattgagancaagcatctgtgctaatcttaattattaattgttattgccctcgaggccggccggggggccgaactaggcagcgtggaaaggctacgaagagcggagaggcgctccattgaagcggacggcaacgagctctgcatgctgcgctgcgcccttctcaccgccgccagcccgccagaaggtctcctccccgtctctagagtggctctttctctctccgtcaaatggctctcgcgtgcgcctctcacgcgtgccgctttctcctcgccggccaggcgagatctttccacgcccagccctaccatgccaaggtcggcgtggtggagttcctgaacggcgtcgggaaaggggtggaggcgcacgccgcgaagctggaggaggctgtgggcggcgacctccagaggctccttgaggcccgcacgctgcggctcaagaagctcggcatcccctgcaagcatagaaaattgattttgagttttgcacacaagtaccgtcttggtctctggaagccccaagcagaacccaggaaagttgaataaagttggttcgttcttgaaagatagtctactgttggactgaggcatgtttgggacattgaatatttgctttgtaatttagaaacctcaaacctttgttctctgtctctagccatacttatttgcaaccattacgcaaaaaaaaaaaaagattctagaaagattccaacttattgtgtgtgggtttgctccttttgtaataacaaatcataagactgttggtttcatccctaattcatcaggattaaagtggattgagggaggttttgacttgtaggggattcaatccctctcaatccttgcggtttgataaaaccgaacagggtcaaaggtgcagccccctgtgataatctgtcacttgatgtttgtatttttacttaggtttcttaccaacaacattgcagttttgttaacgtagcctaagtaaattgattaggttcagagttggacccgacggtccacaattcaacaatgttgtaatgacatagaagtttttgtggttctacgctgccctttcaagctgcaaatgcgcattatctgtttgcactgtgatgattttagtaatttcatgtggttgccacaggtagcaaattgaacactctagttataggacccatgggaaggctggatccacaacccgccaggacaggccaggggcgctgaccggatggaggactgttcgaacatgttcgctcacacgagacaagactaaggccccgccgaagtctacgggacctctggctctgacaccaccaagagaggtccatgtgcggcgcggcaccatacagctggtccctgcgtagacatgcacgattagggccgccgtctgagataaaacttaccgaaatgactggctgtaacctctcctagtgggaatattctggggataaaccaggcactccagggacgaaatgtct

SEQ ID NO: 1223 - DNA, 490 bp, Zea mays
  Clone ID: TF_uC-zmroteosinte001d08a1
gggcaggcccagttctgcagtcttaacaacgggatcgggaacaatggccataaaacccaacggggcggggaacaatggtcatcagtcttaacagctcaaataggcccagatcatattatccatcactccccctaccaaataaattgggccacgtttaccaaccccccccagcctagtcctatgaaccttaaaaaggggggaacctggggccggccttggggcccccggagaccgggtgcttggcaagccccccgggggggcccaggccccccggggtctggaccccgcggggggggacggggggcttcttgttatagcgcgccagcttgggggactcggccgggggcttctcaaaaatgtccttgatgaaggggttcatggtggacatggccttggaccaaatgcccatgttggggggcccctggttaagcaccttgaaaatggaaaacttgaagggccccacggactttttaaacttttttttcccctt

SEQ ID NO: 1224 - DNA, 376 bp, Zea mays
  Clone ID: TF_LIB4764-031-R1-K1-C2
tgggtacctcgagccggcctggctagccacgcatcgtcgccctcaaattcgttccgtccaggcaaggaagaaatcgagcagccaaggagaggagaagatggctcgtacgaagcagaccgcccgcaagtccaccggaggcaaggccccgcgcaagcagctcgccaccaaggcggcgaggaagtcggcgccgacgaccggcggcgtgaagaagccccacaggtacaggcccgggacggtggtgctgcgcgagatccgcaagtaccagaagagcacggagctgctgatccggaagttgccctctcacagcctggtccgtgagatccctcatgacttctagacggatctgcggttccatagccacgtccgccctgcccct

SEQ ID NO: 1225 - DNA, 339 bp, Zea mays
  Clone ID: TF_ZmC1048210_1
aacgccagcgccgcctcttgcttgctgagctccagccgaggagaagggggtaagtaaggaggtgctcataccatggctcgtacaaagcagactgcccgcaaatccaccggtggtaaagcacccaggaagcaactggctacaaaagccgctcgcaagagtgcgccctctactggaggggtgaagaaacctcatcgttacaggcctggtactgtggcgctccgtgaaatcagacgctatcagaagtccactgtgcttctgattcgcaagctccccttccagcgtctggtgcgagaaattgctcaggactttaaaacagatctgcgcttccagagcgcagta

SEQ ID NO: 1226 - DNA, 343 bp, Zea mays
  unsure (1)..(343): unsure at all n locations
  Clone ID: TF_LIB3150-075-P1-N1-G7
tcttcctttctccctagcaatctctatcatcagataggagttctttgcaaagcggtagacttcctactctcccnatgtcccgcacgaagcatactgcgaggaagtccactggcgacaaggcgcctatgaagcatctgtccacgaaggcagttcgcaagtctgccccggctaccgtcggagtgaataagccccaccgtttccgccccgtcaccgtcgcgctccgttagatccgcaagttccatgaatagcacggagctgcttatccacatgcttccgttccagcgcctggtgcttgagatctgcccatgattttcaagaccgaccttctcttccagagctcctt

SEQ ID NO: 1227 - DNA, 361 bp, Zea mays
  Clone ID: TF_LIB4735-001-R1-M1-F3
tcttagcagtggtaacaacgcagagtactttttttcttttttttttttttttttttttgccctttttttttgtttttttctttcttctaggagctcgggaagtctgttggcaggcgtcaccatcgcgcacggcggcgtcctccccaacatccactccgtgctcctgcccaagaaggcggcggagaaggcggccagcgccggctgcccggagcccaagtcccccaagaagggcgcctcgccccccacgaaggcttagaaaggcggggcttccttcgcactgtgtgctgccgcatgctcgggtctagctccgcgggtgggatgcgccctgctctaggttggtgcttgcgccttattgcctgcc

SEQ ID NO: 1228 - DNA, 314 bp, Zea mays
  Clone ID: TF_LIB3245-236-P1-N1-H10
aaatccaccaacggcataccagcgtgtccgggattccgtcgagttgactgggccagagaataatctttgaccagaagaggcgaatatgagttccggcggcgggaggggcaaacccaaagggtgcaaagctgtgtctcgggcgaccaaaggccggctgtagtttcccgtctggcgcatatggcgctacctcaaaggcgggaagtacgcccagcgcgtctgcggtggtgcgcccgtctacctcttcgccgtcctagagtatatctcggcagaggtgttggaactggcgggcaacacggcgcgcgacaacaagaaga

SEQ ID NO: 1229 - DNA, 470 bp, Zea mays
  Clone ID: TF_LIB3606-056-Q1-N6-B3
aaaaaaacccgggttttccttttcccttgggaaggacaaaagggggcgggggggaagcaaatcccccgccaatcacattggccggttacaacccacccatggcaacatggggtccccccccaaaccctttgccttttgggggggctggggggcctttttgggggaatgggcccccttgttccccccggggggccccttttcccccgtttttttgggcaaaaggacccggtttattttgggcaacccccccccgggggggaggggcaccccgggaaaaaatttccccagctcctttttgttggggatcccccacaacacggggggggggacaaagcccgttttttttttttccttgggagggttgccggggagctccaaaaccccaggggggaggtcctccaaaacggccccaaggtaaacgggggccccctttcccacccccttcgcgtaagggcccttcttgggggagc

SEQ ID NO: 1230 - DNA, 624 bp, Zea mays
  Clone ID: TF_LIB4975-032-A1-K1-C10
gttgatcaattattctgtgcatctgctcctcatcccaccggatgagtaagcaaggcgcagtagcacctatcgggctgccgccgcaaagaaggaacgcgaggaaatcagcctaactgattacctgctatagttgccactcctctatgcgcaaatgaccccgaccgcgactcctccggcgccgccgggcacctcgtcgtcgtactactacacctcgcgtgtgagggtgtcgaacttggccggaaagcagcaaggcaatacaagaaaacacgaatagagccacgccacatccagattgttgtgcggcaacgaggactagctgactgatatggtagcggctgccaccatctggagcagagcgggtatgcataaaatacatcagcagctgttccacaagaaaagatgcctcctccaaagacaatgccgactacaaccacaaatgtaactgcttgctgcagaagtgatacgatcacctgctatgtacttcgacgaataggatgcatcggtgtctgtccaatgcccaggagaatgctatgttgggatatacagtgacaatataagctgtgatgatgcatgtgatgagaacgtcgaatgactgatctcacgatggcatgctcggtgagaaag

SEQ ID NO: 1231 - DNA, 445 bp, Zea mays
  Clone ID: TF_LIB3279-216-Q6-N6-G10
ggggaaaccagcgcccaccctaagtgacatcaattataaattttaaaacatagccagattggaacacttcctaccacttgtccactacggatgaattttacgaattggaacacccacaaatgtgaacttccacaaaggcaagcctggaacaaatgcaaaccatactacggggccactcccagatgccgtaaacagagaatgtaggccctttaaccaggggtcctcctagccaggtgaatgcccttgggcataatggacacccgcttggcctggatggcgcacagattattgccctgcaataaacccaccaggtacacctccggaatctcctgcagcgcaagcaccgaatggttcttgaaactaaaataagcttgaaatactgagcaattttcctgacaaggctttggaacggaagctctcttatgagcaggagaaggctcttctg

SEQ ID NO: 1232 - DNA, 560 bp, Zea mays
  Clone ID: TF_LIB4742-078-R1-K1-H5
ttggggccctcgaggccgggcggggtgttcctagaaaggagagacggttggcatctcccctgagagggacgggaacagcttcgggctttcctctagcaacattgcggttaagggtctctgcttcggcagatctaacccaaattttataaaaaaaaaaaaaaaaaaaaaaaaaaaaaaaaaaaaaaaaaaaaaaaaaaaaaaaaagattacaaacccggcctctggccggcctaccaccacaggtcaccgggggttgggtttctcccctcttccggacccgcttctccgtccggattccctctggtctttccctaacgaagggagccatggcggggaaagggaaagcgatcggctcaggggcccccaaaaaggccacggccaggagctccaagggtggcctccagttccccgggggaaggatccccaggttcctcaagggcggcaagcatgcccagagagtcgggcccggcgcccctgtctacctcgctggcgggctcgagaatcttgctgctgagggtcttgagctggccggcaatgcggcacgtgacaacaaaaagacc

SEQ ID NO: 1233 - DNA, 280 bp, Zea mays
  Clone ID: TF_LIB4730-056-R1-K1-C4
agaacatgctaggtgatgacgaagccggcgatccagaggtgggataagattagggcgggaaagaggctgatggggcataataacaaggccgcgcgcagggccggaacgagctagagcaagcaacgccattaagaaggcacgtaccagacgcgagacctacaagatctagagctgcaacgtgctgaggtaggtgtaccccgacatggcaaggtcgtcaagggccatgtccataatgaaatatttcataagcgacatctcggagaagctaggctggcacgcc

SEQ ID NO: 1234 - DNA, 566 bp, Zea mays
  Clone ID: TF_LIB4742-096-Q1-K1-A6
ctcgaggccggccgggtcgcatttcgcttcgttccactcctgagcactttctcctcgtcccagacaagccaatcgaagccgagatacgaccatggactccaccggcaccggagcagggggtaaggggaagaagggagcggccgggcgcaaggtcggcgggccaaggaagactcgcattattccgcgccacgtgcttctggcgatccggaacgacgaggagcttgggaagctgttgggcggcgtgaccatcgctcacggcggtgtgctccccaatatcaaccctgttctgctgcccaagaagacggcggagaaggcgtccagtggcgggagcaaggaggcaaagtcgcccaagaaggccgccaagtcccctaagaaggcatagactgactgtccggagtgatctgatgtttagcagtaccttgttaccagtatgcggtgatgcgtaggctgcagatgggacgaatgtgcttgtatgtgtatgtgtcctgctgcatgttgtcctttgctatttagaatggaagaagaaatgccttgtttctctgaaaaaaaaaaaaaaaaaagcgggc

SEQ ID NO: 1235 - DNA, 334 bp, Zea mays
  Clone ID: TF_LIB3088-004-Q1-K1-E10.6C0
ggcccttggaggagatgccgatgtcggggtgacctgcttaggaccttgaagatgtagatcttgtaggtctccacgctcttcttcgccttcttcctacccttcttgtcgccgccctccttgccggcggacttgcccgcaggtagccgcttctccgccttgggcttcttccccgcgggggccttgtccgccggagccgacttctgcgagggctcctgctgcggcaacttcttcggcgacggcttcttctccgacttgggcgccatgaataccgctcacattttctggatgataggagtaggagcgatggaaaacgatgatgcgctgtgaagatgtt

SEQ ID NO: 1236 - DNA, 306 bp, Zea mays
  Clone ID: TF_LIB3159-018-Q1-K1-C12
acgcgccgcagtatcatccatggacgtgagcggagcaagcggtttagcgtataatggcgcggcggggcgcttggcctgctggccgaccaataaatctgtgtcgcggtcctccaaggccgggctgtatttccccgtcagccgcgtctggcggtacctcaaaaagggccggttcgcgcagcgtgtttgcacgggtgcccccgtctacctcgccgccgtcctggagtacctcgcggccgaagtgctcgatctcgtctgctacgcggctaggtgacaacatgaagacgcgcatcattccgcgccacgtgc

SEQ ID NO: 1237 - DNA, 638 bp, Zea mays
  Clone ID: TF_LIB4740-040-R1-K1-C7
ctcttgggtgcatcctctacgcgagcgggccgcttatcccatccagccgagcacggtcgtcgtcggaaccggagaagggagggaggaagggagcgcgagatggacaaggccaataagcatagcgccggagcggaggagaaggcgaccaaaagcaggagccacggatgcacggagctgttcgtcgcggaggactacgacggtcctgatcgcgcttcgccgggttcctcgcctacctgggcgggtagggcatcctggcctacgacgacgggtacaactacaccgagacgtacatgatgtatatcttttatgtgttgcacgatgtgcacggagccattggctgctggagcaccggcatgctcatcatgagcttcttgattaacgatatatttgagaatgttgccgctgacgccatgaagttggcgcgctacaacacgaagaccacacataaccttgcgcgagattcagacctcggctgcgcctgggactcaccggtgagtttgccaagcacgccgtatacgagggcactaaggccgttactaagtttacctcgttttatgatccttgtgatggtcatgtgcgcgctggcggtaggcgtggctcagctgatgtgatactgatagcgatggatgatgatgatc

SEQ ID NO: 1238 - DNA, 689 bp, Zea mays
  Clone ID: TF_ZmC697_49
attagaagttcgaaacacggaaatgcggtactcatatattactgtttgacagtggcttagagtggtcgaacccaacaaccgctaacaataagcactagcacgtcatccagaatactctcgatttcttgaccgcgacccaagacttttgccacggccaccagcggcggtagcgcctctcagccgccgaatccgtagagggtgcgaccctggcgcttgagggcgtagacgacgtccatggcggtgacggtcttgcggcgggcgtgctccgtgtaggtgacggcgtcgcggatgacgttctcgaggaagatcttgagcacgccgcgggtctcctcgtagatgagccccgagatgcgcttcacgccgccccttctcgccagccgtaagaccgtcaccgccatggacgtcgtctacgcgctcaagcggcagggccgcaccctctacggatttggcggctgaggggtcaggggtgtccgccagctgctgctggtcgtggcagaagtcttgggtcgcggtcacgaaatggagtgattcgagagtattcttgcccatgggcttagtttcgtaggcttatcactctagactctagtgccttggtccagtagtagcatacgacttgtactgcatttctttgttctgaacctctaaatatgatgaaatgtggattcacttgatctcacagacaaccagtt

SEQ ID NO: 1239 - DNA, 508 bp, Zea mays
  Clone ID: TF_LIB4742-047-R1-K1-H7
cattgggtacctcgaggccggccggggcgcgcatagacatcgacgcgagcgaatccctcttatcgcattcgtagccttctgttgcatcacaccagcgtcgaaatcccaccatccgtcatcgatggcgcccaaggcggagaagaagactgctgcgaacaagccagcgcaggacgagtccgctgccgataagggcccatgggtgaagaagacctacggccaaaagcgtctcccggtggcccagtcaatgcggcaaagaaggcgtcgacgagaatggtgagacaaaagctgacatccccgtggatacctacaagatctacctcttcgaggggctgaagcaggatcaccccgacatctgcctctcttccaaaggcatgtccatcctgaactccttcctcgacgacgtcttccacaagttcgcctgggatggtgccaagcttgcgcgctatcgacaagaatcccaccatcccctctctacagattcatacctctgtccgccttgtacttccct

SEQ ID NO: 1240 - DNA, 393 bp, Zea mays
  Clone ID: TF_LIB4975-026-R1-K1-H6
aatcacagcgaccatctcctcgcatttcttcccatccgatccccccttcgcaaccaaaaccccaactcgccccgcatcgatggcgcccaaggccgagaagaaacccgcggcgaagaagccggcggaggaggagcccgcggccgagaaggcgcccgccgggaagaagccgaaggcggagaagcgggtccccgctggcaagtccgctgccaaggaaggcggcgagggcaagaggggcaagaagaagggcaagaagagcgtggagacctacgagatcgacatcttcaaggtgctgtatcaggtgcacccggtctttggcatctcctctttttttttttttctcccgccctcccccattactgttatgtgtttagtgcttctttgctgattgcgttt

SEQ ID NO: 1241 - DNA, 493 bp, Zea mays
  unsure (1)..(493): unsure at all n locations
  Clone ID: TF_LIB4669-008-R1-K1-F3
tgcatctcagcagcactagcagtgacaaactctaacttggcttctagctgggttacaccccaaaactaaaactagaggcggcgacggcaacaagcggggcgtaaagcattggcggcaaggcgaccactctgcagctggccacgaaggcggcgcgcaagtctgcccnggcgaccggcgtgatgaagaaagccccaccgtttccgtccgggggggggggcgctccgggagatccgcaagtatcagaagagcacggagctgctgatccgcaagctgccgttccagcgcctggttcgtgagatcgcccaggacttcaagaccgaccttcgcttccagagcttccgccgtcgctaggctgaaggaggcgtccgaggcctacctcgtcgggctcttcgaggacaccaacctctgcgccattcacgccaagcgcgtcaccattatgcccaaggagcagccagcttgcccgagcgccatccgtggggaagaggcctaggcc

SEQ ID NO: 1242 - DNA, 206 bp, Zea mays
  Clone ID: TF_jC-zmXLIB3526060bc11b1
gcgcgccgtattagcagccctggacctgagcggagcaggcggtaaggcgatataaaggcgccgcggggccgcaaggcccgcgggcccacgaagaactcggtgtcgcggtcctccatggcccgggcgcacctccccgtcagccgcctcgggcggtacctcaaaaagggccggtacgcgcagcgtgtaagcacgggtgcccccgtcta

SEQ ID NO: 1243 - DNA, 473 bp, Zea mays
  Clone ID: TF_jC-zmXLIB3527P074Bh05d1
gattaaaacaacgaaacatacacagactgacaggcaggtacatcaaactacattagctttggtctagctagctgctacccggcctgattacactatcaactacacatacgtacaggagctactagctagtctagtttttttgcatgaagtagcatcagctgcagtacgcactacttccaaggtcgtacggccggtacagaaaacatgtagctacctagctaggcggcataggacatgtacttggagatggctttggtgccctcagagatggcgtgcctgaccagctccctggggagcacgagcctgacggcgctctgcacctcgcggcaggtgagcgttgccttgcccgtggccttggacaggcgcgccgcctcgtccgcgaggcgctcgaacatgtcggccatcatcatgtccagcacctggatggcgtgccccgacacgcccaggcccgggtgcacctgccttagcacgcg

SEQ ID NO: 1244 - DNA, 266 bp, Zea mays
  unsure (1)..(266): unsure at all n locations
  Clone ID: TF_LIB5025-070-A1-XP1-F2
gccggccggatcggaccgttcacgcgctcagttcttggcacagagccaaatttttctccactcaatcactgcagccatggacgccagcggagccggtagcaaggcgaagaagggggcggctgggcgcaaggctggcggccccaggaagaagtcggtgtcgcggtccgtcaaggccgggctgcagntccccgccggccggatcgggcgctacctcnngaaggngcgggacgngcagcgcgtggctacccttccccccccgtttatct

SEQ ID NO: 1245 - DNA, 616 bp, Zea mays
  Clone ID: TF_LIB4764-066-R1-K1-A7
attgggtacctcgaggccggccgggggcagtgtctcaagtttcctcggagttgatgcgatggttgtaaagggagggaaaggattgttcgccgcgaatactacggagtgcaagtccgccgaaaaagacgaggggaagaaggcgcccaatttcacactcttcccgagacggcctccaattccctgtaggacgaatccaccgtcaactgaagaaaaggactcaagaaaatggacctgatgttgccaccgtacccgtatactccgctgccatcctggaatacttgactgccgaagtactggaacatggatggcaatgctagcaaggatctgaaggtgaatcgtatcaccccatcgccatttgcagttaggcattcctgcagacaacgacatgaacaccctcatcaagagcaccatcgaatgaggaggtgccatcccgaacattcacaagctcctgatcgacaagacctccaaggagtgaagactaggagatgcgcatctataggtcaaactagacttctgtgcactcctcggcgagaccttggcatcctggagggattagatgagctggcaggaagtagctcctctgtgaaacgcttgcctgatactgcttcatcaggta

SEQ ID NO: 1246 - DNA, 332 bp, Zea mays
  Clone ID: TF_LIB3070-010-Q1-N1-H2
ctctactccacactctcgatctctaagggcagcaacatgagtctagctgacatggactcatagcgcagtcttgattccggctataagtgcgaaccaaaggcgcgtgacgatcgcaatgcctgcgggcctaggaagaagtcattgacgaggtccgtcgaggccgagctgcagatatctgaatggcgaatatgtcggtacctgttaaacgtatggtacacgcagcgcgtatgcaatggcgcttccgtctacctggccgacgtcctatagtacctggccgacgaggtgctggtgctgatctgtgactctgacatagacgacatgatgacccgcat

SEQ ID NO: 1247 - DNA, 937 bp, Zea mays
  Clone ID: TF_ZmC25865_2
gccggccgttccgagaacgatctcagtctccctagcaatctctagcagcagatcctcgtgcgaagcaaagcgctagccccttcgtactgtcccgatggcccgcacgaagcagacggcgaggaagtccactggcggcaaggcgccaaggaagcagctggccacgaaggcggcgcgcaagtctgccccggcgaccggcggagtgaagaagccccaccgtttccgccccggcaccatctccacgcagccgtccgatggccaagcggctcgccggcgccgacaaagaggtgctcgtcgaggtggtgaggttcacgcataagagcggactgaggggctgtgacggcggctggaaggatttcctggcccagaacgacaggaagtttggcgcgtcggtgagcgacccgaggaagcgctccagggacgtgctgttcgccttcctgcagaccttccccgaggatttccagaagaaacacttgatgccactagtctgacgagagccaccggaagattttaatgcttcaggtgcataggctctgcattaatattctcatgacagcatacgcagccgcaattttggtaggagcgtcatctacgaacctgtatcagaagattgtcattgtgtctggtcatggcttgcctgcctccacactctggcaaagagcacaacaatttgacattgagaataaggattgtatcacacaattttatatgttcatttggaagttattctacgccgagtattttcttataccatttgtgtagtaaagaatcatgcgaagaacaacacccctggtatagacatgtgaaggtttattgctaatgttactctaccgaatggtctgaatgtctatgcgtcatttgtatgtaatatgactatttgttgtatcagggtaacaactggagcaaatgtaccgtatatattaagcattaatttaacttt

SEQ ID NO: 1248 - DNA, 342 bp, Zea mays
  Clone ID: TF_LIB3150-029-Q1-N1-H11
tacaccagaaaaattcccagttctttggtccgcgtcagagaggcggcggcgatgtctgggcgcggcaagggcggcaagggtctgggcaagggcggcgcgaagcgccaccggaaggtgctccgcgacaacatccaaggcattaccaagccggcgatccggaggctggctaagaagggtggcgtgaaacgcatctcggggctcatctaccaagagacccgcggcgtgctcaaaaacttttttgagaaccttaatcgggacccccttacctaaacgaacaacccccccggaagaccgtgaccgccatggacgttgtctacacgctcaagcgccaaggacgcaccc

SEQ ID NO: 1249 - DNA, 556 bp, Zea mays
  Clone ID: TF_LIB3606-014-Q6-N6-G11
gtgtggtgttttttttttttttttttttttttttttttttttttttttttttttttttttttttttttttttttttttttttttttttttttaccttcataacagccaaattggtttgccaagaacatcggtccccgattggggggcaagggggggggggggccctcgcctagttcaaacctttcagaaacagggggacagggcggcaatcagggcctttcgcccctgatgcggggcgcgagctggatgtccttgggcatgagggggacccttttgggggggggggggcaaaggggggggtcctaaaagagacccaccaaataccccttggggggctccttcaacggggggacagggggggactggaacccaagggggggtttgaaggcttgggcgaactcacccaccaaccggtgggaggggagcttccggaggagcagctcccggctcttttggggcttggggatctcccggaaaggaaccgggcccggggggaacctttgcgggtttttcacccccccggggggcggagcccacttgcgcccccccttggggg

SEQ ID NO: 1250 - DNA, 391 bp, Zea mays
  Clone ID: TF_LIB3088-050-Q1-K1-G10
actacgcgttcgcccacgcgtgctggcacgcgtccgactaatctactctacaccagatatggttctcagttctttggtgcgcagtcagagaggcagcggcgatgtctgggcgcgtcaaggtcggcatgggtctgatccagggcggcgcgaagcgccaactgaaggtgctacgcgacaacatccatagcatcaccaagccgatgatccggaggctggttaggatgggtggcgtgaagctcatctaggagcttatatactaggagacccgaagcgtgctcaagatctttctcgagaacgtcatccgcgacaccgtcacctacaccgagcacgctcgccgcatgaccgataccgtcatgtacgtcgtctacgcgctcaagcgctagggacgcac

SEQ ID NO: 1251 - DNA, 622 bp, Zea mays
  Clone ID: TF_LIB4975-003-R1-K1-H11
actctcatttttcccgcgttccacctagaagaggccgaagaatcccaccctcaaggctgacgagcatgagttgaccgcacgtgcgaccgtgggaaggggaagccagcgaccaagtctgagcgctgctcttccaaggctgggctccagctccccgtctgggcgcatctacaagaaacctcaaggcctcctagtacacggagcgcgaaggtgacgtctctgccgagtacctctcctgcgacctcgatcagctccccgacgaggggctgtatatgtccgcgaacgtctgctccttacaacgacaacaaccggatcgtgccccaccacattcatttgcggttgctgaacgacgaggaggtgagcaaggttctgggcactgagacgatcgcgatcggcgtcgagaagtctaacatccaccagaatttgctgccgatcaaggctgacctccaggagcacatcgagtccgactcccaggagctctgaatgcacattctgaacgaggacagacgcaaggcgatgtgtggcatgtcctggatcgacgctgttgaccatgttcttgagactgatcgttgtctgcgacgtgaacaaatgcaatatgctgctccatgaacgaacgcatgaacat

SEQ ID NO: 1252 - DNA, 474 bp, Zea mays
  Clone ID: TF_LIB4740-003-R1-K1-H7
acagacatggaattcttgcggtctaaaccaaccttcgcgccgcggcggaacctctgaccctcgcgagtgcaggcctacgcgaagcggtcgacagaggacctgcagggcggaaacgaagacacgctgcaccaagccatctcaggcggagagagcgacctacaatggggctaaggccgcaagggctacagaatcctcggtcgacaagtgcttctcaccacccacgtctacggactgaccggagtgcacccaagcctaaacgacacgctataagactgcgcagacctacaagcatctacctcttcaaggtgctgtagctgctgcacacccacttggatatttatcacaacgacctccccatcatgaactccttcatgaacgacatttacgataagctcgagctcgagtacgccaagctgtcgcgctaccacacgaagcacaccatcacctgacgctagatccactacctcggtgcgc

SEQ ID NO: 1253 - DNA, 383 bp, Zea mays
  Clone ID: TF_LIB4729-116-A1-K1-H12
ccaggcggccgggaccacaacaacacccgcacacggcccgactctcctcctccgcccgcgtacctctcggcttcggcgctgcccgggcgcggcaagggcggcaaggggcatgggacaaggcgcgcgcgccacagccgccacacgcaaggcgcctgcgccgacaacatccagggaataacgaagccggcgatcagtaagctggacagaaggggtggagtcaagcgcatttctgggatcatctaagaggagaccacccgcgcgctcaacatcttcctcgagaacgccatccgcgacgccgccacctacaccgagcacgcccgccgcaagaccgtccccgccacggatgccgtctacgcgctccagtgccagagacgcacgctcta

SEQ ID NO: 1254 - DNA, 264 bp, Zea mays
  Clone ID: TF_LIB3150-002-Q1-N1-C10
gatggatagaaggaacatatcaatcccaactcatcgacagcactcccccaaaaaccgcagagctgaaacacaaccatgcggagcgcgtcggcgccggggcccgcgcgtacctttacgccgttctagagcatatcgccgccgaggtgctggagctggccgggaacgctgatcgggacaacaggaagaaccgtatcgtgccgtgccacatacagctggcggtgcggaacgacgaggagctgagcaggctgttgtgcactgtgacga

SEQ ID NO: 1255 - DNA, 409 bp, Zea mays
  Clone ID: TF_jC-zmXLIB3526089bg07a1
atccaaaaaaccttggaaaaaaggtttttatccccctgaaaaaattacctggttcaggggattgaaccccgagaaatacgaaacaaaattttggggccaaaaattggtggggtggaacaaccccaaattaaaaaagggcctcctcaagggttgaaacaaattttttaagcacaatttggaattttttaaaaatttccacacttcattgttccttgagcaaccttttagcacgggcctaaaaggccgaggaaacgaaacaaagccgttttttcgggcgggggggatttaaaaggaaataaacttggtaacggccttggggcccttgaaaacggggggtttggcaaacttcccagaaaggacaaggtcctccaaagtttggatctcccgggaggttatggggggctttttg

SEQ ID NO: 1256 - DNA, 302 bp, Zea mays
  Clone ID: TF_LIB3205-052-P1-N1-G12
cttctttatgtttttttttttactgataacataggtcagtgccaatttaaaagcgtaatgttaatatgttatcatgcattctacatccaactacttgatgattcgtcaggaacccatactacagaacccagcacatcttctacatcttcgtgatcggtcactgatgaccagaaaatactaagcttaagtcactttcccacatgtgctgctggcaagctggatgttcttgggcatgatggagacgcgcttgacgtgtatggcgcagaggttggtgtccttgaatagtccgtcaaggtatgcct

SEQ ID NO: 1257 - DNA, 381 bp, Zea mays
  Clone ID: TF_LIB3116-028-P1-K1-C8
cccggcccggaatccccgggcggaccaacccttccgcttgggccggggacaacccaattcgaacctttcggaaagaccaaaaaaccggaggagatggttggtaccaagcagactgttggaaagtccacggaagggaaggttcccaggaagcagtttgccaccaaggttgcccgtaggtttgccccaaccactggtggagggaaaaagcttaaccgttaccgccctgaaactgttgccttccgggggatccgaaggtttaaaaaaagcactgagctgttgatcaggaagttgcccttccaaaggctcgtaagggaaattgcacaggacttaaaaactgatttgcgtttccaaagccatgcggggcttgccctccaggaggct

SEQ ID NO: 1258 - DNA, 456 bp, Zea mays
  Clone ID: TF_LIB4730-068-R1-K1-B4
cttacccaaagaatcgccctatttatgttgcctgctaaggaagcgagaaagactggtcaccgtcatacgactatgccatgtgcgcgctacgggcgggaaaggactggacaaggtctggagcaaagcgccaacgcagggggctacgcgacaacatccagagcatcaccaatccctcgatccgtactctgtctcgaagattagaagtgaagcgcatttgggcacttatctactaagagacccgaagcgttctcaagatcttcctctataacgtgattcgatacgccgacacctacaccgagcacgcacgccgcatgactgttaccgacatggacgttgcttacgcgctcaagcgctatggccgaaccctctacagcttctgcagctaggctggatgccttttatgcttgctgaagaggatgcctggttgttggtagggctacttcgattacctccttg

SEQ ID NO: 1259 - DNA, 440 bp, Zea mays
  Clone ID: TF_LIB3608-053-Q6-N6-A2
gacagagaaaaggcattccattttccattcagggaaccaacacgttccgaaatagccaaatgggcccgggataaaaaggacccaccaccatttattttagacattacaacgaccaacaggagcagcgcaacagtttaagccctttggcccctgatgcggggggcgagctggatgtccttgggcatgagggggacccttttggcgtggatggcccaaaggttggtgttcttaaaaagccccaccaggaacgccttcgggggcttttgcagccccgccacggccgaggactggaacccgaggtcccttttgaagtcctgcgcgatttcctggacgaagcccttgtaaggggagcttgagaaagagcaattccgtgctttttggggacttgcggatctcggggagagcgacagtcccggggcaggaagcggggcgatttttta

SEQ ID NO: 1260 - DNA, 516 bp, Zea mays
  Clone ID: TF_ZmC653_38
ctcaccggccaccgcgaatccagagccccacgccccgtccgaaccccagagcagagcaaagcctcctcgacctccctgtccccagccttccccgatggcccgcacgaagcagacggcgcgcaagtcgacgggcggcgtgaagaagccgcaccgcttccgcccgggcaccgtcgccgcgctgcaggaggccgccgaggcctacctggtgggcctcttcgaggacaccaacctctgtgccatccacgccaagcgcgtcaccatcatgcccaaggacatccagctcgcgcgccgcatccgcggcgagcgcgcctaggcggttcggttgcggcgcctgctcgctactgctggaggtgcttagtttagcccgtcatggttgtgttataggtgtgcgttgttttcaagagtaggcttcttgctatgtgctgatgttaacggaggattatgattagcagttctgaaaaaatgcaatggatgtgatctgctctatctacgaaaaaaaaaaaaaaaaaagcggcc

SEQ ID NO: 1261 - DNA, 1002 bp, Zea mays
  Clone ID: TF_ZmC697_108
cccggtgtcgacccaacgcgtcctttttccgtccgcgtagctctcggtttcggcgatgtcggggcgcggcaagggcggcaaggggctgggcaagggcggcgccaagcgccaccgcaaggtgctgcgcgacaacatccagggcatcacgaagccggcgatccgtaggctggccaggaggggcggcgtcaagcgcatttctgggctcatctacgaggagacccgcggcgtgctcaagatcttcctcgagttttttttttttttttttacttgatgaaacactactaacaagatgcatcacaaatgtctggcaccaacaagaaacccgcaagccgtaaaacagaacaaaattttaaccagacctatcacgaaaacatgtaacacaacaacggcatatcttagcaaatttatctctgagagccccaggactaaacacgaaatattcatggtaatacgaaaacagagatggagtgtgtccgatacaacaaatcgacagctaaagcaggactattcgggaggccgagcatctagaagcggagcttggtaaagaaccacctgttcttgccggtcttgaacctctcctcaaggcgcgctttggccgtcttgcaggcggcgaccttcttgtcgtgggtagagagtgcgtcgggcccaccggtggcgacatccttgaaatcgacgtcgagggtgtagcgggtgggcatgaggtgagtgaagttgacgagcttgatgaagcacttgacgcgcgacttcttcgcagtcttcttggcggagtccttgcggatcaccttctttgggtacttggcgaggcctgcgacgaggcagtggccataggggcggtcgcgggtgccctcctcgaacacgcgcacgataactgccttcctgccggcgaagcggccctggaggaggataacggccttgccgggcttgaggaacttcaccatcttcggatgctgctgccgctgctgcgccgccgccgccgccgggagtgtagggtttggctcgtgc

SEQ ID NO: 1262 - DNA, 270 bp, Zea mays
  Clone ID: TF_LIB3078-019-Q1-K1-H11
cccactcgttcggacacacgcgtgctatcgctcggttactcaaggccgccaagtactccgagctgatgatctcctgcgtccctggctacatcgccgctttcctcgagtacctcatcgctgaggtcctggagcttgctggaaactcaactagggataacaacaatacccgcatcgtgccgcgtcacatacagctctccgtgcgcaacgactacgagctgaccaagctgctttgaggtgccaccatcactagacgctgcattatgcccaaca

SEQ ID NO: 1263 - DNA, 447 bp, Zea mays
  Clone ID: TF_LIB3088-044-Q1-K1-D2
cgcagtccttcgaggacgcgttggagtacgccttcggccagatctgccgctaccctgaagaggggcctggtactcacaatgcgtgatcactgggacatgtgtctacctctgatccatcctgaagtaccttgctgcatacgttatggagttggcagggaacgcggcgagagacaacatgaagacgctcatcattccgcgccacgtgcttgtgacgatccgcatcgactatgagctcggctagctgctggcaagtgtcaccatctttcacaggggcgtactgggcaacatccagtgcgtgctaatgtccaagaatgcggcggaaaaagcggtcagcgccgtcagcaaggagcccaaatgccccaagaagggcgccatttccaacaagaaggcttacaaagtagggactgtatttgcactgtgtgctgtagcatgctcgcgtctagatct

SEQ ID NO: 1264 - DNA, 387 bp, Zea mays
  Clone ID: TF_LIB3279-054-P1-K1-D6
cgagcacttgcgggcactcatgagtggatgcccgagccgcccttttctgatctctttcgtgaccgattggatcgattcctgataggcacccaaggccgagaagaatcccgcgtgagaagaagccttctgaggagaaggccgagaagaagccaagggcggagaagcgcgtgccgagcaaggagggctgcgtgactaagggaacgaagactgctatgaagagcgtctagtcttacaagatctacattttcaaggagctcaagcaagtgcacccggtcattggcatctaagccaaggccatgttcattatgaactccttgatcaacgacatcttcgagaagctcgccttcgaggccgcgaagctcgcccgctacaacaaggagcccacca

SEQ ID NO: 1265 - DNA, 482 bp, Zea mays
  Clone ID: TF_LIB4741-128-A1-K1-C2
aagaaagcctccattcctgagtctccggacaaccagcatcgatgtccacgccatcctcctcagactgcgacaacctggagtctcgacccgatggcgcccaaggccgagaagaagccacgggagaagaagccggcggccgaggtacaaggcggaaaagacgaccgcaggctaaatgcccaagctcgagaaccgcctgtccgtctcgaactcctccgtgaaggagggcgtggcagaatacggggaagaagaacgccccgaagagcgtggagacctaccaaatctacatcttcaaggtcctaaagcaggtgcaccccgacatcggcatctcctccaagggcatgtccatcgtgaactccttcatcaacgacatccttcgataatctcgtcgtcgaggccgataagctcgcccggtacaacaagaagcctaccatcacctcccgcgagatccagacctccgtgcgcctcgtactcccagtagagct

SEQ ID NO: 1266 - DNA, 433 bp, Zea mays
  Clone ID: TF_LIB5027-045-B1-XP1-B5
tcggagcacaaatcctcttcctcgagttctcctcaaccaaattcaaagtcacagcggcgaaactctcggcgatgtctggccgcggcaagggcgggaagggtctgggcaagggcggcgccaagcgccaccgcaaggtgctgcgtgacaacatccgggctcatctacgaggagacccgcggcgtgctcaagatcttcctcgagaacgtcatccgcgacgccgtcacctacaccgagcacgcccgccgcaagactgtgaccgccatggacgttgtctacgctctcaagcgccagggccgcaccctctacggtttcggcggttaggtcgcccctctcccggtggcgaattacgtggtggcggtggcggtcgtgttgtgttcttggtctagttagtctgtgttgtctttatcggtgctgctttctgcgccgcctgcac

SEQ ID NO: 1267 - DNA, 373 bp, Zea mays
  Clone ID: TF_LIB3150-050-Q1-N1-E6
gcgtgacgagcgtgaggaggcgggtgtcgtactgaatcgaaaaggcgtaaactcagtctctcgagtttcctcggaccggaagccatggctgccaatgaagcgaaaggcttgctcgccgcgaaaactacagcagccaaatccgaccacaaggacaaggtgaataaggtcccaatctcacgctcctacggcgcccgactacagttacctgttcggcgtatccaccgtcagctgaaacaacagactcatgcaaatgctcgcgttcgagctacctgaaccgtctactgagctcccattctctaatacttgactgccgacgttctggaacttgctgcgaacgctagtaaggatctgaaagtgaagcgtatcactcctc

SEQ ID NO: 1268 - DNA, 266 bp, Zea mays
  Clone ID: TF_LIB3158-017-Q1-K1-G9
tatcaatcgttttccatggctcgtaccaagcaaaccgctcgcaaatccaccggtggaaaggctcctaggaagcaactcgccaccaaggctgcaaggaaatctgcaccgacaaccggtggagtcaagaagcctcatcgctatcgccctggaactgttgctcttcgtgagatccgcaaataccaaaagagcacagagcttctgatccgcaagctccccttccagcgtcttgttcgtgaaattgcgcaagacttcaagaccgatttgag

SEQ ID NO: 1269 - DNA, 419 bp, Zea mays
  unsure (1)..(419): unsure at all n locations
  Clone ID: TF_LIB3600-027-Q6-K6-A5
tttttcaaaaaaaaaaatgaggggatcaaatagnaggcacgctacgttggtagaaagtgtagcatgccaacattcctacttcaccgtccaatccaatcccatccacccaccagttcgaagcggaggcgaccggcaacctgcggcggtgatgtcaggcaggggcaagggcggtaagggggggggggggggcggcgcgaagcgtcaccggaaggtgctgcgcgacaacatacaggggatcacgaagccggggatccggaggctggcgaggaggggtggagtgaagcgcatctccgggctgatctacgaggagacccgtggagtgcttaagatctttctgaagaatgggatgcgagactctgtgacctatatggaggacgatcgttgtaaaaacgtgagtgatatggatgaagtgtgggggt

SEQ ID NO: 1270 - DNA, 559 bp, Zea mays
  unsure (1)..(559): unsure at all n locations
  Clone ID: TF_LIB4740-069-R1-K1-C9
gggtaccctcgggctcgccggggcctgcgtcctctcacccccggtgccttcgagctttgactctacgcccatcttccaaagcctttgcttctttcttatctggggatctcctctgatcatggttcgatggagggaccagcgatacggctcaggcgcacgccagaaggcacatgagcaggagctccaaggccgggctgcaggtcccagtgggaaggatcgccaggatcctcaaggtcggcagggacgcctagaggctcaccgccgtggcccccgtctacctgactggcgcgctcaagtatattgctgctgaggtgctaccacttgccggcaacacggcttgagacatcaagaagacgccgatgaaggcacacgccacatccaggtggacgttacggacgacgaggaggtctcccgcttgctccgtactgggaccatctccagtggtggtgtcctgcccaacatgacacaacctggtggtgaacctgactgacgaggagggcagcgacaaggctgctgatggcgatgatgactanaccgaccacacctagtctttgatgcg

SEQ ID NO: 1271 - DNA, 598 bp, Zea mays
  Clone ID: TF_LIB4976-052-A1-K1-H6
tgcggttattcgattcacagcgctcaccacaccaaacagcaagtgaaaattccccaatcctctcgctctctgcgtcgatgatgccgtggcgtggcaaggtgcggctagcggcctagcgcaatgaccgtcgctcaaacgtcaccgatacggtgctgccgcgacaacatccaggggatcacgaagccagctatccggaggctggcgcgacgaggcgacgagaagcgcatctcgcggctcatctacgaggagacccgcggtgcgctcccgagcttcctgtagaacgacatccgcgacgacgtcacctacaccgagcacgcgcgccgtatgaccgtcaccgccatgtacgccttctatgtccttaagggcctcggccgcaccctctatggcttctacgggtaagtttgccgcgttcgtgcctcgcctcaccgtgggtgcggctctggtgttgctgcagatcacaagcagtttgtggagggtgaaaagatgctagctactgtataactgcaaagccgcacgccacacatggcgtggttgcctgaacaattgctgtcaatgctgagcttgctctggactcacacatgctccattctgtgtacaa

SEQ ID NO: 1272 - DNA, 417 bp, Zea mays
  Clone ID: TF_LIB3088-044-Q1-K1-B10
gccggcttctaatccgtactctttgtggcttcgcattcatggcgccctacgcggttaagaggcccgtttcgaacagagccacataggacgatcccattgccaataccgctccttccgcgaagaactccaatgcggcaaagcctatcacagcatgcaaatccgccttcacagactacggcaagggaatagaggtgccggtcgaaggtcaagaagagcagtgcagacctacaacatctacatcttcaaggcgctgtagcaggtgcacgcgaacatcaacatcttctataacgtcatgtgcatcatgaactacttgatcaacgacatcttccagaagctcgccgtcgaggccgtcaagctcacgcggtacaacaagaagctcaccatcacgtcccgtgagatccagatcttcctgcgcct

SEQ ID NO: 1273 - DNA, 328 bp, Zea mays
  Clone ID: TF_700613664H1
tgccgagacaaagcccgcggagcagaatccgacggatgagactgtcgagaagaagcgcaaggccgctaatcgagtaccacgaatggattgcaggaagaactacgtggatgcacactgcaaatacagcgtcactacgtacgagatctacatcatcaacagtgtcatgcacgtgcacgcggacatcggtatatcgtccaacgacatgtccatcatgaactccttcatcaacgacatctacgagaagctggctgtcgaggccgacatactcgcccgctacaacaagatgctcaccataacctcccgggagatccagacttcggtgcgcctc

SEQ ID NO: 1274 - DNA, 512 bp, Zea mays
  unsure (1)..(512): unsure at all n locations
  Clone ID: TF_LIB3600-058-Q1-N6-B8
attatccaaaatcaggaccaatcgctgttactaccataaatcaatcacccacagacacaacatacgtaccatgcttccgagcgctcgattgcaaaatcgacagattacaccggtattgctgcaataataccacaaaaagcatcacacagagacatgtgccctaaccagtccccaatatgaagaggcacctaccctagcctcctaagccgtacagggtgcctccctgtcgctcgagcgcgtaaacaacgtccatggcggtcacgggcttgcggagcgcgtgctccgtgtaggtgacagcatcgcggataacgttctctagaaaaatattaagcacgccaagggtctcctcgtacatgagccccaaaatgcgcttcacgccacccctcctaaccagactgacagatcaccggcttggcgataccctgcatgttgtcgtgtacaccttccgagtgggcgcttcgagccgnccttgcccagacccttgccgcccttgccgcacccagacatatacg

SEQ ID NO: 1275 - DNA, 517 bp, Zea mays
  Clone ID: TF_LIB4740-021-Q1-K1-A12
aacacctctcgtcaactgtccttagacgccgacctctggttcctgcctgccacacggcgcacacagtggtgaagaagccctccgacacgattctcccatgttggaggatccccttgaccagagaatgtggagattgtatacgaaggcgaagaagcccttgtcgacaagcgcctagggtgacctatctgccaagaccccggactgggacgaggcgctaaaacgaaggcagcgaccttcgatgtgacctacagcatctattttttgacggctctgaaggaattgcactccaaaatctggatttccgctaaatgcatgaccatcatgaactccttgatcaacgacttcttcgagaagctcatggccgtgtacaacatgctgtcgcgcatcaactagatgctgatcatgacctacctccagatccacacctagaagcacctcgtcttccccggcaagctcgccgagcacgccgtctgcgacggcactaacggcgctacgaacttgatctactgttaggatg

SEQ ID NO: 1276 - DNA, 657 bp, Zea mays
  unsure (1)..(657): unsure at all n locations
  Clone ID: TF_LIB4965-006-R1-XP1-E12
gccggccgggttgggacacaccaagaagcaagaaaactagaaaaggctcctcccgaccgcaacgcccctcatctccctcgaccccgacatccccgacccgatggcgcccaaggcggagaagaagccagcggagaagaagccggcggccgaggagaaggcggagaagacgaccgcagggaagaagcccaaggccgagaagcggctgcccgcgtccaagtcctccggcaaggagggcggcgagaagaaggggaagaagaaggccaagaagagcgtggagacctacaagaagcccaccatcacgtcccgcgagatccagacctccgtgcgcctagtcctccccggagagctcgccaagcacgccgtctccgagggaaccaaggccgtcaccaagttcaccagcaactgagcgcgctgcgggatccgcggatctgttagaagggttctttgctggtgtcctttccccagtcccccaccctacccgcctagtagctagcttgcctgctctataaatccggcgcgccggattgtaatggtcctcttagatttgatgtccctgttgtggaatatagttgtatctctccgcttgctattttgannnnnnnnnnnnnnnnnnnnnnnnnnnnnnnnnnngaaaaaaaaaaaaaaaaaaggccccta

SEQ ID NO: 1277 - DNA, 468 bp, Zea mays
  Clone ID: TF_LIB5045-035-B2-K1-C4
gggtacctcgaggccggccgggcctggattccggccgccgaccgccgctggttttctttcttctcgcccaagccgcgccgccggcgcggtcctttgtaaaggcctagcggcacgggagcgggctgcgctccctctctctggattaggcaaagcatcctcctgtttggatcggcatggacaagacgacgaccacaccactgccggactgaacaaagctcaccgctaccgccctggaactgttgccctccgtgagatccgcaagtatcagaagagcactgagctgctgatcaggaagctgcccttccagaggctcgtcagggaaattgcacaggacttcaaaactgatttgcgtttccagagctcatgcggcgcttgccctccaggaggctgctgaggcataccttgttggactgcctgaggacccccacctgagagccatccatgatcaacgtgtgaccatcatgcccc

SEQ ID NO: 1278 - DNA, 355 bp, Zea mays
  Clone ID: TF_LIB3070-014-Q1-N1-C4
cttcgatggccccagggcggcaagaagccgtcggctaataagcctgcagaggaagagcccgcgacagacaacgcggagaacgcttcggcgtagaagaagcccaatgccgagaagcgccttccggcgggcaagttcgtcgctaaggaaggcggcgagggcatgacggggacaaagaaagcgaataattccgtggtgacctacaagatctacatcttcaaagtgctgaagcaggtgcaccttgacatcggcatcttgaccaacgccatgtccatcatgaactccttcatcaacgacatcttcaagaagctcgcggtcgagtccggcaagctggctcgctataacaagaagcccaccg

SEQ ID NO: 1279 - DNA, 421 bp, Zea mays
  unsure (1)..(421): unsure at all n locations
  Clone ID: TF_LIB4766-069-R1-K1-H2
ggacccgngggcncccnnggcggccangaagccggcggcgaagaagcccgcagaggaggagcccgcggccccggcggagaaggcccccgcggggaagaagccgaaggcggagaagcggcccccggcgggaaaacccgccggcaaggaaggcgggggggacaagaaggggcggaagaaggccaagaagagcggggagacgnacaagaccnacancnncaaggggcngaagcaggggcacccggacancggcaccnccnccaaggccagggccancangaacnnccacagcaacgacancnncgagaagcccgccggcgaggcggccaagcncgcccgggacaacaagaagcccaccancaccncccgggagaaccagaccnccgnccgccccggncaacccggggagcncgccaagcacgcc

SEQ ID NO: 1280 - DNA, 449 bp, Zea mays
  Clone ID: TF_LIB148-064-Q1-E1-B9
accacgcgtcagaacacgcgtccgcgccattggccatcgcttgaatccatttaggaaaaggttgcttcttggacgtatgccgctataagcaaaacggagtgacaaagttggaagaaaatgcctcgagcaggtaaagttgtgtctcgctcggttgtaggaggtgaccgaaacagaagagaaccaacacttataaggattggtcaacctcaagcttccactaccgcgaaaagttcgactagtgccaaaccacatagatatcgtccaggtacgagagcgctgatggaaatacgcaagtttcaaaagagtaccgacttgttgattcgcaagttaccgtttgcacgtctggttaaggaaataactcagcactatcatcacgaacttcgctggcaagtggaggcagtactagcccttcaaacaagtgcagaggactacctagttggtttgttgga

SEQ ID NO: 1281 - DNA, 623 bp, Zea mays
  Clone ID: TF_LIB4979-027-A1-K1-C12
attccacccttaacatctcctcggattttttctcctacgagccgctcgttcgaatcaaataccacctccatgcaggtccatgccaccatgggccgaaaaaagacgctgggaaaataatgctgcaggtgatgacgccgctgactagatagcgctccctctccatgaatgcatatcgaggagaaccgtgactgcgctcggagagactgctgccaagcataagtacggagagcgaaacgttgccgatgaagggcaaaaagagcgcgcagagctacgatatctacctcttcattgcggtgaactcggcgcacacgaaagttggaagctactgcaaggccatgttcttcctgaactccttcatgagcgatatcatcgagaggctcgctgttgaggacatcaatatcgctcgctatagaaagagaactaccatcacctcccgtgagatcacaacctccgtgcgccacttccttaccgggtagcttgacatagcactgcgactccgaaggctccaacgtcgtgcaccaagttcacctcgtgctaaggtgcatggtcgtcgcttgcaggattctctcctggggtcacgacactagctgtagataggcgctactgcctggtgctctatatgc

SEQ ID NO: 1282 - DNA, 398 bp, Zea mays
  Clone ID: TF_LIB3357-029-P1-K1-B9
atgcacacatttcttaccattacttgccatacgatccccccttcgcatccaaatccccatctcaccgtggatggatgggtcccaaggccgagaactaacccgcggcgtacaagccggcagaagaggagcccgcggccgataatgcgcccgccgggaagaagccggaggcggggaatcgggtccccgcttgcaaggcccctgccaaggaaagcggcgagggcaataagggcaagaagaagggcaagaagagcgcggagacctacaagatctacatcttcaaggtgctgaagcaggtgcacccggacatttggatatcctccaaggccatgtgcattatgaactccttcattaacgatatcttcgagaagctcgctgctgaggccgacaagctcgcgcgc

SEQ ID NO: 1283 - DNA, 561 bp, Zea mays
  unsure (1)..(561): unsure at all n locations
  Clone ID: TF_LIB4185-031-R1-K1-A10
atcttatatctttttctattttagcaccacagatgatcgtttagaagcaaagcgaccaccagagatcacagataagatacagaaagcgtggttttccctgcaaccgaatccaaaagaacgaatacaagaacaccgacgctaatacggcctatttgatgggcaactaaacattcataagatcctcggagatgaagggtaccctcgctcgtgacggatgctgttggacgaactggatgtccttgggcatgatggtgacgcgcttgggggggatggcgcagaggctggcgtcctcaaagaggccgacgaggtaagcctcggcggcctcctggagcgccagcacggtgtggctctgaaaccggaggtctgtcttgaagtcctgaagcgatctcgcgcaccacttgctggaagggcagcttgcggatcagcacctccgtgctcttgtggtacttgcggatctcgcgcagcgccacgggtacgggcctgttcctgtggggcttnttcacgccgacggtcgtcggcgccgacttcctagccggcttggtggagagctgcttgcggggg

SEQ ID NO: 1284 - DNA, 421 bp, Zea mays
  Clone ID: TF_cC-zmle1890011f01a1
ttttggtttcgatacaactatattccaaaacaggggcgggatatctaatagggcaatgacacttgggccctatttatcaacccagcaaactttttgctgggctgcgctggtccgccgagaacatcaacactatcacgggccatacataagcgatgacgggtggaggacactacgaagaacccgtgtaagaaggggatacctaacaaatccgtggacgctgcaggctgctcaattgctggtgaacttggtgacggccttggttccctcggagacagcatgtttgcggagctctcctgggaggaccatgcgcacggaggtctggatctcgcgggaggtgatggtgggcttcttgctgtacctggcagagctggaggactcggcgcgcagctttttgaatatgtcgttgatgaacgagttcatg

SEQ ID NO: 1285 - DNA, 567 bp, Zea mays
  Clone ID: TF_LIB4827-050-A1-N1-B2
ccggccgagacgccgtgactccgccgcaaagagagggagagtccaccgttattcgtgtcctggcatccgcagagagcttgttccgtcctggcaaccaaaatgcaagttgccccgccgcgcacaggaagaatagagcagaggaggatggttcgtacgaatgagaccgcccgtaagtccacgggaggaaaggccccccgcaagcagctcgccaccaaggcggagaggaaatcggcgtcgaccaccggctcagtgaagaagccccatagtgacatggcccgaaaccgcggcgctgaacgagattccctagtacaagaagagcactgagttgctgatccgtaagctgcccttccagaggctgtggcgcaagatttcgcaggactttgagaaagaccttgggttatatactcacggcgtgttgcatgtccagaaggctcttgaggcctacctcgactatctcttcgaggactgcaaactctgcgacatcgacgctaacatcgtcgccatcatgcgctgggacttacaactcctccgccgtgttgggggtcatcgcctgtatccatcatttcc

SEQ ID NO: 1286 - DNA, 532 bp, Zea mays
  Clone ID: TF_LIB4764-069-R1-K1-H1
cctcgaggccggccgggatccacccatcagtacccaaccttcccctacaccagaaaaatccccagttctttggtccgcgtcagagaggcggcggcgatgtctgggcgcggcaagggcggcaagggtctgggcgaggggtggcgtgaagcgcatctcggggctcatctacgaggagacccgcggcgtgctcaagatctttctcgagaacgtcatccgcgacgccgtcacctacaccgagcacgcgcgccgcaagaccgtgaccgccatggacgtcgtctacgcgctcaagcgccagggccgcaccctctacggcttcggaggctaggctaggcgcctcttcgtagtcggggactggttaggggacatgtctctgtgtgatgctttctgaggtagtattgctgcaatagctgtgtaatccatcgcttctgcaatgaagcgctttgaagcatgctacgtatgttgtgtctgtgggtgattgtatttctggtagtaacagtgattcttcctgaaaaaaaaaaaaaaaaaagcggcc

SEQ ID NO: 1287 - DNA, 735 bp, Zea mays
  Clone ID: TF_LIB4185-041-R1-K1-F4
gccctccctcgagttttttttttttttttttttttttttttttttttttttttttttttttttttttttttttttttttttttttttttttttttaaaaagggaaggggcccgggtgtcctaaaaaaacccccccaaaggggtggggggacaaaaactttggggatctcccctaaacatgatctaattaaacggcccaattgttaagggaaaaattgtttaaaaacaggaaacccctctcccccttttggggggactaaagggcctttttgggctccttggcccccttttgggccccctttttggggaggaccccaggggggattttggggaggacccccccgggggcaaggggaaccccccccaaaagtttgccaagctccttttttttggggatgggaaaaacccccgggcccggaaaaaaccccctttttttgttgccccttgccgggttgccgggaaactcaaccccctcggccggggggtcccccaaaacggggggaaggaaaaagggggcccccgtccctaccccctgggggaaccggccttttttgaggcccccccccccccggttgacgggaaactgccccccccccctggaggaccccaaacccgatttttttgtgggccccccggctttggcccccgccgggcctttttttgccttaccggcgggtccgttaaaggacatgggtgttacgggggggcttccaaatggaaaaaaaaaagggccctt

SEQ ID NO: 1288 - DNA, 585 bp, Zea mays
  Clone ID: TF_LIB4171-011-R1-K1-G10
ggtaccggcccccttcgcggtttttttttttttttttttttttttttttttttttttttttttttttttttttttttttttttcaaaaacagccaaatggtttggccaaaaacatgggcccccgatggcgggacaaaaagcgataaagcccttcgcctatttcaaactttacaaaaccgggaaaacagagcagcattcgggccctttcccccttgaggcggggcgcgacctggatgccctgggccataaggggaaccctttggggggggagggcccaaaggttggggccctaaaaaaaacccaccaaatccccctggggggcctcttgcagggggggaacgggggaggacggaacccaagggtcggttttgaagttttgcgcaatctccccccccagccgtgggaggggcagtttccggagaagcagctccgggctttttgggaactgggggatctcgcgaaaagcaacgggcccggggcgaaacctgggcggttttttcaccccgcggggggccggacccgatttgcgcaatcaaaggatttaaaatggaaaatcggcctcgggccaaattcctgcagccgggg

SEQ ID NO: 1289 - DNA, 621 bp, Zea mays
  Clone ID: TF_LIB4729-112-A1-K1-B10
gaaggtttctccgccactgagtccccatctcacgcatctccttgtaccacaacactgccattcacccaactcggcggcgatgactgggcgcgtcaagagagccaagggaatggggaaggccggcgcgaaacgccaccgcaggttctccgcgacaacatccatggtatcacgaaggcgaaaatccggaggatggaccaggcaggggcagccgtgaagcgtatctccgggcttatctactaggaaacccgcggcgggctcaagatcttcctcgagaatgacatccgcgaacgcgccacctacaccgagcacgctcgccgcaagaccgtcaccgccaaggatgttgtgtacgccctcaagcgccagggccgcactctgtacggcatcgatggctgatagcatctcttccctcgtatgcagcggctgccggcggagtttcctcagtaccctctgacttgattggcttggtgtacagagttatcatattagaatacctctgatgcgcttcgttatcgggcgaaatcatgtgccccagcagcgctgtgaaatcgagatcaagatgtatctttctttggagtaatgaaatgccaaaatcgagatcaagatgtatcttttctttgaagc

SEQ ID NO: 1290 - DNA, 378 bp, Zea mays
  unsure (1)..(378): unsure at all n locations
  Clone ID: TF_LIB3279-014-P1-K1-D8
ccgcaagctgcccttccagcgcctgggccgcgagatcgcgccggactggaagaaagannanggttccagtcctccgccgtcgccgcgctgcaggaggccgccgaggcctacctcgtcggcctgttcgaggacaccaacctgtgcgccatccacgccaagcgcgtgaccatcatgcccaaggacattcagcttgcccggcgcattcgcggggagcgcgcctaaggggcccggcggataagccgtgggccggggggcaaggtctttttgggaggttggactacagggcggggccggggggaagagggggggtcttgtaaaaaagggtcaaaacaagggaaaatctttggtgggataaagggaaaagcgactttgtgtggt

SEQ ID NO: 1291 - DNA, 496 bp, Zea mays
  Clone ID: TF_LIB3279-192-Q1-N6-E9
aaaaaaaaacaggggttttttttttcctttttaaatagcaaaggacaattgggggggggacacatccccttccaagccctttggtccaatttggagcctacgcataaccgttttcgggaaaaagggtcctgttaaaaataaaatcactccggacaggaagtttttgcctttttaggggacttgggggcttttttgggcaattttgcctttttgttcccgccattggaccctttttccgccgtttttttgggaaaaaaaaaagggttttttttggggagcacacccccgggagcgatggtaacccccccaaaaagtttccaaagttttttgtttttccggatcgccaaaagcacgtggggcggaataatgcgagtttttttgttgtccctggaagatttaccggggagctccaaaacctaaggggggaggttttcaaggacagcggcaaggtaaacgggggccccggtcccaacacccttggcgtaggggccctttt

SEQ ID NO: 1292 - DNA, 527 bp, Zea mays
  Clone ID: TF_LIB4730-090-Q1-K1-H2
accggccaccgcgaatccagagccccacgccccgtccgaaccccagagcagagcaaagcctcctcgacctccctgtccccagccttccccgatggcccgcacgaagcagacggcgcgcaagtcgacgggcggcaaggcgccgcggaagcagctggcgacgaaggcggcgcgctgcaggaggccgccgaggcctacctggtgggcctcttcgaggacaccaacctctgtgccatccacgccaagcgcgtcaccatcatgcccaaggacatccagctcgcgcgcgcatccgcggcgagcgcgcctaggcggttcggttgcggcgcctgctcgctactgctggaggtgcttagtttagcccgtcatggttgtgttataggtgtgcgttgttttcaagagtaggcttcttgctatgtgctgatgttaacggaggattatgattagcagttctgaaaaaatgcaatggatgtgatctgctctatctacatgttttctgtctttgtcctggaatcccatggtgtttagcattg

SEQ ID NO: 1293 - DNA, 623 bp, Zea mays
  Clone ID: TF_LIB4730-113-A1-K1-G1
cctcgagccggccgggacattcattccaccccatgcccctttacctcgactccccgaatcccgacgctatggcgcccaaggccgacaacaactctcggcatgagaagccggcggccgaggagaaaggggagaagacgaccgctggcaagatgcccaagtccgagaagcgcctgaccgcctccaagtcctccgggaaggagggggcggagaataatgtgaagaagaaggcccagaagagcgtgggagacctacgagatctacctcttctaggtcctaaagcaggtgcaccccgtagcatcgtcatctcctctcatggtgatgtccatcatgaactccttcatgaacgacatcttccagaaggtcgccggttaggacgctaagctcggccggcatctctggaagcccagcatcaactctcgctggatccagacctccgttgtgccatcatcctgcccaggattagctctgccaaagacttcgtttgcgaggtatactcatgtcgtcgccaatgtcttcagccatggatcactctgcaccgtccacgtgattagttaagtctcctcttcttacgagggttcttctgagggtcttctacccctccgcctccgctgctatgtatgtgc

SEQ ID NO: 1294 - DNA, 433 bp, Zea mays
  Clone ID: TF_jC-zmX700240924b1
cttcttaggtccctttttttttctcgatctggacgcgccgcactagcagccatggtcgtaagcgaagctggcggaaaggcgaacaactgcgccgatgagcgcacgttcggcgcgccgactaagatttttgtgtcgcgaccctacatggatcgtctgcagttccctatcagacgtgttgggcgcctcttataaaagggccgatgccctcccatgctaatcacttctgcccccttctacatctccgacagtctggattacttactgaacgtggtgcttgcgctcaccggaaacccggaaagggacaacaagaagacgcgcatcatcccgcgccacagtgctcttctgcatcaccaacgacacgtagctctgcaagctgatatccgcagtctccatctcacacagcggatttctccccaacatacacactgtgctc

SEQ ID NO: 1295 - DNA, 511 bp, Zea mays
  unsure (1)..(511): unsure at all n locations
  Clone ID: TF_LIB4729-048-R1-K1-H3
cgggacgacacgactctcggcaacggatatctcggctctcgcatcgatgaagaacgtagcaaaatgcgatacctggtgtgaattgcagaatcccgcgaaccatcgagtttttgaacgcaagttgcgcccgaagccttctggcggagggcacgtctgcctgggcgtcacgccgcctcgcatcaaaccaactctttcccaaatccaccgccggctcggctcgcccatcttcgcgccaagcaccgaatctccgatggcccgcacgaagcagacggcgcgcaagtcgacgggcggcaaggcgccccgcaagcagctggccaccaaggcggcgcgcaagtcggcgccggcaaccggtggcgtgaagaatcctcaccgcttccgccccggcaccgtcgcgctccgggagattcgcaagtaccagatgagcacggagctgctcatccgcaagctgccctttcagcgcctcgtccgtgagatcgcgcatgatttcaaagaccgacctncgctttcagtc

SEQ ID NO: 1296 - DNA, 449 bp, Zea mays
  Clone ID: TF_cC-zmle189068a05d1
gccgacgcgtgggcggacgcgtgggcgtacgcctgggctggagctttctctttttgctgccagggacaacaagaaggcgcgcgtgattccgtgccacgtgcttctggcgatccggaacgacgaggagcttgggaagctgctgggcggcgtaactatcgctcacgggggtgtgctccccaatattaaccctgttctgctgcccaagaagacggtggagaaggcgtacagtgtggggagcaaggaggcaaaatcactccaagaaggccgccaagtcccccaagaaggcatagactgactgtatggagtgatctgatgtttgagaggaccttgataccattctgctgtgatgcgtagggtggagatgggtcaaatgttcttgagtgtgaatgtgccctggtgcaagtggccctttgctatttaaaatggaagaggaaaagcctggttttctg

SEQ ID NO: 1297 - DNA, 491 bp, Zea mays
  Clone ID: TF_LIB4762-010-R1-M1-E1
ggtctcggggggcgccttttttttttttttttttttagtatcatgtgggccatctctaccagggctaactgattaatgcagtatagactctcgaatgctccactgggtgaaccatcaacctaggacagtctgaagtatgagaagacacagcaacgcgcgctgaaggaggaaccctaagatgaagccacgaagctgaccgtctgcgagcctgaggtgacgatgttcttgtcgagcttgacggggaggacgaggcccacctaggtttggccctactggaaggcgctagggggctgtctgacgtagcggtcgagctaggtctgcttggactggatgttcttgaagatgagccccatgaaggagcgcatgatggacatccccttgggccaaatgccaatgtccggatgcaactgctttagcaccttgtagacccagagcttgagcgcctccacgctctccttaggcgtattctttccctgtttatggccggcctc

SEQ ID NO: 1298 - DNA, 1407 bp, Zea mays
  Clone ID: TF_ZmC10394_1
atttgcggacgcgtggggttggcacgtgctggtcatttagaagaagcatgggattttattgaggaaatgcctggcaaggtagatgccgtcatgttaggcgctttgcttgctgcttgccggaaatgcaagaacactgaggttggtgagagggtcatcaataggattatgaagctggagccatcaaactcgtggaactacgtggtgtcatccaagatttatgcaacctcagataaaatggatgaatctgcaaggatgatagggctaatgagggagaggggtgtcaacaagactccagggtgcagctgggttgaggttaatggaaaagttcttgaattctatgcaagcactgaaccacagcatggtgcggaagatatgtatcaactcatgggcgtactggtaaatgagatgagactaaagggatatgttccaaaccttgatctggtgtagcacgtaataaagcatatttcctgttcttcttggagcaaaaggaatgacttatgctaattcacaggaggaggaaaatcgcaaaatgaaataaacagaggaacgacaagaacagcagcagccaacaatatgatgggataccatactataatataaaacgaaaaagagggaacacccaaatgctaaacctcaatagctgatactctttgcctgatttcaacttcttccttaatgcagtgaaccatttgcagcgtgctaagcaatcgttattgacaattatttaccttctcacttgttcaataaagtgtgccgcatggaatctctcatttggctattgggacctttttatggtctacttcctaccaccaccaccaagtcagtttgtttgtaagctgggaagataagagttcagttacaccatgtggctccttaaatatgcacatgatttttaatgttacaggacaaggtgaggttggcaactattgatggatccttacttctagagttgcgctgaagctatcttttgttcgcttgttttgttcttagaatactttgttttgtgctaattttgttcatccacttcctgcatatggatactaatggggaagagggcaagaagagcgtggagacgcacaagatctacatcgctgaagcaggtgcaccctggtattggaatcccctgcaaggtcatgtctgtcatgaactcgctcatcaacgacatcttcgagaagcttgccggtgaggctgccaagttcatcggctacaataagatgcccaccatcacatcctaggacatccaagggcatcaaggccgtcaccaagttcacctcgtcttaggcttcttctccggtgcttctgtgtcttcgtgtgagtaacatgttggttggtcggaggcttggctgttatggtatcgtgtaattgccgcggtggctttttggcagaatggaatgctatggttatgtg

SEQ ID NO: 1299 - DNA, 530 bp, Zea mays
  Clone ID: TF_LIB4762-024-R1-K1-G4
gacacccacacaaattcaggaactcgcatttttctgcgtcatccaagttgtggcggcgcagcgctcggtttcggcaatgtcggcgcgcggcaagggcggcaaaggtctgggcaagggcggagcaaatcgccaccgtaaggtgctccgtgacaacattcagggcatcaccaatcccagcgatccgtatgtctgtgctcggcaggggccggcgatgaagcgcatgtgcggtgtcttatctactaggagacccgcggagtcctcaagatcttcctcgagaacgtcatgcgcgacgccgtcacctacaccgagcacgcacgccggaagaccgtcaccgccatggacgtcttctacgcgctcaagcgccagggccgaaccctctacggcttcggaggctaggctggatgcctcttctccttgctatcgtggatgcctgcttgttgttagggttactgcgtttagttgcttggctgtgacgtgtcggactattgctagtagtattcttgaaggtgtgcttcgaatgtaaaactttt

SEQ ID NO: 1300 - DNA, 685 bp, Zea mays
  Clone ID: TF_LIB4975-064-Q1-K1-A6
gtgttccatttgcttcggctcatctcagatcaagctagcgcacctgacacccaccacctccctcccagatccaccaccccagtcatgggcaccgcctttgactccccgacctcctgccccgcggccgcgaaccttccacgacaacccttgcccacctttggacggcgcgagacgcgccggggcatgagcgttgccgaaaacccggacacgcttacgccccggtacgattgcgcttggcgagatccgcaagtaccacaatacgacgaagctgttgcatccagcggctcaccttcaagcggctccgccgctagatcgcgcaggacttcaagacggagctgagggaccactgctccgacgaggcggcgatgcaagaggccgtggacgtgtacctgaagagactcttagaggacaccaacctctgcaacatccacgtcaagatggacaccatcatgtccaaggacatccagatcgacagccgcatcagggacgagagggcttgatcagcggcgatgctgcagttcttggctgcaatgtctgaagaatatggagcctagggctgatggtgatacagggtggcccttactggcccgaccagacgtcgcagctccaatatgctagcatttgggaggacgcgccgccgcaaggcatgttcatttgagcatgaaactcagaagctgcagatctc

SEQ ID NO: 1301 - DNA, 405 bp, Zea mays
  Clone ID: TF_LIB3357-030-P1-K1-H5
tcgtttttctttttcttttttaactcaagaccgatggctcccaagggcgagtataatcccggggcgaataagccggcggaggatgagcccgctgtggataatacgactgttgggaagaagtccaaggcggagaagcgggtccccgtgggcaagtccgtcggcaaggagggcggttagggcaatcgttgcatgaataagggcatgaagagcgtggagacgtacaatatctacatttttaaggtgctgaagcaggtgcacccggacatctgcatttcctccaaggtcatttccatcatgaactccttcatcaacgacatcttctagaagctggccggcgaggccttcaagctttgctctctacaacaagaaatgccaccattacgttccgtgagattcatactttcc

SEQ ID NO: 1302 - DNA, 362 bp, Zea mays
  unsure (1)..(362): unsure at all n locations
  Clone ID: TF_LIB4730-014-R1-K1-A9
ccggacacccgcaatcttaatctcccagcaatccctagcagagccttccatcctcactcgctcgatggcccgcacgaagcagacggcgaggaagtccaccggcggcaaggcgccgaggaagcagctggcgactaaggcggcccgcaagtctgcccctgcgaccggcggagtgaagaagccccaccgcttccgccccggcaccgtcgcgctccgggggaggcgcaagtaccataagagcacggagctgctgatccgcaagctgccgttccagcgcctggtgcggtagaccgcccccgccttgctcaccgaccgacgcctcccncccctattcctcgctccgttcccctgacacaccgcctgcc

SEQ ID NO: 1303 - DNA, 927 bp, Zea mays
  unsure (1)..(927): unsure at all n locations
  Clone ID: TF_LIB4762-019-Q1-K1-H6
gctgcagccgaccgcaacgcccctcatctccctcggccccgcacatccccgtacccgctggcgcccaaggcgtacaagaagccagcggcgaagaagccgtcggccgaggagaaggcggagaagacgaccacagggaaaaagcccaaggccgagaagcggctgcccgcgtccaacacctccgccaaggagggcggaaagaagaaggggaagaagaaggccaagaagagcgaggagacctacaagatctacatcttcaaggcgctgaagcaggtgcaccccgacatccgcatatcctccaaggccatgtcccatcatgaactccttcatcaaccacatcttctcacaagcttggcccgcgaggccgcccagcctggcgccgnacaacaagaaacccaccatcacgtcccgacgagatcccaaacctccctacctcctactcccttcccccgtagaagctcgacaaaacacgccccactcccgacacaaccaagggcccgccaacccaagtcccacccaccaaacctaaactcgcttcccgggcatcccctccgcttcctgttactaaacgttccttttgttttgcttatctttttcccccaccccccccctccctaacccccccccacccccctcaccctcgcncttcctccccacaccccccccccccccccccgtcgcggcacaccgctanctttcccctatctcgccctcccccccccgccccccaacccccccccccccccccctcccnnccccccttcaaccccccccaccccacccaaaacacccccccccccnccccacccccctccccccctacccatcactaccctcccccctcccacacccccccccctcccttccccccccctcccccctcccccccccnctcccgccccttcccccccccccccctccccctccccc

SEQ ID NO: 1304 - DNA, 403 bp, Zea mays
  Clone ID: TF_LIB3076-019-Q1-K1-A2
ttccgaattcgaggcacgagtcacgcgctgatcccgcatctcgtgccaactaccatagcactttcatcgtcgtacgacacaagcacaatgcgaaggggaaatacgacgcactgactccaccggcaccgtgagcatgggctaaggctaagaacgaagcgggccaacacaaggtccgccttccaaggaagaaaccagggtcgaggtccctgaaagccgatcttcaattctgcgtacgacgtatcgggcgctacttgaagaagggccaatactcacagtacgtcggtaccggcgcccatgactacctcgacgctgctctcgaatacctcaccgctcaggatctggaactcgacggtaatgctgacacggacaacatgaagactcgtattattccgcgccacgtgct

SEQ ID NO: 1305 - DNA, 334 bp, Zea mays
  Clone ID: TF_LIB3357-024-P1-K1-E7
ctcctcgtcccagacaagccaatcgaagccgagatacgaccatggactccaccggcaccggagcagggggtaaggggaagaagggagcggcctggcgcaaggtcggcgggccaaggaagaagtcggtgtcgaggtccgtgaaggccaatctccagctacacgtcggcctcattgggcgctacttgaagaagggccgctacgcgcatcgtgtcaacaccaacgcccccatgtaccttgacgctgtgcttgaatacctcgccgctgaggttctagtgctctacattaatgctggcagtgtcaacaagatgactagcattattacgctccacgtgct

SEQ ID NO: 1306 - DNA, 447 bp, Zea mays
  Clone ID: TF_LIB4742-074-R1-K1-C10
ccggccggggtatcctagccctcaattggttacatacaggcaaggtagaaatcgagtagtcaggagaggagaagatggttcgttcgaaacagaccgccctgaagttcaccggaggtaaggccccgcgctagcagatcgcctccaaggtggacgtggaagtcggcgccgacgaccggcggagacgaagaagccccacatgtactggcccgagactgtggtgctgcgcgatgatccgcatgtaccataacagcacggttgtgctgatcggtaaggtgtccttccagtgcctgatccgtgatatcgctcaggacttcaagactcatctggtgtttcagagccacgacgccctggtcctccatgaagccggcgatggctacctcggcgggctgttcgaggataacaacctctgcgccgtccacgcagatcgcgtcaacatcatgcccaaag

SEQ ID NO: 1307 - DNA, 720 bp, Zea mays
  unsure (1)..(720): unsure at all n locations
  Clone ID: TF_LIB4730-101-Q1-K1-H3
aatctaattcacagcgctcaagttctcgcgcccacggccaaatttttctccactcaatcgcggaataatctgcactgcagccatgtacgtcagcgtagtcggcatcaaggcgaagaagggggcggctggtcgcaaggctgtggtccccangaacaatcggtgtcatgcctcagtcaaggccgggctgcagttccccggcggtcggatcaggtcgctacctcaagaaggggcggtacgcgcagcgcgtgggcaccggggcccacgactatctcgtcgccgtgtttgagtacctcgtctgcgaggtgttggagttggacgataacgcggcgaaagacaacaacgagagacctagccatcgtctgcgcgcacacttatgctccgtgtgagatctctgaaccgactactgtaggctcaggcaagcttgcttgtcatggcagtcaccattcgctgctacgcgcgactgtaccttcgcccaaccatgcaaacccagcgatctccttgccacaagtaatcgtggcaggcgcataagcgctcacatacggcagtgcagcaagcgatgagcaactaccctaaaaaggacgccctgttctcatataaggcagctcaagtccccgaagagaggcttacatattagtcacttcactagcggtctgctgtagcatgatctcggacacatctgtgtgacttatgtgctgcagcctaattgcctcttttgcttgc

SEQ ID NO: 1308 - DNA, 421 bp, Zea mays
  Clone ID: TF_LIB3357-059-P1-K1-H11
ggctgaccccaccaacagcaagcgaaaatctcccgataccctctagtcttcgtggaaaagatgtcggctcgcgccaaaggcggtaagggcctgggcaagggcggatcgtaacgccaccgaaaggtgctccgcgacaacattcatgggatcacaaagcctgctatccgtgcgctagcgcacaggggcggcatgaagcgcatctgcggtctcatctactaggagacccgcagcgttctcaagatctatctgagagaacgtgatccgcgacacctgaacctacaccgagcacgcgcgccgtaagaccgtcacagccatggacgttgtctacgcactcaagcgccagggccgtacactctactgtttcagccgttaagataagccagtcacgcctccgtgtcatcactgcggttctattgttttt

SEQ ID NO: 1309 - DNA, 586 bp, Zea mays
  Clone ID: TF_LIB3600-040-Q6-N6-C10
ttttgtttttttttttttttttttttttttttttttttttttttttttttttttttttttttttttttttttttttttttttttttttttttttttttttttttgggcacacataagggggggtttccattggtgacaacaaaggggggggggggggtggggacattggtgattaggaaaccatttctttcaaaagacccggccatttgtacaaacttccgagaagagactgggccacgggctttccgggcgggcgggcccttaggggccctccccggggatgcggggggcaaactggatttccttgggcataaaggggacccccttgggggggatgggccaaaggttggggtcctcaaacaggcccacaagggaagccttgggggccttctggaacgggggaacgggggaggactggaagcgggggtcggttttaaagtcctgggcaattttggggaccaggggctggaagggcaatttggggataaacaactcccggcttttttgggacttggggatctcgccccccgccacggggcccggggggaaggggggcggtttcttcacccccccgggcgaaggggcc

SEQ ID NO: 1310 - DNA, 406 bp, Zea mays
  Clone ID: TF_jC-zmXLIB3526P037af07a1
ggttggggtcttttttttttttttttttttttttttttttttggacccccaaataagcaactagctggattcaataaacattggtactggtccataaaataacagttgctaccgggggaaaccaaacacagcagcccctaactacaggaagacacccgaacattccagggaagcctcgaagcggaggccacccagcctaagacgaggggaacttggagacggccttggtgcccttggaaaccgggtgcttggggaacttcccggggaggaccaggcgcacggaggtctggatctcacgggaggggaaggggggctttttgttgtaccgggcaagcttggcggccttgggggcaagcttcttaaaaatgtcgttgatgaaggagttcattatggacatggccttaaa

SEQ ID NO: 1311 - DNA, 432 bp, Zea mays
  Clone ID: TF_LIB3355-039-P1-K1-D9
ctcgcattttccttgcaaccgattgcctatccccctcccaacccaagaccgatggcgcccaaggcctataagaagcccgcggcgaataagccggcggaggaggatcccgcggcggagaagacgaccgccgggaagaagcccaaggcggagaagcgggtccccgcggtcaagtccgccggtaaggagggcggctagggcaagcgtggcaagaagaagggcatgaagagcgtggagacgtacaagatctacatcttcaaggtgctgaaacaggtgcacctggacatcggctttttgtccaaggccatgtccatcatgaactccttcattaacgacatgttttacatgctgctcgccttatccgtcaagctctgcgcgctataacaagaagtccactcatttcgttctcgtagatccatacctgctagcgccttc

SEQ ID NO: 1312 - DNA, 668 bp, Zea mays
  unsure (1)..(668): unsure at all n locations
  Clone ID: TF_LIB4975-031-A1-K1-C6
ctcgaggcggcgggcgggaaatagaccagtaaatgctcattgttcgtctacctccggttcgcctgttcgcaatccgccgcttcccatcccgcgatggccgctccatttgatcaaattcgcgagggcgcccacgggcgatgaagaacgccgcgccataagaaccgacggaggagaacgcgagacaagactaggggggacaacgcgtgccggctctgagggcgcggagaataaggggaagaagaatgccaccaagaccgtctagacgtactagatctacatcttcctcgtgctctagctcgcgctcctggacattgtgtatctcgtccaaggccatgtccatcatgaactccttcatcatcgacatcttcgacaggctgtctgccgaggtcgtctatgctcgtccgctactagcaagaagcccactataacctcccgggatatccacacttcggagcgtctcgttgttcccggcgagctcgccgagcacgccgtctccgagggcacccatgatgatgccaagttcgcttcctcttagatcgccgccggcggtgcgacggctctggttcgtttcctcgtgttnaagcncagtgctactacgttgcccgaggaacaatgtactgctggaaatttctaatatatttccagattgtgccgaaaaaaanatcaat

SEQ ID NO: 1313 - DNA, 395 bp, Zea mays
  Clone ID: TF_LIB3059-049-Q1-K1-G1
cacgctcttgcgcccagacccaaatatttctccactcaatcactgcagtcatggacgccaacggagccagtagcaaggcgaagaacggggcggctgggcgcaaggctggcggccccaggaagaagtccgtgtctcggaccgtcaaggacgggatgcaatttcccgtaggtcggatcgggcgctacctcaagaagggccggtacgcgcaacgcgtgggcaccagcgcccacgtgctatctcgccgtcgtgcttgagtacctagccgacgaggtgctggagctggacgtcaacgcttcgaaggacaacaagaagacgcgcatcgtaccgtgccacgtgctcctggcgatcgcgaactacgttgaactcggcgcgctactgtctggcgtcaccatctg

SEQ ID NO: 1314 - DNA, 507 bp, Zea mays
  Clone ID: TF_LIB3637-242-Q6-K7-A5
cgcgccctggctcccgggcgaaccgatggccctctacttatccccccagcgcaaatccgggctctcctcctggcgctacaagccttggccttccgcggcaccgggattggcgctgcctcccccgagctggggagggcctgcaactactagctgtgctggggttttccgtggggagtgagcggtcacctcctccagggcggccagtacccggaacacggggacgccctggctcctggttacctagacgttgaacaagcttacgcgccaggtgaggttctgcaactcgcagagaactcagagagggataacatgaagactccaatccggccgctgcacatccaggtcggcgtgcgcaacgacgaagagcagaccaagctggttggcggtgccaccagcgcgagcggcggcggtatgcccactatgcactatgaactaccgaccaagaacgctggctctaccaaggctaccacctgcaaaggacgactactagcagcgctgcccactgca

SEQ ID NO: 1315 - DNA, 397 bp, Zea mays
  Clone ID: TF_LIB4758-112-R1-K1-B11
ccggccgggaattcgtcgctcaagctagtccgccacgagagcttcgtgtcggtcgagtcaatcgaaaaaggaagttgcacctgccgcggatagcaagaacagaggagaggaggatcggctcgtactgcaagtcagaccgcccgcacagtccactgtcgaggcaagtccccccgcaagcagctcgccaccaaggcgacgaggaagtcggcgccgacgaccgtcggcgtgaagaagccccacaggtacaggtccgtaaccgtgtggctgcgcgagatccgcaagtaccagaagagtacggagctgctgatccgcaagctgcccttccagcgcctggtgcgcgagatcgcgcaggacttcgagatatattttttttttcagagccccgccggggtggcac

SEQ ID NO: 1316 - DNA, 412 bp, Zea mays
  unsure (1)..(412): unsure at all n locations
  Clone ID: TF_uC-zmflteosinte93b03b1
ggaccggccggaagcccgggcgacccacgcgccgttcttcccaaacaancccccacnnncnncgaggcgaggagagcgagaaaaacagggcaccggcagcgacgatgacggggcgcggcaagggcggcaaaggaccgggcaagggcggagcaaagcgccaccggaaggtgcgacgagacaacatccagggcatcaccaagcccgcgatccgcaggctggcacggaggggcggcgagaagcgcaaaacggggcataactacgaggagacccgcggcgcccccaagaacttcctcgagaaacgacatccgcgacgccgacacctacaccgagcacgcacgccgcaagactgataccgccaaggacagcgactacgcgcccaagcgccagggccgaacccccaacggcatcggag

SEQ ID NO: 1317 - DNA, 313 bp, Zea mays
  Clone ID: TF_LIB3150-033-Q1-N1-C6
gcaaagcaaagcgctagccttcctactgtcccgatggcccgcacgaagcagacggccaggaagttcactggcggcaaggcgcctatgaagcacctggccactaaggccgctcgcaagtttgccacggctaccggctgagtgaagaagccccaccgtttccgtcccgacaccgtcgagctcctggagatccgcatgtaccagaagagcacagatctgctgattcacaagctgccgttccagcatcatgtgcgtgagatcgcccaggatttcaagaccgaccttcgcttgcagagctgcgtcgtcgccgcgctga

SEQ ID NO: 1318 - DNA, 408 bp, Zea mays
  unsure (1)..(408): unsure at all n locations
  Clone ID: TF_LIB4730-060-R1-K1-F3
acccgcaccccacancactcanccacagcncgcagccgnannccngncncggaggcgcgctcgccgcncacgaggcccgcacgaagcaaacagcaaggaagncgaccggcggcaaggccccccggaagcagcnggccacnaaggctgcgcgcaagncggccccggccaccggcggcgngaagaagccccaccgcgnccgccccggcaccggcgggcgccgcgaganccgcaaggaccagaagagcacngagcngcncaaccgcaagcnccccnnccagcgccncgnccgcgagaacgcgcaggacnncaagacngancngaggnnccagacccccgccgncgcggcgcngcaggaggccgccgaggcgnaccnggnggggcncnacgaggacaccaaccnnagcgccc

SEQ ID NO: 1319 - DNA, 745 bp, Zea mays
  unsure (1)..(745): unsure at all n locations
  Clone ID: TF_LIB4729-057-R1-K1-C7
gcaccaccgacgcgccgcccaaaccctaggcgtcgacgctcgacgacgttcgccatggttcgcacgtcaacacgacccacctcctgtatcacgtcgaatggcacctcacaagggcagacactggataaaccggacgacaccaacgggcagtcggcctgtaccgcaccggtcattgccgggcgccgcacggaatccagagctccggacgatcggcgcatggctgtcacacggaccagaggcttgctagtctctcgcagacaagccggcatgcgcctacgctacgcttaagcaggggcgcgcgaccacgcagacgtgtgggcactggctgcggtacctacctcgccgtggctctgaagcacctcgtcgccgagggtgtgacccaccgagccaaccagggaaaggacaacaacatgagccgcatcatgccgcagccatgtgctcctgaagatccgaacgacgaggagctcgggaagctgatgaacgtcctcaccatcgcgcacggcggcgtgctccccaacatccactgcgtgctcctgcccaagaaggcgcgggacaaggtggacagcggcggcagcaaggagcccaagttccccaagaagggcgccaagtaccccaagaaggcttagaaagtagggtcttcatttgcgctgtgtgctgtagcatgttcgtgtctagatctgtggatgggatgtgtcatgctttagtatcgnccttgtgctctattgtatgttcgtcttcatcgaga

SEQ ID NO: 1320 - DNA, 388 bp, Zea mays
  Clone ID: TF_LIB3070-004-Q1-N1-G12
gcttgttctcttcgtgcccgacaagccaatcggagccgagatacggccatggactccaccggcaccggagcaaggggtaaggggaagaagggagcggccgtgcgcaaggtcagcggaccaaggcagaagtcggagtcgaggtccgtgaaggccgggctgctgctacccgtcagtcgcatcgaccgcaactggagaaagggccttaaccacaaggggttgggagccgtgcccacgatttacctaacggttgacctgaattccttggcgctgatgttcctgaagctagctgttaaggctaccggggccaccaggaaacccggatttattccgcgccacgtgctcctggcaacccgaaccaacaggaagctcgagaagctgttgggcggct

SEQ ID NO: 1321 - DNA, 500 bp, Zea mays
  Clone ID: TF_jC-zmshLIB3569P023a05a1
ggggatgacatcaataacgattcaaagcttcaaacagccaaacccacagttaagtttggatacccgttcaacaacccggggatatatcacgattattaagtagtcctaaaaggggtggataaaaaactccaaaccccccaacagccaacagtttgcccatgcatatgctactggggttacagtcaaacaggccaaggacagtttactaaatcattttttcacaaaacttacagggggagagaggggaacacccaaaacgagcgcagagtttttcctcccgtcgacagaattacccccttttgccacggatcctttttgccaactgaatgtccttgggcatgatggtcacccccttggcatggatcccccacaaattggtttcttcgaaaaaaccaaccaggtaggcctttgctgcctcctgcaaaacaagcacggcatggctctggaagcccaaatccgtcttgaaatcctgagcaatctccctgacaagcctttggaac

SEQ ID NO: 1322 - DNA, 439 bp, Zea mays
  Clone ID: TF_LIB4730-112-A1-K1-A4
gcgcggagctgctcatccgcaagctccccttccagcgcctggtccgagagatcgcgcaggacttcaagaccgacctccgcttccagtcctccgccgtcgccgcgctgcaggaggccgcggaggcctacctcgtcgggctcttcgaggacaccaacctctgcgccatcgcacgccaggcgcgtcaacatcatgcccaaggacatccagctcgcccgccgcatccgcggggagcgcgcttaagcgtttacggttgattgtcactactgtagatgtgtaggctatgttctcgccatgctctaggtctgtttccctcttatctgtcattttggtttcatcctgaacggtgaagcgtgggcaagagctatcggtgcctgcctgagaactggagtgatctattggcgccacaagaataaaaaaactggcggccctggaagctcca

SEQ ID NO: 1323 - DNA, 280 bp, Zea mays
  unsure (1)..(280): unsure at all n locations
  Clone ID: TF_700051888H1
gcatccgcaggctctcgagctctagtccatcccctcgatctcgtagcgcacagcagcagtcaggcggccatggacgccagcgcagcgatagccggcgggaaagcgaagaacggcgcggccgggcgcaaggccggcgggccgaggaagaagtcggtgacgaggtccgtcaaggccgggctgcagttcaacgtcggccgcatcgtgcggtacctgaagaacggccggtacgcgcagcgntcggcacaggcgcacccgtctacatggccgccgtcctcgagta

SEQ ID NO: 1324 - DNA, 240 bp, Zea mays
  unsure (1)..(240): unsure at all n locations
  Clone ID: TF_LIB3180-060-P2-M1-H6
attccctttttacccactctgttttactccaccaccgccataccancgcgccgagctattaaaaagaggtcggcgggcnaaagagtantctcagacgagaagaggtgaatatgagttccggcggcggcaggggcaagcccaaggggtccaaggctgtgtctcggtcgaccaaagctgggctgcagttccccgtcggccgtatcgcgcgctacctcaaggccggcaagtactccgagcgcg

SEQ ID NO: 1325 - DNA, 319 bp, Zea mays
  Clone ID: TF_LIB3279-051-P1-K1-C7
cagccatggacttgagctgagcaggcggtaaggagaagaagggcacggacgggcgcaaggccggctggccgacaaaaactcggtgtcgcggtcctgcagggccgggctgcagttccccgttagacgtgttgggcggtacttcataatggggcgattcgcgtaccgtgtaggcactggtgcctacgtatacctcgccggcgtactgtagtacctagaaggcgacgtacttgatctcgacggctacgctgtaattgacaacgagaatacgcgcatgatcccgcgccacgtgctcttctccatccgcaacgacgaggagatc

SEQ ID NO: 1326 - DNA, 464 bp, Zea mays
  unsure (1)..(464): unsure at all n locations
  Clone ID: TF_LIB3279-180-Q1-K6-D12
gggggggggccaaaaaagaagccagcgggagaagaagccggcggccgaggagaaggcggagaagacgaccgcaggnaagaagcccaagnccgagaagcgccngcccgccncgaagncctccggcaaggagggcggcaagaagagagggggggaggggggctttcctctttttggagaccnacaaaancnacancgncaggggggggaggcaggngcaccccgacaccggcancnccnccaaggccangnccancangaaccccnncancaacgacaccnncgagaagcncgccggcgaggccgcgaagcncgcccggggcaacaagaggcccaccancaccncccgcgagaaccagaccgccgngcgccgcgnccncccaggagagcgcgccaaacacgccgncnccgagggaaccaaggccgncaccaaggncaccagcaanggagcagcccccagcggccac

SEQ ID NO: 1327 - DNA, 467 bp, Zea mays
  Clone ID: TF_LIB4071-010-Q1-N1-D9
agctccttgttaaggactaggcgcacggaaggactggatctcacgggaggagatggtaggcttgttggtatagcgcgcgagctaggcggcctgagcagcaagcttctcaaagatatcgttaatgaaggagttcatgatggacatgggcttggaggagatgccaacgtccgggtgcacctgcttcagcacctagaaaatgaagatcttgaaggtctccaacgctcttcttgcccttcttattgcccctcttgccctcgccgccttacttggcaaagagacttgccagcggagacccggtactccgacttcagcttcttcccggtgggcgccttatcggaagcggtctccttctgcgccgactactacaacgcgagtctctaataggacatgggcgccatagatgcaaggcgagatggggattcggctgcgaacggaggatcggatggcaagaaatgcgaggagacgcc

SEQ ID NO: 1328 - DNA, 267 bp, Zea mays
  Clone ID: TF_LIB3607-024-Q6-K6-H11
cgtgggcggagcctcccgctgtgcggggggacacaaagataatgatccgaaagctgccgttccagcgcctggtgcgtgagatcgcccaggacttcaagaccgaccttcgtttccagagctccgccgtcgccgctctttttttggcgtccgaggcctaccttgtggggggtggggggggacacctatctctgcgccattcacgcctagcgcgttaccattatgcccaaggacatgtcatttgcccgccggatccgtgtggtgagggcc

SEQ ID NO: 1329 - DNA, 328 bp, Zea mays
  Clone ID: TF_LIB3236-043-P1-N1-A7
ggggagcacacataaggggcgatttccattgctgacaacaaagagggtggcatggtgtgagacattgttgatcaatgcaccactccttgcaaacgacccgaccattagtacaaacttgcgagaagagcctgccccacgggccacggtctatccggccggccgtctaagctccctccccaaggatgcggcgggcaagctggatttccttgggcatgatagaaacccgcctggcgtggatggcacaaaggttggtttcctcaaacaggccggccaggtatgcctcggcggccttctgcagcgcggtgacgggggatgaatggaaacgggg

SEQ ID NO: 1330 - DNA, 384 bp, Zea mays
  Clone ID: TF_jC-zmXLIB3526P099bg02a1
ggagcgccttagtattacccatggtcgtgaagcggaacatgttaaaatgttaaaaagggcgcggtcggtttttatgtttttttttcgacgaaaaagacggaaaaacagccctccagggccagtctgctaatacccgtcaaccgcgaaaggggggacctcaaaaagggccggtacccgcattgtttatgcaaggaggcccccggatacctcgacgacggcctggagtacctcggggacaaggtgctcgagctcgccgacaacgcggcaagggacaacaagaagacgcgcatcatcctgcgctaagtgctgctcggcatccgcaacgacgaggaggtaggtaagctgctggccggcataaccatcgcccacggcggcgtgctcccc

SEQ ID NO: 1331 - DNA, 349 bp, Zea mays
  Clone ID: TF_700572124H1
cggcatatctgctcgcatttccttgcaaccgattgccttcagccgtcccaacccacgaccgatggcgctctacgacgataagaagcccgcggcgcataatccggcagattatgaccccgcggcggtgaacacgaccgccgggaacaagcccaaggcggacaagcggatccccggtgtcaagtccgccggcaaggaccgcggcgatggcaatcgtggcgagacgaagtgctagaagatcgtggagacgtgcaagatctacatcttcaaggtgctgaagcaggtgcagccggacatcggcatctcctccaaggacatgtccatcatggactccttcatcaacgacatcttc

SEQ ID NO: 1332 - DNA, 343 bp, Zea mays
  Clone ID: TF_LIB3078-007-Q1-K1-F11
cccacgcgtccgtccacgcgtccgcggacgcgagtgcggtcccgccatccaaccagaggggaagttgagcacacgagcataggtagaagagagcagacgatgatggctcgtacgaagcacaccgcccggaagtccacggtaggcaaggcccccagcatgcagctcgccaccaaggcggcgaggaagtctgcgccgacgaccggcggcgtgaataagccccacaggttcaagcccggaacagtgtcgctgcgcgagatcctcatgtaccagaagagcacggtgctgctgatccggaagctgcccttgcagcgcctggtgcgcgagatcgcgcatgacttcaaga

SEQ ID NO: 1333 - DNA, 353 bp, Zea mays
  Clone ID: TF_LIB3088-006-Q1-K1-F10
gttctagatcgcgagcggtcgcccttttttttttttttttttttttttttttttttgttttgttttttttttgggggggccggcaagcttgcgcgctacaacaagaagcccaccatcaccttccgcgagatccaaacctccgtgcgcctcgtgctccccggggagctcgtcaagcacgccgtttttgagggcaccaaggccgtcaccaagttcaccttcttctaggcttgcacgctcgccctttgtaggcttctcttgggttgatgttccccttgagttgtaactagatgttgcttggttatttgtcggcgctgctcttcttttgtaagaactgcgtcatgtaacccaccaag

SEQ ID NO: 1334 - DNA, 443 bp, Zea mays
  Clone ID: TF_LIB4730-038-R1-K1-A2
gcgtcttcgtactcgcctatctccgcgacccaaaggggtcccccttctcccattcttctctcatttctcaccaccggcgccgataccccctttcgacaacaccatgagggagtgcatctcgatccacatcgggcaggccgggatgcaggagggaaacccctgctgcgagccgtactgacggaagcatgggagggcgggcgatgcaagaataccggcaggaagagcgaggggacgtacaagatctacattttcaaggtgctgaagcaggtgcacccggacatcggcatctcctccaaggccatgtgcatgatgaactacttcatcaacgacatcttcaagaagctggccggcgagggcgacaagcttgagcgctacaacaagaagccgaccatcacgtaccgggagatccagacctacgagcgtctcgtgctccccgctgagct

SEQ ID NO: 1335 - DNA, 674 bp, Zea mays
  Clone ID: TF_LIB4746-033-R2-K1-C10
cattgggtacctcgaggccggccggggaatcgttgtcctcaatttctgcacgtccagggacggaagacatcgagcatcaacgagatgagaacatgcgtcctacgaagccgaccgccggagagttcagcggaggctgggccccgcgaccgaagctcgtcaccgaggcgccgaggaaggaagcgccgactaccgacgctgaagagaagccccacctgcacaggccaggtacggtggctgtgctcgaaatccacaagtaccatagcaaaaccgaactggtgatccgataggtgcccttccaggaactcgggcagagaatcgctcatgacttcaagacggatgtgaggttccagagccacgccgtcctggccctccaagaatccaccgaggcctacctcgactgtctgttcaatgacaccaacctctgtgccatccacggtgagcgcgtcaccatcctgcccaaatgacatccacctcgccttgcacgatccgaagataacgagtgcatgagtatctcacgcccggccccatggcaagaacatggatggatggagagcaatttgtaactttatgctgatagttcgatgttaaacggcgcgggaagacgcatcgaaaaacggctatactcgtgtattatgtgcaggagaacttgtatgccgcttcgtcccgaagcgaac

SEQ ID NO: 1336 - DNA, 440 bp, Zea mays
  unsure (1)..(440): unsure at all n locations
  Clone ID: TF_LIB3600-054-Q2-K6-B9
ccccgcgtccgctccgccgtcgcggcgctgcaggaggccgccgaggcgtacctggtggggctcttcgaggacaccaacctttgcgccatccacgccaagcgcgtcactatcatgcccaaggacatccagctcgcgcggcgcatcaggggcgagagggcttgagcgcccgtcgtgctgctcgttgttgtagtgttactagaagtagatggtggcattcgtttcgtggcttccttatcctgtaggagtaatgttctagatgtcttggcttcagtgcaatggactgtgattgctcatttctgaaatttatcaatgaacttgttcttgcaaaaaaaaaaaaaaaaaaaaaaaaaaaaaaaaaaaaaaaaaaaaaaaaaaaaaaaaaaaaaaaaaaaaaaaaaaaaaaaaaaaaaaaaaaaaaaaaaaaaaaanggggggggccg

SEQ ID NO: 1337 - DNA, 440 bp, Zea mays
  unsure (1)..(440): unsure at all n locations
  Clone ID: TF_LIB4729-090-Q1-K1-H12
cggggcgacacgctccagcgctcccccgcacctccgctcccacaccgccgccccgcacgaaccacacggcgcgcaagtccaccggnggcaaggcgccgcggaaccagctggcgaccaaggcagcgcgcaagtcgcccccggcgaccggnggcgccgaagaagccgcaccgcttccgcccgggcaccgtggcgctccgcgagatccgcaaggaccagaagagcacggagctgctcatccgcaagctccccttccagcgcctggtccgcgagatcgcgcaggacttcaagaccgacctccgcttccagaactccgccggcgccgagctgcaggaggacgcggaggcctacctcgcccgcctcttccaggacaccaaacctctgtgccatccacgataaacgcgacacccatacactgcccacggacatccagctcgcccgcc

SEQ ID NO: 1338 - DNA, 614 bp, Zea mays
  Clone ID: TF_LIB3596-044-Q6-K6-B10
ctttcttctcaaaccaacctagccattctccacagtctgtcatctggcgagtcctggcctctcctatctccgccagtatggcacccaaggcgtatatgaagcctgcggccaacaagcccgctggaggaggagcccccgacaaactaagcgctttaatgctccggcggggtaacagcccatggccgagaagtgccttccggcgggcaagtccaacgagggcgtgcagggcaagacggggaaaaagcaagcgaagaagtccgcggagacctacaagatctacatgttcaacgtgctgaagcaggtgcaccccgtcatcggcatctcgtccaaggtccatgtccatcatgaactccttcatctactacatcttcgagaagctcgcggccgagtccgccaagctggcgcgctacaacaagaagcccaccatcacctcccacgagatccatacctcggtgcgcctcatcctccccgaggagctcgccatgcacgctcgtctacgaggcactaacgccgttacgaatttcacctcgctctgaagatccttctaatggtcatgtgggcgttaacggtaggcgcggctgaacttatgtgatactgctagcgatggatgatga

SEQ ID NO: 1339 - DNA, 575 bp, Zea mays
  Clone ID: TF_LIB3600-020-Q6-K6-G8
atccccgcggggggcgagccgacctatcgtcctgtcgtggaggaagcaatggcggtccgtggcaaggcgattggcgctggtgccgctgaagaaggcaacgtcaaggagctccaagctgggctgcagtttcccgtgcggcagagatcgcctcggatcctcaagggcgggggggacgccaagcgcgtgggcaccggcgcccctgtctacctcgcagatggcctggagtacctcgccgatgaggtcctggagcttgctgggaacccaatgagggataacaagaagacccgcatcgtgcctcgtgacatgcaactcgccgtgcgcaacgacgaggagctgaccatatctgcttggtggtgccaccatctggagcggtggcgttatgcccaacatccaccaccacctcctacccaaaaaggctggctcgatcaaagcttacaccggcactaacgatgacaactgatactgcccactggagaatgcattcaataccggcttgtttcctaagtttagcacgcacctacacggcatgtctttgatagctctatgtgtttgacaatgacaatagtttctttctt

SEQ ID NO: 1340 - DNA, 450 bp, Zea mays
  Clone ID: TF_LIB3355-036-P1-K1-E9
tggtacgcctgcagcgctagccggtcccgaatcccagtttcgacccacacccacgcgttcgtatccggacaacaaccaaaaagcacgttgccccgccgcgcagaggaagaagagagcagaggaggatggctcgtacgaagcaaaccgcccgcaagtccacgggaggcaaggccccccgcaagcagctcgccaccaaggcggcgaggaagtcggcgccgacgaccggcggcgtgaagaagccccacaggttcaggcccggaaccgtggcgctgcgcgagatccgcacgtaccagaagagcacggagctgctgatccgtaagctgcccttccagcgcctggtgcgcgagatcgcgcaggactttaagacagaccttcggttccagagccacgccgtgctggcgctccatgagggccgcgaggcctaccttgtaggcctgttcgaggacacca

SEQ ID NO: 1341 - DNA, 440 bp, Zea mays
  Clone ID: TF_LIB3067-035-Q1-K1-C2
cccacgcgttcgtccacgcgttcggccacgcgtccgttcacgcgtccggcaagtaccagaagagcacggagctgctcatccgcaagttgcccttccagcgccttgttcgtgagatcgcgcaggacttcaagaccgatctccgctttcagtcctccgccgtcgccgcgctgcaggaggccggcgaggcctacctcgtggggctctttgaggacactaacctctgcgccattcacgccaagcgcgtcaccatcatgcccaaggacattcagctcgcgcgccgtattaggggccagagggcctgagcgaggcgaggctctcttaccgtaggcggcgttcgtgttgctttcggcctgcttggaagacttgtgcttctcttgggttactttttggtggcatttggcattttggtaccatagtgctttgtcttagtatcttagggg

SEQ ID NO: 1342 - DNA, 644 bp, Zea mays
  unsure (1)..(644): unsure at all n locations
  Clone ID: TF_LIB4975-058-Q1-K1-C4
ngactcgcaatcttcaatctccccagcaatccctagcagaagccttccatcctcactcgctcgatggcccgcacgaagcagacggcgaggaagtccaccggcggcaaggcgccgaggaagcagttggcgactaaggcggcccgcaagtctgcccctgcgaccggcggagttaagaagccccaccgcttccgccccggtaccgtcgcgctccgggagatccgcaagtaccagaagagcacagagctgctgatccgcaagctgccgtcccagcgcctggtgcgggagatcgcgcaggacttcaagaccgacctacgcttccagagctccgctgtctccgcgctgcaggaggcggctgaggctaccttgtcggtctcttcgaggacaccaacctctgcgccatccacgccaagcgcgtcaccatcatgcccaaggacatccagcttgcccgccgcatccngtggggagagggcctaagcatcgtatattctgtcatcagtgcccgatcagaagatgtagagnatgtgctgggttctggtagttttgggttactgtcgaatcatcgaggtaagttgggttgttcactggctgtaacttattatcatgatgcatatgaaatggcaatgaacttatgttatcagttctcg

SEQ ID NO: 1343 - DNA, 712 bp, Zea mays
  Clone ID: TF_ZmC114_19
aaaaaggcctcgcgggtcgcaaaccgctctctgttgatttgggatttgggaggcgctcgagttttcaggtaaaccatagtttagtgaccaatggctcgtactaagcaaactgctcgcaagtccactggagggaaggctcctaggaagcaacttgccaccaaggctgctcgtaagtctgcacccacaactgggggagtaaagaagcctcatcgttaccgccctggaactgttgctcttcggtgggtgacacatgattcttttgattgtttactgtttattacacttcaaataatatgacaattgttctccctgactttgcagtgaaatccgcaagtatcagaagagcactgacctgctcataaggaagcttccgttccagaggcttgtcagggagattgcccaggatttcaagactgatcttcgtttccagagccatgcggtgcttgcgctgcaggaggctgcggaggcgtacctggtgggtctattcgaggacactaatctgtgcgccatccatgccaagcgcgtgaccatcatgcccaaggacattcagctggctaggaggatccgtggtgaaagggcctagattctctgtttacggctactgggagtggctccgtagtatggtttgcatctgttcgatgcttgcttttgtggaagtttacatttgtgggtgttcgaattcgtaatattcatccgtagtggacaagtggta

SEQ ID NO: 1344 - DNA, 558 bp, Zea mays
  Clone ID: TF_LIB3597-054-Q1-K6-A2
cccgggtcttctccctacatcacacctcgtgcaacgcaaagcgctagccttgctactgtcccgatggcccgcacgaagcagaggggaggaagtccacttggcggcaagggcgccaaggcaagcagctggccaccaagcggcgcgcaagtctgtccccggcgtaccggcgggagtgacagaagccccaccgtttccgccccggcaccggcgcgctccgggagatccgcacgtaccagaagagcacggagctgctgatccgcaagctgccgttccagcgcctggtgcgtgagatcgcccaggacttcaagaccgaccttcgcttccagagctcccccgtcgccgcgctgcaggaggcgttcgaggcctacctcgtcggtctcttcgaagacaccaacctctgcgccattcacgccaagcgcgtaaccatcatgcccaaggacatccagctcgcccgtcgtatccgtgtggagagggcctatgcgtcgcggcggcggacgtctaagtagtattcccagtttctgtcatcaccgtctggctagaaggtgtacaagatgtgcc

SEQ ID NO: 1345 - DNA, 470 bp, Zea mays
  Clone ID: TF_uC-zmroteosinte048a10b1
agctttttcaccacagcttctcaccaccgttaccttggatggcacccaaggcggaaaagaagccggtggcgaagaagcccgcagaggaggagcccgcgacagagaaggcggagaaggccccggcggggaagaagcccaaggtcgagaagcgcctcccggcgggcaagtctgccggtaaggatggcggcgagggcaagaaggggaaaaagaaggcaaagaagtccgtggagacctacaagatctacatcttcaaggtgctgaagcaggtgcaccccgacatcggcatctcgtccaaggccatgtccatcatgaactccttcatcaacgacatcttcgagaagctcgcggccgagtccgccaagctggcgcgctataacaagaagcccaccgtcaccttccgcgagatccaaacctcggtgcgcctcgttctccccggcgagcttgccaagcacgccgtctccgagggcacc

SEQ ID NO: 1346 - DNA, 498 bp, Zea mays
  Clone ID: TF_jC-zmXLIB3526088dc05b1
cgagtctccagccaaccgcatccagtccacccctatccccttcgaccccgacaaccccgattcccgacccgttggcccccaaggccgaaaaaaacccaccggaaaaaaagccggcggccgaggagaaggcggaaaaaacgaccgcaggtaaaaagcccaagtccgagaagcgcctgcccgcctcgaagtcctccggcaaggagggcggcgagaagaaggggaagaagaaggccaagaagagcgtggagacctacaaaatctacatcttcaaggtcctgaagcaggtgcaccccgacatcggcatctcctccaaggccatgtccatcatgaactccttcatcaacgacatcttcgagaagctcgccggcgaggccgctaagctcgcccggtacaacaagaagcccaccatcacctcccgcgagatccagacctccgtgcgcctcgtcctcccaggagagctcgccaaacacgccgtctccgagggaaccaaggccgtca

SEQ ID NO: 1347 - DNA, 524 bp, Zea mays
  Clone ID: TF_ZmC653_30
tccggatccacgctcgcatccgatttccaatttcaaatccttcgatcgcgcaagtcggctccggccaccggcggcgtgaagaagccgcacaggttccgccccggcaccgtcgctctccgcgagatccgcaagtaccagaagagcacggagctgctcatccggaagctgcccttccagcggctggtgcgtgagatcgcgcaagacttcaagaccgaccttcggttccagtcctccgctgtcgccgcgctgcaggaggccgccgaggcgtatctggtgggtctctttgaggacaccaacctctgcgccatccacgccaagagggtcaccatcatgcccaaggacatccagctcgcgcgccgcatcaggggcgagagggcctgattgctgctctgtcttcctgtttctgtaatgtctgaactaggcgatggactctatcgcttcttgtcctgcaatcgtgtaccgatgttcttggcaaatcaatttggctgttatgaatgcaaaaaaaaaaaaaaaaaaggccccta

SEQ ID NO: 1348 - DNA, 338 bp, Zea mays
  Clone ID: TF_LIB3150-013-Q1-N1-B10
aaaggctcctcccgaccgcaacgcccgtgatctacctcgaccccgacatccccgacccgatggcgcccaacgcggagaacaagccggcggataagaagccggcggccgaggagaaggcggagaagacgaccgcacggaagaagcccaaggccgagaagcggctgcccgagtgcaagtccttcggcaaggagggcggccagaagaacgggaagaagaacgccaacaagagcgtgcagacctacaagatctacatcttcaaggagctgaatcacgtgcaccccgacatcggcatatgctacaaggccatgtacatcatgaactccttcatcaacgacatc

SEQ ID NO: 1349 - DNA, 542 bp, Zea mays
  unsure (1)..(542): unsure at all n locations
  Clone ID: TF_LIB3150-013-Q1-N1-B10.F2
aaggctcctcccgaccgcaacgcccgtgatctcacctcgaccccgacatccccgaacccgatggcgccccaaggcggcgcaaaaagccagcggagaagaagccggcggccgaagagaaggcggaaaagacgaccgcaggngaaaaagcccagggccgagaagcggctgcccgagtccaagtcctccggcaaggagggcggcgagaagaaggggaagaagaaggccaacaagagcgtggagacctacaagatctacatcttcaaggtgctgaagcaggtgcaccccgacatcggaatatgctccaaggccatgtccatcatgaactccttcatcaacgacatctttgagaagctggccggtgaggccggcaagctggcgcggtacaacaagaagcccaccatcacgtgccgcgagatccagacctccgtgcgcctagtcctccccggagagctcgccaagaacgccgtctccgagggaatccaaggcgtcaccaagttcaccaccaactgaccgcgctgcgggatccgcggatctgttagaag

SEQ ID NO: 1350 - DNA, 648 bp, Zea mays
  Clone ID: TF_LIB4979-052-R1-K1-E6
accgcaatcttcaatctccccagaaatccctagctgaatccttccatcctcactcgctcgatggcccgcacgaagcatacgggcgtaggaagtccaccggaggcaaggagccgaggaagcagttggcgactaaaggggcccgcaagtctgcccctgcgaccggcggagttaagaagccccaccgcttccgccccggtaccgtcgagctccgggagatccgcatgtaccagaagagcacagagctgctgatccgcaagctgccgttccagcggctggtgcgtgagatcgcgcaggacttcaagatcgacctacgcttccagagctccgctgtctccgcgctgcaggaggcggatgaggactaccttgtcggtctcttcgaggacaccaacctctgcgccatccacgccaagcgcgtcaccgtcatgcccaaggacatccaggttgcccgccggatccgtggggagagggcctaagcatcgtatattctgtcctcagagcccgatcagaagatgtacagatgtgctgggatctgtagtctgggttactgtcggatcatcgagttagttgattgttcactgctgtaagttattatcatgatgcatatgaaatgggaatgaactatgttatcagttctcgaaaaagaaaaca

SEQ ID NO: 1351 - DNA, 697 bp, Zea mays
  unsure (1)..(697): unsure at all n locations
  Clone ID: TF_LIB5045-063-Q1-K1-C9
gacacagcaatcttcaatctcccgagcaacccctagcagaagcctccagcaaagcaaagctctagcccttccattctcactcgctcgatggcccgcacgaagcagacggcgaggaagtccaccggcggcaaggccccgaggaagcagctggcgactaaggcggcgcgcaaatctgcccctgcgaccggcggagtgaagaagccccaccgcttccgccccggcaccgtcgcgctccgggagatccgcaagtaccagaagagcacggagctgctgatccgcaagctgccgttccagcgcctggtgcgggagatcgcgcaggacttcaagaccgacctacgcttccaaagctccgctgtctccgcgctgcaggaggcggctgaggcctaccttgtcggtctcttcgaggataccaacctctgcgccatccacgccaagcgcgtcaccatcatgcccaaggacatccagcttgcccgccgcatccngcggggagagggcctaagcgtcatattctctgtcatcagtgcccgatcagaagatgtagagatgtgctgggtnntctgtagtttgggttactgtcgaatcatcgaaggtactgggttgttcactgctgtaacttaattatcatgatgcatatgaaatggcaatgangctctgttatcagttctcgaaaaaaaaaaaaaaaaaggcccctagggcc

SEQ ID NO: 1352 - DNA, 556 bp, Zea mays
  Clone ID: TF_LIB5116-040-A1-PF1-C2
actcctcctcccacctcccagtgaaacaccaccgcaccccacaatcccacggctctccccggcgaagtagcagcggcatccatggcccccaaggcggagaagaagccggtggcggagaaggccgagaagacgacggcagccaagaagaccaaggccgagaagcggccgccggcgtccaaggagggcggcgagaagaaggggaagaagaagtccaagaagagcgtggagacgtacaagatctacatcttcaaggtgctgaagcaggtgcacccggacatcggcatctcctccaaggccatgtccatcatgaactccttcatcaacgacattttcgagaagctcgccggcgagtcggccaagcttgcgaggtacaacaagaagcccaccatcacgtcccgggagatccagacctccgaccgcctcgtcctccccggcgagctcgccaagcacgccgtctccgagggcaccaaggctgtcaccaagttcacctcctcctaggctaggatggttttctgtaatagtcagctgttcagaccatgtcttcctgtaacttgtg

SEQ ID NO: 1353 - DNA, 653 bp, Zea mays
  Clone ID: TF_LIB5116-002-A1-PF1-D2
aactcagatcgccgccgcacccgatctccaagaacacaccaccaccagagccgccgacccccaatccccgatggcccgcacgaagcagacggcccgcaagtccaccggcggcaaggcgcccaggaagcagctcgccaccgaggctgctcgcaagtcggcgccggcgaccggcggcgtgaagaagccccaccgcttcaggccgggaaccgtcgccctccgtgagatccgcaagtaccagaagagcacggagctgctcatccgcaagctccccttccagcgtctggtgcgggagatcgcgcaggacttcaagaccgacctccgcttccagtcctccgccgtctctgcgctgcaggaggccgccgaggcgtacctggtggggctgttcgaggacaccaacctgtgcgccatccacgccaagcgcgtcaccatcatgcccaaggacatccagctcgcccgccgcatccgtggggagcgcgcctaggttcgtcctggtcgccggtaatgcttgctagctgttcttgtcgtgtgatcctggtgtgtgcctggtgcttctgtttgtcggtgtcgatatgatgtgtcatctggtcctatgtatggtgatggtcgaatgaaattgcaatggaaagttcagttatcgatctgatgctcgaacg

SEQ ID NO: 1354 - DNA, 668 bp, Zea mays
  unsure (1)..(668): unsure at all n locations
  Clone ID: TF_LIB5116-019-A1-PF1-F5
atcgcctctctctttctactactccagcccagtcaaacttctctcgacctcgaagcatcagccgccgcaccatggcccccaaggcagccgagaagaagccggtggagaagacccccgcgggcaagaagcccaaggcggagaagaaggtgccggcgtccaaggagggcggcgacaagaaggggaagaagaaggccaagaagagcgtggagacctacaagatctacatcttcaaggtgctcaagcaggtgcacccggacatcggcatctcctccaaggccatgtccatcatgaactccttcatcaacgacatcttcgagaagctcgccggcgagtccgccaagctcgcgcggtacaacaagaagcccaccatcacgtcccgggagattcagacctccgtccgcctcgtcctccccggcgagctcgccaagcacgccgtctccgagggcaccaaggccgtcaccaagttcacctcggcctagtttcctggtctgattcttgtgttcccttcctggtccttgtctgatgaattctgtaggtagctgtgttctgacagtgtcatgcgacattgtcatcttgtaacagagtttctgcttgtggntttgtggctgttattcggtctggttaaatagtcaacttcacctcatcctagtattctcatctaatgtggt

SEQ ID NO: 1355 - DNA, 629 bp, Zea mays
  Clone ID: TF_LIB5116-045-A1-PF1-H7
agctaccagcaccacacctctccccgtccaagtagcagcaaccaacggcatccatggcccccaaggcggagaagaagccggtggcggagaaggccgagaagaccacggcggggaagaagaccaaggccgagaagcggccaccagcgtccaaggagggcggcgagaagaaggggaagaagaagaacaagaagagcgtggagacgtacaagatctacatcttcaaggtgctgaagcaggtgcaccccgacatcggcatctcctccaaggccatgtccatcatgaactccttcatcaacgacatcttcgagaagctcgccggcgagtccgccaagctggcgcgctacaacaagaagcccaccatcacgtccagggagatccagacctccgtccgcctcgtcctccccggcgagctcgccaagcacgccgtctctgaggggaccaaggccgtcaccaagttcacctcctcttagatagcctgctcttgtgtcttctctgaatgtgttgacttctcgtggctgtttgatgaatccattgtactctgtagttagatgttcagaacgcaccattttgtaatttgcgaggacacaaatgtttcaggatttggaggaaatagtaatggtgttgctttg

SEQ ID NO: 1356 - DNA, 648 bp, Zea mays
  Clone ID: TF_LIB5116-047-A1-PF1-H1
ccgatccagcgcaacttccgccaacaccacaccccgacaatccccgtcgccgaagaagtagcaagcaagatggccggaaggaagggcggcgacaggaagaaggcggtgacacgctccgtcaaggccgggctccagttccccgtcggccgcatcgggcggtacctcaagaagggccgatacgcccagcgcgtcggatccggcgcccccgtctacctcgccgctgtcctcgagtacctcgccgccgaggtcctggagctcgccggcaacgcggccaaggacaacaagaagacccgcatcatcccgcgccacctgctgctcgccgtccgcaacgaccaggagctcggcaagctgctcgccggcgtcaccatcgcccacggcggcgtcatccccaacatcaacgccgtgctgctccccaagaagtcccccgccgccgccgagaaggaggccaagtcgcccaagaagaagacctccaccaagtcccccaagaagaagaccgccgccaccaaggagtaaccgcccccatagcctggccagtgttgcttagatccatttctcatggactaagatgagaccctgtatgtaatgcctgctagtctgtagtgcccgtcagattcgtcgagcaaggatgatattgtatctgtgatttct

SEQ ID NO: 1357 - DNA, 758 bp, Zea mays
  unsure (1)..(758): unsure at all n locations
  Clone ID: TF_ZmC644467_1
actcacccagagcattccaatccagcgccagcaccaccgccgccagctccacacctcgagagggacgcctcgtcgccggagaagcagcaagaagaagatggccggaaggaagggcggcgataggaagaaggcggtgacccgctccgtgaaggccgggctccagttccccgtgggccgcatcgggcgctacctcaagaagggccgctacgcgcagcgcgtcggctccggcgcccccgtctacctcgccgccgtcctcgagtacctcgccgccgaggtcctggagctggccggcaacgcggccaaggacaacaagaagacccgcatcatcccgcgccacctgctgctggccgtccgcaacgaccaggagctcggcaggctgctcgccggcgtcaccatcgcccacggcggcgtcatccccaacatcaactccgtgctgctccccaagaagtcccccgccgccgccgagaaggaggccaccaagtcgcccaagaagaagaccgccgccaagtcccccaagaagaagaccgcagccaccaaggagtagccgtccccgtccccatagcctagccagtgttgctgctctgttccatttctcatggacaagatgagtagtagtcgtttggttggcagatctgtatgtagtgcctggtagtctctagtgaccctttcctcagattcgtcgagcaaaagggtgggcattgtatctctgatttctgtgngaaatactatactanagatgcatccatctgaatcttagt

SEQ ID NO: 1358 - DNA, 1510 bp, Zea mays
  Clone ID: TF_ZmC369_149
gaggctggccggaacacagcgaacacatctcctcgcatttcttcccatcccccttcgcaacccaaaccccaactcgccccgcatcgatggcgcccaaggccgagaagaagcccgcggcgaagaagccggcggaggaggagcccgcggccgagaaggcgcccgccgggaagaagccgaaggcggagaagcgggtccccgctggcaagtccgctgccaaggagggcggtgagggcaagaggggcaagaagaagggcaagaagagcgtggagacctacaagatctacatcttcaaggtgctgaagcaggtgcacccggacattggcatctcctccaaggccatgtcgatcatgaactccttcattaacgatatcttcgagaagctcgctgctgaggccgccaagctcgcgcgctataacaagaagcccaccatcacatcccgtgagatccagacctccgtacgcctcgtccttcccggggagctcgccaagcacgccgtctccgagggcaccaaggccgtcaccaagttcacctcggcctaggctgcgcggccgccgcttgcaggattctctcctgtgttcacgtctcttgctgtagttaggtgctgctgcctgctggcttctatgtatgttgtctatctgtctgtagcaactgtgttatctgataggaccgtaatggtgcttattcaacccagctatatgtttctatgtgaaaaaaaaaaaaaaaaaaaaaaaaaaaaaaaaaaaaaaaaaaaaaaaaaaaaaaaaaaaaaaaaaaaaaccaccggcgaccacatctcctcgcatttcttcccatccgatccccccttcgcaaccaaaaccccaactcgccccgcatcgatggcgcccaaggccgagaagaaacccgcggcgaagaagccggcggaggaggagcccgcggccgagaaggcgcccgccgggaagaagccgaaggcggagaagcgggtccccgctggcaagtccgctgccaaggaaggcggcgagggcaagaggggcaagaagaagggcaagaagagcgtggagacctacaagatctacatcttcaaggtgctgaagcaggtgcacccggacattggcatctcctccaaggccatgtccatcatgaactccttcattaacgatatcttcgagaagctcgctgctgaggccgccaagctcgcgcgctataacaagaagcctaccatcacctcccgtgagatccagacctccgtgcgcctcgtccttcccggggagctcgccaagcacgccgtctccgagggcaccaaggccgtcaccaagttcacctcggcctaggctgcgcggccgccgcttgcaggattctctcctgtgttcacgtctcttgctgtagttaggtgctgctgcctgctggcttctatgtatgttatctatctgtctgtagcaactgtgttatctgataggaccgtaatggtgcttattcaacccagctatatgtttctatgcgaaaaaaaaaaaaaaaaaaggcccctagggcc

SEQ ID NO: 1359 - DNA, 371 bp, Zea mays
  unsure (1)..(371): unsure at all n locations
  Clone ID: TF_LIB3356-022-P1-K1-H9
ttcnaattccgattatcaatccagcataccctaccatccttttgcaaactcataggggggcccgatggcaccgagggcggataataaaccggcggcgaagaagcccgcagaggaggagcccgcggccccggcggagaaggctcccgctggaaagaatccgaaggcggagaagcggttcccggcgggaaaatccgccggcatggaaggcggtgttgacatgaaggggcggtagaaggccaagaagagcgtggagacgtacaatatctacatcttcaatgtgctgaagcaagtgcacccggacatcgtgatatccttcaaggccatgtccatcattaacttcatcaataacgacatcttctagaagctcggcg

SEQ ID NO: 1360 - DNA, 425 bp, Zea mays
  unsure (1)..(425): unsure at all n locations
  Clone ID: TF_LIB3227-024-P1-K1-G6
atcacatcgtatttcttcccatccgatcccgccttcgcaaccaaaaccacaacgggcgggttatcgattgctttcaaggcccaaaacaaacccttgctgacaaaaccggctgaggatgagcccgcggtctagaaggcgcccgcacgcaagaagccgatagccgagaatcgggtccccgctggcaagtccgctgccaaggaaggccctgagggcaagaggcgcaagaagaatggcaagaagagcgcggaaacctacaagatctacatcttcaacgtgctgaagcaagtgcacccggacattgccatntcctcccaggccatgtccatcatgaactccttcattaacgatatcttcgagaagctcgcttctgatgccggcaagctcgcgcgctataacaagaagcctaccatcaccttccggagatc

SEQ ID NO: 1361 - DNA, 1573 bp, Zea mays
  Clone ID: TF_ZmC2879_6
tcgcggacgcgtgggcggacgcgtgggcggacgcgtgggcggacgcgtgggggacattggtgcgctttctggtggtcacaccctgggaagatgccacaaggacaggtctggatttgagggagcctggacgtccaaccctttgatctttgacaactcttacttcaaggagcttctgagcggatagaaggaaggccttctgcagctaccaagtgacaaagccctcctctctgatccatccttccgtccacttgttgacaaatacgcatcggacgaggactctttctttgctgactacgccgaggcccacctgaagctttcagaattgggatttgctgaggcgtaacgaaccagaagagtgtggtggctgtcgccggtcgaccttgtgttttttttgtctgcttttctcttgaacgaagatgtgatgaactcagctgaagatgtagtgtgtatgttgtcatggtttatttttctattttatttatctatctataatatctatcggagaaggtttgatatgaagcggaaaaaaaaaaaaaaaaaaaaaaaaaaaaaaaaaaaaaaaaaaaaaaaaaaaaaaaaaaaaaaaaaaaaaaaaaaaaaaacccccgaaatcttaaatccccccagaaatcccaagaaaaagccttccatcctcactcgctcaagggcccgaacaaagaaaacggggagaaagcccaccgggggaaaggccccaagaaaaaagttggcaacaaagggggcccgaaagtttgcccctgcaaccgggggagtaaaaaagccccaccgtttccgccccggaaccgtcgcgctccggaaaatccgcaagaaccaaaaaagcacggagttgctgatccgaaagttgccgtcccagcccctggggcggaaaatcgcgcaggacttcaaaaccgacctacgtttccaaagctccgttgtctccccgctgaagaagggggttgaggccaacctgcccgggctcttctgcgtcagaaggttacaaatttgggcgccatccacgcaaaggggggggggggttagctttggcaatgagtacgcttgaaaagaaattccctgcatccagaccgtttggtatcaagtacaagtttcacttagaggtaagtgggacttgtttttcgttaatatatgccttgtgtttcgtttaaaggatcgtgggggggtggactaatttttaatagtcttttggatttaaatatctagtctagtttgggtaagtagtttctgtcgtctcaaattagtagtttcccagattggctttcttttggactttcttttgtctgtatttataaattctgaaagaaaaacaagtggtgaattaaattcttctgcaacatgcaggatgctgttgattgcccagaatgggttgttccattccatctcttcaaattattggcagaggaggtactggaggggttctattgcttcaacagtcctctgtgcagcctatatgcctcaccaatgcttgttacatattgtttgccaatgtttcacagtatgatctcgagctggttctgatgaagaactttcatgaatttgtacacgagtacttgcaaaaacc

SEQ ID NO: 1362 - DNA, 357 bp, Zea mays
  Clone ID: TF_LIB3227-014-P1-K1-B9
acatcttcaaggtgctcaagcaggtgcacccggtcattggcatctcgtccaaggggatgttcatcatgaactccttcatcaacgacatctacgataagctcgccgtctaggccgccaagctcgcccgctacaacatgaagcccaccatcacctcccggtagattccagacctcggtgcgcctcgtcctccccggtgagctcgccaagcacgccgtatcctaagggaccaaggcggttaccaagattacatcctcttagggtgccgtctcacgttgttactttcctgtctaattcttatatataggctcttacttgggtgtcttcttcaactaatgtataaatttgattataattgct

SEQ ID NO: 1363 - DNA, 467 bp, Zea mays
  unsure (1)..(467): unsure at all n locations
  Clone ID: TF_LIB4073-010-Q6-K1-H10
ccccgggctcgacccacgcgctccgacgatagccctttgntcctctgctcccggggaagcgagctcgcagcacaggccgcgagccatggcactccaccagccgctcggagcgggtaggggaagggcgaagaaggggagcggcccggacgcaagggtccggcgggccgagggaagaagtcagtgtncgagggtcggtgataggccccgggctccagttccccgtgcgggggggtgcggnngcgctacctgaagaagggccccgctacgcgcagnncgcgtcggcaccccggcgctcnnccgtctacctcnngccgccgtccctcgagtacccctcgccgctgaggttnctggagctcgccgggaacgccgccagggacaacaagaagacgcgcatcatcccccgccgcgtgctgctcgcgatccgcaacgacgaggagctcgggaagctgctgtccggtgtggccatt

SEQ ID NO: 1364 - DNA, 532 bp, Zea mays
  unsure (1)..(532): unsure at all n locations
  Clone ID: TF_LIB4740-141-A1-K1-E12
tgttgacgactacctccctggcgccgtacctgctgccgcctgctggccctttcgctgccgtgcctgccggcggtgaccgcgccggcggggtccgggtacggcgcggcgccgggcgtggcggcgctggcggaggcggccgtggcgtacgccacctcggagaccgtgccgcagcagtcggtcgacgagatctcgctgtcgctggccgtgctgcggcggcgcgcgccgctgcggctgctggtgttcgtgctggagacccactacgaggatgaagaacgcgatgatctgatccgcaagctggccttccatggactggtgcgcgagatcgcgcaggacttcaagatttacctccttttccccacccacgccgtgntggcgctccaggaggccgccgaggcctacctcgtaggaataaacaaggacaccaacctctgcgccatccacgctaagcgcgtcaccatcatgcccaaggacatccagctcgcccgccgcatccgtggcgagcgcgcgaacccatcatctccggggatctgat

SEQ ID NO: 1365 - DNA, 308 bp, Zea mays
  Clone ID: TF_700380613H1
ccatccgatccccccttcgcaaccaaaaccccaactcgccccgcatcgatcgctttctattttgagtttttatcttctgtgaagattgtggctgaggatgtgcccgctgccgataaggcgcccgccgggaagaagccgaagcgacgaagcgggtccccgctggtaagtccgctgccaaggaatgcggcgatggcaagaggggcaagaagaagggcaagaagagcgtggagacctacaagatctacatcttcaaggtgctgaagcaggtgcacccggacattggcatctcctccaaggccatgtccatc

SEQ ID NO: 1366 - DNA, 418 bp, Zea mays
  Clone ID: TF_ZmC119_816
gcacgaggttccccgtcggccgcatcgggcgctacctcaagaagggccgctacgcgcatcgtcccgcgccacgtgctgctggcgatccgcaacgacgaggagctcgggaagctgctgaccggcgtgaccatcgcccacggcggcgtgttgcccaacatcaacccggtcctgctgcccaagaagacggcggagaaggcggccagcggcgggagcaaggaggccaagtcgcccaagaaggccgccaagtcccccaagaaggcatagggtttggaggcggatccgatgttgtcatgtgtaggttgtaagcgggcaatgtgattggctgtgtatctgcttcgctcaagttgctttatgtcattcctaatggaataggaaatgccgtgtttcttaagaaaaaaaaaaaaaaaaaaggccccta

SEQ ID NO: 1367 - DNA, 439 bp, Zea mays
  Clone ID: TF_LIB4732-042-R1-K1-D11
acaccatataaaatacatacgaatcctacaattctgcccttgccgtcgtcatcctgtcctctgcatctacggtatgtagactgctccctcctcctctccgctctgaatggcccgaacgaaggatacgtcctccatagtcgaccgtgggcaaggcgccgcggaatgcaactggccactcaatgctgctggcaagtcggccccggacacgggcggcgtgaataagccgcaccgcttccgccccggcaccgtcgcgctccgcgagatccgcaagtaccagaagagcacggagctgctcatccgcaagctccccttccagcgcctcgtccgcgagatcgcgcaggacttcaagacggacctgcggttccagtcctcggccgtggcggcgctgcaggaggccgcggaggcgtacctggaggggatcttcaaggacaccaacctc

SEQ ID NO: 1368 - DNA, 545 bp, Zea mays
  unsure (1)..(545): unsure at all n locations
  Clone ID: TF_LIB4172-005-Q1-L1-A5
aattcggcacgaggccgcatcgtcgccctcaaattcgttccgtccaggcaaggaagaaatcgagcagccaaggagaggagaagacggcttcgtacgacagcagaccgcccgcaagtccaccggaggcaaggcccccgcgcaaagcagcttcgccactcaatggcggcgaaggatagtcttgcgcccgaccgaccggcggcgtgaagaagccccacaggtaccaggcccgggaaggtggctctgcgccgagaaccgcaagtacccagaagagcacggagcttgctgatccccgaagttgcccttccagcgcctggtccgtgagatcgctcaggacttcaagacggatctgcggttccaaagccacgccgtcctgccctcaaaggaaacccgccgagcctacctcgtcggcctgttcgaagacaccaacctctgcgccatccacgccaagcgcgtcaccatcatgcccaaagacatccagctcgcccgccgcatccgcggcgagcgcgcgtnaaggcgtatctcgcgcccggccccagtggcggcgg

SEQ ID NO: 1369 - DNA, 665 bp, Zea mays
  Clone ID: TF_LIB5026-032-Q1-XP1-D12
gccggccgggttcgggagaatagtcaagtaccccatttccaaggggtacctgttgaaaatcgtttcaacaaatccgtccaaaactttttaagaaaaatgaaaaagttttgaactcgaaagtttttccaaaagatgcctgctaaaaattgtttcaatctctcaccaaaacagataagaagtatatcactgaaaattactatccagccataggggtatatgaagagcgcaaattcctttataccccacccaaaactcgcaattccgcattcgttccaactcctgagcactttctcctcgtcccagacaagccaatcgaagccgagatacgaccatggactccaccggcaccggagcagggggtaaggggaagaagggagcggccggacgcaaggtcggtggtccaaggaagaagtcggtgtcgaggtccgtgaaggccgggctccagttccccgccagacgcatcgggcgctacttgaagaagggacgctacacgcagcgtgtcgataccggcgcccccgtatacctcgccgctgacctcgaatacctcaccgctgaggttctggagctcgccggtaatgctgccagggacaacaagaagactctggttattccgtgccacgagcttcttgagatccggaacgacaagtagctttgttaacctgttg

SEQ ID NO: 1370 - DNA, 445 bp, Zea mays
  Clone ID: TF_LIB3245-532-P1-K1-A1
cggacgcgtgggcaatctccccagctatccctagcagaagccttccatcctcaggcgctcgatggcccgcacgaagcagacggcgaggaagtccaccggcggcaaggcgccgaggaagcagctggcgactaaggcggcccgcaagtctgcccctgcgaccggcggagtgaagaagccccaccgctttcgccccggcaccgtcgcgctccgggagatccgcaagtaccagaagagcacggagctgctgatccgcaagctgccgttccagcgcctggtgcgggagatcgcgcaagacttcaagaccgacctacgcttccaaagctctgctgtcttcgcgctgcatgaaggcgctgatgcctaccttggttggcttcttcaggacaccaaacctttggcccttccagccaagcgcgtcaccatttatgcccaaagacattcagcttgc

SEQ ID NO: 1371 - DNA, 611 bp, Zea mays
  Clone ID: TF_LIB4185-042-R1-K1-H6
ttggggtaccgggcccccttctcgagtttttttttttttttttttttttttttttttttttttttttttttttttttttttttttttgcgaaaatagtatgccaaaattatatattgccctgctcaaatcaactttcaaatgacaaacattccatacagtcaaaaggcgccacggggcttaaggacctactaaaaaggagcttaggacgaggggaacttggggacggccttggggccctccgaaacggggtgcttggcgagctccccgggtaaaacgaggcggacggaggtctggatctcccgggaggggagggggggctttttgttgtagcgggcgaacttggccccctccccggcgagcttttcaaaaatgtcgttgatgaaagagttcatgatggacatggccttggaggaaatgccgatgtccgggtgcacctgcttcagcaccttgaaaatgtaaatcttggacgtctccacgctttttttggcctttttccgcccctttttggaaacaccgccttccttgccgggggattttcccgccgggagccgcttctccgccttcggtttcttcccagggggggccttctccgccggggccgcgggctcct

SEQ ID NO: 1372 - DNA, 1151 bp, Zea mays
  unsure (1)..(1151): unsure at all n locations
  Clone ID: TF_ZmC838_10
cacggcgccaacggagcggcacctacatcagccgcgccgccgcgctgcccagcaagtgcggcgtcgccctgccgtacaagatcagcaccaacgttaactgcaacacgtacgactgactacacacacgctcctgcatatatgccgtgttctctcgttccaatactgctctgcagctagattattaccattgcgcttgcgccggccgttctgtgtttctggactacaccgacgtgctgtaaccttgtttctctctctctgtttctctttgcaggattaattaagtgatgaggcgtcctgtgcgcgtccgggcgaggaatgcatgcatggcgctggcggagagtaataaaataatgctactggtattttaagctatatcgaggtgtgcctgtctctagtcatttattatggtgtttaggaatggtctacacagttcgtaacggtgtatcgtggatgcatgttgccgcgagcagagtacgtaggcatgaaccgatgtgtgcgcttctgtctgtttactctctctatgtagtaatgtgtgggtgctttgatccagatgtattcgctcgtgagtcgtggaagtagatcgtttcagtatcaaaaaaaaaaaaaaaaaaaaaaaaaaaaaaaaaaaaaaaaaaaaaaaaaaaaaaaaaaaaaaaaaaaaaaaaaaaaaaaaaaaaaggtaccccgcatcccacataattaatccacagttggaaggcggattcctgtctcgaatcctttttcgccgttccgagggcccgcacgaagcaaacagcagggaagtcgaccgggggaaaggccccccggaagcagttggccactaaggttgcgcgcaggtcggccccggccaccgggggggtgaaaaagccccaccgtttccgccccggaactgtcgcgctccgggagatccgcaagtaccaaaaaagcactgagctgttaatccgaaagctccccttccagggcctggtccgggaaatcgcgcaagacttaaagactgatctgaggttccagtcctccgccgtcgcggggctgaaggaggccgccgaggcgtacctgggggggctcttcgaggacaccaacctttgcgccatccacgccaagcgcgtaactatcatgcccaaggacatccagttcgcgcggngcataagggg

SEQ ID NO: 1373 - DNA, 677 bp, Zea mays
  Clone ID: TF_LIB4570-006-R1-K1-G2
ggccgggctagaccccgcatcgtcgccctcaaattcgttccgtccaggcaaggaagaaatcgagcagccaaggagaggagaagatggctcgtacgaagcagaccgcccgcaagtccaccggaggcaaggccccgcgcaagcagctcgccaccaaggttcgtctctacctacccgtaccgatctgctgttccgatcccctcgattgttcccgttgtaagacggtgctgacgcggcggcggttgttatttcgttgcaggcggcgaggaagtctgcgccgacgaccggcggcgtgaagaagccccacaggtacaggcccgggacggtggctctgcgcgagatccgcaagtaccagaagagcacggagctgctgatccggaagttgcccttccagcgcctggtccgtgagatcgctcaggacttcaagacggatctgcggttccagagccacgccgtcctggccctccaggaagccgccgaggcctacctcgtcggcctgttcgaggacaccaacctctgcgccatccacgccaagcgcgtcaccatcatgcccaaagacatccagctcgcccgccgcatccgcggcgagcgcgcgtaggcgtatctcgcgcccggccccagtggcggcggagggatggaggagggcaatttgtaaccttatgctgtttgttcgcttttag

SEQ ID NO: 1374 - DNA, 935 bp, Zea mays
  Clone ID: TF_ZmC369_101
cattgggtacctcgaggccggccggggccatcaccaatcagtcagtcacagctcacagcaaacaccgcgaagccgcccccgctcccaaacccgaccgagcaaagcgcaaagccccccaaccgcggatcaatccgcagcatcgatggcgcccaaggcggagaaaaagccggcggcgaagaagcccgcggaggaggagcccgcgaccgagaaggcggagaaggctccggcagggaagaagccgaaggcggagaaacgcctccccgcgggcaagtccggtgccggcgagggcaagaagggcaagaagaaagccaagaagagcgtggagacctacaagatctacatcttcaaggtgctcaagcaggtgcaccccgacatcggcatctcgtccaaggccatgtccatcatgaattccttcatcaacgacatcttcgagaagctcgccgcggaggccgccaagctcgcccgctacaacaagaagcccaccatcacctcccgcgagatccagacctccgtccgcctcgtcctacccggcgagctcgccaagcacgccgtctctgaaggcacaaaggcggtcaccaagttcacttcgtcttagattggttgccttccctctcgtttgtactggtgtctggtagtagatctcatctagttgggggtgctgttgctagtcggtcgtgggtccctttggtatgataggccctgttcaatgggtatgcaagtgattagtttgtatatggttgtagtagatctcgtttcagctgtgattcttattactgctatgctatagttgtagtgatctcgttcccatttcttgatgcagtcctatcaactatatggttgttttaaaaaaaaaaaaaaaaaaaaaaaaaaaaaaaaaaaaaaaaaaaaaaaaaaaaaaaaaaaaaaaaaaaagggcggccctcgcgatctagaac

SEQ ID NO: 1375 - DNA, 899 bp, Zea mays
  Clone ID: TF_ZmC369_148
cattgggtacctcgaggccggccgggccgggatcaccaatcagtcagtcacagctcacagcaaacaccgcgaagccgcccccgctcccaaacccgaccgagcaaagcgcaaagccccccaaccgcggatcaatccgcagcatcgatggcgcccaaggcggagaaaaagccggcggcgaagaagcccgcggaggaggagcccgcgaccgagaaggcggagaaggctccggcagggaagaagccgaaggcggagaaacgcctccccgcgggcaagtccggcgccggcgagggcaagaagggcaagaagaaagccaagaagagcgtggagacctacaagatctacatcttcaaggtgctcaagcaggtgcaccccgacatcggcatctcgtccaaggccatgtccatcatgaattccttcatcaacgacatcttcgagaagctcgccgcggaggccgccaagctcgcccgctacaacaagaagcccaccatcacctcccgcgagatccagacctccgtccgcctcgtcctacccggcgagctcgccaagcacgccgtctctgaaggcacaaaggcggtcaccaagttcacttcgtcttagattggttgccttccctctcgtttgtactggtgtctggtagtagatctcatctagttgggggtgctgttgctagtcggtcgtgggtccctttggtatgattggccctgttcaatgggtttgcaagtgattagtttgtacatggttgtagtagatctcgtttcagctgtgattctttattactgctatgctatagttgtagtgttctcgttcccatttcttgatgcagtcctatcaactatatggttgtttagttacatgttctttttttaacctacatccatcaccatcagtacggttttacc

SEQ ID NO: 1376 - DNA, 823 bp, Zea mays
  Clone ID: TF_ZmC369_50
aaacgtgcctagaaatcgaccgagcgaatccctcgcatcgcattcgcagcctttgctgcatcacaccaccgcgaaaccccagcagccgcatcgatggcgcccaaggcggagaagaagccggctgcgaagaagccagcggaggaggagcccgctgccgcgaaggccccggcggggaagaagcccaaggccgagaagcgcctcccggcggccaagtcgtccggcaaagaaggcggcgacaagaagggtaagaagaaggcgaagaagtcggtggagacctacaagatctacatcttcaaggtgctgaagcaggtccaccccgacatcggcatctcttccaaggccatgtccatcatgaactccttcatcaacgacatcttcgagaagctcgccggcgaggctgccaagcttgcgcgctacaacaagaagcccaccatcacctctcgggagattcaaacctctgtccgccttgtccttcccggcgagctcgccaagcacgcggtctccgagggcaccaaggccgtcaccaagttcaccagcaactgagcgcgctgcgggatccgcggatctgttagaagggttctttgctgtgtcctttccccagtcccccaccctacccgcctagtagctagcttgcctgctctataaatccggcgcgccggattgtaatggtcctcttagatttgatgtccctgttggggaatatagttgtatctctccgcctgctatttttctcattctttaggaaaatggaaatctggtcattttaaaagggagattactaggctcgtcgcaaattcgcggttaaaaaaaaaaaaaaaaaaac

SEQ ID NO: 1377 - DNA, 801 bp, Zea mays
  Clone ID: TF_ZmC369_62
aaaaaaaaaaaaaaaaaaaaaaaaaaaaaaaaaaaaaaaaaaaaaatcaccaatcagttagtcacagctcacagcaaacacggcgaagccggccccactcccaaacccgaccgagcaaagcgcaaagccccccaacctcggatcaatccgcagcatcgatggcgcccaaggcggagaaaaagccggcggctaagaagcccgccgaggaggagcccgcgaccgagaaggcggagaaggctccggcagggaagaagccgaaggcggagaagcgtctccccgcgggcaagtccggcgccggcgagggcaagaagggcaagaagaaggccaagaagagcgtggagacctacaagatctacatcttcaaggtgctcaagcaggtgcaccccgacatcggcatctcgtccaaggccatgtccatcatgaattccttcatcaacgacatcttcgagaagctcgccgcggaggccgccaagctcgcccgctacaacaagaagcccaccatcacctcccgcgagatccagacctccgtccgcctcgtcctccccggcgagctcgccaagcacgccgtctctgaaggcacaaaggcggtcaccaagttcacttcgtcttagataggttgccttccctctcgtttgtactggtgtctggtagtagatctcgtctagttgggggtgctgttgctagtcggtcgtgggcccctttggtgtgataggccctgtttaattggtttgcaagtgattagtttgtatatgggtggagtagatctcgtttcagctgtgattctttattactgctatgcta

SEQ ID NO: 1378 - DNA, 742 bp, Zea mays
  Clone ID: TF_ZmC369_68
atcaccaatcagttagtcacagctcacagcaaacaccgcgaagccggccccactcccaaacccgaccgagcaaagcgcaaagccccccaacctcggatcaatccgcagcatcgatggcgcccaaggcggagaaaaagccggcggctaagaagcccgccgaggaggagcccgcgaccgagaaggcggagaaggctccggcagggaagaagccgaaggcggagaagcgtctccccgcgggcaagtccggcgccggcgagggcaagaagggcaagaagaaggccaagaagagcgtggagacctacaagatctacatcttcaaggtgctcaagcaggtgcaccccgacatcggcatctcgtccaaggccatgtccatcatgaattccttcatcaacgacatcttcgagaagctcgccgcggaggccgccaagctcgcccgctacaacaagaagcccaccatcacctcccgcgagatccagacctccgtccgcctcgtcctccccggcgagctcgccaagcacgccgtctctgaaggcacaaaggcggtcaccaagttcacttcgtcttagataggctgccttccctctcgtttgtactggtgtctggtagtagatctagtttggggtgctgttgctagtcggtcgtgggcccctttggtgtgataggccctgtttaattggtttgcaagtgacacatttgagcaccaaactgttgtagtattcaagatgcaaattgcgcccactac

SEQ ID NO: 1379 - DNA, 778 bp, Zea mays
  Clone ID: TF_ZmC369_77
atcaccaatcagttaatcacagctcacagcaaacaccgcgaagcgcgaagccggcccgctcccaaacccgaccgagcaaagcgcaaagccccccaacctcagatcaatccgcagcatcgatggcgcccaaggcggagaaaaagccggcggcgaagaagcccgtggaggaggagcccgcgacggagaaggcggagaaggctccggcagggaagaagccgaaggcggagaagcgcctccccgcgggcaagtccggcgccggcgagggcaagaagggcaagaagaaggccaagaagagcgtggagacctacaagatctacatcttcaaggtgctcaagcaggtgcaccccgacatcggcatctcgtccaaggccatgtccatcatgaattccttcatcaacgacatcttcgagaagctcgccgcggaggccgccaagctcgcccgctacaacaagaagcccaccatcacctcccgcgagatccagacctccgtccgcctcgtcctccccggcgagctcgccaagcacgccgtctctgaaggcacaaaggcggtcaccaagttcacttcgtcttagataggctgccttccctctcgtttgtactggtgtctggtagtagatctcgtctagttgggggtgctgttgctagtcggtcgtgggtccctttggtatgataggccctgttcaatgggtatgcaagtgatttgkttgtatatkgttktagtagatctcgtttcagctgttattctttattactgctattckatagtctcgaatacaac

SEQ ID NO: 1380 - DNA, 732 bp, Zea mays
  Clone ID: TF_ZmC369_89
tggacggccatagaaatcgaccgagcgaatccctcgcatcgcattcgcagcctttgctgcatcacaccaccgcgaaaccccagcagccgcatcgatggcgcccaaggcggagaagaagccggctgcgaagaagccagcggaggaggagcccgctgccgcgaaggccccggcggccaagtcgtccggcaaagaaggcggcgacaagaagggtaagaagaaggcgaagaagtcggtggagacctacaagatctacatcttcaaggtgctgaagcaggtccaccccgacatcggcatctcttccaaggccatgtccatcatgaactccttcatcaacgacatcttcgagaagctcgccggcgaggctgccaagcttgcgcgctacaacaagaagcccaccatcacctctcgggagattcaaacctctgtccgccttgtccttcccggcgagctcgccaagcacgcggtctccgagggcaccaaggccgtcactaagttcacatcatcttagatttgaggtagtagctattgggtggcgttggtagttgtgtctcaatttgtctgctactaatagtggtagcagtatccatgtgtagttgggttgtggtaagaattgtgttaaactggtaatacgtttgaaattgcttttttcaaaaaaaaaaaaaaaaaaaaaaaaagtactctgcgttgttacactgcttaaggacatattccagcacacggcggccgtactag

SEQ ID NO: 1381 - DNA, 416 bp, Zea mays
  Clone ID: TF_LIB3078-055-Q1-K1-F9
acgcggacgcgtgcggtggatctccgggagattcgtaggtgccaaagcagcacggagctgaggacacggaacctccctataagggcctggaaacggagatcgctctcaactgccagaccgatctcaggttccagtactccaccgactgtgttctgtatgaggccgtctaagcgtacctcgtggggctctttgatgacactaacctgtgcgccatccactccaagcgcgtcaccatcatgcctactgacatccaactcgcacgccgcatcaacggagacaaggcctgaacgatgcgagctcatctcactcaaggccccgtagttgctgatgcttacctgctagcaggacttgtgctcatcgcggttacctttgtgccatcaacgacatcttcgtgccactgtgcttgctcttagaat

SEQ ID NO: 1382 - DNA, 327 bp, Zea mays
  Clone ID: TF_LIB3070-010-Q1-N1-G7
gacgaaaattaatgctcgacacataagacaaccgcagacgggtatatctgagaaggacatggggaagaaggccaccatctaatggtctaccccacgggcctgcaatttgctgttctacgaatacaccgtcagctgatgcaaaagacttaggcaaatggccgcgttggtacctctgcagccgtctactctgccgtcattctgcagtacttgactgccaaggatctggaactggctgtgaacgctagcttggatctgaacgtgaagcgtatcacccgtcgccacctacagtttgccattctcggagacaatgagcttgacactcttatt

SEQ ID NO: 1383 - DNA, 342 bp, Zea mays
  Clone ID: TF_LIB3088-036-Q1-K1-H8
gtgcggcagggcacagcatacaccgcgaatttcgattccggcccgctcccaaacccgaccgagcagagcgcatagccccccaacctcagatcaatccgcagcatcgatggcgcccaaggcggagaaaaagccggcggcgaagaagcccgaggaggaggagcccgcgacggagaaggcggagaaggctccggcagggaagaagccgaaggcggagaagcgcctccccgcgggcaagtccggcgccggcgagggcaagacgggcatgaagaaagccatgaagagcgtggagacctacaagatctacatcttcaaggtgctcaagcaggtgcaccccgacattgg

SEQ ID NO: 1384 - DNA, 329 bp, Zea mays
  Clone ID: TF_LIB3354-075-Q6-N6-E3
gggggaaaggacagcccaattttttaattcaattcccccccgatcatcatcatccatcggtggggggatcacataaactgggccacccctaccggcggcccccacatgaccattacaggggtcctaaaacggggggaactttgtaacggccttagggccctcggaaaccgggtgcttggggagctccccggggaggaccaggcccccccaggtctggatctcccgggaggggatggggggctttttgttgtagccccccaacttgggggactcggccccgagcttttaaaaaagtcgttgatgaaggagttcatgatggacatggcctt

SEQ ID NO: 1385 - DNA, 601 bp, Zea mays
  Clone ID: TF_LIB4729-041-R1-K1-E9
aatcttgcttgtgttcgcattccttccatctatcctagacctacttagtcaccaacaagcgcgcgtgcgtgcatgcatgcaacccagcactgaatctagatggaaggaaagcaaggaagcgagcggtcgcaaggacggccggccgagcaagaaataagtgactaagaccgtgaaggacggcctccatttccccgcccgtcggatggatcgctacctacaataaagaacggctacgtacacgcagtgcgtagggaggcccgcctctacctacgctggcgtcctggatgacctacctggtcagggactggatctagctggcaacgctggctaggacagccagaagacacacatgcatccgcgccacctactgcttgctatccataccgaccaacgactagctaagctagttgctggctggaccatccatcacgcacggcggtttgccaacataaatccacccctgcttgctaagaaaacagaggagaaagaatgcatccaccggagcaagcaaggcaagcaagccaacaaagacggcaagcacctcaacaaagatagatattggaggcagatccaacctatgcatgcataggtaggaagcgag

SEQ ID NO: 1386 - DNA, 267 bp, Zea mays
  Clone ID: TF_LIB4730-068-R1-K1-F4
ccccattgcacgactgccacatgtcggcgtccttcgcgccaagccccaaagactacgatggaccgcacgaagcaaacggcacgcatgtcaacgggcggcaaggcgccccgaaagcagctggtgaccaaggcggcgcgcaagtctgcgcctaccgccggcgtcgtgaagaagccccaccggttaggggggggcacggttacgctacggtagattcggaagtaccagaagagaacggagctgcctatccgcaagttgcccttacagcgc

SEQ ID NO: 1387 - DNA, 667 bp, Zea mays
  Clone ID: TF_LIB4974-021-Q1-K1-A5
gaatcactaaaccgtactcggtgcgtcctaaaccaccgctcacctcgatatggctttctcccctcttccgactcgcttctctgtccggattccggattccctctgctctttccctaaccattgtagccatggcctctgacaggcacggcgatcggctcatgttcctccaagaaagccacgaacaggagttccaaggctggcctccagatccccgtgggaaggatcaccagaatccgcatggccgatgagaatgcccagagagacaatgccgtggccactgcctacctcgctgccgtgctccagtatattgctgctgaggctctgtgattgcgcggaatgcctgacgtgacaacacagaagacccgaatctgacggtgccacattctgctcggcgccagcaaaaactagaatgtctcgcggttgatgggcacggggaccatcgctatggatgccgtaatgacctagatgcataaacttttgatcccaataaatgtcgaccacatatctgccaaggctgcacctggagactaggactatgctgttgactactgctgatgacacctccaggatgatggcggagccacgtgagactgagcagtacgctacgtgttacacgtagatgatcatgcgtgatgctgcaacatgctacactaagatactgttgaga

SEQ ID NO: 1388 - DNA, 346 bp, Zea mays
  unsure (1)..(346): unsure at all n locations
  Clone ID: TF_LIB3069-003-Q1-K1-G4
gcagtctcnagttacaattcccaatccattaaactttaccagccttttgcaaactcagaggagnacgttattgtacccaaggcggagaagaagcctgtttttaagataccctctgaggacgagcccgtggccccggcggataaagcccccgctgtgaataagcctaatgcggataaactgctcccggcgggaaaatccgacggcaaggaatgccgtgttgacaagaacgtgcggaagaatgccaagaagagcgtggagacgtacaagatctacatcttcaaggtgctgaagcatgtgcacccagacatcggcatctcctccaaagccatgtccatcatgaactcct

SEQ ID NO: 1389 - DNA, 606 bp, Zea mays
  Clone ID: TF_LIB3279-200-Q1-K6-G11
ctcacgcgttcgctcatcttttctcgtttagaacctctaatatttaccccactcgccagtcgcagccatacctgtcgccatggacgccagcggagccaataacgaggcgaacaagggcgcggccggccgcaaggcaagcagccccaggaagaagtccgtgacgcgctccctcaaggcccggctgcagctcctcgtccgccggatcaggaactacctgaacaaggaccggttcgcccatggcgtgggcacttacctccccgtctacctggactacctcctggactaccttgtcgactaggttctggacttggcaagggacaccgcgaaagacaacatgatgacgcgcatcatgctgctccacatgctcctcgacatccacatcgacaaggagctcgggaagctgatgataggcctcaccatcgtgcacggcaacatcctctccaacatccactccatgctcctgcccaagaaggcggccaacaacgcgggcaacgcccgcaacaacgagcccaagtgcgccaagaacggcaccaagtcctccaagaaggcttactaagtagggacttcatctgcactgtgcgctggagcatgctcgtgtctagatct

SEQ ID NO: 1390 - DNA, 495 bp, Zea mays
  Clone ID: TF_LIB4762-006-R1-K1-G10
gggtctccaaacccttaaccaggagctctaggccttattccatgttctctgatgccgctcctggcatcgctacgaaccttatcacccataccctgtctcgttgtgccaacacctactaagccgctgaccgctaacgctgtccataagagaaggcctgagaccgctgaagcaaataagccccaccacgctcggcccgggctcgcacgggctcagcgtgatccgctttacgacaaaaagcacggagctgccgctactcaaggtgccggaccagcccctgatgcggcagatcgggcaggacgtcaagaccgacctacacttccacagttctgctgtctcaaggcttgaggagccggctgaggcctaccttgtcgtgctcttggaggacaccaacctatgcgccatccacgccaagcgcgccaccatcctgcccaaggacatccagcttgcccggcgtattcgcggagatgaggggctaagcgtgacattgcactgtgc

SEQ ID NO: 1391 - DNA, 517 bp, Zea mays
  Clone ID: TF_LIB4300-007-R1-M1-G1
acgcgcgagatcgcacaaatcctcttgctcgagttctcctcaaccaaattcaagtcacagtggtgaaactctcggcgatgtatggcgcgtggcaagggcgtataagggtctgggcaagggcggagccaagcgccaccgcaaggtgctgcgtgacaacatccagggcatcaccaatccggcgatccgcaggttggcgaggaggggcggcgacaagcgcatctccgggctcatctacgaggagacccgcggtgtgctcaagatcttcctcgagaacgtcatgcgcgacgccgtcacctacaccgagcacgcccgccggaagactgtcaccgtcatggacgctgtctacgcgcccaagcgccagggccgcaccctctacggtttcggcggctaggtcggtccatctcccggcggcgaattacctggcggctgtggactgtggaggtcgagttgtgtgtttcgtctagtgtagtctgagatgtctactattggtgctgatttctgtggcggctgaacacta

SEQ ID NO: 1392 - DNA, 437 bp, Zea mays
  Clone ID: TF_jC-zmXLIB3527P083cd11d1
ctggggttgcacccacattgaagacagattatctgatagaagggaatgacgtggaaaccacaatggacagatctactaaccagcttcagttcagcggacgacctacagacgtaaagatctactgaacacgagcattaaccatcacagctgtttatgcgccggcccctctatgccttattgggggacttgacggccttcttgggcgacttggtctccgagggcgccgccttgtcagcggactttttgggcaggagcaccaggatgatggtggggaggactccggcgtgggcgatggtgacaccggacagcaggttgctgagctcctggtctgtgcggatggaaaggagcacctggctcgagatgaggcgggttttcttgtggcccttggaagagctggcggccagctccagcaccttggcggtcaggtacttgaggac

SEQ ID NO: 1393 - DNA, 749 bp, Zea mays
  Clone ID: TF_LIB4762-143-Q1-K1-C1
ccggccgggaaaaatttcaaaaaaggaaaaaaaaaaaaaaaaaaaattaaaaaaaaaaaaaaaaaaaaaaaaaaaaaaaaaaaaaaaaaaaaaaaaaaaaaaaaaaaaaattcccccggtttaatcaacccttaaggggaaagtggcctccccctcgcctcccggccgggaaaagggaggggggcccggggaaaggttttcggggttggccccgcaaaaaaggaaacgtcaaggatttccagggcgggattccatttccccgtcggaaggttggccaggttcctcaggggggaaaagaaccgggagggggtcgggcccggcccccccgggaacctcgccgccgtcctcaagaacctcggggttggggttctcaaatttgccggaaaccccggggggaacaaaaaaaaaacccgttttgggccgcgccacttccattttgttgggcgcaacaacgaggagttgcccaaactgtgggggggggcccccttcgcgggggggggggttttgcctaacttccttcagatttggctccccaaaaaggttgcctcctccaaggccagggtcaacaacaacaacaattgaaattgtttcctgaaaaaaggatccaaccccccccttgttttgaagaaataggaggatgttgtcttcgggaaggatccggttttgttggaaaggaaatttaaattagtttcggtttttttaaagggaagggaaacggggttggaaatctcagggttgaatgctcgttg

SEQ ID NO: 1394 - DNA, 444 bp, Zea mays
  Clone ID: TF_jC-zmX700345539a1
caagcacccgcacgtaagctcggaattcggctcgagattccttccatctcccatttacttcctcagacccgagaagcgcagctgcggccatggacgccaccggcactggagctggagggaaggcgaagaagggagcggccggtcgcaaggccagcgggccgaggaagaagaccgtgacgaggtccgagaaggccgggctccagttccccgccggccgcatcgggcgctacctcaagaagggccgctacgcgcagcgcgtcggcagtagtgcccccgtctacctcgcggacgacctggagcacatcgccgctgaggacctggagctcgccggagactctaacaatgacaccaagaagacgcgcatcgtaccgagccccgggccgctggcgatccccaaccacaaaggagcccgagaagctgctgaccggcgtgaaccatcgccca

SEQ ID NO: 1395 - DNA, 449 bp, Zea mays
  Clone ID: TF_LIB3137-005-Q1-K1-A2
ctgatttgcgtttccagagccatgcggtgcttgccctccaggaggctgctgaggcataccttgttggcctgtttgaggacaccaacctgtgcgccatccatgctaagcgtgtgaccatcatgccaaaggacattcagctggcaaggaggatccgcggcgagagggcctaatcgccacctcaaacatcgtgacaaaaacatgaagtcctggggttattgttaatctggtgccattgtaaggacatatgagtagggtttgttttgtggatcgcaagtttctcttctgctactggtgctgctacctttgctggtgttattgctaggggcgaatactaaagtaactatgcgctgacagtctggactagcagtgttatgtgcgcttgttgaccttgcgcgccatgcttggggccgattggtccgttatgtcaaagaatggcgtacaaggcgggt

SEQ ID NO: 1396 - DNA, 395 bp, Zea mays
  Clone ID: TF_LIB3279-015-P1-K1-G10
cgcattcgttccaactcctgagcactttctcctagtgccagacaaagccaatcgagggcaaaatacaacattgacttcaacggcacccgaacaaggggttaggggaaaaagggagcggccggccgcaaggtcggccggccaaagaagaagtcggtgtctaggtacgagaaggcctgtcttcagttccccgaaggccgaatcgggcgctacttgaagaagggccgctacgcgcagcgtgtttgcaccggcgccctcgtctacctcgccggtgtcctctaatacctctccgcttaggttttggagctcgcccataatgcttccagggacaacaagaagactcgcattatttcgcgccacgtgcttctggctatccggaacgacgaggagcttgggaa

SEQ ID NO: 1397 - DNA, 440 bp, Zea mays
  Clone ID: TF_jC-zmXLIB3527P004bf03a1
catattcggtccgtcctggccaggaagaaatcgagcagccaaagagaggagaagatggctcgtacgaagcatacctgcctgtaagtgcacgcggaggctagagaccctgctgcatgcagttcgccaccaaggcggcgaggaagtctgcgccgaccatcgtcgtgcgtgaagaagccccacatgtacaggctcggcacggtggctctgcgcgagatccgcatgtaccagaagagcactgagctgctgatcctgaagctgccctttcagcgcctggtgcgtgagatcgctcaggactttaagacggatctgcggttccagagccacgccgttctggcccttcaggaagccttcgaggcctacctagtcggtctggtcgaggacaccaacctctgcgccatgcacgccaagcgcgtcaccatgatgcccatagacattcagct

SEQ ID NO: 1398 - DNA, 417 bp, Zea mays
  unsure (1)..(417): unsure at all n locations
  Clone ID: TF_LIB3957-024-Q1-K6-B2
ccgnatttccaatttcaaatccttcgacgcgcagcgccgcccgccctctcgcagctctctccgatggcccgcacgaagcagacggcgaggtaagtcaactggcggcaaggcgccgcggaagcagctggccaccaaggcggcgcgcaagtcggctccggccaccggcggcgtgaagaagccgcacaggttccgccccggcaccgtcgctctccgcgagatccgcaagtaccagaagagcacggagctgctcatccggaagctgcccttccagcggctggtgcgtgagatcgcgcaagacttcaagaccgaccttcggttccagtcctccgatgttaccgcgctggaagaggcctactaggcgtatctggtgggtctttttgaggacaccaacctgtgtcgcatccaccccaatagggg

SEQ ID NO: 1399 - DNA, 642 bp, Zea mays
  Clone ID: TF_LIB3594-060-Q1-N6-D6
gtgtttttttttttttttttttttttttttttttttttttttttttttttttttttttttttttttttttttttttttttttttttttttttttttaacagccaaattgttttgccaagaacattggtccccgtttgcgggacaaggaggggtggagtccatcgccttgttcagacttttcagaaaccgggagacagggcagcatttaggcccttttcccccttatgcggggcccgagctggatttccttgggcatgatggggacccttttggcgtggatggcccaaaggttggggtcctaaaagagacccaccaaataccccttgggggccttctgcagcggggggacaggggaggactggaacccaagggcggttttgaagttttgcgcgatctcacccaccagccgttggaagggcagtttccggatgagcagctccgggcttttttggtacttggggatctcgcggaaagcgacggtgccggggcggaacctgtggggttttttcacccccccggtggccggagcccatttgcgcccccccttgggggccaattttttccggggggccttgccgccagttgatttccttgccgtttgttttgtgcgggccattagaaaaagcttcaagagggcgggcg

SEQ ID NO: 1400 - DNA, 498 bp, Zea mays
  Clone ID: TF_LIB4071-005-Q1-N6-H8
aaaacgagcaatcgcattccattttccattcagggaggacaacacgcccgaaatacccaaataggcccggcataaaaaagcccccaccaccatatacttaaaacattacaacgacgaacagcagcagcgcgacagcaaaagccctctcccccctgatgcggggggcgagctggatgtcctggggcatgaaggggaccctcttggcggggatggcccaaaggttggggtcctcaaaaagccccaccaggaacccctccggggcctcctgaagggccgccacggccgaggactggaaccgaaggcccgtcttgaagccctgcgcgatctcacggacaaggcgctggaaggggagcttgcggatgaacagccccgggctcttcgggaacttgcggatctcgcggagcgcgacggggccggggcggaagcggggcggttttttcaccccgcccggggccggggccgacttgcgcgccgccttgggggccagctgcttccggg

SEQ ID NO: 1401 - DNA, 739 bp, Zea mays
  Clone ID: TF_LIB4766-057-R1-K1-E7
ccggccggaccccgcatctcctatgcccagctagatctttgcgacacatatcgaaacagctctagctagtgcgctcgacgcctaacctggtttccggtatggattccaagcagatcggagccatgacctgcttcattgccatcaccgctctcggcttccgtccctgcgcatccgccgagcgcatggtacggtgacttgccaaggatggcctccacatccctgagggaaggatcgccaggttcctcaaggacggcaagtatgccgagagagacggcgccggcgcccctgtctacctcgctgccgtgctcgagtatcttgctgctgaggttcttgagctggccggcaatgcggcacgtgacaacaagaagacccgcatcgtaccgcgccacatccagctcgccgtccgcaacgacgaagagctctcccgcttgctgggcacggtgaccatcgctagcggtggtgtaatgcccaacatccataacctgctgctcccgaagaaggacggcggcggcagcgccaaggctgcggatggtgacgaggactaagtccttgactacgcctggtggcacctccaggatgctgccgtatcaacatgtgtctgtgtagtacgttaggtgttcgttgtagctgggtatgtgagttgctgtaacactgctaaactaagttactcttgtgtttgctaaggattaagttctgtatttggtgctataaaagtgcatcctttgaatgactggttcat

SEQ ID NO: 1402 - DNA, 1173 bp, Zea mays
  Clone ID: TF_ZmC369_116
cattgggtacctcgagggccggccgggcacacaccaagaagcaagaaaactagaaaaggctcctcccgaccgcaacgcccctcatctccctcgaccccgacatccccgacccgatggcgcccaaggcggagaagaagccagcggagaagaagccggcggccgaggagaaggcggagaagacgaccgcagggaagaagcccaaggccgagaagcggctgcccgcgtccaagtcctccggcaaggagggcggcgagaagaaggggaagaagaaggccaagaagagcgtggagacctacaagatctacatcttcaaggtgctgaagcaggtgcaccccgacatcggcatatcctccaaggccatgtccatcatgaactccttcatcaacgacatctttgagaagctggccggcgaggccgccaagctggcgcggtacaacaagaagcccaccatcacgtcccgcgagatccagacctccgtgcgcctagtcctccccggagagctcgccaagcacgccgtctccgagggaaccaagcacgccgtcaccaagttcaccagcaactgagcgcgctgcgggatccgcggatctgttagaagggttctttgctgtgtcctttccccagtcccccaccctacccgcctagtagctagcttgcctgctctataaatccggcgcgccggattgtaatggtcctcttagatttgatgtccctgttgtggaatatagttgtatctctccgcttgctatttttctcattctttaggaacttggaaatctggtaattttgccgggagataactaggatcatcacaaattcgcgttgacaacgcgacctcacaaggtcgaaggctcgtgcgtttgttgtttcagtctcagattcttcagcacaagggtatttgtgagcggcaacgatgtctgtcttgcagccatacgatgattacaattttttttgtctgccagaacctgccaatgtgtgatgacataagagcgtctcaagcatgtgggtacattttgctctcgtcaatgtgtgatggtacaagttgctctaaagatttcgatttgtgttaacctgattgattagctggtcataacaaatgctttcagagtttgcaaatagtatctggtgcattctttcagaatgcattcttttttatggtaaagctattcacaatgg

SEQ ID NO: 1403 - DNA, 442 bp, Zea mays
  unsure (1)..(442): unsure at all n locations
  Clone ID: TF_3341041
ataacaaattctacattgttgcagaagcaacctagcacaggcctaaatatataacaaattctacattgttgcagaagcaacctagcacaggcctaaatataaacttggtaaccgccttggtcccttcggatacggcgtgcttggcgagctcgccggggaagacgaagcgcaccgaggtctggatctcccgggaggtgatggtgggcttcttgttgtancgggcgaacttggcggcctcggcagcgaacttctccaaaatgtcgttgatgaaggagttcatgatggacatggccttggacgaaatgccaatatccgggtgcacctgcttgaacaccttgaagatgtagatcttgtacgtctcgacgctcttcttcgccttcttctttcccttcttctcgccgccctccttgctcggcacgcgcttctccgcccttggcttctt

SEQ ID NO: 1404 - DNA, 797 bp, Zea mays
  unsure (1)..(797): unsure at all n locations
  Clone ID: TF_ZmC369_51
gccggcctggctgggaacacagcgaacacatctcctcgaatttctttccatccgatccccccttcgcaaccaaaaccccaactcgccccgcatcgatggcgcccaaggccgagaagaagcccgcggcgaagaagccggcggaggaggagcccgcggccgagaaggcgcccgccgggaagaagccgaaggcggagaagcgggtccccgctggcaagtccgctgccaaggagggcggcgcgggcaagaggggcaagaagaagggcaagaagagcgtggagacctacaagatctacatcttcaaggtgctgaagcaggtgcacccggacattggcatctcctccaaggccatgtcgatcatgaactccttcattaacgatatcttcgagaagctcgctgctgaggcagccaagctcgcgcgctataacaagaagcccaccatcacatcccgtgagatccagacctccgtacgcctcgtccttcccggggagctcgccaagcacgccgtctccgagggcaccaaggccgtcaccaagttcacctcggcctaggctgcgcggccgccgcttgcaggattctctcctgtgttcacgtctcttgctgtagttaggtgctgctgcctgctggcttctatgtatgttatctatctgtctgtagcaactgtgttatctgataggaccgtaatggtgcttatttaacccagctatatgtttctatgtgaatcatctctctatcggttattgagtacctttatattgtgatgntgatgtgaatgtgatttataaaatgcgtcagtttct

SEQ ID NO: 1405 - DNA, 822 bp, Zea mays
  Clone ID: TF_ZmC369_84
cattgggtacctcgaggccggccgggaccgaaatcttccgtcccaaatcgaccgagcgaattcaccacagcttctcaccaccgataccttcgatggcacccaaggcggacaagaagccggcggcgaagaagtccgcagaggaggagcccgcgacagagaaggcggagaaggccccggcggggaagaagcccaaggccgagaagcgcctcccggcgggcaagtccgccggtaaggagggcggcgggggcaagaaggggaaaaagaaagcgaagaagtccgtggagacctacaagatctacatcttcaaggtgctgaagcaggtgcaccccgacatcggcatctcgtccaaggccatgtccatcatgaactccttcatcaacgacatcttcgagaagcttgcggccgagtccgccaagctggcgcgctataacaagaagcccaccatcacctcccgcgagatccagacctcggtgcgcctcgtcctccccggcgagcttgccaagcacgccgtctccgagggcaccaaggccgtcaccaagttcacctcttcttaaggttcatagtactaggctgggtggtgttggtagacgtggctcaatttatctggtaggggtagtgatggatgatatgatctgcgtctatttgagctgttaagactgatgaacattgttccacgtcacgttgtgtttgatggacattgttccagatcacgttgttaagactgcagaactgtgtctgacatggaacaagtatgatactcgaaatttctgtgagtgcattgaaacgtgaaatctgcagtccttaaaaaaaaaaatctggaat

SEQ ID NO: 1406 - DNA, 719 bp, Zea mays
  unsure (1)..(719): unsure at all n locations
  Clone ID: TF_LIB5116-007-A1-PF1-C8
acaaaccagagcagcgcgcaccgccgcccacgcatctcgagtagtttccagctcgccggagacgcagcaagcaagaagatggccggaaggaagggcggcgacaggaagaaggcggtgacccgctccgtgaaggccgggctccagttccccgtcggccgcatcgggcgctacctcaagaagggccgctacgcccagcgcgtcggctccggcgcccccgtctacctcgccgccgtcctcgagtacctcgccgccgaggtgctggagcttgccggcaacgcggccaaggacaacaagaagacccgcatcatcccgcgccacctgctgctcgctgtccgcaacgaccaggagctcggcaggctgctcgctggcgtcaccatcgcccacggtggcgtgatccccaacatcaactccgtgctgctccccaagaagtcccccgccgccgccgagaaggaggccaggtcgcccaagaagaagacctccaccaagtcccccaagaagaaggtcgccgccaaggagtagcccgcccatagactactgtcgtgacattgcttaggtccatatcagggagaggatgatgagttttggttggttggatcctgtgtgtaattgcctaagtctgtagtggctgttacattagttcgatgaacagccggtagatgggcgctgtaatttatctctgatttatgtccggaatggctanagatgcaatcctttcaacc

SEQ ID NO: 1407 - DNA, 678 bp, Zea mays
  Clone ID: TF_ZmC369_99
acgacgagcactcgccgccactcaccagcaaattcccaagccgcccctttccccatctctttcgcgacccatttgatcgattcctgatggcgcccaaggccgagaagaagcccgcggagaaaaagccggcggaggagaaggccgagaagaagccaagggcggagaagcgcgtgccgagcaaggagggcggcgagaagaagggaaagaagaaggcgaagaagagcgtcgagacgtacaagatctacatctttaaggtgctcaagcaggtgcacccggacattggcatctcgtccaaggccatgtccatcatgaactccttcatcaacgacatcttgcgagaagctcgccgccgaggccgccaagctcggcccgctacaacaagaagcccaccatcacctcccgggagatccagacctcggttcgcctcgtcctccccggcgagctcgccaagcacgccgtatccgaagggaccaaggcggttaccaagtttacatcctcttagggtgccgccgcacgttgctacgatcctgtttaattctcatatttaggcctgtgctaggttgttcgtgcaacaatgtagaatttgttataattgctgaatgaatcagttacccctgttgaagttttctaatatattaatcttgctagtaaaaaaaaaaaaaaaaaactcgagcccgg

SEQ ID NO: 1408 - DNA, 575 bp, Zea mays
  unsure (1)..(575): unsure at all n locations
  Clone ID: TF_LIB3279-011-P1-K1-H6.F2
ggaaaccagattggtttagcngaacagaggaagcaggacgcttcctcttcgttcacggttccttggcggggccnagcnaaagaacatgcttcaacacactctggaacacaccacgggggggggggcgcagagacccttggcacacgagggctgacggggccccatcagtccagttcaccggctcgggcgctcggagccagatctacgccttggtggccttcttgggggacttggtggccttcttgggcgacttgggggcggtcttctcggccttctcagccttctcgggggccttcttggggagcagcaccgggttggtgttggggatgacgccgccgtgggcgatggtgacgccggacagcagcctcccgagctcctggtcgttgggggtggccngcagcaggtgcctgggcacgatgcgggtctttttgttggccttgggggggttcccggtccgctcctgcccctttggtgggaggttctcgaggacgggggcgaggtagacgggggcgcctggacccacccggctgggcgtaacggccctttttggggagcgcccgatgcggccgtcgggg

SEQ ID NO: 1409 - DNA, 283 bp, Zea mays
  Clone ID: TF_LIB3088-011-Q1-K1-D5
gcgcagacgcgtgggcaggcggcaaggccccttggaagcatctggcgaccaaagcggcgcgcgagtcggcccctgcgaccggcggcgtgaagaagccgcaccgattccgaccgggcaccagggcgctgcgcgagatccgcaagtaccagaagagcacggagcttctcatccgcaagctggccttgcagcgcctggtccgcgagatcgcgcatgacttcaagaccgacctccgcttgcagtcctacgccgtcgacgcgctgcacgaggcctaccaggcctacct

SEQ ID NO: 1410 - DNA, 344 bp, Zea mays
  unsure (1)..(344): unsure at all n locations
  Clone ID: TF_LIB143-046-Q1-E1-C10
cgtttcaaccttttccatcgctcctaatcctaacaaccaaaaaatctgagccgtaattattggccccaaaggcggaaaaaagcccggcgcaaaaaagtgcggangagaaccctcggaaaagcggctccgcggagaaagcccccgcggggaagaagccaaagcggagaagcggctacctgcgggcaagtccgccggcaaggaggcggcaacaaaaggtagaagaagcgaagaagagcgtggagacctacaagatctacatcttcaaggtcctgaagcangtgcaccccgacatcggcatctcctccaaggccatgtccatcatgaactccttcatcaacgacatc

SEQ ID NO: 1411 - DNA, 381 bp, Zea mays
  Clone ID: TF_uC-zmflteosinte78g07b1
cccacgcgatcgtcaagacctcctcagaccccgagaagcgcaggggcagccatggacgccaccggcgctggagctggagggaaggccaagaagggagcggctggtcgcaaggccgcgggccgaggaagaagcaatgacgaggtgcctgaaggccgggctccagctccgcgtcggacgcatcaggcgctacctcaggaagggccgatacgcgcagcgcgtcggcagcggtgcccccgtctacctagcggccgttctggagtacctcgacgccgaggtcctggagctcgccaggaacggtggcaaagacaacaagaagactcgcatcagtccgcgccacgtgctgctggcgatccgcaacgacgaggagctagggaagctgct

SEQ ID NO: 1412 - DNA, 509 bp, Zea mays
  Clone ID: TF_jC-zmshLIB3569P054h03b1
cacagtggctttgtcctttctaggaagaaatcgagcagccaaggagaggagaagatggttcgcacgaagcaggccgcccgcaagtccaccggaggcaaggcccttagcaagcagctcgccaccaaggcggagaggaattctgcgccgacgacccgcggcgtgaagaaaccccacaggtacaggcccgggacggtggctctgcgcgagaaccgcaagtaccagaagagcacggagctgctgatccggaagaagcccttccagcacctggtccgtgagatcgctcaggacttgaagacggatctgcggttccagagccacgccgtcctggccctcaaggaagccaccgaggcctacctagtcggcctgtgtgaggacaccaacctctgcgccatccaccccaagcgcgtcaccatgatgcccaaagacatccaggtggcccgccgcatccgatgggagcgcgcgtaggcgtatctcgcgcccggacccagcggcaccggagggatggacga

SEQ ID NO: 1413 - DNA, 654 bp, Zea mays
  unsure (1)..(654): unsure at all n locations
  Clone ID: TF_LIB5116-021-A1-PF1-H10
accattcctcccaccttcaagcgcatctacacacacacacaccacagaccacctctccccgcccaagcatccccatccgcatcctcatccatggcccccaaggcagccgagaagaagccggtggagaagaccccggcggggaagaggcccaaggcggagaagaaggtgccggcgtccaaggagggcggcggggacaagaagggcaagaagaaggccaagaagagcgtggagacgtacaagatctacatcttcaaggtgctgaagcaggtgcacccggacatcggcatctcctccaaggccatgtccatcatgaactccttcatcaacgacatcttcgagaagctggccggcgagtcggccaagctggcgcgctacaacaagaagcccaccatcacgtcccgcgagatccagacctccgtccgcctcgtcctccccggcgagctcgccaagcacgccgtctccgagggcaccaaggccgtcaccaagttcacctccgcctgattcggtcctgtccctgtgtgtgtcttcctggtggatggatcgatgtcgccctgtagtttcctgctcggactttgtcctcttgtaacttgtgctggctgtgtcttgtgtgngatcatatttcatgatctggagaaatagtagcggtgcttattg

SEQ ID NO: 1414 - DNA, 2295 bp, Zea mays
  Clone ID: TF_ZmC19847_1
ctcgaggccggccgggccgggattgtcgagcacacagcttcggactcttctctagggagttcgcgcacaggctccacctcatcggcccccgcgaagtcagagccacatccctggttcgagccccagagcagagcagcctccccgatctccacccctctgtgatagtccgcatgaagcagatggcgcgcaagtcgatgggcggcaaggcgccgcggaagcagctggcaacgaagggggcgcgcaagtcggagacgaggacgcgcggcgtgaagaaggcgcaccagctccgcccgggcaccgccgcgctgtgcgagatccgtcagtacaagaagagcacggggctgctaatccgcaagctcttgttccagcgcctcgtcggccacgacgccacatggttcctgctcgacatcgccttctacagccacaacaggttccaggaggactccaccagcatcagcgggatccccatgtccaacaccaggagcgcagaggagaaggaggttctcgccacctcgcccaacaggtgtttgacgaattgcttcaaactcatacaaagttgttttagctgggatgcagtgccatatcaacagccttggccaccacctcatatgcaggtggagtttgggtgtggcagtgctgatttatgtccaattccatggccgtttttcaccacaattggtaccaatgaggagataattgacatcacatctgatgatgacaaggttgataatgtggttgatcagctgattgatgaacagatcgcagcagtagtctttgtgccagcgtgtatggaagctacgcctaataatgtgataaatacaagcaaaaccgtggagacctttgctgctcatcagtctcctgagtatgatagtggattgaaagataaggatcagagaatatcatttgaagatgagatatctgagggtgggcaagctgaacaaagtactccacaacaggaattgtgggctatgccaccagatactagtgaccgtgaaactgttgagaggacaaccagaagtattgaggtggagcatttctctcaggttgagtcaaagcataaaatgaactctatgtccgtggaagcttctgagcatgtcactatcactcagattgagaagaagccggttcaacaagttgagataactcaggagttagattcactgccgatatgttctagggagcattctaatgaggcacttgaaggggagagaacagtgcaggctgggttggaacaagagtgtgaggtgctggggatattgtcaacgatcacctcagatatttttgcaatagggctcagtccaaatcaatatactgtgtatttttatcggaatttgatggcctgcatgatgttaatccgtcgcagattcttgctgtcatttggacgtagttgggatgcggtgacgtataagcaaccatggccaccaccggtgcatgttgtgatactaggagatggcttttccgtcaggcttacaccttggcaaccacttgatactgatatctacagctttcctgtgaacaaaccagaatcatctgcaggtgtcttttgtattgcaacagaatcaacgcagtgtgcctatgattcccaatgaaacagtgtctcgacaatcctcttgatgatgcacagatgcctttatgaacagatgcaatacaaatctgaagagggatgtactcgggtagtgaaatgcctcccaccggctgacgcaagtttacttgtctgggctgttaatcagatgacagatccattgattgcattgatgtatgcggtccaagtgatgaattttctcaaggacaaagaggagtcacctcgagaggatgttttgctgctccagaaggacccatttgatggcaacaggcatcagaaacccaacgtgacacttgccatctccttgaggaaagatccaggagtcattgttgcgtgcactgccccaaccaacgaagtaccaacatatgtggaggactacactagtagctcacaatctgcaactgctggctagtggctatcaccgatgctcccggcatgacaactaaaatttcttaccatcagcggcttgggggcaagccgcatttcaagcggtggggaatgtcagcaacggtctaggggagacgctagacgaggcagccgtcgcggaagagcggcgatgtcccagcaaggagcagctcgcatatccgagccaaggagttatgtaaacgagtgggccatatgttgggccgcagggtgaagggtatttgagtctgtattccgtatgaactggttatgaaaagaaatagaatatcagaaaagccttcgtgctcccc

SEQ ID NO: 1415 - DNA, 351 bp, Zea mays
  Clone ID: TF_LIB3076-004-Q1-K1-A11
gcgacgccactgcgtgccgatctccgcatgtcgttaccatactgcttgagcgactttctacctcgtgcccagacaagtccatatcgagagcgcgagatactgaccagtggacgtgcacctggcacctggagcagcggggtaatggggaagaagtggagctggcctggcgcaaggtgctgcgggccataggaagaagtcaggagtctaggtccgtgaaagccgtgctccagttccccgtcggccgcatcgtgcgctacttgaagaatggccgctactcgcagtgtgtatgctccggctcccgcatctacctcgacgctgtactagaatacctaggcgatgacgatttttagc

SEQ ID NO: 1416 - DNA, 515 bp, Zea mays
  Clone ID: TF_LIB3600-051-Q1-N6-A5
aaagggtgaacgcttttatagcatcatatacatatattgaatatttaacatgcacaggagtatcatatagttaacggggtctctaggcacccacatatccctgctacagcgtgagaccataatgtactaacaaacacacatgagcgtatgctgtctgtattcgctagaacgagggaccagcgcgcatgcaaggacttaccactctttattagcaggagtctttacgatggagcagtcggatttgttggatagcaaaatgttatagttgttagggcattacaccagcgatagtgatggccaccgtagcccaacactaggcatagatttttagctttgcggaccgcgagctgcatgtggcgcgtcacgataccacttttatggtggtgacgtgcagcattgccgagcaactgacgaacctgaagagcaagatactctagcacgttattgaggtagacaggggcgccgtggtggcatttcttgtcatacttgccggccttgatgaacctggcgatact

SEQ ID NO: 1417 - DNA, 506 bp, Zea mays
  Clone ID: TF_LIB3595-063-Q1-K6-B6
gggcgaacgcctccctggatgcccaagatcccggagaacctgcggtgaaaactgcggctatggacgagcccaatggcgtgtacgtccccggcggccagaagccaggggaaaggaaatctagtcccactcaggcgatgaactgcgcatgtgagtctggcaaggcaaataggagccagccgacgggcgaggtcagcgtggaagacctacaagatctacatcttcaaggtggtgaagcaggtgcacccatacatccttatctactctaacgtcctgtgcattatgaactccttcatgaaccacatcttcaataagctggccgccgatgccaacaagctcgagcggtacaacaagaagcccaccatcacctaccgtgagatccaaacctccgttctcctcatcctgcccggtgagctagacgagcacaccgattgccatggcaccaaggtgcgcaccatgattagctaatgctacgctgcctggactgcgctatcaagctcgcctggtgt

SEQ ID NO: 1418 - DNA, 569 bp, Zea mays
  Clone ID: TF_LIB4762-009-R1-K1-H2
taccctccgggctcggccggggccaccttttgctatgatagttaaatatttctgggggatgaatcatagcttttccctcaaaacccaatcgcacatgtgggagacctagccctgccattgcaacgatccctttaatttatcctaccaccttatctgctcgattctaatactttaagggctagtttgggacacgcagctttagtcccatctctcaaaccatccgaccccacctcgccgctcactcccaagccagtccctgccggcagcgatggcccgcacgaagcagacggcgcgcaagtcgacgggcggcaaggcgccgcggaagcagctggcgacgaaggcggcgcgcaagtcggcgccggccacggggggcgtgaagaagccgcaccgcttccgcccgggcaccgtggcgctgcgggagatccgcaagtaccagaagagcacggagctgctgatccggaagctgccgttccagcggctggtgcgggagatcgcgcaggacttcaagacggacctccggttccagtcctccgccgtggccgcgctgcaggaggccgccgaggcctacc

SEQ ID NO: 1419 - DNA, 430 bp, Zea mays
  Clone ID: TF_LIB3597-038-Q1-K6-G10
gcccgcgaagtgccacccggcaggcgaaggctcctcgtgccaagccatgctcgcctaccaagggcggcaagagaagtatgcgccaacgacccacggtgtgaagaaaccccacaggttcaggcccgggacggttgtactgcgccagatccacacgtacacatgagacacggggctgctgatgccgaagtttaccttccagcgcttgatctgtgagatcactcaagacttgaagacggatctgaggttccagagacacgccttactggccctccataaagccggccaggcctacctggtctgactgttacaggacaccatactctgagccatacactcaaagcgcgtaaccatcatgccctaacacatgcagttcgcctatcccatacgctgctagcgctcgtaatcatatctgtcgccatgacccactggc

SEQ ID NO: 1420 - DNA, 386 bp, Zea mays
  unsure (1)..(386): unsure at all n locations
  Clone ID: TF_LIB3245-004-P1-N1-E8
cactcatccacagctcgcanccctatgcctggggcgaatcctgtctgggcggtgcnatnncccncacnaaacaaacagcaaggaagtcgaccggcggcaaggccccccggaagcagctggccactaaggctgcgcgcaagtcggccccggccaccggcggcgtgaagaaaccccaccggttccgccccggcaccgtctcgctcctcgagatccgcaagtaccagaagagcactgagctgctcatccgcaagctccccttgcagcgcctcgtccgcgagatcgcgcaggacttcaagactgatctgaggttccagtcctccgccgtcacggcgctgcaagaggccgccgaggcgtacctggtggggctcttcgagacaccaaccttt

SEQ ID NO: 1421 - DNA, 432 bp, Zea mays
  Clone ID: TF_LIB4979-046-R1-K1-F12
agatccatctcatctccctagcaatctctagcatgcagatcctcgtgcgaagcaaagcgctagcccccttcgtactgtcccgatggcccgcacgaagcagacggcgaggaagtccactggcggcaaggcgccaaggaagcagctggccaccaaggcggcgcgcaagtctgccccggcgaccggcggagtgaagaagccccaccgtttccgccccggcaccgtcgcgctccgggagatccgcaagtaccacaagagcaccgagctgctgatccgccagctgccgttccagcgcctggtgcgtgagatcgcccaggacttccagaccgacctcctcttttttttttccccccgcgccgcgctgcaggaggtgttccaggcctacctcgtcgggctcttttaggaaaccaacctctgccccattctccgcccagc

SEQ ID NO: 1422 - DNA, 722 bp, Zea mays
  Clone ID: TF_LIB4185-029-R1-K1-C8
cctcgagtttttttttttttttttttttttttttttttttttttttttttttttttttttaaaagcacattccttttccattaaaatagagggaaacgccatttcaaaggccccggggcaagaacaagcagattaaaaaaggcaactcctaacactacaaacaccattttgcgaacagaaggaaccgaacaaaagcaaggtttttacaagcagaaacccagaggaaaggcccaacaacggggacaacaacaacgggagatcaagccctttcccccctgatgcggcgcgcgagctggatgtccttgggcatgatggggacccccttggcggggatggcccaaaggttggtgtcctcaaaaagccccacgagggaggcctggggggcctcctgcagcgcgggaacaggggaggactggaagcggaggtcggtcttgaaatcctgcgcgatctcacggacaaggcgctggaagggcattttggggataaacagctccgggcttttttggtacttgcaaatctcccggagcgcgacggtgccggggcggaagcggggaggttttttcaccccaccggttgccggggccaatttgcgcgccgccttgggggccaattgtttggggggcgccttgccccccgtcaacttgcgcgccgtttgtttcgggcgggccatcggaaattcggtgcttggcgcaaaaatgggcaacccgagccggcgggggatt

SEQ ID NO: 1423 - DNA, 471 bp, Zea mays
  Clone ID: TF_LIB5025-020-A1-XP1-E2
gccggccgtttccgggacaccgcaatcttcaatctccccagcaatccctagcagaagccttccatcctcactcgctcgatggcccgcacgaagcagacggcgaggaagtccaccggcggcaaggcgccgaggaagcagctggcgactaaggcggcccacaagtctgcccctgcgaccggcggagtgaagaagccccaccgcttccgccccggcaccgtcgcgctccgggagatccgcaagtaccagaagagcacggagctgctgatccgcaagctgccgttccagcgcctggtgcgggagatcgcgcaggacttcaagaccgacctacgcttccagagctctgctgtctccgcgctgcaggacgcggctgaggtccaccttgcccggctcttcgaggacaccaacctctgcgccatccactccaagcgcgtcccctcatgcccaccgacatccatcttgcccgccgtatcc

SEQ ID NO: 1424 - DNA, 498 bp, Zea mays
  Clone ID: TF_LIB3279-174-P1-K6-D12
ccaaggccgagaagaagcccgcggcgaagaagccggtggaggaggagcccgcggccgagaagacgaccgccgggaagaagcccaaggcggagaagcgggtccccgctggcaagtccgtcggcaaggagggcggcgagggcaagcgtggcaagaagaagggcaagaagagcgtggagacgtacaagatctacatcttcaaggtgctgaagcaggtgcacccggacatcggcatcttctccaaggccatgtccatcatgaactccttcatcaacgacatcttcgagaagctggccggcgaggccgccaagctcgcgcgctacaacaagaagcccaccatcacctcccgcgagatccagacctccgtgcgcctcatgctcctcggagagctagccaagcacgccgttctttgagggcaccatggccgttaccaagttcaccttcttctatgcttgcacgctcgccctttgtaggcttctcttgtattgatgttcgccttgt

SEQ ID NO: 1425 - DNA, 511 bp, Zea mays
  Clone ID: TF_LIB4975-062-Q1-K1-F6
aatcatataacaatatagacacactggagtgaatagagaacagcctaggacaaacccaacgcgccagtcctgtctcgactgtgccgatgtctgggatgatacctcatcgtgaggctagctctgtgtcggcaagggggcagggaagcacgtgaccaccaaggccgaacgcaagtctgccccggcgaccggtggagtgaagaagccccaccgtttccgccccggcaccgtcgcgctccgggagatccgcaagtaccacaagagcacggagctgctgatccgcaagctgccgttccagcgcctggtgcgtgagatcgcccaggacttcaagaccgacctccgcttccagagctccgccgtcgacgcgctgcaggaggcgtccgaggcctacctcgtcgggctcttcgaggacaccaacctctgcgccattcacgccaagcgcgtcaccatcatgcccaaggacatccagctcgcccgccgtatccgtggggagagggcctaggagtcgtcccgg

SEQ ID NO: 1426 - DNA, 695 bp, Zea mays
  Clone ID: TF_ZmC653_26
gccggccgggcctcgaccaacgatctcagtctccctagcaatctctagcagcagatcctcgtgcgaagcaaagcgctagccccttcgtactgtcccgatggcccgcacgaagcagacggcgaggaagtccactggcggcaaggcgccaaggaagcagctggccacgaaggcggcgcgcaagtctgccccggcgaccggcggagtgaagaggccccaccgtttccgccccggcaccgtcgcgctccgggagatccgcaagtatcagaagagcacggagctgctgatccgcaagctgccgttccagcgcctggttcgtgagatcgcccaggacttcaagaccgaccttcgcttccagagctccgccgtcgctgcgctgcaggaggcgtccgaggcctacctcgtcgggctcttcgaggacaccaacctctgcgccattcacgccaagcgcgtcaccattatgcccaaggacatccagctcgcccgccgcatccgtggggagagggcctaggcgtcgtcgcggtggaggtcgaagtagtggtcgcagtttctgtcatcaccgtctggctagaaggtgtagagatgtgccgggttctgtagtttgggttatcggtcgaatcatgatgtagttggttcttcacagctgtaatttaactatgacgatgccatggcaaaaaaaaaaaaaaaaaaggccccta

SEQ ID NO: 1427 - DNA, 438 bp, Zea mays
  Clone ID: TF_LIB3088-044-Q1-K1-A3
ctcacgcgtccgatccgctgtcgcatgcgctgtatttcaagctctactccatgaagtgcagctccaagagcaacaccagcagggacgcgggcatggacggcaccgcagcaagagccaacaaggacgcgaacaagggcacggccggacgcacggccaacaagccgaggacgaagtccgtgacgaggtccctgaaggcccggctgcagcgcatcgtgcggcgtatgaagaaggatctgaacaaggaccgcgacgcgcagggcgtccgcacgtacgtggccgtctacctggacgacgtgctcgagtacgtggtcgaccaggtgctggaccttgccgacgacaatgacaaggacaacatgatgacgcgcatcatgctgctggacatgctcatggacaagcagctcgacgaggagctgggcaagctgatgatcggcgacagca

SEQ ID NO: 1428 - DNA, 247 bp, Zea mays
  Clone ID: TF_700021006H1
ttcggcacgagcaactcccaaggtccctttttttttgtcggtctggaagcgccgcagtagcagccatggacgtgagcggacaggcggtaaggcgaagaccggcgcggcggggcgcaaggccggcgggccgacgaagaagtcggtgtcgcggtcctccagggccgggctgcagttccccgtcagccgcgtcgggcggtacgtcaaaaagggccggtacgcgcagtgctaggcacgggtgcccccgtct

SEQ ID NO: 1429 - DNA, 571 bp, Zea mays
  unsure (1)..(571): unsure at all n locations
  Clone ID: TF_LIB4730-058-R1-K1-H4
ccgtcgccgttcttgttgttctacgataccaaaccccaaacatgctccaccggcacctctgctaccacacaacaccgatggcccgcacgaagaagacggcgcgcaagtccaccggtggcaaggcgccgaggaagcagctgacgaccaaagcagcgcgcaagtcggccccgacgaccggcggcgtgaagaagccgcaccgcttccggccgagcaccgtggtgctccaggagatccgcaagtaccagaagagcacggagctgatcatccggaagctcttcttccagcgcctggtccacgagatcgagcaggacttcaagaccgacctctgcttccagtcctccgccgtcgccgtgctgcaggaggccggaggaggactacctcgtcggcctcttcgaggacaccaacctctgcgtcatccacgccaagcgcgtcatcatgatgcccaacgacatccagctcgcccgccgcatccgngaggagcgcgcttaggcgattacggatgattgttactactggagatgattaggctatgtnctcaccatgtactaggtctgcttcgttattatttgtt

SEQ ID NO: 1430 - DNA, 389 bp, Zea mays
  Clone ID: TF_LIB3357-004-P1-K1-B2
ggcaattcgccgcagcctctcaccctcgcgagtcccgacctcccgcagccgccgcacagatggcacccaaggcggagaagaagccggcggccaagaagccccgcggaggaggagcccgcgacagagaaggtggagaaggctccggcggggaagaagcccaaggccgagaagcgcctcccggcgggcaagtccaaggagggcggcgagggcaagaaggggaaaaagaaggcgaagaagtccgtggagacctacaagatctacatcttcaaggtgctgaagcaggtgcaccccgacatcggcatctcgtcaaggccatgtcatcatgaactcttataacgacattcgagagctcgggcgagtcgcagctggcctcacagagccacatactc

SEQ ID NO: 1431 - DNA, 348 bp, Zea mays
  unsure (1)..(348): unsure at all n locations
  Clone ID: TF_LIB4829-035-R1-N1-G5
gattgggtatcctcgnacgccgccgggccctagccaccgcatcgtcgccctcaaattcgttccgtccaggcaaggaagaaatcgagcagccaaggagaggagaagatggctcgtacgaagcagaccgcccgcaagtccaccggaggcaaggccccgcgcaagcagctcgccaccaaggcggcgaggaagtccgcgccgacgaccggcggtgtggagaagccccacaggtacaggcccgggacggtggtgctgcgcgagatacgcaagaaacataagagcccgcggctgttgatacgtaaggtgccctttcaccgcgtggaccgggagatccgtttggaatgtttgatg

SEQ ID NO: 1432 - DNA, 555 bp, Zea mays
  Clone ID: TF_LIB4665-002-R1-N1-D12
ctctttttttttttttttttttttttttttttttttttttttggtatcttttttttgttattttttttgttttggtttttttttttttaaaggacagctgggaagaaccaactactttgggatgggaccgataacccaaactccagaacggggaaaatctttacactttttagccagacggggacgacagaaactgagactgctactttgacctcctccgccacgacgcggtaggccctttaacagggatacggggggcgaccttggatgcccttgggcatgagggtgacccccttggcgtgaggggcgcaaaggttggtgtcctggaaaagaccgacaaggtatgcctgggacgcctcctgaaggggggggacgggggaactctggaagcgaaggccgggcttgaattcctgggcgagctcacgcaccagtctctgaaacggaagctggcgtataagcacttgcgggctcttctggcactgggggatctcccggagcgcgacggtaccggggcggaaccgttggggctctttcactcccccgggcgccggggca

SEQ ID NO: 1433 - DNA, 729 bp, Zea mays
  Clone ID: TF_LIB4766-036-R1-K1-A9
cattgggaccctcgaggccggccgggacacggccacgcaccgaaactgccccgcccccgcagacactcgtcctccccgcgccacctcggggacgtcccggtccgcgacatccctgaccaccgcgatggccgccgccgccctccgctcctccgcacgccggctcctgcgtctcaccccggcaccctcgtcggctctgttcgccgcttcccggcccaccgccagggttgcaccgctctcacgccccatcgccgctctgtcaggtggcaacaatcctatctcatggaaactgagacgcttcttcagttcaaatgaaaagcacttgcctgcaatatctgatccagagatcgaagctgcatttaaggatttgttggctgctagttggaatgaacttccagattctctcgtagcggaagcaaagaaagcagtatctaaagcgaccgatgataatgctggtcaagaggctttttttccggcctcccattcctcgcgcggcgaccacccgattcgaagcgtgcggagagaccgaagaagcgggagagatggctcgtaccaagcagactgctcgcaagtccacgggagggaaggctcccaggaagcagcttgccaccaaggctgcccgtaagtctgcccccaccactggtggagtgaagaagcctcaccgctaccgccctggaactgttgccctccgtgagatccgcaagtatcagaagagcactgagctgctgatca

SEQ ID NO: 1434 - DNA, 2954 bp, Zea mays
  Clone ID: TF_ZmC460_2
ggccgcttttttttttttttccgttttttttttttttttattatacatcaaactgacctcatttatcaggctgaaagcatggccctgccttttataattacatatgtgtccaacgtaagtgtcagtgcatcccatgatggcatacatacatattttgcgtacatacacatcacatgactggataattacatatgtccaacgtaagcgtcagtgcaccccatgatggcatacatacatattttgcatacatacacacatcacatgactggagaatcatgcagagatctctcatctcagccaagatcaggaacgatgaagtagtcctcgtcgtcgtcgtcaggcacctccatccgtgacttcttgaacaggcgcgccccgttcgccttgtagaacccggcgttactcactggctgcggcgaggcgaagaactccgccatggcagttttagctggcgaatgggcgtggaacaggtcgatgtcctcgaaccactccagctccttgagcccaagagacgagtctttcttgtcgctggattcgtagtccgacagctcgaggaggtcctcgacggcccaaccggacggtggcaggaacggcgaggacggcacctcctgcggcagcgcgtccttgaccgtccttgttttggtggtcgtcccggcagctggcgcgctgacgacggccgcgggcttggagctgcccttgggcggcgccggcgggaggccctcggcgctggcgccgcagacggagctgaagccgacgcggatgccggtggcgaggtagcgctggtggttgccggagagcgtgccggggacgtggatgggctcgtcgcagtcgcggcagaggagcgccctgtcctcgacgcagaagatgaaggccggcctctcctggcacacgtcgcagcgcgggaggctggcggggagcgccgcggcgtcgccgagcgggagccgctggtgcttgctggcgagcttgttggcggcgtggatctccacgtcgcagcgcgcgcacagcgccgcctcgtcggcgcagcacaccaccgtggccgccgcggcctcgcacgcgtcgcactggatcctcatgccgcccgcccctttcctacgtaatccggagcttccagtggagacaggcaggccagcagccgcctaaaaaaatcagcatgggaacgcggacgcgtgggcggacgcgtggggcgtggttggcgcgtataaatcgcgcagcgcgcctaacggaaggcgcccgccgctgggccatgcgccccgggacgctggtgggcgtggataccgacgtcgcagcgcgcgcacagcgcggcctcgtcggcgcagcacaccaaggtgaattccgcgcgttcgcacgcatcgcaccaaatcgtcatcgcccttggatcactctgtggtggctctatactaccgtgtgcagctcgctaacccgacgcctggtcttttaagtctaaacgagatcagggacgatgaggtggtcctcgtcgtcggtgacctcggtccggcccttcttgctctggcgcaccccggcgacggcagtggcagtggctttggctggcctgtagtacgccgcgtcgttcgcggcctgggttccggaaagctccggtacctcggccaatctcctgccggctttcggcgtctgctcgtggaagaggtcgatgtcggtgaaccactccagctccttgaacccgagcggggactccttgtgcagcttgtcgctggactcgcagtcggagaactgcaggagctcgtcgacggcccagccctgtggcaggaactgcggcggcgagggcacctgctgcgccgcggaggagacggcggccttgggcggggcgtggtggtcggagtcgtcgtgggcgtcgcaggcgtcactgcacgctgacgaagcggaggcgaagccgacgcggatgccggtggcgaggtagcgctggtggttcccggagagcgtgcccgggacgtggatgggctcgtcgcagtcccggcagaagagcgcccggtcctccacgcagaagatgaacgccgctttctcctggcagacgtcgcagcgcgggaggctggcggagagagcctcgagcgggaggcgctggtgcttgctggcgagcttgttggcggcgtggatctcgacgtcgcagcgcgcgcacagcgcggcctcgtcggcgcagcacaccacggtggcagccgcgccctcgcacgcgtcgcactggatcttcatggccgctccacctctctgtctgcggtctatactcccaggcccagctcgctatcctgtcctgtcgtctcgcaagtcgcaacaacgagggaggcaaggacgaacaagataaggccaccgactgcgatggaggaggacgagcttgcgcgcgcgagcacgcaactggagcaatcagtgagctgccgctgccgggcgagcttgtggtggaggactcgccggggagacttgtggccaggggctcccggctcgtctccccgtgtactagctacacgccggaaccacgcttggacgcgccgattcaggtttttttttttgggctcactcggcggaacgggccctgtcactcccggtattgcctttttacatggttttgttattgatttgaagaaaatttggtcagaactcaggaccgtttgtagtacttgtcactcgagctctctgtacccaagtgaaagtgtcaggtgttgaggaaatgttatgttaaaaacatcggagatgtctcttagactgctactagtcggttgcccgtgcgttgcgccggtttacataatacctcacgtaaactatccataaatttttttaagattttcaaccggcgcatgtgctaaccgcccgccccaacccacgttagggcgttcgcgccccaagggcccgtcccattggctcagcccgcccggcagacgcgcctcggcgggccgcctcgaagctcccttcccaacgggcggcgtgcttaaaaaacacaaaataatgtacac

SEQ ID NO: 1435 - DNA, 457 bp, Zea mays
  unsure (1)..(457): unsure at all n locations
  Clone ID: TF_LIB4729-095-Q1-K1-F11
cctctcccgngagccgtaccccgcctcccggttcaaccaaatccctctcgcctcatccccaccagcgcaaagccgncctatcgacctgacnagagaagcaatggagnnccgagggaaggtagatggagctggtgccgcnaagaaagcaacgncaaggagctccaaggctggnctgcagattcccgtcgncaggatcgctcggttcctcaaggccgncaagtacgccgagcgcgtgggcgccggcgcccctgnctacctcccacctgtcctcnagtacctccccgctgaggncctgaagcttgctggnaacgcagcgaggaataacaagaagacccgcatcgtgccgcgtcacatcccgctccccgtgcgcacccacgaagagctgacccagctgcttgncgcagcccccctccccagcgccgcccccatgccccccatccaccaacccctcctcccc

SEQ ID NO: 1436 - DNA, 662 bp, Zea mays
  Clone ID: TF_ZmC369_37
ctcgaggccggccgggccatagaaatcgaccgagcgaatccctcgcatcgcattcgcagcctttgctgcatcacaccaccgcgaaaccccagcagccgcatcgatggcgcccaaggcggagaagaagccggctgcgaagaagccagcggaggaggagcccgctgccgcgaaggccccggcggggaagaagcccaaggccgagaagcgcctcccggcggccaagtcgtccggcaaagaaggcggcgacaagaagggtaagaagaaggcgaagaagtcggtggagacctacaagatctacatcttcaaggtgctgaagcaggtccaccccgacatcggcatctcttccaaggccatgtccatcatgaactccttcatcaacgacatcttcgagaagctcgccggcgaggctgccaagcttgcgcgctacaacaagaagcccaagcacgcggtctccgagggcaccaaggccgtcactaagttcacatcatcttagatttgaggtagtagctattgggtggcgttggtagttgtgtctcaatttgtctgctactaatagtggtaggagtatccatgtgtagttgggttgtggtaagaattgtgttaaactggtaatacgtttgaaattgctttttatggatgtggaatagttgtgttgcttgtct

SEQ ID NO: 1437 - DNA, 445 bp, Zea mays
  unsure (1)..(445): unsure at all n locations
  Clone ID: TF_jC-zmXLIB3526P100dc07a1
tcgacccacgcgggcggcgcattcgttccaaatcctgagcactttcttctcgtcccagacaagccaatcgaagccgagatacgaccatggactccaccggcaccggagcacggggtaaggggaagaaaggagcggccgggcgcaagggcggcgggccattgaagaaggcggtgtcnaggtccgtgaaggacggtcttcagttccccgtcggccgcatcgggcgctacttgaagaaaggccgctacgcgcagcgtgtcggcaccggcgcccccgtctacctcgccgatgtcctcgaatacctacccgctgaggttctggagctcgccggtaatgctgcccgggacaacaagaagactcgcattatttcgcgccacgcgcttgtggcgatccggaacgacaaagagccttgcgaagctgttgggcggggggccatcgctcaccggcg

SEQ ID NO: 1438 - DNA, 554 bp, Zea mays
  Clone ID: TF_LIB4665-006-R1-M1-F6
ccacgcgggcgggagcactcgccgccactcaccatcaaattcccaagccgccccttcccccatctctttcgcgccccatttgatcgattcctgatggcgcccaaggccgagaagaagcccgcggagaataatccggcggaggataatgccgagaagaagccaagggcggataatcgcgtgccgagcaaggagggcggcgagaataagggaaagaagaaggcgaagaagagcgtggagacgtacaagatctacatcttcaaggggctcaagcaggtgcacccggacattggcatctcgtccaaggccatgtgcatcatgaactccttcatcaacgacatcttcgagaagctcgccgccgaggcagccaagctcgcccgctacaacaagaagcccaccatcacctcccgggagatccagacctcggggcgcctcgtcctccccggggagctcgccaagcacgccgtctccgaagggaccaaggcgggtaccaaggttacatcctcttatggggccgccgccgccgcacgttgctaaattttctcatatttaggact

SEQ ID NO: 1439 - DNA, 633 bp, Zea mays
  Clone ID: TF_LIB4764-037-R1-K1-D4
cattgggtacctccgagccggccgggaaccgcaatcttcgatctccccagcaatccctagcagaagccctccatcctcactcggtcgatggcccgcacgaagcagacggggaggaagtccaccggtggcaaggcgccgaggaagcagctggcgactaaggcggtccgcaagtctgcccctgcgaccggcggagtgaagaagccccaccgcttccgccccggaaccgtcgcgctccgggagatccgcaagtaccagaagagcacggaggtgctgacccgcaagctgccgttccagcgcctggggcgggagatcgcgcaggacttcaagaccgacctacgcttccagagctctgctgtctccgcgctgcaggaggcggctgaggcctaccttgtcgggctcttcgaggacaccaacctctgcgccatccacgccaagcgcgtcaccatcatgcccaaggacatccagcttggccgccgcatccgcggtgagagggcctaagcgtcatattttctgtcatcagtgcccgatcagaagatgcagagatacgctgagttctgcagactaggtactgtcagatcatcgagtgttggcctgtcactgctgtaacttaattatcatgatgcatatgaaatg

SEQ ID NO: 1440 - DNA, 656 bp, Zea mays
  Clone ID: TF_LIB5026-055-A1-XP1-F7
gcaggcagaggcagctcagcagcagccagctccatccatcctctttcccctcctcgcttcgcttcctcggcggattcctcctccctcggccgtccccgtcccctttttcaacgctcgcaggtaagcagataggcaccaagggtgaccgtaagtctgcccccaccactggtggagtgaagaagactcaccgctaccgccctggaactgttgccctccgcgagatccgcaagtatcagaaaagcactgagctgctgatcaggaagctgcccttccagaggctcgtcagggaaattgcacaggacttcaaaactgatttgcgtttccagagccatgcggagcttgccctccaggaggctgctgaggcataccttgttggcctgtttgaggacaccaacctgtgcgccatccatgctaagcgtgtgaccatcatgccaaaggatattcagctggcaaggaggatcccgcgccgagagggcctaatcgccacctcaaacatcgtgacaaaaacatgaagtcctggggttattgttaatctggtgccattgtaaggacatatgaatacggcttgctttgagaatagacaagttctcttctgctaatgttgctgctacctttgatggtgctattgctaaggccgaaaacttaagttaactatg

SEQ ID NO: 1441 - DNA, 509 bp, Zea mays
  Clone ID: TF_LIB3354-104-Q6-K2-B1
ggcatccgcagagagcttgttccgtccaggcaaccaaaaagcatgttgccccgccgcgcataggaagaagagagcagaggaggatggctcgtacgaagcataccgtccgcaagtccacgggaggcaaggccccccgcaagcagctcgccaccaaggcggagaggaagtcggcgccgacgaccggcggcgtgaagaagccccacaggtacaggcccggaaccgtggcgctgcgcgagatccgcaagtaccagaagagcacggagctgctgatccgcaagctgcccttccagcgcctggtgcgcgagatcgcgcaggacttcaagacagacctccggttccagagccacgccgtgctggcgctccaggaggccgccgaggcctacctcgtcggtctgttggaggacaccaacctctgggccatccacgctaagcgcgtcaccatcatgcccaaggacatccagctcgaccgccgcatccgtggtgagcgctcgtagccatcatctccgggg

SEQ ID NO: 1442 - DNA, 573 bp, Zea mays
  unsure (1)..(573): unsure at all n locations
  Clone ID: TF_LIB4666-020-R1-K1-G6
tttttccggcctcccattcctcgcgcggcgaccacccgattcgaagcgtgcggagagaccgaagaagcgggagagatggctcgtaccaagcagactgctcgcaagtccacgggagggaaggctcccaggaagcagcttgccaccaaggctgcccgtaagtctgcccccaccactggtggagtgaagaagcctcaccgctaccgccctggaactgttgccctccgtgagatccgcaagtatcagaagagcactgagctgctgatcaggaagctgcccttccagaggctcgtcagggaaattgcacaggacttcaaaactgatttgcgtttccagagccatgcggtgcttgccctccaggaggctgctgaggcataccttgttggcctgtttgaggacaccaacctgtgcgccatccatgctaagcgtgtgaccatcatgccanaggacattcagctggcanggaggatcccgcgcgagagggcctaatcgccacctcaaacatcgtgacanaaacatgaagtcctggggttattggtaatctggtgccatttgtaggacatatgagtagggttt

SEQ ID NO: 1443 - DNA, 575 bp, Zea mays
  Clone ID: TF_LIB4742-057-R1-K1-E4
cctcgaggccggccggggccaccgaaatcttccgtcccaaatcgaccgagcgaattcaccacagcttctcaccaccgataccttcgatggcacccaaggcggacaagaagccggcggcgaagaagtccgcagaggaggagcccgcgacagagaaggcaagaaggggaaaaagaaagcgaagaagtccgtggagacctacaagatctacatcttcaaggtgctgaagcaggtgcaccccgacatcggcatctcgtccaaggccatgtccatcatgaactccttcatcaacgacatcttcgagaagcttgcggccgagtccgccaagctggcgcgctataacaagaagcccaccatcacctcccgcgagatccagacctcggtgcgcctcgtcctccccggcgagcttgccaagcacgccgtctccgagggcaccaaggccgtcaccaagttcacctcttcttaaggttcatagtactaggctgggtggtgttggtagacgtggctcaatttatctggtaggggtagtgatggatgatatgatctgcgtctatttgagctgttaaaactgatgaaca

SEQ ID NO: 1444 - DNA, 676 bp, Zea mays
  Clone ID: TF_ZmC519748_1
atcttctctgtctctgctacatctcccgcccagccaaacttctctctcgccttcgaagaagaagccgcagcatccatggcccccaaggctgctgagaagaagccggtggagaagacccccgcgggcaagaagcccaaggcggagaagaaggtgccggcgtccaaggagggcggcgacaagaaggggaagaagaaggccaagaagagcgtggagacgtacaagatctacatcttcaaggtgctcaagcaggtgcaccccgacatcggcatctcctccaaggccatgtccatcatgaactccttcatctacgacatctttgagaagctcgccggcgagtccgccaagctcgcgcgctacaacaagaagcccaccatcacgtcccgcgagatccagacctccgtccgcctcgtcctccctggcgagctcgccaagcacgccgtctccgagggcaccaaggccgtcaccaagttcacctcgtcctaggctcctcgtgcattagttcttgtgtttctttcctgttcctcgtctgatgagttctgtagctagctgtgtgtgttctgacagtgtcatcctgtaacaatggtgctgcctgaataaatagtcgtcttgctgcttgaatggacgactgtcgctagtatgcttgactgccacatgtttaatcagtttcttctcgggc

SEQ ID NO: 1445 - DNA, 680 bp, Zea mays
  unsure (1)..(680): unsure at all n locations
  Clone ID: TF_LIB4730-027-R1-K1-A5
nacaacgatcacagtctccctagcaatctctagcagcagatcctcgttcgaagccaagcgctagccttcctactgtcccgatggcccgcacgaagcagacggcgaggaagtccactggcggcaaggcgccaaggaagcagctggccacgaaggcggcgcgcaagtctgccccggcgaccggcggagtgaagaagccccaccgtttccgccccggcaccgtcgcgctccgggagatccgcaagtaccagaagagcacggagctgctgatccgcaagctgccgttccagcgcctggtgcgtgagatcgcccaggacttcaagaccgaccttcgcttccagagctccaccgtcgccgcgctgcaggaggcgtccgaggcctacctcgtcgggctcttcgaggacaccaacctctgcgccattcacgccaagcgcgtcaccatcatgcccaaggacatccagctcgcccgccgcatccgtggggagagggcctaggcgtgttcgcggtggagttggaaagtagtagtcgcagttttctgtcatcactgtctggttagaagttgaagagattgcccggttatgtagttttgggttattggtcgaatcattatgtagtttgggtcttcactgctgtaatttaactatgactatgcaatgcaaatgaagttcctcgttatcacttcg

SEQ ID NO: 1446 - DNA, 814 bp, Zea mays
  unsure (1)..(814): unsure at all n locations
  Clone ID: TF_ZmC369_106
cattgggtacctcgagggctgnccgggacaacacctagaagcaagaaaagcctcctcccgtccgcatcgcccctcatctccctcgaccccgacatccccgacccgatggcgcccaaggccgagaagaagccagcggagaagaagccggcggccgaggagaaggcggagaagacgaccgcagggaagaagcccaaggccgagaagcggctgcccgcgtccaagtcctccggcaaggagggcggcgagaagaaggggaagaagaaggccaagaagagcgtggagacctacaagatctacatcttcaaggtgctgaagcaggtgcaccccgacatcggcatatcctccaaggccatgtccatcatgaactccttcatcaacgacatcttcgagaagctggccggcgaggcagccaagctggcgcggtacaacaagaagcccaccatcacgtcccgcgagatccagacctccgtgcgcctagtcctccccggagagctcgccaagcacgccgtctccgagggaaccaaggccgtcaccaagttcaccagcaactgagcgcgctgcgggatccgcggatctgttagaagggttctttgctgtgtcctttccccagtaccctacccgcctagtagctagcttgcctgctctataaatccggcgcgccggattgtaatggtcctcttagatttgatgcccctgttgtggaatatagttgtatctctccgcttgctatttttctcattctttaggaacttggaaatctggtaattttgccgggagataactaggatcatcacaaattcgcgttgacaacgcg

SEQ ID NO: 1447 - DNA, 807 bp, Zea mays
  Clone ID: TF_ZmC369_152
cattgggtacctcgaggccggccgggcacaacaccaagaagcaagaaaactagaaaaggctcctcccgaccgcaacacccctcatctccctcgaccccgacatccccgacccgatggcgcccaaggcggagaagaagccagcggagaagaagccggcggccgaggagaaggcggagaagacgaccgcagggaagaagcccaaggccgagaagcggctgcccgcgtccaagtcctccggcaaggagggcggcgagaagaaggggaagaagaaggccaagaagagcgtggagacctacaagatctacatcttcaaggtgctgaagcaggtgcaccccgacatcggcatatcctccaaggccatgtccatcatgaactccttcatcaacgacatctttgagaagctggccggcgaggccgccaagctggcgcggtacaacaagaagcccaccatcacgtcccgcgagatccagacctccgtgcgcctagtcctccccggagagctcgccaagcacgccgtctccgagggaaccaaggccgtcaccaagttcaccagcaactgagcgcgctgcgggatccgcggatctgttagaagggttctttgctgtgtcctttccccagtcccccaccctacccgcctagtagctagcttgcctgctctataaatccggcgcgccggattgtaatggtcctcttagatttgatgtccctgttgtggaatatagttgtatctctccgcttgctatttttctcattctttaggaacttggaaatctggtaattttgccgggagataactaggatcatcac

SEQ ID NO: 1448 - DNA, 823 bp, Zea mays
  unsure (1)..(823): unsure at all n locations
  Clone ID: TF_ZmC369_78
cctcgagccggccgggaacccaagaagcaagaaaactagaaaagcctcctcccgaccgcatcgcccctcatctccctcgaccccgacatccccgacccgatggcgcccaaggccgagaagaagccagcggagaagaagccggcggccgaggagaaggcggagaagacgaccgcagggaagaagcccaaggccgagaagcggctgcccgcgtccaagtcctccggcaaggagggcggcgagaagaaggggaagaagaaggccaagaagagcgtggagacctacaagatctacatcttcaaggtgctgaagcaggtgcaccccgacatcggcatatcctccaaggccatgtccatcatgaactccttcatcaacgacatcttcgagaagctggccggcgaggccgccaagctggcgcggtacaacaagaagcccaccatcacgtcccgcgagatccagacctccgtgcgcctagtcctccccggagagctcgccaagcacgccgtctccgagggaaccaaggccgtcaccaagttcaccagcaactgagcgcgctgcgggatccgcggatctgttagaagggttctttgctgtgtcctttccccagtcccctaccctacccgcctagtagctagcttgcttgctctataaatccggcccgccggattgtaatggtcctcttagatttgatgcccctgttgtcgaatatagttgtatttctccgcttgctattttctcattctttaggaacttggaaatttagtatttttgccgggagataactgggatcatcacaaatttcgcgtgacnacgcgacctcacatgg

SEQ ID NO: 1449 - DNA, 529 bp, Zea mays
  Clone ID: TF_LIB4975-071-A1-K1-F1
atccaatcagcatctacagatcaagtataaccgcgaagccgcccccgctcccaaacccgaccgagtaaagcgctaagccccccaaccgcggatcaatccgcagcatcaatggcgtcgcaaggcgagagaaaaaggcggcggctagagaagcccgcggaggaggagcccgcgcaccgagaaggcggagaaggctccggcagggaagaagccgaaggcggagaaacgcctccccgcgggaaagtccggcgccgaagagggcaagaatggtagagtaagaaagccaagaagagcgtggagagctacaagatctacatcttcgaggtgctcaagcaggtgcaccccgacatctggcatctcgtccaaggtcatgtacatcatgaattccttcatcaacgacatcttcgagaagctcgacgtgtaggccgtcaagctcgaccgctacaacaagaagcccaccatcatctcgctcgagatccagatctccgtccgcctcgtcctacccggcgagctcggcaagcacgccgtctct

SEQ ID NO: 1450 - DNA, 257 bp, Zea mays
  Clone ID: TF_LIB3076-018-Q1-K1-E6
atctccgaacatctgctcagaccttttaagttctgctccggccatggacgccacgggcactggtactttattgaaggctaacaacgtatccgccggtcgcaaggccggccgtcccatgaagaaatctgtgacgaggtccgtcaaggccgggctccagtttcccgtctgccgcatcgggcgctacctcaaaaatggccgctactctcagcgcgtctgcagctttgcccccgtctacctcgcggtcgtcctgtaatacc

SEQ ID NO: 1451 - DNA, 410 bp, Zea mays
  Clone ID: TF_LIB3279-230-Q6-N6-E12
aaaaaaaacaaggcttttttttttcctttctaaatagcaaaggacaacttgcggggggacacatccccatacaggggcgttggccccatttgcagcctacccataaccgaatacggggaacaagggcctgctaaacatcaaatcactccggacaggcagtctatgcctttttaggggacttgggggcctttttgggcaattttgcctccttgctccccccactggaccccttttccgccgtttttttgggcaaaaaaacagggttgattttggggagcacacccccgggagcgatggtcaccccccccaaaagtttcccaagctccttttttttccggatccccaaaagcacgtggcgcgaaataatgcaagtttttttgttgtccctggcagcattaccgggaagctcc

SEQ ID NO: 1452 - DNA, 445 bp, Zea mays
  Clone ID: TF_LIB3608-007-Q1-N6-H1
gggccggggggggcaaccccaaataaaaacagggcctcctaagggtggaagcaaattatttgggggcaattgggaatattattaaaaatttccacactacattggtcctcgggcaacctattagcactggcctaaaagccgaggaaacaaaacaaagccgtcgttccgggcgggggggatctaagaggaagaaaacttggaaacggccttggggccctcggaaacggggtgcttgggaagctccccaggaaggacgaggcccaccaaaatctggatctcccgggagggtatggggggctttttgttgaaacgggcaaacttgggggccttggaagccaacttttcaaaaatgtcgttgatgaaggagttcatgagggacatggccttggacaaaataccaaaggccgggggcacctgcttgagcaccttgaaaaaagaaaaactt

SEQ ID NO: 1453 - DNA, 422 bp, Zea mays
  Clone ID: TF_uC-zmroteosinte022h10b1
cgcgaccacccgatacgaagcgtgtggagagattgaagaagcatgagtgatggctcgtaccaagcagactgctcgctagtccacgggagggaaggctcacaggaagcagcttgccaccaaggctgccctgaagtatgcccccaccactggtggagtgaagaagcctcaccgctaccgccctggaactgttgcccttcgtgagatccgcacgtaccataagagcactgagctgctgatcatgaagctgcccttccagaggcttgtcagggaaattgcacaggacttccagacttgatttgcgtttccagagccatgccgtgcttgccctccacgaagctgctgaggcataccttgttggtttgtttgggacaccaacctgtgcgccatacatgctaagcgtgtgaccatcatgccaaaggaca

SEQ ID NO: 1454 - DNA, 1019 bp, Zea mays
  unsure (1)..(1019): unsure at all n locations
  Clone ID: TF_ZmC2834_3
aggccggaggaagacggcggagaagcccaagaagaagctccagttcgagcgctcaggtggtgcgagtacctcggcgacgccggaaagggctgcnnnnnnnnnnnnnnnnnnnnnnnctggaggtgactcagttaagaagacgaaaccacgccaccgctggcggccagggactgtagcgctgcgggagatcaggaagtaccagaagtccactgaaccgctcatcccctttgcgcctttcgtccgtgtggtgagggagttaaccaatttcgtaacaaacgggaaagtagagcgctataccgcagaagccctccttgcgctgcaagaggcagcagaattccacttgatagaactgtttgaaatggcgaatctgtgtgccatccatgccaagcgtgtcacaatcatgcaaaaggacatacaacttgcaaggcgtatcggaggaaggcgttgggcatgatatataatatccattctgattgcatcattcttgtgaatttgtttgtaggagctagacattagtgttgttgaatgctgcatggttcctaatccttttcgcagtctaacatctgtggagttagtatgttacatggcaacggacgcgtgggtgtggactatatggcaacagccgaagattgtgtctgtgggataactggtggttttggttgctcttcagtagtttgtttgcttcagtctgcagtatggactatggagtaaactgcatgctgaaacccgaaccactgctgaaactgcatgctgaaacccgaaccactgctacggcagttgccaggatagcaggagggcctttatgcacagtggaattgagtagagaactgagtaaaccatggttctttctccttttgaactggaacacacacagttggatcttgtttctcttcttaggccattcatcgtgtttattaggggtgtaaatggtacaaatattatctgtccgtattcgaatttgatctatctaagaaggttgaaatccgaaaaaaaaaataaaaaaccctaacaatttcacc

SEQ ID NO: 1455 - DNA, 669 bp, Zea mays
  Clone ID: TF_LIB4975-051-A1-K1-E8
atgattaacatccgtcctctgtccgtcctaccccaccgctccctcggtttggctgtctcccctattacgcacacgcttctcgctccggattccgtattccctccgctctttccctaccgaacggagccatgatggacataggcaaggcgatcggatcaggcgccgccaagaaggccacgtccaggagctccaaggctgggctccagtgccccgtggtaaggatcgccaggttcctcaagggcgccaagtatgccgagagagtccgcgccggcgcccctgtctacctcgctgccgtgctcgagtatcttgctgctgaggatcttgagctggccgctaatgcggcacgtgacaacaagaatacccgtatcgtaccgcgccacatccagctcgccgtccgcaacgacgaagagctctcccgcttgctgggcacggcgaccatcggtagcgctggtgtaccgcccaacatccataaccttttgctcccgaagaatgccgtgggcacgagcgccaaggctgcggatggcgacgaggactaatgccttgactacgactggtgagaccttcaggatggtgccgtatcaacatgtgtctgtgcactacgttaagagccgcgtgaatgtgatcatgcgggctgctgtaacaatgctatcacaaggatctcctgtgctt

SEQ ID NO: 1456 - DNA, 699 bp, Zea mays
  Clone ID: TF_ZmC369_39
ctcctcgcatttccttgcaaccgattgcctatccccctctcaacccaagaccgatggcgcccaaggcggagaagaagcccgcggcgaagaagccggcggaggaggagcccgcggcggagaagacgaccgccgggaagaagcccaaggcggagaagcgggtccccgcgggcaagtccgccggcaaggagggcggcgagggcaagcgtggcaggaagaaggggaagaagagcgtggagacgtacaagatctacatcttcaaggtgctgaagcaggtgcacccggacatcggcatctcgtccaaggccatgtccatcatgaactccttcatcaacgacatcttcgagaagctggccggcgaggccgccaagctcgcgcgctacaacaagaagcccaccatcacgtcccgcgagatccagacctccgtgcgcctcgtgctccccggcgagctcgccaagcacgccgtctctgagggcaccaaggccgtcaccaagttcacctcctcctaggcttgcacgctcgccctttgtaggcttctcttgtgttgatgttcccccttgtgttgtagttagatgttgctggtttctctgtcggcgctgctcgtaactgcgtcatgtaacccagcaaggacttgtttaattgtgaatcagcaacactttgttgttgatcactttatgttccaaattctgagtttgacgctcg

SEQ ID NO: 1457 - DNA, 650 bp, Zea mays
  unsure (1)..(650): unsure at all n locations
  Clone ID: TF_LIB4669-005-R1-K1-D3
accctcggagtcttccggaccgcaatcttcaatctccccagcaatccctagcagaagccttccatcctcactcgctcgatggcccgcacgaagcagacggcgaggaagtccaccggcggcaaggcgccgaggaagcagctggcgactaaggcggcccgcaagtctgcccctgcgaccggcggagttaagaagccccaccgcttccgccccggcaccgtcgcgctccgggagatccgcaagtaccagaagagcacggagctgctgatccgcaagctgccgttccagcgcctggtgcgggagatcgcgcaggacttcaagaccgacctacgcttccagagctccgctgtctccgcgctgcaggaggcggctgaggcctaccttgtcgggctcttcgaggacaccaacctctgcgccatccacgccaagcgcgtcaccatcatgcccaaggacatccagcttgcccgccgcatccgcggngagagggcctaagcgtcatattctctgtcatcagtgcccgatcagaagatgtagagatgtgnctgnnttctgtaatttgggttactgtcgaatcatcgagtagttggttggtcactgttgtaacttaattattatgatgcttatgaaatggcaatgaagctttggttttactt

SEQ ID NO: 1458 - DNA, 640 bp, Zea mays
  unsure (1)..(640): unsure at all n locations
  Clone ID: TF_LIB4669-006-R1-K1-G9
ccctcgaggcttccggacccgaatcttaatctcccagcaatccctagcagaagccttccatcctcactcgctcgatggcccgcacgaagcagacggcgaggaagtccaccggcggcaaggcgccgaggaagcagctggcgactaaggcggcccgcaagtctgcccctgcgaccggcggagtgaagaagccccaccgcttccgccccggcaccgtcgcgctccgggagatccgcaagtaccagaagagcacggagctgctgatccgcaagctgccgttccagcgcctggtgcgggagatcgcgcaggacttcaagaccgacctacgcttccagagctctgctgtctccgcgctgcaggaggcggctgaggcctaccttgtcgggctcttcgaggacaccaacctctgcgccatccacgccaagcgcgtcaccatcatgcccaaggacatccagcttgcccgccgcatccgcggngagagggcctaagcgtcatattntctgtcatcagtgcccgatcagaagatgtagagantatgctggttctgtagtttggggtactgtcgaatcatcgagtgttgggctggtcactgctggtacttaattatcatgatgcatatgaaatggcaatgaactctgttatc

SEQ ID NO: 1459 - DNA, 641 bp, Zea mays
  Clone ID: TF_LIB4729-002-R1-K1-C10
acagcaatcttcaatctcccgagcaaagcaaagctctagccttccatcctcactcgctcgatggcccgcaccaagcagacggctaggaagtccaccggcggcaaggccccgaggaagcagctggcgactaaagcggcccgcaagtctgcccctgcgaccggcggagtgaagaagccccaccgcttccgccccggcaccgtcgcgctccgggagatccgcaagtaccagaagagcacggagctgctgatccgcaagctgccgttccagcgcctggtgcgggagatcgcgcaggacttcaagaccgacctacgcttccagagctccgctgtctccgcgctgcaggaggcggctgaggcctaccttgtcgggctcttcgaggacaccaacctctgcgccatccacgccaagcgcgtcaccatcatgcccaaggacatacagcttgcccgccgcatccgcggggagagggcctaagcatcatatatttctgtcatcaccgcccgatcaggagatgcacagatgggcctgggttctagcagtttgggttacctgccaatcatcgagaagttggtttgttaactgctgtaactttactatcacgatccataatgaaaagggcaacggaaccatttttatcaacagac

SEQ ID NO: 1460 - DNA, 698 bp, Zea mays
  Clone ID: TF_LIB4729-002-R1-K1-H10
acagcaatcttcaatctcccgagcaaagcaaagctttagccttccatcctcactcgctcgatggcccgcaccaagcagacggctaggaagtccaccggcggcaaggccccgaggaagcagctggcgactaaagcggcccgcaagtctgcccctgcgaccggcggagtgaagaagccccaccgcttccgccccggcaccgtcgcgctccgggagatccgcaagtaccagaagagcacggagctgctgatccgcaagctgccgttccagcgcctggtgcgggagatcgcgcaggacttcaagaccgacctacgcttccagagctccgctgtctccgcgctgcaggaggcggctgaggcctaccttgtcgggctcttcgaggacaccaacctctgcgccatccacgccaagcgcgtcaccatcatgcccaaggacatccagcttgcccgccgcatccggggggagagggcctaagcatcatatattctgtcatcagtgccccgatcagaaagatgtagcagatgtgcctgggttcctgtaggtttgggttactggccgatcatcgagtagttgggtggttcactgctggtacctttatttcatgatgcctttgaaatggctatgcaccatggcaatcagacctaggaaaaaaataaaaaaaaaggcggcccttcgggcctctgccttttggttcccctttt

SEQ ID NO: 1461 - DNA, 626 bp, Zea mays
  Clone ID: TF_LIB4729-040-R1-K1-C10
cggaccgcaatcttcatctccccagcaatccctagcagaagccttccatcctcactcgctcgatggcccgcacgaagcagacggcgaggaagtccaccggcggcaaggcgccgaggaagcagctggcgactaaggcggcccgcaagtctgcccctgcgaccggcggagttaagaagccccaccgcttccgccccggcaccgtcgcgctccgggagatccgcaagtaccagaagagcacggagctgctgatccgcaagctgccgttccagcgcctggtgcgggagatcgcgcaggacttcaagaccgacctacgcttccagagctccgctgtctccgcgctgcaggaggcggctgaggcctaccttgtcgggctcttcgaggacaccaacctctgcgccatccacgccaagcgcgtcaccatcatgcccaaggacatccagcttgcccgccgcatccgcggggagagggcctaagcgtcatattctctgtcatcagtgcccgatcagaagatgtagagatgtgctgggttctgtagtttggggtactgtcgaatcatcgagtagttggttggtcactgctgaaactaattatatgatgcatatgaagtggcaatgaactctttattc

SEQ ID NO: 1462 - DNA, 685 bp, Zea mays
  unsure (1)..(685): unsure at all n locations
  Clone ID: TF_LIB4729-041-R1-K1-D8
tgggaccctcgagccgccggaaccgaatcttcatctccccagcaatccctagcagaagccttccatcctcactcgctcgatggcccgcacgaagcagacggcgaggaagtccaccggcggcaaggcgccgaggaagcagctggcgactaaggcggcccgcaagtctgcccctgcgaccggcggagttaagaagccccaccgcttccgccccggcaccgtcgcgctccgggagatccgcaagtaccagaagagcacggagctgctgatccgcaagctgccgttccagcgcctggtgcgggagatcgcgcaggacttcaagaccgacctacgcttccagagctccgctgtctccgcgctgcaggaggcggctgaggcctaccttgtcgggctcttcgaggacaccaacctctgcgccatccacgccaagcgcgtcaccatcatgcctaaggacatccagcttgcccgccgcatccgcggngagagggcctaagcgtcatattctctgtcatcagtgcccgatcagaagatgtagagatgtgctgggttntgtagtttgggttactgtcgaatatcgagtagttgggtggtcactgctgaaactaatatcaatgagcaatgaaaggcaatgagctctgtatcaccgaaaaaaaaaaaaaaaaggggcctcgagctcaacttttggttc

SEQ ID NO: 1463 - DNA, 647 bp, Zea mays
  unsure (1)..(647): unsure at all n locations
  Clone ID: TF_LIB4729-049-R1-K1-E2
ggggaccctcgggcctccggacccgaatcttaatctcccagcaatccctagcagaagccttccatcctcactcgctcgatggcccgcacgaagcagacggcgaggaagtccaccggcggcaaggcgccgaggaagcagctggcgactaaggcggcccgcaagtctgcccctgcgaccggcggagttaagaagccccaccgcttccgccccggcaccgtcgcgctccgggagatccgcaagtaccagaagagcacggagctgctgatccgcaagctgccgttccagcgcctggtgcgggagatcgcgcaggacttcaagaccgacctacgcttccagagctccgctgtctccgcgctgcaggaggcggctgaggcctaccttgtcgggctcttcgaggacaccaacctctgcgccatccacgccaagcgcgtcaccatcatgcccaaggacatccagcttgcccgccgcatccgcggggagagggcctaagcgtcatattctctgtcatcatgtgcccgatcatgaagatgntagagatgtgctgggttctgtagtttgggttactgtcgaatcatcgagtagtgggttgttcactgctgtaacttaattatcatgatgcatatgaaatggcaatgagctctgttacc

SEQ ID NO: 1464 - DNA, 654 bp, Zea mays
  unsure (1)..(654): unsure at all n locations
  Clone ID: TF_LIB4762-025-R1-K1-B11
tcgaggtcctggcccgggacactcgcaanntcttcaatctccccagcaactccctagcagaagccttccatcctcactcgctcgatggcccgcacgaagcagacggcgaggaagtccaccggcggcaaggcgccgaggaagcagctggcgactaaggcggcccgcaagtctgcccctgcgaccggcggagtgaagaagccccaccgcttccgccccggcaccgtcgcgctccgggagatccgcaagtaccagaagagcacggagctgctgatccgcaagctgccgttccagcgcctggtgcgggagatcgcgcaggacttcaagaccgacctacgcttccagagctctgctgtctccgcgctgcaggaggcggctgaggcctaccttgtcgggctcttcgaggacaccaacctctgcgccatccacgccaagcgcgtgaccatcatgcccaaggacatccagcttgcccgccgcatccgcggggagagggcctaagcgtcatattttctgtcatcagtgcccgatcagaagatgtagagatatgctgggttctgtagtttggggttctgtcgaatcatcgagtgttgggctggtcactgctgggacttaattatcatgatgcatatgaaatggcgatgaactctggtatcaggc

SEQ ID NO: 1465 - DNA, 642 bp, Zea mays
  Clone ID: TF_LIB5027-040-B1-XP1-A5
ttgcaaaacagaggtcttcaatctcccgagataccaaagctctagccttccatcctcactcgctcgatggcccgcaccaagcagacgtctaggaagtccaccggcggcaaggccccgaggaagcagctggcgactaaagcggcccgcaagtctgcccctgcgaccggcggagtgaagaagccccaccgcttccgccccggcaccgtcgcgctccgggagatccgcaagtaccagaagagcacggagctgctgatccgcaagctgccgttccagcgcctggtgcgggagatcgcgcaggacttcaagaccgacctacgcttccagagctccgctgtctccgcgctgcaggaggcggctgaggcctaccttgtcgggctctttgaggacaccaacctctgcgccatccacgccaagcgcgtcaccatcatgcccaaggacatccagcttgcccgccgcatccgtggggagagggcctaagcatcatatattctgtcatcagtgcccgatcagaagatgtagagatgtgctgggttctgtagtttgggttactgtcgaatcatcgagtagttggctgttcactgctggaacttagtatcatgatgcatatgaaacggccatgaaacattgtatcagctctcgaac

SEQ ID NO: 1466 - DNA, 658 bp, Zea mays
  unsure (1)..(658): unsure at all n locations
  Clone ID: TF_LIB5116-032-A1-PF1-F7
ctccactctcgaaccttccaagctcctcccggcctcccctcgcttccaccgagtccctccgatccgatggcccgcaccaagcagactgcgcgcaagtccaccggcgggaaggcgccgcggaagcagctggcgacgaaggcggcgcgcaagtcggcgccggccaccggcggcgtgaagaagccgcacaggttccgccccggaaccgtcgccctgcgcgagatccgcaagtaccagaagagcacggagctgctgatccgaaagctgccgttccagcggctggtgcgggagatcgcgcaggacttcaagacggacctccggttccagtcgtccgccgtgtcggcgctgcaggaagccgcggaggcgtacctcgtcgggctgttcgaggacaccaacctctgcgccatccacgccaagagggtcaccatcatgcccaaggacatccagctcgcgcgccgtatcaggggcgagagggcctgatgaacgaattctctctgtctctgttctctgccgccgttgatgttcttggtgtcgtcgtcgtgtgttaggatttagaaaatgttgngttgtcgcctgctgcttaccattactagtatcttgtagcgatggttcgcctctggaatgtcgttcaatggaatgttaccgctgcttcattgctttg

SEQ ID NO: 1467 - DNA, 1528 bp, Zea mays
  Clone ID: TF_ZmC653_106
aaaaaaaaaaaaaaaaaaaaaaaaaaaaaaaaaaaaaaaaaaaaaaaaaaccgcaatcttcaatctccccagcaatccctagcagaagccttccatcctcactcgctcgatggcccgcacgaagcagacggcgaggaagtccaccggcggcaaggcgccgaggaagcagctggcgactaaggcggcccgcaagtctgcccctgcgaccggcggagtgaagaagccccaccgcttccgccccggcaccgtcgcgctccgggagatccgcaagtaccagaagagcacggagctgctgatccgcaagctgccgttccagcgcctggtgcgggagatcgcgcaggacttcaagaccgacctacgcttccagagctctgctgtctccgcgctgcaggaggcggctgaggcctaccttgtcgggctcttcgaggacaccaacctctgcgccatccacgccaagcgcgtcaccatcatgcccaaggacatccagcttgcccgccgcatccgcggggagagggcctaagcgtcatattttctgtcatcagtgcccgatcagaagatgtagagatatgctgggttctgtagtttgggttactgtcgaatcatcgagtgttggctgttcactgctgtaacttaattatcatgatgcatatgaaatggcaatgaactctgttatcagttctcgaaaaaaaaaaaaaaaaaaaaaaaaaaaaaaaaaaaaaaaaaaaaaatcacacagctttgcaaggccgccccatctctcaaaccatccgaacccccctcgccgctcactcccaagctaatccccgccggcagcgatggcccgcacgaagcagacggcgcgcaagtcgacgggcggcaaggcgccgcggaagcagctggcgaccaaggcggcgcgcaagtcggcgccggccacggggggcgtgaagaagccgcaccgcttccgcccgggcacccgtggcgctgcgggagatccgcaagtaccagaagagcacggagctgctgatccggaagctgccgttccagcggctggtgcgggagatcgcgcaggacttcaagacggacctccggttccagtcctccgccgtggccgcgctgcaggaggccgccgaggcctacctcgtgggcctcttcgaggacaccaacctctgcgccatccacgccaagcgcgtcaccatcatgcccaaagacatccagctcgcgcgccgcatccggggcgagagggcctgagcacccccggtctctactgcgattccttcgcttcctgatttctgtagcgggaagaactactgtagtaggcgaggaactactgcgtgttatattggggttgtgggtaggaaactaggaatgttctgttggtttcgatgcagtgccccccgtgatactgacatccgtgctgcttgttctgttcttcctactacgaatgcgattgttactattattttagcgtttgtttatgcggttatgcttctggaactgaacagtgctacttgttaccgctttctgccccaaaaaaaaaaaaaaaaaaaaa

SEQ ID NO: 1468 - DNA, 634 bp, Zea mays
  Clone ID: TF_ZmC653_48
aacagcaatcttcaatctcccgagcaaagcaaagctctagccttccatcctcactcgctcgatggcccgcaccaagcagacggctaggaagtccaccggcggcaaggccccgaggaagcagctggcgactaaagcggcccgcaagtctgcccctgcgaccggcggagtgaagaagccccaccgcttccgccccggcaccgtcgcgctccgggagatccgcaagtaccagaagagcacggagctgctgatccgcaagctgccgttccagcgcctggtgcgggagatcgcgcaggacttcaagaccgacctacgcttccagagctccgctgtctccgcgctgcaggaggcggctgaggcctaccttgtcgggctcttcgaggacaccaacctctgcgccatccacgccaagcgcgtcaccatcatgcccaaggacatccagcttgcccgccgcatccgtggggagagggcctaagcatcatatattctgtcatcagtgcccgatcagaagatgtagagatgtgctgggttctgtagtttgggttactgtcgaatcatcgagtagttggttgttcactgctgtaacttagtatcatgatgcatatgaaatggcaatgaactatgttatcagttctcg

SEQ ID NO: 1469 - DNA, 678 bp, Zea mays
  Clone ID: TF_ZmC653_70
ccgggaaaaaaaaaaaaaaaaacaccgcaatcttcaatctccccagcaatccctagcagaagccttccatcctcactcgctcgatggcccgcacgaagcagacggcgaggaagtccaccggcggcaaggcgccgaggaagcagctggcgactaaggcggcccgcaagtctgcccctgcgaccggcggagttaagaagccccaccgcttccgccccggcaccgtcgcgctccgggagatccgcaagtaccagaagagcacggagctgctgatccgcaagctgccgttccagcgcctggtgcgggagatcgcgcaggacttcaagaccgacctacgcttccagagctccgctgtctccgcgctgcaggaggcggctgaggcctaccttgtcgggctcttcgaggacaccaacctctgcgccatccacgccaagcgcgtcaccatcatgcccaaggacatccagcttgcccgccgcatccgcggggagagggcctaagcgtcatattctctgtcatcagtgcccgatcagaagatgtagagatgtgctgggttctgtagtttgggttactgtcgaatcatcgagtagttggttgttcactgctgtaacttaattatcatgatgcatatgaaatggcaatgagctctgttatcacgaaaaaaaaaaaaaaaaaaggccccta

SEQ ID NO: 1470 - DNA, 659 bp, Zea mays
  Clone ID: TF_ZmC653_79
ccgggacaccgcaatcttcaatctccccagcaatccctagcagaagccttccatcctcactcgctcgatggcccgcacgaagcagacggcgaggaagtccaccggcggcaaggcgccgaggaagcagctggcgactaaggcggcccgcaagtctgcccctgcgaccggcggagtgaagaagccccaccgcttccgccccggcaccgtcgcgctccgggagatccgcaagtaccagaagagcacggagctgctgatccgcaagctgccgttccagcgcctggtgcgggagatcgcgcaggacttcaagaccgacctacgcttccagagctccgctgtctccgcgctgcaggaggcggctgaggcctaccttgtcgggctcttcgaggacaccaacctctgcgccatccacgccaagcgcgtcaccatcatgcccaaggacatccagcttgcccgccgcatccgtggggagagggcctaagcatcatatattctgtcatcagtgcccgatcagaagatgtagagatgtgctgggttctgtagtttgggttactgtcgaatcatcgagtagttggttgttcactgctgtaacttattatcatgatgcatatgaaatggcaatgaactatgttatcactaaaaaaaaaaaaaaaaaagcggcc

SEQ ID NO: 1471 - DNA, 752 bp, Zea mays
  Clone ID: TF_ZmC653_85
ctcgaggccggccggggtttggatggatggatgaagaaggacaccgcaatcttcaatctccccagcaatccctagcagaagccttccatcctcactcgctcgatggcccgcacgaagcagacggcgaggaagtccaccggcggcaaggcgccgaggaagcagttggcgactaaggcggcccgcaagtctgcccctgcgaccggcggagttaagaagccccaccgcttccgccccggtaccgtcgcgctccgggagatccgcaagtaccagaagagcacagagctgctgatccgcaagctgccgttccagcgcctggtgcgggagatcgcgcaggacttcaagaccgacctacgcttccagagctccgctgtctccgcgctgcaggaggcggctgaggcctaccttgtcggtctcttcgaggacaccaacctctgcgccatccacgccaagcgcgtcaccatcatgcccaaggacatccagcttgcccgccgcatccgtggggagagggcctaagcatcgtatattctgtcatcagtgcccgatcagaagatgtagagatgtgctgggttctgtagtttgggttactgtcgaatcatcgagtagttggttgttcactgctgtaacttattatcatgatgcatatgaaagtggcaatgaactatgttatcaggaaaaaaaaaaaaaaaaaaaaaaaaaaaaataaaaaaaaaaaaaaaaaaaaaaaaaagaaaaaaaaaaaaaaaaaagcggcc

SEQ ID NO: 1472 - DNA, 879 bp, Zea mays
  Clone ID: TF_ZmC653_92
cctcgaggccggccgggaggcctccatattgacaaacagaaatcactgccaaatcccccagaaagtcaactcctccccaattccacgctgccaccaactcgccgtcctccgcgccaagcaccaaagctccgatggcccgcacgaagcagacggcgcgcaagtcaacgggcggcaaggcgccccgcaagcagctggcgaccaaggcggcgcgcaagtctgcgccggccaccggcggcgtgaagaagccccaccgcttccgccccggcaccgtcgcgctccgggagattcgtaagtaccagaagagcacggagctgctcatccgcaagttgcccttccagcgcctcgtccgtgagatcgcgcaggacttcaagaccgatctccgcttccagtcctccgccgtctctgcgctgcaggaggccgccgaggcctacctcgtggggctctttgaggacactaacctgtgcgccatccacgccaagcgcgtcaccatcatgcccaaggacatccagctcgcgcgccgcatcaggggagagagggcctgagcgaggcgagctcctctcaccgcaggcggcgtcgttgttgcttcgggcctgcttgtaggacttgtgcttctcttggtttcctttctggtggcagtggcatcttcgtaccattgtgcttgttcttagaatcttagggatagagagttgttcagttgctgggtaacctgattgtttatcttgcattcctgcctctgtaatggttgtctgctgtcttaatggaaatgatatttgcttttttaattcccagtttcatcaatatgttcaatctgtggttaatttttctgtggacaacattgtacccagtcagtttcatctataatataattccttatgtttt

SEQ ID NO: 1473 - DNA, 670 bp, Zea mays
  Clone ID: TF_ZmC825079_1
attgggtaccccctcgagggcccggcccgggacagcaatcttcaatctcccgagcaaagcaaagctctagccttccatcctcactcgctcgatggcccgcaccaagcagacggctaggaagtccaccggcggcaaggccccgaggaagcagctggcgactaaagcggcccgcaagtctgcccctgcgaccggcggagtgaagaagccccaccgcttccgccccggcaccgtcgcgctccgggagatccgcaagtaccagaagagcacggagctgctgatccgcaagctgccgttccagcgcctggtgcgggagatcgcgcaggacttcaagaccgacctacgcttccagagctccgctgtctccgcgctgcaggaggcggctgaggcctaccttgtcgggctcttcgaggacaccaacctctgcgccatccacgccaagcgcgtcaccatcatgcccaaggacatccagcttgcccgccgcatccgtggggagagggcctaagcatcatatattctgtcatcagtgcccgatcagaagatgtagagatgtgctgggttctgtagtttgggttactgtcgaatcatcgagtagttggttgttcactgctgtaacttagtatcatgatgcatatgaaatggcaatgaactatgttatcagttctccgattcc

SEQ ID NO: 1474 - DNA, 680 bp, Zea mays
  Clone ID: TF_LIB5116-061-A1-PF1-F4
aatagagtccagccacgaacacccgccgcgaaatcccaaatcaccaaccaaatcccctcccctcctctcccgcgtcccgacgagcaccagccatcagacatggacgcctcagccaccggagcgggagcgaaggcgaagaagggcgcggccgggcgcaaggccggcggccccaggaagaagtcggtgacgaggtccgtcaaggccgggctccagttccccgtcggccgcatcgggcgctacctcaagaatggccgctacgcgaagcgcgtcggcacgggcgcccccgtctacctcgccgccgtcctggagtacctcgccgccgagctgctggagctcgccgggaacgccgccaaggacaacaagaagtcccgcatcgtgcccaggcacctgctgctcgccgtccggaacgaccaggagctcgggaggctgctggctggcgtgaccatcgcgcacggcggcgtgctgcccaacatcaacccggtgctgctgcccaagaggacggcggagaaggagcccaaggagggcaagtcgcccaagaaggtcgccaagtcccccaagaaggccgacaagaaggcgtagagagagccgcgcgtcgattagcttaagctttgctgtaacagtgatcgctgttttactaattgtgtcgatgtagatctgtgctgtcatgaaaaattaattca

SEQ ID NO: 1475 - DNA, 682 bp, Zea mays
  Clone ID: TF_LIB4730-094-Q1-K1-D12
aaacgtttacagtctccctagctatctctagcagcagatgctcgttcgaagccaagcgctaggcttcctactgtgccgatggaccgcacgatgcacatggagaggaagtccactggcgggaaggcgccgatgaagcagctggtcacaaaggcggcgcgcaagtctgcctcggcgacctgcgtagtgaacaagccccaccgtttccgccccggcaccgtcgcgctccggtagatccgcaagaaccagaagagcacggagctgctgatccacaagctgccgttccagtgcctggagcgtgtagatcgcccagtacttcaagaccgaccttctcttccagagctccgccgtcgccgcgctgcaggaggcgtccgaggactacctcgtcgggctctgtcgaggacaccaacctctgctccattcacaccaagcgcatcaccatcatgcccaaggacattcagctcgtccgccgcatacgtggggagagggcctatgctgtcctctcggtgcatgtggaatgagaactctcagtgtctggcatcactgtctggctacaagatgtatacatgtggcggaatatggaggttgtcatattgatcgaatcattatgaattctgaatcttcactgctgtaattctactatgactatgcaagtggcaatgaatgtctcggttatcactccccg

SEQ ID NO: 1476 - DNA, 362 bp, Zea mays
  unsure (1)..(362): unsure at all n locations
  Clone ID: TF_LIB3356-007-P1-K1-D11
ttttaaacccatttcctcccaatccatcccgtctccaaacccgaactccaagtcgcccggcatcgatggcgcccaaggccganaagaagcccgtggcgaaaaagccggcggaggaggagcccgctgtcgagaaagcgccggccgggaagaagcccaaggcggagaagcgtgtcccagcaggcaagtccgtcgcaagggaggcggcgagggaaagaagggccgggagaagggcaagaatagcgttgagacctacaagatctacattttgaaggtgctgaagcaggtgcacccggaccatggcatttcctttaagccatggtcataatgaactcccttattaacgacattttttaaaaagctcg

SEQ ID NO: 1477 - DNA, 400 bp, Zea mays
  unsure (1)..(400): unsure at all n locations
  Clone ID: TF_LIB5025-057-A1-XP1-H11
gccggccgttccgaaacactacgatctccatctatctatttgcacatcgtcgtggaacgcgacggctagccttcctacctgttcctgtgggccgcacgaatcagagggcgcaggaagtccactagggggtgaggcagccaagagaagcgaactgtgccaccacaggcnggcgcggcaaactcatgccccaggggacgcgcgcaatcgaagaagccccaccgtttccgccccggtaccgaacttctgcgggagatccggaagtacaagaacagctcacaactggtgatacgcaagctgccgttacagaggctggcgcgggagatcgcacagaacttcaagagcgaccttagattccagagctcctccggctcatgagttgaggaggtctgcgagggcaacc

SEQ ID NO: 1478 - DNA, 540 bp, Zea mays
  Clone ID: TF_LIB4185-038-R1-K1-A7
ggaaaacggaaaacagagttaatggccttttaataggcataaggaaaattaagttacggcggggaacagccaacattcgaggattcgacggaaacccaaattacaaaacccagcatatttttacatttttggagcgggccctgaggacaaaaaatatgacgtttaggccctttccccggggaggcggggggcaagctggatgtccttggccatgaggggaacccccttggcggggagggcccaaaggttggggtcctcaaaaagcccgacaggggaggcctaagccgcctcttgcaggggggaaacagaaaagttttggaagcgtaggtcggttttgaagtcctgggcaatctcccgaaccaggcgctgaaacggaagtttggggataaaaagctccgggctttttgggaactgggggatctcccggagcgcaacggtcccggggcgaaagcgggggggttttttcactccgccggtcgaaggggcaaatttggggcccgctttagtcgccagttgtttcctcggcgccttgccgccggg

SEQ ID NO: 1479 - DNA, 613 bp, Zea mays
  Clone ID: TF_ZmC653_24
aacccgcatccacatcactcatccacagctcgcagccgtattcctgtctcgtatcctctctcgccgctccgatggcccgcacgaagcaaacagcaaggaagtcgaccggcggcaaggccccccggaagcagctggccactaaggctgcgcgcaagtcggccccggccaccggcggcgtgaagaagccccaccgcttccgccccggcaccgtcgcgctccgcgagatccgcaagtaccagaagagcactgagctgctcatccgcaagctccccttccagcgcctcgtccgcgagatcgcgcaggacttcaagactgatctgaggttccagtcctccgccgtcgcggcgctgcaggaggccgccaagcgcgtcactatcatgcccaaggacatccagctcgcgcggcgcatcaggggcgagagggcttgagcgcccgtcgtgctgctcgttgttgtagtgttactagaagtagatggtggcattcgtttcgtggcttccttatcctgtaggagtaatgttctagatgtcttggcttcagtgcaatggactgtgattgctcatttctgaaatttatcaaaaaaaaaaagaaagggcggccgccgacaagtgagctc

SEQ ID NO: 1480 - DNA, 522 bp, Zea mays
  Clone ID: TF_LIB5026-023-B1-XP1-G7
gccggccgggtcgcagcaccgcatcgtcgccctcaaattctgtctccgtccaggcaaggaagaaatcgagcagccaaggagaggagaagatggctcgtacgaagcagaccgcccgcaagtccaccggaggcaaggccccgcgcaagcagctcgccaccaaggcggcgaggaagtctgcgccgacgaccggcggcgtgaagaagccccacaggtacaggcccgggacggtggctctgcgcgagatccgcaagtaccagaagagcacggagctgctgatccggaagttgcccttccagcgcctggtccgtgagatcgctcaggacttcaagacggatctgcggtttttttttctcgccgccctgcccctccaggaagccgccgaggcctacctcgtcggcctgttcgaggacaccaacctctgcgccatccacgtcaagtgcgtcaccatcatgcccaaagacatccagttcgcccgccgtatccgcgctgagtgcgcgtaagtgtatctcgcgcccggcccca

SEQ ID NO: 1481 - DNA, 567 bp, Zea mays
  Clone ID: TF_9794541
gcccgcacgaagcaaacagcaaggaagcgaccggcggcaaggccccccggaagcagctggccactaaggctgcgcgcaagtcggccccggccaccggcggcgtgaagaagccccaccgcttccgccccggcaccgtcgcgctccgcgagatccgcaagtaccagaagagcactgagctgctcatccgcaagctccccttccagcgcctcgtccgcgagatcgcgcaggacttcaagactgatctgaggttccagtcctccgccgtcgccgcgctgcaggaggcgtccgaggcctacctcgtcgggctcttcgaggacaccaacctctgcgccattcacgccaagcgcgtcaccatcatgcccaaggacatccagctcgcccgccgtatccgtggggagagggcctaggcgtcgtcccggtggaggtggaagtagtagtcgccgtttctgtcatcactgtctggctagaaggtgtagagatgtgccgggttctgtagtttgggttatcggtcaaatcatgatgtagttgggtcttccctgctgtaatttaactatgactatgcaatga

SEQ ID NO: 1482 - DNA, 561 bp, Zea mays
  Clone ID: TF_LIB4730-042-R1-K1-G12
ggtaccctcccggtccgtccgggctatatagcatctcactccaacaacacaacgatcacagttctccctagcaatctctagcagcagatcctcgttcgaagccaagcgctagccttcctactgtcccgatggcccgcacgaagcagacggcgaggaagtccgctggcggcaaggcgccaaggaagcagctggccacgaaggcggcgcgcaagtctgccccggcgaccggcggagtgaagaagccccaccgtttccgccccggcaccgtcgcgctccgggagatccgcaagtaccagaagagcacggagctgctgatccgcaagctgccgttccagcgcctggtgcgtgagatcgcccaggacttcaagaccgaccttcgcttccagagctccgccgtcgccgcgctgcaggaggcgtccgaggcctacctcgtcgggctcttcgaggacaccaacctctgcgccattcacgccaagcgcgtgaccatcatgcccaaggacattcagctcgcccgccgtatccgtggggagaggtccctagcgtcttcccggtggaggtgga

SEQ ID NO: 1483 - DNA, 566 bp, Zea mays
  unsure (1)..(566): unsure at all n locations
  Clone ID: TF_LIB4975-022-R1-K1-H9
atcgagcgatctgcaatctcccatagcaatctactatcacgacactcctcatgagaagcacagacgctaggcccccttcgtatcgtgtgcccgatggcccggacgaagcagacggcgaggaactccactgacgacaaggcgccaaggaagcagctggccaccaaggcggcgcgcaagtctgccccggcgaccggcggagtgaagaagccccaccgtttccgccccggcaccgtcgcgctccgggagatccgcaagtaccagaagagcacggagctgctgatccgcaagctgccgttccagcgcctggtgcgtgagatcgcccaggacttcaagaccgacctccgcttccagagctccgccgtcgccgcgctgcaggaggcgtccgaggcctacctcgtcgggctcttcgaggacaccaacctctgcgccattcacgccaagcgcgtcaccatcatgcccaaggacatccagctcgcccgccgtatccgtggggagagggcctaggcgtcgtcccggtggaggtggaagtannantgnncgnttctgtcatnactgtttgggtagaa

SEQ ID NO: 1484 - DNA, 807 bp, Zea mays
  Clone ID: TF_ZmC653_110
aaaaaattcaaaaaaacagaacgatctcaatctccctagcaatctctagcagcagatcctcgtgcgaagcaaagcgctagcccccttcgtactgtcccgatggcccgcacgaagcagacggcgaggaagtccactggcggcaaggcgccaaggaagcagctggccaccaaggcggcgcgcaagtctgccccggcgaccggcggagtgaagaagccccaccgtttccgccccggcaccgtcgcgctccgggagatccgcaagtaccagaagagcacggagctgctgatccgcaagctgccgttccagcgcctggtgcgtgagatcgcccaggacttcaagaccgacctccgcttccagagctccgccgtcgccgcgctgcaggaggcgtccgaggcctacctcgtcgggctcttcgaggacaccaacctctgcgccattcacgccaagcgcgtcaccatcatgcccaaggacatccagctcgcccgccgtatccgtggggagagggcctaggcgtcgtcccggtggaggtggaagtagtagtcgccgtttctgtcatcactgtctggctagaaggtgtagagatgtgccgggttctgtagtttgggttatcggtcaaatcatgatgtagttgggtcttcccctgctgtaatttaactatgactatgcaatgacaatgaagttctcggttatcagttcccgaatatatgcgtctacaatctagatcaatctgaatatatacatgtatcgaaaccttatattctatttaatagaaaaaaaaaaaaaaaaaagcggccctcgagctccagc

SEQ ID NO: 1485 - DNA, 1784 bp, Zea mays
  Clone ID: TF_ZmC653_111
cctcgaggctcggccgggaaaaaaaaaaaaaaaaaaaaaactaaatgatgtgaaactttgaaagggaaagcgtccaatctgttcgattgtgatgtaccatgacagttctttcatattgaataggaagatctgatagaaacagaacgatctcaatctccctagcaatctctagcagcagatcctcgtgcgaagcaaagcgctagcccccttcgtactgtcccgatggcccgcacgaagcagacggcgaggaagtccactggcggcaaggcgccaaggaagcagctggccaccaaggcggcgcgcaagtctgccccggcgaccggcggagtgaagaagccccaccgtttccgccccggcaccgtcgcgctccgggagatccgcaagtaccagaagagcacggagctgctgatccgcaagctgccgttccagcgcctggtgcgtgagatcgcccaggacttcaagaccgacctccgcttccagagctccgccgtcgccgcgctgcaggaggcgtccgaggcctacctcgtcgggctcttcgaggacaccaacctctgcgccattcacgccaagcgcgtcaccatcatgcccaaggacatccagctcgcccgccgtatccgtggggagagggcctaggcgtcgtcccggtggaggtggaagtagtagtggccgtttctgtcatcactgtctggctagaaggtgtagagatgtgccgggttctgtagtttgggttatcggtcaaatcatgatgtagttgggtctaccctgctgtaatttaactatgactatgcaatggcaatgaagttctcggttatcaaaaaaaaaaaaaaaacgacacgactctcggcaacggatatctcggctctcgcatcgatgaagaacgtagcaaaatgcgatacctggtgtgaattgcagaatcccgcgaaccatcgagtttttgaacgcaagttgcgcccgaagccttctggcggagggcacgtctgcctgggcgtcacgccaaaaaaaagaaaaaaaaaaaaaataaaaaaaaaaaacctagccaccgcatcgtcgccctcaaattcgttccgtccaggcaaggaagaaatcgagcagccaaggagaggagaagatggctcgtacgaagcagaccgcccgcaagtccacgggaggcaaggcccccgcgcaagcagctcgccaccaaggcggcgaggaagtcggcgccgacgaccggcggcgtgaagaagccccacaggtacaggcccggcaccgtggcgctgcgcgagatccgcaagtaccagaagagcacggagctgctgatccggaagttgcccttccagcgcctggtccgtgagatcgctcaggacttcaagacggatctgcggttccagagccacgccgtcctggccctccaggaggccgccgaggcctacctcgtcggtctgttcgaggacaccaacctctgcgccatccacgccaagcgcgtcaccatcatgcccaaagacatccagctcgcccgccgcatccgcggcgagcgcgcgtaggcgtatctcgcgcccggccccagtggcggcggagggatggaggagtgcaatttgtaactttatgctgtttgttcgcttttagacggcgtggcgaagtagtgtaaaaacggctttacaagtctattttgtgtggtagttcgtgtaccgcttcgtcccgaagcgatcttggtaaaagactgatgattcgtgttgccaaacgacacaattcgtattttttttgtgtgccgtgtagaacacggtttgttgttattggaaatgttcacc

SEQ ID NO: 1486 - DNA, 668 bp, Zea mays
  Clone ID: TF_ZmC653_39
ctccctagcaatctctagcagcagatcctcgtgcgacgcaaagcgctagccttcctactgtcccgatggcccgcacgaagcagacggcgaggaagtccactggcggcaaggcgccaaggaagcagctggccacgaaggcggcgcgcaagtctgccccggcgaccggcggagtgaagaagccccaccgtttccgccccggcaccgtcgcgctccgggagatccgcaagtaccagaagagcacggagctgctgatccgcaagctgccgttccagcgcctggtgcgtgagatcgcccaggacttcaagaccgacctccgcttccagagctccgccgtcgccgcgctgcaggaggcgtccgaggcctacctcgtcgggctctttgaggacaccaacctctgcgccattcacgccaagcgcgtcaccatcatgcccaaggacatccagctcgcccgccgcatccgtggggagagggcctaggcgtcgtcgcggtggaggtggaagtagtagtcgccgtttctgtcatcactgtctggcgggctagaaggtgtagagatgtgccgggttctgtagtttgggatatcggtcaaatcatgatgtagttgggtcttccctgctgtaatttaactatgactatgcaatggcaatgaagttctcggttatcagttcccg

SEQ ID NO: 1487 - DNA, 732 bp, Zea mays
  Clone ID: TF_ZmC653_58
ttgggaccctcgaggccggccgggacagaacgatctcaatctccctagcaatctctagcagcagatcctcgtgcgaagcaaagcgctagcccccttcgtactgtcccgatggcccgcacgaagcagacggcgaggaagtccactggcggcaaggcgccaaggaagcagctggccaccaaggcggcgcgcaagtctgccccggcgaccggcggagtgaagaagccccaccgtttccgccccggcaccgtcgcgctccgggagatccgcaagtaccagaagagcacggagctgctgatccgcaagctgccgttccagcgcctggtgcgtgagatcgcccaggacttcaagaccgacctccgcttccagagctccgccgtcgccgcgctgcaggaggcgtccgaggcctacctcgtcgggctcttcgaggacaccaacctctgcgccattcacgccaagcgcgtcaccatcatgcccaaggacatccagctcgcccgccgtatccgtggggagagggcctaggcgtcgtcccggtggaggtggaagtagtagtcgccgtttctgtcatcactgtctggctagaaggtgtagagatgtgccgggttctgtagtttgggttatcggtcaaatcatgaatgtagttgggtcttccctgctgtaatttaactatgactatgcaatggcaatgaagttctcggttatcagttcccgaaaaaaaaaaaaaaaaaagcggcc

SEQ ID NO: 1488 - DNA, 674 bp, Zea mays
  Clone ID: TF_ZmC653_63
acacaacgatctcagtctccctagcaatctctagcagcagatcctcgtgcgaagcaaagcgctagccttcctactgtcccgatggcccgcacgaagcagacggcgaggaagtccactggcggcaaggcgccaaggaagcagctggccacgaaggcggcgcgcaagtctgccccggcgaccggcggagtgaagaagccccaccgtttccgccccggcaccgtcgcgctccgggagatccgcaagtaccagaagagcacggagctgctgatccgtaagctgccgttccagcgcctggtgcgtgagatcgcccaggacttcaagaccgaccttcgcttccagagctccgccgtcgccgcgctgcaggaggcgtccgaggcctacctcgtcgggctcttcgaggacaccaacctgtgcgccattcacgccaagcgcgtcaccatcatgcccaaggacatccagctcgcccgccgcatccgtggggagagggcctaggcgtcgtcgcggtggtggtggaagttgtagtcgccgtttctgtcatcactgtctggctagaaggtgtagagatggttatgtagtttgggttatctgtcgaatcatgatgtagttgggtcttcactgctgtaatttaactatgactatgcaatggcaatggagttccctgttatcagttccct

SEQ ID NO: 1489 - DNA, 904 bp, Zea mays
  unsure (1)..(904): unsure at all n locations
  Clone ID: TF_ZmC653_67
gcaatctctagcagcagatcctcgtgcaaagcaaagcgctagccttcctactgtcccgatggcccgcacgaagcagacggcgaggaagtccactggcggcaaggcgcctaggaagcagctggccacgaaggcggctcgcaagtctgccccggctaccggcggagtgaagaagccccaccgtttccgccccggcaccgtcgcgctccgggagatccgcaagtaccagaagagcacggagctgctgatccgcaagctgccgttccagcgcctggtgcgtgagatcgcccaggatttcaagaccgaccttcgcttccagagctccgccgtcgccgcgctgcaggaggcgtccgaggcctaccttgtcgggctcttcgaggacaccaacctctgcgccattcacgccaagcgcgtcaccatcatgcccaaggacatccagctcgcccgccgcatccgtggggagagggcctaggcgtcgtcgcggtggaggtggaagtagtagtcgcagtttctgtcatcactgtctggctagaagttgtagagatgtgccggtttatgtagtttgggttattggtcgaatcattatgtagttgggtcttcactgctgtaatttaactatgactatgcaatggcaatgaagttctcggttatcacttcccgaataaaaaaaaaaaaaaaaaaaaaaaaaaaaaaaaaaccgtggggagagggcctaggcgtcgncgcgggggaggtggaagtagaagncgcagtttctgtcatcactgtctggctagaagttgtaaagatgtgccggtttatgtagttggggttattggacaaatcattatgtagttgggtcttcactgctgnaattaaactatgactatgcaatggcaatgaagttctcggttatcacttcccgaat

SEQ ID NO: 1490 - DNA, 820 bp, Zea mays
  Clone ID: TF_ZmC653_72
cattgggtacctcgaggccggccgggacacaacgatctcaatctccctagcaatctctagcagcagatcctcgtgcgaagcaaagcgctagccccttcgtactgtcccgatggcccgcacgaagcagacggcgaggaagtccactggcggcaaggcgccaaggaagcagctggccaccaaggcggcgcgcaagtctgccccggcgaccggcggagtgaagaagccccaccgtttccgccccggcaccgtcgcgctccgggagatccgcaagtaccagaagagcacggagctgctgatccgcaagctgccgttccagcgcctggtgcgtgagatcgcccaggacttcaagaccgacctccgcttccagagctccgccgtcgccgcgctgcaggaggcgtccgaggcctacctcgtcgggctcttcgaggacaccaacctctgcgccattcacgccaagcgcgtcaccatcatgcccaaggacatccagctcgcccgccgtatccgtggggagagggcctaggcgtcgtcccggtggaggtggaagtagtagtcgccgtttctgtcatcactgtctggctagaaggtgtagagatgtgccgggttctgtagtttgggttatcggtcaaatcatgatgtagttgggtcttccctgctgtaatttaactatgactatgcaatggcaatgaagttctcggttatcagttcccgaatatatgcgtctacaatctagatcaatctgaatatatacatgtatcgaaaccttatattctatttaatagaacattcagctcatttacaaaaaaaaaaaaaaaaagcggcc

SEQ ID NO: 1491 - DNA, 729 bp, Zea mays
  Clone ID: TF_ZmC653_73
cattgggacctcgaggcggcgggacagaacgatctcaatctccctagcaatctctagcagcagatcctcgtgcgaagcaaagcgctagcccccttcgtactgtcccgatggcccgcacgaagcagacggcgaggaagtccactggcggcaaggcgccaaggaagcagctggccaccaaggcggcgcgcaagtctgccccggcgaccggcggagtgaagaagccccaccgtttccgccccggcaccgtcgcgctccgggagatccgcaagtaccagaagagcacggagctgctgatccgcaagctgccgttccagcgcctggtgcgtgagatcgcccaggacttcaagaccgaccttcgcttccagagctccgccgtcgccgcgctgcaggaggcgtccgaggcctacctcgtcgggctcttcgaggacaccaacctctgcgccattcacgccaagcgcgtcaccatcatgcccaaggacatccagctcgcccgccgtatccgtggggagagggcctaggcgtcgtggcggtggaggtcgaagtagtagtcgcagtttctgtcatcaccgtctggctagaaggtgtagagatgtgccgggttctggagtttgggttatcggtcgaatcatgatgtagttggttcttcacagctgtaatttaactatgacgatgccattgcaatgaagttctcagctatcagttccggaaaaaaaaaaaaaaaaagcggcc

SEQ ID NO: 1492 - DNA, 804 bp, Zea mays
  Clone ID: TF_ZmC653_89
tgcatgatgtctttctcgttaacctgaggcatttattgcatggaagacacctaatccattcataactcaagactgagaacacaacgatcacagtctccctagcaatctctagcagcagatcctcgttcgaagccaagcgctagccttcctactgtcccgatggcccgcacgaagcagacggcgaggaagtccactggcggcaaggcgccaaggaagcagctggccacgaaggcggcgcgcaagtctgccccggcgaccggcggagtgaagaagccccaccgtttccgccccggcaccgtcgcgctccgggagatccgcaagtaccagaagagcacggagctgctgatccgcaagctgccgttccagcgcctggtgcgtgagatcgcccaggacttcaagaccgaccttcgcttccagagctccgccgtcgccgcgctgcaggaggcgtccgaggcctacctcgtcgggctcttcgaggacaccaacctctgcgccattcacgccaagcgcgtcaccatcatgcccaaggacatccagctcgcccgccgcatccgtggggagagggcctaggcgtcgtcgcggtggaggtggaagtagtagtcgcagtttctgtcatcactgtctggctagaagttgtagagatgtgccggtttatgtagtttgggttattggtcgaatcattatgtagttgggtcttcactgctgtaatttaactatgactatgcaatggcaatgaagttctcggttatcacttcccggggaaaaaaaaaaaaaaaaaaccaaaaaaaaaaaaaaaagggccct

SEQ ID NO: 1493 - DNA, 709 bp, Zea mays
  Clone ID: TF_ZmC653_96
acacaacgatctcagtctccctagcaatctctagcagcagatcctcgtgcgaagcaaagcgctagccccttcgtactgtcccgatggcccgcacgaagcagacggcgaggaagtccactggcggcaaggcgccaaggaagcagctggccacgaaggcggcgcgcaagtctgccccggcgaccggcggagtgaagaagccccaccgtttccgccccggcaccgtcgcgctccgggagatccgcaagtatcagaagagcacggagctgctgatccgcaagctgccgttccagcgcctggttcgtgagatcgcccaggacttcaagaccgaccttcgcttccagagctccgccgtcgctgcgctgcaggaggcgtccgaggcctacctcgtcgggctcttcgaggacaccaacctctgcgccattcacgccaagcgcgtcaccattatgcccaaggacatccagctcgcccgccgcatccgtggggagagggcctaggcgtcgtcgcggtggaggtcgaagtagtggtcgcagtttctgtcatcaccgtctggctagaaggtgtagagatgtgccgggttctgtagtttgggttatcggtcgaatcatgatgtagttggttcttcacagctgtaatttaactatgacgatgccatggcaatgaagttctcagctatcagttcacaaaaaaaaaaaaaaaaaaaaggccccta

SEQ ID NO: 1494 - DNA, 332 bp, Zea mays
  Clone ID: TF_LIB3357-025-P1-K1-A5
agaacctctaaaatttcccccactcgccaggcgcagcagtacctgtagtcatggacgccagcggagcccgaagcaaggggaaaaagggtgcagtcgcgcgcaaggcactcggacgcagcaagaaatcaatgacgctgtccggtatggccgggctgcagttccacggaagacgcatcaggcgctacctgaagaaggggcggtactcgcagagagtgggcactgccagaccagtatacatctgctgcttcctgaactacctttccagcgacggtctcgagttatcacgcaacacttcaagagacaacatgaatacgcgagttatgccgcgccac

SEQ ID NO: 1495 - DNA, 395 bp, Zea mays
  Clone ID: TF_LIB3357-054-P1-K1-G3
ctcctagtattttccttgcaaccgattgcctatcccgctcccaaccaaagaccgatggcgcctaaggccgagtagaagcccgcgttgtagaatccggtggaggaggagcccgctgacgagaagacgaccgtctggaagaagcccaaggcggagaatcggatccccgttggcaagtccgcctgcaaggagggcggggagggcaagcgtggcaagatgattggcaagaagagcgtggtgacgtacaagatctacatcttcaaggtgctgaagcaggtgcacccgtacatcggcatctcctccaaggccatgtgcatcatgatctccttcatcaacgacatcttcgataagctggccggcgaggacgccaatctcgcgcgctacaacaagaagcccac

SEQ ID NO: 1496 - DNA, 380 bp, Zea mays
  Clone ID: TF_LIB4730-016-R1-K1-F7
gtagtctactctccgctactcaccagcaaattcccatgccggcccttagcccatctatttggtgccccattggatcgattcctgatggcgcccacggccgagaagaagcccgcggagaagaagccggcggacgagaaggccgagaagcagcctggggcggatatgcgcgcgccgagcaaggagggcggtgagaagatgggccagaagaaggcgatgaagagcgtcgagacgtacaagatctacatctgctaggtgctcagtcatgtgcacccggacattggcatttccaccagggccatgtccatcatgaactccttgatgaacgagattttcgagaagctcggcgccgcggccgtcaatctcgtccggtccagcaggaa

SEQ ID NO: 1497 - DNA, 669 bp, Zea mays
  unsure (1)..(669): unsure at all n locations
  Clone ID: TF_LIB4730-031-R1-K1-A2
ggtaccctccggagttccggccgggnatcaaaccaactatatatcacatattcaccgacggctncgctggctcatcttggcgctaagcaccgaatgtacgatggcccggacgaagcacacgaagcgcacgtcgaccgacgggacggcgcccaggaagcagctgaccaacaaggcgacgagcaagtcgggcacgtcaaccgcgggagcgaagaagcctaaccggtttcaccccttcaccgccgggctcggggagattcggaagtatccagaagagcacggagatgatcatgctgatgatgcccttgcagcgcttccagcgtgagatcgggcagaatttcaagaacgacctgagcttccagtgcttcgatgtctccgctctggacgaggtcgacgaggcctacctggtgtagctcttggaggacaccaacctctgcaacatccacgccaagcacgtcaacatcatgcccatggacatccaggtcatgcacctcatgaggcgcaagagggcttgaactgctggagctgccgttcacgttgttgaccctttcctctgtgtctttggttgtagaattcttgcttctgttggttttcttctgttcctatgatggtgatcatagtgttaggagtggcattagctaatctgcttgatcttgcagcgctgcctctgaa

SEQ ID NO: 1498 - DNA, 186 bp, Zea mays
  Clone ID: TF_LIB3597-024-Q1-K6-E2
gtctgttgctagctttcttcgtcatcgagagcccgagcccgccagtccgcgccggccccgaagaaggctccaagaagcggtgaccaaggcgcagaagaagacggcaataagcgcaagcgcagccgcaaggagagctactcggtgtacgtgtacaaggtgctgaagcaggtgcaccccgacacgggc

SEQ ID NO: 1499 - DNA, 368 bp, Zea mays
  Clone ID: TF_LIB3079-041-Q1-K1-C3
cccacgcgtccgggctcaccccatcatcagcacgcgaaaatctcccgatcccagctagtcttcgccgagaagatgttcgctcaccgtaagggcgtgaagggcctgggcaagggcggaccgaaccgccaccggaaggcgctccgctacaacatcgagcggatcacgaagccggcgatccagctgctggcgcgcaggggctgcgtcaaccgcatctccgggctcatctacgacgagacccgcggcgtactcaagatcttcctggagaacgtgatccgcgacgccggcacctacaccgagcacgcgcgccgcaagaccgtcacagacatggacgtcgactacgcgctcaagcgtccaggccgcaccctcta

SEQ ID NO: 1500 - DNA, 359 bp, Zea mays
  Clone ID: TF_LIB3279-004-P1-K1-H7
cgcgtccaaccttcggtcattttttattattcgatccaaggtaggcacccaagacctttactcactggggatcgatatggctcagggacaaaaagaaatttatggtgaatacgaccgtgaacgaggagctcgccgacaagattgcgctcgtcaataagaagccgaaggcggaaaagcgggtctatgctggtaagtacgctaccaacgaatgcggctagggcaagaggggctagattaagggcaagaagagcgtcgagacttattagatctacatcttcaaggtgctgaagcaagtataccctgacattggcatctccttcaaggtcatgttcatcatgaactccttcattaacgatatc

SEQ ID NO: 1501 - DNA, 549 bp, Zea mays
  unsure (1)..(549): unsure at all n locations
  Clone ID: TF_LIB3067-005-Q1-K1-G10.F2
cnncgtgntctggggcagtgtcgctcnnncccancgtggcgtgggccantgttcttctgtctttaccgctcnnnttggcgccggtcttttcntccctcncttccttttctctttttnnttgggccccgttttccggcggcgcgcggccttgttctttgnncctttnngaggggtggncttggtggcgggcttggtgccctcggggacggcgtgcttggcnngctcgccggggggggcgnggcgccccgcggtctggttctcgcggggggtggcggtgggcttcttgtttttgcgcgcccgcttggcgggctcggccgcgngcttctcgnngntgtcgttggtggnggggttcttgttgggcctggccttgggcgggntgccgntgtcggggtgcgcctgcttctgcnccttggnggtgttggtcttgttggtcttcccgggcttcttcgctttctttttcccctttttgccctcgccggcctcctttccggcgggcttgcccgccggggggggctttttgggcttgggcttttttcccgtcggggcctt

SEQ ID NO: 1502 - DNA, 646 bp, Zea mays
  Clone ID: TF_LIB4742-143-Q1-K1-C6
ctcgaggccggccgggatcagaatctcgagtctcctctgtcgcttccgcagcctttctagctctactccaccccctcgatatccaaatgcatcatttgcagtcacgcgatcatgcaagcgagcgcacccgtacccagagttcacgccatgaagggcgcggccgcgcgcaagggcggcggtgctaggaacaagttggtgacgacgtccgtccaggccggtctgcagtttcccgcatggccgcatcgggcggcacctgaacaaggcccgttacgcgcagagcgtcggcacggtagtccctgtctacctggcctccgtcctcgaatacctggccgccgaggtgctcggagctggctcgttattcgtgccaaggtacatcaagaagacccgcatcatcccgcgccacgtgctccttgtcatccgcaacgactaggagctcggcaatctgctgtccggcgttaccatcgctcacggcggcgtcctccccaacatcaacccggtgctcctgcccaagaagaccgcgtagaacgcggcgccccaggaggccaagtcgtccatgaatgccgccacgtcccctaagaaggcatatagggccgcctttaccgttgtgatgttgaatgctcgtgttcagtagatctttacgtctgta

SEQ ID NO: 1503 - DNA, 522 bp, Zea mays
  Clone ID: TF_LIB4976-005-R1-M1-E12
gaaacatataagctgggttggataagtaccattacgggccgatctgataacacaggtgctacagagagatagatagcatacatagaagccagtaggtaggagtacctaactacagtgagagacgtgagcaccggagagaatcctgcaagcggtggacgggcagcctaggccgaggtgaacttggtgacggacttggcgccctcggatacggctgtgcttggcgagctccccgggaaggacgaggcgcacggaggtctggatctcacgggaggtgatggcaggcttcttgctatagcgcgcgagcttgtgggactcactaacgagcttctctaagatatcgctaaggaatgagttcatgatggacatgggcttggaggaggtgccaatgcccgggtgcacctgcttcagcagcttgaagatgtaaaacttggatgcctccacgctcttcttgcccttcttcttgcgcctgttgccctcgtcggcttccttggtagcggactagccagtggggacccggttctc

SEQ ID NO: 1504 - DNA, 691 bp, Zea mays
  Clone ID: TF_ZmC653_29
aaccagatcgatctcaatctccctagcaatctctagcagcagatcctcgtgcgaagcaaagcgctagcccccttcgtactgtcccgatggcccgcacgaagcagacggcgaggaagtccactggcggcaaggcgccaaggaagcagctggccaccaaggcggcgcgcaagtctgccccggcgaccggcggagtgaagaagccccaccgcgctccgggagatccgcaagtaccagaagagcacggagctgctgatccgcaagctgccgttccagcgcctggtgcgtgagatcgcccaggacttcaagaccgacctccgcttccagagctccgccgtcgccgcgctgcaggaggcgtccgaggcctacctcgtcgggctcttcgaggacaccaacctctgcgccattcacgccaagcgcgtcaccatcatgcccaaggacatccagctcgcccgccgtatccgtggggagagggcctaggcgtcgtcccggtggaggtggaagtagtagtcgccgtttctgtcatcactgtctggctagaaggtgtagagatgtgccgggttctgtagtttgggttatcggtcaaatcatgatgtagttgggtcttccctgctgtaatttaactatgactatgcaatggcaatgaagttctcggttatcagttcccgaatatatgcgtctacaatctagatcg

SEQ ID NO: 1505 - DNA, 593 bp, Zea mays
  Clone ID: TF_LIB4979-098-A1-K1-E4
acagatcgatctcattctccctagcaactctctagtattactatcctgcgtgcgaatcaaagggctagccaccttcgtactgtgccgatggaccgcacgaagcacacggttgatgaagtccactggtgacaaggcgcctaggaagcagctggacaccaaggcgatgcgcaagtctgccccggcgaccggaggagtgaataaggcccaccgtttccgccccggcaccgtctagctccgggagatccgcaagtaccagaagagcacggagctgctgatccgcaagctgccggtccagcgcctggtgcgtgagatcgcccaggacttcaagaccgacctccgcttccagagctccgccgtcgccgcgctgcaggaggcgtccgaggcctacctcgtcgggctcttcgaggacaccaacctctgcaccattcacgccaagcgcgtcaccatcatgaccaaggacatccagctcgcccgccgtatccgtgaggagagggcctatgcgtactcccggtgcaggcgaaaactgtagagtgcgttactgaatacagtgcttggccacaaggcgtatagatataccaggcgtggatttgggt

SEQ ID NO: 1506 - DNA, 673 bp, Zea mays
  Clone ID: TF_LIB4185-043-R1-K1-A9
ttggggtaccggccccttctcgagttttttttttttttttttttttttttttttttttttttttttggataacagagctcattgccatttcatatgcatcatgataattaagttacagcagggaacaaccaactactcgatgattcgacagtaacccaaactacagaacccagcacatttttacattttttgatcgggcactgatgacagaaaatatgacgcttaggccctctccccggggatgcggggggcaagctggatgtccttgggcatgatggggacccgcttggcgtggatggcgcaaaggttggtgtcctcaaagagcccgacaaggtaggcctaagccgcctcctgcagcgcggaaacaggggagctctggaagcgtaggtcggtcttgaagtcctgcgcgatctcccgcaccaggcgctggaacggcagtttgcggatcagcagctccgtgctcttctggtacttgcggatctcccggagcgcgacggtgccggggcggaagcggtggggcttcttaactccgccggtcgcaggggcagacttgcgggccgccttagtcgccagttgcttcctcggcgccttgccgccggtggacttcctcgccgtctgcttcgtgcgggccatcgagcgagtgaggatggaaggcttctgctagggattgctg

SEQ ID NO: 1507 - DNA, 529 bp, Zea mays
  Clone ID: TF_LIB4762-059-R1-K1-C11
ggccggccggatcctgccaatcccccgaaagtaactcctccccaattccacgctgccaccaactcgccgtcctccgcgccaagcaccaaagctccgatggcccgcacgaagcagacggcgcgcaagtcaacgggcggcaaggcgccccgcaagcagctggcgaccaaggcggcgcgcaagtctgcgccggccaccggcggcgtgaagaagccccaccgctttcgccccggcaccgtcgcgctccgggagattcgtaagtaccaaaagagcacggagctgctcattcgcaagttgccctttcagcgcctcgtccgtgagatcgcgcaggactttaagaccgatctccgcttccagtccttcgccgtctctgcgctgcaggaggccgccgaagcctacctcgtggggctctttgaggacactaacctgtgcgccatccacgccaagcggcgtaccatcatgcccaaggacattcagctcgcgcgccgcatcaggggagagaaggccctgagcgaggcgagcttctctcacc

SEQ ID NO: 1508 - DNA, 741 bp, Zea mays
  Clone ID: TF_JC-ZMSHLIB3569P021H08_FLI
ttcgaaacaccctcgcacccacactctcccttcgtccccagcctaaatccccgcaaagatggctcgcacgaagcagacggcgcgcaagtccacgggcggcaaggccccgaggaagcagctggcgaccaaggcggcgcgcaagtcggcccctgcgaccggcggcgtgaagaagccgcaccgcttccgcccgggcaccgtggcgctgcgcgagatccgcaagtaccagaagagcacggagctgctcatccgcaagctgcccttccagcgcctggtccgcgagatcgcgcaggacttcaagaccgacctccgcttccagtcctccgccgtcgccgcgctgcaggaggctgccgaggcctacctcgtcggcctgtttgaggacaccaacctctgcgccatccacgccaagcgcgtcaccatcatgcccaaggacatccagctcgcccgccgcatccgcggggagcgcgcataggcggcccgccggataggccggtggcccgttgcgcagtctcttctcggaagtttgtactagtggtcgggtcgtgtggaaggagtggtgtactgatctgcaatgtctcaaaccatgtcaacctctttgttgtcatcaatggaaatcgctacttatgtgtgctaatcttcgtgctgcgtttgtttcgtagtaacacaattcgatggattcgtacctgtgaacaatcgattcatatcgtcaccagatgcgaaattggcagtttgtgttcaaatttc

SEQ ID NO: 1509 - DNA, 635 bp, Zea mays
  Clone ID: TF_LIB4729-084-Q2-K1-F4
ccggcgggaaccgttcccactcactcatccacagctcgcagccgtattcctgtctcgaatcctctctcgccgctccgatggcccgcacgaagcaaacagcaaggaagtcgaccggcggcaaggccccccggaagcagctggccactaaggctgcgcgcaagtcggccccggccaccggcggcgtgaagaagccccaccgcttccgccccggcaccgtcgcgctccgcgagatccgcaagtaccagaagagcactgagctgctcatccgcaagctccccttccagcgcctcgtccgcgagatcgcgcaggacttcaagactgatctgaggttccagtcctccgccgtcgcggcgctgcaggaggccgccgaggcgtacctggtggggctcttcgaggacaccaacctttgcgccatccacgccaagcgcgtcactatcatgcccaaggacatccagctcgcgcggcgcatcaggggcgagagggcttgagcgcccgtcgtgctgctcgtcgttgtagtgttactagaagtagatggtggcattcgtttcgtggcttccttgttctagatgtcttggcttcagtgcaatggactgtgattgctcatttctgaaatttatcaatggacttgttcttac

SEQ ID NO: 1510 - DNA, 615 bp, Zea mays
  Clone ID: TF_LIB4729-135-A1-K1-E10
attgggacctcgagccggcgggtcccagctcgatccgatttccatttcaatccttcgatcgcacagcgccgcccgccctcacgcagctctctccgatggcgcgcacgaagcagacggcgaggaagtcgaccggcggcaaggcgccgcggaagcagctggccaccaaggcggcgcgaaagtcggccccggccaccggcggcgtgaagaagccgcacaggtttcgccccggcaccgtcgcgctccgcgagatccgcaagtaccagaagagcacggagctgctcatccggaagctgcccttccagcggctggtgcgggagatcgcgcaggacttcaagaccgacctccggttccagtcctccgccgtcgccgcgctgcaggaggccgccgaggcgtacctggtgggtctcttcgaggacaccaacctctgcgccatccatgccaagagggtcaccatcatgcctaaggacatccagctcgcgcgccgcatcaggggcgagagggcctgattgctctgtcttcctgtttctgtagtgtctgaactaggggatggaatctatcgcttcttgtcctgcaatcgtgtactgatgttctaggcaaatcagtttggctgttatg

SEQ ID NO: 1511 - DNA, 656 bp, Zea mays
  Clone ID: TF_LIB4979-026-A1-K1-F2
actgaacgatctcaatctccctagcaatctctagcggcagatcctcgtgcgaagcaaagcgctagcccccttcgtactgtcccgatggcccgcacgaagcagacggcgaggaagtccactggcggcaaggcgccaaggaagcagctggccaccaaggcggcgcgcaagtctgccccggcgaccggcggagtgaagaagccccaccgtttccgccccggcaccgtcgcgctccgggagatccgcaagtaccagaagagcacggagctgctgatccgcaagctgccgttccagcgcctggtgcgtgagatcgcccaggacttcaagaccgacctccgcttccagtcctcggccgtggcggcgctgcaggaggccgcggaggcgtacctggtggggctcttcgaggacaccaacctctgcgccatccacgccaagagggtcaccatcatgcccaaggacatccagctcgcccgccgcatcaggggcgagagggcttgagctgtcgcgctgctgctgttcgtcgttgtaatgtctgaagtatatggtggtgggtgctttctatgccgtgcctatttggctatttcggacgtgttgtcctcactgaatggaaaatggaatgcgattgctcgtctgaaattaacgaatgaccttttacctgc

SEQ ID NO: 1512 - DNA, 657 bp, Zea mays
  unsure (1)..(657): unsure at all n locations
  Clone ID: TF_LIB4979-075-A1-K1-H8
ngatccgcaatcttcaatctccccagcaatccctagcagaagccttccatcctcactcgctcgatggcccgcacgaagcagacggcgaggaagtccaccggcggcaaggcgccgaggaagcagttggcgactaaggcggcccgcaagtctgcccctgcgaccggcggagttaagaagccccaccgcttccgccccggtaccgtcgcgctccgggagatccgcaagtaccagaagagcacagagctgctcatccgcaagctccccttccagcgcctcgtccgcgagatcgcgcaggacttcaagacggacctgcggttccagtcctcggccgtggcggcgctgcaggaggccgcggaggcgtacctggtggggctcttcgaggacaccaacctctgcgccatccacgccaagagggtcaccatcatgcccaaggacatccagctcgcccgccgcatcaggggcgagagggcttgagctgtcgcgctgctgctgttcgtcgttgtaatgtctgaagtatatggtggtgggtgctttctatgccgtgcctatttggctatttcggacgtgttgtcctcactgaatggaaaatggaatgcgattgctcgtctgaaattaaaaaaaaaaaaaaaaaaaaaaaaaagtaaaaaaaaanaaaaa

SEQ ID NO: 1513 - DNA, 839 bp, Zea mays
  Clone ID: TF_ZmC653_100
cctcgaggccggccgggccgggatccacagctcgcatccgatttccaatttcaaatccttcgatcgcgcagcgccgcccgccctctcgcagctctctccgatggcccgcacgaagcagacggcgaggaagtcaactggcggcaaggcgccgcggaagcagctggccaccaaggcggcgcgcaagtcggctccggccaccggcggcgtgaagaagccgcacaggttccgccccggcaccgtcgctctccgcgagatccgcaagtaccagaagagcacggagctgctcatccggaagctgcccttccagcggctggtgcgtgagatcgcgcaagacttcaagaccgaccttcggttccagtcctccgctgtcgccgcgctgcaggaggccgccgaggcgtatctggtgggtctctttgaggacaccaacctctgcgccatccacgccaagagggtcaccatcatgcccaaggacatccagctcgcgcgccgcatcaggggcgagagggcctgattgctgctctgtcttcctgtttctgtaatgtctgaactaggcgatggactctatcgcttcttgtcctgcaatcgtgtaccgatgttcttggcaaatcaatttggctgttatgaatgtgattcagtgatttgatttataacttttttgttccaaaattggaacaatcactgatccaagagagcgttgttttttgagccagaacataaaatctaggttttatcggttcttatattttatcgtgacagtagcagccaaaaaacagtgaatctaagcatatctattttaaaatatcaaatttgttctaataagaattcagatgtttagttcc

SEQ ID NO: 1514 - DNA, 1010 bp, Zea mays
  Clone ID: TF_ZmC653_102
cacgttagggcgttcgcgccccaagggcccgtgccattggctcagcccgcccggccgactcgccgcggcgggccgcctcgaagctcccttacagctcgcatccgatttcccatttcaaatccttcgatcgcacagcgccgcccgccctcacgcagctctctccgatggcgcgcacgaagcagacggcgaggaagtcgaccggcggcaaggcgccgcggaagcagctggccaccaaggcggcgcgaaagtcggccccggccaccggcggcgtgaagaagccgcacaggtttcgccccggcaccgtcgcgctccgcgagatccgcaagtaccagaagagcacggagctgctcatccggaagctgcccttccagcggctggtgcgggagatcgcgcaggacttcaagaccgacctccggttccagtcctccgccgtcgccgcgctgcaggaggccgccgaggcgtacctggtgggtctcttcgaggacaccaacctctgcgccatccatgccaagagggtcaccatcatgcctaaggacatccagctcgcgcgccgcatcaggggcgagcgcgcgtaggcgtatctcgcgcccggccccagtggcggcggagggatggaggagggcaatttgtaaccttatgctgtttgttcgcttttagacggcgtggtgaagaactagtgtaaaaacggctttaaagtctattttgtgcggtagttcgtgtaggccgcttcgtcccgaagcgatcttggtaaaagacttattcgtgttgccaaacgacacaattcgtattttttttgtgtgccgtgtagaacacggtttgttgttattggaatggttcatcgaaatctgtgtgcccgtttggttaaatatcgagggcacgggaatcagcagctagacctaatcgatgtactgtaattgccctcggtcgcaagacaatgaggcaattagcagtcgttgcgttggagggatggccggtcatgaaaaatgtggtgttattccggattttggaac

SEQ ID NO: 1515 - DNA, 846 bp, Zea mays
  Clone ID: TF_ZmC653_103
acccacgcgtccgcgctccggttacaaaacacccaaccccatcccaatctccgaacgcctcgcatcaaaccaactctttcccaaatccaccgccggctcggctcgcccatcttcgcgccaagcaccgaatctccgatggcccgcacgaagcagacggcgcgcaagtcgacgggcggcaaggcgccccgcaagcagctggccaccaaggcggcgcgcaagtcggcgccggcaaccggtggcgtgaagaagcctcaccgcttccgccccggcaccgtcgcgctccgggagattcgcaagtaccagaagagcacggagctgctcatccgcaagctgcccttccagcgcctcgtccgtgagatcgcgcaggatttcaagaccgacctccgcttccagtcctccgctgtcgccgcgctgcaggaggccgccgaggcctacctcgtggggctcttcgaggacaccaacctctgcgccatccacgccaagcgcgtcaccatcatgcccaaggacatccagctcgcgcgccgcatcaggggcgagagggcttgatctcccgttgtcgtcgtccacgttgttgggcctttcctctgtgtctctgcttgtagaatccttgcttctgttcggttccttctgttcgcatgatggtgttcgtagtgttaggagttgcattttctaatctgcttgttcttgcaccggtgcctctgaagtggcgtttccctctatcttaatggaaatggaatgtgctttaaaaaagaaatctgatgtctcgtttgtttccggaattgtaatcttattaacagaataggttatttttttaagatgtgaccttcgaccgtataagtctatctt

SEQ ID NO: 1516 - DNA, 1433 bp, Zea mays
  Clone ID: TF_ZmC653_104
tcataaggtgagaaagaagggcagatgttacgggcccgtacactttcagagaagctggagctcaggtggaactggccacctagcttatgaaggacagtgggttggttagcctggtccgccattaccacctcaaaactgttggcctggccttgggcaccggaggcggggaaggggaggcggtctgggcggcggcctcgactccgaactttacgtcagtaccgaagtcaataacccggccggccgggattcatctccattcgaaacaccctcgcacccacactctcccttcgtccccagcctaaatccccgcaacgatggctcgcacgaagcagacggcgcgcaagtccacgggcggcaaggccccgaggaagcagctggcgaccaaggcggcgcgcaagtcggcccctgcgaccggcggcgtgaagaagccgcaccgcttccgcccgggcaccgtggcgctgcgcgagatccgcaagtaccagaagagcacggagctgctcatccgcaagctgcccttccagcgcctggtccgcgagatcgcgcaggacttcaagaccgacctccgcttccagtcctccgccgtcgccgcgctgcaggaggccgccgaggcttacctcgtcggcctgttcgaggacaccaacctctgcgccatccacgccaagcgcgtcaccatcatgcccaaggacatccagctcgcccgccgcatccgcggggagcgcgcctaggcggccggccggccggataggccgtggcgcagtctcttctcggaagtttgtactagtggtcgggtcgtgtggagggagtggtgtactaatcagcaatgtctcaaaccatgtcaacctctttgttgtcatcaatggaaatcgctacttatgtgtgctaaaaaaaaaaaaaaaaaaaaaaaaaaaaaaaaaaaaaaaaaaaaaaaaaaaaaaaaacccccaccgaagcacagcgccggaaaccgccgccatcgatcgatcgcccggaaactgacctctaccgatgtctggagccggcaagaaggaaaaaaagcccgcggagggcggcgcccacatcaaccttaaggtcaagggacaggatggcaatgaggggttctttcgcataaaaaggcccacccagctgaaaaagctgatgaacgcctattgcgaccgccagtctggggacatgaatgccattgcattcctgtttgatggccgcaggcttcgcggcaagcaaacccctgatgagctggaaatgaaggacggcaacaaaatcaacgccatgcttcaccagaccggaggcagcgttcctagcaccacctaaaagcagcagctgcggagcctcgttttgctctccgccctgcgtagaactaaacaaaagggaaaaagtctttttaaggaacttgggatgctctggctccttgtgccattgctgagggacatccttagcct

SEQ ID NO: 1517 - DNA, 726 bp, Zea mays
  Clone ID: TF_ZmC653_109
cattgggtacctcgaggccggccgggagtaacccgcatcccacatcactcatccacagctcgcagccgtattcctgtctcgaatcctctctcgccgctccgatggcccgcacgaagcaaacagcaaggaagtcgaccggcggcaaggccccccggaagcagctggccactaaggctgcgcgcaagtcggccccggccaccggcggcgtgaagaagccccaccgcttccgccccggcaccgtcgcgctccgcgagatccgcaagtaccagaagagcactgagctgctcatccgcaagctccccttccagcgcctcgtccgcgagatcgcgcaggacttcaagactgatctgaggttccagtcctccgccgtcgcggcgctgcaggaggccgccgaggcgtacctggtggggctcttcgaggacaccaacctttgcgccatccacgccaagcgcgtcactatcatgcccaaggacatccagctcgcgcggcgcatcaggggcgagagggcttgagcgcccgtcgtgctgctcgttgttgtagtgttactagaagtagatggtggcattcgtttcgtggcttccttatcctgtaggagtaatgttctagatgtcttggcttcagtgcaatggactgtgattgctcatttctgaaatttatcaatgaacttgttcttgcaaagatttgccgacaaaaaaaaaaaagaagaaaaaaaaaaaaaaagcggcc

SEQ ID NO: 1518 - DNA, 634 bp, Zea mays
  Clone ID: TF_ZmC653_27
cccccgaggctggccgggatcccagctcacatccgatttctatttcaatccttcgatcgcacagcgccgcccgccctctcgccgctctctccaatggcgcgcacgaagcagacggcgaggaagtcgaccggcggcaaggcgccccggaagcagctggccaccaaggcggcgcgcaagtcggctccggccactggcggcgtgaagaagccgcacaggttccgccccggcaccgtcgcgctccgcgagatccgcaagtaccagaagagcacggagttgctcatccggaagctgcccttccagcggctggtgcgtgagatcgcacaggacttcaagaccgacctccggttccagtcctccgccgtcgccgcgctgcaggaggccgccgaggcctacctggtggggctgttcgaggacaccaacctctgcgccatccacgccaagagggtcaccatcatgcctaaggacatccagctcgcgcgccgcatcaggggcgagagggcctgatcgctgctctgtcttcctgtttctgtagtgtctgaactaggcgatggaatctatcgcttcttgtcctgcaatcatgtaccgatgttctaggtaaatcagtttggctgttatgaatgtgatcagtgatttg

SEQ ID NO: 1519 - DNA, 634 bp, Zea mays
  Clone ID: TF_ZmC653_32
ccggccgggatccacagctcccatccgatttcctatttcaaatccttcgatcgcgcagcgccgcccgccctctcgcagctctctccgatggcccgcacgaagcagacggcgaggaagtcgaccggcggcaaggcgccgcggaagcagctggccaccaaggcggcgcgcaagtcggctccggccaccggcggcgtgaagaaaccgcacaggttccgccccggcaccgtcgcgctccgcgagatccgcaagtaccagaagagcacggagctgctcatccggaagctgcccttccagcggctggtgcgcgagatcgcgcaggacttcaagaccgacctccggttccagtcctccgccgtcgccgcgctgcaggaggccgccgaggcgtacctggttggtctattcgaggacaccaacctctgcgccatccacgccaagagggtcaccatcatgcctaaggacatccagctcgcgcgccgcatcaggggcgagagggcctgattgctgctcttgtcttcctgtttctgtaatgtctgaactaggcgatggactctatcgcttcttgtgctgcaatcgtgtaccgatgttcttggcaaatcaatttggctgttatgaatgtgattcagtgatttgattt

SEQ ID NO: 1520 - DNA, 720 bp, Zea mays
  Clone ID: TF_ZmC653_34
gcgaatcctccatctgcccttgccgccgccgccgacggatccaggtctgtagactgctcactcctctacgctccgctccgaatggcccgcacgaagcagacggcgcgcaagtcgaccggcggcaaggcgccgcggaagcagctggccaccaaggcggcgcgcaagtcggccccggccacgggcggcgtgaagaagccgcaccgcttccgccccggcaccgtcgcgctccgcgagatccgcaagtaccagaagagcactgagctgctcatccgcaagctccccttccagcgcctggtccgcgagatcgcgcaggacttcaagacggacctccggttccagtcctccgccgtcgccgcgctgcaggaggccgccgaggcctacctggtgggcctcttcgaggacaccaacctctgtgccatccacgccaagcgcgtcaccatcatgcccaaggacatccagctcgcgcgccgcatccgcggcgagcgcgcctaggcggttcggttgcggcgcctgctcgctactgatggaggtgcttagtttagcacgtcatggttgtgttataggtgtgcgttgttgttttcaagaggtagcttcttgctatgtgctgatgttaacggtggattatgattagcagttctgaaaaaaatgtaatggatgtgatctgctctatctacatgttttctgtctttgtcctgcaaaaaaaaaaaaaaaaaagcggcc

SEQ ID NO: 1521 - DNA, 667 bp, Zea mays
  Clone ID: TF_ZmC653_37
cattgggtacctcgaggccggccgggacacacgcgaatcctaaatctgcccttgccgcccgatccaggtctgcagactgctcactcctctccgctccgaatggcccgcacgaagcagacggcgcgcaagtcgaccggcggcaaggcgccgcggaagcagctggccaccaaggcggcgcgcaagtcggccccggccacgggcggcgtgaagaagccgcaccgcttccgccccggcaccgtcgcgctccgcgagatccgcaagtaccagaagagcacggagctgctcatccgcaagctccccttccagcgcctcgtccgcgagatcgcgcaggacttcaagacggacctgcggttccagtcctcggccgtggcggcgctgcaggaggccgcggaggcgtacctggtggggctcttcgaggacaccaacctctgcgccatccacgccaagagggtcaccatcatgcccaaggacatccagctcgcccgccgcatcaggggcgagagggcttgagctgtcgcgctgctgctgttcgtcgttgtaatgtctgaagtatatggtggtgggtgctttctatgccgtgcctatttgggtatttcggacgtgttgtcctcactgaatggaaaatggaatgcgattgctcgtctaaaaaaaacaaaaaaaagcggcc

SEQ ID NO: 1522 - DNA, 678 bp, Zea mays
  Clone ID: TF_ZmC653_41
ttgggaccctcgaggccggccgggacacacgcgaatcctcaatctgcccttgccgccgccactgcccgatccaggtgtgcagactgctccctcctcctctccgctccgaatggcccgcacgaagcagacggcgcgcaagtcgaccggcggcaaggcgccgcggaagcagctggccaccaaggcggcgcgcaagtcggccccggccacgggcggcgtgaagaagccgcaccgcttccgccccggcaccgtcgcgctccgcgagatccgcaagtaccagaagagcacggagctgctcatccgcaagctccccttccagcgcctcgtccgcgagatcgcgcaggacttcaagacggacctgcggttccagtcctcggccgtggcggcgctgcaggaggccgcggaggcgtacctggtggggctcttcgaggacaccaacctctgcgccatccacgccaagagggtcaccatcatgcccaaggacatccagctcgcccgccgcatcaggggcgagagggcttgagctgtcgcgctgctgctgttcgtcgttgtaatgtctgaagtagatggtggtgggtgctttctatgccgtgcctatttggctatttcggacgtgttggttcactgaatggaaaatggaatgccatttctcgtcagaaaaaaaaaaaaaaaaaagcggcc

SEQ ID NO: 1523 - DNA, 727 bp, Zea mays
  Clone ID: TF_ZmC653_43
cgggaaaaaaaaacaaaaaaaaaaaagtaacccgcatcccacatcactcatccacagctcgcagccgtgttcctgtctcgaatcctctctcgccgctccgacggcccgcacgaagcaaacagcaaggaagtcgaccggcggcaaggccccccggaagcagctggccactaaggctgcgcgcaagtcggccccggccaccggcggcgtgaagaagccccaccgcttccgccccggcaccgtcgcgctccgcgagatccgcaagtaccagaagagcactgagctgctcatccgcaagctccccttccagcgcctcgtccgcgagatcgcgcaggacttcaagactgatctgaggttccagtcctccgccgtcgcggcgctgcaggaggctgccgaggcgtacctggtggggctcttcgaggacaccaacctttgcgccatccacgccaagcgcgtcactatcatgcccaaggacatccagctcgcgcggcgcatcaggggcgagagggcttgagcgcccgtcgtgctgctcgtcgttgtagtgttactagaagtagatggtggcattcgtttcgtggcttccttatcctgtaggagtaatgttctagatgtcttggcttcagtgcaatggactgtgattgctcatttctgaaatttatcaatggacttgttcttgcaaaaaaaaaaaaaaaaaaaaaaaaaaaagaaaaaaaaaaaaaaaaaagcggcc

SEQ ID NO: 1524 - DNA, 701 bp, Zea mays
  Clone ID: TF_ZmC653_47
cgctcttgttgtttccgagcccaaaccccagcacgctccacccgcacctccgctcccacacaccgatggcccgcacgaagcagacggcgcgcaagtccaccggtggcaaggcgccgcggaagcagctggcgaccaaggcagcgcgcaagtcggccccggcgaccggcggcgtgaagaagccgcaccgcttccgcccgggcaccgtggcgctccgcgagatccgcaagtaccagaagagcacggagctgctcatccgcaagctccccttccagcgcctggtccgcgagatcgcgcaggacttcaagaccgacctccgcttccagtcctccgccgtcgccgcgctgcaggaggccgcggaggcctacctcgtcggcctcttcgaggacaccaacctctgcgccatccacgccaagcgcgtcaccatcatgcccaaggacatccagctcgcccgccgcatccgcggggagcgcgcttaggcgtttacggttgattgtcactactgtagatgtttaggctatgttctcgccatgttctaggtctgcttcgttcttatttgtttttttttggtttcatcctgtgcgttgatgtgtgtcgatgagctatctgtgcctgtctgagagaaatagagtgatctattggcgccattgttgaacaccatgaagttggagacataaatatgcatgaacaacacaattaactgg

SEQ ID NO: 1525 - DNA, 629 bp, Zea mays
  Clone ID: TF_ZmC653_50
cggcacgagcccatttcgaatccttcgatcgcgcagcgccgcccgccctctcgcagttctctccgatggcccgcacgaagcagacggcgaggaagtcgaccggcggcaaggcgccgcggaagcagctggccaccaaggcggcgcgaaagtcggctccggccaccggcggcgtgaagaagccgcacaggttccgccccggcaccgtcgcgctccgcgagatccgcaagtaccagaagagcacggagctgctcatccggaagctgccgttccagcggctggtgcgtgagatcgcgcaggacttcaagaccgacctccggttccagtcctccgctgtcgccgcgctgcaggaggccgccgaggcgtacctggtgggtctctttgaggacaccaacctctgcgccatccacgccaagagggtcaccatcatgcctaaggacatccagctcgcgcgccgcatcaggggcgagagggcctgattgctgctctgtcttcctgtttctgtagtgtctaaactaggcgatggaatctatcgcttcttgtcctgcaatcgtgtactgatgttctaggcaaatcagtttggctgttatgaatgtgattcagtgatttgatttaaaaaaaaaaaaaaaaaa

SEQ ID NO: 1526 - DNA, 786 bp, Zea mays
  Clone ID: TF_ZmC653_51
aaatctcccaaggacatccagcccaaacacggtcaaacacgctccagcctccacccgcacctccgctcccacaccgatggcccgcacgaagcagacggcgcgcaagtccaccggtggcaaggcgccgcggaagcagctggcgaccaaggcagcgcgcaagtcggccccggcgaccggcggcgtgaagaagccgcaccgcttccgcccgggcaccgtggcgctccgcgagatccgcaagtaccagaagagcacggagctgctcatccgcaagctccccttccagcgcctggtccgcgagatcgcgcaggacttcaagaccgacctccgcttccagtcctccgccgtcgccgcgctgcaggaggccgcggaggcctacctcgtcggcctcttcgaggacaccaacctctgtgccatccacgctaagcgcgtcaccatcatgcccaaggacatccagctcgcccgccgcatccgcggggagcgcgcttaggcgtttacggttgattgtcactactgtagatgtttaggctatgttctcgccatgttctaggtctgcttcgttcttgttttttttgtttcatcctgtgcgttgatgggtgtcgatgagctatcggtgcctgtctgagagaaatggagtgatctgttggcgccattgttgaacaccatgaagttgcgagctcggacgttataaattcctaccagacataaatatgcatgaacaatacaattaactggagatactggtagactagtacctctactaaaaaaaaaaaaaaaaaagcggccctc

SEQ ID NO: 1527 - DNA, 654 bp, Zea mays
  unsure (1)..(654): unsure at all n locations
  Clone ID: TF_ZmC653_53
ggtaccctccgggtcggccgggacgcgaatcctccaatctgcccttgccgccgactgctcactcctctccggtccgctccactccgaatggcccgcacgaagcagacggcgcgcaagtcgaccggcggcaaggcgccgcggaagcagctggccaccaaggcggcgcgcaagtcggccccggccacgggcggcgtgaagaagccgcaccgcttccgccccggcaccgtcgcgctccgcgagatccgcaagtaccagaagagcacggagctgctcatccgcaagctccccttccagcgcctcgtccgcgagatcgcgcaggacttcaagacggacctgcggttccagtcgtcggcggtggcggcgctgcaggaggccgcggaggcgtacctggtggggctcttcgaggacaccaacctctgcgccatccacgccaagagggtcaccatcatgcccaaggacatccagctcgcccgccgcatcaggggcgagagggcttgagctgtcgcgctgctgttcgtcgttgtaatgtctgaagaagatggtgggctcgtttcatgtcgtgcctatcgtggatgtgtttccctcactgaatggaatgcgactgcccttgtccgaaattaatgaactagatcaggtggcgccctnncnggcgcc

SEQ ID NO: 1528 - DNA, 882 bp, Zea mays
  Clone ID: TF_ZmC653_55
ccggccggggaaaaagttcccggctccccgctccggttacaaaacacccaaccccatacaagctccgaacgcctcgcatcaaaccaactctttcccaaatccaccgccggctcggctcgcccttctccgcgccaagcacccaagctccgatggcccgcacgaagcagacggcgcgcaagtcgacgggcggcaaggcgccccgcaagcagctggccaccaaggcggcgcgcaagtcggcgccggcaaccggtggcgtgaagaagcctcaccgcttccgccccggcaccgtcgcgctccgggagattcgcaagtaccagaagagcacggagctgctcatccgcaagctgcccttccagcgcctcgtccgtgagatcgcgcaggatttcaagaccgacctccgcttccagtcctccgctgtcgccgcgctgcaggaggccgccgaggcctacctcgtggggctcttcgaggacaccaacctctgtgccattcacgccaagcgcgtcaccatcatgcccaaggacatccagctcgcgcgccgcatcaggggcgagagggcctgatctcccgttgtcgtcgtccacgttgttggaccttttctctgtgtctctgcttgtagaatccttgcttctgttcggttccttctgttcgcatgatggtgttcgtagtgttaggagttgcattctctaatctgcttgttcttgcaccggtgcctctgaagcggcgtttccccctatcttaatggaaatggaatgtgcttttggaaaaaccccgagtgaattctaggctctgaacacactttctgggcttatctttatgtggtgggatcaatgtgtgaattttgagacatgtaatttttagttgtcaggtctacacaattgcctc

SEQ ID NO: 1529 - DNA, 785 bp, Zea mays
  Clone ID: TF_ZmC653_56
cattgggacctcgagccggcgggaccgatcctcaatctgcccttgccgccgccgccgccgccgcccgatccaggtctgtagactgctcactcctccggtctgctcggaatggcccgcacgaagcagacggcgcgcaagtcgaccggcggcaaggcgccgcggaagcagctggccaccaaggcggcgcgcaagtcggccccggccacgggcggcgtgaagaagccgcaccgcttccgccccggcaccgtcgcgctccgcgagatccgcaagtaccagaagagcactgagctgctcatccgcaagctccccttccagcgcctggtccgcgagatcgcgcaggacttcaagacggacctgcggttccagtcgtcggcggtggcggcgctgcaggaggccgcggaggcgtacctggtggggctcttcgaggacaccaacctctgcgccatccacgccaagagggtcaccatcatgcccaaggacatccagctcgcccgccgcatcaggggcgagagggcttgagctgtcgcgctgctgttcgtcgttgtaatatttgaagatggcgggttcgtttcatgtcgtgcttatcgtggatgtgttgccctcactgaatggaatgcgactgcccttgtccgaaattaatgaatgcccttgttccttcaaagattttggtgacttgtttaatgggcacagtgtagtcggaggtcgcaggcataccattatgtgacttgtttacatggttcaatggcgtgttgattgcttgcaaaaaaaaaaaaaaaaaagcggcc

SEQ ID NO: 1530 - DNA, 762 bp, Zea mays
  Clone ID: TF_ZmC653_57
tgggtccctcgggccggccggaccggtcagcgcgaagccagagcaccacgccccgtccgaactccgaactccagatcagagcagagcctcttcgacctccctgtccccagccttccccgatggcccgcacgaagcagacggcgcgcaagtcgacgggcggcaaggcgccgcggaagcagctggcgacgaaggcggcgcgcaagtcggcgccggcgacgggcggcgtgaagaagccgcaccgcttccgcccgggcaccgtcgcgcttcgcgagatccgcaagtaccagaagagcacggagctgctgatccgcaagctcccgttccagcgcctggtccgcgagatcgcgcaggacttcaagacggacctccggttccagtcctccgccgtcgccgcgctgcaggaggccgccgaggcctacctggtgggcctcttcgaggacaccaacctctgtgccatccacgccaagcgcgtcaccatcatgcccaaggacatccagctcgcgcgccgcatccgcggcgagcgcgcctaggcggttcggttgcggcgcctgctcgctactgatggaggtgcttagtttagcacgtcatggttgtgttataggtgtgcgttgttgttttcaagaggtagcttcttgctatgtgctgatgttaacggaggattatgattagcagttctgaaaaaaatgtaatggatgtgatctgctctatctacatgttttctgtctttgtcctgaaatcccatggtgttttagcattgatttc

SEQ ID NO: 1531 - DNA, 859 bp, Zea mays
  Clone ID: TF_ZmC653_60
tctgccggaaaaccccgccgcttaaaaacgcacccgaatctgccactccaaaatctcccaaagacgccgtcgccgctcttgttgtttccgatcccaaaccccaaacacgctccaccggcacctccgctcccacaccacaccgatggcccgcacgaagcagacggcgcgcaagtccaccggtggcaaggcgccgcggaagcagctggcgaccaaggcagcgcgcaagtcggccccggcgaccggcggcgtgaagaagccgcaccgcttccgcccgggcaccgtggcgctccgcgagatccgcaagtaccagaagagcacggagctgctcatccgcaagctccccttccagcgcctggtccgcgagatcgcgcaggacttcaagaccgacctccgcttccagtcctccgccgtcgccgcgctgcaggaggccgcggaggcctacctcgtcggcctcttcgaggacaccaacctctgcgccatccacgccaagcgcgtcaccatcatgcccaaggacatccagctcgcccgccgcatccgcggggagcgcgcttaggcgtttacggttgattgtcactactgtagatgtttaggctatgttctcgccatgttctaggtctgcttcgttcttatttgtttttttggtttcatcctgtacgttgatgggtgttgatgagctatcggtgcctgtctgagaaatggagtgatctattggcgccattgttgaacaccatgaagttgcgagctcggacgttataaattcctaccagacataaatatgcatgaacaatacaattaactggagatatactgttagactagtatgtctactacatttgcttatgcttggatgtgcattctc

SEQ ID NO: 1532 - DNA, 756 bp, Zea mays
  Clone ID: TF_ZmC653_61
cctgccgggaaaccccagcgcttaaaaacgcacccgaatctgccactccaaaatctcccaaagacgccgtcgccgctcttgttgtttccgatcccaaaccccaaacacgctccaccggcacctccgctcccacaccacaccgatggcccgcacgaagcagacggcgcgcaagtccaccggaggcaaggcgccgcggaagcagctggcgaccaaggcagcgcgcaagtcggccccggcaaccggcggcgtgaagaagccgcaccgcttccgcccgggcaccgtggcgctccgcgagatccgcaagtaccagaagagcacggagctgctcatccgcaagctccccttccagcgcctggtccgcgagatcgcgcaggactttaagaccgacctccgcttccagtcctccgccgtcgccgcgctgcaggaggccgcggaagcctacctcgtcggcctcttcgaggacaccaacctctgcgccatccacgccaagcgcgtcaccatcatgcccaaggacatccagctcgcccgccgcatccgcggggagcgcgcttaggcgtttacggttgattgtcactactgtaggtgtttaggctatgttctcgccatgttctaggtctgcttcgttcttatttgtttttttggtttcatcctgtacgttgatgggtgttgatgagctatcggtgcctgtctgagaaatggagtgatctattggcgccattgttgaacaccagtaaaaaaaaaaaaaaaaaagcggcc

SEQ ID NO: 1533 - DNA, 693 bp, Zea mays
  Clone ID: TF_ZmC653_62
gggctgcaggaattcggcacgaggctcattcatctccattcgaaacaccctcgcacccacactctcccttcgtccccagcctaaatccccgcaaagatggctcgcacgaagcagacggcgcgcaagtccacgggcggcaaggccccgaggaagcagctggcgaccaaggcggcgcgcaagtcggcccctgcgaccggcggcgtgaagaagccgcaccgcttccgcccgggcaccgtggcgctgcgcgagatccgcaagtaccagaagagcacggagctgctcatccgcaagctgcccttccagcgcctggtccgcgagatcgcgcaggacttcaagaccgacctccgcttccagtcctccgccgtcgccgcgctgcaggaggctgccgaggcctacctcgtcggcctgtttgaggacaccaacctctgcgccatccacgccaagcgcgtcaccatcatgcccaaggacatccagctcgcccgccgcatccgcggggagcgcgcataggcggcccgccggataggccggtggcccgttgcgcagtctcttctcggaagtttgtactagtggtcgggtcgtgtggaaggagtggtgtactgatctgcaatgtctcaaaccatgtcaacctctttgttgtcatcaatggaaatcgctacttatgtgtgagaaaaaaaaaaaaaaaaaaggccccta

SEQ ID NO: 1534 - DNA, 745 bp, Zea mays
  Clone ID: TF_ZmC653_64
gcatcacgcagctttagtccatctctcaaccatccgaccccacctcgccgctcactcccaagccagtccctgccggcagcgatggcccgcacgaagcagacggcgcgcaagtcgacgggcggcaaggcgccgcggaagcagctggcgacgaaggcggcgcgcaagtcggcgccggccacggggggcgtgaagaagccgcaccgcttccgcccgggcaccgtggcgctgcgggagatccgcaagtaccagaagagcacggagctgctgatccggaagctgccgttccagcggctggtgcgggagatcgcgcaggacttcaagacggacctccggttccagtcctccgccgtggccgcgctgcaggaggccgccgaggcctacctcgtgggcctcttcgaggacaccaacctctgcgccatccacgccaagcgcgtcaccatcatgcccaaggacatccagctcgcccgccgcatccggggcgagagggcctgagcaccccccgtctctgctgtgttcccttcgctttctgatttctgtagcgcgaagaactactgtagtaggggaagaactacctcgtgttatattggggttgtgggtaggaaactaggaatgttctgttggtttcgatgcagtgcccccgtgatactgacatccgtgctgcttgttctgttcttcctactacaaatgcgattgttactattatcgaaaaaaaaaaaaaaagaaaaaaaaaaaaaaaaaagcggcc

SEQ ID NO: 1535 - DNA, 738 bp, Zea mays
  Clone ID: TF_ZmC653_65
cggacgcgtgggtcccccagaaaatcaactcctcctcaattccacgctgccaccaactcgccgtcctccgcgccaagcatcaaagctccgatggcccgcacgaagcagacggctcgcaagtcgacgggcggcaaggcgccccgcaagcagctggcgaccaaggcggcgcgcaagtctgcgccggccaccggcggcgtgaagaagccccaccgcttccgccccggcaccgtcgcgctccgggagatccgcaagtaccagaagagcacggagctgctcatccgcaagttgcccttccagcgcctcgtccgtgagatcgcgcaggacttcaagaccgatctccgcttccagtcctccgccgtcgcggcgctgcaggaggccgccgaggcctaccttgtggggctctttgaggacactaacctctgcgccatccacgccaagcgcgtcaccatcatgcccaaggacatccagctcgcgcgccgcatcaggggcgagagggcctgagcgaggcgagctcctctcaccgcaggcggcgtcgttgttgcttcggacctgcttgtaggacttgtgcttctcttggtttcctttctggtggcagaggcatcttggtaccattgtgcttgttcttagaatcttagggatagagagttttcagttgctgggtaacctgattgtttatcttgcattcctgcctctgtaatggttgtctgctgtcttaatggaaattatatttgctttttt

SEQ ID NO: 1536 - DNA, 696 bp, Zea mays
  Clone ID: TF_ZmC653_68
tgggtacctcgaggccggccgggaaaaaaaaaaaaaaaaaaaacgcgaatcctccaatctgtctttgccgccgccgcccgatccaggtctgcagactgctcactccactccgctccgaatggcccgcacgaagcagacggcgcgcaagtcgaccggcggcaaggcgccgcggaagcagctggccaccaaggcggcgcgcaagtcggccccggccacgggcggcgtgaagaagccgcaccgcttccgcccgggcaccgtcgcgctccgcgagatccgcaagtaccagaagagcacggagctgctcatccgcaagctcccgttccagcgcctcgtccgcgagatcgcgcaggacttcaagacggacctgcggttccagtcgtcggcggtggcggcgctgcaggaggccgcggaggcgtacctggtggggctcttcgaggacaccaacctctgcgccatccacgccaagagggtcaccatcatgcccaaggacatccagctcgcccgccgcatcaggggcgagagggcttgagctgtcgcgctgctgttcgttgttgtaatatctgaagaagatggcgggttcgtttcatgtcgttcctatcgtggatgtgttgccctcactgaatggaatgcgactgcccttgttcgaaattaatgattgcccttgttccttgcaaaaaaaaaaaaaaaaaagcggcc

SEQ ID NO: 1537 - DNA, 658 bp, Zea mays
  Clone ID: TF_ZmC653_69
tacaattcaacagagctcgcagccgtattcttttcttgaatcctctctcgctgctccgatggcccgcacgaagcaaacagcaaggaagtcgaccggcggcaaggccccccggaagcagctggctactaaggctgcgcgcaagtcggccccggccaccggcggcgtgaagaagccccaccgcttccgccccggcaccgtcgcgctccgcgagatccgcaagtaccagaagagcactgagctgctcatccgcaagctccccttccagcgcctcgtccgcgagatcgcgcaggacttcaagactgatctgaggttccagtcctccgccgtcgcggcgctgcaggaggccgccgaggcgtacctggtggggctcttcgaggacaccaacctttgcgccatccacgccaagcgcgtcactatcatgcccaaggacatccagctcgcgcggcgcatcaggggcgagagggcttgagcgcccgtcgtgctgctcgtcgttgtagtgttactagaagtagatggtggcattcgtttcgtggcttccttatcctgtaggagtaatgttctagatgtcttggcttcagtgcaatggactgtgattgctcatttctgaaatttatcaatggacttgttcttgcaaaaaaaaaaaaaaaaaaggccccta

SEQ ID NO: 1538 - DNA, 761 bp, Zea mays
  Clone ID: TF_ZmC653_71
cagaaaatcaactcctccccaaatccacgctgccaccaactcgccgtcctccgcgccaagcaccaaagctccgatggcccgcactaaacagacggcgcgcaagtcgacgggcggcaaggcgccccgcaagcagctggcgaccaaggcggcgcgcaagtctgcgccggccaccggcggcgtgaagaagccccaccgcttccgccccggcaccgtcgcgctccgggagatccgcaagtaccagaagagcacggagctgctcatccgcaagttgcccttccagcgcctcgtccgtgagatcgcgcaggacttcaagaccgatctccgcttccagtcctccgccgtcgccgcgctgcaggaggccgccgaggcctacctcgtggggctctttgaggacactaacctctgcgccatccacgccaagcgcgtcaccatcatgcccaaggacatccagctcgcgcgccgcatcaggggagagagggcctgagcgaggcgagctcctctcaccgcaggcggcgtcgttgttgcttcgggcctgcttgtaggacttgtgcttctcttggtttcctttctggtggcagtggcatcttggtaccattgtgcttgttcttagaatcttagggatagagagttgttcagttgctgggtaacctgattgtttatcttgcattcctgcctctgtaatggttgtctgctgtcttaatggaaatgatatttgctttttaaactgagaattaacccacgcgtccggttctagatcgcga

SEQ ID NO: 1539 - DNA, 716 bp, Zea mays
  Clone ID: TF_ZmC653_75
ggccggccgggaaaaaaaaaaaaaaaaaaaaacgcgaatcctccaatctgcccttgccgccgccaccgcaaccgcccgatccaggtccgcagactgctccctcctcctctccgctccgaatggcccgcacgaagcagacggcgcgcaagtcgaccggcggcaaggcgccgcggaagcagctggccaccaaggcggcgcgcaagtcggccccggccacgggcggcgtgaagaagccgcaccgcttccgccccggcaccgtcgcgctccgcgagatccgcaagtaccagaagagcacggagctgctcatccgcaagctccccttccagcgcctcgtccgcgagatcgcacaggacttcaagacggacctgcggttccagtcctcggccgtggcggcgctgcaggaggccgcggaggcgtacctggtggggctcttcgaggacaccaacctctgcgccatccacgccaagagggtcaccatcatgcccaaggacatccagctcgcccgccgcatcaggggcgagagggcttgagctgtcgcgctgctgctgttcgtcgttgtaacgtctgaagtagatgatggtgggtgctttctatgccgtgcctatttggctatttcggacgtgttgtcctcactgaatggaaaatggaatgcgattgctcgtctgaaattaacgaatgactttttacctgacaaaaaaaaaaaaaaaaaagcggcc

SEQ ID NO: 1540 - DNA, 760 bp, Zea mays
  Clone ID: TF_ZmC653_76
cattgggtacctcgaggccggccgggagacacgcgaatcctccaatctgcccttgccgccgccgccgacggatccaggtctgtagactgctcactcctctacgctccgctccgaatggcccgcacgaagcagacggcgcgcaagtcgaccggcggcaaggcgccgcggaagcagctggccaccaaggcggcgcgcaagtcggccccggccacgggcggcgtgaagaagccgcaccgcttccgccccggcaccgtcgcgctccgcgagatccgcaagtaccagaagagcactgagctgctcatccgcaagctccccttccagcgcctggtccgcgagatcgcgcaggacttcaagacggacctgcggttccagtcgtcggcggtggcggcgctgcaggaggccgcggaggcgtacctggtggggctcttcgaggacaccaacctctgcgccatccacgccaagagggtcaccatcatgcccaaggacatccagctcgcccgccgcatcaggggcgagagggcttgagctgtcgcgctgctgttcgtcgttgtaatatttgaagatggcgggttcgtttcatgtcgtgcttatcgtggatgtgttgccctcactgaatggaatgcgactgcccttgtccgaaattaatgaatgcccttgttccttcaaagattttggtgacttgtttaatgggcacagtgagtcggaggtcgcaggcataccattatgtacttgtttacaggttcaaaaaaaaaaaaaaaaa

SEQ ID NO: 1541 - DNA, 765 bp, Zea mays
  Clone ID: TF_ZmC653_78
atcccgtccaccgagtagcagagtcccacgcccctttcgaactccgaaccccagagcagagcagagcctcctcgacctccctgtccccagccttccgcgatggcccgcacgaagcagacggcgcgcaagtcgacgggcggcaaggcgccgcggaagcagctggcgacgaaggcggcgcgcaagtcggcgccggcgacgggcggcgtgaagaagccgcaccgcttccgcccgggcaccgtcgcgctgcgcgagatccgcaagtaccagaagagcacggagttgctgatccgcaagctcccgttccagcgtctggtccgcgagatcgcgcaggacttcaagacggacctccggttccagtcctccgccgtcgccgcgctgcaggaggccgccgaggcctacctggtgggcctcttcgaggacaccaacctctgtgccatccacgccaagcgcgtcaccatcatgcccaaggacatccagctcgcgcgccgcatccgcggcgagcgcgcctaggcggttcggttgcggcgcctgctcgctactgatggaggtgcttagtttagcacgtcatggttgtgttataggtgtgcgttgttgttttcaagaggtagcttcttgctatgtgctgatgttaacggtggattatgattagcagttctgaaaaaaatgtaatggatgtgatctgctctatctacatgttttctgtctttgtcctggaatcccatggtgtttagcattgattttaaaaaaaaaaaaaaaaaagcggcc

SEQ ID NO: 1542 - DNA, 939 bp, Zea mays
  Clone ID: TF_ZmC653_80
cattgggtacctcgaggccggccgggaaaagataaccgacgaaattttgctcttgtttataagtactaccttgactgtcgcttccaaaaaaaaaaaaaaaaaaaagcatcacgcagctttagtcccatctctcaaaccatccgaccccacctcgccgctcactcccaagccagtccctgccggcagcgatggcccgcacgaagcagacggcgcgcaagtcgacgggcggcaaggcgccgcggaagcagctggcgacgaaggcggcgcgcaagtcggcgccggccacggggggcgtgaagaagccgcaccgcttccgcccgggcaccgtggcgctgcgggagatccgcaagtaccagaagagcacggagctgctgatccggaagctgccgttccagcggctggtgcgggagatcgcgcaggacttcaagacggacctccggttccagtcctccgccgtggccgcgctgcaggaggccgccgaggcctacctcgtgggcctcttcgaggacaccaacctctgcgccatccacgccaagcgcgtcaccatcatgcccaaggacatccagctcgcccgccgcatccggggcgagagggcctgagcaccccccgtctctgctgtgttcccttcgctttctgatttctgtagcgcgaagaactactgtagtaggggaagaactacctcgtgttatattggggttgtgggtaggaaactagaaatgttctgttggtttcgatgcagtgcccccgtgatactgacatccgtgctgcttgttctgttcttcctactacaaatgcgattgttactattatcttagcgtttgtttatgcggttatgcttctggaactgaacagtgctacttgttaacgctttgcgttccaacttccaacagaaataaatccgctacactgctgcggaaaaaaaaaaaaaaaaaagcggcc

SEQ ID NO: 1543 - DNA, 799 bp, Zea mays
  Clone ID: TF_ZmC653_81
cattggtacctcgagccggccgggaaaaaattctcaaacgcggcacagagcctcattcatctccattcgaaacaccctcgcacccacactctcccttcgtccccagcctaaatccccgcaacgatggctcgcacgaagcagactgcgcgcaagtcgacgggcggcaaggccccgaggaagcagctggcgaccaaggcggcgcgcaagtcggccccggcgaccggcggcgtgaagaagccgcaccgcttccgccctggcaccgtggcgctgcgcgagatccgcaagtaccagaagagcacggagctgctcatccgcaagctgcccttccagcgcctggtccgcgagatcgcgcaggacttcaagaccgacctccgcttccagtcctccgccgtcgccgcgctgcaggaggctgccgaggcctacctcgtcggcctgtttgaggacaccaacctctgcgccatccacgccaagcgcgtcaccatcatgcccaaggacatccagctcgcccgccgcatccgcggggagcgcgcataggcggcccgccggataggccggtggcccgttgcgcagtctcttctcggaagtttgtactagtggtcgggtcgtgtggaaggagtggtgtactgatctgcaatgtctcaaaccatgtcaacctctttgttgtcatcaatggaaatcgctacttatgtgtgctaatcttcgtgctgcgtttgtttcgtagtaacacaattcgatggattcgtacctgtgaacaatcgattcatatcgtcaccagatgcgaaattggcagtttgtgttc

SEQ ID NO: 1544 - DNA, 767 bp, Zea mays
  Clone ID: TF_ZmC653_83
cattgggtccctcgaggccggccgggaaatctcccaagacgccgtcgccgctcttgttgtttccgatcccaaaccccaaacacgctccaccggcacctccgctcccacaccacaccgatggcccgcacgaagcagacggcgcgcaagtccaccggaggcaaggcgccgcggaagcagctggcgaccaaggcagcgcgcaagtcggccccggcaaccggcggcgtgaagaagccgcaccgcttccgcccgggcaccgtggcgctccgcgagatccgcaagtaccagaagagcacggagctgctcatccgcaagctccccttccagcgcctggtccgcgagatcgcgcaggacttcaagaccgacctccgcttccagtcctccgccgtcgccgcgctgcaggaggccgcggaggcctacctcgtcggcctcttcgaggacaccaacctctgcgccatccacgccaagcgcgtcaccatcatgcccaaggacattcagctcgcccgccgcatccgcggggagcgcgcttaggcgtttacggttgattgtcactactgtagatgtttaggctatgttctcgccatgtcctaggtctgctttgttcttatttgtttttttggtttcatcctgtgcgttgatggttgtcaatgagctatcggtgcctgtctgagagaaatggagtgatctgttggcgccattgttgaacaccatgaagttgcgagctcggacgttataaattcctaccagacataaatatgcatgaacaatac

SEQ ID NO: 1545 - DNA, 855 bp, Zea mays
  Clone ID: TF_ZmC653_84
cggccgggggaaagtcgataccccacgcgaatcctccaatctgcccttgccgccgccgcccgatccaggtctgtagactgctcactcctctccgctccggtccgaatggcccgcacgaagcagacggcgcgcaagtcgaccggcggcaaggcgccgcggaagcagctggccaccaaggcggcgcgcaagtcggccccggccacggggggcgtgaagaagccgcaccgcttccgccccggcaccgtcgcgctccgcgagatccgcaagtaccagaagagcacggagctgctcatccgcaagctccccttccagcgcctggttcgcgagatcgcgcaggacttcaagacggacctgcggttccagtcgtcggcggtggcggcgctgcaggaggccgcggaggcgtacctggtggggctcttcgaggacaccaacctctgcgccatccacgccaagagggtcaccatcatgcccaaggacatccagctcgcccgccgcatcaggggcgagagggcttgagctgtcgcgctgctgttcgtcgttgtaatgtctgaagaggatggtgggttcatttcatgtcgtgcctttcgtggatgtgttgccctctctgaatggaatgcgactgcccttgtccgaaattaatgaatgcccttgttccttcaaagattttggtgacttgtttaatgggcacagtgtagtcgtaggtcgcaggcataccgttatgtgacttgtttacatggttcaatggcgtgttgattgcttgcaatggtttcaggcataccattatgtgaatgctgaagatgaaaatctgtgtgcactattgattaaaaaaaaaaaaaaaaaactcgagagtcttct

SEQ ID NO: 1546 - DNA, 828 bp, Zea mays
  Clone ID: TF_ZmC653_86
attgggtacctcgaggccggccggaaaaaaaaaaaattgacaaccagaaaaataaaaatcttgtacctggatatagcctgacacgagagaactcttccaggagaggcgcggagggcggcgcggctgggcaccggacgacgggcggcgcagccaggcggacgtcaggcggcgcggcagaggagcggtgctgaggaagaatccacagctcgcatccgatttccaatttcaaatccttcgatcgcgcagcgccgcccgccctctcgcagctctctccgatggcccgcacgaagcagacggcgaggaagtcaactggcggcaaggcgccgcggaagcagctggccaccaaggcggcgcgcaagtcggctccggccaccggcggcgtgaagaagccgcacaggttccgccccggcaccgtcgctctccgcgagatccgcaagtaccagaagagcacggagctgctcatccggaagctgcccttccagcggctggtgcgtgagatcgcgcaagacttcaagaccgaccttcggttccagtcctccgctgtcgccgcgctgcaggaggccgccgaggcgtatctggtgggtctctttgaggacaccaacctctgcgccatccacgccaagagggtcaccatcatgcccaaggacatccagctcgcgcgccgcatcaggggcgagagggcctgattgctgctctgtcttcctgtttctgtaatgtctgaactaggcgatggactctatcgcttcttgtcctgcaatcgtgtaccgatgttcttggcaaatcaatttggctgttatgaaaaaaaaaaaaaaaaaaaaaaaagcggcc

SEQ ID NO: 1547 - DNA, 722 bp, Zea mays
  Clone ID: TF_ZmC653_87
ccggccgggaaaaaaaaaaaaaaaaaaaaaaaaaaaaaaaaaaaaaaaaaaaaaccccgcatcccacatcactcatccacagctcgcagccgtattcctgtctcgaatcctctctcgccgctccgatggcccgcacgaagcaaacagcaaggaagtcgaccggcggcaaggccccccggaagcagctggccactaaggctgcgcgcaagtcggccccggccaccggcggcgtgaagaagccccaccgcttccgccccggcactgtcgcgctccgcgagatccgcaagtaccagaagagcactgagctgctcatccgcaagctccccttccagcgcctcgtccgcgagatcgcgcaagacttcaagactgatctgaggttccagtcctccgccgtcgcggcgctgcaggaggccgccgaggcgtacctggtggggctcttcgaggacaccaacctttgcgccatccacgccaagcgcgtcactatcatgcccaaggacatccagctcgcgcggcgcatcaggggcgagagggcttgagcgcccgtcgtgctgctcgtcgttgtagtgttactagaagtagatggtggctttcgtttcgtggcttcgttatcctgtaggagtaatgttctagatgtcttggcttcagtgcaatggactgtgattgctcatttctgaaatttatcaatggacttgttcttgaaaaaaaaaaaaaaaaaagcggcc

SEQ ID NO: 1548 - DNA, 810 bp, Zea mays
  Clone ID: TF_ZmC653_88
tgggtccctcgggccggccggtactgccaatcccccagaaaatcaactcctccccaaatccacgctgccaccaactcgccgtcctccgcgccaagcaccaaagctccgatggcccgcactaaacagacggcgcgcaagtcgacgggcggcaaggcgccccgcaagcagctggcgaccaaggcggcgcgcaagtctgcgccggccaccggcggcgtgaagaagccccaccgcttccgccccggcaccgtcgcgctccgggagatccgcaagtaccagaagagcacggagctgctcatccgcaagttgcccttccagcgcctcgtccgtgagatcgcgcaggacttcaagaccgatctccgcttccagtcctccgccgtcgccgcgctgcaggaggccgccgaggcctaccttgtggggctctttgaggacactaacctctgtgccatccacgccaagcgcgtcaccatcatgcccaaggacatccagctcgcgcgccgtatcaggggcgagagggcctgagcgaggctggctcctctcaccgcaggcggcgtcgttgttgcttcgggcctgcttgtaggacttgtgcttctcttggtttcctttctggtggcagtggcatcttggtaccattgtgcttgttcttagaatcttagggatagagagttgttcagttgctgggtaacctgattgtttatcttgcattcctgcctctgtaatggttgtctgctgtcttaatggaaatgatatttgctttttaaaaaaaaaaaaaaaaaaaaaaaaaaaaaaaaaaaaaaaaaaaaaaaaaaaaaa

SEQ ID NO: 1549 - DNA, 818 bp, Zea mays
  Clone ID: TF_ZmC653_90
cattgggtacctcgaggccggccgggatcactgccaaatcccccagaaaatcaacacctcccaattccacgctgccaccaactcgccgtcctccgcgccaagcaccaaagctccgatggcccgcacgaagcagacggcgcgcaagtcaacgggcggcaaggcgccccgcaagcagctggcgaccaaggcggcgcgcaagtctgcgccggccaccggcggcgtgaagaagccccaccgcttccgccccggcaccgtcgcgctccgggagatccgcaagtaccagaagagcacggagctgctcatccgcaagttgcccttccagcgcctcgtccgtgagatcgcgcaggacttcaagaccgatctccgcttccagtcctccgccgtcgccgcgctgcaggaggccgccgaggcctacctcgtggggctctttgaggacactaacctctgcgccatccacgccaagcgcgtcaccatcatgcccaaggacatccagctcgcgcgccgcatcaggggcgagagggcctgagcgaggcgagctcctctcaccgcaggcgggcgtcgttgttgcttcgggcctgcttgtaggacttgtgcttctcttggtttcctttctggtggcagtggcatcttggtaccattgtgcttgttcttagaatcttagggatagagagttgttcagttgctgggtaacctgattgtttatcttgcattcctgcctctgtaatggttgtctgctgtcttaatggaaatgatatttgctttttaaaaaaaaaaaaaaaaaaaaaaaaaaaaagaaaaaaaaaaaaaaaaaagcggcc

SEQ ID NO: 1550 - DNA, 682 bp, Zea mays
  Clone ID: TF_ZmC653_91
cattgggtacctcgaggccggccgggacacacgcgaatcctcaaatctgcccttgccgccgccactgcccgatccaggtgtgcagactgctccctcctcctctccgctccgaatggcccgcacgaagcagacggcgcgcaagtcgaccggcggcaaggcgccgcggaagcagctggccaccaaggcggcgcgcaagtcggccccggccacgggcggcgtgaagaagccgcaccgcttccgccccggcaccgtcgcgctccgcgagatccgcaagtaccagaagagcacggagctgctcatccgcaagctccccttccagcgcctcgtccgcgagatcgcgcaggacttcaagacggacctgcggttccagtcctcggccgtggcggcgctgcaggaggccgcggaggcgtacctggtggggctcttcgaggacaccaacctctgcgccatccacgccaagagggtcaccatcatgcccaaggacatccagctcgcccgccgcatcaggggcgagagggcttgagctgtcgcgctgctgctgttcgtcgttgtaatgtctgaagtagatggtggtgggtgctttctatgccgtgcctatttggctatttcggacgtgttggttcactgaatggaaaatggaatgccatttctcgtcagaaattaacgatgactttttacctgc

SEQ ID NO: 1551 - DNA, 741 bp, Zea mays
  Clone ID: TF_ZmC653_93
cattgggacctcgagccggccgggacacacgcgaatcctcaaatctgcccttgccgccgccaccgcccgatccaggtctgcagactgctccctcctcctctccgctccgaatggcccgcacgaagcagacggcgcgcaagtcgaccggcggcaaggcgccgcggaagcagctggccaccaaggcggcgcgcaagtcggccccggccacgggcggcgtgaagaagccgcaccgcttccgccccggcaccgtcgcgctccgcgagatccgcaagtaccagaagagcacggagctgctcatccgcaagctccccttccagcgcctcgtccgcgagatcgcgcaggacttcaagacggacctgcggttccagtcctcggccgtggcggcgctgcaggaggccgcggaggcgtacctggtggggctcttcgaggacaccaacctctgcgccatccacgccaagagggtcaccatcatgcccaaggacatccagctcgcccgccgcatcaggggcgagagggcttgagctgtcgcgctgctgctgttcgtcgttgtaatgtctgaagtatatggtggtgggtgctttctatgccgtgcctatttggctatttcggacgtgttgtcctcactgaatggaaaatggaatgcgattgctcgtctgaaattaacgaatgactttttacctgctaaaaaaaaaaaaaaaaaaaaaaaaaaaaaacccaaaaaaaaaaaaaaaaaggccccta

SEQ ID NO: 1552 - DNA, 742 bp, Zea mays
  Clone ID: TF_ZmC653_94
cggagtacccgatccacatactcatccaagctcgcagccgtattcctgtctcgaatcctctctcgccgctccgatggcccgcacgaagcaaacagcaaggaagtcgaccggcggcaaggccccccggaagcagctggccactaaggctgcgcgcaagtcggccccggccaccggcggcgtgaagaagccccaccgcttccgccccggcaccgtcgcgctccgcgagatccgcaagtaccagaagagcactgagctgctcatccgcaagctccccttccagcgcctcgtccgcgagatcgcgcaggacttcaagactgatctgaggttccagtcctccgccgtcgcggcgctgcaggaggccgccgaggcgtacctggtgggtctcttcgaggacaccaacctttgcgccatccacgccaagcgcgtcactatcatgcccaaggacatccagctcgcgcggcgcatcaggggcgagagggcttgagcgcccgtcgtgctgctcgtcgttgtagtgttactagaagtagatggtggctttcgtttcgtggcttccttatcctgtaggagtaatgttctagatgtcttggcttcagtgcaatggactgtgtttgctcatttctgaaatttatcaatggacttgttcttgcaaagatttgtgtttcttacttttgtaagacgtcgagcactgattgtaaatgtactagtaaaacaatttcatttcaaaaaaaaaaaaaaaaaaaaa

SEQ ID NO: 1553 - DNA, 898 bp, Zea mays
  Clone ID: TF_ZmC653_95
attgggtccctcgaggccggccgggaccggccaccgcgaagccagagccccacgccccgtccgaactccgaaccccagaacagagcaaagcctcctcggcctccctgtccccagccttccccgatggcccgcacgaagcagacggcgcgcaagtcgacgggcggcaaggcgccgcggaagcagctggcgacgaaggcggcgcgcaagtcggcgccggcgacgggcggcgtgaagaagccgcaccgcttccgcccgggcaccgtcgcgctgcgcgagatccgcaagtaccagaagagcacggagctgctgatccgcaagctcccgttccagcgcctggtccgcgagatcgcgcaggacttcaagacggacctccggttccagtcctccgccgtcgccgcgctgcaggaggccgccgaggcctacctggtgggcctcttcgaggacaccaacctctgtgccatccacgccaagcgcgtcaccatcatgcccaaggacatccagctcgcgcgccgcatccgcggcgagcgcgcctaggcggttcggttgcggcgcctgctcgctactgatggaggtgcttagtttagcacgtcatggttgtgttataggtgtgcgttgttgttttcaagaggtagcttcttgctatgtgctgatgttaacggtggattatgattagcagttctgaaaaaaatgtaatggatgtgatctgctctatctacatgttttctgtctttgtcctggaatcccatggtgtttagcattgatttcacatgtcttgtttttctctgaatcctgcttgtaatgacatcgacatctgttacacgatctgcttcaatttgtttttaaaaaaaaaaaaaaaaaaaaaaaaaaaaaaaagaaaaaaaaaaaaaaaaaagcggcc

SEQ ID NO: 1554 - DNA, 700 bp, Zea mays
  Clone ID: TF_ZmC653_97
aaaaaaaaaaaaaaattccaacgcggcacagagcctcattcatctccattcgaaacaccctcgcacccacactctcccttcgtccccagcctaaatccccgcaacgatggctcgcacgaagcagacggcgcgcaagtccacgggcggcaaggccccgaggaagcagctggcgaccaaggcggcgcgcaagtcggcccctgcgaccggcggcgtgaagaagccgcaccgcttccgcccgggcaccgtggcgctgcgcgagatccgcaagtaccagaagagcacggagcttctcatccgcaagctgcccttccagcgcctggtccgcgagatcgcgcaggacttcaagaccgacctccgcttccagtcctccgccgtcgccgcgctgcaggaggccgccgaggcctacctcgtcggcctgttcgaggacaccaacctctgcgccatccacgccaagcgcgtcaccatcatgcccaaggacatccagctcgcccgccgcatccgcggggagcgcgcctaggcggccggccggataggccgtggcccgtggcgcaggctcttctcggaagtttgtactagtggtcgggtcgtgtggaaggagtggtgtactgatcagcaatgtctcaaaccatgtcaacctctttgttgtcatcaatggaaatcgccacttatgtgtgttaaaaaaaaaaaaaaaaaagcggcc

SEQ ID NO: 1555 - DNA, 812 bp, Zea mays
  Clone ID: TF_ZmC653_98
cattgggtacctcgaggccgggccgggctcaccggccaccgcgaatccagagccccacgccccgtccgaaccccagagcagagcaaagcctcctcgacctccctgtccccagccttccccgatggcccgcacgaagcagacggcgcgcaagtcgacgggcggcaaggcgccgcggaagcagctggcgacgaaggcggcgcgcaagtcggcgccggcgacgggcggcgtgaagaagccgcaccgcttccgcccgggcaccgtcgcgctgcgcgagatccgcaagtaccagaagagcacggagctgctgatccgcaagctcccgttccagcgcctggtccgcgagatcgcgcaggacttcaagacggacctccgcttccagtcctccgccgtcgccgcgctgcaggaggccgccgaggcctacctggtgggcctcttcgaggacaccaacctctgtgccatccacgccaagcgcgtcaccatcatgcccaaggacatccagctcgcgcgccgcatccgcggcgagcgcgcctaggcggttcggttgcggcgcctgctcgctactgctggaggtgcttagtttagcccgtcatggttgtgttataggtgtgcgttgttttcaagagtaggcttcttgctatgtgctgatgttaacggaggattatgattagcagttctgaaaaaatgcaatggatgtgatctgctctatctacatgttttctgtctttgtcctgaaatcccatggtgtttagcattgatttgacatctgttacacgacctgcttgactgcttcaaaaaaaaaaaaaaaagcgggc

SEQ ID NO: 1556 - DNA, 684 bp, Zea mays
  Clone ID: TF_ZmC653_99
gatcgtggaatataggagcgagcaatccacagctcgcatccgatttccaatttcaaatccttcgatcgcgcagcgccgcccgccctctcgcagctctctccgatggcccgcacgaagcagacggcgaggaagtcaactggcggcaaggcgccgcggaagcagctggccaccaaggcggcgcgcaagtcggctccggccaccggcggcgtgaagaagccgcacaggttccgccccggcaccgtcgctctccgcgagatccgcaagtaccagaagagcacggagctgctcatccggaagctgcccttccagcggctggtgcgtgagatcgcgcaagacttcaagaccgaccttcggttccagtcctccgctgtcgccgcgctgcaggaggccgccgaggcgtatctggtgggtctctttgaggacaccaacctctgcgccatccacgccaagagggtcaccatcatgcccaaggacatccagctcgcgcgccgcatcaggggcgagagggcctgattgctgctctgtcttcctgtttctgtaatgtctgaactaggcgatggactctatcgcttcttgtcctgcaatcgtgtaccgatgttcttggcaaatcaatttggctgttatgaatgtgattcagtgatttgatttaaaaaaaaaaaaaaaaaaaaaaaaaaaaaagcggcc

SEQ ID NO: 1557 - DNA, 709 bp, Zea mays
  Clone ID: TF_ZmC593337_2
ccggccgggacttctcatccaccaattgtcatcgcaaccaagcctttcgacactctcatccatcacagtctttcagactcacatactccctttttaaccacaaacccccccaaaccacaaaccctccaaaatgactggcggcggcaagtctggcggcaaggcctctggttccaagaacgcgcaatcgcgttcctccaaggctggtctcgctttccctgtcggtcgtgtccaccgtctcctccgaaagggcaactacgctcagcgtgtcggtgccggtgctcccgtctacctcgctgccgtcctcgagtacctcgctgctgaaatcctcgagttggctggtaacgctgctcgcgacaacaagaagacccgtatcatcccccgtcatcttcagcttgccatccgaaacgatgaggagctgaacaagcttttgggtcacgtcaccatcgctcagggtggtgttctccccaacatccaccaaaaccttctgcctaagaagacaggcaagactggcaagacctcaagcatggagctgtaatcgggtcatttggttctgtttttccatgcgatggcaggttgtttcggttgtcatgacaaaggggtcacggtttaagggtttacacggttgcttttcatcagtttattcgcgcgcgtcgggttgtacaataatcccccacggctatggtcatgaaataagaatacttctcagatc

SEQ ID NO: 1558 - DNA, 1354 bp, Zea mays
  Clone ID: TF_ZmC20163_2
agagcacggagctgctcatccgcaagctgcccttccaacgcctggtccgcgagatcgggcaagagttcaagaccgacctccgcttccagtcctccgcgtcgccggctgcaagaggggagattgataccattttcgttggagaatcaggttcgcaaatgcgcgactctgcactgagtttaacaaaatgcttagcacaaacagcacaaaagactttcagtgattttgaagaagctgttgaaaaggatgcaacaaagaatattcatactgatggaacagttcatcctttaacaagctatgtgatcaactatgttaagtttttgtttgactaccagtcaactctaaagcagcttttccaggagttcaaggaagatgggacaggttctgagctggcagctgtaacaatgaaaatcatgcaagccttacaaaataatttagaagcaaaagcaaaacaatacaaggatcctgcattgatgcacatatttttgatgaataacattcactatattgtcaaatctgtccgcagatcagaagccaaagatttgttgggtgatgactggattcaaaggcaccgaaggattgtacaacaaaatgccaatcagtatagaaggattgcttgggcgaaggtgttgcaatgcctctctggtcaaggtttgacttcatcaggtggtagtggtcatgtaggaagtgatggtggcaatagcagtggagcttcaagaacagctgtgaaggagagattcaggtctttcaatgtgttgttcgaagagatctaccacaagcaatgtggctggtccgttccagacactgagctgcgcgagtcactaagactcgcggtcgctgaaatcctgttgcctgcctaccgatcattcataaaacgttttgggcctctcattgagaatagcaaagcacctgggaaatacgtgaagcacactcccgagcaactcgagctgctgctaggcaatttattcgaggggaaacaagaacgtgcttgatagtttggtaccgcccgcagcaaggatgtgctgctcttctatgtaaaatacaaaataataaaaataaaaaagatctggaggccctgttagcgttagcattgcttgtgttctccccgtgggagtcaagtatacagctgatgtggcgccaatccttgtttagccgcattattatttgtacagaagaatatatgtgtcagctgtgccttgtgttgatctgatagcaggcgtgttcctggtttctttaatgactggcgacccatctgtagtttttgagatagaaaaatacttccccctcgtcaaaaaaaaaaaaaaaaaaaaaaaaaaaaaaaaaaaaaaaaaaaaaaaaaaaaaaaaaaaaaaaaaaa

SEQ ID NO: 1559 - DNA, 378 bp, Zea mays
  unsure (1)..(378): unsure at all n locations
  Clone ID: TF_LIB3357-001-P1-K1-H12
agcaaccttgcgctcaaacaagaattcacggcctacccaatctattcaagagggagccctattcggataccgacgtcgtgttctaaaggcgcccaaaggcctgaagaagcctgnccgaccgaaacctgcgggggaggagcaccggggggagaaggccctggcggagaagaatcccactgccgagaagcgtgtccctgcgaccaagtccaggtgcaaggaggctggcaagaacaagggctagaagaaggcgaagatgtcggtggagacgtacaagacctacatcttccaggtgctagggcatgcgcacccggatatcggcatctggctcaaggccatgatcatgatgaactccttcatcaacgacatctttgagaatat

SEQ ID NO: 1560 - DNA, 701 bp, Zea mays
  Clone ID: TF_LIB4762-134-Q1-K1-D11
tcgagccggccaggaatatggtcacgtaaaacactagtttactttatattgtagaatatagttttttttaagtcaagagtcaagtttaaaatagaggataacataagtaatagaataaaaaactgctatagacagtttagtggggttcttctttattaaaaagtcaaatatatttattttaaaaaaaaaaaaaaaaaaaaaaaaaaaaaaaaaaaaaaaaaaaaaaaaaaaaaaaaaaaaaaaaaaaataccccgaatcccaaatcattcatccaaagttcgaagccgaattccggtctcaaatcctctctcgccgttccaagggcccgcacaaagaaaacagaaaggaagtcaaccgggggaaaggccccccgaaagaagttggccacaaaggttgggcgaaagtcggccccggccaccggggggggaaaaaagccccaccgtttccgccccggaattgtcgggctccgggaaatccgcaagaaccaaaaaagcactgagttgctcatccgaaagttccccttccagggcctcgtccggaaaatcgcgaaaaacttcaaaactgatcgtgaggttccagttcctccggccgtcgcggggttgaagaaggccgccaaggcgaacctgggggggttcttcaaggacaccaacctttgcgccatccacgccaagggggtcattataatgcccaaggacatcca

SEQ ID NO: 1561 - DNA, 477 bp, Zea mays
  Clone ID: TF_LIB3689-232-Q1-N6-A8
cccacaacagggccataaaatctaaagaggcccattacaacccggccccccggattaatagagcaggcaacctacctcctaggcgggtagggggggggactgggaaaaggacccaaaaaaaaacccttttaaaaaaccccgggaccccccaacccccccagttgctgggaaacttggggacggccttggttccctcgaaaacggggtgcttggcaagccctccggggaggacaaggcccccggaggtctgaatcccccggaacggaagggggggctttttgttgaacccccccagtttgggggcctccccggccagtttttaaaaaatgcctttgataaaggagttcataagggacatggccttggagaatatccccatgtgggggggccccttcttaaacaccttaaaaaaggaaatcttgaaggcctccaccctttttttggccttttttttcccctttttttcccccccctcct

SEQ ID NO: 1562 - DNA, 287 bp, Zea mays
  Clone ID: TF_700346422H1
attcctcccatctcacaagaactcctcagacccgagaagcgcaatgcggacatggacgacaccggcactggagctggagggaaggcgaagaagggagcggccggtcgcaaggtcggcgggccgaggaagaagtcggtgacgaggtccgtgaaggccgagctaccgttccccgtcggccgcatcgggcgctacctcaagaagggccgctacgcgcaggcgtacggcagcggtgcacacgtctaactcgcggacgtcctggagatactcgccgctgaagtcctggagct

SEQ ID NO: 1563 - DNA, 454 bp, Zea mays
  Clone ID: TF_LIB3689-237-Q1-N6-G2
gccccagcggcaaacccaaaatttggaacaaaagggaccaacaacaaaggggtggggggggggagggaaacaagcccttgctagggtacatgacccaattcctacaaaaacaaagcagcgcccacagaaaaaccagcaacatttaactacaacacaaggggaacatcaacccaagaaaagcccacaaagggcgagcgggcaagcctaggaggaggggaacttggggaccgccttggggcccccaaaaacggggtgcttggcgagctccccggggagcaccaggcccacggaggtctggatctcgcgggaggggaaggggggctttttgttgtaacgcgcgaacttgggggcctccccggccaccttttcaaaaatgtcgttgatgaaggagttcatgatggacatggccctggaggaaatgcccatgtccgggtgcacctgcttcaacaccttg

SEQ ID NO: 1564 - DNA, 631 bp, Zea mays
  unsure (1)..(631): unsure at all n locations
  Clone ID: TF_LIB4569-012-Q1-K1-G3
ccgggccctagccaccgcatcgtcgccctcaaattcgttccttccaggcaaggaagaaatcgagcagccaaggagaggagaagatggctcgtacgaagcagaccgcccgcaagtccaccggaggcaaggccccgcgcaagcagctcgccaccaaggcggcgaggaagtctgcgccgacgaccggcggcgtgaagaagccccacaggtaccaggcccgggacggtggctctgcgcgagatccgcaagtaccagaagagcacggagctgctgatccggaagttgcccttccagcgcctggtccgtgagatcgctcaggacttcaagacggatctgcggttccagaagccacgccgtcctgccctcnaaagaagcccgccgaggcctacctcgtcggcctgtttcgaggacaccaacctctgcgccatccacgccaagcgcgtcaccatcatacccaaagacatccagctcgcccgccgcatccgcggcgagcgcgcgttangcgtatctcgcgcccggccccagtggcggcggagggattggaagaaggcaaatttgtaaccttatgcntgtttgttcgctttagacgggcgtgggtgaagaactagtgtaaaaacggctntaaagtctattt

SEQ ID NO: 1565 - DNA, 411 bp, Zea mays
  unsure (1)..(411): unsure at all n locations
  Clone ID: TF_511379
ctcgcaagtccacgggagggaaggctcccaggaagcagcttgcnaccaaggctgcccgtaagtttgcccccaccactggtggagtgaagaagcctcaccgctaccgccctggaacttttgccctccgtaagatccgcaagtatcagaagagcactgagctgctgatcaggaagctgcccttccagaggctcgtaagggaaattgcacaggacttcaaaactaatttgcntttccagagccatgcggtgcttgccctccaggaggctgctgaggcataccttgttggcctgtttaaggacaccaacctgtgcgcatccatgctaagcgtgtnnccatcatgccaaaggaccattcagcttggcaaggnaggttccgcggcgagagggcctaatcgcacctgtaaacaatcgt

SEQ ID NO: 1566 - DNA, 459 bp, Zea mays
  unsure (1)..(459): unsure at all n locations
  Clone ID: TF_LIB3067-008-Q1-K1-H9.R2
tcctgcccgccaaggcatggcgcgcgaggggaaagaggggcccgcaagaagggcaagaagagcgtggagtacctactagatctacatcttcaacgtgctgaagcaggtgcacccggacatcggcatctgctttaaggccatgtccatcatgaactccttcatcaacgacatcttcgagaagctcggcgccgaggccgccaagctcgtgcggtacaacaagaagcccaccatcacctgccgtgagatccatacctccgtgcgcctcgttctccaaggtgagctcgccaagcacgccctcttccagggcaccaagggccgcaccaagttcacctcgttctaagctgcgtgtgctccgcttggaggcttccctcgtatgntcgcgtgtcttgctgcacttaggtgctgctgtgtgtggtctcctccggtagcgactgttatctgatgggacagtgacaatgc

SEQ ID NO: 1567 - DNA, 618 bp, Zea mays
  Clone ID: TF_LIB4665-006-R1-N1-F6
actaccaagattaatattttaaaaaacttcaacaggggtaacctgattcattcagcaattataacaaattctacattggtgcacaaacaacctaacacagccctaaatatgaaaaaatttaacaacgggcgggggggggggccccctaaaaggatgtaaacttggaaaccgccttggccccttcggaaacggggtgcttggcaagctccccggggaggacaaggcccaccgaggtctggatctcccgggaggggatggggggctttttgttgtaacgggcaaacttggctgcctcggggggaagcttctaaaaaatgtcgttgatgaaggagttcatgatggacatggccttggacaaaatgccaatgtccgggggcccctgcttgagcaccttgaaaatgtaaatcttgtacgtttcgacgctttttttcgcctttttttttccctttttttcgccgccctccttgctcggaacgcgcttttccgcccttggttttttttcggccttctcctccgccggttttttctccgggggctttttctcggccttgggcgccatcaggaatcgatcaaatggggcccaaaaaattgggggaaggggcggcttggaaatttgct

SEQ ID NO: 1568 - DNA, 698 bp, Zea mays
  Clone ID: TF_LIB4742-061-R1-K1-F2
tgggtacctcgaggccggcctgggctagtatatcatcgtcgtcctcagattcgttccgttcaggcaaggaagaaatcgagcagtcaaggagaggagaagatggctcgtacgaagcagaccgcccgcaagtccaccggaggcaaggccccgcgcaagcagctcgccaccaaggcggcgaggaagtctgcgccgacgaccggcggcgtgaagaagccccacaggtacaggcccgggacggtggctctgcgcgagatccgcaagtaccataagagcacggagctgctgatccggaagttgcccttccagcgcctggtccgggagatcgctcaggacttcaagacggatctgcggttccagagacacgccgtcctgaccctccaggaagtcgccgaggcctacctcgtcggcctgttcaaggacaccaacctctgcgccatccacgccaagtgcgtcaccatcatgaccaaagacatccagctcgcccgcctgatccgcggcgagagcgcgtaggcgtatctcgcgcccggacccactgtcatcgcagggatggaggaggtgaatttgtaactttatgctgtttgttcgcttttagaccgtgtgttgaacaactagagtataaacggctttagagtctattatgcgcgatagttcgtgtaggtcgcttcctcgcgaagtgatcttgagataacacttattcg

SEQ ID NO: 1569 - DNA, 722 bp, Zea mays
  unsure (1)..(722): unsure at all n locations
  Clone ID: TF_LIB4764-133-Q1-K1-E5
cctcgaggccggccgggagaacgatctcaatctccctagcaatctctagcagcagatcctcgtgcgaagcaaagcgctagcccccttcgtactgtcccgatggcccgcacgaagcagacggcgaggaagtccactggcggcaaggcgccaaggaagcagctggccaccaaggcggcgcgcaagtctgccccggcgaccggcggagtgaagaagccccactgtttccgccccggcaccgtcgcgctccgggagatccgcaagtaccagaagagcacggagctgctgatccgcaagctgccgttccagcgcctggtgcgtgagatcgcccaggacttcaagaccgacctccgcttccgaagctccgccgtcgccgcgctgcaggaggcgtccgaggcctacctcgtcgggctcttcgaggacaccaacctctgcgccattcacgccaagcgcgtcaccatcatgcccaaggacatccagctcgcccgccgtatccgttggggagagggcctaggcgtcgtcccgggggaggtgggaagtagtagtcggccgtttctgtcatcactgtctggctagaaggtgtagagaatgtgccgggttcctgtaagttggggttatcggtcaatcatgaatggaaggttgggtccttccctgctgtaatttaactatgactatgcattggacatggaangttctcggtgaaaaaaaaaaaaaaaaaagcggcc

SEQ ID NO: 1570 - DNA, 804 bp, Zea mays
  Clone ID: TF_ZmC653_36
tcaaaaacccgcatccacagctcgcagccgtattcctgtcttgaatcctctctcgctgctccgatggcccgcacgaagcaaacagcaaggaagtcgaccggcggcaaggccccccggaagcagctggctaaggctgcgcgcaagtcggccccggccaccggcggcgtgaagaagccccaccgcttccgccccggcaccgtcgcgctccgcgagatccgcaagtaccagaagagcactgagctgctcatccgcaagctccccttccagcgcctcgtccgcgagatcgcgcaggacttcaagactgatctgaggttccagtcctccgccgtcgcggcgctgcaggaggccgccgaggcgtacctggtggggctcttcgaggacaccaacctttgcgccatccacgccaagcgcgtcactatcatgcccaaggacatccagctcgcgcggcgcatcaggggcgagagggcttgagcgcccgtcgtgctgctcgtcgttgtagtgttactagaagtagatggtggcattcgtttcgtggcttccttatcctgtaggagtaatgttctagatgtcttggcttcagtgcaatggactgtgattgctcatttctgaaatttatcaatggacttgttcttgcaaagatttgccgtctgttttttacttttggaagacgtcgaacactgattgccgtgcaagcagctgatacgatcccttgtgcaatgttttgatgtaaatgtactagtaaaacgatttgatttcaaataaaaaaaaaaaaaaaaaaggaaaaaaaaaaaaaaaaaagcggcc

SEQ ID NO: 1571 - DNA, 693 bp, Zea mays
  Clone ID: TF_ZmC263912_1
agctccaatctcagagcattccgatccagaccagccgccccccgcatctcgagtagcttccagctcgccggagaggtagcaagcaagatggccggaaggaagggaggcgacaggaagaaggcggtgacccgctccgtgaaggccgggctccagtttcccgtcggccgcatcgggcgctacctcaagaagggccgctacgcccagcgcgtcggctccggcgcccccgtctacctcgccgccgtcctcgagtacctcgccgcagagatgctggagctcgccggcaacgcggccaaggacaacaagaagacccggatcatcccgcgacacctgctgctcgccgtccgcaacgaccaggagctcggaaggctgctcgccggcgtcaccatcgcccacggcggcgtgatccccaacatcaactccgtgctgctcccaaagaagtcccccgccgccgccgagaaggaggccaagtcgcccaagaagaagacctccaccaagtcccccaagaagaaggtcgccgccaaggagtagccgccccatagactacagtcgtgacattgcttaggtccatatcagggagaggatgaggagtttcggttggttgcatcctgtcatcctgtgtgtaattgcctagcccagtaagcgctgtattccatctctaacttatgtccggaatgactaaagatgcaatccttt

SEQ ID NO: 1572 - DNA, 748 bp, Zea mays
  Clone ID: TF_LIB5075-003-R1-XP1-C9
gccggccgggccgggccatcgtcttgatactccacgcccacaacccgctcactcacgccgctccgtccacactcccgtctttttcgactcccacttccaaaaacaacccccaccaaaaaactcattcaaaatgactggcggaaagtccggaggcaaggccagcggctccaagtccagcgcccaatctcgttcatccaaggccggtctcgctttccccgtcggtcgtgtccaccgtctcctccgcaagggcaactacgcccagcgtgtcggtgctggtgctcccgtctacctcgctgccgtccttgagtacctcgctgctgagattctcgagttggccggtaatgctgcccgcgacaacaagaagacccgtatcatcccccgccatctccagctcgccatcaggaacgatgaggagttgaacaagcttctcggacacgttaccatcgcacagggtggtgtcctccccaacattcaccaaaaccttctgcccaagaagactgccaagcctggcaagggtccttcgcaggagctctaagcgcattttgctttcgagtttcttcttcacggcgtggttacttcatgggtctttttcgtctgcaatgataatgggagtcggtctgggttttgggttctcggcttttcacgggatttataccagagctgtatattagctggtcgctttgatgaccacaggctcatgagctgaatcgagcatatcactagaaaaaaaaaaaaaaaaaagccccta

SEQ ID NO: 1573 - DNA, 626 bp, Zea mays
  Clone ID: TF_LIB4766-061-R1-K1-C1
cattgggaccctcgaggccggccggggcctctcccgctacctgaccccgcactcgcgacatcaccaaatcgctcccctcttcccaccagagcaaaggctccctatcggcctgacataacaagccatggcggcgcgcgatgaggccattgcagatgctgtcccgaataaagatatctcccggaccttccaagctggactgcaactaccactcaggaggaatcagcgcacagatcctcaagatcatgaagaaacgcgaacgcatgggacgccgctccccctgtatacctctccgctgacctcgagtacctcgacgcttagggactgcagcttggtgcgaactcagcaaggcataacaaaaatacccgcatcgtgccgcgtatcatccagatcaccacgaccaacaacaagaagctgaccaaattgcttggtgcagccaccatcaccagcggtcgcagtatgcctcaacatcgcaccaggagctcctctccaacaacgctggctcgtccaacgcctccaccgtcgatgaccatcacaactgaagctgaccactgtagaagaggcatccactaccgtcttgtgtcctatgataccacacagatagtcagcatgtctttgagagctcgatg

SEQ ID NO: 1574 - DNA, 394 bp, Zea mays
  unsure (1)..(394): unsure at all n locations
  Clone ID: TF_LIB3076-002-Q1-K1-A4
atcttacgtccccaaatcgaccgagcgaattcaccacagcttctcaccaccgctaccttcgatggcacccaaggcggacaagaagccggcggcgaagaagcctgcagaggaggagcccgcgacagagaaggcggagaaggctccggcggggaagaagcccaaggccgagaagcgcctcccggcgagcaagtccgccggtaaagagggcggcgagggcaagaaggggaaaaagaaagcgaagaagtccgtggagacctacaagatctacaatctcaaagggctgaaacangtgcaccccgacattggcatttcgtgcaaaggcatgtccattatgaacttctttattaacgacattttcgagaaactcgcgggcgaatccggcaagctggcgcgc

SEQ ID NO: 1575 - DNA, 426 bp, Zea mays
  Clone ID: TF_LIB4979-087-A1-K1-C7
gggcggggggggggtactccctaaattgcgcgtgcgatccaactcctgaacactttctcctcggccccgacagggcaagccaacccgaaatacggacatgaactccagcggcaccgaaactagggataaggagaataagggagcgtgcgtagcacaacggcggcgtcacaatgaacaattcggcgtcgaggtccgtgagcgcggcgctccagttccacggcggacgtatcgggagctacttgaagaagggccgctacgcgcagcggggcggaaccggagccccctactacctcgccgctgccatcaaatacctcatcgctgaggttctgcagctcgctgagaatgctggcaggtacaacaggaacactggcatgattgcccgccacgtgcgttctggcgatccgaaatgacgaggagcttgggaag

SEQ ID NO: 1576 - DNA, 458 bp, Zea mays
  Clone ID: TF_LIB3067-019-Q1-K1-C12
ttcccggtcgaccactcgtctcgcccactcgttcgcccactcgttcgctgacgcttttgctgacgcgtgggaaaacacttaagcggataaggcatacaaggaccggaacaagctaagcagctgaagaagccagcagaggaagagctcctgtcactagaaggcaccctactggaagaagcctaaagctgataagctggtcctctctggcaagtccagctgtcaaggagtacgtcaaggtcaagaggggcaagaagaagggcaaaaacagcgtgtagacctacaagatctacatcttcaaggtgctgaatcacgtgcacccagacattggcatctactccaaggtcatatctatcatgaactccttaattaacgatatcttcgagaagctcgatgctgaggccgtcaagctcgcgcgctataacaagaagcctaccatcacactccttgagatccatacc

SEQ ID NO: 1577 - DNA, 286 bp, Zea mays
  Clone ID: TF_LIB3067-056-Q1-K1-F12
gcaatctctaccaccaaatcctgttccgatccaaaccccttgcccctttgtacctgtccggttggcccgaccaaaccaaccggcaagaaattcaattgccggaaagcccccaaggaaccacttgcccacaaagcgcggccccaatgttgcccgggacaccggcagattaaaaaacccaccgttttcgccccggcaccgtctcgctccgggagatacgcaagtaccagaagagcacggagctgctgatccgcaagctgccgttccagcgcctggtgcgtgagatcgc

SEQ ID NO: 1578 - DNA, 550 bp, Zea mays
  unsure (1)..(550): unsure at all n locations
  Clone ID: TF_LIB4732-093-Q1-K1-H8
tcctccacctgccgcctcgtcgacgnngttgagagagagctagaaagcgggagagatgagctcgcatcaaggagactgctcggaagtccgacgggagggaaggctcccaggtaagcatgttgccgccgagggtgcccgtaagtctgcccccaccactggtggagggaagaagcctcaccggtaccgccctggaagtgttgccctccgcgagatccgcaaggatcatagagagacggaggtgttgatcaggaagctgccctgtccgaagcctcccccgggaatttgcagaggacttcagaactgattggcgtttccagaggcatgcgaggatgcccctccagggggtggtgaggcacaccgtggtctgctgtgaggagaacaacgagatgtggcgcatggcctgcgtctggggtgatcatgatggcgaaggacatttatctgaggaaggaggatccgcggacagaatacctaatcgctccgtcagacgtggggacaaagaagatgaagccctgcgggtattgttaatcccctggcgttgtagggacatatg

SEQ ID NO: 1579 - DNA, 746 bp, Zea mays
  Clone ID: TF_LIB4729-031-R1-K1-A12
ggggtaccctcgggttcggccgggttgcacaggctcgcattcgatttcccatgttatatccttcgatcgtacagtgccggccgctctcacgcagctctctgcgatggcgcgcacgaagcagacggcgaggaagtcgaccggctggcaaggcgccgcggaagcagctggccaccaaggcggagcgaaagtggggcccggacaccggctggcgtgaagatgccgcacaggtttcgccccggcaccgtcgcgctccgcgagatccgcacgtaccagaagagcacggagctgctcatgcggaagctgcccttccagcggctgatgcgggagatcgcgcaggacttcaagaccgacctgcggttccagtcctccgccgtcgcctgcgctgcaagaggccgccgaggcgtacctggtgggtctcttcgaggacaccaacctctgcgccatccatgccatgagggtcaccatcatgcctaaggacatacaactcgcgcgccgcgtcaggggcgagagggcctgattgctgctctgtctttctggttctgcagtgtatgaactaggggatggaatctatcgcttcttgtactgcaatcgtgtatctgatgtctctaggcataatcattgttggctgatatgaatgtgactcagtgctttgattcgaaaaaaaaaaaggatggaatgggatcttgcactccatggttgaggtgcctttatcgagggataacagcgcgcttggcgtatcatggtga

SEQ ID NO: 1580 - DNA, 864 bp, Zea mays
  unsure (1)..(864): unsure at all n locations
  Clone ID: TF_LIB4758-088-R1-K1-D11
cattgggaccctcgaggccggccggggtctagtccagctaacgatccgcgcctttcgcgaaacagcccatcacggctcagggcacagccggctcggtccgcaccttctcgcccggcgcgcgccatccgatccatctggtccgcggtcatctgtcagtttgtttgcgcgaaaaaggtgaggaatcctcttgtgtcctggccgttggccgtcgctgcgtcgttccagatttggggaaggaaatccggcaccgagattcgagtcgaaaagatggcgcgtaccaagcagaccgctcgcaagtccactggaggaaaggctcctaggaagcaactcgctacaaaggcagcccggaagtctgcacccacaactggaggagtgaagaagcctcaccgttaccgcccagggactgttgctcttcgtgagatccgcaagtaccagaagagcactgagttgctgattaggaagctgccgtttcagaggcttgtcagggagattgctcaggatttcaaggtaggtgaaagcactgaaacctcacatgcgggaattatgggatatccatggaatggaagaccgatctgcgcttccagagccatgccgtgcttgctctgcaggaggcagcagaggcctacctggttggtctcttcgaagataccaatctgtgcgcgatccatgccaagcgcgtgaccatcatgcccaaggacattcagcttggcaagaaggatccgtggcgagnagggcgtaagtctgtcgacgggaggaagactctgcgctcgttttgtgtgtcgctctctcaccctgtagttttgtgagaaatgatctagtaactgtacttgggctgnttgactgtagccgcagtacatatgcatg

SEQ ID NO: 1581 - DNA, 576 bp, Zea mays
  Clone ID: TF_LIB4829-021-R1-N1-G8
ccggccgggaaactgccaaggttatcttccgttctcataccaacctaaggaattttccgcaggctctcaccctcaagagtcccgacctcccgtagccggcggacagatgcgacccaaggaggagaataagccgtcgcacaagaagcccgctgcgaggaggagcaccgtgacagagaatgtggataaggctccggcgcaagtataagcccatatgcgagaagtgcctcccgttggccatgctaatagtaggcgctgagggcaaaaaggctaaaaataaatgcgaagaaggccttggagacctacatgatcatacatcttcaatgcgctgtagcaggtgcaccccgacatcggtatctcgtccgaggtgatgtccatcatgaactccttcatcaacgacatcttcgagaagctcgcgtgcgagtccgccaagctgtggcgctacaaccagaagaccaccatctcctcccgcgagatccagacctcggtgcgcctcgtcctcctccgtagagctcggcaagcacgtcgtctccgactgcactaaggccgttacgaagttcacctcgtcttaagatcctt

SEQ ID NO: 1582 - DNA, 567 bp, Zea mays
  unsure (1)..(567): unsure at all n locations
  Clone ID: TF_LIB4730-131-A1-K1-E1
attcgtcaaactcgtttcactttctcctcgtccccgacaagccactcgaagccgnnatacggccatggactccaccggcaccagagcagcggggaaggntaagaagagagcggccaggcgcaangtcggcaggccaaggaaagaagtcgtgtcgaggtcccgtggggctgggctccagttccccgtcggccgcatcgggcgctacttgaaagaaggccgctacgcgcagcgtgtcgncaccggcgcccccgtctacctcgccgctgtcctcgaatacctcgccgctgnagttctgganctcgccggtaatgctgcccgggacaacaaaaagctcgcattattccgcgccacgtgcttctggcgatccggaacgacgnagagctcnagaagctgctgggcagcgtgaccatcgctcacggaggtgtgctccccaatatcaaccctggttctgcttcccaananagacggnagagaaggcgtccagtgncgagatgaagggaggcatagtcgcccaagagggcccccaattcccctaagaaggcataaccgactgtccggaagtgatct

SEQ ID NO: 1583 - DNA, 354 bp, Zea mays
  unsure (1)..(354): unsure at all n locations
  Clone ID: TF_700349182H1
tcatcgcgagtctccagctaccgcatcaaatcnacncncatccncgtcgaccccgacaaacncgacccgatggcgctcaaggccgagaagaagccagcggagaagaagccggcggccgaggagaaggcggagaagacgaccgcacgtaagaagcccanttccgagaagcgcttgccggcctcgaagtcctccggcaaagatggcggcgagaatgaagggaagaagaaggccaagaagagcgtggagacctancaaatctacatcttcaaggtcctgaagcangtgcaccccgacatcggcatctcctccaaggccatgtcgatcatgaactccttcatcgacgacatattcgag

SEQ ID NO: 1584 - DNA, 548 bp, Zea mays
  Clone ID: TF_LIB3969-012-Q1-K1-H12
gtcgaccccgcgttcggtcctggctttttccttgcgcccgtttgcctatttctgtctcgatcgaggccgttggctcccatggccgggcaagtaatccctcggcgtaataagccggcggcggaggagcccgggccgttaagcgaccggcgggagagcccaggcggggaagcggttcctcgctgtcaagtccttcggctggtggggggggggggcaaccttggcaagatagtatgggcaagaagagcgtggtgacgttcaggatctacattttcgaggtgctggatcatgtgctcccggtcatcggtgtttcctccaaggccttgtccattatgaactccttcatcaacgacatcttcgagaagctggccggcgaggccgcctagctcgcgcgctttctcttgaagcccaccatcacttcccgcgagatccagaccttcgtgcgcctcgtgctccccggcgagcttgcccagcacgccgtctctgggtggcccaagggcgtcaccaatttcacttgcttctaggcttgcacgcttgccctttgtaggctt

SEQ ID NO: 1585 - DNA, 386 bp, Zea mays
  Clone ID: TF_LIB3088-042-Q1-K1-B9
cggacgcgtggggctcgtacgaagcagacttcccgcatgtccaccggaggcaaggccacggcgcaagcgagctcgccaccaaagctgcgaggaagtcggcgccgacgaccggcggcgtgaagaagccccacaggtacaggtccggcaccgtggcattgcccgagatccggacgtaccacaagagcaccgagctggtcatccggaagttgaccttgcagcgcctggtccttgagatcgctcaggacttcaagacggatcttcgggtccagagccacgccgctctggccctccaggaagacgccgaggcctacatcgtcggtgtgttctaggacaccaacctctgcaccatccacacctagcgcgtgaccatcatgcccaacgacatt

SEQ ID NO: 1586 - DNA, 766 bp, Zea mays
  unsure (1)..(766): unsure at all n locations
  Clone ID: TF_ZmC369_40
gccggcctggtccgggaacatcttcataacccagtcggcaggcgtgacccgatgctctctcgtcgtcggatcgtcgccaccgtctcctccgcgtcgtctacaccgacatggacgaccggcagtatgccggactgaccaaggcaggtttgggcgtgctggccttcaactcgggcctcgccatctacaactcctggggcgacgcgagctccgtcgcgttcgtgctctccgcggactccatcctcgtgctgctcttcctctgcctccgtgagctggagctgcaggggcggccgngggacgtcgtcaggggccatgtccatcatgaactccttcatcaacgacatcttcgagaagctcgccggcgaggccgctaagctcgcccggtacaacaagaagcccaccatcacctcccgcgagatccagacctccgtgcgcctcgtcctcccaggagagctcgccaaacacgccgtctccgagggaaccaaggccgtcaccaagttcaccagcaattgagcagcctgcagcgtccacggatttgttaggtctccccttcttacaagggttcttcgtcgtgtcctctacccctccccctccccgcctatgtatgtgctgtgaaattgttgatgttctcgtcgggtgaacaaaggccagtagctagcttgcctgcttcataaatcgtgccggattgtaatgggcctcttagatttgacgcccctgttttggaatatagttgtatccgtgccaaaaaaaaaaaaaaaaaaggccccta

SEQ ID NO: 1587 - DNA, 852 bp, Zea mays
  Clone ID: TF_ZmC653_45
tagccaccgcatcgtcgccctcaaattcgttccgtccaggcaaggaagaaatcgagcagccaaggagaggagaagatggctcgtacgaagcagaccgcccgcaagtccaccggaggcaaggccccgcgcaagcagctcgccaccaaggttcgtctctacctacccgtaccgatctgctgttccgatcccctcgatggttcccgttgtaagacggcgctgacgcggcggcggttgttgtttcgttgcaggcggcgaggaagtcggcgccgacgaccggcggcgtgaagaagccccacaggtacaggcccggcaccgtggcgctgcgcgagatccgcaagtaccagaagagcacggagctgctcatccggaagttgcccttccagcgcctggtccgtgagatcgctcaggacttcaagacggatctgcggttccagagccacgccgtcctggccctccaggaagccgccgaggcctacctcgtcggtctgttcgaggacaccaacctctgcgccatccacgccaagcgcgtcaccatcatgcccaaagacatccagctcgcccgccgcatccgcggcgagcgcgcgtaggcgtatctcgcgcccggccccagtggcggcggagggatggaggagtgcaatttgtaactttatgctgtttgttcgcttttagacggcgtggcgaagtagtgtaaaaacggctttacaagtctattttgtgtggtagttcgtgtaccgcttcgtcccgaagcgatcttggtaaaagactgatgattcgtgttgccaaacgacacaattcgtattttttttgtgtgccgtgtagaacacggtttgttgttattggaatggttccccg

SEQ ID NO: 1588 - DNA, 603 bp, Zea mays
  Clone ID: TF_LIB4729-138-A1-K1-A10
taccggtcaccgcgaagccagagccccacgccccgtccgaactccgaaccccagaacagagcaaagcctcctcggcctccctgtccccagccttccccgatggcccgcacgaagcagacggcgcgcaagtcgacgggcggcaaggcgccgcggaagcagctggcgacgaaggcggcccgcaagtcggcgccggcgacgggcggcgtgaagaagccgcaccgcttccgcccgggcaccgtcgcgctgcgcgagatccgcaagtaccagaagagcacggagctgctgatccgcaagctcccgttccagcgcctggtccgcgagatcgcgcaggacttcaagacggacctccggttccagtcctccgccgtcgccgcgctgcatgaggccgccgaggcctacctggtgggcctcttccaggacaccaacctctgtgccatccacgccaagcgcgtcaccatcatgccctaggacatccagctcgcgcgccgcatccgcggcgagcgcgcctaggcggctcggttgtggggcctgctcgattctgatgagagggcttagtctcaacccctcatgcgtgatctactcgagtgctctcgatttatcccc

SEQ ID NO: 1589 - DNA, 615 bp, Zea mays
  Clone ID: TF_LIB5116-026-A1-PF1-C11
tcccacctcccagcgaagccacgcacaccacaccagagcacctctccccgtcgccgccgccgcagcagcatccatggcgcccaaggctgccgagaagaagccggcagagaagacccccgcgggcaagaaacccaaggcggagaagaaggtgccggcgtccaaggagggcgggggcgagaagaaggggaagaagaagtccaagaagagcgtggagacgtacaagatctacatcttcaaggtgctgaagcaggtgcacccggacatcgggatctcctccaaggccatgtccatcatgaactccttcatcaacgacatcttcgagaagctggccggcgagtcggccaagctggcgcggtacaacaagaggcccaccatcacgtcccgggagatccagacctccgtccgcctcgtcctccccggcgagctcgccaagcacgccgtctccgagggcaccaaggccgtcaccaagttcacttccgcctgattcggctgatggatcgatgtcaccctgtagtttcctgttcgtgctctgtcctcttgtaacttgtcctggttgtgtgggatcacatctcatgatccggagaaatagtaacagcgcttatttcagttcttgcc

SEQ ID NO: 1590 - DNA, 608 bp, Zea mays
  Clone ID: TF_LIB5116-006-A1-PF1-A2
taatctcagagcattcccatccagcgcaaccgtcgccaacaccactcctcgagagtcctcgccgccggagaagtagcacgcaggatggccggaaggaagggcggcgacaggaagaaggcggtgacccgctccgtgaaggccgggctccagttccccgtcggccgcatcgggcgctacctcaagaagggccgctacgcccagcgcgtcggctccggcgcccccgtctacctcgccgccgtcctcgagcacctcgccgccgaggtcctggagctcgccggcaacgcggccaaggacaacaagaagacccgcatcatcccgcgccacctgctgctcgccgtccgcaacgaccaggagctcggcaggctgctcgccggcgtcaccatcgcccatggcggcgtgatccccaacatcaactccgtgctgctccccaagaagtcccccgccgccgccgataaggaggccaagtcgcccaacaaaaaaacgtccaccaagtccccccaagaagaagacggccgccaccaaggagtaaccgtccccataccctatccggtggtgcttaaatccatttctcatggactcagatgaaaccctgtacgcaatgcctcgct

SEQ ID NO: 1591 - DNA, 696 bp, Zea mays
  Clone ID: TF_ZmC369_31
gggaccctcgaggccggccgggccgggacatcatcgaccgagcgaatccctcgcatcgtattcgcagcctttgctgcatcacaccaccgcgaaaccccagcagccgcatcgatggcgcctaaggcggcgacaagaagggtaagaagaaggcgaagaagtcggtggagacctacaagatctacatcttcaaggtgctgaagcaggtccacccggacatcggcatctcttccaaggccatgtccatcatgaactccttcatcaacgacatcttcgagaagctcgccggcgaggctgccaagcttgcgcgctacaacaagaagcccaccatcacctctcgggagattcaaacctctgtccgccttgtccttcccggcgagctcgccaagcacgcggtctccgagggcaccaaggccgtcactaagttcacatcatcttagatttgaggtagtagctattgggtggcgttggtagctgtgtctcaatttgtctgctactaatagtggtaggagtatccatgtgtagttgggttgcggtaagaattgtgttaaactggcaatatgtttgaagttgctttttatggatgtggaatagttgtgttgcttgttctacgttcggtttctgtctggatgcgattctcttatcttggaactgtcattgttgataatgaactgacaaaaaaaaaaaaaaaaagcggcc

SEQ ID NO: 1592 - DNA, 473 bp, Zea mays
  Clone ID: TF_LIB5116-028-A1-PF1-G10
ttctcaaatcccccattgcgccaaatctctccgcacctcaaaccaacccctgcctcgagccgcaatggacgcctccgccgccggcgccgtcgccaaggcgaagaagtacgtggtggggcgcaagctcggcggtggccccaggaagaaggcggtggcgcggtccgtcaaggccgggctgcagttccccgtcggccgcatcgggcgcttcctcaagaagggccgctacgcgcagcgggtcggcatgggcgcccccgtctacctcgcctccgtcctcgagtacctcgccgccgagcttctcgagctggccgggaacgccgccaaggacaacaagaagtcccgcatcatcccgcgccacctgctgctcgccatccggaacgaccaggagctcggcaagctgctcgccggcgtcaccatcgcgcacggcggcgtgctgcccaacatcaaccccgtgctgctccccaagaagacggcgg

SEQ ID NO: 1593 - DNA, 444 bp, Zea mays
  Clone ID: TF_LIB3608-036-Q1-N6-C6
cggaccggtgaaaatcttctcggtgaagaccaaccttccataagaccacagggccattcttgggcatgacacatcccatccacagatttaaacacgaacattcttcagcacacaaggcaaatgaaaacccttctttttaagcctttttgggggacttggccccctttttgggggacttgggcttcttttttccccccttggccccctttttcgccgcctttttgggcaggaacaccgagtggattttggggaggacccccccctccccgatggggaccccggccaaaaatttcccaagctccttttttttgcggatcgccaagaacacctggggcgggatgatgcccctctttttgttgttttttgccgggttccctgccaactccaaaacctcgggggggagggactccaaaaaagcggcaaggtaaacgggggccccagtgc

SEQ ID NO: 1594 - DNA, 349 bp, Zea mays
  unsure (1)..(349): unsure at all n locations
  Clone ID: TF_LIB3245-084-P1-N1-B7
aaaatcaacacctcccaattccacncgggcaggtactcacggtgcgtggcgcgaagcaccaaanctccnatngcccccacgaagcanaccgcgcgcaagtcaacgggcggcaaggcgccccgcaagcagctgtcgaccaaggcggcacgcaagtctgcgccggccaccggcggcgtgaagaagccccaccgcttccgccccggcaccgtcgcgctccgggagatccgcaagtaccagaagagcacggagctgctcatccgcaagttgcccttccagcgcctcgtccgtgagatcgcgcaggacttcaagaccgatctccgcttccagtcctccgccgtcgccgcgctgc

SEQ ID NO: 1595 - DNA, 678 bp, Zea mays
  Clone ID: TF_LIB4732-057-Q1-K1-D7
agacccagcatccagcaatctcgtccccaaacaagcaacctccgcctccccgattctcgtcgagaggaagcccaatcccgaaaccgtcgccgtattccaatggcgcccaaggccgagaagaagcccgccgccaagaagcctgcggaggaggagccggcggcggagaaggccacggcggggaagaagcccaaggccgagaagcggctccccgcgggcaagtccgcaggcaaggagggtggcgagaagaaggggaagaagaaggcaaagaagtcggtggagacgtacaagatctacatcttcaaggtgctgaagcaggtgcacccggacattggcatctcgtccaaggccatgtccatcatgaactccttcatcaacgacatcttcgagaagcctcgtcctccccggcgagctcgccaagcacgccgtctccgagggcaccaaagccgtcaccaagttcactagctcctaggcgagcgatgcgacgtgcactcgtctcctcttcttgcagtagtaccatagtagtacggttaggtgtgttgccgcggtggtagttgccgctgcgtttgctttctgggctcggttgatgtcttttatgtaagaaagtaactgtattgtgtctgcagtatcttaccatgcatgttttaagtagcatcccataatctataaggaatatgtttt

SEQ ID NO: 1596 - DNA, 392 bp, Zea mays
  unsure (1)..(392): unsure at all n locations
  Clone ID: TF_3341056
caacaggggcatcaaatctaaaaggaccattacaccccggcgggccggatcaacaggggcatcaaatctaaaaggaccattacaccccggcgggccggataaaggacacaccaaaaaacccttctaacaaatccgcgaatcccgcagcgcgctcatttgctggtaaacttggtaacggccttggttccctcgaaaacggcttgcttggcaagctctccgggaaggactaggcccacggaggtctggatctcgcgggacttaatggtgggcttcttgttttaccncgccatcttggcggcctctccggccagcttctcaaaaatttctttaataaaggatttcataatggacatggccttgaaggatatcccaatttcggggtgcacctgctt

SEQ ID NO: 1597 - DNA, 645 bp, Zea mays
  unsure (1)..(645): unsure at all n locations
  Clone ID: TF_LIB4744-035-R1-K1-H5
tctttaatgctccccagcggtccctagcagaagccttccatcctcactcgctcgatggcccgcacgaagcagacggcgaggaagtccaccggcggcaaggcgccgaggaagcatctggcgactaaggcggcccgcaagtctgcccctgcgaccggcggagtgaataagccccaccgcttccgccccggcaccgtcgcgctccgggagatccgcaagcaccagaagagcacggagctgctgatccgcaagctgccgatccagcgcctggtgcgggagatcgcgcaggacttcaagaccgacctacgcttccagagctctgctgtctccgctgctgcaggaggcggctgaggcctaccttgtcgggctcttcgaggacaccaacctctgcgccatccacgccaagcgcgtcaccatcatgcccaaggacatccagcttgcccgccgcatacgcggagagagggcctaagcgtcatattctctgtcatcagcgcccgatcagaagatgtagagatatgctgngttctgtagctagggttactgtcgaatcatcgagtgatggctgttcactgctgtaacttaattatcatgatgcatatgacatgccaatgaactctgatactaaaaaaaaaaaaaaaaagcgggccc

SEQ ID NO: 1598 - DNA, 465 bp, Zea mays
  Clone ID: TF_LIB4758-023-R1-K1-H11
ccctcgggcctgccggaaatcaacatacgtaccgagcgcgactccccttccattctcatttgttcgatcctactgcgtcgcccgcccttcgcagttctctaccagtggcgcgctccagagtacacggtgaggaagtagaccgtgggtatggcgccgcggaagcagctggccaccaaggcggtgcgaaagtcggccccggccaccggtggcatgaacaatccgacagtgttggccctggcaccgtggcgctcctcgagattcgtaagtaccagaagatcacggagctgctcatccggaagctgcctttccagcggctggtgcgggagatcgcgcaggacttcaagaccgtccttcggttccagtcctccgccgttgccgcgctgcaggaggccgacgaggcgtacctggagggtctctttgaggacaccaacctgtgtgccatccatgcctagagggttatcatca

SEQ ID NO: 1599 - DNA, 688 bp, Zea mays
  Clone ID: TF_LIB4979-019-A1-K1-A12
atccgcaatcttcaatctccccagtaatccctaccagaagccttccatcctcgctcgctcgatggaccgcacgaaggagacgaggagcgaagtccaccgcgcggcaaggcgccgagagaagcaataggcgactaaggcggaccgcgagtctgcccctgcgaccgacggaggtaagaaggcccaccgcttccgccccggtaccgtctcgctcagggagatccgcaagtaccagaatagtacagagctgctgatccgccagctggcgttccagcgcctggtgcgggagatacgcgctggacttgcgaagaccgacactacgcttccagagctccgctggtctctgctctgcaggactgcggcctcgtagggctaccttgacggtctctgctaggacaccatacctacttgcgccatccacgcctggcgggtcaccatcatgcccaaggacatccagcttagtcacgtccgcatccgtgggagagagggcctaagcatctcatattctgacatcagaggccgatcagaagatgaagagatgtgcctggaatctgtgatattgagtgactgtggaatacatgccaatagatgactgtgcactgctgtgacttattatcatgatgcatattgaaaagacaatgaacgtatgttatcaaatcgcgaaagaagagctgaagaaggacactgcgtg

SEQ ID NO: 1600 - DNA, 461 bp, Zea mays
  Clone ID: TF_LIB4979-061-R1-K1-G4
catcatagctcgcatccgatttcaatttcaatccttcgatagcgcatcgtcgcccgccctctcggagctctctccgatggcccgtacgaagtagacggtgaggaagtcaactgcgcggaaaggcgccgcggaagcagatgaacacctaggcggcgcgcaagtcctctccgggcaccggcggcgtgaagaagtcgcacaggttccgtcccggaagcgtcgctctccgagagatccgcaagtaccataagagcacggagctgctcatccgtaagatgcccttccagcggctggtgcgtgacatctcgcaagacttcaagaacgacctttggattcagttctactttgtcgccgcgctgcaggaggacgacgatgcgtatctggtgggtctctttgtagaaccaacctctgcggcatccacgccaagagggtcaccatcatggccaaggacattcagctcgcgc

SEQ ID NO: 1601 - DNA, 599 bp, Zea mays
  Clone ID: TF_LIB4729-135-A1-K1-H9
aacgcgaatcctcaatctgcccttgccgccgccaccgcccgatccaggtctgcagactgctccctcctcctctccgctccgaatggcccgcacgaagcagacggcgcgcaagtcgaccggcggcaaggcgccgcggaagcagctggccacgggcggcgtgaagaagccgcaccgcttccgccccggcaccgtcgcgctccgcgagatccgcaagtaccagaagagcacggagctgctcatccgcaagctccccttccagcgcctcgtccgcgagatcgcgcaggacttcaagacggacctgcggttccagtcctcggccgtggcggcgctgcaggaggccgcggaggcgtacctggtggggctcttcgaggacaccaacctctgcgccatccacgccaagagggtcaccatcatgcccaaggacatccagctcgcccgccgcatcaggggcgagagggcttgagctgtcgcgctgctgctgttcgtcgttgtaatgtctgaagtatatgggtggtgggtgctttctatgccgtgcctatttggctatttcggacgtgttgtcctcactgaatggaaaatggaatgcgattgctcgtctg

SEQ ID NO: 1602 - DNA, 674 bp, Zea mays
  Clone ID: TF_LIB4742-005-R1-K1-G10
gaggctcggccgggcaagcgggaaagagtctgaaaccacacagcagtcttcaatctgccgagcaaagcaaagctctagccttccatcctcactcgctcgatggcccgcaccaagcaggacggctaggaagtccaccggcggcatggccccgaggaagcagctggcgactaaagcggcccgcaagtctgcccctgcgaccggcggagtgaagaagccccaccggttccgccccggcaccgtcacgctccgggagatccgcaagcaccagaatagcacggagctgttgatccgtaagctgccgttccagcgcctggtgcgggagatcgcgcatgacttcaagaccgacctacgcttacagagctccgctgtctccgcgctgcaggaggcggctgaggcctaccttgtcgggctcttcgaggacaccaacctctgcgccatacacgccaagcgcgtcaccatcatgcccaaggacatacagcttgcccgccgcatccgtggggagagggcctaagcatcatatattctgtcatcagtgcccgatcagaagatgtagagatgtgctgggttctgtagtttgggttactgtcgaatcatccagtagttgggtgttcactgctgtaacttactatcatgatgcatatgaaatggcaaagaactatggtatcagttcctcg

SEQ ID NO: 1603 - DNA, 508 bp, Zea mays
  unsure (1)..(508): unsure at all n locations
  Clone ID: TF_LIB4665-006-R1-M1-E8
ccacgcgtccgcgacagcaagcgaaaatctcccgatcccctctagtctccgcggcgaagatgtcggggcgcggcaagggcgggaagggcctgggcaagggcggagcgaagcgccaccggaaggggctccgcgacaacatccatgggatcacgaagccggggatccggcggctggcgcgcatgggcggcgtgaatcgcatctccgggctcatctacgaggagacccgcggggtgctcaagatcttcctgggagaacgtgatccgcgacgccgtgacctacaccgagcacgcgcgccgcaagaccgtcacagccgtggagcgggtgtacgcactcaagcgccagggccgcaccctctacggcttcggcggctangctaggcgcggcgcgcgtcgttgtcgtcgctgcgggtctattgtgtttgcgattcgcaaggtgtggctgggtggggaaaatgctgggtactgtgccactanatcaagcatggtgtgcgtgtctgaaaaaatgccaa

SEQ ID NO: 1604 - DNA, 362 bp, Zea mays
  Clone ID: TF_LIB3279-005-P1-K1-B7
cgcatgcgttccaacatctgagcaatctcttgtgcactcagacatgccaatagacgcggcaatacaaccatggactccaccatcacctgcacaggcactaaggcaaagaatgaggcgaacaagcgcacggtcggccgcacagggaagaagtcaaggtagaagtccgtgaaggcgggtgtgcaggtccctgtccagcgcatcgggcgctacatgaagaacgacctgtacacgcagcgttacgcgaacggtgtccgcacctacgtcgccgtttacctcgaatatgtcgtcgattacgttgtcgatctcgttgttgatgctgccagggacaacaagaaggacagcatgattactcgccttatgct

SEQ ID NO: 1605 - DNA, 531 bp, Zea mays
  Clone ID: TF_LIB5026-002-Q1-XP1-E7
gccggccgggctgcgatccaattcacaggctcaccacaccatccagcaagcaaaaattccccaatcctctcgtctccgcggcgaagatgtcggggcgcggcaagggcggcaagggcctgggcaagggcggcgcgaagcgtcaccggaaggtgctgcgcgacaacatccaggggatcacgaagccggcgatccggaggctggcgcggcggggcggcgtgaagcgcatctcggggctcatctacgaggagacccgcggcgtgctcaagatcttcctggagaacgtcatccgcgacgccgccacctacaccgatcacgcgcgccgtaagaccgtaactgtcctggtatccctctaccccgtcggtgggctcccagtcctgcttgaggcttgcgaccggacacctgggcctgttcctcatgctcccctatcggccagattggtttccaggtcaggcccgaggactacttcaagaagtgaatcgcttgagattctatgcatcattcctggcgcttcgttgcgtgcctcgtgtgccc

SEQ ID NO: 1606 - DNA, 466 bp, Zea mays
  Clone ID: TF_ZmC369_105
tcaaggtgctgaagcaggtgcacccggacatcggcatttcctttaaggccatgtccatcatgaactccttcatcaacgactttttgagaagctcgccgccgaggccgccaagctcgcgcggtacaacaagaagcccaccatcacctcccgtgagatccagacctccgtgcgcctcgtcctccccggggagctcgccaagcacgccgtctccgagggcaccaaggccgtcaccaagttcacctcgtcctaggctgcgtggcctccgcttgcaggcttccctcgtatgttcgcgtgtcttgctgtagttaggtgctgctgtgtctggtctcctccggtagcaactgttatctgatggaacagtaacaatgcttattgaatccagctaaaaaaaaaaaaaaaaaaaaaaaaaaaaaaaaaaaaaaaaaaaaaaaaaaaaaaaaaaaaaaaaaaaaaaaaaaaggtccct

SEQ ID NO: 1607 - DNA, 334 bp, Zea mays
  unsure (1)..(334): unsure at all n locations
  Clone ID: TF_LIB3070-004-Q1-N1-E3
ccgcattcgatgggcgccccaagggcccgagaagaaaccctcgcggcgaagaagcccggcggagggaggagcccccgcggccgagaaaggcgcccgcgggtaagaagctcgaaaggcggagaaaagcgggtccccgctggcaagtctcgctgccaaaggaagggcggcgagggccaagaggggcacagaagaagggcaagtaagagctgtggagaacctacaagatctacatcttcaaagtgctgaagcaggtgcacccggacattggcatctnctncaaggccatgtccatcatgaactccttcattaacgatatcttcgagaagctcgctgc

SEQ ID NO: 1608 - DNA, 347 bp, Zea mays
  Clone ID: TF_LIB3357-028-P1-K1-E9
aatacctcctcagacccgtgaagcgcagctgcggccatggacgccaccggcactggagctggagggaaggcgaagaatggagcggccggtcgctaggccggcgggccgatgatgaagtcggtgacgtggtccgtgtaagccgggctccatttccccgtcggccgcatcgggcgctacctcaagtagggccgcttcgcgcatcgcgtcggctgcggtgcccccgtctacctcgcggccgtcctggagtacctctccgctgatgtcctggtgctcgccggcaacgctgccaaggacaacaagaagtcgcgcatcgtcccgcgccacgtgctgctggcgatccgcaacga

SEQ ID NO: 1609 - DNA, 413 bp, Zea mays
  unsure (1)..(413): unsure at all n locations
  Clone ID: TF_LIB84-008-Q1-E1-G3
acaccaccgcgaaaccccagcagccgcatcgatggcgcctaaggcggagaagaagccggctgcgaagaagccagcggaggaggagcccgctgccgcgaaggccccggtggggaataagcccatggcctagaagcgcctctcggcggtcaagtcgtccggcaaagaaagcggcgacaagaagggtaagaagaacgtgaacaagtcggtggagacctacaagatctacatcttcgacgtgctgaagcacgtccacccggacatcggcatctcttccaaggccatgtccatcatgaactccttcatcatcgacatcttcgagaagctcgccggcgacgctgccaagcttgcgcgctacaacaagaagcccagcatcacctctcgggagattcanacctctgtccgccttgtccttc

SEQ ID NO: 1610 - DNA, 416 bp, Zea mays
  Clone ID: TF_LIB3150-052-Q1-N1-B2
tttaatttccccagcaatccctagaaaaagcgggcgatcctcattcgctcgagggcccggacgaagcaaacgcggaggagttcctccggcggcatggtgccgaggaagcatttgccaactaaggcggcccgcatgtctgcccctgcgaccggcggagttaaaaagccccaccgttttagcctcgataccgtcgcgctccgggagatcctgaggtaccaaaagagcccggagctgctgatccgcatgctgccgatccagcgcctgttgcgggagatcgcgcatgacttcaagaccgacctacgctttcagagctccgctgtctccgcgctgcacgaggcggctgaagcctacactggcggtctatacgaggacaccaacctgtgcgtcattcacgccaagcgcgttaccatcatgcc

SEQ ID NO: 1611 - DNA, 480 bp, Zea mays
  Clone ID: TF_LIB4745-005-R1-K1-H3
ccgccgcttccagtcccgcgttcgccgctccatttgatcgaattgccgatggcgcccaaggtccgagaagaagcccgcggagaagaagccgacggaggagaaggccgagaagaagcccagggcggagaagcgcgtgccggtcaaggagggcggcgagaagaaggggaagaagaaggccaagaagagcgtggagacgtacaagatctacatgttgaaggtgctcaagcaggtgcacccggacattggtatctcgcccaaggccatgtacatcatgaactcgttcatcaacgacatgttgcagaagctggctggcgaggccggcaagctggtccggtacaacaagaagccctccatagcctcgcgggagatccagacttgggtgcgcctggaccttcctggcgagcgtcggcaagcacgccgtttccgagggcaccaaggccgtgtccaagggtacttgctgttagatcgccgtcgcacgga

SEQ ID NO: 1612 - DNA, 399 bp, Zea mays
  Clone ID: TF_LIB3227-030-P1-K1-B8
gttccaactcctgagcactttctcctcgtcccagacaagccaatcgaagccgagatacgaccatggactccaccggcaccggagcagggggtaaggggaagaagggagcggccgggcgcaaggtcggcgggccaagggagaagttggtgtcaaggtccgtgaaggccgggctccaggtccccgtcgggcgtattgagcgctacttgaagaagggccggtacgcgcagcgtgtcggcaccggcgcccgcgtctatctagccgatgtactagaataccttgccactgaggttctggagctcgccggtaatgcttccagggacaacaagaagactcggattatttcgcgccacgtgcttctggggatccggaacgacgaggagcttgagaagcttttgggcg

SEQ ID NO: 1613 - DNA, 789 bp, Zea mays
  unsure (1)..(789): unsure at all n locations
  Clone ID: TF_ZmC114_13
ggaggatcctcttgtgtcctggccgttggccgtcgctgcgtcgttccagatttggggaaggaaatccggcaccgagattcgagtcgaaaagatccgcggtatcgctcggccttcaaatacttcggcaacgtcgccggttcaggacatcatttgctagatggcgcgtaccaagcagaccgctcgcaagtccactggaggaaaggctcctaggaagcaactcgctacaaaggcagcccggaagtctgcacccacaactggaggagtgaagaagcctcaccgttaccgcccagggactgttgctcttcgtgagatccgcaagtaccagaagagcactgagttgctgattaggaagctgccgtttcagaggcttgtcagggagattgctcaggatttcaagacggatctgcgcttccagagccatgccgtgcttgctctgcaggaggcagcagaggcctacctggttggtctcttcgaagatacncaatctgtgcgcgatccatgccaagcgcgtgaccatcatgcccaaggacattcagctggcaagaaggatccgtggcgagagggcgtaagtctgtcgacgggaggaaaactctgcgctcgttttgtgtgttgcctctctcaccctgtaagttttgtgagaagagatctagtaactgtacttggnctgtttgactgtagccgcagtagcatatgcatgcgcttactggtgggctgttgggcgtgtctggagtcttttatccatccattctagtatacttaaatatcgtgatattatcaccgggttgctgc

SEQ ID NO: 1614 - DNA, 754 bp, Zea mays
  unsure (1)..(754): unsure at all n locations
  Clone ID: TF_LIB5116-008-A1-PF1-D5
cacccatcccagcccccacctcccctccttccagcaaactcacgcatcccaccaccgaagctcccaaccccacccgaagcggcagccatggcccccaaggcagacaagaagccggccgccgagaacaaggtcgagaaggcggcggagaagacccccgcgggcaagaagcccaaggccgagaagcggctgccggcgggcaagacggcgtccaaggaggccggcggcgagggcaagacccggggccgcaagaagggcagcaaggccaagaagggcgtggagacgtacaagatctacatcttcaaggtgctgaagcaggtgcaccccgacatcggcatctcctccaaggccatgtccatcatgaactccttcatcaacgacatcttcgagaagctcgccggggagtcggccaagctcgcccgctacaacaagaagcccaccatcacctcccgggagatccagacctccgtccgcctcgtcctccccggggagctcgccaagcacgccgtctccgagggcaccaaggccgtcaccaagttcacctcctcctagactgaagatgcgccgcttgttgtgccagatgtggctgtctgatgtatctctgctgttgactctgcttacctgcaagtagaagtagtggtagtagttcgtgtggtagaagattgccaacgctttgttggcttcttggttgtgagaactgaacgtgttgcttttgcaaaatgaaatctatctaaaaaatggttgcggntgtggtaac

SEQ ID NO: 1615 - DNA, 620 bp, Zea mays
  Clone ID: TF_LIB5116-037-A1-PF1-C8
cccccacctccgagccaacacctcctccctcactcccacctccgaagcttcagcggcagccatggcccccaaggcagacaagaagcccgcggccgagaacaaggtcgagaaggcggcggagaagacccccgcgggcaagaagcccaaggccgagaagcggctgccggcgggcaagacggcgtccaaggaggccggcggcgaggggaagacccggggccggaagaagggcagcaaggcgaagaagggcgtggagacgtacaagatctacatcttcaaggtgctgaagcaggtgcaccccgacatcggcatctcctccaaggccatgtccatcatgaactccttcatcaacgacatcttcgagaagctcgccggcgagtccgccaagctcgcccgctacaacaagaagcccaccatcacctcccgggagatccagacctccgtccgcctcgtcctccccggcgagctcgccaagcacgccgtctccgagggcaccaaggctgtcaccaagttcacctcctcctagattgactatgcgtcgcttgttgtgatagatgtagttggctgctgttagtcgctgactctgcttatgtatctgcaagtagtggtagtagtagtcgtct

SEQ ID NO: 1616 - DNA, 662 bp, Zea mays
  Clone ID: TF_LIB5025-058-A1-XP1-A9
gccggccggtcccgggagtaacccgcatcccacatcactcatccacagctcgcagccgtattcctgtctcgaatcctctctcgccgctccgatggcccgcacgaagcaaacagcaaggaagtcgaccggcggcaaggccccccggaagcagctggccactaaggctgcgcgcaagtcggccccggccaccggcggcgtgaagaagccccaccgcttccgccccggcaccgtcgcgctccgcgagatccgcaagtaccagaagagcactgagctgctcatccgcaagctccccttccagcgcctcgtccgcgagatcgcgcaggacttcaagactgatctgaggttccagtcctccgccgtcgcggcgctgcaggaggccgccgaggcgtacctggtggggctcttcgaggacaccaacctttgcgccatccacgccaagcgcgtcactatcatgcccaaggacatccagctcgcgcggcgcatcaggcgagagggcttgagcgcccgtcgtgctgctcgtcgttgtagtgttactagaagtagatggtggcattcgtttcgtggcttccttatcctgtaggagtaatgttctagatgtcttggcttcagtgcaatggactgtgattgctcatttcgaaaaaaaaaaaaaaaaaaggccccta

SEQ ID NO: 1617 - DNA, 632 bp, Zea mays
  Clone ID: TF_ZmC519824_1
accaacgcactcggcaatcagcagtcaagcaatccccactcacatctctccacttcccgattcctttctccagctcgccatggacgcctcagccaccgtagccaccgggaaggggaagaagggcgtggccgggcgcaaggcgggcggccccaggaagaagtccgtgtcgcggtccgtcaaggccgggctccagttccccgtcagccgcatcgggcgcttcctcaagaagggccgctacgcgcagcgcgtcggctccggcgcccccgtctacctcgcggccgtcctcgagtacctcgccgccgagctgctggagctcgcgggcaacgccgccaaggacaacaagaagagccgcatcatcccccgccacctgctgctcgccatcaggaacgacgaggagctcggcaagctgctcgccggcatcaccatcgcgcacggcggcgtgattcccaacatcaacccggtgctgctccccaagaagacggccgagaagtcccccaaggagcccaagtcgcccaagaagaccgccaagtcccccaagaaggcgtagattccttgcttagttaggctgtagctgggatgtatggatgggtgtgtttgaggatacttcagttcgaagtagactgttcttgctt

SEQ ID NO: 1618 - DNA, 1953 bp, Zea mays
  Clone ID: TF_ZmC119_1144
gcacgaggatggtcagataggggtatacaaaggaacacctgctttgatgctcacgggcactgcagcgaggaggtacagccacaagtacaaagcacgattagacaattttttttgaccccattgcaacatttcacaaatttgctctcatcaagcaagagtcgtttagaacctctaaaatttcccccactcgccagtcgcagcagcacctgtagcagtcatggacgccagcggagccggtagcaaggggaagaagggggcggccgggcgcaaggcaggcggccccaggaagaagtcggtgacgcggtccgtcaaggccgggctgcagttccccgtcggccggatcgggcgctacctcaagaagggccggtacgcgcagcgcgtgggcactggcgcccccgtctacctcgccgccgtcctggagtacctcgccgccgaggttctggagttggcagggaacgcggcgaaagacaacaagaagacgcgcatcatcccgcgccacgtgctcctggcgatccgcaacgacgaggagctcgggaagctgctggccggcgtcaccatcgcgcacggcggcgtcctccccaacatccactccgtgctcctgcccaagaaggcggcggagaaggcggccagcggcggcagcaaggagcccaagtcccccaagaagggcgccaagtcccccaagaaggcttagaaagtagggtcttcatttgcgctgtgtgctgtagcatgttcgtgtctagatctgtggatgggatgtgtcctgctctagtatcgtccttgtgtcttattgtatgttcgtcttcatcgagaagatcttcagcagtcagagctccgagttttttttttttttttttttttaaatcaatagagaaacgttataatacagcccaaattgcttcagaacatacaatcgcccaatatgtccaaaacaggtgcggccaagggcgtaccgttttacaggatgcaacaaccaaagccttaagtttgggagtttgggacaagcgtcatcaaccaaggcaactgaacatgagcattggcataccatgggcataaaaatgaaacaatccagagacaattctcagggccagtgaattccaggctgtgatccatgtgataaagcacttgcaaacaatactcaggtaaacaatatgggacgacaaataatcagccaaaatcttcactcagccaatcatagaaggtatgttcccattctctaagcattcctggttgcgatctgagactcagcctctttcttcacgggctcttccttctctgacaagatgagttcgatgtggcacggggaggacatgtaagggttgatgcgcccatgagcgcggtaggtcctgcgccgctgcttctgagcctggttcacttgaatgtgtgacacatagagggtatcgacatcaagaccttttacctcagcattgctctcagcattcttgagaaggtctagaatgaatctagcagatttgacaggccagcgtccctgcccatttgagtgacgagacttagcctgagcggtacgtccaacaccgccacaatacctgcggaacgggatggcctgcttgtgggcaatcacatcctcaaggtaccttttggccttggtgagtgacaacttcctaagggcaaaagctgtctcacgggtgttcttgaagtgaacacgtaggtcacggcccatggccttggttgacttggtggggttggttggctccgtcgaatatttcaccatggctgcagccggcgagttggggggtcctcaaggcggtgttgagatgctcctgcggagggagcgggagccaaggttagagaacgaagcggcggcggtaggagcgcgagaaattgtgtacatgcaactatgcaagccaactactgggcaaaaaccctagcggcttcgttatgggccgagccgctcgagcttggcccacgttcatccaaggaaaaagaacctcgtgc

SEQ ID NO: 1619 - DNA, 629 bp, Zea mays
  Clone ID: TF_LIB4730-068-R1-K1-D9
tgggctaccctaggagcctcgcgcggtacacagcacatcttcaatctccccgagcaaagcaaagctctagccttccatcctcactcgctcgcatggcccgcaccaagcagcacggctaggaagtccaccggcggcaaggccccgaggaagcagctggcgactaaagcggcccgcaagtctgcccctgcgaccggcggagtgaagaagccccaccgcttccgccccagcaccggcgcgctccgggagatccggacgtaccataaaagcacctagctgctgatccgcaagctcccgtcacagccgccggggcgaggagacccgcaggcactccacacccgacctcgcatcaaggcgctcaatgagtccgagagggaccggaagaaggtcaagcaacattaagcacagtggtaacatcggcctcgacgacgtggtcgagatcgccaggaccatgaggaacagggccatggccaaggagttggccggcaccgtcaaggagatcctcggcacctgcgtcagcgtcgggggcaccgtcgacggcaaggaccccaaggacctgcagcaggagattgatgaccgagaggtcgagaccccccccgcttgatactagccatccaggggacttccattgg

SEQ ID NO: 1620 - DNA, 750 bp, Zea mays
  Clone ID: TF_LIB5025-045-A1-XP1-A10
gccggccgggccgggcacgatctccgactccctattaatctctatgacctcattctcgtgggaagcaaagcgcttgccccttctcactgtcccgatggcccgcacgaacctgatacccacgaagtccactgggggcaaagcgacatggaagtagctgtgcaccagggcgtgatgcatgtctgccccggcgacaggcgcaactaaaaagacccacacgattcctacacgctaccaccacgctcctgaagatccgcaaatatcagaagagcacggagctgctgatccgcaagctgccgctccagcgtctgtttccagatatcgtccaagacttcctcagcgaacttcgattccagagctgctgcgtagatgcgctgcaagaagaatcctaggcctacctcaacaccactcttctagggacaccaacctctgctgcattcactacaagagcgtgaccattatgcccccggacatccagctcgcccgccgcatcctgagggcagagggcctacgagactacgggatgcacctcgaagtagtgatcccagattctgtcatcaccgactggctacaacgagtagagatgtcgccgaccctctgtcagcctatattatcggccaaatcatgatgctcactggttcttcacagctgtaattcaagtatgacaatgccatggcaatgaacatctcaattatcttgtcccccatacccactttaaacaaatggcgctatagccaagagcgctctacaata

SEQ ID NO: 1621 - DNA, 459 bp, Zea mays
  unsure (1)..(459): unsure at all n locations
  Clone ID: TF_681794
cagcaatccctagcagaagccttccatcctcactcgctcgatggnccgcacgaagcagacggcgaggaagtccaccggaggcaaggcgccgaggaagcagctggcgactaaggcggcccgcaagtctgnccctgcgaccggcggagtgaagaagccccaccgtttccgccccggcaccgtcgngctccgggagatccgcaagtaccagaagagcacggagctgctgatccgtaagctgtcgttccagngtctggtgcgggagatcgcgcaggnacttcaagaccganctacgcttccagagctctgctntctccgcgctgcaggaggaggttgatgnctacttgtcggnntcttcganganacatcctctntgtcatccacgccaagnggtcacatatgccaagganatccagttgcccgccgtatccnggngagagggctaagcgtntttttcttttt

SEQ ID NO: 1622 - DNA, 217 bp, Zea mays
  Clone ID: TF_LIB4730-067-R1-K1-C4
tggggacgaaagcagcgcgtaagtcttatccctagacgctaggaattaagaagccacaccggtgcggcccggactccgcttcgctgcgggagatccgcatatacaagaatagcaggaagctgctgatccgtaagtctgcgatcgagcgcctggagctccagatcggggaggacttcaagacggacctaagcttccaggcctccgccgtcgccgcgct

SEQ ID NO: 1623 - DNA, 335 bp, Zea mays
  unsure (1)..(335): unsure at all n locations
  Clone ID: TF_LIB3076-046-Q1-K1-H11
accccgcgtccgcccacgcgtgcggcaaccgattgcctatcttcctcttaaccaaagaccgatggcccccagggccgggtggatttccgcggcgaggaagcctntnnaagaagaccccgcggccgagaagacgaccgccgggaagaagcccaaggcggagaagcgggtccccgctggcaagtccgccggcaaggagggcggctagggcaagcgttgcaagaagaagggcaagaagagcgtggagacgtacaagatctacatcttcaaagtgctgaagcaggtgcacccggacatctgcatctcctccaaagccatgttcatcatgaactccttta

SEQ ID NO: 1624 - DNA, 619 bp, Zea mays
  Clone ID: TF_ZmC22376_3
acttccgcccaaatccaccaccgccataccagcgcgtccgcgattccgtcgagtagactgggcgagagagtagtctcggacgagaagaggcgaatatgagttccggcggcggcaggggcaagcccaaggggtccaaggctgtgtcgcggtcgaccaaggccgggctgcagttccccgtcggccgcatcgcgcgctacctcaaggccggcaagtacgccgagcgcgtcggcggtggtgcgcccgtctacctctccgccgtcctcgagtatctcgcggcagaggtaactgcctcctcttcttttccctgccctccatttctctccccccctccctttagcgaatccgtttggatgtttgttgaatctttgcggtacgctcgtaatcgtttgcctgcaggtgttggaactggcgggcaacgcggcgcgcgacaacaagaagaaccgcatcgtgccgcgtcacatccagctcgccgtgcgcaacgacgaggaactcagcaagctgctcggagctgtcaccatcgccgccggaggtgtgttgcccaacattcatcagacgctgctgcccaagaaggccggtgggaagggcaaggccgacatcggttccgcatcccaggagttct

SEQ ID NO: 1625 - DNA, 482 bp, Zea mays
  unsure (1)..(482): unsure at all n locations
  Clone ID: TF_LIB3608-036-Q1-K6-A11
ctctctngtattacgcacctcgggggggggggtgggggccctcgatctcnaagcgcagcagcagcagtcaggcggccatggacgccagcgcagcacgagccggcgggaaggcgaataagggcgcggcctggcgcaaggccggttgtttctattaagaagtcggtgactaggttcttgaggggcgggctgcagttccccgtcngccgcattggtcggtatttgaagaagggccagtacccacagcgcgtttgcacgggcacccccttctacctggccgtcgtcctctagtacctggccccctaggtgctggacctggccggtaacgctgccatagacaacaagaagacccacattatcctaatccacttgcttctggccattctcaactacaagaatctcggtaagctgctggttcgcgttaccattaaccacggcggcgttcttcccaacatcaacccggtgttcttgccctagaatacccc

SEQ ID NO: 1626 - DNA, 454 bp, Zea mays
  Clone ID: TF_jC-zmXLIB3527P006bd04a1
taggccccacgccccgtccgaactccgaaccccagaacagagcaaagcctcctcggcctccctgtccccagccttccccgatggcccgcacgaagcagacggcgcgcaagtcagacgggcggcaaggcgccgcggaagcagctggcgacgaaggcggcgcgcaagtcggcgccggcgacgggcggcgtgaagaagccgcaccgcttccgcccgggcaccgtcgcgctgcgcgagatccgcaagtaccagaagagcacggagttgctgatccgcaagctcccgttccagcgtctggtccgcgagatcgcgcaggacttcaagacggacctccgggtccaggcctccggcgtggccgcgctggaagaggccgccgaggcctacctggtgggcctcttcgaggacaccaaactttgtgccattcacgccaagcgcgtgaccattatgcccaaggaca

SEQ ID NO: 1627 - DNA, 822 bp, Zea mays
  Clone ID: TF_ZmC369_118
gccggcccgggaacaaacagcgaaacacatctcctcgcatttcttcccatccgaccccccccttcgcaacccaaaccccaactcgccccgcatcgatggcgcccaaggccgagaagaagcccgcggcgaagaagccggcggaggaggagcccgcggccgagaaggcgcccgccgggaagaagccgaaggcggagaagcgggtccccgctggcaagtccgctgccaaggagggcggcgagggcaagaggggcaagaagaagggcaagaagagcgtggagacctacaagatctacatcttcaaggtgctgaagcaggtgcacccggacattggcatctcctccaaggccatgtcgatcatgaactccttcattaacgatatcttcgagaagctcgctgctgaggccgccaagctcgcgcgctataacaagaagcctaccatcacctcccgtgagatccagacctccgtgcgcctcgtccttcccggggagctcgccaagcacgccgtctccgagggcaccaaggccgtcaccaagttcacctcggcctaggctgcgcggccgccgcttgcaggattctctcctgtgttcacgtctcttgctgtagttaggtgctgctgcctgctggcttctatgtatgttatctatctgtctgtagcaactgtgttatctgataggaccgtaatggtgcttatttaacccagctatatgtttctatgtgaatcatctctctatcggttgttgagtacctttatattgtgatgttgatgtgaatgtgatttataaaatgcgtcagtttctacggtaaggttagctgctggccatc

SEQ ID NO: 1628 - DNA, 1025 bp, Zea mays
  Clone ID: TF_ZmC369_145
ttcccgggaacacatctcctcgcatttcttcccatccgatccccccttcgcaaccaaaaccccaactcgccccgcatcgatggcgcccaaggccgagaagaaacccgcggcgaagaagccggcggaggaggagcccgcggccgagaaggcgcccgccgggaagaagccgaaggcggagaagcgggtccccgctggcaagtccgctgccaaggaaggcggcgagggcaagaggggcaagaagaagggcaagaagagcgtggagacctacaagatctacatcttcaaggtgctgaagcaggtgcacccggacattggcatctcctccaaggccatgtccatcatgaactccttcattaacgatatcttcgagaagctcgctgctgaggccgccaagctcgcgcgctataacaagaagcctaccatcacctcccgtgagatccagacctccgtgcgcctcgtccttcccggggagctcgccaagcacgccgtctccgagggcaccaaggccgtcaccaagttcacctcggcctaggctgcgcggccgccgcttgcaggattctctcctgtgttcacgtctcttgctgtagttaggtgctgctgcctgctggcttctatgtatgttatctatctgtctgtagcaactgtgttatctgataggaccgtaatggtgcttattcaacccagctatatgtttctatgtgaatcatctctctatcggttgttgagtacctttatattgtgatgaagatgtgaatgtgatttataaaatgcgtcagtttctacggtaaggttagctgctggccatcaaggtccttgctaggtgtcaggtgcatacatcgttggattggaatgtagtcttgttctgattcagtttgattgtaatatgatgttttgtttgcacattgatctgtgaacaactgaactttgaaggtcactaacgtgttgctgatagaacccatggctgaaacaaatgtttttccagcagtaaaaaaaaaaacaaaaaaaaaaaaaaaaaagcccctagg

SEQ ID NO: 1629 - DNA, 709 bp, Zea mays
  Clone ID: TF_ZmC369_41
tagcgccagccaagccccagcgctcgtcacctccaatcaacaaattcccaatccgccgcttcccatcccgcgttcgccgctccatttgatcgaattcccgatggcgcccaaggccgagaagaagcccgcggagaagaagccgacggaggagaaggccgagaagaagcccagggcggagaagcgcgtgccgggcaaggagggcggcgagaagaaggggaagaagaaggccaagaagagcgtcgagacgtacaagatctacatcttcaaggtgctcaagcaggtgcacccggacattggtatctcgtccaaggccatgtccatcatgaactccttcatcaacgacatcttcgagaagctggctgccgaggccgccaagctcgcccgctacaacaagaagcccaccataacctcccgggagatccagacttcggtgcgcctcgtccttcctggggagctcgccaagcacgccgtctccgagggcaccaaggccgtcaccaagttcacctcggcctaggctgcgcggccgccgcttgcaggattctctcctgtgttcacgtctcttgctgtagttaggtgctgctgcctgctggcttctatgtatgttatctatctgtctgtagcaactgtgttatctgataggaccgtaatggtgcttattcaacccagctatatgtttctatgcgaaaaaaaaaaaaaaaaaaggccccta

SEQ ID NO: 1630 - DNA, 541 bp, Zea mays
  Clone ID: TF_LIB4073-021-Q6-N1-F8
aagcagggaagctagctattagtctttgttcccgaggagaacatcaacgatttctgagcacatacatagggggagggaggaggagaggacacaacgaagaaccctcctagaaagggagacctaacaaatccgtggacgctgcaggtcgctcagttgctggtgaacttggtgacggccttggttccctcggagacggcgtgcttggcgagctctccggggaggacgaggcgcacggaggtttggatctcgcgggaggtgatggtgggcttcttgttgtaccgcgcgagcttggcggcctcgccggcgagcttctcgaagatgtcattgatgaaggagttcatgatggacatggccttggaggagatgccgatgtcggggtgcacctgcttcagcaccttgaagatgtagattttgtaagtctccacgctcttcttggccttcttcttccccttcttctcgccgccctccttaccggaggacttggaggcgggcaggcgcttctcggccttgggcttcttttctggaggcgccttctccgcct

SEQ ID NO: 1631 - DNA, 634 bp, Zea mays
  Clone ID: TF_ZmC519532_1
aatttcccccaccttcgagcgaagccgcgcacagcacaccagagcacctctccccgttgcagcagcagcagcagcatccatggcgcccaaggctgccgagaagaagccggtggagaagacccccgcgggcaagaagcccaaggcggagaagaaggtgccggcgtccaaggagggcggcgagaagaaggggaagaagaagtccaagaagagcgtagagacgtacaagatctacatcttcaaggtgctgaagcaggtgcacccggacatcgggatctcctccaaggccatgtccatcatgaactccttcatcaacgacatcttcgagaagctcgccggcgagtccgccaagctggcgcggtacaacaagaagcccaccatcacatcccgggagatccagacctccgtccgcctcgtcctccccggcgagctcgccaagcacgccgtctccgagggcaccaaggctgtcaccaagttcacctccgcctaatttggcacgtcgtccgtgtgtcttctctggtggatggatcgatgtcaccctgtagtttcctgttcggactctgtcctcttgtaacttgtgctggttgtgtgggatcatatttcatgatccggagaaatagtaatttcagttcttgat

SEQ ID NO: 1632 - DNA, 657 bp, Zea mays
  Clone ID: TF_LIB5116-031-A1-PF1-E3
aacaactcagagcatcccgatccagcgcaaccgccgcaaacaccacacctcgagagtcctcgtcgccggagaagtagtagcaagcaagatggccggcaggaagggcggcgacaggaagaaggccgtgacccgctccgtgaaggccgggctccagttccccgtcggccgcatcgggcgctacctcaagaagggccgctacgcccagcgcgtcggctccggcgcccccgtctacctcgccgccgtcctcgagtacctcgccgcagaggtcctggagctcgccggcaacgcggccaaggacaacaagaagacccgaatcatcccgcgccaccttcttctcgccgtccgcaacgaccaggagctcggcaggctgctcgccggcgtcaccatcgcccacggcggcgtgatccccaacatcaactccgtgctgctccccaagaagtcccccgccgccgccgagaaggaggccaagtcgcccaagaagaagaaggccgccaagtcccccaagaagaaggtcgccgccaaggagtagccgccaccatagcctagcctgcgccgaggaaccgtgtcgtgttgcctaattagttggatcttgtatgtagtgcctggtctcgagttgcaaggtgtagcgtagtggccctttcatcagatctcgatgag

SEQ ID NO: 1633 - DNA, 552 bp, Zea mays
  Clone ID: TF_LIB5116-048-A2-PF1-D4
acttcgctcagagcattccgatctagcaccgtcgccgcaaacaccacacctcgagagtcctcgtcgccggagaagtagtagcaagcaagatggccggaaggaagggcggcgacaggaagaaggcggtgaccaggtccgtgaaggccgggctccagttccccgtcggccgcatcgggcgctacctcaagaagggccgctacgcccagcgcgtcggctccggcgcccccgtctacctcgccgccgtcctcgagtacctcgccgccgaggtgctggagcttgccggcaacgcggccaaggacaacaagaagacccgcatcatcccgcgccacctgctgctcgccgtccgcaacgaccaggagctcggcaggctgcttgccggcgtcaccatcgcccacggcggcgtcatccccaacatcaactccgtgctgctgcccaagaagtcccccgccgccgccgagaaggaggccaagtcgcccaagaagaagacctccaccaagtcccccaagaagaaggtcgccgccaaggagtagaattccccatagcatagccatt

SEQ ID NO: 1634 - DNA, 324 bp, Zea mays
  Clone ID: TF_LIB3205-078-P1-N1-H9
cgggacaaatcggcctacacgaactaccatacaaaataaacttgtaaagccgtttaaacactactatattcccgcgccgtctaaaagcgaacaaacagtataaagttacaaattgcactcttacattccttcgccgacactggggccggacgcgaaatacgcctacacgcgctcgccacggatgcggagggcgagctgtatatctttggccatgaaggtgacccgctttgcgtggatggcccaaaagtaggtttcctctaacacgccgacaaaataagccattacagctttctggaaggccaaaactgcattggttttgaaacc

SEQ ID NO: 1635 - DNA, 401 bp, Zea mays
  Clone ID: TF_ZmC1045423_1
gttcgttgggcggtgctggtttttcgctcgtcgactgcggctcttcctcgggcagcggaagcggcgcggcggtcggagaagtggcctaaaacttcggcgttgggtgaaagaatatggcccgaaccaagcagactgctcgtaagtccaccggtgggaaagccccccgcaaacagctggccacgaaagccgccaggaaaagcgctccctctaccggcggggtgaagaagcctcatcgctacaggcccgggaccgtggcgcttcgagagattcgtcgttatcagatgtcgaccgagctgctcatccggaagctgcccttccagaggttggtgagggagatcgcgcaggatttcataaccgacctgaggtttcagagcgcagccatcggtgcgctgcaggaggct

SEQ ID NO: 1636 - DNA, 531 bp, Zea mays
  Clone ID: TF_LIB4729-119-A1-K1-A4
aaacacagcgaacacatctcctcgcatttcttcccatccgatccccccttcgcaaccaaaaccccaactcgccccgcatcgatggcgcccaaggccgagaagaaacccgcggcgaagaagccggcggaggaggagcccgcggccgagaaggcgcccgccgggaagaagccgaaggcggagaagcgggtccccgctggcaagtccgctgccaaggaaggcggcgagggcaagaggggcaagaagaagggcaagaagagcgtggagacctacaagatctacatcttcaaggtgctgaagcaggtgcacccggacattggcatctcctccaaggccatgtccatcatgaactccttcattaacgatatcttcgagaagctcgctgctgaggccgccgcttgcaggattctctcctgtgttcacgtctcttgctgtagttaggtgctgctgcctgctggcttctatgtatgttatctatctgtctgtagcaactgtgttatctgataggaccgtaatggtgcttattcaacccag

SEQ ID NO: 1637 - DNA, 801 bp, Zea mays
  unsure (1)..(801): unsure at all n locations
  Clone ID: TF_LIB4729-002-R1-K1-A4
accgaaaccttaaatctncccgcaatccctatcagaagccttccatcctcactcgctcgatggcccgcacgaagcagacggngaggaagnccaccggcggcaaggcgccgaggaagcagntggcgactaaggcggnccgcaagtctgcccctgcgaccggnggagntaagaagccccaccgcttccgccccggcaccgtcgcgctccgggagatccgcaagtaccagaagagcacggagctgctgatccgcaagctgccgnnccagcgcctggagcgggagatcgcgcaggacttcaagaccgacctacgctnncagagctccgctgtctccgacctgcaggaggcggntgaggcctaccttagnaggactactaaaggacaccaacctctgngccatccacnccaagcgcgctaccatcatgcccaaggacatgcagcttgcccgccgcattcgcggggagagggcctaagcgtaatattcctcctgccactagngcccgatcagaagatgtagagaatcgccnggggctctgaaaattgggattacaggcaaatcacanggatagaagggtggtcactgctgcaagttaacgataaaaaagaaaaaggaaataagaaaagagccccggnnnnaagaaaaaaaaaaaaaaaaacaggacattaaaaaaaaaaaacaaaaaatcacattaaaaaaagaanaaacaagaccccaaaaagaaaaacaaancacaaaaaaaggnnnncnagnnnaaaaaaaaaaaancnaacacacaccaaacngacaaaaaaaaccaacnaac

SEQ ID NO: 1638 - DNA, 429 bp, Zea mays
  unsure (1)..(429): unsure at all n locations
  Clone ID: TF_LIB3245-603-P1-K1-D6
caaatcctcctagcgaattcaccacagcttctcaccaccgctaccttcgatggcacccaaggcggacaagaagccggcggcgaagaagcctgcagaggagcccgcgacagagaaggcggagaaggctccggcggtgaagaagcccaaggccgagaagcgcctcccggcgggcaagtccgccggtaaggagggcggcgagggcaagaaggggaaaaagaaagcgaagaagtccgtggagacctacaagatctacatcttcaaggtgctgaagcaggtgcaccccgacatcggcatctcgtncaaggccatgtccatcatgaactccttcatcaacgacatcttcgagaagctcgcggccgagtccgccaagctggcgcgctataacaagtagcccaccgtcacctgccgcgagatccagacctcggtgcg

SEQ ID NO: 1639 - DNA, 634 bp, Zea mays
  unsure (1)..(634): unsure at all n locations
  Clone ID: TF_LIB4729-064-R1-K1-E10
acacagaatcttcaatctcccgagcaaagcaaagctctagccttccatcctcactcgctcgatggcccgcaccaagcagacggctaggaagtccaccggcggcaaggccccgaggaagcagctggcgactaaagcggcccgcaagtctgcccctgcgaccggcggagtgaagaagccccaccgcttccgccccggcaccgtcgcgctccgggagatccgcaagtaccagaagagcacggagctgctgatccgcaagctgccgttccagcgcctggtgcgggagatcgcgcaggacttcaagaccgacctacgcttccagagctccgctgtctccgcgctgcaggaggcggctgangcctaccttgtcgggctcttcgaggacaccaacctctgcgccatccacgccaagcgccgtaccatcatgcccaaggacatccagcttgcccgccgcatccgtggggagagggcctaagcatcatatattctgtcatcagtgcccgatcagaagatgtagaagaggtgctgggttctggtagttgggttactgtcgaatcatcgagtagttgggtggttcactgcttgtacttagtatcatggtgcataatgaaatggcaatgaacctatgtatcacggg

SEQ ID NO: 1640 - DNA, 333 bp, Zea mays
  Clone ID: TF_LIB4979-058-R1-K1-G4
tcactcgcaattccgcattcgttccaactcctgagcactttctcctcgtccccgacaagccaatcgaagccgagatacggccatggactccaccggcaccggagcagggggtaaggggaagaagggagcggccgggcgcaaggtcggcgggccaaggaagaagtcggtgtcgaggtccgtgaaggccgggctccagttccccgtctgccgcatcgggcgctatttgaagaatggccgctacgtgcagcgtgtttgcatctgctcccgcgtctacctcaccgctgtcctcgtctccctcgtgtgtgggatcgtcaagccccacgtttttttttt

SEQ ID NO: 1641 - DNA, 430 bp, Zea mays
  Clone ID: TF_LIB4719-018-Q1-K1-H12
cgggagcaagccgcatccgcaccacgcagccgtactcccgtgctcgaaaccactctcgccgctccgaggcccgcacgaagcacacagcaaggaagtcgaccggcggcaaggccccccgcaagcagctgggcactaaggctgcgcgcaagtcgcccccggccaccggcggcgcgaagaagccccagcgcttccgccccgccaccgtcgcgctccgcgagatccgcaagtaccaaaagagcactgagctgatcatccccaagctcccattccagcgcctcgcccgccagatcgcgcaagacttcaagactgacccgagcctccagtcctccgccgacgcggcacaggaggaggccgcccaggcataccatggaggggcctgtgagaggacaccaacctatgcgccatccacgccaagcgagtcactatcagg

SEQ ID NO: 1642 - DNA, 365 bp, Zea mays
  Clone ID: TF_LIB3180-038-P2-M2-C6
ttcgaattacgattcccaatccagaaaaccttaccagccttttgaaaactcagagagggacccgatggcacccaaggcggagaagaagccgccggctaagaatcccgcagaggaggagcccgcggccccggcggagaaggcccccgctgggaagaagccgaaggcggagaagcggctcccggcgggaaaatcctccggcaaggaaggcggtgttgacaagaaggggcggaagatggccacgaagagcgtggagacgtacaagatctacattttcaaggtgctgaacctggtgtacccggacatgggcatctcctccaaggccatgtccatcatgaactccttcatcaacgacatctttgagaagc

SEQ ID NO: 1643 - DNA, 309 bp, Zea mays
  Clone ID: TF_ZmC369_57
ccgcggaggccgccaagctcgcccggtacaacaagaagcccaccatcacctcccgcgagatccagacctccgtccgcctcgtcctccccttcgagctcgccaagcacgccgtctcggagggtaccaaggccgtcaccaagttcacctcgtcttagcccccttgtagtaggcgtcgttgttgtctgcttctcaagcaagcactgtgatgtgccgcttctcatggtagtagtggtggttggctggtgtgtgtaagtggtgcagtggcttttgcctgtgttatgaatttagtcatggtggtaatgcattgct

SEQ ID NO: 1644 - DNA, 568 bp, Zea mays
  unsure (1)..(568): unsure at all n locations
  Clone ID: TF_LIB3608-022-Q1-K6-D10
tcgtcctgctttccttgcaccgttgcgttcccctcccacccagaccgtggcgcccaaggcctganaagaagcccgcggcgaagaaccggcggaggaggagcccgcggcgtgagaagacgacctgccgggtaagtaagcccaaggcggagaagcggatccccgctggcaagtccgccgggaaggagggcggcgagggcaagcgtggcaagaagaagggcaagaagagcgtggagacgtacaagatctacatcttcaagtgctgaagcaggtgcacccggacatcggcattttctccaaggccatgtccatcatgaactccttcatcaacgacatctttgagaagctggccggcgaggccgtcaagctcgcgcgctacaacaagaagtctactattacctaccgtgagatccagacctacgtgcgccttgtgctacccggtgagctcgccaagcacgccgtttttgagggtacctaagtcgtcaccaagttcacctgctttctaggcttggacgctcgccctttgttggcttttcttgtgttgatgttcgccttgtgttgtaatttagat

SEQ ID NO: 1645 - DNA, 615 bp, Zea mays
  Clone ID: TF_ZmC275904_1
aattcggcatgaggcacatctcctcgcatttcttcccatccgatccccccttcgcaaccaaaaccccaactcgccccgcatcgatggcgcccaaggccgagaagaaacccgcggcgaagaagccggcggaggaggagcccgcggccgagaaggcgcccgccgggaagaagccgaaggcggagaagcgggtccccgctggcaagtccgctgccaaggaaggcggcgagggcaagaggggcaagaagaagggcaagaagagcgtggagacctacaagatctacatcttcaaggtgctgaagcaggtgcacccggacattggcatctcctccaaggccatgtccatcatgaactccttcattaacgatatcttcgagaagctcgctgctgaggccgccaagctcgcgcgctataacaagaagcctaccatcacctgccgtgagatccagacctccgtgcgcctcgttcttaccggggagctcggcaagcacgccgttttcgagggcaccaaggtcggggccaagtgcaccctggggctaagctgggcggacggcggttgggggattgtgtgctggggtgcgggctgtgggtggggcctcgcgctggtgggtggtgggg

SEQ ID NO: 1646 - DNA, 674 bp, Zea mays
  unsure (1)..(674): unsure at all n locations
  Clone ID: TF_LIB4667-010-Q1-K1-D4
gaccctcgaggttgccggacccgaatcttaatctcccagcaatccctagcagaagccttccatcctcactcgctcgatggcccgcacgaagcagacggcgaggaagtccaccggcggcaaggcgccgaggaagcagctggcgactaaggcggcccgcaagtctgcccctgcgaccggcggagttaagaagccccaccgcttccgccccggcaccgtcgcgctccgggagatccgcaagtaccagaagagcacggagctgctgatccgcaagctgccgttccagcgcctggtgcgggagatcgcgcaggacttcaagaccgacctacgcttccagagctccgctgtctccgcgctgcaggaggcggctgaggcctaccttgtcgggctcttcgaggacaccaacctctgcgccatccacgccaagcgcgtcaccatcatgcccaaggacatccagcttgcccgccgcatccgcggnggagagggcctaagcgttatattctctgtcatcagtgcccgatcagaagatgtagagatgtgctgggttctgtagtttgggttactggcgaatcatcgagtagtgggttggtcactgttggaacttaattatcatgatgcatatgaaatgggcatgagctttggttttacttaaaaaagaaaaaaaaagggggccctcg

SEQ ID NO: 1647 - DNA, 627 bp, Zea mays
  unsure (1)..(627): unsure at all n locations
  Clone ID: TF_LIB4979-095-A1-K1-A11
aacctgcaatcttcaatctccccagcaatccctagcagaagccttccatcctcactcgctcgatggcccgcacgaagcagacggcgaggaagtccaccggcggcaaggcgccgaggaagcagttggcgactaaggcggcccgcaagtctgcccctgcgaccggcggagttaagaagccccaccgcttccgccccggtaccgtcgcgctccgggagatccgcaagtaccagaagagcacagagctgctgatccgcaagctgccgttccagcgcctggtgcgggagatcgcgcaggacttcaagaccgacctacgcttccagagctccgctgtctccgcgctgcaggaggcggctgaggcctaccttgtcggtctcttcgaggacaccaacctctgcgccatccacgccaagcgcgtcaccatcatgcccaaggacatccagcttgcccgccgcatccgtggnggagagggcctaagcatcgtatattctgtcatcagtgcccgaccagaagatgtagagatgtgctgngnnntctgtagttgggttactgtcgaatcatcaggtagntgggtgttcactgctgtaacttattatcatgatgcatatngaatggcaatgaactatgtta

SEQ ID NO: 1648 - DNA, 809 bp, Zea mays
  Clone ID: TF_LIB4762-141-Q1-K1-F10
ttgggtacctcgaggccggccggggcgaatgtcgcagtccccgcccgccctcccgacatcgacgccttcctccctcgcgtgccatgccccgttctcccgacatcgacgtcgggtccctgcctcgtctggtcctctcggtgtgggaaggaaccaaaccgagacggaggcagagtacgacgcctgccttccctcttccgccgagcgcccgctgcgtcattcttgtccctcctcttcatcttcatcggccaaccgattgccactgactccggccatcggcgactgtccctcgcgcatccctcctcctcgtgatgcccgctcccccaaggacctgtgcctgcggcagcgggaggagatcaggacgctcaaatatgtcgtcctgttcctgcacgtggagccggagccagagttcgaccgccgccttcggggcgatatttccatgctcaccgaccagatccagtgcctcacgcaggagctcgccgcccaggttaaggccgagaagcactcggcaaggtcgtgctttgacgaggatggatactgctcttcccctaggacgtcggggtttaacgaggataccgctttctctctggtgtgttcgattactccaccatctcactctcacagcaaaacgattggcatgtcgatacgctgtttccaaaacgattggcccccgtgtacctctccgccgttctcgagtatcgcaccgccgaggtgttggagctggccgggaacgctgctcgtgacaacaagaaccgtatcgtgctgcgccacatccagctggtggtgcggaacgacgaggagctgagggttcg

SEQ ID NO: 1649 - DNA, 326 bp, Zea mays
  Clone ID: TF_LIB3150-112-P2-K1-C2
gggggagggggcagatcacatccattgcattttttcagaaccgctaatcataatcctccggtaacatcagcccatagcaagaagccttcttttgaaaacaacccacaccttttacacaaccatgacgggcttaactaaacacctccagcagtagggagcaggccccgaaaccgaacccccttaggcccctccccccggattccgcccccaagctggatttccttgggcattatggtgacccccttggcgtggatggcacaaaggttggggtcctcgaaaaggcccaccaggtaggccttgggggccttctgcaacgcggttaccgg

SEQ ID NO: 1650 - DNA, 580 bp, Zea mays
  Clone ID: TF_LIB4742-062-R1-K1-G12
attgggtacctcgaggccggccgggaactccatacatttatctgataccctactgcctgtaataacccctactcgtagtcttgtagattcatgatggggagccgatggcatcccatgcgcgcaagaagtcatctgacgttgacgccgcagaggagcagcccgacgccccatggtacaaggcccctgctcgcactaagccaaacgctgactagcatttccttgcccgaaaatccttcgcgaagccaaggcgatagttcaccaacaacggtcgataacaaggcccacaagagcgtgacagaaaacaatatctacatcttcaagtggccacaaactggtgcacccagacatcaccatcacctccactgccatgaccattatgaactcatccgtcaacgacatcactgagaaacttgccggagaggggcgcaagttctcccgctaaagcaagaagaccaccatcaccaaccgacagatccatacctcgggccgtctcgtgccacccggctatatccacaagcacaccgtgtcgtaggagaccaatgccgtcaccaagttaagctagatctaatctcctttatag

SEQ ID NO: 1651 - DNA, 516 bp, Zea mays
  Clone ID: TF_LIB4762-004-R1-K1-A11
gccgggttggactgaagggtgctccctggaggtcccagttccatctcgtctccaaacccgaactccaagtcgccccgcatcgatggcccccaaggccgacaagaagcccgcggcgaacaagccggcggaggaggagcccgctgccgagaaggcgccggccgggaagaagcccaaggcggagaagcgtgtcccagcaggcaagtccgccggcaaggagggcggcgagggaaagaggggccggaagaagggcaagaagagcgtggagacctacaagatctacatcttcaaggtgctgaagcaggtgcacccggacatcggcatctgctctaaggccatgtccatcatgaactccttcatcaacgacatcttcgagaagctcgccgtcgatgccgtcgagctcgcgcggtacaacaagaagcccaccatcacctcccgtgagatccagacctccgttcgcctcctgctccccgggtagctcgtcaagcacgccgtcctccggggcacccaggccgtcac

SEQ ID NO: 1652 - DNA, 770 bp, Zea mays
  Clone ID: TF_ZmC653_44
ccgggtcaccggccaccgcgaagccagagccccacgccccgtccgaactccgaaccccagaacagagcaaagcctcctcggcctccctgtccccagccttccccgatggcccgcacgaagcagacggcgcgcaagtcgacgggcggcaaggcgccgcggaagcagctggcgacgaaggcggcgcgcaagtcggcgcgctgcgcgagatccgcaagtaccagaagagcacggagttgctgatccgcaagctcccgttccagcgtctggtccgcgagatcgcgcaggacttcaagacggacctccggttccagtcctccgccgtcgccgcgctgcaggaggccgccgaggcctacctggtgggcctcttcgaggacaccaacctctgtgccatccacgccaagcgcgtcaccatcatgcccaaggacatccagctcgcgcgccgcatccgcggcgagcgcgcctaggcggttcggttgcggcgcctgctcgctactgatggaggtgcttagtttagcacgtcatggttgtgttataggtgtgcgttgttgttttcaagaggtagcttcttgctatgtgctgatgttaacggaggattatgattagcagttctgaaaaaaatgtaatggatgtgatctgctctatctacatgttttctgtctttgtcctggaatcccatggtgtttagcattgatttcacatgtcttgtttttctctgaatcctgcttgtaatgacatcgacatctgttacacgatctgcttcaatttgtttt

SEQ ID NO: 1653 - DNA, 553 bp, Zea mays
  Clone ID: TF_LIB4730-129-A1-K1-H11
cctcgagccggccgggaacacttcaacactctcctctaatttctttccattcgatccccccttcgcaatcaaaaccccatctcgtcccttatctatggcgcccatagccgagaaaaagcccgcgccgaacaagacgaaggaggaggatgccgcgctgcgataatgcgcccgccgggaacaacccgaacgcggataaccgtttccccgctgttaagtccgctgccaaggagggcggtgcggatgagaggatgaagatcaaggtgaagaagatcgtggagacctgacatatctacatcttctgggtgctgaagcaagagcacccgtacattggcatctcctccaaggccatgtcgatcatgaactccttcattaacgatatcttcgagaagctcgctgctgaggcagccaagctcgcgcgctataacaagaagcccaccatcacatcccgtgagatccagacctccgtacgcctcgtccttcccggggagctcgccaagcacgccgtctccgagggcaccaaggccgtcaccaagttcacctcggcctaggctgc

SEQ ID NO: 1654 - DNA, 689 bp, Zea mays
  unsure (1)..(689): unsure at all n locations
  Clone ID: TF_LIB4762-046-R1-K1-H9
cgggcttgctcgctgcgccgccgcctccgaatcgtcccttcgtccccacgagcaaccgagtgtccgccggcgttgagatgttggtttatgaggatctcctatctggcaacgagctagtgaggagttgattacccagcagncacgtaaggcaccccctgctaccggcggagttaagaagccccaccgcttccgccccggtaccgtcgcgctccggggggggggggagtaccagaagagcacagagctgctgatccgcaagctgccgttccagcgcctggtgcgggagatcgcgcaggacttcaagaccgacctacgcttccagagctccgctgtctccgcgctgcaggaggcggctgaggcctaccttgtcggtctcttcgaggacaccaacctctgcgccatccacgccaagcgcgtcaccatcatgcccaaggacatccagcttgcccgccgcatccgtggggagagggcctaagcatcgtatattctgtcatcagtgcccgatcagaagatgtagagatgtgctgggttctgtagtttgggttactgtcgaatcatcgagtagttggttgttcactgctgtaacttattatcatgatgcatatgaaatggcaatgaactatgttatcagttcttgaatttcaaaaccaataaaggacggggcacccacccacaaaaaaggcggccct

SEQ ID NO: 1655 - DNA, 283 bp, Zea mays
  Clone ID: TF_LIB4730-069-R1-K1-H10
ctcattcacaggtcgcagccgtatttctgtctcgtatcctctggtggcggtggcggggcccgaacaaagcaaacagcaaggaggtcgaccggcggcaaggccccccggaagcagctggccactaaggctgcgcgcaagtcggacccggccaccggcggcgtgaagaagccccaccgattccgccccggcaccgttgtgctcggggaggggcggaagtaccataagagcactgagctgatcattcgtaagataatgttgcagcgcctcgtacgcgagatcgcgc

SEQ ID NO: 1656 - DNA, 596 bp, Zea mays
  Clone ID: TF_LIB4729-123-A1-K1-D9
acagaacgatctcaatctccctagcaatctctagcagcagatcctcgtgcgaagcaaagcgctagcccccttcgtactgtcccgatggcccgcacgaagcagacggcgaggaagtccactggcggcaaggcgccaaggaagcagctggccaccaaggcggcgcgcaagtctgccccggcgaccggcggagtgaagaagccccaccgtttccgccccggcaccgtcgcgctccgggagatccgcaagtaccagaagagcacggagctgctgatccgcaagctgccgttccagcgcctggtgcgtgagatcgcccaggacaccaacctctgcgccattcacgccaagcgcgtcaccatcatgcccaaggacatccagctcgcccgccgtatccgtggggagagggcctaggcgtcgtcccggtggaggtggaagtagtagtcgccgtttctgtcatcactgtctggctagaaggtgtagagatgtgccgggttctgtagtttgggttatcggtcaaatcatgatgtagttgggtcttccctgctgtaatttaactatgactatgcaatggcaatgaagttctcggttatcagttcctg

SEQ ID NO: 1657 - DNA, 594 bp, Zea mays
  Clone ID: TF_700379678_FLI
gccactcgaagccgagatacggccatggactccaccggcaccggagcagcggggaagggaaagaagggagcggccgggcgcaaggtcggcgggccaaggaagaagtcggtgtcgaggtccgtgaaggctgggctccagttccccgtctacctcgccgctgtcctcgaatacctcgccgctgaggttctggagctcgccggtaatgctgccagggacaacaagaagactcgcattattccgcgccacgtgcttctggcgatccggaacgacgaggagctcgggaagctgctgggcggcgtgaccatcgctcacggaggtgtgctccccaatatcaaccctgttctgctgcccaagaagacggcggagaaggcgtccagtggcgggagcaaggaggcaaagtcgcccaagaaggccgccaagtcccctaagaaggcatagactgactgtccggagtgatctgatgtttagcagtaccttgttaccagtatgcggtgatgcgtaggctgcagatgggacgaatgtgcttgtatgtgtatgtgtcctgctgcaagttgtcctttgctatttagaatggaagaagaaatgccttgtttc

SEQ ID NO: 1658 - DNA, 1919 bp, Zea mays
  unsure (1)..(1919): unsure at all n locations
  Clone ID: TF_ZmC38430_1
cgatgtcccccttgtgacaagccttctaggcagcaattttggtggatgtaggcatcacgccgccggccgcgatcgtcacagtgccagaagcttgctcagctcctcgtcgttccgcaccgccagctgaatgtggcgcggcacgatccggttcttcttgttgtcccgagcagcgttcccggccagctccagcacctcggcggcgaggtactcgaggacggcggagaggtacacgggagccccggcgcctacgcgctccgcgtacttgccggccttgaggtaccgcgcgatgcggccgacggggaactggagcccagccttggaagaccgcgacacagacttggtcgctggcttcgccttcccacggccgctgcctccggtggaactcatgctgcttcgctttgagggtgtggaaacttcggaactcttcgaggttggggcgcggtggagaatggaggagttttttttttttcattttctgaaatggaactcaaaggaacttcccggtcataaatacgacagatcaaaaaagtattattgtgagtccaactacaaggaaatataaaattcagagcacccaaatccaaaactttatgcccatttaccgcacaggctgctggttgtaatgactcttctctttcttcttggccgccgcaagccttgcgctccttgctgtggcctcggcagcggcgattttggcaccggtgtccgtctctttgctcgatctcttcttcttcattgaagccatcttcttcaaacgctccttcacgtccacagcagtggtatcttcttcatcaggtcctgcactggcagtctcctctgacccctcggctgcttcttgtgtttcttttcttccctcctttgaactcttgtccttctttttcttcttcttggaggtcttgctctctgaggggacagtagcatcttcctttttctctgcatcaccagcttggttggcaccttccttctcagcatcctgtgcagcgctggttgagttcccagaaagtcccagctcagccaatactgcatcaagttctgctagttccctctttttcaactcctttttagacagctgcctttctgtatctttgggtggcgcagccagggcttcaactgttttgacagcaagttcggctggggcatcttccacttcatgctcagctccatcatcaaggtcctcgtcatcaaggtcctcgtcgtcactctcaacgtcctcctgaagggcggcgcggacagcatcctcgacgtcctcctcctcctccttggcgggctcggcggcggcggcggcggcccatacggggcgcggcggcgcggtggtggcgaagtagtcgtcgtcgtcgtcgtcctcgacgtctgcccaggacttggtggtgagcggcgcgggagcccagaagacatccttctgcggcggctcctgctgctgctgcgcggcccccgcgccgtgcttcttcctggaggacggcccggccgccctgcccttgtcgcccttcttcttcttcttgagggactcgagcgccgcgaacacgttgccggtgttgagcttcacctcctccgccgccgctcctccccgcctcccccctcccaccatgctccccgaccgccgcggtgggaccccggcgaggctagccgagcgaaccacggacccgaatctgaatctgccccgcccgccgatctgcggggacgagtcggcgcgggagggtcctcgccgcctggggaccgaacttggattgggatttggggtagggatggaccgatggaggcgcggttgctagggttttgagatgggtggagccgtggagggtggagactggagacgcgtgccgcggccctcccctgtccggcgtttgtttaagcagcggcgcaacgcagatacgactacgagagagaggcacaggcacggtggtctactggtctgctnnnnn

SEQ ID NO: 1659 - DNA, 743 bp, Zea mays
  unsure (1)..(743): unsure at all n locations
  Clone ID: TF_LIB4980-056-A1-K1-D5
tcctacatgggctaaaaactatggcacttaaagctgaaaagaagcccactggaggaaaggctcccgctaagagcatcgaaaagaaggccaagtctggtgatgccaagaagagaaaggctagccgtaaggaaacctactcttcctacatctacaaggtcttgaagcaagtccaccctgatactggtatctccaacaaggccatgtccatccttaactctttcgtcaacgatatctttgagcgtattgctggtgaagcttccaagctcgctgcttacaacaagcgttccaccatctcatctcgcgagattcaaaccgctgttcgtctcattcttcctggtgaattggccaagcacgccgtctctgaaggtactaaggctgtcaccaagtacaccagctccaaataaatgaattctggctgggctgaaatggggttgcagaatttgtgtgaacttggcttcaaaaaaagaaaaatatccatcttgcaactctttttttttcactttgttgcgcgcatacaacttattttgcacgcctttcagtttcacccaatctcattcacaagaaattcatccatgttttgtcagtctcgtttacaaacaactgacaatttgggcaacgcactatttatcccttcaactcgtttcatctgtacagactccccttttttctttaccgctgtttgtttctttaataacaattcctatatcatctgtnaaaaaaaaaaaaaaaagggccctagggcc

SEQ ID NO: 1660 - DNA, 648 bp, Zea mays
  Clone ID: TF_LIB5116-035-A1-PF1-G12
atctcccattcatccctcacaatctgtccgactccggccatctctccggcaaccaccgtatccgcgcgtccacccttcgtagcgacgagaagatgagttctgccggcagcgggaggggcaagggcaaggcggtgtccaagaccgtctcgcggtcttccaaggccggcctccagttccccgtcggccgcatcgccaggtacctcaagatcggcaagtacgcccagcgcgtcggtgccggcgcccctgtctacctctccgccgtcctcgagtacctcgccgctgaggtcctggagctcgccggcaatgctgcgcgcgacaacaagaagacccggatcgtgccgcgccacatccagctggcggtccgcaacgatgaggagctgagccggcttctgggcgcggtcaccatcgccgccggtggtgtgctgcccaacatccacaccacgctgctccccaagaaggtcggcaagggcaagggcgacatcggctccgcgtcccaggagttctagaacctcgcagatcaaactagaactaatctaacaacgttctgggtcaatctggttcttgttattattcatcgtgatatgtcaacgtgaaaacatcttattgatgtctatgatgcggaatgaatggtgaaaacatgtttttact

SEQ ID NO: 1661 - DNA, 347 bp, Zea mays
  Clone ID: TF_LIB3076-042-Q1-K1-H11
gcgaacgcattcctgccatctcccaagacctcctcagactttagaatcgcatctgcgtccatgggcgccgggggcactggaactggagggaaggcgaataagggagcggccggtcgcaaggcctgcgggccgatgaagaagtcggtgacgaggtccgtgaaggccgggctccagttccccgtcggccgcatcgggcgctacctcaagaagggccgctacgcgcagcgctttcttcagcggtgcccctcgctacctcgcggcctgcctggagtacctcgccactgatgtcctggagctcgccggcaacgctgccaaggacaacaagaagacgcgcatcgtcccgcgcc

SEQ ID NO: 1662 - DNA, 594 bp, Zea mays
  unsure (1)..(594): unsure at all n locations
  Clone ID: TF_LIB4766-069-R1-K1-B4
ccggccgggaacgcanttcccgacttgantcaactgctgagacnctcccctcgagcgcgacagccaatcgaagccgactatacggtcatggactccaccggtaccgtatcagggggtaaggctaagaaagcagctcccgcgcgctaggtcggcggaccaaggaagaagtctcttgcccaggtgcgagaaggacgggctccagatccccgccggccgacatcgggcgctacttgaataatgggctctaccctcaccgaggcggcaccggagcccccgaatacctcgccgctgccctccaatacctcggccctgaagttctggagctccctggtcatgctgccagggacaaccagaacactcccattattccaccccacgggcttctggcgatccggaaccacgactagcttgggaagctgctgggcagcgtgaccatcgctcacggtgtagtgctccccaatatcaaccctgatctgctgtccaacaacaccgggttcacgaggccagagtgtggagtaaggagcgacagtccccccaaaaggtcgcccagtcccccaagaatgcatagactgactgactggagtgatctgatgc

SEQ ID NO: 1663 - DNA, 694 bp, Zea mays
  Clone ID: TF_ZmC119_1386
ctcgaggccggccgggatcacaattcactccactcatcttttctcgtttagaacctctaaaatttcccccactcgccagtcgcagcagcacctgtagcagccatggacgccagcggagccggtagcaaggggaagaagggggcggccgggcgcaaggcaggcggccccaggaagaagtcggtgacgcggtccgtcaaggccgggctgcagttccccgtcggccggatcgggcgctacctcaagaagggccggtacgcgcagcgcgtgggcactggcgcccccgtctacctcgccgccgttctggagtacctcgccgccgaggttctggagttggcagggaacgcggcgaaagacaacaagaagacgcgcatcatcccgcgccacgtgctcctgcccaagaaggcggcggagaaggcggccagcggcggcagcaaggagcccaagtcccccaagaagggcgccaagtcccccaagaaggcttagaaagtagggtcttcatttgcgctgtgtgctgtagcatgttcgtgtctagatctgtggatgggatgtgtcatgctctagtatcgtccttgtgtcttattgtatgttcgtcttcatcgagaagatcttcagcagtcagagctcgttgtgtactaatgttcccccatgttctgtttctcgttctgattctgcaattcgtcatattgttgaattt

SEQ ID NO: 1664 - DNA, 728 bp, Zea mays
  Clone ID: TF_LIB4764-084-R1-K1-F2
cgattgggtacctcgaggccggccggaagaaaagcctccattcccgagtctccagccaaccgcatccagtccacccccatccccctcgaccccgacaaacccgacccgatggcgcccaaggccgagaagaagccagcggagaagaagccggcggccgaggagaaggcggagaagacgaccgcaggtaagaagcccaagtccgagaagcgcctgccggcctcgaagtcctccggcaaggagggcggcgagaagaaggggaagaagaaggccaagaagagcgtggagacctacaaaatctacatcttcaaggtcctgaagcaggtgcaccccgatatcgattgttgtttatctttaaaaaaaatcggcatctcctccaaggccatgtccatcatgaactccttcatcaacgacatattcgagaagctcgccggcgaggccgccaagctcgcgcggtacaacaagaagcccaccatcacctcccgcgagatccagacctccgtgcgcctcgtcctcccaggagagctcgccaaacatgccgtctccgagggaaccaaggccgtcaccaagttcaccagcaattgagcagcctgcagcgtccacggatttgttaggtctccccttcttacaagggttcttcgtcgtgtcctctacccctccccggctatgtatgtgctgtgaaatcgttgatgttctcgtcgggtgaacaaaggccagtagctagcttgcct

SEQ ID NO: 1665 - DNA, 696 bp, Zea mays
  unsure (1)..(696): unsure at all n locations
  Clone ID: TF_LIB4730-012-R1-K1-D8
cccgtccgcatcgcccctcatctccctcgaccccgaaatccccgacccgatggcgcccaaggccgagatgatgccagcggagatgaagccggcggccgaggagaaggcggagaagacgaccgcagggaagaagcccaaggccgagaagcggctgcccgcgtccaagtcctccggcaaggagggcggcgagaagaaggggaagaagaaggccaagaagagcgtggagacctacaagatctacatcttcaaggtgctgaagcaggtgcaccccgacatcggcatatcctccaaggccatgtccatcatgaactccttcatcaacgacatcttcgagaagctggccggcgaggcagccaagctggcgcggtacaacaagaagcccaccatcacgtcccgcgagatccagacctccgtgcgcctagtcctccccggagagctcgccaagcacgccgtctccgagggaaaccaaggccgtcaccaagttcaccagcaactgagcgcgctgcgggatccgcgggatctgttagaaggggttcttttgcttgtgtccttttcccccaagtaccctaacccgcctagtagcttagcttgccttgctctattaaatccggcgcgcccggattgtnaatgggtcctctttagattttgatgccccctgctgtggaatataaagnttgnaatctctcccgctttgcc

SEQ ID NO: 1666 - DNA, 648 bp, Zea mays
  Clone ID: TF_LIB5116-009-A1-PF1-B11
accttacaacaaagcgcccaagcaatcaacaacctccgaagcagcctcccctccccacccccaccccgcagcaatggctcgcacgaagcagacggcgaggaagtcgaccggcgggaaggcgccgaggaagcagctggcgaccaaggcggcgcgcaagtcggccccggccactggcggggtgaagaagccccaccgcttccgccccggcaccgtcgcgctccgtgagatccgcaagtaccagaagagcacggagctgctgatccgcaagctgccgttccagcgcctggtgcgggagatcgcgcaggacttcaagaccgacctccgcttccagagctccgttgtttccgcgctgcaggaggccgccgagtcgtacctcgtcgggctcttcgaggacaccaacctctgcgccatccacgccaagcgcgtcaccatcatgcccaaggacatccagctcgcccgccgcatccgcggggagagggcctaggtagcggtagccgcgtgcgtgcgttatcagagagtcctactgtgatgttccggtttcagagcttggtggtgtagcttaacatgttcctgtccgctctcatcgttgtcttgccatatgtagctcctcgctgcgatgaattatcaatgaagagtgcagttatcact

SEQ ID NO: 1667 - DNA, 621 bp, Zea mays
  Clone ID: TF_LIB5116-022-A1-PF1-A12
tccgatccagcaccgtcgccgcaaacaccacacctcgagagccctcttcgccggtgaagtagcaagcaagatggctggaaggaagggaggcgacaggaagaaggcggtgacccgctccgtcaaggccgggctccagttccccgtcggccgcatcgggcgctacctcaagaagggccgctacgcgcagcgcgtcggctccggcgcccccgtctacctcgccgccgtcctcgagtacctcgccgccgaggtcctggagcttgccggcaacgctgccaaggacaacaagaagacccgcatcatcccgcgccaccttctgctcgccgtccgcaacgaccaggagctcggcaggctgctcgccggcgtcaccatcgcgcacggtggcgtgatccccaacatcaactccgtgctgctccccaagaagtcccccgccgctgcagagaaggaggccaagtcgcccaagaagaagaccaccaccaagtcccccaagaagaaggtcgccgccaaggagtagccgcccctagcttagctgactcttagttccatatcagggagaagatgaggagacttttggttgattggatcctgtatgtaaatgctagtctgtagtggctcattcattag

SEQ ID NO: 1668 - DNA, 1015 bp, Zea mays
  Clone ID: TF_ZmC22376_1
cgaccgactctcggcaacggatatctcggctctcgcatcgatgaagaacgtagcaaaatgcgatacttggtgtgaattgcagaatcccgcgaaccatcgagtttttgaacgcaagttgcgcccgaagccttctgccggagggtcccgcggcccgggccgggccgggatcccacttccgcccaaatccaccaccgccataccagcgtgtccgcgattccgtcgagtagactgggcgagagagtagtctcggacgagaagaggcgaatatgagttccggcggcggcaggggcaagcccaaggggtccaaggctgtgtcgcggtcgaccaaggccgggctgcagttccccgtcggccgcatcgcgcgctacctcaaggccggcaagtacgccgagcgcgtcggcggtggtgcgcccgtctacctctccgccgtcctcgagtatctcgcggcagaggtgttggaactggcgggcaacgcggcgcgcgacaacaagaagaaccgcatcgtgccgcgtcacatccagctcgccgtgcgcaacgacgaggaactcagcaagctgctcggagctgtcaccatcgccgccggaggtgtgttgcccaacattcatcagacgctgctgcccaagaaggccggtgggaagggcaaggccgacatcggttccgcatcccaggagttctaagcggccgcggcggcggttgcaggtttctctgacttgttcgaactggagctccaacatgcatgaagtccccccgtcgctcaagtttcgtcgattagtagtgttagggtgttttctatctttggttaggtttaggttgtctgatggatggtttatcagacgaaagtttggtgatcgagggcttcctgtatgtatcaatcaatcttgctggaatggaacaaatcgttggttgcagtaaaaaaaaaaaaaaaaaaagcaccaaaaaaaaaaaaaaaggcccctaactgctattttgtttttaccagttgaagttgctactgattgtgatctgtggatgcttg

SEQ ID NO: 1669 - DNA, 366 bp, Zea mays
  Clone ID: TF_LIB5025-017-B1-XP1-E3
gccggccgggctcagaagagacggcgcatcccacatcactcatccactgttcgcagccgcattcctgtctcgtatcctctctcgccgatccgatggtctgcacaaagcaaacagcaaggaagacgaccggcggcaaggccccccggaagcagatgcccactaaggctgcgcgcaagacggccccggacaccggcggcgcgaagaagccccaccgcttccgccccggcaccgtcgcgctccgcgagatccgcaagcaccacaagagcactgtaccgctcatccgcactctccccttacagcgcctccaagagatcacgcacgactcccagactgacctgatgttttttttttttcttacctcccccc

SEQ ID NO: 1670 - DNA, 464 bp, Zea mays
  Clone ID: TF_LIB4732-132-Q1-K1-G10
gaatcctccaatctgcccttgccgccgccgcccgatccaggtctgtagactgctcactcctctccgctccggtccgaatggcccgcacgaagcagacggcgcgcaagtcgaccggcggcaaggcgccgcggaagcagctggccaccaaggcggcgcgcaagtcggccccggccacggggggcgtgaagaagccgcaccgcttccgccccggcaccgtcgcgctccgcgagatccgcaagtaccagaagagcacggagctgctcatccgcaagctccccttccagcgcctggttcgcgagatcgcgtacgacttcaagacggacctgcggccccagcatcccaagaatgccatcatatcttgcgtcattcttaaggagcagcggagccctccttctgacaatctctattgtattgcttcctatctgctccctgctgcctgatcccaacacatactacgctcttgt

SEQ ID NO: 1671 - DNA, 3665 bp, Zea mays
  unsure (1)..(3665): unsure at all n locations
  Clone ID: TF_ZmC5819_4
ccacgcgtccggcaaacccaccgcttccaccatcgccacccgtcaccccttgctcccatagtcccctcccataccatgcccgacctccacccgccggagcaccaagtcgccggtcaccgcgcctccgccagcaagctgggcccgctcatcgacggctccggcctcttctacaagccgctccaggccggcgaccgtggggagcacgaggtcgccttctatgaggcgttctccgcccacgccgccgtcccggcccgcatccgagacaccttcttcccccggttccacggcacgcgactcctccccaccgaggcgcagcccggggagccgcatcctcacctcgtcctcgacgacctcctcgcggggtttgaggcgccctgcgtcgcagacatcaagatcggtgccatcacgtgaccacgagcgttctgctcggattccgcgtctccggcgtccgagtcgtcggccccgagggcgccgtgnnnnnnnnnnnnnnnnnnnnnnngaaggctatggacattgtcggcgtccgccgcgtgctccggcgctacgtgtcatccgcttgccgacgaggggatggactgcgcgctcgcggcggcggtgtacggaggaaaaggtggagtcttgtcacagctgcgcgagctcaaggcgtggttcgaggggcagactctgttccacttctactattttttgattcttctgggctatgatgctggggcagtcgcagcatgtgggggtggggatggggtaacagcgaagctggtggactttgcccatgtggccgagggtgatggggtgattgaccacaacttcctgggcgggctctgctagctgatcaagtttgtttctgacattgttccagagactcctcagacgcagcctttgggtccttcttaagagataaacctgacacttttgattcggttccgaaagaatcacatttttgcgcgcctacagaaagcagcagtgaggatgaagatgacagtagtgaggaaagttcggatgatgagnnnnnnnnnnnnnnnnnnnnnnnnnctccaaaagtatcagaaaatattggatctgaggatgaatcttctgaagacaagagtgataaagacagtgaagagcctcaggcatgccatcatttaacacctcaggcatgccatcannnnngtttcacaactnnnnnnnnnnnnnnnnnnnnnnnnntatgcaggcagtatgagggacacacatagtttactgaaactcccttacacagacacatacacaccgtgttcactgaaacattcagatttcactaaactgcaacttctccaaacaaacactatctgcggctcggtcaagtaacgagcctcggctcggctcgctcctctagcgagcctnnnnngtcggctcggttcggcgagccaacgagcctgaccataagcatgaaatcagtctccaaaatataatataaagtctcnnnnntaatttaagtgacacgtnnnnnnnnnnnnnnnnnnnnnnnnnnnnnnnnnnnnnnnnnnnnnnnnnnnnnnntannnnnnnnnnnnnnnnnnnnnnnnnnnnnnnnnnnnntannnnnnnnnnnnnnnnnnnnnnnnnnnnnnnnnnnnnnnnttgttgtttgagccagctcgcgagctgaactggctcgctctggctcgctcttttattgagccagnnnnnnctctgctcgagcttgttctaagcacagtttctggatcggaggagcatccccgcctaggtctctgcagccatggttcgcggatcgctcggcaagcttgcatnnnnnnnnnnnnnnnnnnnnnnnagatggcagcaccagcagctccgccgcctcaacatccacgagtaccagggcgcggagttgatgggtaaatacgggatcaacgtgcccnnnnnnnnnnnnnnnnnnnnnnnncatgaggtcaaggacgccttgaagaacatgttccccagcgagaaagagatagttgttaaaagtcaaatccttgctggtggccgagggctgggaactttcaaaagcggactgcaaggtggtgtccatattgttaaggctgaggaagctgaattgattgcaagtaaaatgttaggccagattctgataacgaaacaaactggtccagagggaaagattgtgagcaaggtctacttgtgtgagaaactatctcttactaatgagatgtactttgccatcacccttgataggaaaactgctggtccgctcattattgcttgcagcaagggaggaaaacactatagttgacctcaatgttcaaaggatggccagggctacatcatcttgttgttgacgggttccgtgtgttcaatcgccgagcagaaagccaggaacagaacttaggcgttggcgattggcatctccctcccctaagccatggccaccgggcggcccgtacgactcgtgctggatnnnnnnnnnnnnnnnnnnnnnnnnnnnnnnngggnnnnnnnnnnnnnnnnnnnnnnnnnnggggtagaggagctgttgcggcggttgcgctactccaacctgaatgtggcaatctgctatgcagagggcatgccaactaatgagatgctctacttatctacattattattacatccctctgaagttgtatcttcagaagttcacattgacagtatttgcttcctcttgccatacttacccatcatggcccatggggtgtctatcttatcatgccatcttcaaagaatggcatcatgttaacnnnnntgaatgagaaatcagtcatttctaatggaaagtcaggctttcttgaaaaggtcgcaagctcacacttgtttggctctatagcacttcttgcgaaaagtgggaatctttctctaactgaattaatgttagaatggagccaaacaagtttatgnnnnnatgcgacttcaagagttgacaaaggtttaagttctgagctccagaatcagaattggagagttctttctgtagctaatgaatgtagcatagaggttcctgtgttttaaatgttcaaaggcttcagcagttgcttctcaccttggctactctaataaaaagggaactatgtgactcatctgttctggtgattggatatataatgaaaatattctgtgaggaagacttcgcaaggagatgtggttctgtcacttatgtgactgttgccgtgtatggagacgaggacaagccagcgcttataatgtttacagagatgtggttctgtgactgttgtcgtgtactcaggctttatttcaacaggatttaaatatgagatgtagagtgattgatgtacatcacttcactaatcatgaaatctgtagaaggcgaaactactagccatatatgatatgcataatccgtgtggtaaacattatcaatatcacacaaattatttctaatgggttttgcattagaagcccaaggaaaaaaaaaaaaaaaaaaaaaaaaagtccgccgcgtaaggagggcggcgagggcaagaaggggaaaaagaaagcgaagaagtccgtggagacctacaagatctacatcttcaaggtgctgaagcaggtgcaccccgacatcggcatctcgtccaaggccatgtccatcatgaacttcttcatcaacgacatcttttagaagctcgcggtcgaatcccccgagctggcgcgctataacaagaagcccaacggcaccttctgcgagatcc

SEQ ID NO: 1672 - DNA, 311 bp, Zea mays
  Clone ID: TF_LIB3227-021-P1-K1-F11
ctgcccttgccgccgccactgcccgatccaggtgtgcagactgctccttcctcgtgtccgttccgaatgcccgcacaaagcaaacggcgcgcaagtcgaccggcggaagggccccgggaaagcagttgcccacaagggcggcgcgcaagtgggcccggcccacgggcggggtgaagaacccgcaccgtttccgcccgggcaccgtcgcgctccgggagatccgaaagtcccagaagagcacggagctgttaatccgaaagttcccctccaagcgctttgtccgagagatcgcgcaggactaaaagacggac

SEQ ID NO: 1673 - DNA, 464 bp, Zea mays
  unsure (1)..(464): unsure at all n locations
  Clone ID: TF_LIB4730-068-R1-K1-A11
taccctcggctctccggnaacaacgcgaacacatctcctcgatttctttccatccgatccccccttcgcaaccagagaccccaactcgccccgcatcgatggcgcccaaggccgagaagaagcccgcggcgaagaagccggcggaggaggagcccgcggccgagaaggcgcccgccgggaagaagccgaaggcggagaagcgggtccccgctggcaagtccgctgccaaggagggcggggcgggcaagaggggcaagaagaagggcaagaagagcgtggagacctacaagatctacatcttcaaggtgctgaagcaggtgcacccggacattggcatctcctccaaggccatgtcgatcatgaactccttcattaacgatatcttcgagaggctcggtgctgaggcagccaagctcgcgcgctataacaagaagcccaccatttcattccgggagatccagacc

SEQ ID NO: 1674 - DNA, 633 bp, Zea mays
  unsure (1)..(633): unsure at all n locations
  Clone ID: TF_LIB4730-066-R1-K1-H6
acaccgcaatcttcaatctgcccagcatgccctagcgtaaaccttccatcctcactcgctcgatggcccgcacgaagcatacggtcgaggaagtccaccggcggccaggcgccgaggaagcagctggcgactacaggcggcccgcatgtctgcaccgtgcgaccgacggagtgaataagccccaccgcttccgccccggcaccgtcccgctccgagagatccgcaagtaccataagagcacggagctgctgatccgcaagctgccgctccagcgcctggtgcgggagatcgcgcaggacttcaaggccgacctacgcttccagagctctgctgtctccgcgctgcaagaggcggctgaggcctaccttgtcgggctcttcgaggacaccaacctctgcgccatccacgccagcgcgtcaccatcatgcccaaggacatccagcttgcccgccgcatccgcggggagagggcctaagcgtcatattttctgtcatcagtgcccgatcagaagatgtagagatatgctgggttctgtagtttgggttatcggtcaaatcatgatgtagttgggtcttccctgctgtaatctaactatgactatgcaatggcaatgaagttctcggntatcaggac

SEQ ID NO: 1675 - DNA, 614 bp, Zea mays
  Clone ID: TF_ZmC369_36
atatctcctcgcattttccttgggaccgattgcctatccccctcccaaccaaagaccgatggcgcccaaggccgagatgaagcccgtggcgaagaatccggtggaggaggagcccgcggccgagaagaccaccgccggtaagaagcccctgcggacaagctgatccccattatcaagtccgccggcatggacggctacgagggcaaccgtggcaagaagaagggcaagaagagcgtggagacgtacaaaatctacatcgttgaaggtcgctacaagcaggtgcacccggacatctgcatctcctccaatgccatgtccatcataaactcattgatcaacgacatcttcgagaagctgtccggagaagccggcaagctggcgcgctacaacaagaagcccaccatcacctcccgcgagatccagacctacgtgcgcctcgtgctccccggagagctcgccaagcacgccgtctctgagggcaccaaggccgacaccaagttcacctcctgctaggcttgcacgctcgacctttgtaggactttcttgagtagatgttcgccttgtgtcgtagttatgatgtgctagtttgtctgacgacgctgctctgcttctgt

SEQ ID NO: 1676 - DNA, 435 bp, Zea mays
  Clone ID: TF_LIB4730-084-R1-K1-A8
attcgcttccatctcctgagcactttctcctcctccccgacaagtcaatcgaagtcgagatacggacatggactccaccggcaccggagcagggggtaatgggaagaaggcagcggccgggcgcaaggtctctgggccaaggaagaagtccgtgtcaaggtccgtaacgggccggctccagttccccgtcggccgcatcgggcgctacttgaataagggcctctacgcgcagcgtgtcgacaccttcgcccccttctacctcgtcgctgtcctcgaatacctcgccgctgaggttctggagttcgctggtaatgctgccagggacaacaagaacactcgcattattccgcgccacgtgcttctggcgatccgcaacgacgatgagcttgtgaacctgctgggctgggtgaccatcgctcacggcggtgtgctccc

SEQ ID NO: 1677 - DNA, 654 bp, Zea mays
  Clone ID: TF_LIB4742-028-R1-K1-F6
cattgggtacctcgaggccggccgggaatcacacactcgactctcctctctcgatccgcaggctttgctagctctactccacccctctcgatctcgaattgtagcagtagctttcaggcggtcatggacgcgagcgcatccggagccggcgggaaggcgaagaagggcgcggccgggcgcaagggcggagtgccgaggaagaagtctgtgacgaggtccgtcaaggccgggctgcagtttcccgtcggacgcatcgggcggtacctgaagaagggccggtacgcgcagcgtgtcggcacgggcgcccccgtctacctggacgccggcctcgagtacctggtcgccgatgtgctggagctgggcgtcaacgctgccatggacaacaagaagacccgcatcatcccgcgccacgtgctccttgtcatccgcaactgcgaggagctcgttaagctgctgttcggcgtcgccatcgcccacggctggcgtcctccccaacattaacccggtgctcctgtgcaagaagaccgcgtagaatgtgccgggctaggaggacaagtcgccctagaatgccggcaagtcccccaagaaggcatacaggtgcgcctttaccgctgtgatgttgaatgctcgcgttcagtagatctttacgactgt

SEQ ID NO: 1678 - DNA, 674 bp, Zea mays
  unsure (1)..(674): unsure at all n locations
  Clone ID: TF_LIB4974-072-Q1-K1-H4
cattgggactctcgaggccggccgggccgggttatcacagtcttcaatctctgcaggaattactagaagaagacttgcatcctcacttgatcgatgtcttgcaccaagcatacggccaggaagtccacctctcgcctcaggcgccttaggaagcatatgtagactaaggcggcccgcagagtctgtccctgcgaccggcggagttaagaagccccaccgcttccgccccggtaccgtcgcgctccgggagatccgcaagtaccagaagagcacagagctgctgatccgcaagctgccgttccagcgcctggtgcggtagatcgcgcaggacttcaagaccgacctacgcttccagagctccgctgtctccgcgctgcaggaggcggctgaggcctaccttgtcggtctcttcgaggacaccaacctctgcgccatccacgccaagagcgtcaccatcatgcccaaggacatccagcttgtccgccgcatccgtgtggagagggcctaagcatcgtatattctgtcatcagtgcccgatcagaagatgtagagatgtgctgngttctgtactttgngttactgtcgaatcatcgagtacttggttgttcactgctgtcacttattatcatgatgcatatgaaatggcaatgaactatgttatcaggtcttgaaaa

SEQ ID NO: 1679 - DNA, 637 bp, Zea mays
  unsure (1)..(637): unsure at all n locations
  Clone ID: TF_LIB5027-055-Q1-XP1-F12
ttcgggaaaaggnaaaaaaaaaaaaaaaaaataacaaaaaaaaaaaaaaaaaaaaaaaaaaaaaaaaaaaaaaaaattaccggcgaacccatctcctcgcatttcttcccatccgatccccccttcgaaaccaaaaccccaactccccccgaatcgatggcgcccaaggccgaaaaaaaacccgcggcgaaaaacccgggggaggaggagcccgcggccgaaaaggcgcccgccgggaaaaagccgaagggggaaaagggggcccccgttggaaagtccgctgccaaggaagggggggggggcaaaaggggcaaaaaaaagggcaaaaaaaggggggaaacctacaaaatctactttttcaaggggctgaagcaggggcacccggactttggaatctcctccaaggccatgtccatcatgaactccttcattaacgatatcttcaaaaagttcgttgctgaggccgccaagttcgcgcgctataacaaaaagcctaccatcacctcccgggagatccaaacctccgggcgcctcgtccttcccggggagctcgccaagcacgccgtttccgagggcaccaaggccgtcaccaagttcacctcggcctaggttgcgcggccgccgcttgcaggattct

SEQ ID NO: 1680 - DNA, 802 bp, Zea mays
  Clone ID: TF_ZmC119_1450
gtccccgacaagccactcgaagccgagatacggccatggactccaccggcaccggagcagcggggaagggaaagaagggagcggccgggcgcaaggtcggcgggccaaggaagaagtcggtgtcgaggtccgtgaaggctgggctccagttccccgtcggccgcatcgggcgctacttgaagaagggccgctacgcgcagcgtgtcggcaccggcgcccccgtctacctcgccgctgtcctcgaatacctcgccgctgaggtactgcaatttgagcccagttctttgtttgtactgatttggcgacggagtattaattcttgcgtcccgattcgttttgcttccttgtttgaccaggttctggagctcgccggtaatgctgccagggacaacaagaagactcgcattattccgcgccacgtgcttctggcgatccggaacgacgaggagcttgggaagctgttgggcggcgtgaccatcgctcacggcggtgtgctccccaatatcaaccctgttctgctgcccaagaagacggcggagaaggcgtccagtggcgggagcaaggaggcaaagtcgcccaagaaggccgccaagtcccctaagaaggcatagactgactgtccggagtgatctgatgtttagcagtaccttgttaccagtatgcggtgatgcgtaggctgcagatgggacgaatgtgcttgtatgtgtatgtgtcctgctgcaagttgtcctttgctatttagaatggaagaagaaatgccttgtttctctgaggttgcaatgtcttttccctaatttcattt

SEQ ID NO: 1681 - DNA, 603 bp, Zea mays
  Clone ID: TF_LIB4826-069-R1-N2-F1
actcctatgggcgattgggaccctcgaggccggccaggaaggcggcgaggaagtctgcgccgacgaccagcggcgtgaagaagccccacaggtacaggcccgggacggtggcgctgcgcgagatccgcaagtaccagaagagcacggagctgctgatccggaagttgcccttccagcgcctggtccgtgagatcgctcaggacttcaagacggatctgcggttccagagccacgccgtcctggccctccaggaagccgccgaggcctacctcgtcggcctgttcgaggacaccaacctctgcgccatccacgccaagcgcgtcaccatcatgcccaaagacatccagctcgcccgccgcatccgcggcgagcgcgcgtaggcgtatctcgcgcccggccccagtggcggcggagggatggaggagggcaatttgtaaccttatgctgtttgttcgcttttagacggcgtggtgaagaactagtgtaaaaacggctttaaagtctattttgtgcggtagttcgtgtaggccgcttcgtcccgaagcgatcttggtaaaagacttattcgtgttgccaaagaaaaaaaaaaaaaaaaaagcggcc

SEQ ID NO: 1682 - DNA, 730 bp, Zea mays
  unsure (1)..(730): unsure at all n locations
  Clone ID: TF_LIB4829-002-R1-N1-C2
ccggccgggatcacacacccacacttcagccttccacccccacaacaacaaccatcatcaacaacttcatccacatcttcacaagaatcatcaacaatggctcgcactaagcagaccgcccgaaagtccactggtggcaaggcccctcgcaagcagctcgcttccaaggctgcccgcaagtccgccccctctaccggaggtgtcaagaagcctcaccgctacaagcccggtaccgtcgctctccgtgagatccgtcgctaccagaagtccactgagcttctcatccgaaagctccccttccagcgtctcgtccgtgagattgctcaggacttcaagtctgatctccgattccagtcctccgccatcggtgctctccaggagtctgtcgagtcttacctcgtctccctcttcgaggacaccaacctgtgcgccatccacgccaagcgtgttaccatccagtccaaggatatccagctcgcccgccgccttcgtggtgagcgcaactaagcgaatggctttgggaggataacgaattttttgctttgacacgagggatatcatggttaggggataatcaaggcgttcatgaggaacaatgttttatacactcaggcttgtacattaagtggcaagcaagttagctgcctttagcaatcgaccaacggtctttgatcatcatcaaaaaaaaaaaaaaaaaaaaaacanaaaaaaaaaaaaaaaccccgcggcc

SEQ ID NO: 1683 - DNA, 926 bp, Zea mays
  unsure (1)..(926): unsure at all n locations
  Clone ID: TF_ZmC369_138
tgggaccctcgaggccggccgggacagccaaggaaatcttccgttctcaaaccaacctaggcaattcgccgcagcctctcaccctcgcgagtcccgacctcccgcagccgccgcacagatggcacccaaggcggagaagaagccggcggccaagaagcccgcggaggaggagcccgcgacagagaaggtggagaaggctccggcggggaagaagcccaaggccgagaagcgcctcccggcgggcaagtccaaggagggcggcgagggcaagaaggggaaaaagaaggcgaagaagtccgtggagacctacaagatctacatcttcaaggtgctgaagcaggtgcaccccgacatcggcatctcgtccaaggccatgtccatcatgaactccttcatcaacgacatcttcgagaagctcgcggccgagtccgccaagctggcgcgctacaacaagaagcccaccatcacctcccgcgagatccagacctcggtgcgcctcgtcctccccggcgagctcgccaagcacgccgtctccgagggcactaaggccgttacgaagttcacctcgtcttaggatccttgtaatggtcatgtgggcgtcggcggtaggcgtggctcagtttatgtgatactgctagcgatggatgatgatgatctgcgtgtaattgaattaaagaattgtgctgatctttctacaacactgttccacatcactcgttgcccgccagtgagccgccaattacatgtgcaaatctacatcaactttctgaaagaagctagttacttgaaaaaaaaaaaaaaaaaaaaaaaaaaaaaaaaaaaaaaaaaaaaaaaaaaaaaaaaaaaaaaaaaaaaaaaaaaaaaaaaaaaaaaaaaaaaaaaaaaaaaaaaaaaaaaaaaaaaannaaggggggggccgttttaaa

SEQ ID NO: 1684 - DNA, 763 bp, Zea mays
  Clone ID: TF_ZmC369_153
cattgggtacctcgaggccggccgggaaaaaaaaaacagccaaggaaatcttccgttctcaaaccaacctaggcaattcgccgcagcctctcaccctcgcgagtcccgacctcccgcagccgccgcacagatggcacccaaggcggagaagaagccggcggccaagaagcccgcggaggaggagcccgcgacagagaaggtggagaaggctccggcggggaagaagcccaaggccgagaagcgcctcccggcgggcaagtccaaggagggcggcgagggcaagaaggggaaaaagaaggcgaagaagtccgtggagacctacaagatctacatcttcaaggtgctgaagcaggtgcaccccgacatcggcatctcgtccaaggccatgtccatcatgaactccttcatcaacgacatcttcgagaagctcgcggccgagtccgccaagctggcgcgctacaacaagaagcccaccatcacctcccgcgagatccagacctcggtgcgcctcgtcctccccggcgagctcgccaagcacgccgtctccgagggcactaaggccgttacgaagttcacctcgtcttaggatccttgtaatggtcatgtgggcgtcggcggtaggcgtggctcagtttatgtgatactgctagcgatggatgatgatgatctgcgtgtaattgaattaaagaattgtgctgatctttctacaaaaaaaaaaaaaaaaaaaaaaaaaaaaaaagtactctgcgttgttaccactgct

SEQ ID NO: 1685 - DNA, 303 bp, Zea mays
  Clone ID: TF_LIB3180-008-P2-M1-A11
tcgcaactcttttccaaatccaccggcgggtcggctcgcccatcttggggccaagcaccgaatcttcgatggcccgcacgaagcagacggcgcgcaagtcgaccggcggcaaggcgccccgcaagcagctggccaccaaggcggcgcgcaagtcggcgccggcaaccggtggcgtgaagaagccttaccggtttcgccccggcaccgttgcgctccgggagattcgcaagtaccagaagagcacggagctgctcattcgcaagctgtccttccagcgccttgttcgtgagatcgcgcaggatt

SEQ ID NO: 1686 - DNA, 476 bp, Zea mays
  Clone ID: TF_LIB3587-200-Q1-N6-H6
ggggttgaaaaatttaaaaaaaattggcttggttgggatttaaacccactcaatctcactcaatcttttttgattggaagctaacccgattagacccaaccaggttaacaaccggcctttttggggggggggcctaagatcactggtcaacattcaaataacccttgcaatacctttcccccctggcttaattcataacacaggcaaaagcccctggcccacttacacacaccagccaacccccacttctggcatgagaagcggcccatgacaatgcttgcttgaaaagcaaacaacaacgacccctacaacaaggggggtaaaaccaggggaacttggggaccgccttggtaccctcccaaaccgggtgcttggcgagctcccccgggaggaccaggcggaccgaggtcttgatctcgcgggaggggatggggggcttcttgttgtaccgggcgagcttggggggcttcgcgggg

SEQ ID NO: 1687 - DNA, 609 bp, Zea mays
  Clone ID: TF_LIB3606-025-Q6-K6-A3
acattgccagttgaggaatcataattcatataatgagcttgtagcacaaaagctggtggacatgaagaacagccaggttactataacggtcaatggcgatgaaattcatatgtttcaggagattggccatcttcgtctaaagctgactgccaacaggtcaaaccaacctgttgaggatcatctgtcaaggcgtcaactatatcctctgcattctcaatggatgcagcaagatgcaacggagttaaaccaccagggccaggaaagtttgggaggaaggggtaaaccttggaattatcaaggcatagtacaacaaactgtacaagcaaatgcaccattctcctactctttcttcggacgcgtgggcccgcggcgtgctcaagatctttctcgagaacgtcatccgcgacgccgtcacctacacggagcacgcccggcgcaagaccgtcacagccatggacgtcgtctacgcgctcaagcgccagggccgcaccctttacggcttcggcggctagggcgctaggctaggccatgctcgacccgccccccactctccgctctggcgtcgtcattggttccttgacccctgtgcggggtcggtcggtggtgcta

SEQ ID NO: 1688 - DNA, 328 bp, Zea mays
  Clone ID: TF_LIB5116-067-A1-PF1-C4
ctcattctccaacaccagagcgtcgcagcagccagatccgcagccagcccagctccgatggcccgcaccaagcagactgcccgcaagtccaccggcggcaaggcgccgaggaagcagctggcgaccaaggcggcccgcaagtccgccccggccaccggcggcgtcaagaagccgcaccgcttccgcccgggaaccgtcgccctccgggagatccgcaagtaccagaagagcacggagctgctcatccgcaagctccccttccagcgcctcgtccgggagatcgcccaggacttcaagacggacctccgcttccagtcctccgccgtct

SEQ ID NO: 1689 - DNA, 862 bp, Zea mays
  Clone ID: TF_ZmC653_101
cccagcgtccgcaatctccctagcagcagatcctcgtgcaacgcaaagcgctagccttcctactgtcccgatggcccgcacgaagcagacggcgaggaagtccactggcggcaaggcgccaaggaagcagctggccaccaaggcggcgcgcaagtctgccccggcgaccggcggagtgaagaagccccaccgtttccgccccggcaccgtcgcgctccgggagatccgcaagtaccagaagagcacggagctgctgatccgcaagctgccgttccagcgcctggtgcgtgagatcgcccaggacttcaagaccgaccttcgcttccagagctccgccgtcgccgcgctgcaggaggcgtccgaggcctacctcgtcggtctcttcgaggacaccaacctctgcgccattcacgccaagcgcgtcaccatcatgcccaaggacatccagctcgcccgccgtatccgtgtggagagggcctaggcgtcgtggcggtggaggtcgaagtagtagtcgcagtttctgtcatcaccgtctggctagaaggtgtagagatgtgccgggttctggagtttgggttatcggtcgaatcatgatgtagttggttcttcacagctgtaatttaactatgacgatgccatggcaatgaagttctcagctatgagttcccgaaaaaaaaaaaaaaaaaaaaaaaaaaaaaaaaaaaaaaaaaaaaaaaaaaaaaaaaaaaaaaaaaaaaaaaaaaaaaaaaaaaagaaagaacaaaaaaaaaaaaaaaaaaataaaaaaacaggggggggccccctttataaaggtacccaattttactcacccgggggtttgcaaaattaaaacctttttttt

SEQ ID NO: 1690 - DNA, 640 bp, Zea mays
  unsure (1)..(640): unsure at all n locations
  Clone ID: TF_LIB4979-020-A1-K1-G12
tttcgtaaaaatcctccgttacttttcagtcgtatcagtgcgatttatctatcggctacctcactacgctatgcagtccgagaacaatactnagagaaggatatatgcatgagcgacccaaggcaggagaactaagcgccgcgaaataggtggaggaggaggaggcctcgcagaagctgctccggaggtcaacggccccgtggtgaagatcccccaggaggacaagcggctacctgtggccatctccggcggcgacgagggcgacgacaagaaaggtacgaagaaagtgaagaatagcgtgtagacctacaagatctacgtcttctaggtcctgaagcatgcgcacccacgacatcgacatctcctccaaggtcatgtacatcatgaactccttcatcaacgacgtctgcgagaggatcgccggggaggacgtgaagctcgcccgcgacaagatcaaaaccaccatcacgctcccgcgagatcatgacctccgtccgcctctacctccccggagagctcgacaagcacgccgtctcggagggtaccaaggacgtcaccaagctcacctcggcttaaccgccttgcaataggcatcgttgttgtctgcttctcaagcaagcactgcgatgagccgcttctc

SEQ ID NO: 1691 - DNA, 259 bp, Zea mays
  Clone ID: TF_LIB3156-011-Q1-K1-C2
acggggcgacccacgcgtacggccgagagagtcagagccggcgcccctgtttatctcgctgccgtgctcgagtaaatagctgatggggttcttgagctggacaacaatgccgtacgtgacaacaagaagacccgcatagatccgcgcctcatacaaatagccgaccgaatcgacaaacagatgttccgattgctgggcacggtgaccatcactagcggcggtgtaatgcccaacattcataacctttcgctcccttaga

SEQ ID NO: 1692 - DNA, 631 bp, Zea mays
  unsure (1)..(631): unsure at all n locations
  Clone ID: TF_LIB4766-065-R1-K1-G3
gccggccgggnatcactttctcagtcggtcactgctcgcagtaaacacctcgaagtcgcccccggtctcgaacacagtaccgagtaaagcgtctaatggcctcccgaatgcgtctcgatcacatccgacagtcatcagattggcagcaccaaggtaggagcaaaaagcccgtcggatgaagacagcccagtggcagcgtaggagacctcgcggaccagacgaaggctggacgaaggtttccggacaggcatagaagccgaaggaggggaaacgcctccccgcggcatagtccggtgccggtgagggcaaaaagggcaagaagaaatccgagaagagcgtggagacctacaagatctacgtcttctatgtgctctagctggtgcaccccgacatccgcatctcgtccaacgccatgtccatcatgaatttctgcatcaacgagcatctatccagatatctctccgccgagggcgccaagttcgcccgctacaactagaagcccatcatcacctaccgtgagatgcagacctccggacgcctcgtcctacccggcaagctcgccaagctcgccgctctctgaaggtacaaaggcggtcaccaagttcacttcgtctcatattggttgccttcc

SEQ ID NO: 1693 - DNA, 820 bp, Zea mays
  Clone ID: TF_ZmC683013_1
ccggccgggaacttccatctcacaacagcatcttctcgcccttcagcaacttgaccaacgcacgagttcttactcaaccgaagcaatcaaccactcaacttttttcaccaactctctcaaatctttcgaaatggctcccaaggctgctgacaagaagcccgcctccaaggctcccgctactgcctccaaggctcctgagaagaaggatgccggcaagaagactgccgcttctggtgacaagaagaagcgctccaagacccgcaaggagacctactctttttacatttacaaggtcctcaagcaggtccaccccgacactggtatctccaaccgtgccatgtccatcctgaactcttttgtcaacgacattttcgagcgcgtcgcttttgaggcttccaagcttgccgcctacaacaagaagtcccccattttttcccgagagatccagacctctgtccgtttcatcctgcccggtgagcttgccaagcaccccgtttttgagggtaccaaggccgtcaccaagtatttttcctcgacgaaataagtgctttgatggcttgatttgttttgggcatttggtttttcacgcgtggcatcagggtgtcatgagtttgaggtttcacggggatccagccctgttttgggggcctcataatgcgttacggatggttttgttttatttcctgggggcaaggttttcacacacgggcaacggggttcgcggttgtacaataaacatcgagaatagggtttcgatcaaatgaattcgtgcccataaaaaaaaaaaaaaaaaaaaaaaaaaaaaaaaaaaaaaaaaaaa

SEQ ID NO: 1694 - DNA, 671 bp, Zea mays
  unsure (1)..(671): unsure at all n locations
  Clone ID: TF_LIB4729-038-R1-K1-D2
gggtaccctcgggttcggccgggaacaccagaagcaagaaaactagaaaaggctcctccggaccgcaacgcccctcatctccctcgaccccgacatccccgacccgatggcgcccaaggcggagaagaagccagcggagaagaagccggcggccgaggagaaggcggagaagacgaccgcagggaagaagcccaaggccgagaagcggctgcccgcgtccaagtcctccggcaaggagggcggcgagaagaaggggaagaagaaggccaagaagagcgtggagacctacaagatctacatcttcaaggtgctgaagcaggtgcaccccgacatcgacatatcctccaaggccatgtccatcatgaactccttcatcaacgacatctttgagaagctggccggcgaggccgccaagctggcgcggtacaacaagaagcccaccatcacgtcccgcgagatccagacctccgtgcgcctagtcctccccggagagctcgccaagcacgccgtctccgagggaaccaaggccgtcaccaagttcaccagcaactgancgcgctgcgggatccgcggatctgttagaagggttctttgctgtgtncttttcccnagtccccacccttaccgcctagtagctagcttgcctgctctattaaatcggcgcgccggga

SEQ ID NO: 1695 - DNA, 463 bp, Zea mays
  unsure (1)..(463): unsure at all n locations
  Clone ID: TF_LIB4827-059-R1-N1-E1
ccggccggncaagaaagcctccattcccgagtctactgccaaccgcatccagtccacccccatcaccctcgaccccgacaacctcgacccgatggcgcccaaggccgagaagaagccagcggagaagaagccggcggccgaggagaagcggagaagacgaccgcagtaaaagccagtcgagaacgctgccgcctcgaagtcctccggcaaggagggcggcgagaagaaggggaagaagaaggccaagaagagcgtggagacctacaaaatctacatcnnttcaggtcctgaagcaggtgcaccccgacatcggcatctcctccaaggccatgtccatcatgaactccttcatcaacgacatcttcagnaagctcgcccggcgaggccgctaagctcgcccggtacaacaagaagcccaccatcacctcccgcgagatccagacctccgtgcgcctcgtcctcc

SEQ ID NO: 1696 - DNA, 466 bp, Zea mays
  Clone ID: TF_LIB4979-020-A1-K1-E4
attcccctctcccgcgacccggaccccgtctcccggcatctaccaaatccctctcgcctcatccccaccagagcatagccgccctatcgacctggcgtgacaactgatggcgggacgcggcaaggctattggcgctggcgccgcacaagaaggcgacgtcgaggagctccaagggtgggctgcaatttcccggcggcaggatcgctcggttcctccaggacggctagcacgcccagcgcgtggacgccggcgccctctgtctagcctctcctgtgccctcgagcacctcgccgctgagagctctctggagcttgctgctaacgcaacgagacataacaagaagacccgcatcgtgctgcgtcacatccagatcgccgcgcgcaacgacgaggacctgcaccaagctgcttggaggagccaccatcgcgagcggcggcgttatgcccaacatccaccagcacctcct

SEQ ID NO: 1697 - DNA, 409 bp, Zea mays
  unsure (1)..(409): unsure at all n locations
  Clone ID: TF_LIB143-037-Q1-E1-H1
aggcgaaacatctctcaaacgatacgaaacggcctcgccgctcagtctcacgctaatccccgccggcaccgatcgcccgcactaagcagacagcgcgcacgtcgacgggcggcaatgcgccgcagacgcatctggcgaccaacgcggcgcgcaagatggacccggccactcggggcttgaagaatccgcaccgcttcctcccgggcaacgtggcgctgcgggagatccccacgtattagacgagcactgacctgctgatacggaagctgccgttccagctgctggtgcaggagatcacgcangacttcaacacggacatccggttccaatcctcagccgtggccacgctgcaggatgccacccaggcctagctcgtgagcctcttcgaggacaccgacctctgctccat

SEQ ID NO: 1698 - DNA, 434 bp, Zea mays
  unsure (1)..(434): unsure at all n locations
  Clone ID: TF_LIB3150-035-Q1-N1-E2
aaatttacccaagccttttgttcctaaccatcttttaccacaaattcgtgggccaaagcaaaccgctggccttctaactgccccgatggcccgaacgaaccaaacggcaaggaagtccactgccggcaaggcccctaggaagcagctggccacgaatgcggctcgcaagtctgccccggctaccggcggagtgaagaagccccaccgtttccgccccggcaccgtcgcgctccgggagatccgcangtaccagaagagcacggagctgctgatccgcaagctgccgttccagcgcctggtgcgtgagatcgcccaggatttcaagaccgaccttcgcttccagagctccgccgtcgccgcgctgcaagaggcgtccgaggcctaccttgtcgggctcttcgaggacaccaacctctgcgccattcacgccaagc

SEQ ID NO: 1699 - DNA, 831 bp, Zea mays
  Clone ID: TF_ZmC653_52
ctagccaccgcatcgtcgccctcaaattcgttccgtccaggcaaggaagaaatcgagcagccaaggagaggagaagatggctcgtacgaagcagaccgcccgcaagtccaccggaggcaaggccccgcgcaagcagctcgccaccaaggttcgtctctacctacccgtaccgatctgctgttccgatcccctcgatggttcccgttgtaagacggcgctgacgcggcggcggttgttgttttgttgcaggcggcgaggaagtcggcgccgacgaccggcggcgtgaagaagccccacaggtacaggcccgggacggtggcgctgcgcgagatccgcaagtaccagaagagcacggagctgctgatccggaagttgcccttccagcgcctggtccgtgagatcgctcaggacttcaagacggatctgcggttccagagccacgccgtcctggccctccaggaagccgccgaggcctacctcgtcggcctgttcgaggacaccaacctctgcgccatccacgcaaagcgcgtcaccatcatgcccaaagacatccagctcgcccgccgcatccgcggcgagcgcgcgtaggcgtatctcgcgcccggccccagtggcggcggagggatggaggagtgcaatttgtaactttatgctgtttgttcgcttttagacggcgcggcgaagaagtagtgtaaaaacggctttacaagtctattttgtgcggtagttcgtgtaggccgcttcgtcccgaagcgatcttggtaaaagactgatcattcgtgttgccaaacgacacaattcgtattcaaaaaaaaaaaaaaaaaagcggcc

SEQ ID NO: 1700 - DNA, 1037 bp, Zea mays
  Clone ID: TF_ZmC653_74
cattgggtacctcgaggccggccggggctattcgtgtcctggcatccgcagagagcttgttccgtccaggcaaccaaaaagcaagttgccccgccgcgcagaggaagaagagagcagaggaggatggctcgtacgaagcagaccgcccgcaagtccacgggaggcaaggccccccgcaagcagctcgccaccaaggtccgtccgtctgcccttctctacccgtttcggatccgctgttctgttctctagggttcccttctgagacgcgccggcggttgtgctgtggttgcaggcggcgaggaagtcggcgccgacgaccggcggcgtgaagaagccccacaggtacaggcccggaaccgtggcgctgcgcgagatccgcaagtaccagaagagcacggagctgctgatccgcaagctgcccttccagcgcctggtgcgcgagatcgcgcaggacttcaagacagacctccggttccagagccacgccgtgctggcgctccaggaggccgccgaggcctacctcgtcggtctcttcgaggacaccaacctctgcgccatccacgctaagcgcgtcaccatcatgcccaaggacatccagctcgcccgccgcatccgtggcgagcgcgcgtagccatcatctccggggatctgatgaatgtctagttaccaaacaaataggctgtattagcgtcgttgttctgtattcgttattttggattcggttgcagtgaaaaacagctttactaatcttatttgtgatctctggtggttgcttcgcttctaagcgatcatctgtggtgcaaaattcgtgctggttattttgttatggccccgtgtttggtctggcggcctggtccatctcaagtgcccgacggaagttgtcgtgcagcatcatgtgggttttactgcgtcacagctcacgaccatccttctcttccgagatgctaatagttggccgtctatttcactgagataatattaatagttcgacgctgttgctggctgtctaataaaaaaaaaaaaaaaaaaaaccgatt

SEQ ID NO: 1701 - DNA, 652 bp, Zea mays
  Clone ID: TF_LIB4974-072-Q1-K1-C5
gggtccctcgaggccggccgggccggtatcactcgaattccgattcgtttaactcctgagcactttctcctcgtccccgacaagccaatcgaagccgagatacggtcatggactccaccggcaccggagcagggggtaagggtaagaagggagcgtcctggtgctaggtcggcgggtcaaggaagaagtcggtgtctaggtccgtgaaggccgggctccagttccccgtcggacgcatcgggcgctacttgaagaagggtcgctacgcgcagcgtgtcggcatcggcggccccgtctacctcgtcgctgtcctcgaatacctcgtcgctgaggttctggaggtcgctggtaatgttgccagggacaacaagaacactcgcattattccgcgccacgtgcttctggcgatccggaacgacgaggagcttgtgaagctgctgtgtggcgtgaccatctctcacggaggtgtgctccccaatatcaaccctgttctgctggccaagaatacggctgtgagaaggcgtgcagtgtgcgtagcaaggaggctatagtcgcccaagaaggccgtcttgtccccctagaaggtatagactgactggtctggagctgatctgatgattatcaggaccttgatatcagtatgcggagatgc

SEQ ID NO: 1702 - DNA, 613 bp, Zea mays
  Clone ID: TF_LIB5116-014-A1-PF1-C11
gcacccgatctccttacagaaccaccaccacccgcgccgatggcccgcacaaagcagacggcgcgcaagtccaccggcggcaaggcgccgaggaagcagctggcgaccaaggcggcccgcaagtccgcgccggccaccggcggcgtcaagaagccccaccgtttccgccccggcaccgtcgccctccgcgagatccgcaagtaccagaagagcacggagctgctcatccgcaagctccccttccagcgcctcgtccgggagatcgcgcaggacttcaagaccgacctccgcttccagagctccgccgtctccgcgctgcaggaggccgccgaggcgtacctggtgggcatgttcgaggacaccaacctgtgcgccatccacgccaagcgcgtcaccatcatgcccaaggacatacagctcgcccgccgcatccgcagggagcgcgcctagatttggggtcgccggtaatactgggcagtatctgttcttgtcctgtgattcgaatgtgtgttgagtgcctctgtttgttggtgttgatatgatgtgtcgtctgttcctatggatcgtgatgttcgaatgaaatggcaatggaagttcagttatcatgtgatgc

SEQ ID NO: 1703 - DNA, 759 bp, Zea mays
  unsure (1)..(759): unsure at all n locations
  Clone ID: TF_LIB4760-007-R1-M1-F1
ggccgcttttttttttttttttttatttacaactatattccaaaataggggcgtcaaatctaagaggcccattacaatccggcacgatttatgaagcaggcaagctagctactggcctttgttcacccgacgagaacatcaacgatttcacagcacatacataggcggggaggggtagaggacacgacgaagaaccctgtaagaaggggagacctaacaaatccgtggacgctgcaggctgctcaattgctggtgaacttggtgacggccttggttccctcggagacggcatgtttggcgagctctcctgggaggacgaggcgcacggaggtctggatctcgcgggaggtgatggtgggcttcttgttgtaccgcgcgagcttggcggcctcgccggcgagcttctcgaatatgtcgttgatgaaggagttcatgatggacatggccttggaggagatgccgatgtcggggtgcacctgcttcaggaccttgaagatgtagattttgtaggtctccacgctcttcttggccttcttcctccccttcttctcgccgccctccttgccggaggacttcgaggccggcaggcgcttctcggacttgggcttcttacctgcggtcgtcttctccgccttctcctcggccgccggcttcttctccgctggcttcttctcggccttgggcgccatcggntcgggtttngtcgggtcgagggataagggggggttgactggnatgcggttggctggaactcgggat

SEQ ID NO: 1704 - DNA, 678 bp, Zea mays
  Clone ID: TF_473604
agaaaatctgagcggtattgatggcgcccaaggcggagaagaagccggcggcgaagaaggtggcggaggaggagccctcggagaaggcggctccggcggagaaggcccccgcggggaagaagcccaaggcggagaagcggctacctgcgggcaagtccgccggcaaggagggcggggacaagaagggtaggaagaaggcgaagaagagcgtggagacctacaagatctacatcttcaaggtcctgaagcaggttcaccccgacatcggcatctcctccaaggccatgtccatcatgaactccttcatcaacgacatcttcgagaagctcgccgcggaggccgccaagctcgcccggtacaacaagaagcccaccatcacctcccgcgagatccagacctccgtccgcctcgtcctccccggcgagctcgccaagcacgccgtctcggagggtaccaaggccgtcaccaagttcacctcgtcttagccgccttgttgtaggcgtcgttgttgtctgcttctcaagcaagcactgtctagtgccgcttctctaggcgatgatggtggttggctggtgtgtgtaagtggtgcagtggcttttgcctgtgttatgaatttagtcatggtggtaatgtattgctatggttatttgaatgttgatcagtgagcttatgtccgcc

SEQ ID NO: 1705 - DNA, 856 bp, Zea mays
  unsure (1)..(856): unsure at all n locations
  Clone ID: TF_ZmC369_130
ttggggtaccactcgggcctgccgggatcgcagaaatcctccgcaacttcacagcgtatcatcgttttccatcgctcctactcctatcatccagaaaatctgagcggtattgatggcgcccaaggcggagaagaagccggcggcgaagaaggtggcggaggaggagccctcggagaaggcggctccggcggagaaggcccccgcggggaagaagcccaaggcggagaagcggctacctgcgggcaagtccgccggcaaggagggcggcgacaagaagggtaggaagaaggcgaagaagagcgtggagacctacaagatctacatcttcaaggtcctgaagcaggtgcaccccgacatcggcatctcctccaaggccatgtccatcatgaactccttcatcaacgacatcttcgagaagctcgccgcggaggccgccaagctcgcccggtacaacaagaagcccaccatcacctcccgcgagatccagacctccgtccgcctcgtcctccccggcgagctcgccaagcacgccgtctcggagggtaccaaggccgtcaccaagttcacctcgtcttagccgccttgtagtaggcgtcgttgttgtctgcttctcaagcaagcactgtgatgtgccgcttctcatggtagtagtggtggttggctggtgtgtgtaagtggtgcagtggcttttgcctgtgttatgaatttagtcatggtggtaatgcattgctatggttatttgaatgttgatcagtggtcttatgtccgcctaccatgtatatcagttggtaccctgnntagatgtgtgggtctactagcaacagctncatctgatacgttctttaagccacaccct

SEQ ID NO: 1706 - DNA, 1031 bp, Zea mays
  Clone ID: TF_ZmC369_143
cggatctacctggacggggtcgacgggggatcagaagcctatggcctggccgtggctcgcattgcacatggtgggtgcgctggcttaccatctccccaagtgggagagtggacgtcataatttgtggtagagggggtacgcgttcgcgcggcccctgcttcatcgcagaaatcctccgcaacttcacagcgtatcatcgttttccatcgctcctactcctatcatccagaaaatctgagcggtattgatggcgcccaaggcggagaagaagccggcggcgaagaaggtggcggaggaggagccctcggagaaggcggctccggcggagaaggcccccgcggggaagaagcccaaggcggagaagcggctacctgcgggcaagtccgccggcaaggagggcggcgacaagaagggtaggaagaaggcgaagaagagcgtggagacctacaagatctacatcttcaaggtcctgaagcaggtgcaccccgacatcggcatctcctccaaggccatgtccatcatgaactccttcatcaacgacatcttcgagaagctcgccgcggaggccgccaagctcgcccggtacaacaagaagcccaccatcacctcccgcgagatccagacctccgtccgcctcgtcctccccggcgagctcgccaagcacgccgtctcggagggtaccaaggccgtcaccaagttcacctcgtcttagccgccttgttgtaggcgtcgttgttgtctgcttctcaagcaagcactgtcatgtgccgcttctcatggcagtagtggtggttggctggtgtgtgtaagtggtgcagtggcttttgcctgtgttatgaatttagtcatggtggtaatgtattgctatggttatttgaatgttgatcagtgatcttatgtccgcctaccatatatgtcagttgttaatcttgttaggtcttattcggttagctttcaatctatatagattgagtgagattgagtgagtttaaatctcaaacaagtcaaattttttttaaatttttcaatcc

SEQ ID NO: 1707 - DNA, 741 bp, Zea mays
  Clone ID: TF_ZmC369_52
atcgcagaaatcctccgcaacttcacagcgtatcatcgttttccatcgctcctactcctagcatccagaaaatctgagaggtattgatggcgcccaaggcggagaagaagccggcggccaagaaggtggcggaggaggagccctcggagaaggcggctccggcggagaaggcccccgcggggaagaaggccaaggcggagaagcggctacctgcgggcaagtccgccggcaaggagggcggcgacaagaaggggaggaagaaggcgaagaagagcgtggagacctacaagatctacatcttcaaggtcctgaagcaggtgcaccccgacatcggcatctcctccaaggccatgtccatcatgaactccttcatcaacgacatcttcgagaagctcgccgcggaggccgccaagctcgcccggtacaacaagaagcccaccatcacctcccgcgagatccagacctccgtccgcctcgtcctccccggcgagctcgccaagcacgccgtctcggagggtaccaaggccgtcaccaagttcacctcgtcttagccgccttgttgtaggcgtcgttgttgtctgcttctcaagcaagcactgtcatgtgccgcttctcatggcagtagtggtggttggctggtgtgtgtaagtggtgcagtggcttttgcctgtgttatgaatttagtcatggtggtaatgtattgctatggttatttaaaaaaaaaaaaaaaaaaggccccta

SEQ ID NO: 1708 - DNA, 338 bp, Zea mays
  unsure (1)..(338): unsure at all n locations
  Clone ID: TF_LIB4729-002-R1-K1-F1
caaccactctttcccaatccaccgccggcttggttcgcccatcttcgcgccaagcaccgaatctccgatggcccgcacgaagcagacggcgcgcaagtcgacgggcggcaaggcgccccgcaagcagctggccaccaaggcggcgcgcaagtcggcgccggcaaccggtggcgtgaagaagcctcaccgcttccgccccggcaccgtcgcgctccgggagattcgcaagtaccagaagagcacggagctgctcatccgcaagctgccctttccagncgcccttcgtcccgntggggatcggcgcagggattttccaaggacccgaaccttcccgcttt

SEQ ID NO: 1709 - DNA, 488 bp, Zea mays
  Clone ID: TF_LIB3595-030-Q1-N6-E12
agcaacctacagagaacaaggcatttcttcttgcattttaaatagcaaagggcagcttgcaacagggcacatacacacacaagcacatttcgcccatctacggcctacgcataaccgcatactggtatcagagggcctgctaaacatcagatcactccagacagcacagcctacgccttattgggggacttggcggtcttattgggcgactttgcctccttggtccccacactgaacccctgctcccccggcttgttgggcactacaacatggtcggtattggggagcacacccgcgggagcgatagacacgccgtccaacaagtatgcaagctccttatccttgacgatcacgcagaagcacctggctcgtgataatgcgagtcttctggtggctcctgggaagacaccggcgagctcaacaacctcaccacgcaggtattcaacaacagggggaaggcaaaccggggccccagctcccacacgctg

SEQ ID NO: 1710 - DNA, 327 bp, Zea mays
  unsure (1)..(327): unsure at all n locations
  Clone ID: TF_LIB4668-005-R1-K1-C12
cgcaccttcatctccccagcatccctattctgagccttccatcctcagtcgctcggtggcccgcacgaagcagacggtgaggaagtccaccggcggcaaggcgccgaggaagcagctggcgactaaggcggcccgcatgtctgcccctgcgaccggcggcgttaagaagccccaccgcttccgccccggcaccgtcgcgctccgggggaggcgctcgccccngacgagctcggggctgctgatccgctcgctgccgttcccgcgcctggtgcggggggtcgcgctgggctttttgaccgccctccgcttcccccgcgccgcgggctc

SEQ ID NO: 1711 - DNA, 608 bp, Zea mays
  Clone ID: TF_LIB4979-055-R1-K1-B6
attattcaaaaccgccctctgtctgcaactccagcacagtttatcttcgtttgcgctttctcccctcttccgcaacatacttctcatgtcactcttccggattccctctgctctttacctaaaaaaaggaaccatgcgggcgaaaggtaaggggatcgagtcagaagccgccgacaaggtcacggccaggagctctcaggctgccctccagttccccgtggcaataatcgacaaattcctcatacccgcaaagtatgccgagagagtcccccccgtacctcctgtctacctccctgacgtgctcgagtatcttgctgctgatggtcttgagttgtgcggcaatgcggcacgagactccaataatacccggatcgtaccttgtcacatccagctcggcgtacgcaattacgaagatgtctcccgcttggtgcatacggtcgaccatcggtagtgccgaagatatgccctgcatccatagaccttttgctcccgaagaaaggcgtccactgtagcgaccaaggtgcgaatgtcgaccaggactaacgccttgactacgccaggtgatacctccagtatgctgacggatctgcatgtgtctgtgtactacg

SEQ ID NO: 1712 - DNA, 437 bp, Zea mays
  unsure (1)..(437): unsure at all n locations
  Clone ID: TF_LIB3357-037-P1-K1-D9
tatnctcgtattttacttgcaaccgattgcctatccctctaccaacccaagaccgatggcgccggaggccgagaagaagcccgcggcgaataagccggcggaggacgagcccgcggtggataagactaccgccgggaagaagcccaaggcggcgaagcgggtccccgcgggcaagtccgccggcaaggagggcggcgagggcaagcgtggcatgaagaatggcaagatgagcgtggagacgtacaagatctacatcttcaaggtgctgaagcaggtgcacccggacatcggcatctcctccaaggccatgtccatcatgaactccttcatcaacgacatcttcaagaagctggccggcgaggccgtcaagctcgcgcgctacaacaagaagcccaccatcacgttccgcgagatccagaccttcgtgcgcctcgtgc

SEQ ID NO: 1713 - DNA, 593 bp, Zea mays
  unsure (1)..(593): unsure at all n locations
  Clone ID: TF_ZmC653_25
aacccgcatcccacacactcatccacagctcgcagccgtattcctgtctcgtatcctctctcgccgctccgatggcccgcacgaagcaaacagcaaggaagtcgaccggcggcaaggccccccggaagcagctggccactaaggctgcgcgcaagtcggccccggccaccggcggcgtgaagaagccccaccgcttccgccccggcaccgtcgcgctccgcgagatccgcaagtaccagaagagcactgagctgctcatccgcaagctccccttccagcgcctcgtccgcgagatcgcgcaggacttcaagactgatctgaggttccagtcctccgccgtcgcggcgctgcaggaggccgccgaggcgtacctggtggggctcttcgaggacaccaacctttgcgcccgtcgtgctgctcgttgttgtagtgttactagaagtagatggtggcattcgtttcgtggcttccttatcctgtaggagtaatgttctagatgtcttggcttcagtgcaatggactgtgattgctcatttctgaaatttatcaatgaacttgttctgaaaaaaaaaaaaaaaaaaggggnncttgag

SEQ ID NO: 1714 - DNA, 474 bp, Zea mays
  unsure (1)..(474): unsure at all n locations
  Clone ID: TF_LIB3608-043-Q1-K6-H7
ttcgagcatcggcgcgcagtcccgggggggggggcgcggggaacagctggcgaccaaggcggcgcgcaagtcggcccctgcgaccggcggcgtgaagaagccgnaccgtttccgcccgggcaccgtggcgctgcgcgagatccgcatgttccagaagagcacggagctgctgggggggggggggcccttccagcgcctggtccgcgagatcgcgcaggacttcaagaccgacctccgtttncagtcctccgccgtcgccgcgctgcaggaggctgccgaggcctacctcgtcggcctgtttgaggacaccaacctntgggccatccacgcctagcgcgtgaccctcttgcccaaggacatgcagttcggccgccgtatccgcggggagcgcgcataggctgtccgccggataggccggtggtcctttgcgcagtctcttctctgaagcttgtacttgtggtcggggtccgtgtg

SEQ ID NO: 1715 - DNA, 296 bp, Zea mays
  Clone ID: TF_LIB3227-027-P1-K1-C8
cttaaaaactgattggcgttaacagagacatgcggtgcttgcactagaggagggtgttgatgcataccttgttggcctgcatgaggacaccaacctgtgcgccatgcatgctaatcgtgtgaccatcatgcctaatgacattcacctggaaaggaggatccgacgtgagagggcctaatatccacctcaaacatagggacaaatacatgaagatctggggttattgataatacggggccattgtaaggtcatatgagtagggtacggttggagcatcgcaagattcatgctatgat

SEQ ID NO: 1716 - DNA, 397 bp, Zea mays
  Clone ID: TF_LIB3960-003-Q1-K6-F5
cttgtactgggaacgccggagtagcatcctggccgtgagcggagcaggcggtaaggccaataaggcgctgtggcgcgcaaggccgaccgggccgacgaataataggtgtctcggtcctgcagggccgggctgcagttccccgtcagccgcgtaagggcggtacctcaaaaaggccgttacgcgcatggtgtacgcacagctgcccccgtctacctctgcttcgaactggagtacttacaggtcgaggcgttctagcttgcctgcaacgcgtaaaggaacatcaagaagacacgcatcatcccgcgccacgtgctcatctccatccgaaacgaacaggagctaaagaagctgctgaccggtgtcaccatgctccacagcggcctactctccaacattc

SEQ ID NO: 1717 - DNA, 612 bp, Zea mays
  Clone ID: TF_LIB4746-094-R1-K1-H9
cattgggtacctcgaagccggccgggaatcacactttctgccttcctccaacactcggcagagatatacgcttaatgttaagccccgggcaggatcactcacgcaagcgcagagagatgccatctgagtcgaacaccactcgcgtcttaggcccgctcctatccctagctgcggacatggcgacctccgagcaactctggaccgaagtctgcccccaccactgctggagtgaacaagcttcaccgctaccgccctggaactgttgccctccgtgagatccgcaagtatcacaagagcactgagctgctgatcaggaagctgcccttccagaggctcgtcaagggaaattgcacaggtacttcaaaactgatttgctgtttccagagccatgcggtgcttgacctccaggaggctgctgaagcataccttgttggcctgtttgaggacaccaacctgtgcgccatccatgctaagcgtgtgaccatcatgccaaaggacattcagctggcaaggaggatccgcggcgagagggcctaatcgccacctcaaacatcgtgacaaaaacatgaaggcctggggttattgttaatctggtgccattgtaaggacata

SEQ ID NO: 1718 - DNA, 710 bp, Zea mays
  Clone ID: TF_LIB4766-118-A1-K1-D8
tacctcgaagccggccgggcataatctctcatacacatcactcgtcaacagctctcagacgaattcgtgcatcgaatcctctatcgccgcacccatgtcccgcacaaagcgcaaccgatgaagacgaaccggcgcgaggccccccgcaaccacctgggcactaacgctgcgcgcaagccggacccgcgccccgtcggcgcgaagaagccccaccgcttccgacccttcactgtcgcgctccgcgagatccgcaaggaccacaacaggagtgacatgatcatcttcaagctacccttcaagcgtctcgatggcgagattctaaagaactgtcaagatatgatctgagggcccagccactctctttcgtagaagaagctacaggaggccgtcgaagaggacctggagggactcttctacgtacaccagccttagtctcatacacgccacgattgtcactatcatgaccaaggacatccacatagcgcgccggatctggatagagaggcatagagcgcccgtggtgcagctctgcttggtagtggtactacaagtatatggggggtatcgttacctgactccgtgatcctggatgagaaattgctctagatgccttgacttcagtgcgatggactgcgatagctcttttgtgaagtcatcaatggactagttcttgcagaaaaacgattgaataaaagaaaaaagcggcccct

SEQ ID NO: 1719 - DNA, 337 bp, Zea mays
  Clone ID: TF_LIB3279-005-P1-K1-D5
gcggctggcagacattcaagtcgttcgataggaagaagggcagccaaggccctggacaggatgtttcggaccaagcagaccgaccgtaagtccaccggaggcaaggccccgcgcacgcagctcgccaccaaggcggcgaggaagtcggcgccaacgaccggcggcgtgaagaagccccacaggtacaggcccggcaccgtggcgctgcgcgagatccgcaagtaccagaagagcacggagctgctcatccggaagttgcccttccagcgcctggtccgtgagatcgctcaggacttcaagacggatctgcggttccagagccacgccgtcctggccc

SEQ ID NO: 1720 - DNA, 895 bp, Zea mays
  Clone ID: TF_ZmC119_1366
agacgaacatacaataagacacaaggacgatactagagcaggacacatcccatccacagatctagacacgaacatgctacagcacacagcgcaaatgaagaccctactttctaagccttcttgggcaggagcacggagtggatgttggggaggacgccgccgtgcgttatggtgacgccggccagcagcttcccgagctcctcgtcgttgcggatcgccaggagcacgtggcgcgggatgatgcgcgtcttcttgttgtctttcgccgcgttccctgccaactccagcctcgtgccgaattcggcacgaggagaactagtctcgagtttttttttttttttttttttaattaatataatataaataagtatcattcaatatatcataaataagcattgtcaaataacgcatacataagtgtactctaaatctaaactaaaatacaattgtttgcactaatgttaagcctaactttatatgaattcaagtctccacacttttgcggccaccaaatttgaattacattctatgttttcttggacaacaaataggagaaaactagacatagcatgcaaaaagctccaagcagcacgtcgataacctcgaagttgcccttgtgcttctcccagttcttgatcaaggatgtgaagagcaaatcttctggtaactttaactacgctgacaaatataatcaaacataccacaaattcatttcagacttttacatagtttttttaacagacttggtaaattttgaaggatgtattgaatgtatattattcttaaaatttagtcaaacaaattggtggtgcataactcaaagttaataactcatgcaaccaactcaatttgtgtataacaaaactatattaatacctacttacttgtaaaactt

SEQ ID NO: 1721 - DNA, 426 bp, Zea mays
  unsure (1)..(426): unsure at all n locations
  Clone ID: TF_LIB3357-026-P1-K1-B7
agtttctccttccactgctttgaccggtgattcgacttaccacaaactatccggttgtaccggacgaactagacaagggcgcaacacgaccggctgcaaggtgtcccgcaagcaggtggtcaccaaagctgcgcgcaagtcacgagccggcgaccggtggcgttaataattctcaccccttccgccccggcaccgtcgcgctccgggagattcgcaagtaccagaagagcacggagctgctcatccgcaagctgcccttccagcgcctcgtccgtgagatcgcgcaggatttcaagaccgacctccgcttccagtcctccgctgtcgccgcgctgcangaggccgccgaggcctacctcgtggggctcttcgaggacaccaacctctgcgccatccacgccaagcgcgtcaccatcatgcccaaag

SEQ ID NO: 1722 - DNA, 519 bp, Zea mays
  Clone ID: TF_LIB4071-010-Q6-K1-F11
ccccgcgtccgctcgtctgctcgcatttgcctcccaatccatccccgcctgcaaacccgaactccaagtcgccccgcatcgatggcgcccaaggccgagaagaagcccgcggcgaagaagccggcggaggaggagcccgctgccgagaaggcgccggccgggaagaagcccaaggcggagaagcgtgtcccagcaggcaagtccgccggcatggagggcggtgagggaaagaggggctcggaagaagggcaagaagagcgtggagacctacaagatctacatcttcaaggtgctgaagcatgtgcacccggacatcggcatctcctctaaggccatgtccatcatgaactccttcatcaacgacatcttcgagaagctcgccgtcgaggccgtcaagctcgcgcggtacaacatgaagcccaccatcacctcccgtgagatccatacctccgtgcgcctagtcctacctggggagctcgccaagcacgccgtctcctagggcaccaaggccgtcaccaa

SEQ ID NO: 1723 - DNA, 729 bp, Zea mays
  unsure (1)..(729): unsure at all n locations
  Clone ID: TF_LIB4729-048-R1-K1-C1
atcccaaattctaacccaagaacaaaaatggccaccgccaccactgaagccgaagtccgtgagtccctcggcacgaagttcggtcgcctcaaggaacaggcgaaagacatggcctccaggcaccccgtcgctggagccgcggccgtcatcgctgtcagcgccgtgggcgcctacttcttgtggcccgtggcagccccggccgtggccatgatgaaggcgcctggatccggcggtgtgctcgtctcccgcgcggcgtttctcgcgaagaaggagctgtacttcaagctcttgcgcaccgggggcgttgcggcggcggtcgccgctttggcgtagctgcgcatgcagtagtggtacatgctgttcgtgaacgagcggcgggccggacgtttcaggttgtatgttgaccaagtggttattagtactttcctttcgttggtgttgagtctcgactatcaactcgcaattccgcattcgttccaactcctgagcactttctcctcgtcccagacaagccaatcgaagccgagatacgaccatggactccaccggcaccggagcagggggtaagggggaagaagggagcggccgggcgcaaggtcggcgggccaaggaagaagtcggtgtcgaggtccgtgaaggccggtctncagttccccgtcggccgcatcgggcgctacttgaagaagggccgctacgcgcagcgtgtcggcaccggcgcccccgtctacc

SEQ ID NO: 1724 - DNA, 689 bp, Zea mays
  Clone ID: TF_LIB4976-005-R1-K1-E12
aatagagaatacatactcctcttatttcttcccatccgatccccccttacaaaccaaaaccccaactcgccccgcatcaatggagtgcatggccgagaagaaagccgcggcgaacaagccgccggaggatgagcccgcggacgagaaggggcccgtcgtcaagatcccgaaggtggagaatggggaccccgctggcaaggccgctgtccaggaatgcgtcgagggcatgagttgcaagaagaatgtcagaatagcgtggagatctacaagatctacatcttcgaggtgtctgaagcaggtgcacccggacattggcacctcctccaaggccatgtccatcatgaactccttcattaacgatatcttcgagaagctcgctgctgaggccgtcaagctcgcgcgctataacaagaagtctaccatcacctcccgtgagatccagacctccgtgcgcctcgtccttcccggggagctcggcaagcacgccgtctccgaggggaccaagggcgtcaccaagttcacctcggcctatgctgctcggccgccgcttgcaggattctctcctgagttcacgtctcttgctgtagatatgtgctgctgcctgctgggcttctatggatgctatctatctggctgtagcaactgtagtatctgataggacccgtatgaagcttattcacccagctata

SEQ ID NO: 1725 - DNA, 448 bp, Zea mays
  unsure (1)..(448): unsure at all n locations
  Clone ID: TF_3341036
ttttttttctagaaacttcgacaggggtaactgattcattcagcaattatttttttttctagaaacttcgacaggggtaactgattcattcagcaattatgaattaaacaggatcgtagcaacgtgcggcggcaccctaagaggatgtaaacttggtaaccgccttggtcccttcggatacggcgtgcttggcgagctcgccggggaagacgaagcgcaccgaggtctggatctcccgggaggtgatggtgggcttcttgttgtancgggcgaacttggcggcctcggcggcaaacttctcgaaaatgtcgttgatgaaggagttcatgatggacatggccttggacgaaatgccaatgtccgggtgcacctgcttgagcaccttgaaaatgtagatcttgtacgtctcgacactcttcttcgccttcttctttcccttcttctcgcc

SEQ ID NO: 1726 - DNA, 589 bp, Zea mays
  Clone ID: TF_LIB4979-103-B1-K1-A5
atcccattttccgtgtcctcgtccgtgccgtaccagatctctatcattctcggatcgtcactcgctccaccacacacctgtaggcatggactccagcgcagacattatcaaggagacagaagggtgtggccgcggcgcaaggcatgcgcccccaggaacaactcggtgacgcagttccgtcaaggacgggctgcagttccccgacagccggatcgggcgctacctgaagaaagaccggtacgcgcagcgcgtgggcactggcgcccccgtctacctcgccgccgtcctggagtacctcgccgccgaggttctggagttggcagggaacgcggcgaaagacaacaagaagacgcgcatcatcccgcgccacgtgctcctggcgatccgcaacgacgaggagctcgggaagctgctggcaggcgtcaccatcgcgcacggcggcgtcctccccaacatccactccgtgctcctgcccaagaaggcggcggagaacgcggccagcgccggtagcaaggagcccaagtcccccaagaagggcgccaagtcccccaagaaggcttacaaagtagggacttcatttgcactgtgt

SEQ ID NO: 1727 - DNA, 422 bp, Zea mays
  unsure (1)..(422): unsure at all n locations
  Clone ID: TF_LIB4669-003-Q2-K1-C9
gtaccccttgtggtcacggccgggcctcacacaagnatctcattctccctagcagcatatcctcgtgcaacgcaaagcgctagccttcctactgtcccgatggcccgcacgaagcagacggcgaggaagtccactggcggcaaggcgccaaggaagcagctggccaccaaggcggcgcgcaagtctgccccggcgaccggcggagtgaagaagccccaccgtttccgccccggcaccgtcgcgctccggggagatccgcaagtaccagaagagcacggagctgctgatccgcaagctgccgttccagcgcctgtgcggagatcgccagacttcagacgacttcgcttcagagctccccgtcgccgcgctgcaggaagcgtccgaggcctacctcggtcgggtctctttcgaaggacacccaa

SEQ ID NO: 1728 - DNA, 498 bp, Zea mays
  Clone ID: TF_ZmC653_31
ggcacgaggaatctccctagcaatctctagcagcagatcctcgtgcgaagcaaagcgctagcccccttcgtactgtcccgatggcccgcacgaagcagacggcgaggaagtccactggcggcaaggcgccaaggaagcagctggccaccaaggcggcgcgcaagtctgccccggcgaccggcggagtgaagaagccccaccgtttccgccccggcaccgtcgcgctccgggagatccgcaagtaccagaagagcacggagctgctgatccgcaagctgccgttccagcgcgtcaccatcatgcccaaggacatccagctcgcccgccgtatccgtggggagagggcctaggcgtcgtcccggtggaggtggaagtagtagtcgccgtttctgtcatcactgtctggctagaaggtgtagagatgtgccgggttctgtagtttgggttatcggtcaaatcatgatgtagttgggtcttccctgctgtaatttaactatg

SEQ ID NO: 1729 - DNA, 531 bp, Zea mays
  Clone ID: TF_LIB3637-196-Q1-K6-G12
cttcgttcccagcacagaccaatcgaaagccgtaaatacgaaccatggtactaccaccggacaccggtagcaggggcgtaaggggaaataaggagcggccgggcgcaaggtcggcgggccaaggaagagtcggtgtcgaggtccgtgaaggccggtctccatttccccgtcggccgctcgggcgctacttgaacaaggccgctacgcgcagcgtgtcggcaccggcgcccccgtactacctcgccgctgtcctcgaaaccttgccgctgaggttctggagctcgccggtaatgctgccagggcacaacaagtaagactcgcattattccgcgccacgtgcttctggcgatccggaacgacgaggagcttgggaagctgttgggcggcgtgaccatcgctcacggaggtgtgctccccaatatcaaccctgttctgctgcccaagaagaggcggagaatgcgtccagtggcgggagcaaggaggcaaagtcgcccaataagccgccaagtcccctaagaagcatagactgac

SEQ ID NO: 1730 - DNA, 413 bp, Zea mays
  Clone ID: TF_uC-zmflB73006d03b1
cgccctattccaatggcgcggggtttttttaagaagcccgccgtcttttcccctgcggaggaggagccggcggggataatgcccggcggggaagaagcccaaggctgagaagcggttcccgcgggcaagtccgcaagcacagaaggcggcgagaagaacgggatgaagaaggcaaagaagtcggtggagacgtacaagatctacatgttcaaggagctgaagcaggtgcacccggacattggcatctggtccaaggccatgtgcatcatgaactcctccatgaacgacatctttgagaagctggcggccgatgcggacaagctggcgcggtacatcaagaagcctaccattacgttccgcgagatccataccttcattggcctcgtcctccccggtgagctcgccaagcaccc

SEQ ID NO: 1731 - DNA, 620 bp, Zea mays
  Clone ID: TF_ZmC653_42
cctcgaggcggcgggcgcctcgcatcaaccactctttcccaatccaccgccggctcggctcgcccatcttcgcgccaagcaccgaatctccgatggcccgcacgaagcagacggcgcgcaagtcgacgggcggcaaggcgccccgcaagcagctggccaccaaggcggcgcgcaagtcggcgccggcaaccggtggcgtgaagaagcctcaccgcttccgccccggcaccgtcgcgctccgggagattcgcaagtaccagaagagcacggagctgctcatccgcaagctgcccttccagcgcctcgtccgtgagatcgcgcaggatttcaagaccaacctctgcgccatccacgccaagcgcgtcaccatcatgcccaaggacatccagctcgcgcgccgcatcaggggcgagagggcttgatctcccgttgtcgtcgtccacgttgttgggcctttcctctgtgtctctgcttgtagaatccttgcttctgttcggttccttctgttcgcatgatggtgttcgtagtgttaggagttgcattttctaatctgcttgttcttgcaccggtgcctctgaagtggcgtttccctctatcttaatggaaatggaatgtgcttt

SEQ ID NO: 1732 - DNA, 702 bp, Zea mays
  unsure (1)..(702): unsure at all n locations
  Clone ID: TF_LIB4732-125-Q1-K1-D7
gaaaaaanatannaaaaaaaaaaaaaaaaaaaaaaaaaaaaaaaaaaaaaaaaaaaaaaaaaaaaaaaaaaaaaaaacccccccccgctcaccggggtttggttttctcccctcttctgcaccacttctcgctccggattccggattccctctgctctttccctaacgaaggtagccatgggggggaaaggtaaggcgatcggttcaggcgccgccaaaaaggccacgtccagaagctccaaggttggcctccagttccccggggaaaggatcgccaggttcctcaaggccggaaagtatgccaagagagtcggcgccggcgcccctgtctacctcgttgccgggctcgagaatcttgctgctgaggttcttgagctggccggaaatgcggcacgtgacaacaaaaaaacccgaatcgaaccgcgccacatccagttcgccgtccgaaacgacaaaaagctctcccgcttgctgggcacggggaccatcgctagggggggggaaaggcccaacatccataaccttttgctcccaaaaaaggccgggggcggcagcgccaaggttgcggttggtgacaaaaactaagtccttgactacgcctgggggcacctccaggatgctgccgaatcaacatgtgtctgtgtagaacgttaggtgttcgttgaaactggggtatggtgggttgctgaaacactgctaaac

SEQ ID NO: 1733 - DNA, 570 bp, Zea mays
  Clone ID: TF_LIB5024-002-A1-K1-D11
taggggccttttttttttttttttttcttttttttttttttttttattagaaaacttcaacaggggtaactgattcattcagcaattataacaaattctacattgttgcacgaacaacctagcacagtcctaaatatgagaaaatttagcaacgtgcggcggcggcggcaccctaagaggatgtaaacttggtaaccgccttggtcccttcggagacggcgtgcttggcgagctcgccggggaggacgaggcgcaccgaggtctggatctcccgggaggtgatggtgggcttcttgttgtagcgggcgagcttggctgcctcggcggcgagcttctcgaagatgtcgttgatgaaggagttcatgatggacatggccttggacgagatgccaatgtccgggtgcacctgcttgagcaccttgaagatgtagatcttgtacgtctcgacgctcttcttcgccttcttctttcccttcttctcgccgccctccttgctcggaacgcgcttctccgcccttggtttcttctcggccttctcctccgccggcttcttctccgcgggcttcttct

SEQ ID NO: 1734 - DNA, 690 bp, Zea mays
  Clone ID: TF_ZmC369_129
ccggccgggactagtcgaaagctacgagcactcgccgccactcaccagcaaattcccaagccgccccttcccccatctctttcgcgccccatttgatcgattcctgatggcgcccaaggccgagaagaagcccgcggagaagaagccggcggaggagaaggccgagaagaagccaagggcggagaagcgcgtgccgagcaaggagggcggcgagaagaagggaaagaagaaggcgaagaagagcgtcgagacgtacaagatctacatcttcaaggtgctcaagcaggtgcacccggacattggcatctcgtccaaggccatgtccatcatgaactccttcatcaacgacatcttcgagaagctcgccgccgaggcagccaagctcgcccgctacaacaagaagcccaccatcacctcccgggagatccagacctcggtgcgcctcgtcctccccggcgagctcgccaagcacgccgtctccgaagggaccaaggcggttaccaagtttacatcctcttagggtgccgccgccgccgcacgttgctaaattttctcatatttaggactgtgctaggttgttcgtgcaacaatgtagaatttgttataattgctgaatgaatcagttacccctgttgaagttttctaatatattaatcttgctaggaaaaaaaaaaaaaaaaaaggccccta

SEQ ID NO: 1735 - DNA, 668 bp, Zea mays
  Clone ID: TF_ZmC369_46
gccggccgggtccgactagtcgaaagctacgagcactcgccgccactcaccagcaaattcccaagccgccccttcccccatctctttcgcgccccatttgatcgattcctgatggcgcccaaggccgagaagaagcccgcggagaagaagccggcggaggagaaggccgagaagaagccaagggcggagaagcgcgtgccgagcaaggagggcggcgagaagaagggaaagaagaaggcgaagaagagcgtcgagacgtacaagatctacatcttcaaggtgctcaagcaggtgcacccggacattggcatctcgtccaaggccatgtccatcatgaactccttcatcaacgacatcttcgagaagctcgccgccgaggcagccaagctcgcccgctacaacaagaagcccaccatcacctcccgggagatccagacctcggtgcgcctcgtcctccccggcgagctcgccaagcacgccgtctccgaagggaccaaggcggttaccaagtttacatcctcttagggtgccgccgccgccgcacgttgctaaattttctcatatttaggactgtgctaggttgttcgtgcaacaatgtagaatttgttataattgctgaatgaatcagttacccctgttgcaaaaaaaaaaaaaaaaaaaggccccta

SEQ ID NO: 1736 - DNA, 654 bp, Zea mays
  Clone ID: TF_ZmC369_75
atagtcgaaagctacgagcgctcgccgccactcacccgcaaattcccaagccgccccttcccccatctctttcgcgacccatttgatcgattcctgatggcgcccaaggccgagaagaagcccgcggagaagaagccggcggaggagaaggccgagaagaagccaagggcggagaagcgcgtgccgagcaaggagggcggcgagaagaagggaaagaagaaggcgaagaagagcgttgagacgtacaagatctacatctttaaggtgctcaagcaggtgcacccggacattggcatctcgtccaaggccatgtccatcatgaactccttcatcaacgacatcttcgagaagctcgccgccgaggcagccaagctcgcccgctacaacaagaagcccaccatcacctcccgggagatccagacctcggtgcgcctcgtcctccccggcgagctcgccaagcacgccgtctccgaagggaccaaggcggttaccaagtttacatcctcttagggtgccgccgccgccgcacgttgctaaattttctcatatttaggactgtgctaggttgttcgtgcaacaatgtagaatttgttataattgctgaatgaatcagttacccctgttgaagttttctaatatattaatcttgctagc

SEQ ID NO: 1737 - DNA, 721 bp, Zea mays
  Clone ID: TF_ZmC653_54
ccggccgcggctattcgtgtcctggcatccgcagagagcttgttccgtccaggcaaccaaaaagcaagttgccccgccgcgcagaggaagaagagagcagaggaggatggctcgtacgaagcagaccgcccgcaagtccacgggaggcaaggccccccgcaagcagctcgccaccaaggcggcgaggaagtcggcgccgacgaccggcggcgtgaagaagccccacaggtacaggcccggaaccgtggcgctgcgcgagatccgcaagtaccagaagagcacggagctgctgatccgcaagctgcccttccagcgcctggtgcgcgagatcgcgcaggacttcaagacagacctccggttccagagccacgccgtgctggcgctccaggaggccgccgaggcctacctcgtcggtctcttcgaggacaccaccctctgcgccatccacgctaagcgcgtcaccatcatgcccaaggacatccagctcgcccgccgcatccgtggcgagcgcgcgtagccatcatctccggggatctgatgaatgtctagttaccaaacaaataggctgtattagcgtcgttgttctgtattcgttattttggattcggttgcagtgaaaaacagctttactaatctgaaaaaaaaaaaaaaaaaaaaaaaaaaaaaaaaaaaaaaaaaaaaaaaaaaaaaaaaaaaaaaaaaaaaaaaaaaaaaaataatg

SEQ ID NO: 1738 - DNA, 792 bp, Zea mays
  Clone ID: TF_LIB4756-019-Q1-K1-F11
ccggccgggatcgtcttgatactccacgcccacaacccgctcactcacgccgctccgtccacactcccgtctttttcgactcccacttccaaaaacaacccccaccaaaaaactcattcaaaatgactggcggaaagtccggaggcaaggccagcggctccaagtccagcgcccaatcgtaagtagccactgattgcatgctttgcagctttttgcctttacctgggctgcgcgcctcgtgctctctggtgttgcaacttgtttgcttttgacgcgtcttttgtctcaattgacgcgtcttttttcgcatctcttcaatattacatcatttgctaacagcaattccagtcgttcatccaaggccggtctcgctttccccgtcggtcgtgtccaccgtctcctccgcaagggcaactacgcccagcgtgtcggtgctggtgctcccgtctacctcgctgccgtccttgagtacctcgctgctgagattctcgagttggccggtaatgctgcccgcgacaacaagaagacccgtatcatcccccgccatctccagctcgccatcaggaacgatgaggagttgaacaagcttctcggacacgttaccatcgcacagggtggtgtcctccccaacattcaccaaaaccttctgcccaagaagactgccaagcctggcaagggtccttcgcaggagctctaagcgcattttgctttcgagtttcttcttcacggcgtggttacttcatgggtctttttcgtctgcaatgataatgggagtcggtctgggttttgggt

SEQ ID NO: 1739 - DNA, 303 bp, Zea mays
  Clone ID: TF_700071688H1
caactcctcgccaaatccacgctgctattaactcgccgtcgtccgcgccaagcagcaaagctccgatggtccgcactaaacagacggcgcgcaagtcgacgggcggcaaggcgtcgcgcaagcagctggcgaccaaggcggcgcgcaagtctgcgtcggcgagcggcggcgcgaagaatccgcaccgcttccgccgcgtgcacgtcgtgctcctggagatatgcaagtaatagaagaccatggagctgctgatgcgtaacttggacttccagcttctcgctcgtgacatcgctcaggacttca

SEQ ID NO: 1740 - DNA, 393 bp, Zea mays
  Clone ID: TF_jC-zmX700553022b1
gagctcactagtctgttgccgccctttttttttttttttttatggggggtttttttaaaaaaagggggggggatccacaaataaccaactagctggatgcaataagcctcgttactgacccatgaaataacaaatgctaccgggggagaccaaacacagcagcccctaactacagaaggacacccaaacatacaagggaagcctgcaagcgggggcctcccagcctaggacgaggggaacttggggacggccttggccccctcggaaaccgcgtgcttgacaagctcccccgggaggaccaggcccacggaggtctggatctcaccgtaggggatggtgggctttttgttgtaccgcgcgagcttggtggccttggcggcaagcttctcgaaa

SEQ ID NO: 1741 - DNA, 314 bp, Zea mays
  Clone ID: TF_LIB3062-034-Q1-K1-D11
gcgcagagcctgattcatctccattcgaaacaccctatcacccacactctcacttcgtccgcagcctgaatcctcgtaacgatggctcgcacgaagcatactgcgcgcaagtccacgggcggcaaggcccctatgaagcagctgtcgaccaaggcggcgcgcaagtcagcccctgcgaccgtcgtgctaaagaatcctgaccgtttccgtccgcgcaccgtggcgctgctctagatccgcaagtaccacaatagcactgagcttctcatccgcaagctgtcctttcagcgcctggtccgcgagatcgcgcagga

SEQ ID NO: 1742 - DNA, 242 bp, Zea mays
  Clone ID: TF_LIB3067-001-Q1-K1-A4
gtacgaagcagactcgtccgcaagtccactcggaggcaaggccccgcgcaagcagctcgccacgaaggcggcgaggaagtctgcgccgactaccggcggcgtgaagaagccccacaggtacaggcccgtgacggttgctctgcgcgagatccggatgtaccagtatagctcggatctgctgattcggatgttttacttcatgctttttgttcgtaagatttctcttgacttgtagtcggttg

SEQ ID NO: 1743 - DNA, 408 bp, Zea mays
  Clone ID: TF_LIB3587-230-Q1-K6-H6
cccattcctcgcgcggcgaccacccgattcgaagcgtgcggagagaccgaagaagcgggagagatggctcgtaccaagcagactgctcgcaagtccacgggagggaaggctcccaggaagcagcttgccaccaaggctgcccgttagtctgcccccaccactggtggagtgaagaagcctgaccgttaccgtcctgaaactgttgccctccgtgagatccgtaagtattataagagcactgtgctgctgatcaggaagctgtccttccagaggctagcaagggaaatcggacaggacttcaaagctgatgtgagtattcagagccatgcggagctagcccttcaagaggctgatgaagcataccttgttagactgtataatgacaccaacctgggcagcgtcgcatgc

SEQ ID NO: 1744 - DNA, 599 bp, Zea mays
  Clone ID: TF_LIB4766-040-R1-K1-F3
cctcgaggccggccgggccaagtccaagaccttcccaaaaaatccctcattttcttcgaggcgaggagagcgtgaaagacagggcaccggcagcgacgacgtcggggcgcggcaagggcggcaaaggtctgggcaagggcggagcaaagcgccaccgtaaggtgctccgtgacaacatccagggcatcaccaagcccgcgatccgtaggctggctcggaggggcggcgtgaagcgcatttcggggcttatctacgaggagacccgcggcgtcctcaagatcttcctcgagaacgtcatccgcgacgccgtcacctacaccgagcacgcacgccgcaagaccgtcaccgccatggacgtcgtctacgcgctcaagcgccagggccgaaccctctacggcttcggaggctaggctggatgcctcttctccttgctatcgtggatgcctgtttgttgttagggttacttcgtttagtttcttgtctgtgacgtgttggactattgttagtagtattcttgaagttgtgtttcgaatgtaatccaatcttatcgttcgagaattgaaatgattcctgagaaaaaaaaaaaaaaaaaagcggcc

SEQ ID NO: 1745 - DNA, 2480 bp, Zea mays
  Clone ID: TF_ZmC697_106
gctggtgccggactgacggttagagatggcccacccctcctccgccgccgccgtatcctccacggcgcccgctgcaaaccctagttatggcgcccgcgaggaaggaggcgcccgctctccgccgtctccgtctccgtctccgtctcagagggggcgggccaaggtggtgatcgttatgggcgccacgggcgccggcaagtcgcggctggccgtcgacctcgcggcccacttcgccggcgtcgaggtggtcagcgccgactccatgcagctctaccgcggcctcgacgtcctcaccaacaaggctcccctccacgagcagaacggtgttcctcatcatctacttagcgtgattgatccctctgtcgagttcacttgccgtgatttccgcgaccgtgccctgccgattatacaggaaatagtggaccgcggtggcctccctgtggttgtcggcggcacaaacttctacatccaggctctcgttagcccattcctcttggatgatatggcagaagaaatgcagggctgtactctgagagatcacatagatgatggtataggccttaccgatgaagatgaaggcaatgggtttgaacgcttgaaggagatcgatcctgtggctgcgcagaggatccatccaaacgaccatagaaaaatcaaacgctacctcgagttgtatgcaaccacgggtgccctacccagcgatctgttccaaggagaggccgctaagtataaacttgctgggaattcctggtcatcatgtcagaacagaaatggggtcggcctagtaactccagactctactgctgtttcctgtgggtagatgctgatcttcaagtcctggacagttatgtcaacaaaagggtcgattgcatgatggatggtggtctgctggacgaagtatgcagcatatatgatgcggatgctgtctatacccaggggctgcggcaggccattggggttcgtgagtttgatgagtttttcagagcatatttagccagaaaagaatctggtgagggttcctgtgcaagcctgttaggtatgcatgacgatcagcttaagagcttgttggacgaatttttttcccagctgaaggcaaacactcgcagactagttcgacgtcaaagacggagattgcataggctgagtaaagattttgggtggaacttgcatcgtgttgacgcaacggaagcattcttctgtgccactgacgactcatggcaaaagaaagttgtcgaaccatgtgtggatgtcgtaagaaggttcttgtcggacgattccactgttttgccaagcacaagcgcaagtgacccctcttcaagagagctgtggacgcaatatgtgtgcgaggcctgcgacaaccgggtgctgcgaggtgcgcacgagtgggagcagcacaggcaagggcgaggccaccggaagcgagtgcagcgcctgaagcggaagagcctgaggccatggccatcgctgctgccccaagaccgcagctgatggtaactttttcacagcagaaccggcgaggagtgggacggggacgttgacgtggacatggtcgtctcgtcccacccaaaaaagcgtgccagcatgacagcgacatgctttcccaatcccgaattcccggcacgtcgacggggggaatacctccatgccttttagcagctgaagaagcaggcaccaaagaactgcttgtcaaaagtattgtaccacacgtacgacgggtctagaagccacagaaacgtagtgtggaagtggatagatacatgaacaatggcccatctttctatactgctaaagtttagcatatgctaaggaggtgtttaagattaaaaaaaaaaaaaaaaaaaaaaaaaaaaaaaccctcagcactagtctcctcttcgcacgagcgcaacaccatccacccaccagttcgaagcggaggcgaccggcaacctgcggcggagatgtcaggcaggggcaagggcggcaaggggctcgggaagggcggcgcgaagcgtcaccggaaggtgctgcgcgacaacatccaggggatcacgaagccggcgatccggaggctggcgaggaggggtggcgtgaagcgcatctccgggctgatctacgaggagacccgcggcgtgctcaagatctttctcgagaatgtcatccgcgacgctgtgacctacacggagcacgcccgtcgcaaaaccgtcaccgctatggacgtcgtgtacgccctcaaacgccagggccgcactctctatggcttcggcggctaggttaggtgtgggtaattgcctgtccaggtgtctcggatctgtggtactagtttggctgccttcctgtgttcgtattgtagtagttgtggtagctggttgctttgtcgtcctgtagtcgtgcttctttgggtctgtaagaaccgctggttcgatgggattggattggacggtgaagtaggaatgttggcatgttagacttttctctaaaaaaaaaaaaaaaaagcggcc

SEQ ID NO: 1746 - DNA, 2218 bp, Zea mays
  Clone ID: TF_ZmC697_131
gccggcctgggttgcgattcacccaagtccaagcaccttcccaaaaaaatcccccattttcttcgaggcgaggagagcgtgaaagacagggcaccggcagcgacgatgtcggggcgcggcaagggcggcaaaggtctgggcaagggcggagcaaagcgccaccgtaaggtgctccgtgacaacatccagggcatcaccaagcccgcgatccgtaggctggctcggaggggcggcgtgaagcgcatttcggggcttatctacgaggagacccgcggcgtcctcaagatcttcctcgagaacgtcatccgcgacgccgtcacctacaccgagcacgcacgccgcaagactgttaccgccatggacgtcgtctacgcgctcaagcgccagggccgaaccctctacggcttcggaggctaggctggatgcctcttctccttgctgtcgtggatgcctgtttgttgttagggttacttcgtttagttccttgtctgtgacgtgttggactattgttagtagtattcttgaagttgtgtttcgaatgtaatccaatcttatcgttcgagaattgaaatgattcctgggcaacattttgcaggcaaaaaaaaaaaaaaaaaacgtctgagagcaaaccagacgaaacaaaccctcctgggctgcttccccttttcgatccccatggcgcaggacgacatcccggagtcctccgcctccggatcccccacctcctccgccccggcggctcgcctcaacgccgccgcgcccgagtttaccccccgatccgccgcccagcaccacggcaacaacgcccatcgccgcggcccgcaccaccaccatcagccgcaccaccacccccactaccaccctcaccagcactaccagccgcggcaccagcaccatcaggcccaggccgaggatgaggggagcgccgccgcgacggcggaggatagggagggccccgctggtgcggtgcaggcgcagcaccggctgcccgaacccgaggcccgcaagctcgtcaagcaggttgaattttacttcagcgatatcaatttggccacaactgaacatctgatgaagttcatcgctaaggatccagatggatttgtgccaatttctgtagttgcatcttttaggaagatccgagagatagtttatgatagatccttgttggttgctgcattacgcacgtcatctgagctggttgtttcagaggatgggaaacatgttaaacgcttacagccctttaatgccgaagaagttcagtctcgtattgttgttgctgaaaatttacctgaggatcaaaagcatcagactctgatgaagattttctcagctgttgggaatgtgaaatctatacgtacctgttatccacaagatatttctccagcagcagccaacagaacatcaaggattgagatgatttttgctaataagcttcattcttttgtggagtattcagctgttgaagatgctgaaaaagcagttgctgaattcggtggtgggggaaactggagagaggggattagagttcgttcactgcttggatgtctgaaacatgggttaggtcaaggaagaaaagtggggatgaggagtatgctgcagatgaagatggccctgacacaactgatcatccacgagactttggaacagatgttaccgcccaaatctcagaaacacatttcgatcaccaggccgaagatggcacccatgacaagggtggaatgaggcagcaggggagagggagaggccgtggaggtagaggcagaggccgtggtcagcattatggccacaacagccgagatggccaccatcctattggcactcccccgtcggagcatccagctgtgccgaagccgcccccgggcccccgcatgccggatggcacaaaagggttcaccatgggccgagggaagccgctcagcattaccattgatgctgctgctaaccctaccaccacggatgctgcttagtcgcagcgtctatgctggtaccggcctattgccctgatcatcagtcttttccaaaccgattgcagtggtcatttactcatgttctaaaccgtttactgtggcgtgttggttcattttgtctgggatttaaaaggaaaggagatggctggtactatgatacatgcgtgtatactaacacccgaagtttagacatgtggacatgtactgtgatatgtagctcttaaattagaaagatgcatacttttgatgag

SEQ ID NO: 1747 - DNA, 1094 bp, Zea mays
  Clone ID: TF_ZmC697_152
agactgatgatcagggcaataggcgggtaccagcatagacgctgcgactaagcagcatccgtggtggtagggttagcagcagcatcaatggtaatgctgagcggcttccctcggcccatggtgaacccttttgtgccatccggcatgcgggggcccgggggcggcttcggcacagctggatgctccgacgggggagtgccaataggatggtggccatctcggctgttgtggccataatgctgaccacggcctctgcctctacctccacggcctctccctctcccctgctgcctcattccacccttgtcatgggtgccatcttcggcctggtgatcgaaatgtgtttctgagatttgggcggtaacatctgttccaaagtctcgtggatgatcagttgtgtcagggccatcttcatctgcagcatactcctcatccccaccttttcttccttgacctaacccatgtttcagacatccaagcggacgcgtgggcggacgcgtgggcggacgcgtgggcggacgcgtgggcgcgtagctctcggtttcggcgatgtcggggcgcggcaagggcggcaaggggctgggcaagggcggcgccaagcgccaccgcaaggtgctgcgcgacaacatccagggcatcaccaagccggcgatccgtaggctggctcggaggggcggcgtcaagcgcatttctgggctcatctacgaggagacccgcggcgtgctcaagatcttcctcgagaacgtcatccgcgacgccgtcacctacaccgagcacgctcgccgcaagaccgtcaccgccatggatgtcgtctacgcgctcaagcgccagggccgcacgctctacggcttcggcggctaggccgcctccccttctgatgctttgatatgacggccgtggtcggttgtgtgtctagttggccggtctactgtagtttgttctgtatcttcgtttcgaggtgttccagtttctagcccatttggtgtaatattttcacagctattatcaatggaaagccctcggttctatccccaaaaaaaaaaaaaaaaaaaaaaaaaaaaaaaaaaaggaaaaaaaaaaaaaaaaaagcggcc

SEQ ID NO: 1748 - DNA, 980 bp, Zea mays
  unsure (1)..(980): unsure at all n locations
  Clone ID: TF_ZmC697_154
cattgggtacctcgaggccggccgggatcgcacaaatcctcttcctcgagttctcctcaaccaaattcaaagtcacagcggcgaaactctcggcgatgtctggccgcggcaagggcgggaagggtctgggcaagggcggcgccaagcgccaccgcaaggtgctgcgtgacaacatccagggcatcaccaagccggcgatccgcaggttggcgaggaggggcggcgtcaagcgcatctccgggctcatctacgaggagacccgcggcgtgctcaagatcttcctcgagaacgtcatccgcgacgccgtcacctacaccgagcacgcccgccgcaagactgtgaccgccatggacgttgtctacgctctcaagcgccagggccgcaccctctacggtttcggcggttaggtcgcccctctcccggtggcgaattacgtggtggcggtggcggtcgtgttgtgttcttggtctagttagtctgtgttgtctttatcggtgctgttttctgtggtggttgtactgcatcgttctagtttctagtccatgtgctgtaatatctcgctgctgtaatcaatggaatgtcctcgtttcaagccccaaaaaaaaaaaaaaaaaaaaaaaaatccactcgccctcccacacagaaaaccctagccgccgccaccgaagcggcctcccaggtaagcaggagcgtccaccccgccgccgtcatgaagcgcaatccccgcgtcacgagctcccgccggaagtgccgcaaggcgcactttacggccccgtcctccgtccgccgcgttctcatgtccgccgggctgtcgacggagctccgccacaagtacaacgtgcgctccatcccgatccgcaaggaccacnaggtgcaggtcgtgcgcggcacctacaaaggccgcgaggggaagggggggcaggtctaccgccgccgctgggtcatccacctcgagcggntcacccccnataaggtgaacg

SEQ ID NO: 1749 - DNA, 1366 bp, Zea mays
  Clone ID: TF_ZmC697_155
ggccgcttttttttttttttttttcggctgcaaaacgttgcccaggaatcatttcaattatcgaacgataagattggattacattcgaaacaacttcaagaatactactaacaatagtccaacacgtcacagacaaggaactaaacgaaataaccctaacaacaaacaggcatccacgacagcaaggagaagaggcatccagcctagcctccgaagccgtagagggttcggccctggcgcttgagcgcgtagacgacgtccatggcggtaacagtcttgcggcgtgcgtgctcggtgtaggtgacggcgtcgcggatgacgttctcgaggaagatcttgaggacgccgcgggtctcctcgtagataagccccgaaatgcgcttcacgccgcccctccgagccagcctacggatcgcgggcttggtgatgccctggatgttgtcacggagcaccttacggtggcgctttgctccgcccttgcccagacctttgccgcccttgccgcgccccgacatcgtcgctgccggtgccctgtctttcacgctctcctcgcctcgaagaaaatgggggatttttttgactagttctagatcgcgagcggccgctcgcgatctagaactagttcaaatctcacaatcttcttgtagcacaccactgtcttcgtccaactcggcggcgatgtctgggcgcggcaagggcggcaaggggctgggcaagggcggcgcgaaacgccaccgtaaggttctccgcgacaacatccagggtatcacgaagccggcaatccggaggctggcgaggaggggcggcgtgaagcgtatctccgggcttatctacgaggaaacccgcggcgtgctcaagatcttcctcgagaatgtcatccgcgacgcggtcacctacaccgagcacgctcgccgcaagaccgtcaccgccatggatgttgtgtacgccctcaagcgccagggccgcactctgtacgggttcggtggttgagcgcatctcttccctcgtctgcagcggctgccggtggcgtttcctcagttccctctgccttgcttggcttgatgtagagagttatcagattaaaatatctctgatgtgcttcgttattgggtggaatcatgtgtcccagcagtgctgggaaatcaagatcaagatgtatctttctttgcagtaatgaaatgttaaaatcgagatcaagatgtatctttctttgcagtaaagaaactttgctattgcgcccactgttaggctaatcacaatggaggtttcatgaggtgtttcatgtattaattagcctgctatattagctattttgatgatgtgtcatatcatttaaaaaaaaaaaaaactcgaggggggggccggt

SEQ ID NO: 1750 - DNA, 1440 bp, Zea mays
  Clone ID: TF_ZmC697_159
ggccgcttttttttttttttttttacaagcagattctccacaaaatccaaccatatgtgtgctttggcataatttaatatcatcgacatgtttttaacaaaatcctctccaagatccataccaagcacgaagccttcatggaaatagcaaaacagagataccttaaagggtttcaggtacaagaaattgacaactagatcagacactatgagggacgcccgacgtctagaagcggagtttggtaaagaaccacctgttcttgccggtcttgaacctctcctcgaggcgcgccttggcggccttgcaggcttcgaccttcttgtcccgggtggagagcgcgtcgggcccgcccgatgcgacgtccttaaagtcgacgtcgagggtgtagcgggtgggcatgaggtgcgtgaagttgacgagcttgatgaagcacttgacgcgggacttcttggccgtcttcttggcggagtccttgcggatcaccttcttggggtacttggcgaggcccgcgacgaggcagtgcccgtagggacgatcacgggtgccctcctcgaaaacgcgcacgatcacggccttccggccggcgaaccggccctggaggaggataacggccttgccgggcttgaggaacttcaccatctttgctctttggacggtggtagcgatgctgcgccgccggcccacgcgtccgcccacgcgtccgcccacgcgtccgacccaatctcccctacaccagaaaaattcccagttctttggtccgcgtcagagaggcggcggcgatgtctgggcgcggcaagggcggcaagggtctgggcaagggcggcgcgaagcgccaccggaaggtgctccgcgacaacatccagggcatcaccaagccggcgatccggaggctggctaggaggggtggcgtgaagcgcatctcggggctcatctacgaggagacccgcggcgtgctcaagatctttctcgagaacgtcatccgcgacgccgtcacctacaccgagcacgcgcgccgcaagaccgtgaccgccatggacgtcgtctacgcgctcaagcgccagggacgcaccctctacggcttcggaggctaggctaggcgcctcttcatagtcggggactggttaggggacatgtctctgtgtgatgctttctgtggtattattgctgcaatagccgtgtaatccatcgcttctgcaatgaagcgctcggaagcatgctacgtatgttgtgtctgtgggtgattgtatttctggtagtaacagtgattgttcctgaattttggataatacaagctcattcgcagtagtttctgttgtaatcctgtcttatcgtttgagaggagtattgctttgggcagcctttgctgtgcatttttatgcattaggataaaaaaatttggtcgacttacgaaaaatttgcgcagcagacatgcgctagatc

SEQ ID NO: 1751 - DNA, 755 bp, Zea mays
  Clone ID: TF_ZmC697_92
cattgggtacctcgaggccggccgggggatgcgatcataccagcactaaagcaccggatcccatcagaactccgaagttaagcgtgcttgggcgagagtagtactaggatgggtgacctcctgggaagtcctcgtgttgcattccccaagtccaagcaccttcccaaaaaaatcccccattttcttcgaggcgaggagagcgtgaaagacagggcaccggcagcgacgatgtcggggcgcggcaagggcggcaaaggtctgggcaagggcggagcaaagcgccaccgtaaggtgctccgtgacaacatccagggcatcaccaagcccgcgatccgtaggctggctcggaggggcggcgtgaagcgcatttcggggcttatctacgaggagacccgcggcgtcctcaagatcttcctcgagaacgtcatccgcgacgccgtcacctacaccgagcacgcacgccgcaagaccgtcaccgccatggacgtcgtctacgcgctcaagcgccagggccgaaccctctacggcttcggaggctaggctggatgcctcttctccttgctatcgtggatgcctgtttgttgttagggttacttcgtttagtttcttgtctgtgacgtgttggactattgttagtagtattcttgaagttgtgtttcgaatgtaatccaatcttatcgttcgagaattgaaatgattcctgggcaacatttttttccaaaaaaaaaaaaaaaaaaaaaaaaaaaaaagcggcc

SEQ ID NO: 1752 - DNA, 722 bp, Zea mays
  Clone ID: TF_LIB4826-120-R1-N1-A9
ccggccgggatacacagcttggaactctcttcatgtctcaaacgatcttaaccccccctcagcggtcactccagatccaatcctcgatgggaaatgtggaccgcacgaaagaaattgcacgccagtcaacgggaggcaaagcgccacgaacacagctggcaaccaaggcagcgcgcaaagcacacccggccacgcgcggcctagaagaagccacatcgagttacacccgcgccaccggggaccctgtgagcagatccgcaagtaccagaaaagcacggagctgcttatccgaaaactgccggtccagcgcctggtgcggcagatcgaacacgacttcaagacggacctccggttccagtcctccgccgaggccgcgctgcacgaggccgccgaagactacctcgtgggcctcttcgaggacaccaaactctgcgacatccacgccaatgagcgacaccatcatgcccaatgacatccggctcgcccgccgcatacggggtgagaggaactgagcaccccctcgccgctgctgcgagtccatcgcttccagatatctgtggagcgaagaactactgcacgacgctaagaactactgcgagctatattcgcctgtgagagtaggaagagcaacaatgctctgatgattacaatgcagtgcccccgcgatactgacatccgtgctgcttgttctggacttcgaactacgaatgcgattgttacta

SEQ ID NO: 1753 - DNA, 390 bp, Zea mays
  Clone ID: TF_LIB3067-019-Q1-K1-C10
aaaaaaaataaaaaaaaaaaaataaaaataaaaattaaaggccggaactccagctggtccagggttgatggcgcctaaagtcgacatgatacccatggcatagaatccgctagatgaggagcccgcggcctagaatgcacacgtcgtgaataagacaacgcggagaatcggatcccaaatggcatgtccgctgacaaggatgtcgccaagggcaatatgggcaagaagaacgtcaagaagagcgtgtagacctaaaagatctacattttcagggtgctgaaccaggtcctgccggacattgttatgtcctccaaggccatgtggatcatgaactcttacattaacgatttctacgagaagttcgctcctgaggccgccaagttttcgcgc

SEQ ID NO: 1754 - DNA, 540 bp, Zea mays
  Clone ID: TF_ZmC369_45
gcattctcgaattccgattctcaatccagcaaaccctaccagccttttgcaaactcagagagggacccgatggcacccaaggcggagaagaagccggcggcgaagaagcccgcagaggaggagcccgcggccccggcggagaaggcccccgctgggaagaagccgaaggcggagaagcggctcccggcgggaaaatccgccggcaaggaaggcggtgttgacaagaaggggcggaagaaggccaagaagagcgtggagacgtacaagatctacatcttcaaggtgctgaagcaggtgcacccggacatcggcatctcctccaaggccatgtccatcatgaactcattcatcaacgacatcttcgagaagctcgccaagcacgccgtctcggagggcaccaaggccgtcaccaagttcacctcgtcctaagctcctttctagtaggtccttaagcgccgtggcgccttttgactgtatggaatgtttgtcatctgaaagttgatctgagcagtgcaatatataattctggcatactattct

SEQ ID NO: 1755 - DNA, 709 bp, Zea mays
  Clone ID: TF_ZmC697_138
gcggggacctcagcactagtctcctcttcgcacgagcgcaacaccatccacccaccagttcgaagcggaggcgaccggcaacctgcggcgcgaagcgtcaccggaaggtgctgcgcgacaacatccaggggatcacgaagccggcgatccggaggctggcgaggaggggtggcgtgaagcgcatctccgggctgatctacgaggagacccgcggcgtgctcaagatctttctcgagaatgtcatccgcgacgctgtgacctacacggagcacgcccgtcgcaaaaccgtcaccgctatggacgtcgtgtacgccctcaaacgccagggccgcactctctatggcttcggcggctaggttaggtgtgggtaattgcctgtccaggtgtctcggatctgtggtactagtttggctgccttcctgtgttcgtattgtagtagttgtggtagctggttgctttgtcgtcctgtagtcgtgcttctttgggtctgtaagaaccgctggttcgatgggattggattggacggtgaagtaggaatgttggcatgttagacttttctccaacgtagcgttgcctctaatttgatctctcaatttattttcaattggggtgcactgtaattcttcctgtctaattcaaatcccctttctgaaattttgtgacctcccaagttttggacccctcgattgttcgaacgagtttttgaatt

SEQ ID NO: 1756 - DNA, 668 bp, Zea mays
  Clone ID: TF_LIB4730-067-R1-K1-E10
ttacatgctccccggcaatccactcaccacgaagccttcacatcctcactgcaggtcgataggcccgcacgaaatgcagacggcggaggaacgctccacgcggcgggcaagcgcgcacaaggtaagcgagctgccgactaaagcggccagcaagtctgctccctgcgaccggcggagtgaagaagcgccaccgcttccgccccggctccgctcgcgctccgggagatccgcaagtaccataagagcacggagctgctgatccgcaagctgccgttccagcgcctggtgcgcgagatcgcgcaggacttcaagaccgacctacgcttccagagctctgctgtatccgcgctgcaggaggcggctgaggcctaccttgacgggctcttcgaggacaccaacctctgcgccatccacgccaagcgcgtcaccatcatgcccaaggacatccagcttgcccgccgcatccgcggggagagggcctaagcgtcatattttctgtcatcagtgcccgatcagaagatgtagagatatgctgcgttctgtagtttgggttactggcgaatcatcgagtgttggctgttcactgctgtaacttaattatcatgatgcatatgaaatggcaatgaactctgttatcaagttcttggaagaaaagatgaaaaaagagg

SEQ ID NO: 1757 - DNA, 693 bp, Zea mays
  Clone ID: TF_LIB5117-054-A1-PF1-C10
aaagctccagattccgaacagcaccgccgctgacgcatctcgagtagtttccagttcgccggagaaggagcaagatggccggaaggaagggcggcgacaggaagaaggcggtgacccgctccgtaaaggccgggctccagttccccgtcggccgcatcgggcgctacctcaagaagggccgctacgcccagcgcgtcggctccggcgcccccgtctacctcgccgccgtcctcgagtacctcgccgccgaggtcctggagcttgcaggcaacgctgccaaggacaacaagaagacgcgcatcatcccgcgccacctgctgctcgccgtccgcaacgaccaggagctcggcaggctgctcgctggcgtgaccatcgcccacggtggcgtgatccccaacatcaactctgtgctgctccccaagaagtccgccgcagccgagaaggaggccaagtcgcccaagaagaaggccgccaccaagtcccccaagaagaaggccgccgccaccaaggagtaggcgccccatagcctagttccataatcagcgagaagatgacgagcctttttttttttgcgggattggatcgtgtatgtaattgcctagtctgtagtggctcgttcattaccttgatgagcaagccattaaggggctgtgttttgtacctgattaatgtcgagaatggctaaatcctttg

SEQ ID NO: 1758 - DNA, 708 bp, Zea mays
  Clone ID: TF_LIB5117-054-A1-PF1-C1
acatttctccacccctctcccaagtctcaatttcaatattgaactccctgctcctcccgtcgctcgatcgccatgtcctcctccacggggagcttggaccacgcagggttcacgttcacgccgccgccgttcatcacgtccttcaccgagcttctgtcggggtccggcgccggcgacgcggagcggtcgccgagggggttcaaccgagggggccgggccggggcgcccaagttcaagtccgcgcagccgcccagcctgcccatctcgtcgcccttctcctgcttctccgtccctgcaggtctcagccctgccgagctgctcgactcccccgttctcctcaactactctcacatcttggcgtctccgactaccggtgcgatccctgcgcagaggtgcgactggcaggcgagcgccgatctgaacacctttcagcaggatgagctcggcctctctggcttctcctttcacgcagtcaagtccaacgccacggtcaacgctcaagcaaactgcttacctttattcaaggagcagcaggagcaacaacaagaagaagtggttcaagtgagcaacaagagcagcagcagcagcggcaacaacaagcaggttgaggacggatacaattggaggaagtacgggcagaagcaagttaaggggagcgagaacccgcggagctactacaagtgcacctacaacaattgctccatgaag

SEQ ID NO: 1759 - DNA, 552 bp, Zea mays
  unsure (1)..(552): unsure at all n locations
  Clone ID: TF_ZmC22376_4
cnnggccgggaaaaagaataaaaaaaaaaaaaaaaaaaaaaaaaaaaaaaaatccaccaccgccataccagcgcgacagcgattccgtcgagttagaccaagcgagagagtagtctcagacgagaagaggtgaatatgagttccggcggcggcaggggcaagcccaaggggtccaaggctgtgtcgcggtcgaccaaggctgggctgcagttccccgtcggccgcatcgcgcgctacctcaaggccggcaagtacgccgagcgcgtcggcggtggtgcgcccgtctacctctccgccgtcctcgagtatctcgcggcagaggtgttggaactggcgggcaacgcggcgcgcgacaacaagaagagccgcatcgtgccgcgtcacatccagctcgccgtgcgcaacgacgaggaactcagcaagctgctcggagctgtcaccatcgccgccggaggtgtgttgcccaacattcatcagacgctgctgcccaagaaggccggtgggaagggcaaggccgacatcggttccgcatcccaggagttctaagcggcc

SEQ ID NO: 1760 - DNA, 346 bp, Zea mays
  unsure (1)..(346): unsure at all n locations
  Clone ID: TF_LIB3354-002-P1-K1-E3
ggtggaacacgcgttcggaaatacttccgccaggcaagttttaaattttgcaccctatgataggatcaatatggctcgtacgaagcagaccttccgcaagtccaccggaggcaaggccccgcgcaagcagctcgccaccaaggcggcgaggaagttggcgccgacnaccggcggcgtgaataancctcacaggtacaggccacgtacggtggcgcttntcgagatccgcaggtaccagaatagcatggagtttgtgattcggaagttgctcttccagcgcctggttcannngatcgctcaggactttaagacggatctgcggttccagagccacgcccgcctggcc

SEQ ID NO: 1761 - DNA, 573 bp, Zea mays
  Clone ID: TF_LIB4979-083-A1-K1-F1
actccacgatctctatctccctagcaatctctatcaccagatcctcgtgcgaaacaaagcgctagcccccttcgtactgtcccgatggtccgcactaagcacacgaggaggaagtctactgagcggcaatgcccctatgaagcagctggccaccaaggttgagcgcaagtctgccccggcgtggtgggagagaagaagccccaccgcttccgccccgtcaccgtcgcgctccgggagatccgcaagtaccataagagcacggagctgctgatccgcaagctgccgttccagcgcctgtgcgcgtgagatcgcccagtgacttcgagaccgacctccgcttccagagctccgacgacgacgcgctgcatgaggcgtccgaggtctacctcgtcgcgttcttcgaggacactaacctctgcgccattcacgccaagcgcgtcaccatcatgcccaaggacatccagctcgcccgccgtatacgtggggagagggtctatgcgtcgtcccgagggaggtgctagtagtagtgaccgtttctgtcatcactgcctgaatataacgagtagagatgtg

SEQ ID NO: 1762 - DNA, 485 bp, Zea mays
  unsure (1)..(485): unsure at all n locations
  Clone ID: TF_LIB3279-193-Q1-K6-C9
cccaanccaagccggccccaaacccgaaccccaaggcgccccggaacggaggggcccaaggccgagaagaagcccgcggcgaagaagccggcggaggaggagcccgccgccgagaaggcgccggccgggaagaagcccaaggcggagaagcgcggcccagggggcggaggcgccggcaaggagggcggcgagggaaagaggggccggaagaagggcaagaagagcgcggagacccacaagagcnacaccnncaaggggcngaagcaggggcacccggacancggcagcnccncnaaggccagggccancangaacnccnncancaacgacancnncgagaagcacgccgccgaggccgccaagcacgcgcggnacaacaagaagcccaccancaccncccgngagagccagaccnccgngcgccncgnccnccccggggagcgcgccaagcacgccgncnccgagggcaccaaggccgncaccaa

SEQ ID NO: 1763 - DNA, 473 bp, Zea mays
  unsure (1)..(473): unsure at all n locations
  Clone ID: TF_LIB3279-194-Q1-K6-E12
ggccagacaagccaancgaagccgaggaacgaccanggacnccaccggcaccggagcaggggggaaggggaagaagggagcggccgggcgcaagggcggcgggccaaggaagaagncggngncgagggccgngaaggccggncgggggggggggggggccgcancgggcgccacnngaagaagggccgcnacgcgcagcgngncggcaccggcgcccccgncnaccncgccgcngnccnncgaaaccncgccgcngaggggcnggagcncgccggnaaggcngccagggacaacaagaagacncgcannannccgcgccacgngcnncnggcganccggaacgacgaggagcnngggaagcngnngggcggcgngaccancgcncacggcggngggcnccccaanancaacccngnncngcngcccaagaagacggcggagaaggcgnccagnggcgggagcaaggaggcaaa

SEQ ID NO: 1764 - DNA, 366 bp, Zea mays
  unsure (1)..(366): unsure at all n locations
  Clone ID: TF_LIB4732-100-Q1-K1-G11
actcgagccggcgggagccacgtatcttcgtcccaaatcgaccgagcgaatcaccacagcttctcaccaccgctaccttcgatggcacccaaggcggacaagaagccggcggcgaagaagcctgcagaggaggagcccgcgacagagaaggcggagaaggctccggcggggaagaagcccaaggccgagaagcgcctcccggcgggcaagtccgccggtaaggagggcggcgagggcaagaaggggaaaaagaaagcgaagaagnccgnggagacctacaagacctacatcttcaaggcgctgaagcaggcgcaccccgacatcgtcatttcgtccatggccatgtccctcctgaactccttcatc

SEQ ID NO: 1765 - DNA, 644 bp, Zea mays
  Clone ID: TF_LIB4762-008-R1-K1-B11
ccggccgggctttaaggtattagagatagaactatttggtattgatctatcgaggctgcagcttgtctgtaaacacaactttccagcttgtataatggatcaacggatcacctgataaaaaaaaaaaaaaaaaaaaaaaaaaaaaaaaaaacaacaccaagaagcaagaaaactaaaaaaggctcctcccgaccgaaacgcccctaatctccctcgaccccgacatccccgacccgatggcgcccaaggcggaaaaaaagccagcggaaaaaaagccggcggccgaggaaaaggcggaaaaaacaaccgcagggaaaaagcccaaggccgaaaagcggctgcccgcgtccaagtcctccggcaaggagggcggcgagaagaaggggaagaagaaggccaagaagagcgtggagacctacaagatctacatcttcaaggtgctgaagcaggtgcaccccgacatcggcatatcctccaaggccatgtccataatgaactccttaataaacgacatctttgagaagctggccggcgaggccgccaagctggccgcggtacaacaagaagcccaccatcacgtcccggcgagatccagacctccgtgcgcctagtcctccccggagagctcgcaagcacgccgtctc

SEQ ID NO: 1766 - DNA, 455 bp, Zea mays
  unsure (1)..(455): unsure at all n locations
  Clone ID: TF_jC-zmX700085305d1
gctcggattngctcccaatccatcccgcctccttttccgtattccaagncgccccgcatcgatggcgcgcgaggcctttaagaagcccgcggcgaacaaccccgcggaggaggagcccgctgtcgaaaaggcgccggccgggaagaagcccaaggcggagaagcgtgtcccaccaggcaagtccgtcggcaaggagggcggcgagggaaagaggggccggaagaagggcaagaagagcgtggagacctacaagatctacatcttcaaggtgctgaagcaggtgcacccggacatcggcatctcctctaaggccatgtccatcatgaactccttcatcaacgacatcttcgagaagctcgccgcctaagccgccaagctctcccggtacaacaagaagcccaccatcaccttccgtgagatccagacctccgggcgcttcgttctccccggggagc

SEQ ID NO: 1767 - DNA, 986 bp, Zea mays
  Clone ID: TF_ZmC1773_3
cactcctatgggcgattgggttcattgggtacctcgaggccggccgggatccacactcgactctcctctctcgcatccgcagcctctcgagctctactccatcccctcgatctcgaagcgcagcagcagcagtcaggcggccatggacgccagcgcagccggagccggcgggaaggcgaagaagggcgcggccgggcgcaaggccggcgggccgaggaagaagtcggtgacgaggtccgtcaaggccgggctgcagttccccgtcggccgcatcgggcggtacctgaagaagggccggtacgcgcagcgcgtcggcacgggcgcccccgtctacctggccgccgtcctcgagtacctggccgccgaggtgctggagctggccggcaacgctgccaaggacaacaagaagacccgcatcatcccgcgccacgtgctcctggccatccgcaacgacgaggagctcggcaagctgctgtccggcgtcaccatcgcccacggcggcgtcctccccaacatcaacccggtgctcctgcccaagaagaccgctgagaaggcggcggccaaggaggccaagtcgcccaagaaggccgccaagtcccccaagaaggcatagaggggcgcctttaccgctgtgatgttgaatgctcgtgttcagtagatctttacgtctgtagtgtcgtcgttgttattggaactggttagtagatctgtgcattgtggttgaaacgtgattccctgatttcagaaatctaatttgcaatttgggtgcacaaaaaaaaaaaaaaaaaagcagacagtactaaaaaaaaaaaaaaaaaaaaggttttgcgggcccctttccccctgtgatgttgaatgctcgtgttcagtagatcctttacgtctgaagggtcgtcgttgttattggaactggttagtagatctgtgcattgtggttgaaacgtgattcccctttttccagaaatctaatttgcaatttgggggcc

SEQ ID NO: 1768 - DNA, 243 bp, Zea mays
  Clone ID: TF_700432838H1
gtaatcctggagtacttcactgacgaggttttggagctggccgggaacgctcgcacggttctgaaagtagacgcgtatcacacctcgccacctaccgatggccattcgcggagacgaggagctggacacccacatcacgggaaccatcgcaggtggaggcgtcatcccgcacatccaaacgtccctgatcaacacgtcctccaaggcgtgttgcatagggaatgcccattgttagtttacaat

SEQ ID NO: 1769 - DNA, 447 bp, Zea mays
  unsure (1)..(447): unsure at all n locations
  Clone ID: TF_LIB4979-119-Q1-K1-H1
atcacgatctcaatctcccctagcatctctagcagcagatcctcgtgcgaagcaaagcgctagcccccttcgtactgtcccgatggcccgcacgaagcagacggcgaggaagtccactggcggcaaggcgccaaggaagcagctggccaccaaggcggcgcgcaagtctgccccggcgaccggcggagtgaagaagccccaccgtttccgccccggcaccgccgcgcttcgggagcactcctccgnagctgaggatactgttgactacgtcatgatcaccgacgcagataagtaagggatgatgtactccagaggtgggtgttctgattgaacctactatggcacacagagggatcggactggcctttatgcctgctgccgatagatacaaacttacactcagaatgcctgccttcattattatggagaggaggatcatattgaagg

SEQ ID NO: 1770 - DNA, 427 bp, Zea mays
  Clone ID: TF_LIB3150-038-Q1-N1-C5
cttctcccaatctcccctacaccagaacaagtggcagttctttggtccgcgtcagagaggccgcccccatgtctgggcgcggcaagggcgccaagggtctgggcaagggcggcgcgaaccgccacctgaaggtgctccgcgacaacatccaacgcatcaccaatcccccgatccggacgctggctaggaggggtggcgtaaagcgcatctcgggcctcatctcccaagagacccacggcgtgctcactatctttctcgagaacaccatcctcaactccatcacctacaccgagcacgctcgccgcaagaccgccaccgccatgtacgtcgtatacgcgcttaaccgccagggacccaccctctacagattcagaggctaggctaggcgcctcttatactctgagactgcctaggggacatgtctctg

SEQ ID NO: 1771 - DNA, 381 bp, Zea mays
  Clone ID: TF_LIB4730-061-R1-K1-B3
gaactagggtaaccatgcatgctccctttccttccaatccataccaggctccaagcctgaagtcctagaatcgctccttatgaatggagacctaaggccgataagagctccgcgctgaataagccggtggaggatgagctcgagtcctaaaaggcgccgaacgacaagaagccctacgctgataattgttttccatctggcacgtacagccgcaaggagggcggtgagggaaagaggggccaaagaaaggactggaacagcgtggatacttacaagatctacattctaaaggcgctgaagcaagcgcacctgtgcattgggattagctacaaggccatgtccatcatgaactccttcatgaacgacatgttcgagaagctc

SEQ ID NO: 1772 - DNA, 518 bp, Zea mays
  Clone ID: TF_LIB4730-079-R1-K1-D6
tgggacctcgaggcggcgggaagattttcaaagaggcgctagcaatctctatctttacatactcgttcgatgacaagggttagccttcctactgtgccgatggcccgcagctagcagacggaagaggaactccagtggcggttgggtgccaaggaacgagctggccactaatgaggcggacaagtgtgccccggggactgatcggatgaaaaatgctcaccgtttccgccccggaaccgatgctgtcggggagatccgcaagtaccaaaaaaatacggatgtgcttatccgtaagctgccgttccaacacctggtgcatgtgatcgatcagtacttcaagaccgaacgtcgtttccagagtttcgccgaagtcgcgctgcaagaggggtacgagggctacctggtcatgctctaccaggacaactacctctgcgccattcactgcaagcgcgtcaccatcatgcacaaagacctccagatcgcccgccgcatccatggtgagaaggtctaagcgttga

SEQ ID NO: 1773 - DNA, 416 bp, Zea mays
  Clone ID: TF_LIB3357-020-P1-K1-H12
ccacgcgagcgatgcgcaccaactcgctgagcacatttctctcttactcccaaacaagccaatcgaagccaggatacgagcatggactgcaccggcaccggagcaaggggtaaggggaagaaaggagcggacgggcgcaaaggtcgcgggccaaagaagaaatcggtgtcgaggtccgtgaaggccggtctccaattccccgtcggccgcatcgggcgctacttgaagaagggccgctacgcgcagcgtgtcggcaccggcgcccccgtttacctcgccgctgtcctcgaatacctcgccgttgaggttctggagctcgccgggaatgctgccagggacaacaagaaaactcgaattattccggcccacgtgcttttggcgatccggaacaaccaggatttggaaagttgttgggc

SEQ ID NO: 1774 - DNA, 704 bp, Zea mays
  Clone ID: TF_ZmC651026_1
ccggccgggacttttccggcctcccattcctcgcgcggcgaccacccaatttcgaagcgcgcgtagagaccgaacaagcgggagagatggctcgtaccaagcagactgctcgcaagtccacggtagggaaggctcccaggaagcagcttgccaccaaggatgcccgtaagtctgcccccaccactggaggagtgaaaaagcctcaccgctaccgccctggaactgttgccctccgtgagatccgcaagtatcagaatagcactgagctgctgatcaagaagctgcccttccagaggctcgtcaggtaaattgcacaggacttcaaaactgatttgcgtttccagagccatgcggagcttgccctccaggaggctgctgaggcataccttgatggcctgtttgaggacaccaacctgtgcgccatccatgctaagcgcgtgaccatcatgtcaaaggacattcaactgtcaaggcagatccgcggctagagggactaatcgccacctcagacatcgcgacaaaaacatgaagacctggggctattgttaatctggagccattgtaggacatatgaccagggcttgttttgaggatcgcaagattctcttctggtactgctgctgctacctatgatgaagtcattgctaggctcgaatacatcagcctactatgcgctgacagcctggactagcagtgctatgtgc

SEQ ID NO: 1775 - DNA, 517 bp, Zea mays
  Clone ID: TF_jC-zmX700206249a1
attcggctcgagatcactcatccacagcttttttccgtattcctgtctcgaatcctctctggccgctccgatggcccgcacgaagcaaacagcaaggaagtcgaccggcggcaaggccccccggaagcagctggccactaaggctgcgcgcaagtcggccccggccaccggcggagtgaagaagccccaccgtttccgccccgtcactgtcgcgctccgcgagatccgcaagtaccagaagagcactgagctgctcatccgcaagctccccttccagcgcctcgtccgcgagatcgcgcaagacttcaagactgatctgaggttccagtcctccgccgtcgcggcgctgcaggaggccgccgaggcgtacctggtggggctcttagaggacaccaacctttgcgccatccacgccaagcgcgtcactatcatgcccaaggacatccagctcgcgcggggcatcaagggcgagagggcttgagccgcccgcgagctgctcgtcggtgtagagttacta

SEQ ID NO: 1776 - DNA, 837 bp, Zea mays
  Clone ID: TF_ZmC114_23
gccggccgggctgcaatcaatagccagttctaatctcaggtttggggggaaaaggcctcgcgggtcgcaaaccgctctctgttgatttgggatttgggaggcgctcgaggtaaaccatagtttagtgacccatggctcgtactaagcaaactgctcgcaagtccactggagggaaggctcctaggaagcaacttgccaccaaggctgcccgtaagtctgcacccacaactgggggagtaaagaagcctcatcgttaccgccctggaactgtagctcttcgtgaaatccgcaagtatcagaagagcactgacctgctcataaggaagcttccgttccaaaggcttgtcagggagattgcccaggatttcaagactgatcttcgtttccagagccatgcggtgcttgcgctgcaggaggctgcggaggcgtacctggtgggtctattcgaggacactaatctgtgcgccatccatgccaagcgcgtgaccatcatgcccaaggacattcagctggctaggaggatccgtggtgaaagggcctagattctctgtttactgctactgggagtggctccgtagtatggtttgcatctgttcgatgcttgctttttgtggaagttacatttgtgggtgttcgaattcgtaatattcatccgtagtggacgagtggtaggaagttctgcaatctgactatgttttaaaatttataattgttgtcaattagtgttggtgttggtttcgcccatcaacggatcaaccttattggttatctgaacgacgaattgatatgttaactcgtgaacttcgttatcaaaaaaaaaaaaaaaaaaggccccta

SEQ ID NO: 1777 - DNA, 774 bp, Zea mays
  Clone ID: TF_ZmC114_31
tgggtccctcgaggccggccgggaaaaaatcaatagccagttctaatctcaggtttggggggaaaaggcctcgcgggtcgcaaaccgctctctgttgatttgggatttgggaggcgctcgagttttcaggtaaaccatagtttagtgaccaatggctcgtactaagcaaactgctcgcaagtccactggagggaaggctcctaggaagcaacttgccaccaaggctgctcgtaagtctgcacccacaactgggggagtaaagaagcctcatcgttaccgccctggaactgttgctcttcgtgaaatccgcaagtatcagaagagcactgacctgctcataaggaagcttccgttccagaggcttgtcagggagattgcccaggatttcaagactgatcttcgtttccagagccatgcggtgcttgcgctgcaggaggctgcggaggcgtacctggtgggtctattcgaggacactaatctgtgcgccatccatgccaagcgcgtgaccatcatgcccaaggacattcagctggctaggaggatccgtggtgaaagggcctagattctctgtttacggctactgggagtggctccgtagtatggtttgcatctgttcgatgcttgcttttgtggaagtttacatttgtgggtgttcgaattcgtaatattcatccgtagtggacaagtggtaggaagtgctccaatctgactatgttttaaaatttataattgatgtcaattagtgttggtgctggtttcgcccatcaacggatc

SEQ ID NO: 1778 - DNA, 830 bp, Zea mays
  unsure (1)..(830): unsure at all n locations
  Clone ID: TF_ZmC114_33
gggcaattgggtttctcgagcgncggccgggatcaatagccagttctaatctcaggttgggggaaataggcctcgcgggtcgcaaaccgctctctgctgatttgggatttgggaggcgctcgagttttcaggtaaaccatagtttagtgacccatggctcgtactaagcaaactgctcgcaagtccactggagggaaggctcctaggaagcaacttgccaccaaggctgcccgtaagtctgcacccacaactgggggagtaaagaagcctcatcgttaccgccctggaactgttgctcttcgtgaaatccgcaagtatcagaagagcactgacctgctcataaggaagcttccgttccaaaggcttgtcagggagattgcccaggatttcaagactgatcttcgtttccagagccatgcggtgcttgcgctgcaggaggctgcggaggcgtacctggtgggtctattcgaggacactaatctgtgcgccattcatgccaagcgcgtcaccatcatgcccaaggacattcagctggctaggaggatccgtggtgaaagggcctagattctctatttactgctactggggtggctccgtagtgtatggtttgcatctgttcgatgcttgcttttgtgaaagtttacgtttgtgggtgttcgaatttgtaatattcatccgtagtggacaagtggtaggaagtgccgcaatctgactatgttttcaaatttataattgctgtcgattagtgttggtgctggttttgctcatcaacggattaactaaccttattggttatctgaacgacgaatttgatatgttaactcgggatc

SEQ ID NO: 1779 - DNA, 1434 bp, Zea mays
  Clone ID: TF_ZmC114_36
cccaccctcccttgtatttccagctcggccaaagctgtatataacttgcctacagccagctgagctccccatcgatcctgtcctgtccagcaagggagacctggactggaggaggaggacctacctacccggcctccagctctctcgtctcttcctcctcctcctcgaagctccgatccgatcccccaatgtctgacagcagtccagctcccggcgcctactactccggccctcccgccgcgccgccgcccgagtctaagcccgttgacggcggccaggtcaacgccgatgttcctggctactactcctccgtccctgctgcgaaatctggcgccggcggccagggcagctccgctgctcctaaggaatcgggcttcttcgccagctgttgtgggtgcttctctggcggcgaaaccgcgagatagatagattcagtgttggaccgaggaccatggatggatggatggaacatgcatgcccagtgattgtttgcgccgatgaaagttcaatttgtccggatttattttctctgaaatagtatatgttttttttctccatcggtgagccggtgatcttgtcaatttgtacaataatcattatatgcaaccaactgtgctttaatttgcctcaggtttggggggaaaaggcctcgcgggtcgcaaaccgctctctgttgatttgggatttgggaggcgctcgagttttcaggtaaaccatagtttagtgacccatggctcgtactaagcaaactgctcgcaagtccactggagggaaggctcctaggaagcaacttgccaccaaggctgcccgtaagtctgcacccacaactgggggagtaaagaagcctcatcgttaccgccctggaactgttgctcttcgtgaaatccgcaagtatcagaagagcactgacctgctcataaggaagcttccgttccaaaggcttgtcagggagattgcccaggatttcaagactgatcttcgtttccagagccatgcggtgcttgcgctgcaggaggctgcggaggcgtacctggtgggtctattcgaggacactaatctgtgcgccatccatgccaagcgcgtgaccatcatgcccaaggacattcagctggctaggaggatccgtggtgaaagggcctagattctctgtttactgctactgggagtggctccgtagtatggtttgcatctgttcgatgcttgctttttgtggaagttacatttgtgggtgttcgaattcgtaatattcatccgtagtggacgagtggtaggaagttctgcaatctgactatgttttaaaatttataattgttgtcaattagtgttggtgttggtttcgcccatcaacggatcaaccttattggttatctgaacgacgaattgatatgttaactcgtgaacttcgttatatttaggcagaaaaaaaactcgtgc

SEQ ID NO: 1780 - DNA, 1169 bp, Zea mays
  Clone ID: TF_ZmC114_39
ccggccggtcgaacgactctcggcaacggatatctcggctctcgcatcgatgaagaacgtagcaaaatgcgatacctggtgtgaattgcagaatcccgcgaaccatcgagtttttgaacgcaagttgcgcccgaagccttctggcggagggcacgtctgcctgggcgtcacgccaaaagacactcccaacacccccccgcggggcgagggacgtggcgtctggccccccgcgccgcacggcgaggtgggccgaagcaggggctgccggcgaaccgcgccgggcgcagcacgtggtgaaaaaaaaaaaaaaatcaatagccagttctaatctcaggtttggggggaaaaggcctcgcgggtcgcaaaccgctctctgttgatttgggatttgggaggcgctcgagttttcaggtaaaccatagtttagtgacccatggctcgtactaagcaaactgctcgcaagtccactggagggaaggctcctaggaagcaacttgccaccaaggctgcccgtaagtctgcacccacaactgggggagtaaagaagcctcatcgttaccgccctggaactgttgctcttcgtgaaatccgcaagtatcagaagagcactgacctgctcataaggaagcttccgttccaaaggcttgtcagggagattgcccaggatttcaagactgatcttcgtttccagagccatgcggtgcttgcgctgcaggaggctgcggaggcgtacctggtgggtctattcgaggacactaatctgtgcgccatccatgccaagcgcgtgaccatcatgcccaaggacattcagctggctaggaggatccgtggtgaaagggcctagattctctgtttactgctactgggagtggctccgtagtatggtttgcatctgttcgatgcttgctttttgtggaagttacatttgtgggtgttcgaattcgtaatattcatccgtagtggacgagtggtaggaagttctgcaatctgactatgttttaaaatttataattgttgtcaattagtgttggtgttggtttcgcccatcaacggatcaaccttattggttatctgaacgacgaattgatatgttaactcgtgaacttcgttatatttaggcagcatcggttacattgttttgtccggaaaaaaaaaaaaaaaagccccta

SEQ ID NO: 1781 - DNA, 791 bp, Zea mays
  Clone ID: TF_ZmC369_103
ccggccgggacccagcagcaagcaatctcgtccccaaacaagcaaccaccgcctccccgatctcgtcgagaggaagcccaatcccgaaaccgccgccctattccaatggcgcccaaggccgagaagaagcccgccgccaagaagcctgcggaggaggagccggcggcggagaaggccacggcggggaagaagcccaaggccgagaagcggctccccgcgggcaagtccgcaggcaaggagggtggcgagaagaaggggaagaagaaggcaaagaagtcggtggagacgtacaagatctacatctttaaggtgctgaagcaggtgcacccggacattggcatctcgtccaaggccatgtccatcatgaactccttcatcaacgacatcttcgagaagctggcggcggaggcggccaagctggcgcggtacaacaagaagcctaccattacgtcccgcgagatccagacctccgtccgcctcgtcctccccggcgagctcgccaagcacgccgtctccgagggcaccaaagccgtcaccaagttcactagctcctaggcgagcgatgcgacgtgcactcgtctcctcttcttgcagtagtgcaatagtagtacggttaggtgtgttgccgtggtggtagttgccgctgtgtttgctttctgggctgggctcggttgatgtgttttatgtaagaaagtaactgtattgtgtctgcagtaccttaccatgcatgttttaagtagcatcccataatctataaggaatatgttttatgtaaaaaaaaaaaaccaaaa

SEQ ID NO: 1782 - DNA, 812 bp, Zea mays
  Clone ID: TF_ZmC369_104
ccggccgggatagaaggccggcaaaaaaaaacccagcaacaagcaatctcgtccccaaacaagcaaccaccgcctccccgatctcgtcgagaggaagccccatcccgaaaccgccgccgtattccaatggcgcccaaggccgagaagaagcccgccgccaagaagcctgccgaggaggagccggcggcggagaaggccacggcggggaagaagcccaaggctgagaagcggctccccgcgggcaagtccgcaggcaaggagggtggcgagaagaaggggaagaagaaggcaaagaagtcggtggagacgtacaagatctacatcttcaaggtgctgaagcaggtgcacccggacattggcatctcgtccaaggccatgtccatcatgaactccttcatcaacgacatcttcgagaagctggcggcggaggcggccaagctggcgcggtacaacaagaagcctacgatcacgtcccgcgagatccagacctccgtccgcctcgtcctccccggcgagctcgccaagcacgccgtctccgagggcaccaaagccgtcaccaagttcaccagctcctaggcgagcgatgcgacgtgcactcgtctcctcttcttgcagtactacaatagtagtacggttaggtgtgttgccgcggtggtagttgccgctgcgtttgctttctgggctcggttgatgtcttttatgtaagaaagtaactgtattgtgtctgcagtaccttaccatgcatgttttaagtagcatcccataatctataaggaatatgttttaataaaaaaaaaaaaaaaaaaaaaaaa

SEQ ID NO: 1783 - DNA, 825 bp, Zea mays
  Clone ID: TF_ZmC369_111
cctcgagggccggcggctggggcccattaatcaatcgaaaacccagcaacaagcaacctcgtccccaaacaagcaaccaccgcctccccgatctcgtcgagaggaagccccatcccgaaaccgccgccgtattccaatggcgcccaaggccgagaagaagcccgccgccaagaagcctgcggaggaggagccggcggcggagaaggccccggcggggaagaagcccaaggccgagaagcggctccctgcgggcaagtccgcgggcaaggagggtggcgagaagaaggggaagaagaaggcgaagaagtcggtggagacgtacaagatctacatcttcaaggtgctgaagcaggtgcacccggatattggcatctcgtccaaggccatgtccatcatgaactccttcatcaacgacatcttcgagaagctggcggcggaggcggccaagctggcgcggtacaacaagaagcctaccattacgtcccgcgagatccagacctccgtccgcctcgtcctccccggcgagctcgccaagcacgccgtctccgagggcaccaaagccgtcaccaagttcactagctcctaggcgagcgatgcgacgtgcactcgtctcctcttcttgcagtagtaccatagtagtacggttaggtgtgttgccgcggtggtagttgccgctgcgtttgctttctgggctcggttgatgtcttttatgtaagaaagtaactgtattgtgtctgcagtatcttaccatgcatgttttaagtagcatcccataatctataaggaatatgttttaatatgttctccaaaaaaaaaaaaaaaaaa

SEQ ID NO: 1784 - DNA, 810 bp, Zea mays
  Clone ID: TF_ZmC369_115
attgggtacctcgaggccggccgggacccagcaacaagcaacctcgtccccaaacaagcaaccaccgcctccccgatctcgtcgagaggaagcccaatcccgaaaccgccgccctattccaatggcgcccaaggccgagaagaagcccgccgccaagaagcctgcggaggaggagccggcggcggagaaggccacggcggggaagaagcccaaggctgagaagcggctccccgcgggcaagtccgcaggcaaggagggtggcgagaagaaggggaagaagaaggcaaagaagtcggtggagacgtacaagatctacatcttcaaggtgctgaagcaggtgcacccggacattggcatctcgtccaaggccatgtccatcatgaactccttcatcaacgacatcttcgagaagctggcggcggaggcggccaagctggcgcggtacaacaagaagcctaccattacgtcccgcgagatccagacctccgttcgcctcgtcctccccggcgagctcgccaagcacgccgtctccgagggcaccaaagccgtcaccaagttcaccagctcctaggcgagcgatgcgacgtgcactcgtctcctcttcttgcaggagtacaatagtagtacggttaggtgtgttgccgcggtggtagttgccgctgcgtttgctttctgggctcggttgatgtcttttatgtaagaaagtaactgtattgtgtctgcagtaccttaccgtgcatgttttaagtagcatcccataatctataaggccccgtttgtttcgttaaaaaaaaaaaaaaaaaagcggcc

SEQ ID NO: 1785 - DNA, 759 bp, Zea mays
  Clone ID: TF_ZmC369_83
acccagcaacaagcaatcctcgtccccaaacaagcaaccaccgcctccccgatctcgtcgagaggaagcccaatcccgaaaccgtcgccgtattccaatggcgcccaaggccgagaagaagcccgccgccaagaagcctgcggaggaggagccggcggcggagaaggccacggcggggaagaagcccaaggccgagaagcggctccccgcgggcaagtccgcaggcaaggagggtggcgagaagaaggggaagaagaaggcaaagaagtcggtggagacgtacaagatctacatcttcaaggtgctgaagcaggtgcacccggacattggcatctcgtccaaggccatgtccatcatgaactccttcatcaacgacatcttcgagaagctggcggcggaggcggccaagctggcgcggtacaacaagaagcctaccatcacgtcccgcgagatccagacctccgtccgcctcgtcctccccggcgagctcgccaagcacgccgtctccgagggcaccaaagccgtcaccaagttcaccagctcctaggcgagcgatgcgacgtgcactcgtctcctcttcttgcagtagtaccatagtagtacggttaggtgtgttgccgcggtggtagttgccgctgtgtttgctttctgggctcggttgatgtcttttatgtaagaaagtaactgtattgtgtctgcagtaccttaccatgcatgttttaagtagcatcccataatctataaggaatatgttttaac

SEQ ID NO: 1786 - DNA, 976 bp, Zea mays
  Clone ID: TF_ZmC369_98
atgtctgggcccccatccaccacgtcagcgatccgcatcgcatccgtcgtccggaacggccgaaccccgtcgaactcctccacgtcagcgatccgcgtcgcatatccacccacaaatggcgtccaacctcccgcactctataaagtggcgcccccagcagccttctttcgcacccagcagcaagcaatctcgtccccaaacaagcaaccaccgcctccccgatctcgtcgagaggaagcccaatcccgaaaccgccgccctattccaatggcgcccaaggccgagaagaagcccgccgccaagaagcctgcggaggaggagccggcggcggagaaggccacggcggggaagaagcccaaggccgagaagcggctccccgcgggcaagtccgcaggcaaggagggtggcgagaagaaggggaagaagaaggcaaagaagtcggtggagacgtacaagatctacatcttcaaggtgctgaagcaggtgcacccggacattggcatctcgtccaaggccatgtccatcatgaactccttcatcaacgacatcttcgagaagctggcggcggaggcggccaagctggcgcggtacaacaagaagcctaccattacgtcccgcgagatccagacctccgtccgcctcgtccttcccggcgagctcgccaagcacgccgtctccgagggcaccaaagccgtcaccaagttcactagctcctaggcgagcgatgcgacgtgcactcgtctccttcttgcagtagtacaatagtagtacggttaggtgtgttgccgcggtggtagttgccgctgcgtttgttttctgggctcggttgatgtcttttatgtaagaaagtaactgtattgtgtctgcagtaccttaccatgcatgttttaagtagcatcccttaatctataaggaatatgttttaatatgttcaaaaaaaaaaaaaaaaagggcggccgctcgcgatctagaacta

SEQ ID NO: 1787 - DNA, 364 bp, Zea mays
  Clone ID: TF_LIB3279-044-P1-K1-D9
gcctcattcatctccattccaaacactcttatattttcactctgccttcgcggcgaggcgatatcgatggagtgagggcgatcacgaagagcaccgcgcgcaagtccacgtggcaggtaaggtcccgaggaagcagctggcaaccaatgcggtgcgcaagtcgtcccctgctgaccggtggcgtgaagaagccgcaccggttccgcccgggcaccgaggcgctgcacgagatcctcaagtaccagaagagcacggagcttctcattcgcaagctgcccttccaacgcctggtccgcgagatcgcgcaggacttcaagaccgacctccgttttcagtccttcgtcgtcgcctgtgctgaaggagg

SEQ ID NO: 1788 - DNA, 383 bp, Zea mays
  unsure (1)..(383): unsure at all n locations
  Clone ID: TF_LIB4729-111-A1-K1-C1
agagncccacgncccgtccgaactccgaaccncataacagagtaaagcctcctcggcctccctgtccccagccttccccgatggcccgcacgaagtagacggcgcgcaagtcgacgggcggnaaggcgccgcggaagnagctggngaccaaggtggcgcgcaagtccgcgccggcgccgggcggcgtgaagaaaccgcaccgcttccgcccgggcaccgtcgtgctgcgcgagatccgcaagtactagaagagctcggagttgctgtatccgcaagctcccgtcccagcgtccggtccgtgagatcgcgcaggacttccagatgaacctccggatccaaattcttcgccgtcgccgcgctcgatgaggccgatgaggcccacc

SEQ ID NO: 1789 - DNA, 454 bp, Zea mays
  Clone ID: TF_LIB4976-058-A1-K1-A12
tgttcacaatcgttcaagcgcaagctgcctcttcctcgtcgtccggtcgtgagaagggatggcgggccgtggcaaggctatcggcgctggcgccgcgaagaaggcaacgtcgaggagctccaaggccggactccagttccccgtcggcaggattgccaggttcctcaaggcgggcaagtacgcggagcgcgtcggcgccggcgcccccgtgtacctcgccgccgtcctcgagtacctcgcggctgaggttctcgaacttgtggggaactcggcgcgggagaccttgtcgtcttccccaagggcatgagctgcacctgggacgtcgccgaggtcgtcgacaagcactacaacttcgagtagccgccgccgccgactagccctgcggcgctcgatgtagacttgctgtgctcttgtactctgaaccaccgtgtaataaagctccggattagggtac

SEQ ID NO: 1790 - DNA, 396 bp, Zea mays
  Clone ID: TF_LIB3227-021-P1-K1-F10
ctcaactacgaaggtcccttttttttctcggtctggaagcgccgcagtcgctgacatggacgtgagcgtagcatgcagaaaggcgaagaaaggcgcggtcagtcgcaaggccggctggccgacgaagaagtcggtgtcgcggtcctacagggccgggctgcaattccccgttagtcgcgtctggcggtacctgaaaaagggccggtacgcgcagcgtgtacgcacgggtgcgcccgtctacctcgtcgacgttctggagtacctagcggacgaggtgcttgtgctcgacggctactcggcaagggacaacatgaagacgcgcatgataccgcgccacgtgctgctggtgatccgaaacgacgaggagctcagtaagctgctggccggcgtcaccat

SEQ ID NO: 1791 - DNA, 450 bp, Zea mays
  Clone ID: TF_LIB3088-031-Q1-K1-E9
acgagtctccctagcaatctctagcatcagatcctcgtgcaaagcaaagcgctagcgtatctagtgtccccatggcccggacgaagcatacagcgatgaagtccactggcggcaaggcgcctaggaagcagctggccacgaaggcagctcgcaagtctgccccggctaccgactgagtgaagaagccccaccgttttcgccccggcaccgtatcgctacgggagatccgcaagtaccagaagagcactgagctgctgatccgcaagctgccgttccagcacctggtgcgtgagatcgcccatgattccaagaccgaccttcgctttcagagcttcggcgtcgcctctctgcatgacgcatgctatgcctaccttgtccatctcttcgaggacaccaacacttgcgccattcacgccaagcccgttaccatcatgcccaaagacattcatc

SEQ ID NO: 1792 - DNA, 542 bp, Zea mays
  unsure (1)..(542): unsure at all n locations
  Clone ID: TF_LIB3354-104-Q6-K6-B1
cccgtttcgacccagcgtnctggcatccgcngagagctggggccgnccaggcnnccaaaaagcagnngccccgccgcgcagaggaagaagagagcagaggagggaggcncgnncgaagcagaccgcccgcaagnccacgggaggcaaggccccccgncagcagctcgccaccttgcggcgaggaagtcggcgccggcgaccggcggcgtgaagaagccccacaggtacaggcccggaaccgtggcgctgcgcgagatccgcangtnccagaagagcacggagctgctgatccgcangctgcccttccagcgcctggtgcgcgagatcgcgcaggacttcaagacagacctccggttccagagccacgccgtgctggcgctccaggaggccgccgaggcctacctcgtcggtctcttcggggacaccttcctctgcgccatccacgcttagcgcgtcaccatcatgcccaaggacatccagctcgcccgccgcttccgtggcgagcgcgcgttgctcttctctccggggatctgttgaatgtc

SEQ ID NO: 1793 - DNA, 786 bp, Zea mays
  Clone ID: TF_ZmC369_120
cattgggtacctcgagccggccgggaaagaacagccaacatatctcctcgcattttccttgcaaccgattgcctatccccctcccaacccaagaccgatggcgcccaaggccgagaagaagcccgcggcgaagaagccggcggaggaggagcccgcggcggagaagacgaccgccgggaagaagcccaaggcggagaagcgggtccccgcgggcaagtccgccggcaaggagggcggcgagggcaagcgtggcaagaagaagggcaagaagagcgtggagacgtacaagatctacatcttcaaggtgctgaagcaggtgcacccggacatcggcatctcgtccaaggccatgtccatcatgaactccttcatcaacgacatcttcgagaagctggccggcgaggccgccaagctcgcgcgctacaacaagaagcccaccatcacgtcccgcgagatccagacctccgtgcgcctcgtgctccccggcgagctcgccaagcacgccgtctctgagggcaccaaggccgtcaccaagttcacctcctcctaggcttgcacgctcgccctttgtaggcatctcttgtgttgatgttccccttgttgtagttatatgttgctggtttctctgtcggcgctgctcgtaactgcgtcatgtaaccctgcaaggacttgtttatttgtgaatcatcaacactttgttgttgatcactcatgttccaaaatctgagtttgacgctcgagcatgcctcatttgttcattctaaaaaaaaaaaaaaaaaagcggcc

SEQ ID NO: 1794 - DNA, 800 bp, Zea mays
  Clone ID: TF_ZmC369_124
aaattccagcaacagccaacatatctcctcgcattttccttgcaaccgattgcctatccccctcccaaccaaagaccgatggcgcccaaggccgagaagaagcccgcggcgaagaagccggtggaggaggagcccgcggccgagaagacgaccgccgggaagaagcccaaggcggagaagcgggtccccgctggcaagtccgccggcaaggagggcggcgagggcaagcgtggcaagaagaagggcaagaagagcgtggagacgtacaagatctacatcttcaaggtgctgaagcaggtgcacccggacatcggcatctcctccaaggccatgtccatcatgaactccttcatcaacgacatcttcgagaagctggccggcgaggccgccaagctcgcgcgctacaacaagaagcccaccatcacctcccgcgagatccagacctccgtgcgcctcgtgctccccggcgagctcgccaagcacgccgtctctgagggcaccaaggccgtcaccaagttcacctcctcctaggcttgcacgctcgccctttgtaggcttctcttgtgttgatgttcgccttgtgttgtagttagatgttgctggtttctctgtcggcgctgctctgcttctgtaggaactgcgtcatgtaacccagcaaggacttgtttatttgtgaatcatcaacactttgttgttgatcacttatgttccaaattctgagtttgacgctggagcatgcctcatttgttgctggaatttgagttggtggtttgcataaacagatgaaatttatttcggtt

SEQ ID NO: 1795 - DNA, 741 bp, Zea mays
  Clone ID: TF_ZmC369_132
aattcggcacgagggaccgatggcgcccaaggccgagaagaagcccgcggcgaagaagccggcggaggaggagcccgcggccgagaagacgaccgccgggaagaagcccaaggcggagaagcgggtccccgcgggcaagtccgccggcaaggagggcggcgagggcaagcgtggcaagaagaagggcaagaagagcgtggagacgtacaagatctacatcttcaaggtgctgaagcaggtgcacccggacatcggcatctcctccaaggccatgtccatcatgaactccttcatcaacgacatcttcgagaagctggccggcgaggccgccaagctcgcgcgctacaacaagaagcccaccatcacctcccgcgagatccagacctccgtgcgcctcgtgctccccggcgagctcgccaagcacgccgtctctgagggcaccaaggccgtcaccaagttcacctcctcctaggcttgcacgctcgccctttgtaggcttctcttgtgttgatgttcgccttgtgttgtagttagatgttgctggtttctctgtcggcgctgctctgcttctgtaggaactgcgtcatgtaacctagcaaggacttgtttatttgtgaatcatcaacactttgttgttgatcacttatgttccaaattctgagtttgacgctggagcatgcctcatttgttgctggaatttgagctggtggtttgcataaacagatgaaatttatttcggtt

SEQ ID NO: 1796 - DNA, 775 bp, Zea mays
  Clone ID: TF_ZmC369_32
cctcgaggccggccgggagcaacagtcaacatatctcctcgcattttccttgcaaccgattgcctatccccctcccaacccaagaccgatggcgcccaaggccgagaagaagcccgcggcgaagaagccggcggaggaggagcccgcggcggagaagacgaccgccgggaagaagcccaaggcggagaagcgggtccccgctggcaagtccgccggcaaggagggcggcgagggcaagcgtggcaagaagaagggcaagaagagcgtggagacgtacaagatctacatcttcaaggtgctgaagcaggtgcacccggacatcggcatctcctccaaggccatgtccatcatgaactccttcatcaacgacatcttcgagaagctggccggcgaggccgccaagctcgcgcgctacaacaagaagcccaccatcacgtcccgcgagatccagacctccgtgcgcctcgtgctcccgggcgagctcgccaagcacgccgtctctgagggcaccaaggccgtcaccaagttcacctcctcctaggcttgcacgctcgccctttgtaggcttctcttgcgttgatgttcccattgtgttgtagttagatgttgctggtttctctctgtcggcgctgctcgtaactgcgtcatgtaaaccagcaaggacttgtttatttgtgaatcatcaacactttgttgttgatcacttatgttccaaattctgagtttgacgctcgagcatgcctcatttgcagctaaaaaaaaaaaaaaaaagcgg

SEQ ID NO: 1797 - DNA, 709 bp, Zea mays
  Clone ID: TF_ZmC369_71
agccacatatctcctcgcattttccttgcaaccgattgcctatccccctcccaacccaagaccgatggcgcccaaggccgagaagaagcccgcggcgaagaagccggtggaggaggagcccgcggcggagaagacgaccgccgggaagaagcccaaggcggagaagcgggtccccgcgggcaagtccgccggcaaggagggcggcgagggcaagcgtggcaagaagaagggcaagaagagcgtggagacgtacaagatctacatcttcaaggtgctgaagcaggtgcacccggacatcggcatctcctccaaggccatgtccattatgaactccttcatcaacgacatcttcgagaagctggccggcgaggccgccaagctcgcgcgctacaacaaaaagcccaccatcacgtcccgcgagatccagacctccgtgcgcctcgtgctccccggcgagctcgccaagcacgccgtctctgagggcaccaaggccgtcaccaagttcacctcctcctaggcttgcacgctcgccctttgtaggcttctcttgtgttgatgttcccccttgtgttgtagttagatgttgctggtttctctctgtcggcgctgctcgtaactgcgtcatgtaaccctgcaaggacttgtttatttgtgaatcaccacccctttgttgttgatcccttatgttccaaattttgagtttgccgct

SEQ ID NO: 1798 - DNA, 750 bp, Zea mays
  Clone ID: TF_ZmC369_81
gaggccggccgggaaaacgaaagcttacgtccccaaatcgaccaagcgaattcaccacagcttctcaccaccgataccttcgatggcacccaaggcggacaagaagccggcggcgaagaagtccgcagaggaggagcccgcgacagagaaggcggagaaggccccggcggggaagaagcccaaggccgagaagcgcctcccggcgggcaagtccgccggcaaggagggaggcgagggcaagaaggggaaaaagaaggctaagaagtccgtggagacctacaagatctacatcttcaaggtgctgaagcaggtgcaccctgacatcggcatctcgtccaaggccatgtccatcatgaactccttcatcaacgacatcttcgagaagctcgcggccgagtccgccaagctggcgcgctataacaagaagcccaccgtcacctcccgcgagatccagacctcggtgcgcctcgtcctcccaggcgagcttgccaagcacgccgtctccgagggcaccaaggccgtcaccaagttcacctcttcgtaggttcatagtactaggctgggtggtgttggtagacgtggctcaatttatctggtaggggcagtcatggatgatatgatctgcgtctatttgagctgttaagactgatgaacattgttccacgtcacgttgtgtttgatgggcattgttccagatcacgttgttaagactgcagaactgtgcctgacatggaacaagtatggtactcg

SEQ ID NO: 1799 - DNA, 826 bp, Zea mays
  Clone ID: TF_ZmC369_85
gggaccctcgaggccggccgggccgggatcgaaatcttccgtctccaatcctcctagcgaattcaccacagcttctcaccaccgctaccttcgatggcacccaaggcggacaagaagccggcggcgaagaagcctgcagaggaggagcccgcgacagagaaggcggagaaggctccggcggggaagaagcccaaggccgagaagcgcctcccggcgggcaagtccgccggtaaggagggcggcgagggcaagaaggggaaaaagaaagcgaagaagtccgtggagacctacaagatctacatcttcaaggtgctgaagcaggtgcaccccgacatcggcatctcgtccaaggccatgtccatcatgaactccttcatcaacgacatcttcgagaagctcgcggccgagtccgccaagctggcgcgctataacaagaagcccaccgtcacctcccgcgagatccagacctcggtgcgcctcgtcctcccaggcgagcttgccaagcacgccgtctccgagggcaccaaggccgtcaccaagttcacctcttcgtaggttcatagtactaggctgggtggtgttggtagacgtggctcaatttatctggtaggggcagtcatggatgatatgatctgcgtctatttgagctgttaagactgatgaacattgttccacgtcacgttgtgtttgatgggcattgttccagatcacgttgttaagactgcagaactgtgcctgacatggaacaagtatggtacttgaaatttctgtgagtgcattgaaacccgaaacctgcagtccttgaaaaaaaaaacccgaaaacact

SEQ ID NO: 1800 - DNA, 749 bp, Zea mays
  Clone ID: TF_ZmC369_30
agaccacctaggcaattcgccgcagcctctcaccctcgcgagtcccgacctcccgcagccgccgcacagatggcacccaaggcggagaagaagccggcggccaagaagcccgcggaggaggagcccgcgacagagaaggtggagaaggctccggcggggaagaagcccaaggccgagaagcgcctcccggcgggcaagtccaaggagggcggcgagggcaagaaggggaaaaagaaggcgaagaagtccgtggagacctacaagatctacatcttcaaggtgctgaagcaggtgcacccggacattggcatctcctccaaggccatgtccatcatgaactccttcattaacgatatcttcgagaagctcgctgctgaggccgccaagctcgcgcgctataacaagaagcctaccatcacctcccgtgagatccagacctccgtgcgcctcgtccttcccggggagctcgccaagcacgccgtctccgagggcaccaaggccgtcaccaagttcacctcggcctaggctgcgcggccgccgcttgcaggattctctcctgtgttcacgtctcttgctgtagttaggtgctgctgcctgctggcttctatgtatgttatctatctgtctgtagcaactgtgttatctgataggaccgtaatggtgcttattcaacccagctatatgtttctatgtgaatcatctctctatcggttgttgagtaagaaaaaaaaaaaaaaaaaaggccccta

SEQ ID NO: 1801 - DNA, 322 bp, Zea mays
  unsure (1)..(322): unsure at all n locations
  Clone ID: TF_700381601H1
gagctgctcatccggaagctgcccttccagaggttggtgagggagatcgcgcaggatttcaaaaccgacctgaggtttcagagcgcaccatcggtgcgctgcaggaggctagcgaacgtagcctggtgggtctgttcgaagataccaacctgtgtgccatccacgctaagagagtcaccatcatgcccaaagacatccagttggctcgccggatacggggagagagagcttaagtgaaggcagttnttatggcgttttgtagtaaattctgtaaaatactttggtttaatttgtgactttttttgtaagaattgtttataat

SEQ ID NO: 1802 - DNA, 399 bp, Zea mays
  Clone ID: TF_LIB3357-024-P1-K1-C11
ctaaaatattcattacgcccgcctgcgtatagggatcttaacggaagaccgatggcgcccatgggcgggacgaactccgccaataacacgccccttgaggacgagcccgccgtcgcgtagactaccgccggcaagaagcccaaggcgcagaatgctatcccggatggcaagtccgacgccatggatgacggtgagggcaagcgtggcttgaagaaagtcacgattagcgtggagacgtacacgatctacatcttataagcgctgaatctggtgctcccgtacatcagtatctcctccaaggccatgtccatcatgaactccttcatcatcaacatgttctagaagctggtcagcgaggccatcaagctcgcgcgctacaacaagtagcccaccatcacc

SEQ ID NO: 1803 - DNA, 1095 bp, Zea mays
  Clone ID: TF_ZmC6067_4
attgggtacctcgaggccggccgggtttttccggcctctcttcctcgcgcggcgaccacccgattcgaagcgtgcggagagaccgaagaagcgggagagatggctcgtaccaagcagactgctcgcaagtccacgggagggaaggctcccaggaagcagcttgccaccaaggctgcccgtaagtctgcccccaccactggtggagtgaagaagcctcaccgctaccgccctggaactgttgccctccatgagatccgcaagtatcagaagagcactgagctgctgatcaggaagctgcccttccagaggctcgtcagggaaattgcacaggacttcaaaactgatttgcgtttccagagccatgcggtgcttgccctccaggaggctgctgaggcataccttgttggcctgtttgaactctctgactcagctacgatctgaaagaaacccgccaccagctctcgtccttccttctctccaatccaaccgcaatcctttcagcttcagcttcttctgctccttctctcgtgaggaggcgtggtgagagactgcgactgcgcgatggaggcgtcgtcgtcggcgttggcgctcgtggccgccgtgctcctcctctcctccccgctcgctgcgtcagatttctgcgtgtgccgttcggaccagccgacggcggtgctgcagaaggcgatcgacttcgcgtgcggcccgcagggcggcgccgactgcacgcccatcctgcagggcggcgggtgctacagcccggacaccgccgccgcgcactgctcctgggccgccaacacctactaccagaacaacaaggccaggggcgccacctgcgacttcggcggcgcagccaccgtctccaccaccgacccgagtttctccgggtgcactttcgcttccagtgccaccagcgccggtgctgggactggaaccgggacggcgggcagcactactaccggcctgggacccacgggcaacgcctttgacgccgccgccgccgccgcgccgggcctgctccccagcgccgcgtccctcggcctcgcactcgccgacctctccttcctaacctagccctgccgcgccattaacggcagc

SEQ ID NO: 1804 - DNA, 442 bp, Zea mays
  Clone ID: TF_LIB3153-005-Q1-K1-F11
aatctgcccttgccgccgccactgcccgatccacgtgtgcagactgctccctcctcctatgcgctcctaatgcacagcacgaagcagacctcgcgcaagtcgaccggcatcaacgcgccgcgcaagcagttggccaccaaggcggcgcgcaagtcgtacccggtcacgggcggcgtgaacaagccgcaccgcttccgccccgtcaccgtcgcgctccgcgagatccgcaagtaccagaagagcacagatctgctcatccgcatgcatccctaccagcgcctcgttcgagagatcgcgcaggacttcaagacggacctgcggttacagtcctctgccgcggcggctctacaggacgcctctgatgcatacctggtggcgctcttcgaggacaccaacctctgcgccattcacgccaagagggtcaccatcatgcccaaagaca

SEQ ID NO: 1805 - DNA, 464 bp, Zea mays
  Clone ID: TF_jC-zmX700431125a1
attcggctcgtggcccatggacgagaagaattcagcggagaagaagccggctggcgtggagaaggcggttaagacgaccgcaggtcagaagcccaagtgcgagaagcgcctggcggcctcaaagtcctcctgtaaggagggcggctagaagacggggtagacgaaggccaagaagagcgtggagacctacaaaatgtacatattcaaggtgctgaagcaggtgcaccccgacatcggcatctcttgcatggccatgttcatcaggaacttcttgatcaacgacatctaccagaagctgggcggcgaggtcgtcaagctggcgcggttcatcaagaagcccaccatcacctcccgcgagatccagacctccgtgcgcctcgtactcccaggagagctcgccaaacacgccgtcttcgagggaaccaagggcgtcaccaagtccaccagccattgagcagactgca

SEQ ID NO: 1806 - DNA, 375 bp, Zea mays
  unsure (1)..(375): unsure at all n locations
  Clone ID: TF_LIB3069-017-Q1-K1-H6
ggagggtggcgagaagaagggtaagaagaatgcaaagaagtcggtggagacgtgcaagatgcgacatctttaaggtgctgaagcaggtgcacccggacattggcatctcgtccaaggccatgtccatcatgaactccttcatcaacgacatcttcgagaagctggcggcggaggcggccaagctggcgcggtacaacaagaagcctaccattacgtcccgcgagatccagaccttcgtccggctcgtcctccccggcgagctcgccaagcacgccgtctccgagggcaccaaagccgtcaccaagttcactagcttctacgcgagcgatgcgacgtgcactcgtctnctcttcttgcagtagtgcaatagtagta

SEQ ID NO: 1807 - DNA, 473 bp, Zea mays
  unsure (1)..(473): unsure at all n locations
  Clone ID: TF_LIB3076-059-P1-K6-E11
ctcctcgcttttccttgcaccggtggggttccccctcccaccaaanccntggcgcccaaggccgnanagnaagcccgcggcngaanaaccggtggaggaggagcccgcgngccgtaaaagacgaccgccgggaagaacccaagcggagaagcgggtccccgctggcaagtccgccggcaagggagggcggcgagggcaagcgtggcaagaagaagggcaagaagagcgtggagacgtacaagatctacatcttcaaggtgctgaagcaggtgcacccggacatcggcatctcctccaaggccatgtccatcatgaactccttcatcaacgacatcttcgagaagctggccggcgaggccgccaagctcgcgcgctacaacaagaagcccaccatcacctgccgcgagatccagacctncgtgcgcctcgtgctccccggcgagctcgccaagcacgccgtctctggaggcacc

SEQ ID NO: 1808 - DNA, 334 bp, Zea mays
  Clone ID: TF_LIB3088-027-Q1-K1-A6
acggttatacatcgccatctaaaactagagacgtttattacaaagccatcaatacctaaccgatgagcaatttgatatgcgagcgtgctcacaaccaccaagggctacaagaactcacctgagaagacaccaactaacgagaactccgttaatagggcaacacccaacaattttataccctgcaagggagacccacataagaacgcaacgaaaaacgctaacaacagcgttgctacttacaagatctacatcttcaaggagctcaagcatgtgcactcatacataagcatctcgaccaaggccatgtgcatcatgaactccttcatcaacgaca

SEQ ID NO: 1809 - DNA, 346 bp, Zea mays
  unsure (1)..(346): unsure at all n locations
  Clone ID: TF_LIB3604-002-P1-N6-F12
aaggctgggtacacgttcagcaacccggtttttaagatgttgaatgggtgggtaaaagactccagacccgacaaccgccaaaagtatgcgcgggggggggggggggctccntcaaacaggccaagggcaggttactaggttattttttcacaaaacttacagggggaggggggggtacccccaaaacgagcgcaaaggtcttcctcccgttgtcagactcacgccctttcgccacggatccttcttgccaggtgaatgtccttgggcctggtggtcacccccttggcctgggtcgcgcacagattggtatcttcaaagtgccccaccaggggggcccttgttggct

SEQ ID NO: 1810 - DNA, 404 bp, Zea mays
  Clone ID: TF_LIB3076-005-Q1-K1-D5
attttcattcctcctctatccattcacctatcggcaattcattggccgtaattccacatcgcgcccactgccaaaaccaagccctcacccaacaaacccaccttggagaacgcccataagaagcccactgccgaaaaactcatgccgcgcaaggaggtcggcgagaagaacgggaacacgaacgccatgaagagcgtcacgacctacaagatctacatattcaacgcgctcaatcaggtgcacccggacattggtatctcgtccaatgccatgtccatcatgaactccttcatcaactacatcttcgagaagctggctgtcgatgccggcaatctcgcccgctacaacaagaagcccaccataaccttcctggagatccagacttttgtgcgcctcgtacttcc

SEQ ID NO: 1811 - DNA, 392 bp, Zea mays
  Clone ID: TF_LIB3067-001-Q1-K1-E7
caaatgctcctagcgaattcaccacagcttctcaccaccgctaccttcgatggcacccaaggcggacaagaagccggcggcgaagaagcctgcagaggagcccgcgacagacaaggcggagaaggctccggcggggaagaagcccaaggccgagaagcgcctcccggcgggcaagtccgacggtaaggagggcggcgagggcaagaaggggaaaaagaaagcgaagaagtccggggagacctacttgatctacagcttcaaggtgctgcagtatgtgcacccctacatcgggatatcgtccaaggccatgtgcattatgaactcctgctcatcgactgtctcctagaagctcgcgtccttatccgtcaagctggcgcgctatatcaagaagc

SEQ ID NO: 1812 - DNA, 456 bp, Zea mays
  Clone ID: TF_LIB4742-054-R1-K1-C10
cattggtacctcgagccggcggggatcgtttcctcaattcgttccgtccaggcaaggaagaaatcgagcagccaaggagaggtgaagatggttcgtactaagcagaccgcccggaagtccaccggaggcaaggctccgcgtaagctgctcgccaccaaggcggtgaggaagtcggcgccgactaccggcggcgtgaacaagccccacaggtactggcccgggacggtggtcgctgcgctagatccgcaagtaccacaagagcacggagctgctgatccggaagttgtccttccagagcctggtccttgagatcgctcaggacttcaagacggatctgaggttccatagccacgccgtcctggtcctccaggaagccgccgaggtctacctcttccgcctgttccaggacaccaacctctgcgccatccacgcaaagcgcgtcaccatcctggccaa

SEQ ID NO: 1813 - DNA, 450 bp, Zea mays
  unsure (1)..(450): unsure at all n locations
  Clone ID: TF_LIB3137-005-Q1-K1-G10
ccctaaccctaatctcccctcccttctccgatggcccgcaccaagcagacggctcgcaagggcaccggcggcaaggccccccggaagcaactggcaaccaaggcggcccgcaaatccgcccctgccacaggcggcgtgaagaagccccatcgcttccgccccggcactgtggctctccgtgagatccggaagtaccagaagagcaccgagttgctgatccgcaagctccccttccagcgccttgtccgtgagattgctcaggatttcaaggcccgatctccgcttccagagctctgcctgtgtcggcgctgcaggaggcngtcggaggcctacttggtggnnnctgntcgaggataccaacctctgcgcgattcacgcaagagggtgactatcatcncgaaggacatccagctggccaggagatcccgggcgagagggcttgacatgtct

SEQ ID NO: 1814 - DNA, 819 bp, Zea mays
  Clone ID: TF_ZmC119_1294
ttgggtacctcgaggccggccgggactcgcattccgattcgttccactcctgagcactttctcctcgtccccgacaagccaatcgaagccgagatacggccatggactccaccggcaccggagcagggggtaaggggaagaagggagcggccgggcgcaaggtcggcgggccaaggaagaagtcggtgtcgaggtccgtgaaggccgggctccagttccccgtcggccgcatcgggcgctacttgaagaagggccgctacgcgcagcgtgtcggcaccggcgcccccgtctacctcgccgctgtcctcgaatacctcgccgctgaggtactgcaatttgagcccagttctttgtttgtactgatttggcgacggagtattaattcttgcgtcccgattcgttttgcttccttgtttgaccaggttctggagctcgccggtaatgctgccagggacaacaagaagactcgcattattccgcgccacgtgcttctggcgatccggaacgacgaggagcttgggaagctgttgggcggcgtgactatcgctcacggcggtgtgctccccaatatcaaccctgttctgctgcccaagaagacggcggagaaggcgtccagtgtggggagcaaggaggcaaagtcgcccaagaaggccgccaagtcccccaagaaggcatagactgactgtctggagtgatctgatgtttagcaggaccttgataccagtatgcggtgatgcgtaggctgtagatgggtcgaatgtgcttgtgtgtgtatgtgccctgctgcaagttgccctttgctatttaaaatggaagaag

SEQ ID NO: 1815 - DNA, 580 bp, Zea mays
  unsure (1)..(580): unsure at all n locations
  Clone ID: TF_LIB4757-029-Q1-K1-B8
ccggccgggacccccacatcacanntacgccatggcccgcaccaagcagaccgcacgcaagtccaccggaggcaaggcgccccgcaagcagctcgccaccaaggcggcgcgcaagtcggcacccgctgccggtggtgtcaagaagccccaccgctacaagcccggtaccgtcgcgctgcgcgagatccgtcgctaccagaagtcgacggagctcctcatccgcaagctgcccttccagcgtctcgtccgtgagatcgcccaggacttcaagacggacctgcgcttccagtcgagcgccatcggcgcgctccaggaggccagcgaggcctacctcgtcggtctgttcgaggacaccaacctggctgccatccacgccaagcgtgtcacgatccagcccaaggacatcgcccttgcgcgccgtctccgcggcgagcgctcgtaagcacgtcgccaccatggccgcgtcctagcgctcctcgcctcccctgcctcgcctgcgccgtccatttacctccctcttgtacaattaccccttgatgcgatctccttgccgtgtaaaaaaaaaaaaaaaaaagcggcc

SEQ ID NO: 1816 - DNA, 306 bp, Zea mays
  Clone ID: TF_LIB3069-011-Q1-K1-F6
cccaccatcacctcccgcagagatccagacttccgtgcgcctcgtgctcaccggcgagctcggcaagcacgccgtctctgagggcaccaaggcctgcaccaatttcacctcctcctatgcttgcacgctcgaccttgcaagctcttctggtgctgatgttcacactgagttgaagttagatgtcgctggtttctctgtcagagctgctctatttctgtaggaactccttaatgtaacccaccagggcctggttaattgggaattattaacactttggtggtgatcacttatggttcaaattcttaa

SEQ ID NO: 1817 - DNA, 442 bp, Zea mays
  unsure (1)..(442): unsure at all n locations
  Clone ID: TF_LIB3607-002-P1-K6-A11
ccgggncgacccagcgnccgggctgggaagggagggaaaggcgggcttgccgcgaacccacggcggccaagnccgccgagagaggacaaggggaagaaggccccaancncacgcnccncccgcgccggcccccagnncccngnnggacgnanccaccgncagcngaagcagaggacccaggcaaanggncgaggggagcggaccgcanccnncnacnccgcngccaaccaggagnacccgaccgccgaggnncnggagccggcngggaangccagcaaggancngaaggngaagcgnancaccccncgccannngcagcnagccanncggggagacgaggagcnggacacccncancaagggcaccancgcaggcggaggggncaacccgcacaaacacaagncccngancaacaagncccccaaggagagaagaccagggg

SEQ ID NO: 1818 - DNA, 516 bp, Zea mays
  Clone ID: TF_LIB4730-068-R1-K1-G3
ggtaccctcgggctggccggaaaaaaaacaccgcatcttacatctccccagcaattcctagcaggaagcctcccatcctcactcgctcgcatggcccgtacgaagcagaacggcgaggaagcccaccggaggccaagtgcgccgaggaagcaactggcgactaaggcggaccgcaagtctggccctgcgaccggcggcagggaagaagccccaccggtttcgccccgataccggcgcgctgcgggagatccacaagtaccactagagcacggagctggtgatccggaagttgccgcttcaacgcctggtgcgggagatcgcgcaggacttaaagaccgtcctacactaccagagctctgctgctttcgcgctggagcaggcggatgaaggctaccttgctgggctcttggaggacacgaaactatgcgccattcacgccaaggacaggaccatcatgcccaagggcatccatgttgtccgacgcattcgggtaaggagtgcctaagcggggccctc

SEQ ID NO: 1819 - DNA, 545 bp, Zea mays
  Clone ID: TF_LIB4740-049-R1-K1-B11
gtaccctccgaggctggccaaaaaaaaaaaatcgaggacctcgtcgcgctccgcggcttcctcaactccgaccagacgctcttctctgacaacaccaggacccgtcgcgtcgtcgagcggctcagcaaggaccaggacgccttcttcagggccttcatcgaggggatgataaagatgggggagctccaaaaccccaggaaaggggagatacggcgcaactgtcgcgttgctaacaacgcgccgaggcaaccaaggacggcgatggcgtccgtacagacgacatctgagctccgccgaggacgggagatcgcgcaagacttcaagaccgacctacgcttccagagctcctgtgtctccgcgctgcaagaggcgggtgaggcctaccttggcgggctctgtgaggacaccaacctgtgtgccatccacgccaagcgcgtcaccatcatgccgaaggacatccagcttgcccgccgcatccgtgaggagagggcctaagcattatatattctcgcatgagtgcccgatcagaagatgcacagatgggc

SEQ ID NO: 1820 - DNA, 441 bp, Zea mays
  Clone ID: TF_LIB4764-128-Q1-K1-C12
acttgattcccgtatagctgcactgaacgcacctccaccgcgtgccaagcgccaccgctaaatgctaccgcgaactcatggggtcgcttggcccccccctcctcgccggcgaccagggctgcccgcaactggtgcccggccaccggcatcgcgaagaagccccaccgcttccgccccgggaccgtgccgctccgcgagatccgcaagtaccagaagagcaccgagctgctcatccgcaagctccccttccagcgcctcgtccgcgagatcgcgcaggacttcaagactgatctgaggttccagatcctctctccgtccgcgccgctccaagaggccgccaagaagcacctgacggacgccttcgaggacaccaacatttgcccaatcccccgccagcgcgacaccatcatgcccacggaccctccaccccgcgcggcgcat

SEQ ID NO: 1821 - DNA, 554 bp, Zea mays
  unsure (1)..(554): unsure at all n locations
  Clone ID: TF_LIB3635-001-P1-K6-F5
gcgtccggtcagtcacagctcacagcaaacaccgcggagccgcccccgctcccaacccgaccggcaagcgcaagccccccaccgcggatcaatccgcagcatcgatggcgcccanaggcggagaaaaagccggcggcgaagaagcccgcggaggaggagcccgcgaccgagaagcggagaagctccggcagggaagaagccgaagcggagaaacgcctccccgcgggcaagtccggcgccggcgagggcaagaagggcaagaagaaagccaagaagagcgtggagacctacaagatctacatcttcaaggtgctcaagcaggtgcaccccgacatcggcatctcgtccaaggccatgtccatcatgaattccttcatcaacgacatcttcgagaagctcgccgcggaggccgccaagctcgcccgctacaacaagaagcccaccatcaccttccgcgagatccagacctccgtccgcctcgtcctacccggcgagctcgccaagcacgccgtctcttgaagcacaaagggggtcaccaagttcacttttgtttt

SEQ ID NO: 1822 - DNA, 639 bp, Zea mays
  Clone ID: TF_LIB4975-069-A1-K1-G5
acttttccggcctcccattcctcgcgcggcgaccacccgattcgaagcgtgcggagagaccgaagaagcgggagagatggctcgtaccaagcagactgctcgcaagtccacgggagggaaggctcccaggaagcagcttgccaccaaggctgcccgtaagtctgcccccaccactggtggagtgaagaagcctcaccgctaccgccctggaactgttgccctccgtgagatccgcaagtatcagaagagcactgagctgctgatcaggaagctgcccttccagaggctcgtcagggaaattgcacaggacttcaaaactgatttgcgttttcagaatcatgcggtgcttggcctccaggaaggtggtgagggataacttggtgggctggttgaagacaccaacctggggggcatccatggtaagcgtgtggacatcatggccaaagacattccgctggcaaggaagaatcccggcgagaagggctaatcggcacctccaacattgtgagaaaaacatggaagcctgggggtattggtaatccggtggccttggaaagacatatataaaagggttggtttgtggatcgcaaggttctcctctggtaacggtggtggtaaccttggtgggggtattggtaa

SEQ ID NO: 1823 - DNA, 590 bp, Zea mays
  unsure (1)..(590): unsure at all n locations
  Clone ID: TF_LIB4977-056-Q1-K1-D5
cgaagagacggcgaggaagtccgcgggggcaaggcgccgaggaagagttggcgactaaggcggccccgcagtctggccctgggagcggcggagttaagaangccccccggcttcggcccggtaccgtcgcggctcgggagatccgcaagtacccgaagagcgcagagctgctgatccgcaagctgccgttccagcgcctggtgcgggagatcgcgcaggacttcaagaccgacctacgcttccgnagctccgctgtctccccgctgcaggaggcggctgaggcctaccttggcggtctcttcgaggacaccaacctctgcgccatccacgccaagcgcgtcaccatcatggccaaggacatccagcttgcccgccgcatgccgtgtggagagggcctaagcatcgtatattctgtcatcagtgcccgatcagaagatgtagagatgtgctgggttctgtagtttgggttactgtcgaatctcgagnnaggtggtggtcactgctggaacttattatcatggtgcatatgagatgggcatgaactatgttatccgtaccaaaaaaaaaaaaaaaaaagggcccctagggcc

SEQ ID NO: 1824 - DNA, 693 bp, Zea mays
  unsure (1)..(693): unsure at all n locations
  Clone ID: TF_LIB4756-072-R1-K1-D4
cattgggtccctcgaggccggccgggactattcttgcctcgcattcctctagtgcatgaccccctattcgaagagcgcgccgagaccgaagaagcggtagagatggctcgtaccaagaatactgctcacaggtccactggagtgaatgctcgcatgaagcatcttgccaccaaggctgcccgatggtctgcccccaccactggagtactgaagaatgctcaccgctaccgccctgtaactgctgcactccgtgagatccgcaagtaccagaagagcactgagctgctgatcaggaagctgcccttccagaggctcgttagggaaattgcacaggacttcaagactgatttgcgtttccagagccatgcggtgcttgctctccaggaggctgctgaggcataccttgttggcctgtttgaggacaccaacctgtgcgccatccattctaagcgtgtgaccatcatgcccaaggacattcagctggcaaggaggatccgcggcgagagggcctaatcgccacctcaaacatcgtgacaaaaaatgaagtcctgnggttattgttaatctggtgccattgtaaggacatatgagtagggtttgatttgtggatcgcaagtttctcttctgctactgntgctgctacctttgctggggntattgctanggntgaatacttaagttaactatgcgctg

SEQ ID NO: 1825 - DNA, 625 bp, Zea mays
  Clone ID: TF_LIB4185-051-R1-L1-H7
aattcggcacgagggtttgttccgtccaggcaaccaaaatagcgttgccccgccgcgcagaggaataagagagcacaggaggatggctcgtacgaagcacaccgtccgtaggtccacgggaggcaaggccccccgcaagcagctcgccaccaatgcggcgaggaagtccgcgccgacgaccggcggcgtgaagaagccccacaggtacaggcccggaaccgtggcgctgcgcgagatccgcaagtaccacaagagcacggagctgctgatccgcaagctgcccttccagcgcctggtgcgcgagatctcgcaagacttcaagacagacctccggttccagagccacgccgtgctggcgctccaagaggccgccgatgcctacctcgtcggcctctttgatgacaccaacctctgcgccatccacgccaagcgcgtcaccatcatgcccaaggacatgcagctcgcccgccgtctccgtggcgatcgcgcgtagccatcatctgcgatgatctgatgaatgtctgcttaccatacaaatcggccgcattagcgtcgctgttctgtcttccctattttggattgcgttgccgggaaaaacagctttactgttctgaacgtgaacccc

SEQ ID NO: 1826 - DNA, 650 bp, Zea mays
  unsure (1)..(650): unsure at all n locations
  Clone ID: TF_ZmC519599_1
nacaagtcagagcattccaaatccgaacagcaccgccgctcccgcatctcgagtagtttccagttcgccggagaaggagaaagatggccggaaggaagggcggcgacaggaagaaggcggtgacccgctccgtcaaggccgggctccagttccccgtcggccgcatcgggcgctacctgaagaagggccgctacgcacagcgcgtcggctccggcgcccccgtctacctcgccgccgtcctcgagtacctcgccgccgaggtcctggagcttgcaggcaacgctgccaaggacaacaagaagacgcgcatcatcccgcgccacctgcttcttgccgtccgcaacgaccaggagctcggcaggctgctcgccggcgtgaccatcgcccacggcggcgtgatccccaacatcaactccgtgctgctccccaagaagtccgccgccgccgagaaggaggccaagtcgcccaagaagaaggccgccaccaagtcccccaagaagaaggccgccgccgccaaggagtaggcgccccatagcctagctccacaatcagggagaagatgacgagacttttgattttttttgcgggattgggtcttgtaattgcctagtctgtagtggctctttcattacctcgatgagcaagccatt

SEQ ID NO: 1827 - DNA, 529 bp, Zea mays
  Clone ID: TF_LIB4766-063-R1-K1-D1
ccggccgggaatttgtttctgaacgcgttcctcccgtctcccctgatctcctcagaccccagaagcgcctctgcggtcatggacgccaccgccactggagctggaggtaatgcgaataagggagcggtcggtcgcaaggccggctgggccgtaggaacgacctcaggggacccatgtctcgtgcaatgcctaacttccagttccccgtcggccgcatcgaccgctacctcgagatgggccgctacccgcagcacgtcagcagcgctgtccccggctacctcgcgtgcctcctgtatcacctcgccgctgaggtcctggagctccccggtaacgctgccaaggactacgagaagacacgcatcgtctcgcgccacgtgctgctggcgatccatgaccacgaagatctcggctagttgctgaccgccctgaccgtcgcccacggcggatgtgctgcccaacatcaggccggtcctgctgctcaagaagactgcggtaagagcgtccagctcacgggattcaggatgccaag

SEQ ID NO: 1828 - DNA, 380 bp, Zea mays
  Clone ID: TF_LIB143-070-P1-N6-A2
cagatcttaacagagtgaagtggacgcaacatcatatcgtccatcactacccctaccagatgaatcgagccgcgtataccaacaccacccaggctaggactatcagcctagaaaagaagtgaacttggtaacggccttggtgccctaggagaccgcgtgctcggcaagcttatacatgaggacgaggctcacccaggtctggatctcgtgggaggtgacggcggggtcatggttatagtgcgctagcttgtcagactcatccgcgagctgctcgaagatgtcttcgatgaacgagttcatgatggccataggcttggacgagatgccgatgtgagggagcacctggtgcagcaccttgtagatgtagagcttgtcaggct

SEQ ID NO: 1829 - DNA, 339 bp, Zea mays
  Clone ID: TF_jC-zmX3059015Q1K1C08b1
gcgcgcttccgcggacgcgtggccaacctccccagcaatccctagcagaagccttccatcctcactcgctcgatggcccgcacgaagcagacggcgaggaagtccaccggcggtaaggcgcctaggaagcagctggcgactaaggcggcccgcaagtctgcccctgcgaccggcggagtgaataagccccaccgttttcgccccggcaccgttgcgctccgggagatccgcaagtaccacaagagcacggagctgctgatccgcaagcttgccgttccagctcctggtgcgggtagatcgcgcaggacttctagaccgacctactcttacagagctttg

SEQ ID NO: 1830 - DNA, 313 bp, Zea mays
  Clone ID: TF_jC-zmX3059040Q1K1E07b2
ctcgtttattgcgccaccagagccatgcggtgcgggctctccaggaggctgctgaggcataccaagctggcctgcatgaggacaccaacctgagcgccatccatgctaagcgcgtgaccatcatgccgaaggacatgcagctggtaaggaggatccgcggcgagagggcctaatcgacacctcaaacagcgggacaaaaaaatgaagtccaggggtaattgaaaatctggcgccattgcaaggacataagagaagggtccgaaatgtggatcgcaaaacaaaagagagcaaaacccccagaaaaaaacagggg

SEQ ID NO: 1831 - DNA, 446 bp, Zea mays
  unsure (1)..(446): unsure at all n locations
  Clone ID: TF_LIB4668-003-R1-K1-B11
gccgggtttttccggcctcccattcctcgcgcggcgaccacccgattcgaagcgtgcggagagaccgaagaagcgggagagatggctcgtaccaagcagactgctcgcaagtccacgggagggaaggctcccaggaagcagcttgccaccaaggctgcccgtaagtctgcccccaccactggtggagtgaagaagcctcaccgctaccgccctggaactggggcactccgtgagatccgcangtgccagaagagcactgagctgctgatcaggangctgcccttccagaggctcgttggggaaattgcgcaggacttcgagactgatttgcgtttccggagccgtgcggtgcttgctcttcgggaggctggtggggcgtgccttggtgggctgtttgtggacgccgtcctgcgcgccgtgcgtgctcggcgcgtgcccttcttgcc

SEQ ID NO: 1832 - DNA, 479 bp, Zea mays
  Clone ID: TF_LIB4730-046-R1-K1-C4
tgggtccctcgggccgccggaaaaacgaaagctacgtccccaaatcgaccagcgaattaccacagcttctcaccaccgataccttcgatggcacccaaggcggacaagaagccggcggcgaagaagtccgcagaggaggagcccgcgacagagaaggcggagaaggccccggcggggaagaagcccaaggccgagaagcgcctcccggcgggcaagtccgccggcaaggagggaggcgagggcaagaaggggaaaaagaaggctaagaagtccgtggagacctacaagatctacatcttcaaggtgctgaagcaggtgcaccctgacatcggcatctcgtccaaggccatgtccatcatgaactccttcatcaacgacatcttcgagaagctcgcggccgagtccgccaagctggcgcgctataacaagaagcccaccgtcacctctccggagatccagacctcggtgcgccttgttct

SEQ ID NO: 1833 - DNA, 444 bp, Zea mays
  Clone ID: TF_LIB3059-015-Q1-K1-G3
ctcctctctcgcattccgaaccttttgagcctttaattcatccccttgaacttcaaacgggaccaccaccaatcaggcggccttggcccccaccgcaccaggaaccggcgggaaggcgaaaaaagggcgcgggcgggcgcaagggccgcgggccgaggaagaaagtcgtgacgaggtccgtcaaagccgggctgcagttccccgtcggccgcatcgggcggtatctgaagaagggccggtacgcgcaacgcgtccgcacgggcgcccccgtctacctggcgcgcgtcctcgagtacctggcccgcgaggtgctggagcctggccgcaacgctgccaaggacaacaagaagacccgcatcatcccgcgccacgtgctcctggccatccgcaacgacgaggagctcggcaagctgctgtccggcgtcaccatcgcccacggcggcg

SEQ ID NO: 1834 - DNA, 750 bp, Zea mays
  unsure (1)..(750): unsure at all n locations
  Clone ID: TF_LIB5072-097-A1-XP1-A11
cctcggtttccccccattcctgaattatttccttcatccatccaactgcatcctaaaaacttttcttaacctcataacagagacatggccagaactaagcaaaccgcccgtaagtccacgggaggcaaagcgccccgaaagcaactggcagccaaggccgctcgcaagtctgctcccgctacaggtggcgtcaagaaaccccaccgatacaaacccggtaccgtcgctcttcgtgagattcgacgataccagaaatcgactgagcttcttattcgtaaacttccgttccaacgtctcgttcgagaaatcgcacaagacttcaagactgatcttcgatttcagtcctctgctatcggcgcattgcaagagtcagccgaggcctacctcgtgtcattgttcgaagataccaatcttgccgccattcatgctaagcgtgtgacgattcaacccaaggacattcaacttgctcgtcgtcttcgtggtgaacggtcatgatctatcgtgaggtcgacctgcgccattatgtcaacggaggatctcaattttcaattttgtttatttcgttatccaaccgtcgagatattcgcaaagttgttgttgcgcccatcgccttccctacccccttgttgtttcttgtgttccccactaggcgtaccaccactgtatcatcaatctgtctgcctctgcgtttatgcagcagactattctccaaaattatctccggttcacnattggattcgnttgagatat

SEQ ID NO: 1835 - DNA, 538 bp, Zea mays
  Clone ID: TF_LIB3608-014-Q1-K6-F3
tccgcccagcgtccggttccgtccaggcaagggaagaaatcgagcagccaaggagaggagaagaggctcgtacgaagcagaccgcccgcaagtccaccggaggcaaggccccgcgcaagcagctcgccaccaaggcggcgaggaagtctgcgccgacgaccggcggcgtgaagaagccccacaggtacaggcccgggacggtggctctgcgcgagatccgcaagtaccagaagagcacggagctgctgatccggaagttgcccttccagcgcctggtccgtgagatcgctcaggacttcaagacggatctgcggttccagagccacgccgtcctggccctccaggaagccgccgaggcctacctcgtcggcctgttcgaggacaccaacctctgcgccatccacgccaagcgcgtaaccatcatgcccaaagacatccagctcgcccgccgcatccgctgcgagcgcacgtaagcgtatcttgcgcccggccccaatgcggcggaaggatggaggaaggcaatttgtaaccttaatgc

SEQ ID NO: 1836 - DNA, 631 bp, Zea mays
  unsure (1)..(631): unsure at all n locations
  Clone ID: TF_LIB4732-063-Q1-K1-B4
aaccgcttcgtcatncgcccagcaatccctagcatacccttccatcctcactcgctcgatggcccgcacgaagcagacggcgaggaagtccaccggcggcaaggcgccgaggaagcagctggcgactaaggcggcccgcaagtctgcccctgcgaccggcggagtgaagaagccccaccgcttccgccccggcaccgtcgcgctccgggagatccgcaagtaccagaagagcacggagctgctgatccgcaagctgccgttccagcgcctggtgcgggagatcgcgcaggacttcaagaccgacctacgcttccagagctctgctgtctccgcgctgcatgaggcggctgaggcctaccttgtcgggctcttctaggacaccaacctctgcgccatccacgccaagcgcgtcaccatcatgcccaaggacatccagcttgcccgccgcatccgcggcgagagggcctaagcgtcatattttctgtcatcagtgcccgatcagaagatgcagagatatgctgggttctgtagtttgggttactgtcgaatcatcgagtgatggctgttcactgctgtaacttaattatcatgatgcatatgaaatggcaatgaactctgttatcagttctcg

SEQ ID NO: 1837 - DNA, 667 bp, Zea mays
  Clone ID: TF_ZmC369_64
caagcaaccaccgcctccccgatctcgtcgagaggaagccccatcccgaaaccgccgccgtattccaatggcgcccaaggccgagaagaagcccgccgccaagaagcctgcggaggaggagccggcggcggagaaggccccggcggggaagaagcccaaggccgagaagcggctccctgcgggcaagtccgcgggcaaggagggtggcgagaagaaggggaagaagaaggcgaagaagtcggtggagacgtacaagatctacatcttcaaggtgctgaagcaggtgcacccggatattggcatctcgtccaaggccatgtccatcatgaactccttcatcaacgacatcttcgagaagctggcggcggaggcggccaagctggcgcggtacaacaaaaagcctaccattacgtcccgcgagatccagacctccgtccgcctcgtcctccccggggagctcgccaagcaccccgtttccaagggcaccaaagccgtccccaagttcactagctcctaggcgagcgatgcgacgtgccctcgtctccttcttgcagtagtccaatagtagtccggttaggtgtgttcccccggtggtagttgcccctgcgtttgttttttgggctcggttgatgtcttttatgtaaaaaagtaactgtattgtgtctgc

SEQ ID NO: 1838 - DNA, 867 bp, Zea mays
  Clone ID: TF_ZmC76846_1
gattcccggtcgagcacgcgtccggacacctcgagccggccgggaaacctctcggtgcgttccgattccaaacccaaatcaccgctccctccaaatcccattccctccgcccagaccagctcgcgaaatggacggcggcggcgcgaaggcgaagaaggcggctgctgggcgaaagctaggcggcggcgggccgaagaggaagccggtgtcgcggtcagttaaggccgggctccagttccccgtgggccgcatcggacggtacctgaagaaagggcggtacgcgcagcgcgtgggcacgggcgctcccgtgttcctggccgccgtcctcgagtacctcgccgctgaggtcctggagctggctggcaacgcggcgcgcgacaacaagaaaacccgcatcatcccgcgccacctcctcctcgccatccgcaacgacgaggagctcggcaagctgctgggtggggtcaccatcgcgcacggcggtgtgctgcccaacattaaccccgtcctcctccccaagaaggccgccgagagggccgagaaggccgctgccgctggccccaagtcccccaagaaggccgccgccaagtcgcctaagaagtagtgactcgtcttgctctcactcatcccgttctgagatcagcttgtgtttgtggtcgtggacgccttttaccattttgcaagtgtgtgtagcgatgcgtcgtctgaactataatgtgctacgattgacctaagttctagtttaattcctagctctagtggtgcttggtgatgggtccccatggaagtttaatgggaacaagaggaagtgtcttgctttctttgatgcttaaccatgcttcttagcattccgcaagtttgatctccatc

SEQ ID NO: 1839 - DNA, 242 bp, Zea mays
  Clone ID: TF_LIB3116-025-P1-K1-F8
ggcccccggaaggcagttggccaccaaggcggtaaggaagtcggcgccaacaaccggcggggggaaaaagcccaacaggtccaggcccggaccaggggcgttgcccaggatccgaaggtcccaaaaaagcacggggttcttgatccgaaggttgcctttcaagggcctggtgcgcaagatcgcccaggatttaaaaacagacttccggttccagagccacgccgggctggcgttcccagagg

SEQ ID NO: 1840 - DNA, 656 bp, Zea mays
  Clone ID: TF_LIB4766-128-A1-K1-G6
gggaccctcgaggccggccgggggccatagacagcgaccgagcgattccctcgtatctgcattcgcatgcctttgctgcatccaccaccgcgtaaccccacgcagccgcatcgatggcgcctaaggtggagaagaagccggatgcgaagaagacggcggaggaggagaccgctgtcgcgaagggcccggtggggaagaaggccatggccgacaagaggctcccggtggacaactccgccgggaaagaaggcgtcgacaagaagggtatcaagaaggatgaagaagcccgtggacacctacaagatctacatcttcaagggggtgaagcaggaccacccggacatctgtatgtcttgcaagggcatgttcatcatgcactccttcgtcaacgacatcttctagaagctcgccggcgaggctgccaagcttgcgcgctacagcaagaagcccgccatcacctctcgggagattcgaacctctgtccgccttgtgcttcccggcgagctcatcatgcacgcgttgtccgagggcaccaaggacgtcactaagtgccatcatcgtagatttgaggcatgatctattgggaggcgttggcatctgcgactcaatttgtctgctactaatactggtgctagtatccatgaggaattgggttg

SEQ ID NO: 1841 - DNA, 484 bp, Zea mays
  Clone ID: TF_jC-zmXLIB3527P004ah01a1
aaccaactctttcccaaatccacctgacggctcggctcgcccatcttagcgccaagcaccgaatctgcgatggcccgcacgaagcatacggcgcgcaagttgacgggcggcaaggctgccccgcaagcagctggccaccaaggcggcgcgcaagtcggcgccgacaaccggtggcgtgaagaagcctcaccgtttccgccccggcaccgacgcgctccgagagattcgcaagtaccagaagagcacggagctgctcatgcgcaagctgcccttgcagcgcctggtccgtgagatcgcgcaggatttcaagaccgacctccgcttacagtcctccgctgtcgccgagctgtaggaggccaccgaggcctacctagtggggctcttagaggacaccaacctctgagccatccacgccaagcgcgtcaccattatgcccaaggacatccagctcgcgcgccgcatcatgggcgagagggcttgatct

SEQ ID NO: 1842 - DNA, 798 bp, Zea mays
  Clone ID: TF_ZmC369_122
cattggtacctcgagccggccgggaaagccacatatctcctcgcattttccttgcaaccgattgcctatccccctcccaacccaagaccgatggcgcccaaggccgagaagaagcccgcggcgaagaagccggcggaggaggagcccgcggcggagaagacgaccgccgggaagaagcccaaggcggagaagcgggtccccgcgggcaagtccgccggcaaggagggcggcgagggcaagcgtggcaagaagaagggcaagaagagcgtggagacgtacaagatctacatcttcaaggtgctgaagcaggtgcacccggacatcggcatctcctccaaggccatgtccatcatgaactccttcatcaacgacatcttcgagaagctggccggcgaggccgccaagctcgcgcgctacaacaagaagcccaccatcacgtcccgcgagatccagacctccgtgcgcctcgtgctccccggcgagctcgccaagcacgccgtctctgagggcaccaaggccgtcaccaagttcacctcctcctaggctgcgcgtgcacgctcgccctttgtaggcttctcttgtgttgatgttccccttgtgttgtagttagatgttgctggtttctctgtcggcgctgctctgcttctgtaggaactgcgtcatgtaacccagcaaggacttgtttatttgtgaatcatcaacactttgttgttgatcacttatgttccaaattctgagtttgacgctggagcatgcctcatttgttgctggaatttgagctggtgggtttgcttaccc

SEQ ID NO: 1843 - DNA, 668 bp, Zea mays
  Clone ID: TF_LIB5116-005-A1-PF1-A4
gaacacccgccgcgaaatcccaaatcaccaaccaaatcccctcctcccgcgtcccgacgagcaccagccgccggacatggacgcctcagccaccggagccggagcgaagtccaagaagggcgcggcggggcgcaaggccggcggccccaggaagaagtcggtgacgcggtccgtcaaggccgggctccagttccccgtcggccgcatcgggcgctacctcaagaatggccggtacgcgaagcgcgtaggcacgggcgcccccgtctacctcgccgtcgtcctcgagtacctggccgccgagctgctggagctcgccgggaacgccgccaaggacaacaaggagtcccgcatcgttcccaggcacctgctgctcgccgtgaggaacgaccaggagctcgggaggctgctggccggcgtgaccatcgcgcacggcggcgtgctgcccaacatcaacccggtgctgctccccaagaagacggcggagaaggagcccaagtcgcccaagaaggctgccaagtcccccaagaaggccgaaaagaaggcttagacagagacgcgcatcgatcgattagcttgtcgtgctctgtagaactaatggtgtagatgtagatctgtgcttccaagaaaaaccaattcagaaatctctcttcgattggcttagccgctgt

SEQ ID NO: 1844 - DNA, 312 bp, Zea mays
  Clone ID: TF_LIB3205-002-P1-N1-B12
gggggggggatacaactatttttcacaacaagggccttaaatttaaaaggaccatttcaatccggcgcgccgggtttataaagcagggaagctagcttcttagccggtagggtgggggactggggaaaggacacagcaaagaacccttctaacaaatccgcggatcccgcaacgcgctcaattgctggtgaacttggtgacggccttggttccctcggagacggcgtgcttggcgagcttttcggggaggactaggcccacggaggtctggatcttccgggacgtgatggtgggctttttgttgtaccgcgc

SEQ ID NO: 1845 - DNA, 684 bp, Zea mays
  Clone ID: TF_LIB4742-007-R1-K1-H9
ggtaccctcgggttcggccgggtaccagcagtcttgattctaccggggggaggagctctagcctgtccatcactcactcgctcgagggcccgaaccaagcagacggctaggaagaccaccggcggaaaggtccggaggaagcaagtggggagtaaagcgagccgcaagtctgcccctgcgactcggcggagggaagaaaccccaccgcttccgccccgggaccggcacgctccgaggagatccgcaagaaccagaagagcacggaactgctgatccgcaagctgccgtgccagcagcctggtgcgggagatcgcgcaggacttcaagaccgacctacgcttccagagctccgctgtctccgcgctgcaggaggcggctgaggcctaccttgtcggactctacgaggacaccaacctctgcgccatccacgccaagcgcgtcaccatcatgcccaaggacatccagcttgcccgccacatccgtggagagagggcctaagcatcatatattctgtcatcagtgcccgatcagaagatgtagagatgtgctgggttctgtagtttgggttactgtcgaatcatcgagtagttggttgttcactgctgtaacttagtatcatgatgcatatgaaatggcaatgaactatgttatcagttctgcaaaaaaaaaaaaaaaaaagcggcc

SEQ ID NO: 1846 - DNA, 565 bp, Zea mays
  Clone ID: TF_LIB4979-048-R1-K1-A12
cttctgagcactttctcctcgtccccgagcaggcaatcgaagccgagatacggccatggactccaccggcaccggagcagggggtaaggggaagaagggagcggccgggcggaagggcggcgggccaaggaagaagtcggtggcgaggtccgtgaaggccgggctccagttccccggcggccgcatcgggcgctacttgaagaagggccgctacgcgcagcgtggcggcaccggcgcccccggctacctcgccggtggcctcgaatacctcgccgctgaggttctggagctcgctggtagtggtgccagggacaacaagaagactcgcattattccgcgccacgggcttctggcgatccggaacgacgaggagcttgggaagcctgctgggcggcgtgaccatcggtcacggcggtggggtccccaatatcaaccctggtctgctggccaagaagacggcggagaaggcgcccagtgtggggacgaaggaggcaaagtcccccacgaaggccgccaagtcccccacgaaggatagactgactgcctggagggatctgatggttag

SEQ ID NO: 1847 - DNA, 564 bp, Zea mays
  unsure (1)..(564): unsure at all n locations
  Clone ID: TF_LIB5024-012-R1-XP1-D8
gcggccgcttcgaggcccggcccgggctcgcggaaaaaaaaaaaaaaaaaaaaaaaaaaacccacttccgcccaaatccaccaccgccataccagcgtgtccgcgattccgtcgagtagactgggcgagagagtagtctcggacgagaagaggcgaatatgagttccggcggcggcaggggcaagcccaaggggtccaaggctgtgtcgcggtcgaccaaggccgggctgcagttccccgtcggccgcatcgcgcgctacctcaaggccggcaagtacgccgagcgcgtcggcggtggtgcgcccgtctacctctccgccgtcctcgagtatctcgcggcagaggtgttggaactggcgggcaacgcggcgcgcgacaacaagaagaaccgcatcgtgccgcgtcacatccagctcgccgtgcgcaacgacgaggaactcagcaagcttgctcggagctgtcaccatcgcncgccggaggtgtgttgcccaacattcatcagacgctgctgcccaagaaggccgggtgggaagggcaaggccgacatcggttccgcatcccagg

SEQ ID NO: 1848 - DNA, 813 bp, Zea mays
  Clone ID: TF_ZmC653_59
ggccgggaaaccccagcgcttaaaaacgcacccgaacccgccactccgaaatctccaaggacatccagcccaaacacggtcaaacacgctccagcctccacccgcacctccgctcccacaccgatggcccgcacgaagcagacggcgcgcaagtccaccggtggcaaggcgccgcggaagcagctggcgaccaaggcagcgcgcaagtcggccccggcgaccggcggcgtgaagaagccgcaccgcttccgcccgggcaccgtggcgctccgcgagatccgcaagtaccagaagagcacggagctgctcatccgcaagttccccttccagcgcctggtccgcgagatcgcgcaggactttaagaccgacctccgcttccagtcctccgccgtcgccgcgctgcaggaggccgcggaagcctacctcgtcggcctcttcgaggacaccaacctctgcgccatccacgccaagcgcgtcaccatcatgcccaaggacatccagctcgcccgccgcatccgcggggagcgcgcttaggcgtttacggttgattgtcactactgtaggtgtttaggctatgttctcgccatgttctaggtctgcttcgttcttatttgtttttttggtttcatcctgtacgttgatgggtgttgatgagctatcggtgcctgtctgagaaatggagtgatctattggcgccattgttgaacaccatgaagttgcgagctcggacgttataaattcctaccagacataaatatgcatgaacaataccattaactggagatatactgttagactagtatgtctactacg

SEQ ID NO: 1849 - DNA, 664 bp, Zea mays
  Clone ID: TF_ZmC369_53
gaaatctcccgtccccaaatcgaccgagcgaattcaccacagcctcaccgtcccgaatccgcaccaccgatggcacccaaggcggagaagaagccggcggcgaagaagcccgcggaggaggagcccgcgaccgagaaggcggagaaggccccggcggggaagaagcccaaggccgagaagcggctccccgcgggcaagtccgccggcaaggagggcggcgagggcaagaaggggaagaagaaggcgaagaagtccgtggagacctacaagatctacatcttcaaggtgctcaagcaggtgcacccggacatcggcatctcgtccaaggccatgtccatcatgaactccttcatcaacgacatcttcgagaagcttgcggccgagtccgccaagctggcgcgctacaacaagaagcccaccatcacctcccgcgagatccagacctcggtgcgcctcgtcctccccggcgagctcgccaagcacgccgtctccgagggcaccaaggctgtcaccaagttcacctcttcttaggttcgtagtagtgatggctgggtggtgctggtagacatggctcggtttatctggtagggcaagcgatggatgttggtgatgatgatctgcgtgtaattgtgttgttaagaattgtgaaacactgttccacatc

SEQ ID NO: 1850 - DNA, 535 bp, Zea mays
  unsure (1)..(535): unsure at all n locations
  Clone ID: TF_LIB4828-008-R1-N1-F5
nnccggccggggagccaccgcatcgtcgccctcaaattcgttccgtccaggcataggaagaaatcgagcagccaaggagaggagaagatggcctcgtacgaagcagaccgctccgcaagtccaccggaggcaaggccccgcgcatgcagctcgcctaccaaggcggcgaggaagtcggcgccgacgaccggcggcgtgaagaagccccacaggtacaggcccgggacggtggcgctgcgcgagatccgcaagtaccagatgagcacggagctgctgatccggaagttgcccttccagcgcctggtccgcgagatcgctcactacttcaagactgatttgagtttccagagccacgccgtgctgggcctgcaggaagcctgcgagcactccctccagttactgcgctggggcatccagatccagggcatgcagttgctcggcatggccatcatggccccgtcatccagcttggcctactgatcacaaccggacttggccgtgtcctatctggcgccctgcgtggctgtgatctact

SEQ ID NO: 1851 - DNA, 654 bp, Zea mays
  Clone ID: TF_LIB5025-027-A1-XP1-C5
ctgtgcggcgctcgaggcggccgtttccgaaatggaacagtgaaccgtcttctcgcatttcttcccatccgatccccccttctctatcgaaaccgccagctcgccccgcatcgatggtgaccaaggtcgagaagaaatccgcggtgaatataacggcgaaggaggagcccgcggccgagaaggcgcccgccgggaagaattcgaaggcggataatcgggtccccgctggcaagtccgctgtcaaggaaggcgtctaggttatgaggggcaagaagaagggtatgaatgagtgtggagacctacaagatctacatcttcaaggtgctgaagcatgtgcacccggacattggcatctcctcccaggccatgtccatcatgaactccttcattatcgatatcttcgagaagctcgctgctgatgacggcaagctcgtgcgctataacaagaaacctaccatcacctcacgtgagatacagacctccgtgcgcctcgtccttcccggggagctcgccgagcacgccgtctccgatggcacctgggccgactgcgagttcacctcggactatgctgcgcggtcgccgcttgtaggattctctcctgtgttcacgtatcttgctgcatttaggtgctgctgcctgctggcttctatgcat

SEQ ID NO: 1852 - DNA, 664 bp, Zea mays
  Clone ID: TF_LIB4979-037-A1-K1-F8
cggattccgatctcaatctccctagcaatctctatgagtagatcctcgtgcgaagcaaagcgctagcccccttcgtactgtcccgatggcccgcacgaagcagacggcgaggaagtccactggcggcaaggcgccaaggaagcagctggccaccaaggcggcgcgcaagtctgccccggcgaccggcggagtgaagaagccccaccgtttccgccccgggaccgtcgcgctccgggagatccgcaagtaccagaagagcacggagctgctgatccgcaagctgccgttccagcgcctggtgcgtgagatcgcccaggacttcaagaccgacctccgcttccagagctccgccgtcgccgcgctgcaagaggcgtccgaggcctacctcgtcgggctcttcgaggacaccatcatgcccaaggacatccagctcgcccgccgtatccgtggggagagggcctatgcgtcatcccggtggaggtggaagtagtagtggacgtttctgtcatcactgtctggctagaaggtgtagagatgtgccgggttctgtagtttgggttatcggtcaaatcatgatgtagatgggtctaccctgctgtaatttaactatgactatgcaatggcaatgaagttctcggttatcagctcccgaagaaaaatgaat

SEQ ID NO: 1853 - DNA, 677 bp, Zea mays
  Clone ID: TF_LIB4729-095-Q1-K1-E3
aacaacgatctcagtctccctagcaatctctagcagcagatcctcgtgcgaagcaaagcgctagacttcctactgtaccgatggcccgcacgaagcagacggcgaggaagtccactggcggcaaggcgccaaggaagcagactggccacgaacgatgcgctgcaagtctcgccccgcgcgaccggcgtgagtgaagaagccccaccgcttccgccccggtaccgtcgcgctccgggagatccgcaagtaccagaagagcacggagctgctgatccgcaagctgccgttccagcgcctggtgcgtgagatcgcccaggacttcaagaccgaccttcgcttccagagctccgacgtcgccgcgctgcaggaggtgtccgaggactacctcgtcgggctcttcgaggacaccaacctgtgcgccattcacgccaagcgcgtcaccatcatgcccaaggacatccagctcgcccgccgcatccgtggggagagggcctaggcgtcatcgcggtggtggtggaagttgtagtcgccgattctgtcatcactgtctggctagaaagcgtagagatggatatgtagcttgggatatctgtcgaatcatgatggagctgcgacttcactgctgcaatttaactatgactatgcaatggcaatggagttccctgttatcagttccc

SEQ ID NO: 1854 - DNA, 917 bp, Zea mays
  Clone ID: TF_ZmC2139_5
ttgggaccctcgaagccggccgggagtaaaagcacgtagtgtagtggtttgtcttggtttgctagcactttattaggtggtggttcgattcccatgtataaactttattcttttaaaaaaaaaaaaaaaaaaaaaaaaaaaaaaaaaaaaaaaactgattacaaacccgtcctctgtccgtcctaccaccaccgctcacctcggtttggttttctcccctcttccgcacccgcttctcgctccggattccggattccctctgctctttccctaacgaaggtagccatggcggggagaggtaaggcgatcggctcaggcgccgccaagaaggccacgtccaggagctccaaggctggcctccagttccctgtgggaaggatcgccaggttcctcaaggccggcaagtatgccgagagagtcggcgccggcgcccctgtctacctcgctgccgtgctcgagtatcttgctgctgaggttcttgagctggccggcaatgcggcacgtgacaacaagaagacccgcatcgtaccgcgccacatccagctcgccgtccgcaacgacgaagagctctcccgcttgctgggcacggtgaccatcgctagcggtggtgtaatgcccaacatccataacctgctgctcccgaagaaggccggcggcggcagcgccaaggctgcggctggtgacgaggactaagtccttgactacgcctctggtggcacttccaggatgctgccgtatcaacatgtgtctgtgtagtacgttaggttttcgttgtagttgggtatgtgggttgctgtaacactgctaaactaagttattcttgtgcttgctaaggattaagttctgtatttgttgctataaaaggtgcatcctttgaatgactggttcactaaaaaaaaaaaaaaaaaaggccccta

SEQ ID NO: 1855 - DNA, 431 bp, Zea mays
  Clone ID: TF_LIB4762-070-Q1-K1-F9
gtaccctcgggctgccggatacattacagcgcttagttgtgcgcccacagccaaattttctctccttaatcgcgggtaagctgcactgtgtgctgttcgcccgcaggagccggtagccaaggcggataagggggcggctggagagcttggctgcgcgtgcctcagcaagaacctgctgttgcggagcgaatggccgttctggagataaccctcgcccggatacctccttaggttgcgcagggggggcccgcacaccgcgagggcaccgccgcccccgtctatctcgccgccgtgcttgagtacctcgccgccgaggtgctggagctggccgggaacgcggcgaatgacaacaagaagacgcgcatcgtcccgcgacacttgctcccggcgattcgtaacgacgttgggctctggtggctgctgtctggcgt

SEQ ID NO: 1856 - DNA, 343 bp, Zea mays
  Clone ID: TF_LIB3078-052-Q1-K1-H1
cggacgcgtgcgcgcaggcactcacgatcaggttctgaagccgccccttacgacataggtgtggagccccatttgatcgagtgctgatggcgcccaagggcgagaagaagcccgcggagaagaagccggcggtggagaagggctataagaagccaacggcggtgaaacgcgtgtcgagctaggtgggcggcgagaagaagggaaagtagatggcgaagaagatcgtggagacgtacaagatctacatgattaaggtgctcaagcatgtgcacccggtcattggcatcttgatcaatgccatgtccatcatgaactgcttcatcaacgacatcttctagaagct

SEQ ID NO: 1857 - DNA, 483 bp, Zea mays
  Clone ID: TF_LIB3279-229-Q6-N6-F2
aaagcttaaacgcccttccattttttttaaaacgatcaaataaacgggggtccgccccaaagttgcatagcccaaaaaccttagccgttttcacattggaatcaacgatcttggggaaccaagaagaggggctttgggcattcccaaacacatggggctctaaaagacaggcggactaacggggggctaaacctaggaaacaagacgggggcgaaggccttttttccagggggcagcttaagttgtcatcgtcatcgacgggggaagccttggacaacccaccctttttggggaggaggggctgggggatgttgggcataacccccccgctcgcgatgggggcaccaccaagcagctgggtcagctcctcgtcgttgcccacggggagctggatgtgacccggcacaatgcgggtctttttgttatccctcgctgggttcccagcaagctccaggacctgttgaagcatcgcataaaaacaaa

SEQ ID NO: 1858 - DNA, 599 bp, Zea mays
  unsure (1)..(599): unsure at all n locations
  Clone ID: TF_LIB3592-076-Q1-N6-E11
atgcacgcgctacgctaatcttggnatcctctnatagcggccccgccctcttttttttgtgttttttttttttttttnttttttttttttttttttttttttttttttttttttttttttttttttttttttttaaggggccggggacccaatacaggtacttttttacctaaaagaacattaaccgggcccaaaaaacaaacgcggggggggctaccaccgggggaacccacctaaccggcctacttttggcctactgcaagaaggggacgagggcccctcgcatcgctcgcctaggagctagggaacttggggacgggtttggggccctcggaaaccgggtgcttggggagctcccccggaaggaccaggcggaccgaggtcttgatctcccgggacctaatggggggctttttgttgtaccccgccagtttggccccctccgccgcccggtttttaaaaatttcgttggtgaaggagttcatgatggacatggccttggaccaaatgccaatgtccgggggcacctggttcagcaccctgaaaattaaatcttggacgtttccaccgacttctttgccttttttttcccctttttt

SEQ ID NO: 1859 - DNA, 384 bp, Zea mays
  unsure (1)..(384): unsure at all n locations
  Clone ID: TF_LIB5027-004-R1-XP1-C1
atccccctcgactttcaacttccaaggcccctttttttttctcgatctggaagcgccgcagtagcagctatggacgtgagcggagcaggcggtaaggcgaagaagggcgcggcggggcgcaaggccggcgggccgacgaagaagtcggtgtcgcggggctccagggccgggctgtagttgcccgtcagacgcgtcgggcggtacctaaaaaagggccggtacgcgcagcgtgtaggcacgggtgcccccgtatacttcgccgccgtcctggagtatgtcgcggncgaggtgctcgagctcgccggcaacgcgggaagggacaacaagaagacgcgnatcatcgcgcgacacgtgctcctcggcatccgcaacgacgaggagctc

SEQ ID NO: 1860 - DNA, 443 bp, Zea mays
  Clone ID: TF_uC-zmroteosinte067a12a1
cgtccttttttttttttttttttagaactggtaacagagctcagttgccatttcatatgcatcatgataattaagttacagcagtgagatgattcgacagtaacccaaactacagaacccagcacatctctacatcttctgatcgggcactgatgacagaatatatgatgcttaggccctctccccacggatgcggcgggcaagctggatgtccttgggcatgatggtgacgcgcttggcgtggatggcgcagaggttggtgtcctcgaagagaccgacaaggtaggcctcagccgccttctgcagcgcggagacagcggagctctggaagcgtgggtcggtcttgaagtcctgcgcgatctcccgcaccaggcgctggaacggcagcttgcggatcagcagatccgtgctcttctggtacttgcggatctcccgagcgcgac

SEQ ID NO: 1861 - DNA, 472 bp, Zea mays
  Clone ID: TF_ZmC103364_1
acggttctagatcgcgagcgccgccctttttttttttttttttaaagcttcaagtacccatcagggactaatattaacatgaagttcaaaccaacatccatcacaaaccaactacccttaactggcactaagtttttagggttcaagaaaagaaagcatctaacagaccaaacataacacactagcagatggagtcccagtagcacaatcaggccctttcacccctgatccggcgagccagctgaatgtctttaggcatgatggtcacacgcttagcatggatggcacacaagtttgtgtcctcaaacagacccacaaggtaagcctctgctgcctcctgaagtgcaaggactgcatggctctggaatcgcacatctgtcttgaaatcctgagcaatttccctgacaagcctctgaaatggcagcttccttatgagaagctctgtgctcttctggtacttcctgatttcacg

SEQ ID NO: 1862 - DNA, 388 bp, Zea mays
  Clone ID: TF_uC-zmflteosinte076b05a1
ccttattctttgttaacttaggcgacagtctaggagccggtgaggattcagagagctaggagagctccccggagagcacgaggcgcacggaagtcaggatctcgcgggaagagaaggagggcttcttgatagaccgcgcgagcttggcgggctcagaggcgagcttctcgaagatgtcgttgatgaaagagttcatgatggacatggccttagaggagatgccgatgtccgggtgcacctgcttcagcaccttgaagacgtagatcttgtagggctccacgctgttattgcccttattccggcccctctagccctggccgccctgtttgccggaggactagcccagtgggacacgcttcttcgacttgggcttgttcccgggcggcgc

SEQ ID NO: 1863 - DNA, 812 bp, Zea mays
  Clone ID: TF_ZmC369_147
ttccaaaaaaaaaaaaaaaaaaaaaaagccaacatatctcctcgcatttccttgcaaccgattgccttcccccctcccaacccaagaccgatggcgcccaaggccgagaagaagcccgcggcgaagaagccggcggaggaggagcccgcggcggagaagacgaccgccgggaagaagcccaaggcggagaagcggatccccgctggcaagtccgccggcaaggagggcggcgagggcaagcgtggcaagaagaagggcaagaagagcgtggagacgtacaagatctacatcttcaaggtgctgaagcaggtgcacccggacatcggcatctcctccaaggccatgtccatcatgaactccttcatcaacgacatcttcgagaagctggccggcgaggccgccaagctcgcgcgctacaacaagaagcccaccatcacgtcccgcgagatccagacctccgtgcgcctcgtgctccccggcgagctcgccaagcacgccgtctctgagggcaccaaggccgtcaccaagttcacctcctcctaggcttgcacgctcgccctttgtaggcttctcttgtgttgatgttcgccttgtgttgtagttagatgttgctggtttctctgtcggcgctgctctgcttctgtaggaactgcgtcatgtaacctagcaaggacttgtttatttgtgaatcatcaacactttgttgttgatcacttatgttccaaattctgagtttgacgctggagcatgcctcatttgttgctggaatttgagttggtggtttgcataaacagatgaaatttatttcggtt

SEQ ID NO: 1864 - DNA, 685 bp, Zea mays
  Clone ID: TF_LIB5116-065-A1-PF1-F11
agcattccgatacagcgcaaccgccgccaacaccactcctagcgagtcctcgccgccggagaagcagcaagaagatggccggaaggaagggtggcgacaggaagaaggcggtgacccgctccgtgaaggctgggctccagttccccgtcggccgcatcgggcgctacctcaagaagggccgctacgcccagcgcgtcggctccggcgcccccgtctacctcgccgccgtcctcgagtacctcgccgccggggtcctggagcttgccggcaacgcggccaaggacaacaagaagacccgcatcatcccgcgccacctgctgctggccgtccgcaacgaccaggagctcggcaggctgctggccggcgtcaccatcgcccacggcggcgtgatccccaacatcaactccgtgctgctccccaagaagtccgccgccgccgccgagaagggggccaagtcgcccaagaagaagacctccactaagtcccccaagaagaagaccgcggccaccaaagagtagcaggccccatagcttagccagtgttgcttagatccatttctcatggactaagatgagatcctgtatgtaatgcctgctagtctgtagtgcccgtcagatttgacgagcaaggttgacattgtgatatcagtgagaatggctaaagatgcaatcatttcaatctctgc

SEQ ID NO: 1865 - DNA, 364 bp, Zea mays
  Clone ID: TF_LIB36-021-Q1-E1-G2
aattctctatactgagtcgtattaatgcgtccgccattcgcgagtctccagccaacggcatccagtccactcccatccccctcgaacccgacaaacccgacccgattgcgcccaatggcgataagaagccagcgcgagaagaagccggcggccgaagataatgcggagaagacgaccgcaggttataagcccaagtctgagaagcgcctgccggcctctaagtcctccggcaaggatggcggcgagaagaatgggaagaagaaagccaagaagagcgtgtagacctacaaaatctacatcttcaaggtcctgaagcatgtgcaccccgacattcggatctcctccaagggcatttcaatcatga

SEQ ID NO: 1866 - DNA, 354 bp, Zea mays
  Clone ID: TF_LIB3069-049-Q1-K1-E1
gtcgaccacccgtccggaccgagcgaattgaccacagcttctcaccttcgctattttcgatggcacccaaggcggacgggaagcgggctgctaataaggcggcagaggatgagcccgcgacagagaaggcggataatgctccggcggggaagaagcccaaggccgagaagcgcctcccggcgggcaagttctccggtaaggagggcggctagggcaagaaggggaaaaagaaagcgaagaagtccgtggagacctacaagatctacatctttaaggtgctgaagcacgtgcaccccgacatcggtatcttgttcaagggcatgttcatcatgaactccttcatcaacgacattt

SEQ ID NO: 1867 - DNA, 610 bp, Zea mays
  unsure (1)..(610): unsure at all n locations
  Clone ID: TF_LIB3606-017-Q6-K6-A3
tcctcgtccccgccaagccaatcgcaagccgnanaatacggccatggnactccaccggcaccggagcaggggtaagggaagaaggagcggccgggcgcaggtcggcgggccaaggaagaagtcggtgtcgaggtccgtgaaggccgggctccagttccccgtcggccgcatcgggcgctacttgaagaaggccgctacgcgcagcgtgtcggcaccggcgcccccgtctacctcgccgctgtcctcgaatacctcgccgctgaggttctggagctcgccggtaatgctgccagggacaacaagaagactcgcattattcctctttacgtgcttctggcgatccggaacgacgaggagcttgggaagctgttgggcggcgtgactatcgctcacggcggtgtgctccccaatatcaaccctgttctgctgcccaagaagacggcggagaaggcgtccagtgtggggagcaaggaggcaaagtcgcccaagaaggccgccaagtcccccaagaagcatagactgactgtctggagtgatctgatgtttagcaagaccttgataccagtatgcggggatgcgttagctgtagatggggtcgatgtgcttgtgt

SEQ ID NO: 1868 - DNA, 501 bp, Zea mays
  unsure (1)..(501): unsure at all n locations
  Clone ID: TF_LIB4729-091-Q1-K1-D10
gccccgtncgaactccgaaccccagaacagagaaagctcctcggnctccctgtccccagccttccccgatggnccgnacgaangagacggcgcgcaaggcgacgggcgggaaggcgccgcggaagcagctggcgacgaaggcggcgcgcaagtcggcgccggcgacgggcggcgtgaagaagccgcaccgcttccgcccgggnaccgncgcgctgcgcgagatccgcaagtaccagaagagcacggagttgctgatccgcaagntcccgttccagcgtctggtccgcgagatcgcgcaggacttcaagacggacctccggntccagncctccgccgtcgccgcgctgcaggaggccgccgaggnctacctggtgggnctcttcggggacaccaacctctgtgccatccacgccaagcgcgtcaccatcatgcncaaggacatccagctcgcgcggcgcatccgcggcgagcgcgcctaggncggaatcggntgcggcgcct

SEQ ID NO: 1869 - DNA, 614 bp, Zea mays
  Clone ID: TF_LIB4975-019-R1-K1-C5
aacacagcgaacacatctcctcgctttcttcccatccgatccccccttcgctaccgaatcccctactcgccccgcatcgatggcggccaagtccgagaagaaaccgcggcgaacaagcggcgccaggatcgacccgcgcacgacaacgcagcccgccgagaacaatccgaacgtggagaagcgacgtccccgcgtggcaatgcccgctgccaaggaaggcgactgaggtgagagcgctgagaagaaagccaagaaaagcggggagacctacacatatctacatcttcaaggtgctgaagcaggcgcacccgtacattgccatctcctcctcggccatgtgcatcatgaactccttcattaacgatatcttcgagaagctcgctgctgaggccgccaagctcgcgcgctataacaagaagtctatccatcacctcccgtgagatccagacctccgtgcgcctcgtccttcccggacagatcgacaagcacgccgatctccgacgcgaccgaggacgtcaccgaggtcgcctcgacctactactgcgcggccgccgcttgcatgattctctcctgagttcacgccgcttgcatgtagatacgagctgctgcctgct

SEQ ID NO: 1870 - DNA, 442 bp, Zea mays
  Clone ID: TF_LIB4729-014-R1-K1-D4
cggcgacattttccggcctcccattcctcgcgcggcgaccacccgattcgaagcgtgcggagagaccgaagaagcggaagagatggctcgtaccaagcagactgctcgcaagtccacgggagggaaggctcccaggaagcagcttgccaccaaggctgcccgtaagtctgcccccaccactgctggagtgaagaagcctcaccgctaccgccctggaactggtgccctccgcgagatccgcaagaatcagaaaagcactgtgctgctgatcaggaagctgatcttacagaggctcgtcttgaaaattgcacaggactctaaaactgatttgctgttgcagagccatgcggtgcttgccctccaggaggttaggtgaagcacacctttgatgagctgtttgttgacacgaacctgtgcgccatccatgcttagctgtgggacc

SEQ ID NO: 1871 - DNA, 458 bp, Zea mays
  Clone ID: TF_LIB3116-025-P1-K2-F8
ggccccccgcaagcagttcgccaccaaggtggttaggaagtcggcgccgacaaccggggtgttgaatattcccaataggtgcgggcccggaacagtggcgctgcgcgagatccgcaagtaccagaagagcacggagctcctgatccgcaagctgcccttccagcgctggtgcgcgagatcgcgcaggacttcaagacagacttccggttccagagccactccttgttgtcgctccagtagttcttatttatttttttttctttttatatttttttttatttttttattttttatttttttttaattttgggttgatggttggttgttttttttttttaaataattaatatttattaattattttcttcttttatatatatattattttaaatattttttctttttttctattttttatattttatatatttattttttattaatttatttatttattt

SEQ ID NO: 1872 - DNA, 390 bp, Zea mays
  Clone ID: TF_LIB4730-015-R1-K1-A10
tgtcctggaatccgagagagcttgttccgttcaggcaccaaaagcatgttgccccgccgcgcagaggaagaagagagcacaggcggatggctcgtacgaagcagaccgcccgcatgtccacgggaggcaaggccccccgcaagcagctcgccaccaaggcggtgaggaagtcggcgccgacgaccgttggcgtgaagaagcctcacaggtacaggcccgtaaccgtggcgctgcgcgagatccgcaagtaccagaagagcacggagctgctgatgcgtaagctgccctttcagcgcctggtgcgcgagatcgcgcatgacttgaagacagaccttcggttgcagagtcacgcttgtgctgatactgcatgaggccgtctaggtctacctc

SEQ ID NO: 1873 - DNA, 531 bp, Zea mays
  Clone ID: TF_LIB4730-040-R1-K1-C12
tgcgccctgaaattccttctgtccaggcaggaagatgttggcagccaggagaggataagatggcctcgacgaagcagatcgaccgcaagtccaccgtaggcaaggacacgcgcatgcagctgcgccaccaattcggcgaggatagtcggcgccgactaccggaggggtgaataagccccacatgtacaggcccggcatggtggtgctgtgcgatgatccgcaagtaccagatgatcacggagctggtgatccggatgttgcccttccatcgcctggtccgggagatcgctcaggacttacagacggatctgcgggtccagagacaccccgtcctggtcctacaggaagccggcgaggtctatctagctggcctgttcgaggacaccaacctctgtgccattcacgcaaagcggggtatcatgatgtccaaagacattcagcttgaccgccgcattcgcagtaattgggcgtaagcctatctcgctgccggacccaatggaagaagagggactgaagagtgcaatttggaac

SEQ ID NO: 1874 - DNA, 623 bp, Zea mays
  unsure (1)..(623): unsure at all n locations
  Clone ID: TF_LIB4729-065-R1-K1-F10
aagtatggatgagaggagagagtgtggagagccactttatacacactcgactctcctctctcgcatccgcagcctctcgagctctactccatcccctcgatctcgaagcgcagcagcagcagtcaggcggccatggacgccagcgcagccggagccggcgggaaggcgaagaagggcgcggccgggcgcaaggccggcgggccgaggaagaagtcggtgacgaggtccgtcaaggccgggctgcagttccccgtcggccgcatcgggcggtacctgaagaagggccggtacgcgcagcgcgtcggcacgggcgcccccgtctacctggccgccgtcctcgagtacctggccgccgaggtgctggagctgggcggcaacgcggccaaggacaacaagaagacccgcatcatcccgcgccacgtgctcctggccatccgcaacgacgaggagctcggcaagctgctgtcccgcgttaccatcgcccacgngnggcgtccttcccaacatcaaccncggtgcttctgcccaagaagaccgctgaaaaaggcggcggcccaaggaaggccaagtcgcccagagaggccggccaaagtccccaagaaaggcatagaagggaccgcctt

SEQ ID NO: 1875 - DNA, 525 bp, Zea mays
  unsure (1)..(525): unsure at all n locations
  Clone ID: TF_LIB4762-056-R1-K1-E5
gggtccctcgggccggccggacccgcatcttcctctccccgtcaatccctgtcagaagccttccctccttcactcgctcgatggcccgcaacgaatgcagacggcgaggaagtccaccggcggcaaggcgccgaggaagcagttggcgactaaggcggcccgcaagtctgcccctgcgaccggcggagttaagaagccccaccgcttccgccccggtaccgtcgcgctccgggagatccgcaagtaccagaagagcacagagctgctgatccgcaagctgccgttccagcgcctggtgcgggagatcgcgcaggacttcaagaccgacctacgcttccagagctccgctgtctccgcgctgcaggaggcggctgaggcctaccttgtcggtctcttcgaggacaccaacctttgcgccatccacgccaagcgcgtcaccatcatgcccaaggacatccagctttgcccgccgattcgnggggagagggcctaagcatngtatattctgtcatcagtgcccgatca

SEQ ID NO: 1876 - DNA, 739 bp, Zea mays
  Clone ID: TF_ZmC369_55
ccggccgggaactacggtaactcgtctgctcgcatttcctcccaatccatcccgcctccaaacccgaactccaagtcgccccgcatcgatggcgcccaaggccgagaagaagcccgcggcgaagaagccggcggaggaggagcccgctgccgagaaggcgccggccgggaagaagcccaaggcggagaagcgtgtcccagcaggcaagtccgccggcaaggagggcggcgagggaaagaggggccggaagaagggcaagaagagcgtggagacctacaagatctacatcttcaaggtgctgaagcaggtgcacccggacatcggcatctcccctaaggccatgtccatcatgaactccttcatcaacgacatcttcgagaagctcgccgccgaggccgccaagctcgcgcggtacaacaagaagcccaccatcacctcccgtgagatccagacctccgtgcgcctcgtcctccccggggagctcgccaagcacgccgtctccgagggcaccaaggccgtcaccaagttcacctcgtcctaggctgcgtggcctccgcttgcaggcttccctcgtatgttcgcgtgtcttgctgtagttaggtgctgctgtgtctggtctcctccggtagcaactgttatctgatggaacagtaacaatgcttattgaatccagctagttgcttatttgtggatccaaaaaaaaaaaaaaaaaaaaaagggcggccgccaccgcggtgga

SEQ ID NO: 1877 - DNA, 257 bp, Zea mays
  unsure (1)..(257): unsure at all n locations
  Clone ID: TF_LIB3279-059-P1-K1-H8
gcctcattcatctccattagaaacaccgtcgcacccacactcttccttggggcgcagcccaaagccgcggaacgatgggtcgcgcgaagcatactgcgcgcaagtccacgggcggtaaggtccacaggaagcatattacgaccaaagaatggcgcaaaacggcccctgctaccggcggagagaaaaagccgcaccgcttccgcccgtncaccatggcgctgcgcgagatccgcatgtaccagaagagcacggagttt

SEQ ID NO: 1878 - DNA, 445 bp, Zea mays
  Clone ID: TF_LIB3357-052-P1-K1-D5
gctctaaagtgtccttgccgacgtcactgtccgatccaggtgtgcagactgctatatcctcatctacgttcagaatggtccgcacgaagcaaacgggtcgcaagtggaccggcggtaaggcgccccagatgcatctggccaccaaggcatgcgcgcatgtcggccccggccacagacggaataaagaagccgcaccggttcctcccaggaaccgtgcagcttcgatagatcctgaagcaccagaagagcacggagctgttaatgcggaagctgtcgtgccaacgcctagtgcgagagatcgagcaggacttgaagacggacctgctgtttcagttctctgccgtggctgtgctgcaagaggccgcggatgcgcacctggtggtgctattcgaggacaccaacctgtgcgccattcaagcgatgagggtgaccatcatgcccaaag

SEQ ID NO: 1879 - DNA, 583 bp, Zea mays
  Clone ID: TF_LIB4185-050-R1-K1-D5
aatccaacaatccttggaaaaagggtttttatccccctgaacaaattacttgatttaggggatggacccccagggaatacaaaacaaaattttgggcccaaaaattggccggggggggcacccccaaattaaaacagggcctcctcaagggtggaaccaatttttttcagcacaattgggaatattttaaaaatttccacactaaattggtcctggagcaaccttttagcacgggcctaaaaggccgaggaaaaaaaaaaaaaccgtctttccgggggggggggatttaaaaggaagaaaacttggaaacggccttggggcccttggaaacggggggtttgggaagctccccaggaaggacgagggcccccgaattctggatcccccgggaggttatggggggctttttgttggagcgggcaatcttgggggcctcaacggcccgtttttcaaaaatgtcgttgatgaaggggttcatgatggacatggccttggacaaaatccccttggccgggggcacctggttggccccctggaaaatggaaattttgggcgtctggaccttttttttggcctttttttt

SEQ ID NO: 1880 - DNA, 578 bp, Zea mays
  Clone ID: TF_LIB4976-001-R1-K1-A4
ccatcccgggttcgacgatgtttttgatcgaattccctatggcgctgtaggcttgatgaagaatcccttgcagaagatgtcgacggaggagaaggcctagaatacaaccattgtgaagaagagcgtgcacgtgcaagtagggcgtattgaagaaggtgaagtataaggccaagaacagtggagagatgtacaagatctacatcttcaaggtgctcaaggaggtgcacccggacattggtatctcgtgcatggtcatgtccatcatgaactctttcagtaacgatatcttcgagaagctggctgccgaggccgtcaagctcgctcgctacaacaagaagcccagcataacctcccgggagatccagacttctgttgtgcctcgtccttcccggcgagctcgccaagcactccgtttacgaggacaccaaggttgctacctagttcacttcctcttagattgtcgctccactggtgcgaggtgttctgtttcctttcctcgcaacttaggtgaatgctactaggttcgccccaggaaaaattgctgtgtgtgaattctctaacctattcctacttgtgct

SEQ ID NO: 1881 - DNA, 640 bp, Zea mays
  Clone ID: TF_ZmC369_44
aggcgccccccgggaagaaacccaaggcggagaaacgggtcccccctggcaagtcccctcccaagaaaggcggcgagggcaaaaggggcaaaaaaaagggcaaaaaaagcgtggagacctccaagatttccattttcaaggtgtttaagcaggtgcccccggacattggcatttcctccaaggccatgtccatcatgaactccttcattaacgatatttttgagaagctccctgttgaggcccccaagctcgcgcgctataacaaaaagcctcccctcccctcccgtgagatccagacctccgtgggcctcgtccttcccggggagctcgccaagcaccccgtttccgagggccccaaggccgtccccaagttcccctcggcctagggtgggcggcccccccttgcaggattttttcctgggttcccgtttcttgctgtagttaggggctgctgcccgctgggttctatgtatgttatctatctgtctgtagcaactgtgttatctgataggaccgtaatggtgcttattcaacccagctatatgtttctatgtgaatcatctctctatcggttgttgagtaactttatattgtgatgaagatgtgaatgtgatttataaaatgcgtcagtttctacggt

SEQ ID NO: 1882 - DNA, 649 bp, Zea mays
  Clone ID: TF_LIB4731-015-R1-K1-F11
accctcccctgcctgctttctttccgatcgccaacccagccaaccctccctgcctttcgttaactcacagagggaccgaccggcacccaccgagggcaagaagccagccgggaagaaacacgcccaggaagaaccagcccgcccgccggagaaggatcgctctgggaggaagccaaccgcgggcaagcagctccctcccggaaaaaacatccgccaggaaggcgggggtgacaagcaggagcggacgaaggacagccagaacgagcggacggacaagctctacatacataaggagcggactcaagcgcacccacacatacatatgtacttcatggacaggcacatccagaactaactcattaatgacatacatcagaagcaagccggccaggcaggcaagctcgcccgtcacaaccagaaggacaccatcaattacctggagatacatacatacgtccgtctggctctacctacccagctagctaagcacgcacgctgggagggcaccaacgacggcagcaagcacacctacctctaacttactttctagtaagtacttacgcgcccggcggcgctccgactgactggaaggaatgtcatccgacagaagatctgaccaaggcgatctataattcaggcttgctgactg

SEQ ID NO: 1883 - DNA, 477 bp, Zea mays
  Clone ID: TF_LIB3600-050-Q1-N6-E12
ccccgggaaaattcccagattcccaagttcctaaagaaaggaaaaaaatagcagggggagagatacaacttttttccacaggggggccataaaatctaaggggcccattacaatccggcgcgccggttttatagagcaggcaagctagctactaggcgggtagggggggggactgggaaaaggacacagaaaaaaacccttttaacaaacccggggatcccgaaacgcgctaagttgcggggaaactgggggacggccttggttccctcggaaacggggtgcttggcaagctctccggggaggactaggcccacggaggtctggatctcgcggaacgggagggggggctttttgtggacccgccccagtttgggggcctcgccggccagtttttaaaaaatgtcgttgataaaggagttcatgatggacatggccttggaggatatgccgatgtcggggtgcacctgcttaagcacc

SEQ ID NO: 1884 - DNA, 579 bp, Zea mays
  unsure (1)..(579): unsure at all n locations
  Clone ID: TF_LIB3595-026-Q1-K6-C2
cggtccgnattcccgggctccttgcttttccttgcactggttgcttatcctcctcccatcccagtacggtggcgcccaagtccgagcaagaagcccgcggcgtaagaagccggtggcggaggagcccgcggcgagagaagacgaccgccggggaagaagcccaagggcggagaagcgggtccccgcgggctagtccgccggtaaggagggcggtgagggcaagcgtggctaagaagaagggcatgaagagcgtggagacgtacaagatctacatcttttaggtgctgaagcaggtgcacccggacattggtattttgtccaaggccatgtccattatgaactccttcattaacgacattttctgaaaagctggccggcgaggccgccaagctcgcgcgcttcaacaagaagcctaccatcacgttccgcgagatcctgacctccgtgcgcctcgtgcttcccggtgagctcgccaagcacgctctctctgagggcaccaaggccgtcaccaagttcacctcctcctaggcttgcacgctcgccctttgtaggcatcttttgtgtttgatgttccccttg

SEQ ID NO: 1885 - DNA, 640 bp, Zea mays
  Clone ID: TF_LIB4758-062-R1-K1-D2
ctcgagccgccgggacacaccatgagcaagaaaagctcctcccgtccgcatcgcccctcatctccctcgaccccgacatccccgacccgatggcgcccaaggccgagaagaagccagcggagaagaagccggcggccgaggagaaggcggagaagacgaccgcagggaagaagcccaaggccgagaagcggctgcccgcgtccaagtcctccggcaaggagggcggcgagaagaaggggaagaagaaggccaagaagagcgtggagacctacaagatctacatcttcaaggtgctgaagcaggtgcaccccgacatcggcatatcctccaaggccatgtccatcatgaactccttcatcaacgacatcttcgagaagctggccggcgaggcagccaagctggcgcggtacaacaagaagcccaccatcacgtcccgcgagatccagacctccgtgcgcctagtcctccccggagagctcgccaagcacgccgtctccgagggaaccaaggtcgtcaccaagttcaccagcaactgagcgcgctgcgagatccgcggatctgatagaagggatctttgatgtgggctttccccaggaccctacccggctagggggtaggttggctgatgtataaatcccca

SEQ ID NO: 1886 - DNA, 795 bp, Zea mays
  Clone ID: TF_ZmC877532_1
tgtgcttgaaaagactaccttcagttgtgttgagcattaagcattgtcgcagtcggttgctgaaaaaaaaaaaaaaaaaaaaaaaaaaaaaaaaaaaaatcacagctctcaatcccaatctcccatcacaaaaccaatcctcctccgcgccccgagccccaagagcatcacctgcaagcaatggacgtctcaggcaccggagctggcgctaagggcaagaaaggcgcggccggacgcaaggctggcggccccaggaagaagtcggtgacgcggtccgtcaaggccgggctccagttccccgtcggccgcatcgggcgctacctcaagaagggccgctacgcccagcgcgtcggcaccggcgcccccgtttaccttgccgccgtcctcgagtacctcgccgccgagctgctggagctcgccgggaacgccgccaaggacaacaagaagagccgcatcatcccgcgccacctgctgctcgccgtcaggaacgacgaggagctcggaaagctgctggccggcgtcaccatcgcgcacggtggcgtgatcccgaagatcaacccggtgctcctccccaagaggaccgcggagaaggagggctaggagcccaagtctcccaagaaagcgaccaagtcccccaagaagaccaccaaggcttaatcgacgcgttccatgtcgtagtgttcttcgtagtggtccggtggtgttcctgtagttgtgttgttttatcttgttgtgtgcatgtttaatggaagaatgtcagaaatttctctgacttgcccaaaaattgcggcgtgc

SEQ ID NO: 1887 - DNA, 401 bp, Zea mays
  Clone ID: TF_LIB3227-021-P1-K1-F6
caacggcacgattctcctcctccgtccgcgtagctctcggtttcggcgatgtcggggcgcggcaagggcggcaaggggctgggcaagggcggcgccaagcgccaccgaaggggcttggccacaaccttcaaggcattaacaaacccgccattccttagcttgcccagaaggggcgggttaaaccccttttttggcttattttacaaggagacccgcggcgtgttaaaaattttcttggagaacgtattccgcgacgccgtaacttacaccgagcacgcccgccgaaggaccgtaaccgccatggttgtcgtttacgcgctaaagcgccagggccgaacgctctacggtttcggcggttaggccgcctccctttctgatgctttgatgtgacggccgtggtc

SEQ ID NO: 1888 - DNA, 623 bp, Zea mays
  Clone ID: TF_ZmC200443_1
tcatgtaattaagctgatcataatcgtgctgatattgtgaatgaattccatgcatttccctgtgggacgcatccaccgccacctgaaggatagcgcacaggccggcgagcgggtgggggcgacggcggccgtgtacgcggcggccgtcctggagtacctgacggcggagatcatggagctggccgggaacgcgtgcagggacctcaaggtgaagcgcatcaccccgcggcacctccagctggcggtacgcggggacgaggagctggacaccctgatcaaggccaccatcgccggcggcggcgtcatcccccacatccacagggagctcatcgacaaggctgcctaggaatgacgaaggagcaagcagtctgagaaaaaaacctgagaaccaagtagtaccatgaacctcttgtgggtggcttcgctcttgttgcgttgtcaatctgctgatacatacacatttctcaaaaatagaggcgggcactcgccgcttcatgctcccttggatggttgttcttttcatccatcagctgaacccagctgatcatcccggtcagcattgagaattggtctgtgcatgaacttaatcgataaacagtcaaagagctcaccctttttactct

SEQ ID NO: 1889 - DNA, 635 bp, Zea mays
  unsure (1)..(635): unsure at all n locations
  Clone ID: TF_LIB4979-081-A1-K1-B4
attctgcgatgcttcgatcaccacacagtcgctacgagatcgcttccatcctagctcaatcgatggtccgcaacacgcagacggggaggattccctccgtcgcctaggcgccgaggaagcagatggcgactaaggcggcccgcaagtctgcccctgcgaccggcggagttaagaagccccaccgcttccgccccggtaccgtcgcgctccgggagatccgcaagtaccagaagagcacagagctgctgatccgcaagctgccgttccagcgcctggtgcgggagatcgcgcaggacttcaagaccgacctacgcttccagagctccgctgtctccgcgctgcaggaggcggctgaggcctaccttgtcggtctcttcgaggacaccaacctctgcgccatccacgccaagcgcgtcaccatcatgcccaaggacatccagcttgcccgccgcatccgtggggagagggcctaagcatcgtatattctgtcatcagtgcccgatcagaagatgtagagatgtgctgggttctgtagtttgggttactgtcgaatcatcagntagttggttgttcactgctgtaacttattatcatgatgcatatgaaatggcaatgaactatgttatcagttctcg

SEQ ID NO: 1890 - DNA, 364 bp, Zea mays
  Clone ID: TF_LIB3150-078-P2-N2-D8
tgtaagcaagaaaactagaaaaggctcctgcgggccgcaacgccccgcatgggggtcgaccccgacatccccgacccgatggcgcccaaggcggagaagaagccagcggagaagaagccggcggccgaggagaaggcggagaagacgaccgcagggaagaagcccaaggccgagaagcggctgcccgcgtccaagtcctccggcaaggagggcggcgagaagaaggggaagaagaaggccaagaagagctgggagacctacaagatctacatcttcaaggtgctgtagggaggtgcaccccgtcatcttgtatattctccaaggtcatgtccattattgacttcctttatcaactaactttttt

SEQ ID NO: 1891 - DNA, 385 bp, Zea mays
  Clone ID: TF_LIB4730-007-R1-K1-C6
acagaacgatctcaatctccctagcaatctctagcagcagatcctcgtgcgaagcaaagcgctagcccccttcgtactgtcccgatggcccgcacgaagcagacggcgaggaagtccactggcggcaaggcgccaaggaagcagctggccaccaaggcggcgcgcaagtctgccccggcgaccggcggagtgaagaagccccaccgtttccggcggggcaccgtcgcgctccgggagatccgcaagtaccagaagagcacggagctgctgatccgcaagctgccgttccagcgcctggtgcgtgagatcgcccaggacttgaagaccgaccttcggttccagagctccgacgtcggcgagctggaggaagtgggtgaggcctacc

SEQ ID NO: 1892 - DNA, 609 bp, Zea mays
  Clone ID: TF_ZmC1215011_1
ttttttttttttttaagacccgaaagggcgtttgggctcataaactctataatggcaaatacacgtggttcttgttttgatcgaagaccggtggtcgattgcgaaaggcagctaattggcttgccatttaatatacatcccagctgtagaaagcatgttccaagcgaacgccttaattatcccctaaccgtgatatccctcatgtcaaagcaaaaagtcgtgatccctcccagatactcatgtgagatcgcttagttgcgctcacctcggaggcggcgggccagctggatatccttggactggatagtgacacgcttggcgtggatggcacagaggttggtatcctcaaagagggagacgaggtaggactcaacagactcctggagagcaccgatggcggaagactggaagcggagatcagacttgaagtcctgggcaatctcgcggaccaggcgctggaaggggagctttcggatgaggagctcggtcgacttctggtatcgtcgaatctcacggagagcaacggtaccaggcttgtagcggtgaggcttcttgacacctccggtggatggggcggacttgcgggcagccttggaagcgagctgcttg

SEQ ID NO: 1893 - DNA, 744 bp, Zea mays
  Clone ID: TF_LIB3279-011-H6_FLI
gccgcaccacagctcagctcccacccactcccaaaccctctcgccggagccccagcaacccgccagcaagcaagatggacggcagcaaggcgaagaaggtggcggcgaagaagttcggcgggccgaggaagaagtcggtgaccaagtccatcaaggccgggctccagttccccgtcggccgcatcgggcgctacctcaagaagggccgctacgcccagcgcgtcggctccggcgcccccgtctacctcgccgccgtcctcgagtacctcgcagcagaggtgctggagctggccgggaacgccgccaaggacaacaagaagagccgcatcgtgcccaggcacctgctgctggccatccgcaacgaccaggagctcgggaggctgctgtccggcgtcaccatcgcccacggcggcgtcatccccaacatcaacccggtgctgctccccaagaaggccgccgagaaggctgagaaggccgagaagaccgccaccaagtcgcccaagaaggccaccaagtcccccaagaaggccaccaaggcgtagatctggctccgagcgcccgtgccggtgaactggactgatggtgctccgtcagccctcgtgtgcctagtgtctctgtgttaagttagctgtggtgtgttccagagtgtgttgaagcttgttcttttgctttgccccgccatgtaaccgtgaacgaagaggaagcgtcttgcttcctctgttctgctatatcaatctggtttct

SEQ ID NO: 1894 - DNA, 405 bp, Zea mays
  Clone ID: TF_LIB3632-007-Q1-N6-A9
aaaaaaagcaaatttaatttccattaagaccggggacaacctttacaggggcgggaatgcaagaaaaacaatcaggttccccagcaacggaaaactctttatccctaagattctaaaaacaagcccaaggggcccaagaggcctttgccccccggaaggggaaccaagagaggcccaggtcctacaagcggggccaaagcaacaaccaccccccctggggggaggggggctcgcctcgttaaggccctttcccccctgatgcggcgcccgagctggatgtccttgggcataaaggggacccccttggcggggatggcccaaaggttagtgtcctcaaagagccccacaagggaggccttgggggcctcctgcaacgccccaacgggggaggactggaagcggaaa

SEQ ID NO: 1895 - DNA, 212 bp, Zea mays
  Clone ID: TF_LIB5027-003-R1-XP1-H3
ctctctcgctgctccgatggcccgacgaagcaaacagatggaatcgaccggcggcaaggccccccggaagtagctggctactaaggttgcgcgcaagtcgcccccggccaccggcggcgagaagaagccccaccgcttccgtcccggccccgccgcgctccgcgagatccgccagcaccacaatagcactgagctgatcttccgcaaagctc

SEQ ID NO: 1896 - DNA, 675 bp, Zea mays
  Clone ID: TF_LIB4740-047-R1-K1-C8
cccagtaccgggatagcatacagagcggggctgcagagcagggtagccgaggtagacgtagtagtcgtcactcatgagtcatgagcaaggacaagcatccacaagcacagagcaccacacatgcgtgccgatgatgcaggtgcatggcgacgctcctcctggcgctggtcctacatcgggggcttcgaataactggtagcgtacctggcgctgaaccgctggaatccgtgcttatacctggaagaacagcagctgtgcactgctatttaggtaggtgacctttcagaggctgggtagggaaattggacagtactttaaaactgatttgagtatccagagccatgcggtgatagccctccaggaggctgctgaagcataccttgctagcctgttagaggacaccaacctgtgcgccatccatgctaagcgtgtgaccatcatgccaaaggacattcagctggcaaggaggatccgcggcgagagggcctaatcgccacctcaaacatcgtgacaaaaacatgaagtcctggggttattgttaatctggtgccattgtaaggacatatgagtaggggtttgttttgtggatcgcaagtttctcttctgctactggtgctgctacctttgctggggttattgctagggtcgaatacttaagttaactatgcgctgaca

SEQ ID NO: 1897 - DNA, 573 bp, Zea mays
  unsure (1)..(573): unsure at all n locations
  Clone ID: TF_LIB3606-029-Q1-K6-F11
atcgtcgccctcacaattcgttccgtgccaggcaagggaanaaatcgagcagccaagnagaggagaagaggctcgtacgaagcagaccgcccgcaagtccaccggaggcaaggccccgcgcaagcagctcgccaccaaggcggcgaggaagtctgcgccgacgaccggcggcgtgaagaagccccacaggtacaggcccgggacggtggctctgcgcgagatccgcaagtaccagaagagcacggagctgctgatccggaagttgcccttccagcgcctggtccgtgagatcgctcaggacttcaagacggatctgcggttccagagccacgccgtcctggccctccaggaagccgccgaggcctacctcgtcggcctgttcgaggacaccaacctctgcgccatccacgccaagcgcgtcaccatcatgcccaaagacatccagctcgcccgccgcatccgcggcgagcgcgcgtattcttatctcgcgcccggcccccattgcggcctgaggatggaggagggcaatttgtaaccttatgctgtttgttcgcttttaaaccgcgtggtgaa

SEQ ID NO: 1898 - DNA, 735 bp, Zea mays
  unsure (1)..(735): unsure at all n locations
  Clone ID: TF_LIB4742-076-R1-K1-G12
cctcgaggccggccgtacttnncctggcctcccattcctcgcgcggcgaccacccgattcgaagcgtgcggagagaccgaagaagcgggagagatggctcgtaccaagcagactgctcgcaagtccacgggagggaaggctcccaggaagcagcttgccaccaaggctgcccgtaagtctgcccccaccactggtggagtgaagaagcctcaccgctaccgccctggaactgttgccctccgtgagatccgcaagtatcagaagagcactgagctgctgatcaggaagctgcccttccagaggctcgtcagggaaattgcacaggacttcaaaactgatttgcgtttccagagccatgcggtgcttgccctccaggaggctgctgaggcataccttgttggcctgtttgaggacaccaacctgtgcgccatccatgctaagcgtgtgaccatcatgccaaaggacattcagctggcaaggaggatccgcggcgagagggcctaatcgccacctcaaacatcgtgacaaaaacatgaaggcctggggttattgttaatctggtgccattgtaaggacatatgagtagggtttgttttgtggatcgcaagcttctcttctgctactgttgctggtacctttgctggcgttattgctagcgccgaatacttaagttaactatgcgcctgacaggctggactagcaatgttatgtgcgctgctgcaccttgcgcgaaat

SEQ ID NO: 1899 - DNA, 680 bp, Zea mays
  unsure (1)..(680): unsure at all n locations
  Clone ID: TF_LIB4762-121-Q1-K1-C4
ctcgaggccggccgggctagccaccgcatcgtcgccctcaattcgttccgtccaggcaaggaagaaatcgagcagccaaggagaggagaagatggctcgtacgaagcagaccgcccgcaagtccaccggaggcaaggccccgcgcaagcagctcgccaccaaggcggcgaggaagtcggcgccgacgaccggcggcgtgaagaagccccacaggtacaggcccgggacggtggcgctgcgcgagatccgcaagtaccagaagagcacggagctgctgatccggaagttgcccttccagcgcctggtccgtgagatcgctcaggacttcaagacggatctgcggttccagagccacgccgtcctggccctccaggaagccgccgaggcctacctcgtcggcctgttcgaggacaccaacctctgcgccatccacgcaaagcgcgtcaccatcatgcccaaagacatccagctcgcccggcgcattcgcggngagcgcgcgtaagcgtatctcgcgcccggccccaatggcggcggaaggatggaggagtgcaatttggaactttatgctggttggtcgcttttagacggcgcggcgaagaagtaatggaaaaacggctttacaagtctattttgtgcggtaattcgtggaagccgcttcctcccgaagcgatcttggtaaa

SEQ ID NO: 1900 - DNA, 633 bp, Zea mays
  Clone ID: TF_LIB4979-070-A2-K1-C5
aaaaaaaaactcttgtgtcgtggccgtcggccgtcgctgcgctgcgtcgttccagatttggggaaggaaatccggcaccgagattcgagtcgaaaagtcttttgtgtaggacatcatttgctagatggcgcgtaccaagcagaccgctcgcaagtccactggaggaaaggctcctaggaagcaactcgctacaaaggcagcccggaagtctgcacccacaactggaggagtgaagaagcctcaccgttaccgcccagggactgttgctcttcgtgagatccgcaagtaccagaagagcactgagttgctgattaggaagctgccgttccagaggcttgtcagggagattgctcaggatttcaagacggatctgcgcttccagagccatgccgtgcttgctttgcaggaggcagcagaggcctacctggttggtctcttcgaagataccaatctgtgcgcgatccatgccaagcgcgtgaccatcatgcccaaggacattcagctggcaagaaggatccgtggcgagagggcgtaagtctgtcgacgggcagaagaactctgcgctcgttttgtgtgttcgcctctctcaccctgtaagttttatgagaagatgatcctagtaaactgtacttg

SEQ ID NO: 1901 - DNA, 629 bp, Zea mays
  unsure (1)..(629): unsure at all n locations
  Clone ID: TF_LIB5116-015-A1-PF1-D3
ccctctctaccgaattcttgcttcccttcagttctccaaccacagcgagcgcaagccgaatcccagttcgaagtcctcgacaaggagaaggagagattgatggcgcgtacgaagcagaccgcccggaagtccaccggcggcaaggcgccccgcaagcagctggccaccaaggcggcgaggaagtcggcgccgaccacgggcggcgtgaagaagccccaccgctacaggcccggcaccgtggcgctgcgcgagatccgcaagtaccagaagagcacggagctgctcatccgcaagctgccgttccagcgcctggtgcgggagatcgcgcaggacttcaagacggacctcaggttccagagccacgccgtgctggccctccaggaggccgccgaggcgtacctcgtcgggctctttgaggacaccaacctctgcgccatccacgccaagcgcgtcaccatcatgcccaaggacatccagctcgcccgccgcattcgcggggagcgcgcatagatcaagcgtctgcctactcgacttaggccttgtacaatggngaggtgtttagagagatgcttagaaaaataaatcgggtttttctgaagcaccggtacctatttctatagaaatagaaa

SEQ ID NO: 1902 - DNA, 675 bp, Zea mays
  Clone ID: TF_LIB5116-023-A1-PF1-H6
atattcgcctttccgcacccacactaggtcgccttccgattcgaacctcccccaaatccgcagcagtccacaggaggcgaagccaccgcgatggcccgtacgaagcagaccgcccgcaagtccaccggcggcaaggcgccccgcaagcagctcgccaccaaggcggcgaggaagtcggcgccgaccaccggcggagtgaagaagccccaccgctacaggcccgggaccgtcgccctccgggagatccgcaagtaccagaagagcacggagctgctgatccgcaagctgccgttccagcgcctggtccgcgagatcgcgcaggacttcaagaccgacctccgcttccagtcccacgccgtgctggccctccaggaggcggccgaggcgtacctcgtcgggctgttcgaggacaccaacctgtgcgccatccacgccaagcgcgtcaccatcatgcccaaggacatccagctcgcccgccgcatccgtggcgagagggcctaagccgtcctccccgtcaacgccgttagtggatcggaagtggaatgtgttgcttccggttgtagtttgttcctaattgccgtgctaggtctatcttcttttgtgtagaagaaatatggttgttggagtaagacgaacttgatatgtgatgatgttccttctggtttgcgatgaagc

SEQ ID NO: 1903 - DNA, 755 bp, Zea mays
  Clone ID: TF_ZmC114_10
cccattcctcgcgcggcgaccacccgattcgaagcgtgcggagagaccgaagaagcgggagagatggctcgtaccaagcagactgctcgcaagtccacgggagggaaggctcccaggaagcagcttgccaccaaggctgcccgtaagtctgcccctaccactggtggagtgaagaagcctcaccgctaccgccctggaactgttgcactccgtgagatccgcaagtaccagaagagcactgagctgctgatcaggaagctgcctttccagaggctcgtcagggaaattgcacaggacttcaagactgatttgcgtttccagagccatgcggtgcttgccctccaggaggctgctgaggcataccttgttggcctgtttgaggacaccaacctgtgcgccatccatgctaagcgtgtgaccatcatgccaaaggacatccagctggcaaggagaatccgcggcgagagggcctaatcgccacctcaaacatcgtgacaaaaaacatgaagtcctggggttattgttaatctggtgccattgtaaggacatatgagtagggtttgttttgtggatcgcaagtttctcttctgctactgttgctgctacctttgctggtgttattgctagggtcgaatacttaagttaactatgcgctgacagtctggaccagcagtgttatgtgcgctgctggacttcgcgcgcagagctgtggccgatttgttcgttaatgtcaagaattgtgttacagtgcgtgt

SEQ ID NO: 1904 - DNA, 826 bp, Zea mays
  Clone ID: TF_ZmC114_15
tcagtttgtttgcgcgaaaaaaggttaggaatcctcttgtgtcctggccgtcggccgtcgctgcgtcgttccagatttgggggaaggaaatccggcaccgagattcgagtcgaaaaggacatcatttgctagatggcgcgtaccaagcagaccgctcgcaagtccacaggaggaaaggctcctaggaagcaactcgctacaaaggcagcccggaagtctgcacccacaactggaggagtgaagaagcctcaccgttaccgcccagggactgttgctcttcgtgagatccgcaagtaccagaagagcactgagttgctgattaggaagctgccgttccagaggcttgtgagggagattgctcaggatttcaagacggatctgcgcttccagagccatgccgtgcttgctctgcaggaggcagcagaggcctacctggttggtctcttcgaagataccaatctgtgcgcgatccatgccaagcgcgtgaccatcatgcccaaggacattcagctggcaagaaggatccgtggcgagagggcgtaagtctgtcgacgggaggaagaactctgcgctcgttttgtgtgttcgcttctctcaccctgtaagttttatgagaagataatctagtaaactgtacttggcctgtttgactgtagccgcagtagcatatgcatgcgcatactgttggctgttggcgtgtctggagtcttttatccatccattctagtactacttaataatcgtgatatatcaacgggttgctgaacgtgtatccagacttaactgtgtgtttggctgtctgaacctctgagtcgttattgatgtc

SEQ ID NO: 1905 - DNA, 796 bp, Zea mays
  Clone ID: TF_ZmC114_20
ccgggacttttccggcctcccattcctcgcgcggcgaccacccgattcgaagcgtgcggagagaccgaagaagcgggagagatggctcgtaccaagcagactgctcgcaagtccacgggagggaaggctcccaggaagcagcttgccaccaaggctgcccgtaagtctgcccccaccactggtggagtgaagaagcctcaccgctaccgccctggaactgttgccctccgtgagatccgcaagtatcagaagagcactgagctgctgatcaggaagctgcccttccagaggctcgtcagggaaattgcacaggacttcaaaactgatttgcgtttccagagccatgcggtgcttgccctccaggaggctgctgaggcataccttgttggcctgtttgaggacaccaacctgtgcgccatccatgctaagcgtgtgaccatcatgccaaaggacattcagctggcaaggaggatccgcggcgagagagcctaatcgccacctcaaacatcgtgacaaaaacatgaagtcctggggttattgttaatctggtgccattgtaaggacatatgagtagggtttgttttgtggatcgcaagtttctcttctgctactgttgctgctacctttgctggtgttattgctagggtcgaatacttaagttaactatgcgctgacagtctggactagcagtgttatgtgcgctgctggaccttgcgcgcaatgctgtggccgatttgttcgttaatgtcaagaattgtgttacagtgcgtgcaaaaaaaaaaaaaaaaaagcggcc

SEQ ID NO: 1906 - DNA, 894 bp, Zea mays
  Clone ID: TF_ZmC114_22
cattgggtacctcgaggccggccgggaggaatcctcttgtgtcgtggccgtcggccgtcgctgcgctgcgtcgttccagatttggggaaggaatccggcaccgagattcgagtcgaaaagatccgcggtatcgctcgaccttcaaatacttcggcaacgtcgccggttcaggacatcatttgctagatggcgcgtaccaagcagaccgctcgcaagtccactggaggaaaggctcctaggaagcaactcgctacaaaggcagcccggaagtctgcacccacaactggaggagtgaagaagcctcaccgttaccgcccagggactgttgctcttcgtgagatccgcaagtaccagaagagcactgagttgctgattaggaagctgccgttccagaggcttgtcagggagattgctcaggatttcaagacggatctgcgcttccagagccatgccgtgcttgctttgcaggaggcagcagaggcctacctggttggtctcttcgaagataccaatctgtgcgcgatccatgccaagcgcgtgaccatcatgcccaaggacattcagctggcaagaaggatccgtggcgagagggcgtaagtctgtcgacgggcagaagaactctgcgctcgttttgtgtgttcgcctctctcaccctgtaagttttatgagaagatgatctagtaaactgtacttggcctgtttgactgtagccgcagtagcatatgcatgcgcatactgttggctgtttgtcgtgtctggagtcttttatccatccattctagtactacttaataatcgtgatatatcaccgggttgctaaacgtgtatccagacttaactgtgtgtttggctgtctgaacctcagaatcgttattgatgtcatcccattcgtcc

SEQ ID NO: 1907 - DNA, 847 bp, Zea mays
  Clone ID: TF_ZmC114_24
acgcaggtgtcctaagatgagctcaacgagaaaaaaataaaaatctggtccgcggtcatctgtcagtttgtttgcgcgaaaaaggtgaggaatcctcttgtgtcctggccgtcggccgtcgctgcgtcgttccagatttggggaaggaaatccggcaccgagattcgagtcgaaaagtcttttgtgtaggacatcatttgctagatggcgcgtaccaagcagaccgctcgcaagtccactggaggaaaggctcctaggaagcaactcgctacaaaggcagcccggaagtctgcacccacaactggaggagtgaagaagcctcaccgttaccgcccagggactgttgctcttcgtgagatccgcaagtaccagaagagcactgagttgctgattaggaagctgccgttccagaggcttgtgagggagattgctcaggatttcaagacggatctgcgcttccagagccatgccgtgcttgctctgcaggaggcagcagaggcctacctggttggtctcttcgaagataccaatctgtgcgcgatccatgccaagcgcgtgaccatcatgcccaaggacattcagctggcaagaaggatccgtggcgagagggcgtgagtctgtcgacgggaggaagaactctgcgctcgttttgtgtgttcgcctctctcaccctgtaagttttgtgaaaagataatctagtaaactgtacttggcctgtttgactgtagccgcagtagcgtatgcgcatactattgggctgttgtcgtggtctggagtcttttatccatccattctactacttaataatcgggttgctgaacgtgttccggaaataaaaaaaaaaaaa

SEQ ID NO: 1908 - DNA, 939 bp, Zea mays
  unsure (1)..(939): unsure at all n locations
  Clone ID: TF_ZmC114_26
tggctcccaggaagcagcttgcaaccaaggctgctcgtaagtcggcccccaccactggaggagtgaagaagcctcaccgctaccgccctggaactgttgccctccgtgagatccggaagtaccagaagagcactgagctgctgatcaggaagctgcccttccagaggcttgtcagggaaattgcacaggacttcaagactgatctgcgtttccagagccatgccgtgcttgccctccaggaggctgctgaggcataccttgttgggctgtttgaggacaccaacctgtgcgccatccatgctaagcgtgtgaccatcatgcccaaggacattcagctggcaaggaggatccgtggcgagagggcctaatccccccctcaaatcattgtgacaaaaatgaagtcttgtgtcgtagcaatgaatttaatctggtgccgttgtaaggacatatgagtagggtttgttttgtggatcataagtttctctactgccgcactatgtgttgctgctacctttgctggtgttattactagtgtcgaatgcttaaattgtctagtcatgtaatgcgctgacagtctgtgacgtgtatgcgatgtaggcactgactagtagtgttgtctgcgctgctggatcttgcgcctcattgctgtggctgatttgttcgttaatgtcaagaattgtgttacagtgagtgtatatttgtgcatcgttgcnaaaaaaaaaaaaaaaaaaaaaaaaaaaaaaaaaaaaaaaaaaaaaaaaaaaaaaaaaaaaaaaaagaaaaaaaaaaaaaaaangaaaaaaaaaaaaaaagaaaaaaaagaaaaaaaaaaaaaaaaaaaggggggggcgcttttttgaggtcccaggttttcttaccggggcgtgccaggtaaaattttttttttagggcccctaaaatcaattcaatgggccggct

SEQ ID NO: 1909 - DNA, 815 bp, Zea mays
  Clone ID: TF_ZmC114_28
atctgaggttggggaaaaaagcctcgcgtgtcgcaaaccgctctccgctgatttgggatttgggaggcgctcgaggtaaaccatagtttgtgactcatggctcgtactaagcaaactgctcgcaagtccactggagggaaggctcctaggaagcaacttgccaccaaggctgcccgtaagtctgcacctacaactggaggagtaaagaagcctcaccgttaccgccctggaactgttgctcttcgtgaaatccgcaagtatcagaagagcactgagctgctcataaggaagcttccattccagaggcttgtcagggaaattgcccaggatttcaagactgatctgcgtttccagagccacgcggtccttgcgctgcaggaggctgcggaagcatacctggtgggtctgtttgaggacacaaacctgtgcgccatccacgccaagcgcgtgaccatcatgcccaaggacattcagctggcaaggaggatccgtggcgagagggcgtagtttctctgttactggattggctctggaagtatggtgtgcatctgttcgatgctttgcttttgtggtgcttaacgtttgtgggtgtttgaactccaatgctcattcgtagtggattagttggtaggaagtgctgcgatcttactatgtttttagagtctataattgttgtcgattagtataattgtctaagtgctggtttcgcccatcaacctgatgggttatctgaacctcgaattgatatgttaagttgtgaacttcgttatattgtgtcagcaacggttgcattttattgtgctgaagttttttgt

SEQ ID NO: 1910 - DNA, 852 bp, Zea mays
  Clone ID: TF_ZmC114_30
cattgggtacctcgaggccggccgggacttttccggcctcccattcctcgcgcggcgaccacccgattcgaagcgtgcggagagaccgaagaagcgggagagatggctcgtaccaagcagactgctcgcaagtccacgggagggaaggctcccaggaagcagcttgccaccaaggctgcccgtaagtctgcccccaccactggtggagtgaagaagcctcaccgctaccgccctggaactgttgccctccgtgagatccgcaagtatcagaagagcactgagctgctgatcaggaagctgcccttccagaggctcgtcagggaaattgcacaggacttcaaaactgatttgcgtttccagagccatgcggtgcttgccctccaggaggctgctgaggcataccttgttggcctgtttgaggacaccaacctgtgcgccatccatgctaagcgtgtgaccatcatgccaaaggacattcagctggcaaggaggatccgcggcgagagggcctaatcgccacctcaaacatcgtgacaaaaacatgaagtcctggggttattgttaatctggtgccattgtaaggacatatgagtagggtttgttttgtggatcgcaagtttctcttctgctactgttgctgctacctttgctggtgttattgctagggtcgaatacttaagttaactatgcgctgacagtctggactagcagtgttatgtgcgctgctggaccttgcgcgcaatgctgtggccgatttgttcgttaatgtcaagaattgtgttaaaaaaaaaaaaaaaaaaaaaaaaaaaaaaaaaaaaaaaaaaaaacaaaaaaaaaaaaaaaaaagcggcc

SEQ ID NO: 1911 - DNA, 805 bp, Zea mays
  Clone ID: TF_ZmC114_34
gccggccgggccgtgacttttccggcctcccattcctcgcgcggcgaccacccgattcgaagcgtgcggagagaccgaagaagcgggagagatggctcgtaccaagcagactgctcgcaagtccacgggagggaaggctcccaggaagcagcttgccaccaaggctgcccgtaagtctgcccccaccactggtggagtgaagaagcctcaccgctaccgccctggaactgttgcactccgtgagatccgcaagtaccagaagagcactgagctgctgatcaggaagctgcccttccagaggctcgttagggaaattgcacaggacttcaagactgatttgcgtttccagagccatgcggtgcttgctctccaggaggctgctgaggcataccttgttggcctgtttgaggacaccaacctgtgcgccatccatgctaagcgtgtgaccatcatgcccaaggacattcagctggcaaggaggatccgcggcgagagggcctaatcgccacctcaaacatcgtgacaaaaaaatgaagtcctggggttattgttaatctggtgccattgtaaggacatatgagtagggtttgttttgtggatcgcaagtttctcttctgctactgttgctgctacctttgctggtgttattgctagggttgaatacttaagttaactatgcgctgacagtctggactagcagtgttatgtgcgctgctggaccttgcgcgcgatgctgtggccgattttgttcgttaatgtcaagaattgtgttacagtgcgcgaaaaaaaaaaaaaaaaagcggcc

SEQ ID NO: 1912 - DNA, 868 bp, Zea mays
  Clone ID: TF_ZmC114_35
gccggccggttcggggtccgcggtcatctgtcagtttgtttgcgcgaaaaaggttaggaatcctcttgtgtcgtggccgtcggccgtcgctgcgctgcgtcgttccagatttggggaaggaaatccggcaccgagattcgagtcgaaaaggacatcatttgctagatggcgcgtaccaagcagaccgctcgcaagtccactggaggaaaggctcctaggaagcaactcgctacaaaggcagcccggaagtctgcacccacaactggaggagtgaagaagcctcaccgttaccgcccagggactgttgctcttcgtgagatccgcaagtaccagaagagcactgagttgctgattaggaagctgccgttccagaggcttgtcagggagattgctcaggatttcaagacggatctgcgcttccagagccatgccgtgcttgctttgcaggaggcagcagaggcctacctggttggtctcttcgaagataccaatctgtgcgcgatccatgccaagcgcgtgaccatcatgcccaaggacattcagctggcaagaaggatccgtggcgagagggcgtaagtctgtcgacgggcagaagaactctgcgctcgttttgtgtgttcgcctctctcaccctgtaagttttatgagaagatgatctagtaaactgtacttggcctgtttgactgtagccgcagtagcatatgcatgcgcatactgttggctgtttgtcgtgtctggagtcttttatccatccattctagtactacttaataatcgtgatatatcaccgggttgctaaacgtgtatccagacttaactgtgtgtttggctgtctgaacctcagaatcgttattgatgtcatcccatc

SEQ ID NO: 1913 - DNA, 902 bp, Zea mays
  Clone ID: TF_ZmC114_38
cattgggaccctcgaggccggccggatctgtcagtttgtttgcgcgaaaaaggataggaatcctcttgtgtcctggccgtcggccgtcgctgcgtcgttccagatttggggaaggaaatccggcaccgagattcgagtcgaaaaggacatcatttgctagatggcgcgtaccaagcagaccgctcgcaagtccactggaggaaaggctcctaggaagcaactcgctacaaaggcagcccggaagtctgcacccacaactggaggagtgaagaagcctcaccgttaccgcccagggactgttgctcttcgtgagatccgcaagtaccagaagagcactgagttgctgattaggaagctgccgttccagaggcttgtcagggagattgctcaggatttcaagacggatctgcgcttccagagccatgccgtgcttgctctgcaggaggcagcagaggcctacctggttggtctcttcgaagataccaatctgtgcgcgatccatgccaagcgcgtgaccatcatgcccaaggacattcagctggcaagaaggatccgtggcgagagggcgtaagtctgtcgacgggaggaagaactctgcgctcgttttgtgtgttcgcctctctcaccctgtaagttttgtgaaaagataatctagtaaactgtacttggcctgtttgactgtagccgcagtagcgtatgcatgcgcatactattggctgttgtcgtgtctggagtcttttatccatccattctactactacttaataatcgtgatatatcaccgggttgctgaacgtgtatccagacttaactgtgtgtttggctgtctgaagctctgaatcgttattgatgtcatcccattcgtccggttgtcggttttaacatgttgatgcttgcgagtt

SEQ ID NO: 1914 - DNA, 1286 bp, Zea mays
  Clone ID: TF_ZmC114_40
gggaccctcgaggccgggctgggacttttccggcctcccattcctcgcgcggcgaccacccgattcgaagcgtgcggagagaccgaagaagcgggagagatggctcgtaccaagcagactgctcgcaagtccacgggagggaaggctcccaggaagcagcttgccaccaaggctgcccgtaagtctgcccccaccactggtggagtgaagaagcctcaccgctaccgccctggaactgttgccctccgtgagatccgcaagtatcagaagagcactgagctgctgatcaggaagctgcccttccagaggctcgtcagggaaattgcacaggacttcaaaactgatttgcgtttccagagccatgcggtgcttgccctccaggaggctgctgaggcataccttgttggcctgtttgaggacaccaacctgtgcgccatccatgctaagcgtgtgaccatcatgccaaaggacattcagctggcaaggaggatccgcggcgagagggcctaatcgccacctcaaacatcgtgacaaaaacatgaagtcctggggttattgttaatctggtgccattgtaaggacatatgagtagggtttgttttgtggatcgcaagtttctcttctgctactgttgctgctgctacctttgctggtgttattgctagggtcgaatacttaagttaactatgcgctgacagtctggactagcagtgttatgtgcgctgctggaccttgcgcgcaatgctgtggccgatttgttcgttaatgtcaagaattgtgttacagtgcgtgtaaaaaaaaaaaaaaaaaaaaaaaagggcggccgccatgtactgggagaccaccatcgcgtcggcggtgtcggactaccgcgccgtggacggcggcgtggccgtcgcgcacgcgggcacgtccacggcgcacctcgcccggttcggcgtgggcgtccgcgccgcgcgcgtcgtcacgcggatggaggagtcgtggaccatcgacgacgtggcgttcaacgtgccggggctcggcccggacgccttcataccgccggaggaggtcaggaggagccggtcctacggcgccgccatcgcaggcggcaagtgagctctctataccaccgtgtcagtcagggctcaagcgtctgtgtaacatagtctgcaactgcatagagagagctttgctgtttggtagcttcgtcgtctttgtctgtcttccctttattttgtaacctgtgagtgagtgagtgagtcagtcagagtggcatcggtgatcgtgcatgtacatatatg

SEQ ID NO: 1915 - DNA, 917 bp, Zea mays
  Clone ID: TF_ZmC114_41
tcacaaccgatccagacggcccacccagcgcgaaccggatataccacacggatgccgctctataaataagaccccgcggccagcctactgtacttttccggcctcccattcctcgcgcggcgaccacccgattcgaagcgtgcggagagaccgaagaagcgggagagatggctcgtaccaagcagactgctcgcaagtccacgggagggaaggctcccaggaagcagcttgccaccaaggctgcccgtaagtctgcccccaccactggtggagtgaagaagcctcaccgctaccgccctggaactgttgccctccgtgagatccgcaagtatcagaagagcactgagctgctgatcaggaagctgcccttccagaggctcgtcagggaaattgcacaggacttcaaaactgatttgcgtttccagagccatgcggtgcttgccctccaggaggctgctgaggcataccttgttggcctgtttgaggacaccaacctgtgcgccatccatgctaagcgtgtgaccatcatgccaaaggacattcagctggcaaggaggatccgcggcgagagggcctaatcgccacctcaaacatcgtgacaaaaacatgaagtcctggggttattgttaatctggtgccattgtaaggacatatgagtagggtttgttttgtggatcgcaagtttctcttctgctactgttgctgctacctttgctggtgttattgctagggtcgaatacttaagttaactatgcgctgacagtctggactagcagtgttatgtgcgctgctggaccttgcgcgcaatgctgtggccgatttgttcgttaatgtcaagaattgtgttacagtgcgtgtaaaaaaaaaaaaaaaaaaaaaaaaaaactcgagactagttctctctctctctctcgtgc

SEQ ID NO: 1916 - DNA, 696 bp, Zea mays
  Clone ID: TF_ZmC263831_1
actattcgcccttccgcatccagtttggtcgccttccgattcgaacctccccgaaatccgcagcagtcgacaggaggccaaaggcgccgccatggcccgtacgaagcagaccgcccgcaagtccaccggcggcaaggcgccccgcaagcagctcgccaccaaggcggcgaggaagtctgcgccgacgaccggcggagtgaagaagccccaccgctacaggcccgggaccgtggcgctccgggagatccgcaagtaccagaagagcacggagctgctgatccgcaagctgcctttccagcgcctggtccgcgagatcgcgcaggacttcaagacggacctcaggttccagagccacgccgtgctggccctccaggaggcggccgaggcgtacctggtggggctgttcgaggacaccaacctgtgcgccatccacgccaagcgcgtcaccatcatgcccaaggacatccagctcgcccgccgcatccgtggcgagagggcctaagctgccccctccgccgacgccgttagtgagtcggaatgagttgattctggttgtagtttgttcctaattgctgtgctaggtctctctgcttttgtgtagaagaaatatggttgttggtacaagcaagacgaacttgttatgtgatgatgttacttttggtttgcgatgaagcaaacgtatgtcggagaccccta

SEQ ID NO: 1917 - DNA, 591 bp, Zea mays
  Clone ID: TF_ZmC518114_1
actattcgcctttccgaccctcttccgtcgccgtcgattcgaacctcccccaaatcagcagcagtcgaccggaggcgccgccatggcccgtaccaagcagaccgcccgcaagtccaccggcggcaaggcgccccgcaagcagctcgccaccaaggcggcgaggaagtcggcgccgaccaccggcggagtgaagaaaccccaccgctacaggccggggaccgtggcgctccgggagatccgcaagtaccagaagagcacggagctgctgatccgcaagctgcctttccagcgcctggtccgcgagatcgcgcaggacttcaagacggacctccgcttccagtcccacgccgtgctggccctccaggaggcggccgaggcgtacctcgtcgggctgttcgaggacaccaacctgtgcgccatccacgccaagcgcgtcaccatcatgcccaaggacatccagctcgcccgccgcatccgtggcgagagggcctaagctgtcctctccgtgaacgacggtagtggatcgggatgagttgattccggttgtagtttgttcctaattgctgttctaggtcttaagcttttgtgtag

SEQ ID NO: 1918 - DNA, 775 bp, Zea mays
  Clone ID: TF_ZmC518497_1
agccccactacccaccgccgctctccgagtctcctgaaagttgcaacctctccctctcggcgaatttggggtttctgaggcgcgcgaggtaaaccaaggttttgctcatggctcgtactaagcagaccgctcgtaagtccactggaggaaaggctccaaggaagcagctagccaccaaggctgcccgtaagtctgctcccactactggaggagtgaagaagcctcaccgttaccgccctggaactgttgctcttcgtgagatccgcaagtaccagaagagcacggagctgctcatcaggaagcttccattccagaggcttgttagggagattgcccaggacttcaagactgacctccgcttccagagccatgcggtgctggcccttcaggaggctgcagaggcctacctggtcggtctcttcgaggacaccaacctgtgcgccatccatgccaagcgggtgaccatcatgcccaaggacattcagctggctaggaggatccgtggcgagagggcttaagatgctgtgcttgccttgcctgtgggaatcgctctggcgggcatctgtgtctgcttttgctgctgaacgcttatcatgtgtcgtgaactactaatacttgtcgtgtgtagtaatgtcagtagcgtactctgtgccatactatgttcgtagagctggatcatttgttcgttggtcgtcctaaatcatccacctggtgggtgcttatctgaaccttgcattttatgtctgagaattagtgattgtgtgaaccattatta

SEQ ID NO: 1919 - DNA, 687 bp, Zea mays
  Clone ID: TF_ZmC519633_1
aaacccatccgtcgcgatccacttcaagttccccaaatccccaaccccgcagcgcgcgcaggccgaagcccggttcgcagtcgacgagaagcaggagagatcgatggcgcgtacgaagcagaccgcccggaagtctaccggcggcaaggcgcctcgcaagcagctggccaccaaggcggcgaggaagtcggcgccgaccaccggcggcgtgaagaagccccaccgctacaggcccggcacggtggcgctgcgtgagatccgcaagtaccagaagagcacggagctgctcatccgcaagctgccgttccagcgcctggtgcgggagatcgcgcaggacttcaagacggacctccggttccagagccacgccgtgctggcgctccaggaggctgccgaggcgtacctcgtcgggctcttcgaggacaccaacctctgcgccatccacgccaagcgcgtcaccatcatgcccaaggacatccagctcgcccgccgcatccgcggggagcgcgcctagatcaagcatctgccttggcaacttccatcgccggattgctgcaatgtagtgtagctgtccgttcgtcgcctctggtttcagatcgtgttagcaataggcaataggccactttctattttgttgtaaaaagtatttctggttggttacatagttacaatgactcatttccatat

SEQ ID NO: 1920 - DNA, 905 bp, Zea mays
  Clone ID: TF_ZmC653_105
accgctattcgtgtcctggcatccgcagagagcttgttccgtccaggcaaccaaaaagcaagttgccccgccgcgcagaggaagaagagagcagaggaggatggctcgtacgaagcagaccgcccgcaagtccacgggaggcaaggccccccgcaagcagctcgccaccaaggcggcgaggaagtcggcgccgacgaccggcggcgtgaagaagccccacaggtacaggcccggaaccgtggcgctgcgcgagatccgcaagtaccagaagagcacggagctgctgatccgcaagctgcccttccagcgcctggtgcgcgagatcgcgcaggacttcaagacagacctccgattccagagccacgccgtgctggcgctccaggaggccgccgaggcctacctcgtcggtctcttcgaggacaccaacctctgcgccatccacgctaagcgcgtcaccatcatgcccaaggacatccagctcgcccgccgcatccgtggcgagcgcgcgtagccatcatctccggggatctgatgaatgtctagttaccaaacaaataggctgtattagcgtcgttgttctgtattcgttattttggattcggttgcagtgaaaaacagctttactaatcttatttgtgatctctggtggttgctcgcttctaagcgatcatctgtggtgcaaaattcgggctggttattttgttatggccccgtgtttggtctggcggcctggtccatctcaagtgcccgacggaagttgtcgtgcagcatcatgtgggttttactgcgtcacagctcacgaccatccttctcttccgagatgctaatagttggccgtctatttcactgagataatattaatagttcgacgctgttgctggctgtctaaaaaaaaaaaaaaaaaa

SEQ ID NO: 1921 - DNA, 1604 bp, Zea mays
  Clone ID: TF_ZmC653_107
ccggccgggaaaaaaaaaaaaaaaaaaaaaaaaaaaaaaaaaaaaaaaaaaaaaaaaaaaaaaaaaaaaacctagccaccgcatcgtcgccctcaaattcgttccgtccaggcaaggaagaaatcgagcagccaaggagaggagaagatggctcgtacgaagcagaccgcccgcaagtccaccggaggcaaggccccgcgcaagcagctcgccaccaaggcggcgaggaagtcggcgccgacgaccggcggcgtgaagaagccccacaggtacaggcccgggacggtggcgctgcgcgagatccgcaagtaccagaagagcacggagctgctgatccggaagttgcccttccagcgcctggtccgtgagatcgctcaggacttcaagacggatctgcggttccagagccacgccgtcctggccctccaggaagccgccgaggcctacctcgtcggcctgttcgaggacaccaacctctgcgccatccacgcaaagcgcgtcaccatcatgcccaaagacatccagctcgcccgccgcatccgcggcgagcgcgcgtaggcgtatctcgcgcccggccccagtggcggcggagggatggaggagtgcaatttgtaactttatgctgtttgttcgcttttagacggcgcggcgaagaagtagtgtaaaaacggctttacaagtctattttgtgcggtagttcgtgtaggccgcttcgtcccgaagcgatcttggtaaaagactgatcattcgtgttgccaaacgacacaattcgtatttttttgtgtgccgtgtagaacacggtttgttgttattggaatggtttacccaaacgggcacacagatttcggtgaaccattccaataacaacaaaccgtgttctacacggcacacaaaaaaatacgaattgtgtcgtttggcaacacgaatgatcagtcttttaccaagatcgcttcgggacgaagcggcctacacgaactaccgcacaaaatagacttgtaaagccgtttttacactacttcttcgccgcgccgtctaaaagcgaacaaacagcataaagttacaaattgcactcctccatccctccgccgccactggggccgggcgcgagatacgcctacgcgcgctcgccgcggatgcggcgggcgagctggatgtctttgggcatgatggtgacgcgctttgcgtggatggcgcagaggttggtgtcctcgaacaggccgacgaggtaggcctcggcggcttcctggagggccaggacggcgtggctctggaaccgcagatccgtcttgaagtcctgagcgatctcacggaccaggcgctggaagggcaacttccggatcagcagctccgtgctcttctggtacttgcggatctcgcgcagcgccaccgtcccgggcctgtacctgtggggcttcttcacgccgccggtcgtcggcgccgacttcctcgccgccttggtggcgagctgcttgcgcggggccttgcctccggtggacttgcgggcggtctgcttcgtacgagccatcttctcctctccttggctgctcgatttcttccttgcctggacggaacgaatttgagggcaacgatgcggtctcggccgc

SEQ ID NO: 1922 - DNA, 818 bp, Zea mays
  Clone ID: TF_ZmC653_108
ccggccgggattcactatataaaaaaaaatcctagccaccgcatcgtcgccctcaaattcgttccgtccaggcaaggaagaaatcgagcagccaaggagaggagaagatggctcgtacgaagcagaccgcccgcaagtccaccggaggcaaggccccgcgcaagcagctcgccaccaaggcggcgaggaagtctgcgccgacgaccggcggcgtgaagaagccccacaggtacaggcccgggacggtggctctgcgcgagatccgcaagtaccagaagagcacggagctgctgatccggaagttgcccttccagcgcctggtccgtgagatcgctcaggacttcaagacggatctgcggttccagagccacgccgtcctggccctccaggaagccgccgaggcctacctcgtcggcctgttcgaggacaccaacctctgcgccatccacgccaagcgcgtcaccatcatgcccaaagacatccagctcgcccgccgcatccgcggcgagcgcgcgtaggcgtatctcgcgcccggccccagtggcggcggagggatggaggagggcaatttgtaaccttatgctgtttgttcgcttttagacggcgtggtgaagaactagtgtaaaaacggctttaaagtctattttgtgcggtagttcgtgtaggccgcttcgtcccgaagcgatcttggtaaaagactgatgattcgtgttgccaaacgacacaattcgtattttttttgtgtgccgtgtagaacacggtttgttgttattggaatggttcatcgaaaaaaaaaaaaaaaaaaaaaaaggccccta

SEQ ID NO: 1923 - DNA, 685 bp, Zea mays
  Clone ID: TF_ZmC653_28
ccgggattcgtgtcctggcatccgcagagagcttgttccgtccaggcaaccaaaaagcaagttgccccgccgcgcagaggaagaagagagcagaggaggatggctcgtacgaagcagaccgcccgcaagtccacgggaggcaaggccccccgcaagcagctcgccaccaaggcggcgaggaagtcggcgccgacgaccggcggcgtgaagaagccccacaggtacaggcccggaaccgtggcgctgcgcgagatccgcaagtaccagaagagcacggagctgctgatccgcaagctgcccttccagcgcctggtgcgcgagatcgcgcaggacttcaagacagacctccgattccagagccacgccgtgctggcgctccaggaggccgccgaggcctacctcgtcggtctcttcgaggacaccaacctctgcgccattcacgccaagcgcgtcaccatcatgcccaaggacatccagctcgcccgccgcatccgtggggagagggcctaggcgtcgtcgcggtggaggtggaagtagtagtcgcagtttctgtcatcactgtctggctagaagttgtagagatgtgccggtttatgtagtttgggttattggtcgaatcattatgtagttgggtcttcactgctgtaatttaactatgactatgcaatggcaatgaagttctcgg

SEQ ID NO: 1924 - DNA, 1104 bp, Zea mays
  Clone ID: TF_ZmC653_33
ccggccgggaccgctattcgtgtcctggcatccgcagagagcttgttccgtccaggcaaccaaaaagcaagttgccccgccgcgcagaggaagaagagagcagaggaggatggctcgtacgaagtagaccgcccgcaagtccacgggaggcaaggccccccgcaagcagctcgccaccaaggcggcgaggaagtcggcgccgacgaccggcggcgtgaagaagccccacaggtacaggcccggaaccgtggcgctgcgcgagatccgcaagtaccagaagagcacggagctgctgatccgcaagctgcccttccagcgcctggtgcgcgagatcgcgcaggacttcaagacagacctccggttccagagccacgccgtgctggcgctccaggaggccgccgaggcctacctcgtcggtctcttcgaggacaccaacctctgcgccattcacgctaagcgcgtcaccatcatgcccaaggacatccagctcgcccgccgcatccgtggcgagcgcgcgtagccatcatctccggggatctgatgaatgtctagttaccaaacaaataggctgtattagcgtcgttgttctgtattcgttattttggattcggttgcagtgaaaaaaaaaaaaaaaaaaaaaaaaaaaaaaaaaaaaaaaaaaaaaaaaaaaaaaaaaaaaaaaaaaaaaaaaaaaaaaaaaaaaaaaaaaaaaaaaattttttaaaaaaaaaaaaaaaaaaaaaaaaaaaaaaaaagggccccccctttaaaaaaccccaattttccccccccgcccttccaacttaaaattttttttttgggccccccaaattaaattcccctcccccttttttaacaccccgggacttgaaaaacccctgggttccccaaattaattccctttaaaaaaaacccccttttcccaatttgggtaaaaacaaaaaagcccccccccatccccctttccaaaaatttcccccccctaattgcaaaaggacccccccccttaaccgccccttaaccccccggggttttggggttcccccccaggtaaccctttacttttccaaccccctaagcccccctccttttgcttttttccct

SEQ ID NO: 1925 - DNA, 690 bp, Zea mays
  Clone ID: TF_ZmC653_40
attgggaccctcgaggccggccgggcgctattcgtgtcctggcatccgcagagagtttgttccgtccaggcaaccagaaagcaagttgccccgccgcgtagaggaagaagagagcagaggaggatggctcgtacgaagcagaccgcccggaagtccacgggagggaaggccccccgcaagcagctcgccaccaaggcggcgaggaagtcggcgccgacgaccggcggcgtgaagaagccccacaggtacaggcccggaaccgtggcgctgcgcgagatccgcaagtaccagaagagcacggagctcctgatccgcaagctgcccttccagcgcctggtgcgcgagatcgcgcaggacttcaagacagacctccggttccagagccacgccgtgctggcactccaggaagccgccgaggcctacctcgtcggcctcttcgaggacaccaacctctgcgccatccacgccaagcgtgtcaccatcatgcccaaggacatccagctcgcccgccgcatccgtggcgagcgcgcgtagccatcatctccgaggatctgatgaatgtctagttaccaaaaaaataggccgtattagcgtcgttgttctgtattcgttattttggattcggttgcagtgaaaaacagctttactaaaaaaaaaaaaaaaaaaaaaaaaaaaaaaaaaaaagcggcc

SEQ ID NO: 1926 - DNA, 724 bp, Zea mays
  Clone ID: TF_ZmC653_49
ccggccgggctagcacccgcatcgtcgccctcaaattcgttccgtccaggcaaggaagaaatcgagcagccaaggagaggagaagatggctcgtacgaagcagaccgcccgcaagtccaccggaggcaaggccccgcgcaagcagctcgccaccaaggcggcgaggaagtcggcgccgacgaccggcggcgtgaagaagccccacaggtacaggcccgggacggtggcgctgcgcgagatccgcaagtaccagaagagcacggagctgctgatccggaagttgcccttccagcgcctggtccgtgagatcgctcaggacttcaagacggatctgcggttccagagccacgccgtcctggccctccaggaagccgccgaggcctacctcgtcggcctgttcgaggacaccaacctctgcgccatccacgcaaagcgcgtcaccatcatgcccaaagacatccagctcgcccgccgcatccgcggcgagcgcgcgtaggcgtatctcgcgcccggccccagtggcggcggagggatggaggagtgcaatttgtaactttatgctgtttgttcgcttttagacggcgcggcgaagaagtagtgtaaaaacggctttacaagtctattttgtgcggtagttcgtgtaggccgcttcgtcccgaagcgatcttggtaaaagactgatcattcgtgttgctaaacgaaaaaaaaaaaaaaaaaagcggcc

SEQ ID NO: 1927 - DNA, 806 bp, Zea mays
  Clone ID: TF_ZmC653_66
aaaaattacaaaaaaaaaaaaaaaaaaaaaaaaaaaaaaaaaaaaaaccaaaaaaaaaaaaaaaaaaaaaaaaaaaaaaggaaatttcgtgtcctggtatccgcagagagtttgttccgtccaggcaaccagaaagcaagttgccccgccgcgcagaggaagaagagagcagaggaggatggctcgtacgaagcagaccgcccggaagtccacgggaggcaaggccccccgcaagcagctcgccaccaaggcggcgaggaagtcggcgccgacgaccggcggcgtgaagaagccccacaggtacaggcccggaacagtggcgctgcgcgagatccgcaagtaccagaagagcacggagctcctgatccgcaagctgcccttccagcgcctggtgcgcgagatcgcgcaggacttcaagacagacctccggttccagagccacgccgtgctggcgctccaggaggccgccgaggcctacctcgtcggcctcttcgaggacaccaacctctgcgccatccacgccaagcgtgtcaccatcatgcccaaggacatccagctcgcccgccgcatccgtggcgagcgcgcgtagccatcatctccgaggatctgatgaatgtctagttaccaaaaaataggccgtattagcgtcgttgttctgtattcgttattttggattcggttgcagtgaaaaacagctttactaatcttatttgtggcctctggtggttgcttcgcttctaagcgatcatctgtggtgcaaaattcgtgctggctattttgtcaaaaaaaaactaaaaaaattgaaa

SEQ ID NO: 1928 - DNA, 675 bp, Zea mays
  Clone ID: TF_ZmC653_77
cattgggaccctcgaggccggccggaaattcgtgtcctggtatccgcagagagtttgttccgtccaggcaaccagaaagcaagttgccccgccgcgcagaggaagaagagagcagaggaggatggctcgtacgaagcagaccgcccggaagtccacgggaggcaaggccccccgcaagcagctcgccaccaaggcggcgaggaagtcggcgccgacgaccggcggcgtgaagaagccccacaggtacaggcccggaacagtggcgctgcgcgagatccgcaagtaccagaagagcacggagctcctgatccgcaagctgcccttccagcgcctggtgcgcgagatcgcgcaggacttcaagacagacctccggttccagagccacgccgtgctggcgctccaggaggccgccgaggcctacctcgtcggcctcttcgaggacaccaacctctgcgccatccacgccaagcgtgtcaccatcatgcccaaggacatccagctcgcccgccgcatccgtggcgagcgcgcgtagccatcatctccgaggatctgatgaatgtctagttaccaaaaaataggccgtattagcgtcgttgttctgtattcgttattttggattcggttgcagtgaaaaacagctttactaaaaaaaaaaaaaaaaaaaaaaaagcggcc

SEQ ID NO: 1929 - DNA, 927 bp, Zea mays
  Clone ID: TF_ZmC653_82
gtcctggcatccgcagagagtttgttccgtccaggcaaccaaaaagcgttgccccgccgcgcagaggaagaagagagcagaggaggatggctcgtacgaagcagaccgcccgcaagtccacgggaggcaaggccccccgcaagcagctcgccaccaaggcggcgaggaagtcggcgccgacgaccggcggcgtgaagaagccccacaggtacaggcccggaaccgtggcgctgcgcgagatccgcaagtaccagaagagcacggagctgctgatccgcaagctgcccttccagcgcctggtgcgcgagatcgcgcaggacttcaagacagacctccggttccagagccacgccgtgctggcgctccaggaggccgccgaggcctacctcgtcggcctcttcgaggacaccaacctctgcgccatccacgccaagcgcgtcaccatcatgcccaaggacatccagctcgcccgccgcatccgtggcgagcgcgcgtagccatcatctccgaggatctgatgaatgtctagttaccaaacaaataggccgtattagcgtcgttgttctgtattcgttattttggattcggttgcagggaaaaacagctttactgatcttatttgtgatctctggtggtcgcttcgcttctaagcgatcatctgtggtgctaaattcgtgctggttattctgttatggtcccgtgtttggtctggcggcctggtacatctcaagtgcccgacggaagttggccgttctgcatcatgtcggtttactgcgtcacagctccagctcactaccatccttctcttccgagatgctaatagttggccctctatttcattgagataatgttaatagttcgacgctgttgctggctgtctaataaatttacgattatgatactctgcaagacagtctaccattgtat

SEQ ID NO: 1930 - DNA, 143 bp, Zea mays
  Clone ID: TF_LIB3153-005-Q1-K1-H1.6U0
cgtcttagaatcctgcgcgatcttgcggacgaggcgctgggaggggagcttgcggatgagcagctccgagctcttcaggtacttgcggatctcgcggagcgcaacggagccgaagcggaagcggtgctattttttaacgccga

SEQ ID NO: 1931 - DNA, 914 bp, Zea mays
  Clone ID: TF_ZmC2139_2
gcctgattaaaacccgtcctctgtccgtcctaccaccaccgctcacctcggtttggctttctcccctcttccgcacccgcttctcgctccggattccggattccctctgctctttccctaacgaaggtagccatggcggggagaggtaaggcgatcggctcaggcgccgccaagaaggccacgtccaggagctccaaggctggcctccagttccccgtgggaaggatcgccaggttcctcaaggccggcaagtatgccgagagagtcggcgccggcgcccctgtctacctcgctgccgtgctcgagtatcttgctgctgaggattctgattcaataattggggccctctccgtgttcgttcgtgcaggttcttgagctggccggcaatgcggcacgtgacaacaagaagacccgcatcgtaccgcgccacatccagctcgccgtccgcaacgacgaagagctctcccgcttgctgggcacggtgaccatcgctagcggtggtgtaatgcccaacatccataaccttttgctcccgaagaaggccggcggcggcagcgccaaggctgcggctggtgacgaggactaagtccttgactacgcctggtggcacctccaggatgctgccgtatcaacatgtgtctgtgtagtacgttaggtgttcgttgtagctgggtatgtgggttgctgtaacactgctaaactaagttactcttgtgcttgctaaggattaagttctgtatttgttgctataaaaggtgcatcctttgaatgactggttcatcaatcatagaaaatgttcatagtgtcccaatttgcatttcgtgtgtctggatcatttcgaaatgttgcgctgtgttgatttggaatttatttctgagattgaatgcgaaaaaaaaaaaaaaaaaaggccccta

SEQ ID NO: 1932 - DNA, 544 bp, Zea mays
  Clone ID: TF_LIB4975-040-A1-K1-H3
aactacggtaactcgtctgctcgcatttcctcccaatccatcccgcctccaaacccgaactccaagtcgccccgcatcgatggcgcccaaggccgagaagaagcccgcggcgaagaagccggcggaggaggagcccgctgccgagaaggcgccggccgggaagaagcccaaggcggagaagcgtgtcccagcaggcaagtccgccggcaaggagggcggcgagggaaagaggggccggaagaagggcaagaagagcgtggagacctacaagatctacatcttcaaggtgctgaagcaggtgcacccggacatcggcatctcctctaaggccatgtccatcatgaactccttcatcaacgacatcttcgagaagctcgccgccgaggccgccaagctcgcgcggtacaacaagaagcccaccatcacctccctcgtatgttcgcgtgtcttgctgtagttaggtgctgctgtgtcaggtctcctccggtagcaactgttatctgatggaacagtaacaatgcttattgaatccagctagttgctc

SEQ ID NO: 1933 - DNA, 614 bp, Zea mays
  Clone ID: TF_LIB4764-068-R1-K1-D11
cattgggtacctcgaggccggccgggggttctcctcctgtctccgtcctctcaccaccgctgcctccgcggttcggtttcccgccgagttcgcaagactttgcttcgctcttcgttgcggattccctctggtcatggccggaagaggagagaggcgatcggctcacgagacgccaagaacgacatgtccagcagctccatacgcgccgggctccagttccccgtgggaaggatcgccaggttcctcaaggccggcaagtacgtcgagagggtcggtgccggagcccccgtatacctcgctgccgtgctcgagtatcttgctgctgaggttctctagcttgccggaaacgcggctcgtgacaacaagaagagccgtatcgtcccgcgccacatccagctcgacgaccgcaacgacgaggatctctaccgattgctgtgcacggggaccatcgacagtggctgaagacatgcccgacatccataacctggtgctgtccaagaagactgcctgctaccagcgacaaggctgcagctggtgatgaggactacaccgaccacgactaggctttcatccggtgcagctacctcttgtggacactgccggatcagcttgtg

SEQ ID NO: 1934 - DNA, 2398 bp, Zea mays
  Clone ID: TF_ZmC119_1859
aaaaatacttgtagttccgtgattttttttcaactattatagttattgtcaatgtcacgatctgtttgaatagatttacaacaaatattaactctgaccaattggtccaaaattcctaatgttttattgtcaaacaaatggtctattgttaacgccatccctagttccctatctactcgagcaatattttgatagttcatgtcaaaaaaacctagaagaattttgaaatgtaatctattgtcaggtacatctgaactaggtcctctgagcttcctgatttcatgtttcatacttgcattgcacctgaatttagcaattatgcatcaggcactcatcctattgatgttagcgaatgtagaaaactgcaatgtgtctgtgtggagcattctccagtttgtgtatagcattgaagtatgcttgtaatgttgacaattttggcggaccttttcctaaagcagtagtgtgtatgggcttgctttggcctgccagagcctgactgccaataccaacataacgaagagtcatccatcagagatgaatcaaagagccaagactgatttctctgatagatcattctcttcaagcatggacatattgtcccctttcatggtgggcagcagaagccttcagttcttatgaaatagtaacaataatctagtacttcacaagggctggtattacagtatagcagtccgataagcaatggaaaagccagttcagaagtagggtatctggcaaattcacgaggagttcagccttaatttccttttcagcaaatgatagggaattccgatgtgtctcagaagtcattgcttctgtcatgagcctaaataccttcttgttcatgtttgttttcatgaatatcatcttgccagatggatatatccgactgataccaagatctgcagccatccgccttacatagagctttttcagtagtaactccatatcacggggctcctttccgtatcgtcgacggaggtcttctgtaaactgtatcaaggtccatagatctttctctgcagcttttgccgcttcattgagcaactcaacaggattttccagataacttatgtattcagaagagagacgtggagaaatgtttatatccagctgaacatctttgtatggtactgggactaggcaaaactggtcaacctttgacaagctatcaaaaagcatatcaaagaataaatcgatgccaacatttgcaacatctccagactgttgctcaccaaacaagcttccaaatcccctgatacccatatccttctctgcaacatggaaaccttggccaagctctgaatgctcctcaatagctccgagtcgttgcaactcttgagagcaaagacttatcagtgtagaaaaggtatgcgaagccttctgtacctgatcttcctactcttcctcgtaactgatacagctgggcaagtccatatagttcagcaaactggataatcattgtattggcatgtgcaatatctattccactttcaatgatatgtgtgcagacaagaatttcccacgcgtccgcccacgcgtccgcccacgcgtccgcccacgcgtccgcccacgcgtccggcattcctcccatctcccaagacctcctcagacccgagaagcgcagctgcggccatggacgccaccggcactggagctggagggaaggcgaagaagggagcggccggtcgcaaggccggcgggccgaggaagaagtcggtgacgaggtccgtgaaggccgggctccagttccccgtcggccgcatcgggcgctacctcaagaagggccgctacgcgcagcgcgtcggcagcggtgcccccgtctacctcgcggccgtcctggagtacctcgccgctgaggtcctggagctcgccggcaacgctgccaaggacaacaagaagacgcgcatcgtcccgcgccacgtgctgctggcgatccgcaacgacgaggagctcgggaagctgctgaccggcgtgaccatcgcccacggcggcgtgttgcccaacatcaacccggtcctgctgcccaagaagacggcggagaaggcgtccagcggcgggagcaaggaggccaagtcgcccaagaaggccgccaagtcccccaagaaggcatagggtttggaggcggatccgatgttgtcatgtgtaggttgtaagcgggcaatgtgattggctgtgtatctgcttcgctcaagttgctttatgtcattcctaatggaataggaaatgccgtgtttcttacgcctgcttttggttctgcattctactgaaaaagcgtacgataattaacacattcacctttgaagaatcacgattgaaaagtacattaaatatttgctaatggagattttgggagcgtttgctttaaggaatcaaaaaaaaaaaaaaaaaagtacct

SEQ ID NO: 1935 - DNA, 685 bp, Zea mays
  Clone ID: TF_LIB4979-060-R1-K1-E1
cattccaggaaatctttcggtctcaaccaacctaccggattcgtcgcagtctctcaccctcgtgagtcccgacctcctgtagccgccgcacagatgataccctctgctgctttaacaagccgacgtacacgaggcccgcgagaggaggagcccgcgacatagaacgtggacaaggatccgacgccaaaaaatcccaaggctcgagcatggcgcctcccggcgggaaagatcaacggaggtcgtcagagggcgaagaaggatgacaaagaaagtcaagaacgccgtgcatacctacctcatctgacatcgttcaaggtgtctgtaggtggtggcacccctgcatcggcctctcgtgcaaggccatgtccatcatgaactccttcatcaacgacatcttcgagaatctcgcggccgagtccgccaaagtgctgcgctacgatgagaaggccaccctcacctcccgcgagatgcatacctcggagcgcctcgccctccctggcgagctcggccagcacgccgctctcccagggctctaagggcggtacaaaactcacctcgtcttaacatccttggaatgctcctgtgtgctgccgcatcagcatgtgtctcatgttatgcgatactggtaccgatgaattgtgatatatctgctggtaattcaattatagaattgtgctcatctttc

SEQ ID NO: 1936 - DNA, 261 bp, Zea mays
  Clone ID: TF_700426183H1
ctttctcccctcttccgcacccgcttctcgctccggattccctctgctgttttcctaatgttggttgctatggtggggcgaggtatcgcgattctctttcgcctcgtctatcctgccacgtccatgcgctccaaggctggcctccagttccccgtgggaaggatcgccaggttcctcgcggccggcaagtctgccgagagagtcggcgccggcgcccctgtctacctcgctgccgtgctcgagtctcttgctgctgaggtt

SEQ ID NO: 1937 - DNA, 560 bp, Zea mays
  Clone ID: TF_LIB4668-008-R1-K1-F1
ggaatgttgtctggctcgaggaacaacagcgaacacatctcctcgcatttcttcccatccgatccccccttcgcaaccaaaaccccaactcgccccgcatcgatggcgcccaaggccgagaagaaacccgcggcgaagaagccggcggaggaggagcccgcggccgagaaggcgcccgccgggaagaagccgaaggcggagaagcgggtccccgctggcaagtccgctgccaaggaaggcggcgagggcaagaggggcaagaagaagggcaagaagagcgtggagacctacaagatctacatcttcaaggtgctgaagcaggtgcacccggacattggcatttccttcaaggccatgtccatcatgaacttctttattaacgatatcttcgagaagctcgctggtgagggcggccagcttgcgcgcttttacaagaagcctaccattaccttccgtgagattcaaaccttcgtgcgccttgttctttccggggagcttggcaagcacgccgtcttcgagggcaccaagggcgtcaccaaggttacctcggcctaagctgg

SEQ ID NO: 1938 - DNA, 664 bp, Zea mays
  Clone ID: TF_LIB4744-093-A1-K1-H11
aggccggccgggaccgattttctaatcgtgcgcagaatccctagcagtagccttccatcctcactcgctcgatggcccgcacgaagcagacggcgaggaagtccaccggcggcaaggcgccgaggaagcagctggcgactaaggcggcccgcaagtctgcccctgcgaccggcggagtgaagaagccccaccgcttccgccccggcaccgtcgcgctccgggagatccgcaagtaccagaagagcacggagctgctgatccgcaagctgccgttccagcgcctggtgcgggagatcgcgcaggacttcaagaccgacctacgcttccagagctctgctgtctccgtttttcatgaggcggctgacgcctaccttgtcgggctcttcgaggacaccaacctctgcgccatccacgccaagcgcgtcaccatcatgcccaaggacatccagcttgcccgccgcatccgcggggagagggcctaagcgtcatattttctgtcatcagtgcccgatcagaagatgtagagatatgctgggttctgtagtttgggttactgtcgaatcatcgagtgttggctgttcactgctgtaacttaaaaaattatcatgatgcatatgaaatggcaatgaactctgttatcaaaaaaaaaaaaaaaaaagcggcc

SEQ ID NO: 1939 - DNA, 313 bp, Zea mays
  unsure (1)..(313): unsure at all n locations
  Clone ID: TF_LIB3151-020-Q1-K1-G7
gntgtaaatcacgagcggcttcccttttttttttttttccggcctcccatggctcgcggggcgaccacccgattcgaagcgtgcggatagaccgaataagcgggagagatggctcgcaccaagcagactgctcgcaagtccacgggagggaaggctcccaggaagcagcttgccaccaaggctgcccgtaagtctgcccccaccactggtggaatgaagaaacctcaccgctaccgccctgtaactgatgccctccgttagatccgccagtatcacaagagcactgagctgcttatcaggaaactgcccttcc

SEQ ID NO: 1940 - DNA, 487 bp, Zea mays
  unsure (1)..(487): unsure at all n locations
  Clone ID: TF_LIB3151-020-Q1-K1-G7.R2
cggactaccattgctgggggggggaccacccgattcgaagcgttctttttgaccgaanaacgggagagatggttcgtaccaagcagactgttcgcaagtccattttttgaaggctcccaggaagaatttgtggggggggggggcgtaagtctgcccccaccactggtggagtgaagaagcctcaccgatacccccctggaactgttgccctccgtgagatccgcaagtttcagaagagcactgagctgctgatcaggaagctgccctttcagagctggtcggggaaattgtacaggacttcaaaactgatttgcgtttccagagccatgcggtgcttgccctccaggaggctgctgtggtataccttggtggcctgtttgaggacaccaacctgtgcgccatccatgctaagcgtgtgaccatcatgccaaaggacattcacctggccagggagatccgcggcgagagggcctaatcgtcaactcaa

SEQ ID NO: 1941 - DNA, 255 bp, Zea mays
  Clone ID: TF_LIB3245-607-P1-N1-A2
ccctcaagcgcaagctggctgctcatcgtagtacaatcctaagaagggatggcattccataatacggctatccatgctgtctccgaacacaaggcaacctcgaagagctccaagggcggactcctgttcctcgtcggcaggattgccagggtcctcaaggcgggcaagtacgcggagcgcgtctgcgccggcgcccccgtgtacctcgccgccgtcctctagtacctcgcggctgaagttctagaacttgccccc

SEQ ID NO: 1942 - DNA, 517 bp, Zea mays
  Clone ID: TF_jC-zmXLIB3526P100ab02a1
gcgattcgttacgtccaggcaaggaagaaatcgagcagccaaggagaggagaagatggctcgtacgaagcagaccgcccgcaagtccaccggaggcatggccccgcgcaagcagctcgccaccaaggcggcgaggaagtcggagcctacgaccgtcggcgtgaagaagccccacaggtacaggcccggcaccgtggcgctgcgcgagatccgcaagtaccataagagcacggagctgctcatccggaagttgaccttccagcgcctggtccgtgagatcgctcacgacttcaagacagatctgcggttccagagccacgccgtactggccctccaggaagccgccgaggcctacctcgtcagtctgttcgaggacaccaacctgtgcgccatccacgccaagcgcgtcaccatcatgcccaaagacattcagctcgcccgccgcatccgcggcgagcgcgcgtaggcgtatctcgcgcccggccccagtggcggcagatggatggaggagtgcaatt

SEQ ID NO: 1943 - DNA, 427 bp, Zea mays
  Clone ID: TF_LIB3632-023-Q1-K6-G1
ggaaaatttggcggtcttgtggcgcccatggctgtgtaagaacccggccgtgacggaaggtggcggaggacgagccctcggagaagctgttcccgcggggaagtccccgctggaagaacccaggctgtgaatcggctacctgctggctagtcctgcggcaaggacggcggcgacaagtaagggtactaagaagggcactactagcgtgagagacctacaagagtacctcttcaccgtcctgaagcacgtgcacccctacatcatgatgtactgcaacgccatgtgcatcatgaacttcttcatcaacgacatgttacagaagctggacgagatggccgtcatgcttgcccggtacaacatgaaggccaccatcacctcccgtgtcatccagtacctccgttcgacttgtcctccgcggtgagctcgc

SEQ ID NO: 1944 - DNA, 635 bp, Zea mays
  Clone ID: TF_LIB4742-110-Q1-K1-E8
tcatcttttcgtgtttataatctctaaaatttcccccactctccagtcgcagcagcacctgtagtagccatggacgccagcggagccggtatgaaggggaagaagggtgcggccgcccgcaaggtatgcggccccactaacaagtcatcgacacggcccgtcaaggctgggttgcaattccccgtcgggcgaatcggatgctacctcatgaatggccggaacgcgcagcgcgtgtccactggttcccccgtctacctctccgccgtcctggagtatctcgccgccgaggttctggagttagcagggaacgcgtggatggacaacaagaacacgcgcatcatcccgcgccatctgctcctggcgatccgcaacgaccatgacttcgctcaactgctggcctgcgtcaccatcgcgcacggcgtccccctcccctgcatgcactccgggctcctgccctagaaggaggatatataatgatgtcattcggcgattgcaaggagtcctagtcccccaagaaggtcgccaagcccccctagaatgcttataaagtatgggcttcgtttgggctgagtgctgaaccatgtgcatgtctatatctgtggatgagatgtggcctgctctaccatcgtccttgt

SEQ ID NO: 1945 - DNA, 724 bp, Zea mays
  unsure (1)..(724): unsure at all n locations
  Clone ID: TF_LIB4828-124-R1-N1-B9
ccggccgggacttttccggcctcccattcctcgcgcggcgaccacccnattcgaagcgtgcggagagaccgaagaagcgggagagatggctcgtaccaagcagactgctcgcaagtccacgggagggaaggctcccaggaagcagcttgccaccaaggctgcccgtaagtctgcccccaccactggtggagtgaagaagcctcaccgcttccgccctggaactgttgccctccgtgagatccgcangtatcaaaagagcactgagctgctgatcaggaagctgcccttccngaggctcgtcagggaaattgcacaggacttcanaactgatttgcgttaccagagccatgcggtgcttgccctccnggaggctgctgaggcataccttgttggcctgtttgaggacaccaacctgtgcgccatccatgctnagcgtgtgaccatcatgccnaaggacattcanctggcaaggaggatccgcggcgagagggcctaatcgccacctcaaacatcgtgacaaanacatgaagtcctggggttattgttaatctggtgccattgtaaggactatnaantagggtttggtttttgtggatcgcaagtntctcttctgctactgttgctgctacctttgctggtgttattgctagggtcgaatacttaagttaactatgcgctgaacgtctggactagcantgttatgtgcgctgctngacttgcgcgc

SEQ ID NO: 1946 - DNA, 694 bp, Zea mays
  Clone ID: TF_LIB4766-001-QB-K6-D11
gccggaaaaaaaaaaaaaaaaaaaaaaaaaaaaaaaaaaaaaaaaaaaaaaaaaaaaaaaaaaaaaaaaaaaaaaaaaaaaaaaaaaaggaaaaggcttcttttccgggttttcagccaaccggattcaggccacccccattccccttgaccccgaaaaacccgacccggtggggcccaaggccggaaaaaagcccggggaaaaaaaaccgggggccggggaaaaggggggaaaaaccaccggaggtaaaaagcccaagtccgaaaagggcctggcggccttaaaatccttcggcaaggggggcgggggaaaaaaggggaaaaaaaaggccaaaaaaaggggggggacctacaaaatttacatttttaagggcctgaagcaggggccccccgacattgggattttcttcaagggcatggccattatgaacttctttattaacgacatttttcaaaagcttgccgggggggcccccaaatttgggggggacaaaaaggagcccaccattaccttccgggggaaccaaaccttcgggggccttggtcttccagggggggttggcaaaaatgccggtttcgggggaaccaagggcggccccaagttccccaacaattggaccgcctggaggggccacggatttgttagggctcccctttttacaagggttttttggcggggcctttacccctccccg

SEQ ID NO: 1947 - DNA, 504 bp, Zea mays
  unsure (1)..(504): unsure at all n locations
  Clone ID: TF_LIB5026-022-B1-XP1-A5
gccggccgggctgcggagaacgatctcaatctccctagcaatctctagcagcagatcctcgtgcgaagcaaagcgctagcccccttcgtactgtcccgatggcccgcacgaagcagacggcgaggaagtccactggcggcaaggcgccaaggaagcagctggccaccaaggcggcgcgcaagtctgccccggcgaccggcggagtgaagaagccccaccgtttccgccccggcaccgtcgcgctccgggagatccgcaagtaccagaagagcacggagctgctgatccgcgctgcaggaggcgtccgaggcctacctcgtcgggctcttcgaggacaccaacctctgcgccattcacgccaagcgcgtcaccatcatgcccaaggacatccagctcgcccgccgtatccgtggggagagggcctaggcgtcgtcccggtggaggtggaagtagnagtcgccgtttctgtcatcactgcctgcttataaggtgtttacatctgcc

SEQ ID NO: 1948 - DNA, 553 bp, Zea mays
  Clone ID: TF_jC-zmshLIB3587P009f02a1
gcggtcgtccttttttttttttttagacaagcacatatttattcaattgttttggaagcagaggtgtttttaattgtaaccgagttcgatgtaacaaagcacagcgcaaccaatttgttccttccgattggtttggatcatacaagatgctgaaatccccggaaatgatgggtacacccgctcgccacggatgcggggggcaagctggatttccttgggcatgatggggacccgcttatcggggatggcccataggttggtgccccctaaaagaccgacgagggaggccttgggggcctcctggaacgccagcacggggtggttttgaaaccggagggctgttttgaagtcctgggggatctcgcgcaccaagcgctgaaagggcaatttggggatcaccagctcctggcttttttggaacttggggatctcgcgcagcgccacggttccgggcctgtacctggggggctttttcacgccgccggtcgtgggggccaacttcctcgcccccttggtggcaaactgcttgcggggggccttgcctcccgtggac

SEQ ID NO: 1949 - DNA, 1556 bp, Zea mays
  unsure (1)..(1556): unsure at all n locations
  Clone ID: TF_ZmC369_151
cattgggtacctcgaggccggccgggaagaaaagcctccattcccgagtctccagccaaccgcatccagtccaccccatccccctcgaccccgacaaccccgagtcccgacccgatggcgcccaaggccgagaagaagccagcggagaagaagccggcggccgaggagaaggcggagaagacgaccgcaggtaagaagcccaagtccgagaagcgcctgcccgcctcgaagtcctccggcaaggagggcggcgagaagaaggggaagaagaaggccaagaagagcgtggagacctacaaaatctacatcttcaaggtcctgaagcaggtgcaccccgacatcggcatctcctccaaggccatgtccatcatgaactccttcatcaacgacatcttcgagaagctcgccggcgaggccgctaagctcgcccggtacaacaagaagcccaccatcacctcccgcgagatccagacctccgtgcgcctcgtcctcccaggagagctcgccaaacacgccgtctccgagggaaccaaggccgtcaccaagttcaccagcaattgagcagcctccagcgtccacggatttgttaggtctccccttcttacaagggttcttcgtcgtgtcctctacccctcccctccccgcctatgtatgtgctgtgaaatcgttgatgttctcgtcgggtgaacaaaggccagtagctagcttgcctgcttcataaatcgtgccggattgtaatgggcctcttagatttggcgcccctgttttggaatatagttgtatccgtgccttccctgcttaaaaaaaaaaaaaaaaaaaagcggccgcttttttttttttttttttcagcacaatttggaatatattagaaatttccacactacattgttcctcgggcaacctagtagcactggcctaaagtacgaggaaacgaaacagagccgtcgcaccgtgcggcggcgatctaagaggaagtgaacttggtaacagccttggtgccctcggagacggcgtgcttggcgagctcgccgggaaggacgaggcgcaccgaagtctggatctcccgggaggttatggtgggcttcttgttgtagcgggcgagcttggcggcctcggcagccagcttctcgaagatgtcgttgatgaaggagttcatgatggacatggccttggacgagataccaatgtccgggtgcacctgcttgagcaccttgaagatgtagatcttgtacgtctcgacgctcttcttggccttcttcttccccttcttctcgccgccctccttgcccggcacgcgcttctccgccctgggcttcttctcggccttctcctccgtcggcttcttctccgcgggcttcttctcggccttgggcgccatcgggaattcgatcaaatggagcggcgaacgcgggatgggaagcggcggattgggaatttgttgattggaggtgacgagcgctggtggctttggctgtgtgcctaattttttttttttttttttttttttttttttttttttttttttttttttttttttnnggattttttccccggcc

SEQ ID NO: 1950 - DNA, 853 bp, Zea mays
  Clone ID: TF_ZmC369_38
gcgattgggttcctcgaggccggccaggatatagaaatcgaccgagcgaatcctcgcttcgcagtcgcagcctttcctgcatcacaccaccgcgaaaccccagcagccgcatcgatggcgcccaaggcggagaagaagcccgctgcgaagaagccagcggaggaggagcccgctgccgcgaaggccccggcggggaagaagcccaaggccgagaagcgcctcccggcggccaagtcgtccggcaaagaaggcggcgacaagaagggcaagaagaaggcgaagaagtcggtggagacctacaagatctacatcttcaaggtgctgaagcaggtccaccccgacatcggcatctcttccaaggccatgtccatcatgaactccttcatcaacgacatcttcgagaagctggccggcgaggccgccaagctcgcgcgctacaacaagaagcccaccatcacctcccgcgagatccagacctccgtgcgcctcgtgctccccggcgagctcgccaagcacgccgtctctgagggcaccaaggccgtcaccaagttcacctcctcctaggcttgcacgctcgccctttgtaggcttctcttgtgttgatgttcgccttgtgttgtagttagatgttgctggtttctctgtcggcgctgctctgcttctgtaggaactgcgtcatgtaacccagcaaggacttgtttatttgtgaatcatcaacactttgttgttgatcacttatgttccaaattctgagtttgacgctaaaaaaaaaaaaaaaaaaaaaaaaaaaaaaaaaaaaaaaaaaaaaaaaaaaaaaaaaaaaaaaaaaaaaaaaaggggcgggcggttttaa

SEQ ID NO: 1951 - DNA, 966 bp, Zea mays
  Clone ID: TF_ZmC369_134
ttgggtacctcgaggccggccgggacaaatgtaagtgagagccaacaaattctcattggtaattaaattattatgtatgtaccatgccattgtaattttgtatgcttactactactactaccactacaacacttgttgcttcatttttcttttaaacttgtactgagaaacagaaccatcaattttctctgccttctcattgtgcaataaaattcttaccttgaaaaaaaaaaaaaaaatagaaatcgaccgagcgaatccctcgcatcgcattcgcagcctttgctgcatcacaccaccgcgaaaccccagcagccgcatcgatggcgcctaaggcggagaagaagccggctgcgaagaagccagcggaggaggagcccgctgccgcgaaggccccggcggggaagaagcccaaggccgagaagcgcctcccggcggccaagtcgtccggcaaagaaggcggcgacaagaagggtaagaagaaggcgaagaagtcggtggagacctacaagatctacatcttcaaggtgctgaagcaggtccacccggacatcggcatctcttccaaggccatgtccatcatgaactccttcatcaacgacatcttcgagaagctcgccggcgaggctgccaagcttgcgcgctacaacaagaagcccaccatcacctctcgggagattcaaacctctgtccgccttgtccttcccggcgagctcgccaagcacgcggtctccgagggcaccaaggccgtcactaagttcacatcatcttagatttgaggtagtagctattgggtggcgttggtagctgtgtctcaatttgtctgctactaatagtggtaggagtatccatgtgtagttgggttgcggtaagaattgtgttaaactggcaatatgtttgaaattgctttttatggatgtggaatagttgtgttgcttgtccaaaaaaaaaaaaaaaaaagcggcc

SEQ ID NO: 1952 - DNA, 751 bp, Zea mays
  Clone ID: TF_ZmC369_150
cggggggaaaatacaaaaaaaaatagaaatcgaccgagcgaatccctcgcatcgcattcgcagcctttgctgcatcacaccaccgcgaaaccccagcagccgcatcgatggcgcccaaggcggagaagaagccggctgcgaagaagccagcggaggaggagcccgctgccgcgaaggccccggcggggaagaagcccaaggccgagaagcgcctcccggcggccaagtcgtccggcaaagaaggcggcgacaagaagggtaagaagaaggcgaagaagtcggtggagacctacaagatctacatcttcaaggtgctgaagcaggtccaccccgacatcggcatctcttccaaggccatgtccatcatgaactccttcatcaacgacatcttcgagaagctcgccggcgaggctgccaagcttgcgcgctacaacaagaagcccaccatcacctctcgggagattcaaacctctgtccgccttgtccttcccggcgagctcgccaagcacgcggtctccgagggcaccaaggccgtcactaagttcacatcatcttagatttgaggtagtagctattgggtggcgttggtagttgtgtctcaatttgtctgctactaatagtggtagcagtatccatgtgtagttgggttgtggtaagaattgtgttaaactggtaatacgtttgaaattgctttttatggatgtggaatagttgtgtgttgcttgtcaaaaaaaaaaaaaaaaaagcggcc

SEQ ID NO: 1953 - DNA, 922 bp, Zea mays
  Clone ID: TF_ZmC369_72
accgtcgccttccccgtttcgtcttccggtcctcgttttatcccctcgcccttgcactcctccgccgcacccctttcctccttccgccctccgccgcgcctggctttctcccttcccgagaggccacgctccatccccgcccgcgctgcctcccctggcgatcggcggcgaccgcggcccaacgaaagcgtcgtggtcggccgctgtcacgcttcttgcagacgctgggcggactgggaacaaaccccagcagccgcatcgatggcgcccaaggcggagaagaagccggctgcgaagaagccagcggaggaggagcccgctgccgcgaaggccccggcggggaagaagcccaaggccgagaagcgcctcccggcggccaagtcgtccggcaaagaaggcggcgacaagaagggtaagaagaaggcgaagaagtcggtggagacctacaagatctacatcttcaaggtgctgaagcaggtccaccccgacatcggcatctcttccaaggccatgtccatcatgaactccttcatcaacgacatcttcgagaagctcgccggcgaggctgccaagcttgcgcgctacaacaagaagcccaccatcacctctcgggagattcaaacctctgtccgccttgtccttcccggcgagctcgccaagcacgcggtctccgagggcaccaaggccgtcactaagttcacatcatcttagatttgaggtagtagctattgggtggcgttggtagttgtgtctcaatttgtctgctactaatagtggtaggagtatccatgtgtagttgggttgtggtaagaattgtgttaaactggtaatacgtttgaaattgctttttatggatgtggaatagttgtgtgttgcttgttctacgtttgatttctatctggatgcgattctcttatcttgg

SEQ ID NO: 1954 - DNA, 770 bp, Zea mays
  Clone ID: TF_ZmC369_74
actccatagggcgattgggttcctcgaggccggccacggccatagaaatcgaccgagcgaatcctcgcttcgcagtcgcagcctttcctgcatcacaccaccgcgaaaccccagcagccgcatcgatggcgcccaaggcggagaagaagcccgctgcgaagaagccagcggaggaggagcccgctgccgcgaaggccccggcggggaagaagcccaaggccgagaagcgcctcccggcggccaagtcgtccggcaaagaaggcggcgacaagaagggcaagaagaaggcgaagaagtcggtggagacctacaagatctacatcttcaaggtgctgaagcaggtccaccccgacatcggcatctcttccaaggccatgtccatcatgaactccttcatcaacgacatcttcgagaagctcgccggcgaggctgccaagcttgcgcgctacaacaagaagcccaccatcacctctcgggagattcaaacctctgttcgccttgtccttcccggcgagctcgccaagcacgctgtctctgagggcaccaaggccgtcactaagttcacatcatcttagatttgaggtagtagctattgggtggcgttggtagttgtgtctcaatttgtctgctactaatagtggtaggagtatccatgtgtagttgggttgcggtaagaattgtgttaaactggtaatatgtttgaaattgctttttgtggatgtggaaaaaaaaaaaaaaaaaaatgaagaaaaaaaaaaaagggggggccc

SEQ ID NO: 1955 - DNA, 454 bp, Zea mays
  Clone ID: TF_LIB3279-037-P1-K1-D4
ctcgagttctcctcaaccaaattcaaagtcacagcggttaaactctcggctatctctctcccgccgaaggtctgtaagggtctgggcaagggcagttccaagctccaccgcaaggtgctgcgtgacaacatctatggcatcaccaagccgtcgatccgcaggttggcgaggaggggcggcgtcaagcgcatctccgggctcatctactaggagacccgcggcgtgctcaatatcttcctcgagaacgtcatccgctacgccgtcacctacaccgagcactcccgcctcaagactgttaccgccatggacgttgtctactctttcaagcgccagggccgcaccctctactgtttctgcggttaagtcccccctctcccggtggcaatatacgtggtggctgtcgttattttttcttggtctatttaatctgtgtcgtctttatcggtgctttttt

SEQ ID NO: 1956 - DNA, 566 bp, Zea mays
  Clone ID: TF_LIB4729-103-Q1-K1-C10
cggccgggattaaatttaatcatctcatcttttctctcttacaatctctatgatttcccccactcgtcagtggcagcagcacctgtagcagccatggacgccatcggagccggtacaatggggaacaaaggggcgcccgggagcaaggcagacgtacccagaaagaagtcggagacgcggtccgacaaggtcggtctgcagttccacgccggccggatcgggtgctacctcaagaaggctcgatactggcagcgcgggggaactggcgcgcccgtctacctcgccgccgatatggagtacctcgccgccgaggtactgtagttgttagtcaacgcggtgagagattacaagaggacgcggatcatcccgcgacactggctcctgatgatacgcaaggatctagtgagctcgtcatactgctgtgcgaagactacatggggtactgtaggtgtcctctgcaagatactcttgcggcctcctgtccaagaaggcgttgaagaaggcgagcatcgtggtgagactggacaccctgctatgcaagaagggcgacaatgcccgctgaagga

SEQ ID NO: 1957 - DNA, 505 bp, Zea mays
  Clone ID: TF_LIB4975-015-R1-K1-D6
cgggactccgcaatctccaatctccccagcaatccctagcagaggccttccatcctcactcgctcgatggcccgcacgaagcagacggcgaggaagtccaccggcggcaaggcgccgaggaagcagttggcgactaaggcggcccgcaagtctgcccctgcgaccggcggagttaagaagccccaccgcttccgccccggtaccgtcgcgctccgggagatccgcaagtaccagaagagcacagagctgctgatccgcaagctgccgttccagcgcctggtgcgggagatcgcgcaggacttcaagaccgacctacgcttccagagctccgctgcttactctcttaagggtctctgtgtgggctatcgttaaccctacgatgttaactgctaacagccagcgaaccacaacagtccttgtacttgctccttgatgttatggaggccgctcaagaggttcacagccctggacagttggctcctttcgtgctcttatattcccccaa

SEQ ID NO: 1958 - DNA, 536 bp, Zea mays
  Clone ID: TF_LIB4730-002-R1-K1-F8
tcttccgggacagcgattcacaggctccctagcaatctctagcagcttatgctcgttcgaagccagcgctagccttcctactgtcccgatgggccgcacgaagcagacggtgaggaagtccactggcgggaaggcgccaaggaagcaagtggccacgaaggcggcgcgcaagtctgccccggcgaccggcggagtgaagaagccccaccgattacggcccggaacgtcgcgcttcgggagatacgcatggaccagaagaggacggagctgctgatccgcaagctgccgatccagcgcctggtgcgtgagatcgaccaggacattaagaccgaccttctctttcagagctacatcgtcgacgcgctgcatgaggcgtacgatggctacctcgtcgggctattggaggacaccaacctgtgtgccatttacgccgagcgcgtggccatcatgcccaaggacattcagctcgcccggcggatcccaggggagagggcctaggcgtcatcgctgaggacgaggaagtattagtcgcaggt

SEQ ID NO: 1959 - DNA, 696 bp, Zea mays
  unsure (1)..(696): unsure at all n locations
  Clone ID: TF_LIB4766-002-R1-M1-B10
ggccgcttttttttttttttttttggattcaataagcattgttactgttccatcagataacagttgctaccggaggagaccagacacagcagcacctaactacagcaagacacgcgaacatacgagggaagcctgcaagcggaggccacgcagcctaggacgaggtgaacttggtgacggccttggtgccctcggagacggcgtgcttggcgagctccccggggaggacgaggcgcacggaggtctggatctcacgggaggtgatggtgggcttcttgttgtaccgcgcgagcttggcggcctcggcggcgagcttctcgaagatgtcgttgatgaaggagttcatgatggacatggccttagaggagatgccgatgtccgggtgcacctgcttcagcaccttgaagatgtagatcttgtaggtctccacgctcttcttgcccttcttccggcccctctttccctcgccgccctccttgccggcggacttgcctgctgggacacgcttctccgccttgggcttcttcccggccggcgccttctcggcagcgggctcctcctccgccggcttcttcgccgcgggcttcttctcggccttgggcgccatcgatgcggngcgacttggagttcgggtttggaggcgggatgggattggaggaaatgcgagcagacgagttacccgtagttcccggccgg

SEQ ID NO: 1960 - DNA, 778 bp, Zea mays
  Clone ID: TF_ZmC369_140
ggcacgaggtctgctcgcatttcctcccaatccatcccgcctccaaacccgaactccaagtcgccccgcatcgatggcgcccaaggccgagaagaagcccgcggcgaagaagccggcggaggaggagcccgcggccgagaaggcgccggccgggaagaagcccaaggcggagaagcgtgtcccagcgggcaagtccgccggcaaggagggcggtgagggaaagaggggccggaagaagggcaagaagagcgtggagacttacaagatctacattttcaaggtgctgaagcaagtgcacccggacatcggcatttcctccaaggccatgtccatcatgaactccttcatcaacgacatcttcgagaagctcgctgccgaggccgccaagctcgcgcggtacaacaagaagcccaccatcacctcccgcgagatccagacttccgtgcgcctcgtcctccccggggagctcgccaagcacgccgtctccgagggcaccaaggccgtcaccaagttcacctcgtcctaggctgcgcagcctccggttgcaggcttctctcgtatgttcgcgcgtcttgctgtagttaggtgctgctgtgtctggtctccttctgtagcaactgttatctgatggaacagtaacaatgcttatttaatccagctagttgcttatttgtggatcctctctctttgttgttggccacctttatctcgtgatgtttgtgtgcatgtgaatactctgaatgtgcatttcgaagtttgagaaaaaaaaaaaaaaaaa

SEQ ID NO: 1961 - DNA, 849 bp, Zea mays
  Clone ID: TF_ZmC369_154
aaaaaaaaaaaaaaaaaaaaaaaaaaataaaaaaaaaacggtaactcgtctgctcgcatttcctcccaatccatcccgcctccaaacccgaactccaagtcgccccgcatcgatggcgcccaaggccgagaagaagcccgcggcgaagaagccggcggaggaggagcccgctgccgagaaggcgccggccgggaagaagcccaaggcggagaagcgtgtcccagcaggcaagtccgccggcaaggagggcggcgagggaaagaggggccggaagaagggcaagaagagcgtggagacctacaagatctacatcttcaaggtgctgaagcaggtgcacccggacatcggcatctcctctaaggccatgtccatcatgaactccttcatcaacgacatcttcgagaagctcgccgccgaggccgccaagctcgcgcggtacaacaagaagcccaccatcacctcccgtgagatccagacctccgtgcgcctcgtcctccccggggagctcgccaagcacgccgtctccgagggcaccaaggccgtcaccaagttcacctcgtcctaggctgcgtggcctccgcttgcaggcttccctcgtatgttcgcgtgtcttgctgtagttaggtgctgctgtgtctggtctcctccggtagcaactgttatctgatggaacagtaacaatgcttattgaatccagctagttgcttatttgtggatcctctctctttgttgttggccacctttatctcgtgatgtttgtgtgcatgtgaatactctgaatgtgcatttcgaaaaaaaaaaaaaaaaaaaaaaaaaaaaagagcgaccgctcgcgatctagaactagtc

SEQ ID NO: 1962 - DNA, 741 bp, Zea mays
  Clone ID: TF_ZmC369_47
tctgctcgcatttcctcccaatccatcccgcctccaaacccgagcttccaagtcgccccgcatcgatggcgcccaaggccgagaagaagcccgcggcgaagaagccggcggaggaggagcccgcggccgagaaggctccggccgggaagaagcccaaggcggagaagcgtgtcccagcgggcaagtccgccggcaaggagggcggcgagggaaagaggggccggaagaagggcaagaaaagcgtggagacctacaagatctacattttcaaggtgctgaagcaggtgcacccggacatcggcatttcctccaaggcgatgtccatcatgaactccttcatcaacgacatcttcgagaagctcgccgccgaggccgccaagctcgcgcggtacaacaagaagcccaccatcacctcccgcgagatccagacctccgtgcgcctcgtcctccccggggagctcgccaagcacgccgtctccgagggcaccaaggccgtcaccaagttcacctcgtcctaggctgcgtggcctccgcttgcaggcttctctcgtatgttcgcgtgtcttgctgtagttaggtgctgctgtgtctggtctccttctgtagcaactgttatttgatcgaacagtaacgatgcttattgaatccagctagttgtttatttgtggatcatctctctttgttgttggccacctttatctcgtgatgtttgtgtgcacattcgaaatgccctattaattt

SEQ ID NO: 1963 - DNA, 151 bp, Zea mays
  unsure (1)..(151): unsure at all n locations
  Clone ID: TF_LIB3114-059-P1-K1-G4
agcaggacttcatgacagacctacgtttccagtcctttnccacggccgtgctgcacgaggccgncgagtcctacctcgtgggcctcttcgaggacaccaacctttgtgcgatccacgcagagcgcgttactatcatgctcaaagacatcca

SEQ ID NO: 1964 - DNA, 343 bp, Zea mays
  unsure (1)..(343): unsure at all n locations
  Clone ID: TF_LIB3357-025-P1-K1-G7
cgcatttcttcccatccgatccacagtatcgaaccaaaaccccaactcgctccgcatcgatggcgcccaatgccgagaagaaacccgcggcgaataagccggcggaggaggagcccgcggccgagaaggcgcccgccgggaagaagccgaaggcggagaagcgggtccccgctggcaagtccgctgccaaggaaggcggcgagggcaagaggggcaagaagaagggcaagaagagcgtggagacctacaagatctacatctttaaggtgctgaagcaagtgcacccggacattggcatctncttcaaggccatgttcatcatgaactccttcatttacgattt

SEQ ID NO: 1965 - DNA, 1252 bp, Zea mays
  Clone ID: TF_ZmC697_67
gccgggataatcatccacccaccacaccaaccaacaagcaaaaattccccaatcctctcgtctccgcggcgaagatgtcggggcgcggcaagggcggcaagggcctgggcaagggcggcgcgaagcgtcaccggaaggtgctgcgcgacaacatccaggggatcacgaagccggcgatacggaggctggcgcggcggggcggcgtgaagcgcatctcggggctcatctacgaggagacccgcggcgtgctcaagatcttcctggagaacgtcatccgcgacgccgtcacctacaccgagcacgcgcgccgtaagaccgtcaccgccatggacgtcgtctacgcgcttaagcgccagggccgcaccctctacggcttcggcggctaggcctgccgcgccgcgattcgccgtcgctgcggttctggtgttgctgcagttcgcaagttgtttgtgtgggcggaaaaatgctagatactgtagaactgcagtgcggtatgtgcacatggtgtgtttgtctgaagaaatgttgtcaatgctggcttgctctggactcaaacatgctccattttgtgtctaaaaaaaaaaaaaaaaaagcggccgcttttttttttttttttttcgagaactgataacatagttcattgccatttcatatgcatcatgataacaagttacagcagtgaacaaccaactactcgatgattcgacagtaacccaaactacagaacccagcacatctctacatcttctgatcgggcactgatgacagaatatatgatgcttaggccctctccccacggatgcggcgggcaagctggatgtccttgggcatgatggtgacgcgcttggcgtggatggcgcagaggttggtgtcctcgaagagcccgacaaggtaggcctcagccgcctcctgcagcgcggagacagcggagctctggaagcgtaggtcggtcttgaagtcctgcgcgatctcccgcaccaggcgctggaacggcagcttgcggatcagcagctccgtgctcttctggtacttgcggatctcccggagcgcgacggtgccggggcgggagcggtggggcttcttcactccgccggtcgcaggggcagacttgcgggccgccttagtcgccagctgcttcctcggcgccttgccgccggtggacttcctcgccgtctgcttcgtgcgggccatcgagcgagtgaggatggaaggcttctgctagggattgctggggagattgaagattacgggt

SEQ ID NO: 1966 - DNA, 519 bp, Zea mays
  Clone ID: TF_LIB4835-001-R1-M1-H10
ggccgcgggtttttttttttttttttggcgaattgtgtcgtttggcaacacgaatgatcagtcttttaccaagatcgctgggggacgaatcggctcgtacacgaactagccgaacaaaatatactggttaagccgtttttacactagcttgttcatcgtgccgcttaaaagcgaacaaacagcataaaggacagatggcacttctacatgcctccgccgacactggggccggacgcgagatacgcctacgctcgctcgccgcggatgcggcggacgagctgaatgtgtttgggcatgatggggacgcgctttgcggggatggcgcaaaggttggtgacctccctcaggccgacgaggtaggcctcggcggcttactggatggccaggactgagtggccctggaaccgcatatccgtcttgaagtcctgagcgatctcaccgaccaggcgctaggagggcaactttcgaatcagaagctgcgtgctcttatggtacttgcggatatggcgcagtgccacc

SEQ ID NO: 1967 - DNA, 333 bp, Zea mays
  unsure (1)..(333): unsure at all n locations
  Clone ID: TF_LIB3069-057-Q1-K1-H9
ttccaaatcaccgccggctcggctcttcatcttcgcgccaacaccgggtcttcgaggcccgcacgaagcaaacggctcncaaatcgactggcggcaaggcgccccgcaagcagctggccaccaatgcggcgcgcaagtcggcgccggcaaccggtggcgtgaagaagcctcaccgctttcgccccggcaccgtcgcgctccgggagattcgcaagtaccagaagagcacggagctgctcatccgcaagctgcccttccagcgcctcgtccgtgagatcgcgcaagatttcaagaccgacctccgctttcagtcctccgctgtcgccgcgcttc

SEQ ID NO: 1968 - DNA, 314 bp, Zea mays
  Clone ID: TF_LIB3279-001-P1-K1-D10
attcgttcccgcccgccgatggcgatatccatcagccatagacacgacaacatggctcgcgcgaatcacaccgtccgcacctccacccaatgcaacgcaccctacaagcaggtcgccaccaacgcgcagaggaagtctgcgccgactacctgcgacgataagaagccccacacgtacaggcccagcaccgtcgcgcttcgcgagatccgcaagtaccagaagagcacggagctgctcatcctgaagctgcccttccagcgcctggaccatgagatcgctcacgacttcaagacggatctgcaggtccagagtca

SEQ ID NO: 1969 - DNA, 431 bp, Zea mays
  Clone ID: TF_LIB3357-027-P1-K1-F9
atcgccagcctcaaattcgttccgtccaggcaaggaagaaatcgagcagccaaggagaggagaagatggctcgtacgaagcagaccgcccgcaagtccaccggaggcaaggccccgcgcaagcagctcgccaccaaggcggcgaggaagtctgcgccaacgaccggcggcgtgaagaagccccacaggtacaggcccggcaccgtggcgctgcgcgagatccgcaagtaccagaagagcacggagctgctcatccggaagttgcccttccatcgcctggcccgagagatcgctcaggacttcaagacggatctgcggttccagagccacgccgtactggcccttcaagaagccggcgaggcctacctggtcggtctgttcgaggacaccaacctgtgcgccatacacgccaagcgcgttaccatcatgccc

SEQ ID NO: 1970 - DNA, 303 bp, Zea mays
  Clone ID: TF_LIB3357-035-P1-K1-E10
tccaaggtcccttttttttctggatctggaagcgccgcagtagcagccatggacttgagcggagcaggccttaaggctaagaatgtttcgtacgaactcaaggccgtcggtccgactaagaagtcggtgtcgcggtcctccaggtccgttctgtagtttcttgtcagccttgttgggcggtacctcaaaaagggccgttacgcgcatcgtgtttgcacggttgcccctgtctacctcggcgtcgtactggagtacctctcggtcgaggtgctttagctcgccggcaacgcggtatgttacaac

SEQ ID NO: 1971 - DNA, 485 bp, Zea mays
  unsure (1)..(485): unsure at all n locations
  Clone ID: TF_LIB3279-177-Q1-K6-A8
ccaggcgagccccccggcgcaaccaaaaccccaacgcgccccgcnnacgaggcgcccaaggccgagaagaaacccgcggcgaagaagccggcggaggaggagcccgcggccgagaaggcgcccgccgggaagaagccgaaggcggagaagcgggggccggggggcaagnccgcngccaaggaaggcggcgagggcaagaggggcaagaagaagggcaagaagagcgnggagaccnacaagancnacancnncaaggggcngaagcaggggcacccggacangggcancnccnccaaggccagggccancangaacnccnncannaacganancnncgagaagcncgcngcngaggccgccaagcncgcgcgcnanaacaagaagccnaccancaccncccgggagaaccagaccnccgggcgccncgnccnncccggggagcncgccaagcacgccgncnccgagggcaccaaggccggcaccaa

SEQ ID NO: 1972 - DNA, 320 bp, Zea mays
  Clone ID: TF_700206634H1
atctcctcgcattttccttgcaaccgattgcctatcgccctcccagcccaagatcgatggcgcgcaaggtcgagaagaagcccgcggcgaagaatccggcggaggaggagcccgctgcggagaagacgaccgccgggaagaagctcaatgcggagaagctggtccccgcgggcaagtccgccggcatagagggcggcgagggcaagcgtggctagatgaagggcaagaagatcgttgagacgtacaagatctacatcttcaaggtgctgaagcaggtgcacccggtcatcggcatctcgtccaaggccatgtccatcatg

SEQ ID NO: 1973 - DNA, 569 bp, Zea mays
  Clone ID: TF_LIB3969-002-Q1-M6-D12
tccaccgcggtggcggccgccctttttttttttttgcaggtaaaaagtcattcgtttattttagacgagcaatccctttccattttccattcatggaggacaacacgcccgatatagacaaataggcacgcgcatcaaaagcacccaccactcatatacttcacacattacaactacgaacctcatgaccgcgacagctcaggctctctctcccctgatgcggtggacgatctggatgtccttgggcatgatgctgaccctcttggcgtggatggcgcagaggttggtgttcttgaagagccccaccatgtacgccttcgcggactcctgcatcgtcgtcacgggcgaggactggaaccgcaggcccgtcttgaattcctgcggtatctcgaggacgaagctctggaaggggagcttgcggatgagcatctacgtgctcttctggtacttgcggatctcgcgtgacgcgactgtgccatggcggaagcggagcgacttcttcacgccgtccgtggccctggcctacttgcgcgccctcttggtggtcagctgcttcctcggccccttgc

SEQ ID NO: 1974 - DNA, 581 bp, Zea mays
  unsure (1)..(581): unsure at all n locations
  Clone ID: TF_LIB4863-005-R1-K1-D7
atcaactcgcaattccgcattcgttccaactcctgagcactttctcctcgtccccgacaagccaatcgaagccgagatacggccatggactccaccggcaccggagcagggggtaaggggaagaagggagcggccgggcgcaaggtcggcgggccaaggaagaagtcggtgtcgaggtccgtgaaggccgggctccagttccccgtcgaccgcatcgggcgctacttgaagaagggccgctacgcgcagcgtgtcggcaccggcgcccccgtctacctcgccgctgtcctcgaatacctcgccgctgaagttttggagctcgccggtaatgctgccagggacaacaagaagactcgcattattccgcgccacgtgcttctggcgatccggaacgacgaggagcttgggaagctgttgggcggcgtgactatcgctcacgggcggtgttgctccccaatatcaacccttgttctgcttgccaagaagaacggggagaaaaggcgtccagtgtgggngaggcaaggagggcaaagtcgcccaaaaaggccggccaagtccccccaagaagggcatagacttga

SEQ ID NO: 1975 - DNA, 876 bp, Zea mays
  unsure (1)..(876): unsure at all n locations
  Clone ID: TF_ZmC369_114
ggccggccgggccgggggaaaaaaaaaaaaatagcacacagccaaagccaccagcgctcgtcacctccaatcaacaaattcccaatccgccgcttcccatcccgcgttcgccgctccatttgatcgaattcccgatggcgcccaaggccgagaagaagcccgcggagaagaagccgacggaggagaaggccgagaagaagcccagggcggagaagcgcgtgccgggcaaggagggcggcgagaagaaggggaagaagaaggccaagaagagcgtcgagacgtacaagatctacatcttcaaggtgctcaagcaggtgcacccggacattggtatctcgtccaaggccatgtccatcatgaactccttcatcaacgacatcttcgagaagctggctgccgaggccgccaagctcgcccgctacaacaagaagcccaccataacctcccgggagatccagacttcggtgcgcctcgtccttcccggcgagctcgccaagcacgccgtctccgagggcaccaaggctgttaccaagttcacttcctcttagatcgccgccgcacggtgcgacggctctgtttcgtttcctcgtactttaggccagtgctactaggttgcccgaggaacaatgtagtgtggaaatttctaatatattccaaattgtgctgatataatttgcttcaaaccttgaggaggcgctgttttaatttggggttgctacagccgtacaattttggcgccaatatcttgcttcgtattcactggggttcaatcacctgaatcatgtaatttgttcagggggataaataacatttatcanaggattgtgagatagtacagataacaaatcagctggcatgctatgcaaaatctggtct

SEQ ID NO: 1976 - DNA, 691 bp, Zea mays
  Clone ID: TF_ZmC369_141
ggccgcttcgaggcccggccggtgcccgggatagcacacagccaaagccaccagcgctcgtcacctccaatcaacaaattcccaatccgccgcttcccatcccgcgttcgccgctccatttgatcgaattcccgatggcgcccaaggccgagaagaagcccgcggagaagaagccgacggaggagaaggccgagaagaagcccagggcggagaagcgcgtgccgggcaaggagggcggcgagaagaaggggaagaagaaggccaagaagagcgtcgagacgtacaagatctacatcttcaaggtgctcaagcaggtgcacccggacattggtatctcgtccaaggccatgtccatcatgaactccttcatcaacgacatcttcgagaagctggctgccgaggccgccaagctcgcccgctacaacaagaagcccaccataacctcccgggagatccagacttcggtgcgcctcgtccttcctggcgagctcgccaagcacgccgtctccgagggcaccaaggccgttaccaagtttacttcctcttagatcgccgccgcacggagcgacggctctgtttcgtttcctcgtacttttaggccagtgctaataggttgctcgaggaacaatgtagtgtggaaatttctaatatattccaaattgtgctgaaaaaaaaaaaaaaaaaagcggcc

SEQ ID NO: 1977 - DNA, 940 bp, Zea mays
  Clone ID: TF_ZmC369_146
gggtaccctcgggctcggccggaaaaaaatagcacacagccaaagccaccagcgctcgtcacctccaatcaacaaattcccaatccgccgcttcccatcccgcgttcgccgctccatttgatcgaattcccgatggcgcccaaggccgagaagaagcccgcggagaagaagccgacggaggagaaggccgagaagaagcccagggcggagaagcgcgtgccgggcaaggagggcggcgagaagaaggggaagaagaaggccaagaagagcgtcgagacgtacaagatctacatcttcaaggtgctcaagcaggtgcacccggacattggtatctcgtccaaggccatgtccatcatgaactccttcatcaacgacatcttcgagaagctggctgccgaggccgccaagctcgcccgctacaacaagaagcccaccataacctcccgggagatccagacttcggtgcgcctcgtccttcctggcgagctcgccaagcacgccgtctccgagggcaccaaggccgttaccaagtttacttcctcttagatcgccgccgcacggagcgacggctctgtttcgtttcctcgtacttttaggccagtgctaataggttgctcgaggaacaatgtagtgtggaaatttctaatatattccaaattgtgctgatataatttgcttcaaaccttgaggaggcgctgttttaatttggggttgctacagccgtacaatttttggcgccaatatcttgcttcgtattcactggggttcaatcacctgaatcatgtaatttgttcagggggataaataacatttatcaaaggattgtgagatagtacagataacaaatcagctggcagtgctatgcaaaatctggtctgtggcaatgtttgccttgtggccagtttttcataattcatgtaatgtgcgttcatggacttct

SEQ ID NO: 1978 - DNA, 309 bp, Zea mays
  Clone ID: TF_LIB5025-016-B1-XP1-F1
gctcaggcggcggtttcaatcatactttcgactctcactctcccgtccctttttttttctcgatctggaagcgccgcagtagcagccatggacgtgagcggagcaggcggtaaggcgaagaagggcgcggcggggcgcaaggccggcgggccgacgaagaagtcggtgtcgcggtcctccagggccgggctgcagttccccgtcagccgcgtcgggcggtacctcaaaaagggccggtacgcgcatcgtgtatgcacgggtgcccccgtctacctcgccgccgtcctgtagtacctcgacgttctattt

SEQ ID NO: 1979 - DNA, 547 bp, Zea mays
  unsure (1)..(547): unsure at all n locations
  Clone ID: TF_LIB4827-072-R1-N1-D12
ccggccgggacttttccggcctctcatttctcacgcggcgaccacccaacttcgaagcgcgcgctagagaccgaacaagcgggagagataggctcgtaccaatcacactgctcgcaagtccacggtagggaacgatcccaggaagcagcttgccaccaaggatgcccggaagtctgccccgcgcacctggaggagagaaaaaggctcaccgctaccgacctgcaactgttggcctccgtgagatccgcaagtatcacaatagcactgagctgctgatcaagaagctgcccttccagaggctcgtcaggtaaattgcacacgacttcaaaactgatttctgtttccagagccatgcggagcttgccctccaggaggctgctgaggcataccttgttggcctgtttgaggacaccaacctgtgcgacatccatgctaagcgtgtgaccatcatgccaaaggacattcagctggnaaggaggatccgcggcgagagggcctaatcgccacctcaaacatcgtgacaaaaacatgaagtccttggggttat

SEQ ID NO: 1980 - DNA, 783 bp, Zea mays
  Clone ID: TF_ZmC369_102
gaagcgtgtcccagcaggcaagtccgccggcaaggagggcggcgagggaaagaggggccggaagaagggcaagaagagcgtggagacctacaagatctacatcttcaaggtgctgaagcaggtgcacccggacatcggcatctcctctaaggccatgtccatcatgaactccttcatcaacgacatcttcgagaagctcgccgccgaggccgccaagctcgcgcggtacaacaagaagcccaccatcacctcccgtgagatccagacctccgtgcgcctcgtcctccccggggagctcgccaagcacgccgtctccgagggcaccaaggccgtcaccaagttcacctcgtcctaggctgcgtggcctccgcttgcaggcttccctcgtatgttcgcgtgtcttgctgtagttaggtgctgctgtgtctggtctcctccggtagcaactgttatctgatggaacagtaacaatgcttattgaatccagctagttgcttatttgtggatcctctctctttgttgttggccacctttatctcgtgatgtttgtgtgcatgtgaatactctgaatgtgcatttcgaagtttgagaagttacgacgcgttaaaaaaaaagcgtgcaccacagcccgtcccgagcgctgcacgacctcacggggatcaagaagcactactgccagaagcacagccagaagaaggtcaagtgctacaggtgcaacatgcgctacgacgtttagtacgacttgaatgcgcacgtcaagacctgcagcgaccgcaagtatct

SEQ ID NO: 1981 - DNA, 598 bp, Zea mays
  Clone ID: TF_ZmC653_46
aaatgctctttgaatttaaatcttgctcgacaaaagttatgaatcaaagcactgaatcacattcataacagccaaactgatttgcctagaacatcagtacacgattgcaggacaagaagcgatagattccatcccctagttcagacactacagaaacaggaagacagagcagcaatcaggccctctcgcccctgatgcggcgcgcgagctggatgtccttaggcatgatggtgaccctcttggcatggatggcgcagaggttggtgtcctcgaagagacccaccaggtacgcctcacgcagctctctccgatggcgcgcacgaagcagacggcgaggaagtcgaccggcggcaaggcgccgcggaagcagctggccaccaaggcggcgcgaaagtcggccccggccaccggcggcgtgaagaagccgcacaggtttcgccccggcaccgtcgcgctccgcgagatccgcaagtaccagaagagcacggagctgctcatccggaagctgcccttcccagcggctggtgcgggagatcgcgcaggacttcaagaccgacctccggttccagtcctcctgcagcgcggcgacggcggagga

SEQ ID NO: 1982 - DNA, 378 bp, Zea mays
  Clone ID: TF_LIB4979-019-A1-K1-E4
tcttcatctcccagcctccctagagaagcttcctcctcactcgctcgatggcccccgccaggcggacggcgaggaagtccaccggcgccaaggctgccgagaagcagttggcgactaagggggcccgcaagtctgcccctgcgacaggtgtagttaagaagctccaccgcttccgccccggtaccgtcgcgctccgggagatcggcaagtccctgaagagcacagagctgctgatccgcgaggtggcgttccagcggctggtgcgggagatcgcgcaggcacttcagagcgacctacgcttccagagctccgcggtctccaggctgggggaggcggctgagcgctaccttgtcgctcgctgcgaggacgccagcctct

SEQ ID NO: 1983 - DNA, 454 bp, Zea mays
  Clone ID: TF_LIB3279-174-P1-K6-E10
tccgggtcgctccagcgtccgcgcatttcacctcgcagccgtattcttgtctcgaatcctctctcgccgctccgatggcccgcacgaagcaaacagcaaggaagtcgaccggcggcaaggccccccggaagcagctggccactaaggctgcgcgcaagtcagccccggccaccggcggcgtgtttaagccccaccggtttcgccccggcaccgtcgcgctcctttgagatccgcaagtaccagaagagcactgagctgctcattcgcaagctccccttccagcgcctcgtcctcgagatcgcgcaggacttcaagactgatctgagggattagtcctccaccgacccggctcctgcaggaggccgacagggcgaacctggtgggggttttagaggacatcaacttttgctccattcaagccaagtgcgtcactttcatgcccaaggacatttca

SEQ ID NO: 1984 - DNA, 680 bp, Zea mays
  Clone ID: TF_LIB4742-082-R1-K1-H5
ctcgaggccggccgggacatagtttgaaagctacgagcactcgccgccactcaccagcaaattcccaagccgccccttcccccatctctttcgcgccccatttgatcgattcctgatggcgcccaaggccgagaagaagcccgcggagaagaagccggcggaggagaaggccgagaagaagccaagggcggagaagcgcgtgccgagcaaggagggcggcgagaagaagggaaagaagaaggcgaagaagagcgtcgagacgtacaagatctacatcttcaaggtgctcaagcaggtgcacccggacattggcatctcgtccaaggccatgtccatcatgaactccttcatcaacgacattttcgagaagctcgccgccgaggccgccaagctcgcccgctacaacaagaagcccaccatcacctcccgggagatccagacctcggtgcgcctcgtcctccccggcgagctcgctaagcacgccgtatccgaagggaccaaggcggttaccaagtttacatcctcttagggtgccgccgcacgttgctacgatcctgtttaattctcatatttaggcctgtgctaggttgcttctgcaacaatgtagaatttgttataattgctgaatgaatcagttacccctgttgaagtttctgaaaaaaaaaaaaaaaaaagcggcc

SEQ ID NO: 1985 - DNA, 837 bp, Zea mays
  Clone ID: TF_ZmC369_125
gttgctgtggactgtttgtttgcttattttcccatccggcgcttgtacttgatttaatttgtgtgttttatgtgtgatattggcgaaaagaaatattaggatgtttgggtgaagaagaaatagtcgaaagctacgagcactcgccgccactcaccagcaaattcccaagccgccccttcccccatctctttcgcgccccatttgatcgattcctgatggcgcccaaggccgagaagaagcccgcggagaagaagccggcggaggagaaggccgagaagaagccaagggcggagaagcgcgtgccgagcaaggagggcggcgagaagaagggaaagaagaaggcgaagaagagcgtcgagacgtacaagatctacatcttcaaggtgctcaagcaggtgcacccggacattggcatctcgtccaaggccatgtccatcatgaactccttcatcaacgacattttcgagaagctcgccgccgaggccgccaagctcgcccgctacaacaagaagcccaccatcacctcccgggagatccagacctcggtgcgcctcgtcctccccggcgagctcgccaagcacgccgtatccgaagggaccaaggcggttaccaagtttacatcctcttagggtgccgccgcacgttgctacgatcctgtttaattctcatatttaggcctgtgctaggttgcttctgcaacaatgtagaatttgttataattgctgaatgaatcagttacccctgttgaagtttctaatatattgtaatcttgctagtataatttgcttcaaacctggatggggtttccattcgtcgtttaaaattgccacaaccacc

SEQ ID NO: 1986 - DNA, 743 bp, Zea mays
  Clone ID: TF_ZmC369_126
ctcgaggccggccgggccggaaaaaaaactagtcgaaagctacgaacactcgccgccactcaccagcaaattcccaagccgccccttcccccatctctttcgcgccccatttgatcgattcctgatggcgcccaaggccgagaagaagcccgcggagaagaagccggcggaggagaaggccgagaagaagccaagggcggagaagcgcgtgccgagcaaggagggcggcgagaagaagggaaagaagaaggcgaagaagagcgtcgagacgtacaagatctacatcttcaaggtgctcaagcaggtgcacccggacattggcatctcgtccaaggccatgtccatcatgaactccttcatcaacgacatcttcgagaagctcgccgccgaggccgccaagcttgcccgctacaacaagaagcccaccatcacctcccgggagatccagacctcggttcgcctcgtactccccggcgagctcgccaagcacgccgtatccgaagggaccaaggcggttaccaagtttacatcctcttagggtgccgccgcacgttgctacgatcctgtttaattttctcatatttaggactgtgctaggttgttcgtgcaacaatgtagaatttgttataattgctgaatgaatcagttacccctgttgaagtttctaatatattgtaatcttgctagtataacttgcttcaaatcttgatggggtttccaaaaaaaaaaaaaaaaaagcggcc

SEQ ID NO: 1987 - DNA, 686 bp, Zea mays
  Clone ID: TF_ZmC369_67
cattgggtacctcgaggccgggccggatagtcgaaagctacgaacactcgccgccactcaccagcaaattcccaagccgccccttcccccatctctttcgcgccccatttgatcgattcctgatggcgcccaaggccgagaagaagcccgcggagaagaagccggcggaggagaaggccgagaagaagccaagggcggagaagcgcgtgccgagcaaggagggcggcgagaagaagggaaagaagaaggcgaagaagagcgtcgagacgtacaagatctacatcttcaaggtgctcaagcaggtgcacccggacattggcatctcgtccaaggccatgtccatcatgaactccttcatcaacgacatcttcgagaagctcgccgccgaggccgccaagcttgcccgctacaacaagaagcccaccatcacctcccgggagatccagacctcggttcgcctcgtactccccggcgagctcgccaagcacgccgtatccgaagggaccaaggcggttaccaagtttacatcctcttagggtgccgccgcacgttgctacgatcctgtttaattttctcatatttaggactgctaggttgttcgtgcaacaatgtagaatttgttataattgctgaatgaatcagttacccctgttgaagtttctaaaaaaaaaaaaaaaaaagcggcc

SEQ ID NO: 1988 - DNA, 1028 bp, Zea mays
  unsure (1)..(1028): unsure at all n locations
  Clone ID: TF_ZmC369_91
tgcaccatttgtcataaaagtacttttataaaagtataaatgtattaacagttcatttgtattttaacaaaaacattggtcaaagttatattttggagaccgtgtcgttgtcctaaacgacaactaataggnaaaccggagggagtagtagnaaagctacgagcactcgccgccactcaccagcaaattcccaagccgccccttcccccatctctttcgcgacccatttgatcgattcctgatggcgcccaaggccgagaagaagcccgcggagaagaagccggcggaggagaaggccgagaagaagccaagggcggagaagcgcgtgccgagtaaggagggcggcgagaagaagggaaagaagaaggcgaagaagagcgttgagacgtacaagatctacatcttcaaggtgctcaagcaggtgcacccggacattggcatctcgtccaaggccatgtccatcatgaactccttcatcaacgacatcttcgagaagctcgctgccgaggcagccaagctcgcccgctacaacaagaagcccaccatcacctcccgggagatccagacctcggtgcgcctcgtcctccccggcgaactcgccaagcacgccgtctccgaagggaccaaggcggttaccaagtttacatcctcctagggtgccgccgcacgttgctacgatcctatttaattctcacatttaggcctgtgctaggttgctcctgcaacaatgtagaatttgttataattgctgaatgaatcagttacccctgttgagttttctaatatattgtaatcttgctagtataatctgcttcaaatcttgatggggtttccattcgtcgtttaaaattgcgacaaccaccaatcttttacccgtcgaacctacttctgaattgtgattgcctggagataaaatgccttgtatcatgtattgccctcagggttttataaactgctgacgggtaaacactgcctgtcacataaatgctttgtgaggtacagttaaataatcggctgtcattgctata

SEQ ID NO: 1989 - DNA, 689 bp, Zea mays
  Clone ID: TF_ZmC369_92
acgagcactcgccgccactcaccagcaaattcccgagccgccccttccccatctctttcgcgacccatttgatcgattcctgatggcgcccaaggccgagaagaagcccgcggagaagaagccggcggaggagaaggccgagaagaagccaagggcggagaagcgcgtgccgagcaaggagggcggcgagaagaagggaaagaagaaggcgaagaagagcgtcgagacgtacaagatctacatcttcaaggtgctcaagcaggtgcacccggacattggcatctcgtccaaggccatgtccatcatgaactccttcatcaacgacatcttcgagaagctcgccgccgaggccgccaagctcgcccgctacaacaagaagcccaccatcacctcccgggagatccagacctcggtgcgcctcgtcctccccggcgagctcgccaagcacgccgtatccgaagggaccaaggcggttaccaagtttacatcctcttagggtgccgccgcacgttgctacgatcctgtttaattctcatatttaggcctgtgctaggttgcttctgcaacaatgtagaatttgttataattgctgaatgaatcagttacccctgttgaagtttctaatatattgtaatcttgctagtataatttgcttcaaacctggatggggtttccattcgtcgtttaaa

SEQ ID NO: 1990 - DNA, 422 bp, Zea mays
  Clone ID: TF_LIB3076-044-Q1-K1-G3
gattaagacccgttctagtgctgcagggggatctgttgcaacttaaggggggcaagggtctatgcaagggtggagccaatcgccaccggaaggtgctccgcgacaacatccatggcatcaccaagcctgcgatccttatgctggctctgatgggcggcgtgaagcgcatctcggtgctcatctacgaggagacccgctatgtgctcaagatcttcctcgagaacgtcatactcgacaccttcacctacaccgagcacgctcgccgcaagaccgacaccgccatggatgtcgactacacgctcaagctccagtgccgtaccctctacggcttttgatgctaggcgcctcttcttaactggggaatgcttatggtgatacgtatctgtcgctgtgggtcgtaatgtatcttcattccttgatat

SEQ ID NO: 1991 - DNA, 353 bp, Zea mays
  Clone ID: TF_LIB3279-224-Q6-N6-B8
tttttttttttttttttttttttttttttttttttttttttttttttttttttttttttttttttttttttttttgggggaaccggttcattcagcaattataacaaattctacattggtgcaaaagcaacccaacccaggcccaaatttgaaaattaaacaggatcgtagcaaccggcgggggccccctaagagggtgtaaacttgggaacccccttggccccttcggataccgcgtgcttggcgagccccccggggaggaccaggcccacccaggtctggatctccccggaggggaaggggggctttttgttgtaacgggcgaacttggcggccccggcggcgaacttctc

SEQ ID NO: 1992 - DNA, 803 bp, Zea mays
  unsure (1)..(803): unsure at all n locations
  Clone ID: TF_LIB4730-144-A1-K1-G1
attgggacctcgagccggcgggaagaatctctcaatctccctagcaatctctagcagcagatcctcgtgcgaagcaaagcgctagcccccttcgtactgtcccgatggcccgcacgaagcagacggcgaggaagtccactggcggcaaggcgccaaggaagcagctggccaccaaggcggcgcgcaagtctgccccggcgaccggcggagtgaagaagccccaccgtttccgccccggcaccgtcgcgctccgggagatccgcaagtaccagaagagcacggagctgctgatccgcaagctgccgttccagcggctggtgcgtgagatcgcccaagacttcaagaccgaccttcgcttccagagctccgccggcgccgcgctgcaggaggcggttgagggctacctcgggggtttcttcgaggacagctacctctgcgccattcgcgccgagccccgtnacgtcatgacctcggcattgcagctcgcccgccgtanccgtggggagagggcattaagcgttcatggcggtggaggtagaagtagtcggcggagtttctggcatccacctgttgaggttacaacggagaaagatgagccgtttgataaagctttccttgtcctcgcaaggatatggactggggatcctaaccttcactttgaagtatgctgttgctcttaagccgccggaagttaccatcgacatggctatgcagcagcagcatgaagctgagcttgctgcagatgctgctcagcctcttcctgattgacatgctgatctgcctgagtacaaaggatctgagtc

SEQ ID NO: 1993 - DNA, 764 bp, Zea mays
  Clone ID: TF_LIB4979-120-Q1-K1-A8
tttcagcactgtggcgagtcaatccatatcttcttgatcacaccactgtcttcgaacactcgatggcgatgtatgagcgagtcaaggtcgccaaggacatgaacaatgacgttgacaaacaccaccgcaaggttctccgaagacaacataccatggtgatcacttaaacctcactatccggcatgctgcgcgagcgatggcgcggccatgaacccgtatctccgggcttatctacgaggaaacccgtcacgtgctcaagatcttcctcgagaatgtaatccgcgacgcaatcacctacacccaacacgctcgacgcaataccgacaccgccatgcatgttgagtacgcccacaagcgccagcatcgcactctgctacgaagtcggaggtcttagcgcatcatcttccactcatgtgcagcctgtgcctgcggcgtttcctcacttccctctgtcttgcttggcttgatgtacagagatatccaattaaaatatctctgatgggcttcgttattgggtgtaatcatgtgtcccgtgagtgatgggaaatcaagatcatgatgtatctttctttgcagcaatgaaatgacttaatcgagatcaagatgtatctttctttgcatgaaagaaactttgctattgctcccactgataggctaatcactatgcaggtttcatgaggtggttcatgtattaattatgctgctatattagctattttgatggtgtgtcatatcatctaagaacaagttttatggactttgat

SEQ ID NO: 1994 - DNA, 496 bp, Zea mays
  Clone ID: TF_LIB3279-211-Q6-N6-C3
ggggaaaaaaggaggcccaaattatttattgccccggtcaaatcaactttaaaatgaaaaaaattccatacaggcaaaagggcccccggggcttaagggcccccccaaaaggggcctaggacgaggggaacttggggacggccttggggccccccaaaacggggggcttgggaagccccccgggtaaaaaaagggggacggaggtttggatcccccgggaggggaaggggggctttttgttgaaacggggaaacttggccccctccccggggaactttttaaaaaagtccttgaaaaaagagttcaaaaaggacaaggccctggaggaaaagcccatgtccgggggcccccggttaaacaccttaaaaaaggaaaatttggacctttccaccctttttttgggctttttccccccctttttggaaacacccccttccttggcgggggattttcccgccgggagccgcttttccccctttgggtttttcccaagggg

SEQ ID NO: 1995 - DNA, 445 bp, Zea mays
  Clone ID: TF_LIB4756-093-R1-K1-E3
ggccgggtattttctgccctcccattcctcgcgcggcgaccacccgattcgaagcgtgcggagggaccgaagaagcgggagagatggctcgtaccaagcagactgctcgcaagtccacgggagggaaggctcccaggaagcagcttgccaccaaggctgcccgtacgtctgcccccaccactggtggagcgaagaagcctcaccgctaccgccctggaactgttgcactccgtgagatccgcaagtaccagaacagcactgagctgctgatcaggaagatgcccttccagaggctcgatagggaaattgcacaggactacaacactgactcgcgtctccacgagccatgcggtgcttgctctccaggaggctgcctgaggaataccttgttgccactgcctgaggaaaccaacctggcgcgccatccatgctaagacgtgtgacc

SEQ ID NO: 1996 - DNA, 393 bp, Zea mays
  unsure (1)..(393): unsure at all n locations
  Clone ID: TF_LIB3150-095-P1-N1-D1
tgtctttgccgccgccactgcccnatccaggtgggcatactaatccctcctcgtctccgctccaaatggcccgcacgaagcatactgcgcgcaagtcgaccggcggcaaggcgccgcggaagcagctggccaccaaggcggcgcgcaagtcggccccggccactggcggcgtgaaaaagccgcaccgcttccgccccggcaccgtcgcgctccgcgagatccgcaagtaccagaagagcacggagctgctcatccgcaagctcccctcccagcgcctcgtccgcgagatcgcgcaagactttaagacagacctgcggttccagtcctctgccgtggcggcgcttcatgaggccgctgaagcgtacctggtggggctcttcgaggacaccaacc

SEQ ID NO: 1997 - DNA, 512 bp, Zea mays
  Clone ID: TF_LIB4829-034-R1-N1-E6
ccggccgggattcgtgtcctggcatccgcagagagcttgttccgtccaggctacaaattatgatgtgccccctcgcgcacaggaagaagatatagaggaggatcgtctccacgaaccgaccgcccgcgagtccacggaaggaaatggccccggtaagcaggtcgccacaaatgcggagagtaagtcggagccgacgaacgctcggtcgagaagaacgcccctcattcacagggccggaaacgtggcgctgcgggtgatccgtaagcactgtaatagcacgctcctgctgagccgcagggtgccctgcctgcgactgtggcgtgagatcgcgcacgacttcaagacagagctccgctgacagatgctcttcgccgctggagctccaacaagacggcgagggctacctcggcgttgtcttataggacataatactctgctgcattgactttaagtgcgatttcatcatgcccgatgacatccagctatgccgtcgaagccgtgtacttcgaaag

SEQ ID NO: 1998 - DNA, 423 bp, Zea mays
  unsure (1)..(423): unsure at all n locations
  Clone ID: TF_LIB3059-047-Q1-K1-H1
agcgcctncacgatctcgacgagaggatgcccaatcgcgaaaccgccgccctattgcaatggcgcccaaggccgagaagaagcccgccgtcgagaagcctgcggaggaggagccggcggcggagaaggccacggctgggaagaagcccaaggctgagaagcggctccccgccggcaagtacgcaggcaaggagggtggctagaagaaggggaagaagaaggcaaacaagtcggtggagacgtacaagatctacatcttgcaggtgctgaatcaagtgcacccagacattggcatctcgtccaaggccatgtccatcatgaactccttcatcaacgacatcttcgagaagctggcggcggaggcggccaatctggcacggtacaacaagaagcctaccattacgtccagcgagatccagacctg

SEQ ID NO: 1999 - DNA, 302 bp, Zea mays
  unsure (1)..(302): unsure at all n locations
  Clone ID: TF_LIB3279-014-P1-K1-D8.F2
ggccccccttggtggcgatttccattggtgccccccncggggttggcttggtttgggacattgctgntcngttcacctctccttcnccacgtcccgcccgctgggggggggctgccgtgtagagcctgcgccccgggccccggcctttccggccggccgccttggcgcgctccccggggttgcggggggcgagctggttgtccttgggcttgatggtgacccgcttggcgtgggtggcgccggggttggtgtcctctaaccggcccgcggggtgggccttggcggcctcctgctccgcggcg

SEQ ID NO: 2000 - DNA, 367 bp, Zea mays
  Clone ID: TF_LIB3245-158-P1-N1-A4
attcttattctttttagctttacgtggacccttttgagttttttagcgcattattagcaatcaggcttccatggacgcgagcgcattctgagccgccccgaaggcgaaaaagggcacgggcggacacaaggacggcgggcctacgaagaagtcggtgacctggtccctcaaggccaagatgcaatttcccatcggccgcatcggtctgtacctgaagaagggcctttacgcgcagcgcgtaagcacgggcgccctcgtctacctggtcggcgaccttgagtacctggcacgacgaagttgctggatctgtggcggcaacccctcccaagggccacatgagagacccgcatcatcccttgccacgtgc

SEQ ID NO: 2001 - DNA, 453 bp, Zea mays
  Clone ID: TF_jC-zmX700352241a1
acgaagctcttattcggctgagctgattctcgaacacgaaaataaacccgcaaaccctaccagccttttgcggacttttagagggacccgatggcacctttcgcggagaagaagccggcggcgaagaagcccgcagaggaggagcccgcggccccggcggagaaggcccccgctgggaagaagccgaaggcggagaagcggctcccggcgggaaaatccgccggcaaggaaggcggagttgacaagaaggggcggaagaaggccaagaagagcgtggagacgtacaagatctacatcttcaaggtgctgaagcaggtgcacccggacatcggcatctactccaaggccatgtccatcatgaactccttcatcaacgacatctttgagaagctcgccggcgaggcggccaagctccgcccgtacaacatgaagcccaccatcaccttccgggag

SEQ ID NO: 2002 - DNA, 362 bp, Zea mays
  Clone ID: TF_LIB3332-011-P1-K1-A11
cccacgcgtacgaagcagacggcgcgcaagtcttcgtgcggcaaggcccctaggaagcaggtgtcgaccaagggggggcgcgtgtcggcccctgcgaccggcggtgtgaagaagccgcaccgcttccgtccgggcaccgcggcgctgcgcgagatccgcaagtaccagaagagcacggagctgctcatacagaagctgtccttccagctcctggtccgcgagatcgcgcaagacttcaagaccgacctgcgctttcagtccttcgccgtcacctctcttaaagaggcatccttgggtgccttcttgcccataagaatgacctccagcttttgtctacttattaccaagcccaaaaaaatcta

SEQ ID NO: 2003 - DNA, 264 bp, Zea mays
  Clone ID: TF_700448372H1
gccgctgaggtcctggagcttgctgggaacgcagcgaaggataacaagaagacccggatcgttgccgcgtcacatacagctcgacgtgcgcaacgacgaggagctgaccaagctgcttggtggtgtcaacatcgcgagctgcggctttatgcccaacatacaccagcagctcgtccccaagaaggctggctcgtccaaggcttccaccgtcgatgacgatgaaaactgaagctgcacactggagaaggcattcgctaccgtctt

SEQ ID NO: 2004 - DNA, 518 bp, Zea mays
  unsure (1)..(518): unsure at all n locations
  Clone ID: TF_LIB3592-095-Q1-K6-C3
caccgatagggaaggctctcatgaagcagcttgacaccaaggtctgtccgtaagtgtgcccccaccactggtggagagaagaaacgctcaccgataccgccctggtaactgttgcactccgagtagatccgcacgtaccagaagagcactgaactgctgatcatgaagctgcccttccagaggctcattagggaaattgcacaggcacttcaagactgatctcgcgtttccagcagccatgcggtgcttgctctgcaggaggctgctgaagcataccttgctggcctgtttgaggacaccaacctgtgcgccatacatgctaagcgtgtgaccatcatgcccaatgacattcagctggcaaggaggatccgcggcgagagggcctaattaccacctcaaacanagcgacaaaaaaatgatacgctggggatattgataatctggtgccattgtaaggacatatgagtagggcttgttctgtggatcgcaagttattctattgctactgatgctgctac

SEQ ID NO: 2005 - DNA, 500 bp, Zea mays
  Clone ID: TF_LIB4979-107-B1-K1-C9
actcaacgatctcatcattctacactctactactcgaaatcactagctcgcgagcttgcttctacagccacttcatactgagccgaggatgcgcacaacagaagacctcgacgaagtcccttgtcctcctggcgccaaggaacgagctggccaccaaggcggcgcgcaagtctgccccggcgaccggcggagtgaagaagccccaccgtttccgccccggcaccgtcgcgctccgggagatccgcaagtaccagaagagcacggagctgctgatccgcaagctgccgttccagcgcctggtgcgtgagatcgcccaggacttcaagaccgacctccgcttccagagctccgccgtcgccgcgctgcaggaggcgtccgaggcctacctcgtcgggctcttcgaggacaccaacctctgcgccattcacgccaagcgcgtcaccatcatgcccaaggacatccagctcgcccgccgtatccgtgtggacagggcctaggcg

SEQ ID NO: 2006 - DNA, 821 bp, Zea mays
  Clone ID: TF_ZmC369_131
cattgggtacctcgaggccggccgggaagaaaagcctccattcccgagtctccagccaactgcatccagtccacccccatccccctcgaccccgacaaccccgacccgatggcgcccaaggccgagaagaagccagcggagaagaagccggcggccgaggagaaggcggagaagacgaccgcaggtaagaagcccaagtccgagaagcgcctgccggcctcgaagtcctccggtaaggagggcggcgagaagaaggggaagaagaaggccaagaagagcgtggagacctacaaaatctacatcttcaaggtcctgaagcaggtgcaccccgacatcggcatctcctccaaggccatgtccatcatgaactccttcatcaacgacatcttcgagaagctcgccggcgaggccgccaagctcgcgcggtacaacaagaagcccaccatcacctcccgcgagatccagacctccgtgcgcctcgtcctcccaggagagctcgccaaacacgccgtctccgagggaaccaaggccgtcaccaagttcaccagcaattgagcagcctgcagcgtccacggatttgttaggtctccccttcttacaagggttcttcgtcgtgtcctctacccctccccctccccgcctatgtatgtgctgtgaaatcgttgatgttctcgtcgggtgaacaaaggccagtagctagcttgcctgcttcataaatcgtgccggattgtaatgggcctcgtagatttgacgcccctattttggaatatagttgtatcggtgccttccctgcttgccaaaaaaaaaaaaaaaaagcggcc

SEQ ID NO: 2007 - DNA, 830 bp, Zea mays
  Clone ID: TF_ZmC369_136
tacctcgaggccgggccgggaagaaaagcctccattcccgagtctccagccaaccacatccagtccaccccatccccctcgaccccgacaaccccgagtcccgacccgatggcgcccaaggccgagaagaagccagcggagaagaagccggcggccgaggagaaggcggagaagacgaccgcaggcaagaagcccaagtccgagaagcgcctgcccgcctcgaagtcctccggcaaggagggcggcgagaagaaggggaagaagaaggccaagaagagcgtggagacctacaaaatctacatcttcaaggtcctaaagcaggtgcaccccgacatcggcatctcctccaaggccatgtccatcatgaactccttcatcaacgacatcttcgagaagctcgccggcgaggccgctaagctcgcccggtacaacaagaagcccaccatcacctcccgcgagatccagacctccgtgcgcctcgtcctcccaggagagctcgccaaacacgccgtctccgagggaaccaaggccgtcaccaagttcaccagcaattgagcagcctgcagcgtccacggatttgttaggtctccccttcttacaagggttcttcgtcgtgtcctctacccctccccctccccgcctatgtatgtgctgtgaaattgttgatgttctcgtcgggtgaacaaaggccagtagctagcttgcctgcttcataaatcgtgccggattgtaattgtaatgggcctcttagatttgacgcccctgttttggaatatagttgtatccgtgccttccctgcttgcgaaaaaaaaaaaaaaaaaaggccccta

SEQ ID NO: 2008 - DNA, 994 bp, Zea mays
  Clone ID: TF_ZmC369_139
cattgggtacctcgaggccggccgggaagaaaagcctccattcccgagtctccagccaaccgcatccagtccacccccatccccctcgaccccgacaaacccgacccgatggcgcccaaggccgagaagaagccagcggagaagaagccggcggccgaggagaaggcggagaagacgaccgcaggtaagaagcccaagtccgagaagcgcctgccggcctcgaagtcctccggcaaggagggcggcgagaagaaggggaagaagaaggccaagaagagcgtggagacctacaaaatctacatcttcaaggtcctgaagcaggtgcaccccgacatcggcatctcctccaaggccatgtccatcatgaactccttcatcaacgacatattcgagaagctcgccggcgaggccgccaagctcgcgcggtacaacaagaagcccaccatcacctcccgcgagatccagacctccgtgcgcctcgtcctcccaggagagctcgccaaacatgccgtctccgagggaaccaaggccgtcaccaagttcaccagcaattgagcagcctgcagcgtccacggatttgttaggtctccccttcttacaagggttcttcgtcgtgtcctctacccctccccgcctatgtatgtgctgtgaaatcgttgatgttctcgtcgggtgaacaaaggccagtagctagcttgcctgcttcataaatcgtgccggattgtaatgggcctcttagatttgacgcccctattttggaatatagttgtatcggtgccttccctgcttgctaattttcttctgccctggtaatttgggatctaagattttgaccgggcagtggagaaccgatgaagatacagggtcatgaggtcgaaagctcatgggtttgtttcagtctcaggttcttcggcatggatatatttatgagcggtaactatgtattgcagccatatggttcaccatgtgatgaaatgatgattccatttgcgcc

SEQ ID NO: 2009 - DNA, 818 bp, Zea mays
  Clone ID: TF_ZmC369_56
ctcgaggccggccggaagaaagtctccttcccgagtctccagccaacagcattcagtccaccccatccccctcgaccccgacaaccccgagtcccgacccgatggcgcccaaggccgagaagaagccagcggagaagaagccggcggccgaggagaaggcggagaagacgaccgcaggcaagaagcccaagtccgagaagcgcctgcccgcctcgaagtcctccggcaaggagggcggcgagaagaaggggaagaagaaggccaagaagagcgtggagacctacaaaatctacatcttcaaggtcctgaagcaggtgcaccccgacatcggcatctcctccaaggccatgtccatcatgaactccttcatcaacgacatcttcgagaagctcgccggcgaggccgccaagctcgcccggtacaacaagaagcccaccatcacctcccgcgagatccagacctccgtgcgcctcgtcctcccaggagagctcgccaagcacgccgtctccgagggaaccaaggccgtcaccaagttcaccagcaattgagcagcctgcagcgtccatggatttgttaggtctccccttcttacaagggttcttcgtcgtgtcctctacccctccccctccccgcctatgtatgtgctgtgaaatcgttgatgttctcgtcgggtgaacaaaggccagtagctagcttgcctgcttcataaatcgtgccggattgtaatgggcctcttagatttgacgcccctgttttggaatatagttgtatccgtgccttccctgcttgctcaaaaaaaaaaaaaaaaaaggccccta

SEQ ID NO: 2010 - DNA, 774 bp, Zea mays
  Clone ID: TF_ZmC369_82
gccggccggtccgggattcccgagtctacagccaaccgcatccagtccacccccatcaccctcgaccccgacaacctcgacccgatggcgcccaaggccgagaagaagccagcggagaagaagccggcggccgaggagaaggcggagaagacgaccgcaggtaagaagcccaagtccgagaagcgcctgcccgcctcgaagtcctccggcaaggagggcggcgagaagaaggggaagaagaaggccaagaagagcgtggagacctacaaaatctacatcttcaaggtcctgaagcaggtgcaccccgacatcggcatctcctccaaggccatgtccatcatgaactccttcatcaacgacatcttcgagaagctcgccggcgaggccgctaagctcgcccggtacaacaagaagcccaccatcacctcccgcgagatccagacctccgtgcgcctcgtcctcccaggagagctcgccaaacacgccgtctccgagggaaccaaggccgtcaccaagttcaccagcaattgagcagcctgcagcgtccacggatttgttaggtctccccttcttacaagggttcttcgtcgtgtcctctacccctccccctccccgcctatgtatgtgctgtgaaatcgttgatgttctcgtcgggtgaacaaaggccagtagctagcttgcctgcttcataaatcgtgccggattgtaatgggcctcgtagatttgacgcccctgttttggaatatagctgtatcggtgccttccctgcttgcg

SEQ ID NO: 2011 - DNA, 1035 bp, Zea mays
  Clone ID: TF_ZmC369_96
ccgggaagaaaagcctccattcccgagtctccagccaactgcatccagtccacccccatccccctcgaccccgacaaccccgacccgatggcgcccaaggccgagaagaagccagcggagaagaagccggcggccgaggagaaggcggagaagacgaccgcaggtaagaagcccaagtccgagaagcgcctgccggcctcgaagtcctccggtaaggagggcggcgagaagaaggggaagaagaaggccaagaagagcgtggagacctacaaaatctacatcttcaaggtcctgaagcaggtgcaccccgacatcggcatctcctccaaggccatgtccatcatgaactccttcatcaacgacatcttcgagaagctcgccggcgaggccgccaagctcgcgcggtacaacaagaagcccaccatcacctcccgcgagatccagacctccgtgcgcctcgtcctcccaggagagctcgccaaacacgccgtctccgagggaaccaaggccgtcaccaagttcaccagcaattgagcagcctgcagcgtccacggatttgttaggtctccccttcttacaagggttcttcgtcgtgtcctctacccctccccctccccctccccgcctatgtatgtgctgtgaaatcgttgatgttctcgtcgggtgaacaaaggccagtagctagcttgcctgcttcataaatcgtgccggattgtaatgggcctcgtagatttgacgcccctattttggaatatagttgtatcggtgccttccctgcttgctaattttcttctgccctggtaatttgggatctaagattttgaccgggcagcggagaaccgatgagatgcagggtcataaggttgaaacctcatgggtttgtttcagtctcaggttcttcggcatggatatatttatgagcggtaactatgtattgcagccatatggttcaccatgtgaagaaatgatgattcgatttgcgccaaaaaaaaaaaaaaaataaaaaaaaaaaaaaaaaaaaaaactcgagcccgg

SEQ ID NO: 2012 - DNA, 328 bp, Zea mays
  Clone ID: TF_LIB4740-076-R1-K1-E7
cggggaaccacatccagtccaccccttcctcctcgaccccgacaaccccgagtcccgacctgatggcgcccaatgtccctgaataagccagcggataaaaagtcggcggccgaggagaaggtgttgatgacgaccgtggtcatgaagcccaagtgcgagaagcgcctgcccgcctcgaagtccttcggcacggagggcggtgagaagaaggtgaagaagatggccaagaagatcgtggagacctacaaaatctacatcttcaaggccctaaagctggtgcaccccgacatcggtatctttttcaatgccatgtccatgatgaactgct

SEQ ID NO: 2013 - DNA, 437 bp, Zea mays
  unsure (1)..(437): unsure at all n locations
  Clone ID: TF_LIB4730-070-R1-K1-A3
cgaaccccaaaacgaccaagcgnaanncgccacagcangcgcaccacgcgagacctggcgaaggcacccaaggcaggacaagaagccgggggcgaagaagaccggagaggaggagcccgcgacagagaaggcggagaaggcccgggcggggaagaagcccaagcgcgagaagcgcgtcccggcgggcaaatccggcggcaaggagggaggcgggggcaagaaggggaaaaagaaggctaagaagtccgtggagacctacaagatctacatcttcaaggtgctgaagcaggtgcaccctgacattgtcatctaggtcaaggccatgtccatcatgaactgctttattagcgacatcttcgagaagctcgcgggcgattgcgccgagctggcgcgctataacaagaagcccaccgtcacctgccgcgatatccacacct

SEQ ID NO: 2014 - DNA, 456 bp, Zea mays
  Clone ID: TF_LIB4730-063-R1-K1-H5
cggggcctcgcatcaaaccaaccctttcccaaatccaccgccggctcggctcgcccatagtcgcgccaagcaccgaatctccgatggcccgcacgaagcagacggcgcgcaagtcgacgggcggcaaggcgccccgcaagcagctggccaccaaggcggcgcgcaagtcggggccggctaccggtggcgtgaagaagcctcaccgctatcgccccgacaccgtcgcgctccgggagattcgcaagtaccacaagagcacggagctgctcatccgcaagctgcccttccagcgcctcgtccgtaagatcgcgcaggatttcaagcccgacctccgcttccagtcctccggtgtcgccgcgctggaggaggccgtcgaggcctacctcgtgggcttcttcgaggacaccaacctctgcgacatccacgccaagcgcgttaccaagatccccaaggtca

SEQ ID NO: 2015 - DNA, 582 bp, Zea mays
  Clone ID: TF_LIB4762-133-Q1-K1-G9
cgcaccgcagcatggccacaagaagccaccggatgattgcgcgccgactaatgatgggcgactaacgaggctcgaagtctgcccctgcgaccggcggagtgaagaagccccaccgcttccgccccggcaccgtcgcgctccgggagatccgcaagtaccagaagagcacggagctgctgatccgcaagctgccgttccagcgcctggtgcgggagatcgcgcaggacttcaagaccgacctacgcttccagagctctgctgtctccgcgctgcaggaggcggctgaggcctaccttgtcgggctcttcgaggacaccaacctctgcgccatccacgccaagcgcgtcaccatcatgcccaaggacatccagcttgcccgccgcatccgcggggagagggcctaagcgtcatattttctgtcatcagtgcccgatcagaagatgtagagatatgctgggttctgtagtttgggttactgtcgaatcatcgagtgttggctgttcactgctgtaacttaattatcatgatgcatatgaaatggcaatgaactctgttatcaaaaaaaaaaaaaaaaaagcggcc

SEQ ID NO: 2016 - DNA, 673 bp, Zea mays
  Clone ID: TF_LIB4974-066-Q1-K1-C8
cctcgaggccggccgggccggacagcggacacatctcctcgcatttcttcccatccgatccccccttcgcaaccaaaaccccaactcgcccgccgggaagaagccgaaggcggagaagcgggtccccgctggcaagtccgctgccaaggaaggcggcgagggcaagaggggcaagaagaagggcaagaagagcgtggagacctacaagatctacatcttcaaggtgctgaagcaggtgcacccggacattggcatctcctccaaggccatgtccatcatgaactccttcattaacgatatcttcgagaagctcgctgctgaggccaagctcgcgcgctataacaagaagcctaccatcacctcccgtgagatccagacctccgtgcgcctcgtccttcccggggagctcgccaagcacgccgtctccgagggcaccaaggccgtcaccaagttcacctcggcctaggctgcgcggccgccgcttgcaggattctctcctgtgttcacgtctcttgctgtagttaggtgctgctgcctgctggcttctatgtatgttatctatctgtctgtagcaactgtgttatctgataggaccgtaatggtgcttattcaacccagctatatgtttctatgtgaatcagcaaaaaaaaaaaaaaaaaaggcccctagggcc

SEQ ID NO: 2017 - DNA, 282 bp, Zea mays
  Clone ID: TF_LIB3088-050-Q1-K1-C2
ccgaatcgttcggaagtccagaacattttgttgtcgttcgaaacaagccattcgaaattgaggtacaacggtgatctgcagaggtaccgaggcatgtcgttagggatcgaaggcaccggccgagcgcacggtcggcgggccatggaagaagtcgatgtcgaggtgcttgaaggccgatctacagttccgcgtcggacgcatctggcgctacttgaagaaaggccggtacgcgcagcgtgtcggcaccggcgccctcgtctaccttgacgatgtcctcgaata

SEQ ID NO: 2018 - DNA, 310 bp, Zea mays
  unsure (1)..(310): unsure at all n locations
  Clone ID: TF_LIB3957-024-Q1-K6-E7
ggccggccgagnaanaaggcggcggcggggtgcgagggttcttcgacgaggaggcccaggtcgacgaggatgaggaagaagaggacgaaggcgagggagaggacgattttattaatgatgctggggccgaccttcctgatgaggatgttgttaggggctcaagacgtcattctattcctatgagggatgaggaagaggatattgatgagatccagacctccgtgcgcctcgtccttcccggggagctcgccaagcacgccgtctccgagggcaccaaggccgtcaccaagttcacctcggcctaggctgc

SEQ ID NO: 2019 - DNA, 536 bp, Zea mays
  Clone ID: TF_LIB5116-016-A1-PF1-A4
cgcctcctgtcccctcgcgcgttccgcctcccagttgcggctccggtcgttcccctcctcctcggttgctgagatggccggtcgtgggaaggcaatcggcgccggcgcggccaagaaggcgacgtcaaggagctccaaggctgggctgcagttccccgtgggaaggatcgccaggttcctcaaggccggcaagtacgccgagcgcgtcggagccggcgcccccgtctacctcgccgccgtccttgagtacctcgccgctgaggtgcgtttctcgcagatctcatccttgcccctgttctcgcggtattctattccttgatccggttccgtcgcgggatccgacaaatcgggctattcttagatctgtttagaaccgtgccgtatgttaatagcaatgcgtcgaaatccaagtaattttttgtccaaattcgtcaagataaggtttcttgggtgcggaatcgatgtgctttcctatgtatccattgcattggttgctgcttgttctaatctggtcgtccttcccctttgatccaggt

SEQ ID NO: 2020 - DNA, 529 bp, Zea mays
  Clone ID: TF_16917799
tttttttttttttttttttttttttttttttttttttttttttttttttttaaaaacagccaaattgatttgccaaaaacatcggtccccgattgcaggacaaaaagcgataaagtccatcgcctatttcaaactttacaaaaacaggaaaacagagcagcaatcaggccctttcccccctgatgcggcgcgcgagctggatgtccttgggcatgagggggacccttttggcggggatggcccaaaggttggtgtcctaaaaaaaacccaccaaatacccctggggggcctcctgcagcgggggaacaggggaggactggaaccaaaggtcggtcttgaatttttgcgcgatctcacccaccacccgttggaagggcagtttccggatgaacagctccgggcttttttggtacttgcggatctcgcggaaagcaacggtgccggggcggaacctgtgcggttttttcaccccgccgggggccggagccgacttgcgcaatcgaaggatttgaaattggaaatcggatgc

SEQ ID NO: 2021 - DNA, 637 bp, Zea mays
  Clone ID: TF_LIB4974-021-Q1-K1-B4
gattccacaaatcctccgcaacttcaccgcgtatcatcatttttcatcggtcctactcctatcatccacaaaatcagagcgatattgatggcgaccatggcggagaagaacccggcgttgaagaaggaggcgtcggacgacccctccgatgaggcggctccgatccaagaacgcccccgcgatgcacaagccccaggaggagatccgcttacctgcggacaagttcgccgacaaggaggccgtcgacaacaacggcatgaagaaggagaacaacatcgcgcagaccgtacaagacctacatctgcaaggtcctgaagcaggagcaccacgacctcggcatctcctccaaggacatgcccatcatgaactccttcatcctccacgtcgtcgagatattcggcgcgcaggccgacaagctcggccggccacaacaagaaggccacgatcacctcccgagagatccagacctccgttcgtctcctactccccggagagctcgtactgcacgccgtctcggatggtacctgggtacgacaccaaggtcacctctgcttgaccgccttgcattatgcgtcgatgtagcctgcttctcgaggaagcactgtgatgtggcgcttctcatggaactagcggaggt

SEQ ID NO: 2022 - DNA, 386 bp, Zea mays
  Clone ID: TF_LIB4762-046-R1-K1-G4
tgttccacatcctgagcactttctgctcgttcccgacatgccattcgaagccgagatacggcgcatggactctcaccggacaccggagcagggggtaagggcgaagaatggcgagcggccgttgcgcatggtcggcgggccaaggaagaagtcggcgtcgaggtccgagatggccccgctccagttccccgacggccggatcgggcgctacttgaagaagggccgctacgcgcagcgtgtcggcaccggcgcccccgtctacctcgccgctgtcctcgaatacctcgccgctgaggttctggagctcgctggtaatgctgccagggacaacaagaagactcgcattattccgcgccacgtgcttctggcgatccggaacgacgagg

SEQ ID NO: 2023 - DNA, 598 bp, Zea mays
  Clone ID: TF_LIB4758-085-R1-K1-H3
cgagccggccgggatccaatttcctccactcatcttttcgcgtttagatacctctaaaatttcccccactcgccagtcgcagcagcacctgtagccatggacgccagcggagccggtagcaaggggaagaagggtgcggccgggtgcaaggcaggcggccccaggaagaagtcggtgacgcggtccgtcaaggccgggctgcagttccccgtctgccggatcgggcgctacctgaagaagggtcggtactcgcagcgcgtgggcactggcgtccccgtctaccttgccgccgtcctggagtacctcgccgccgaggttctggagttggtagggaacgcgccgaaagacttttttttactcgcaccctcccgcgccatgtgcttctggcgatccgcaacgacgaggagctcccgaagctgctggcaagcgtcaccatcgtcgcacgggggcgtcctcctcaacatacactccgtgctccttccccagaaggcttgcgaaaaggcggtcagtcccggcttcaatgatctccccttcccctagatagtcgcccagtccccccccaaggctttcaaagcacggcctttcttttcactgtgtg

SEQ ID NO: 2024 - DNA, 447 bp, Zea mays
  Clone ID: TF_LIB4730-018-R1-K1-A5
acggataccgcagctttagtcccatctctcaaaccatccgaccccacctcgccgctcactcccaagccagtccctgccggcagcgatggcccgcacgaagcagacggcgcgcaagtcgacgggcggcaaggcgccgcggaagcagctggcgacgaaggcggcgcgcaagtcggcgccggccacggggggcgtgaagaagccgcaccgcttccgcccgggcatcgtggcgctgcgggagatccgcaagtaccagaagagcacggagctgctgatccggaagctgccgttccagcggctggtgcgggagatcgcgcaggacttcaagacggacctccggttccagtcctccgccgtggccgcgctgcaggaggccgccgaggcctacctcttgggccttttcttggacaccatcctgtgggccattcacgctaagcgcgttaccattat

SEQ ID NO: 2025 - DNA, 687 bp, Zea mays
  Clone ID: TF_LIB4766-042-R1-K1-E3
ttgggtacctcgaggccggccgggaacctccactgcattctcgaattccgattcccaatccagcaaaccctaccagccttttgcaaactcagagagggacccgatggcacccaaggcggagaagaagccggcggcgaagaagcccgcagaggaggagcccgcggccccggcggagaaggctcccgctgggaagaagccgaaggcggagaagcggctcccggcgggaaaatccgccggcaaggaaggcggtgttgacaagaaggggcggaagaaggccaagaagagcgtggagacgtacaagatctacatcttcaaggtgctgaagcaggtgcacccggacatcggcatctcctccaaggccatgtccatcatgaactccttcatcaacgacatcttcgagaagctcgccggcgaggcggccaagctcgcccgttacaacaagaagcccaccatcacctcccgggagatccagacctccgtccgcctcgttctacccggcgagctcgccaagcacgccgtctcggagggcaccaaggccgtcaccaagttcacctcgtcctaagctcctttcgagtaggtccttaagcgccgtggcgccttttgactgtatggaatgtttgtcatctgaaagttgatctgagcagtgcaatatataattctggcaaaaaaaaaaaaaaaaaagcggcc

SEQ ID NO: 2026 - DNA, 1021 bp, Zea mays
  Clone ID: TF_ZmC369_107
ccggccgggacgcaacctcccactgcattctcgaattccgattcccaatccagcaaaccctaccagccttttgcaaactcagagagggacccgatggcacccaaggcggagaagaagccagcggcgaagaagcccgcagaggaggagcccgcggccccggcggagaaggcccccgctgggaagaagccgaaggcggagaagcggctcccggcgggaaaatccgccggcaaggaaggcggtgttgacaagaagggtcggaagaaggccaagaagagcgtggagacgtacaagatctacatcttcaaggtgctgaagcaggtgcacccggacatcggcatctcctccaaggccatgtccatcatgaactccttcatcaacgacatcttcgagaagctcgccggcgaggcggccaagctcgcccgctacaacaagaagcccaccatcacctcccgggagatccagacctccgtccgcctcgttctacccggcgagctcgccaagcacgccgtctcggagggcaccaaggccgtcaccaagttcacctcgtcctaagctccttttctagtaggtccttaagcgccgtggcgccttttgactgtatggaatgtttgtcatctgaaagttgatctgagcagtgcaatatataattctggcatactattctcgcaatcgttttggggttcagaatgggactgacatcagagtaatatgtggcataccttctgatcctctgtactcgagaggattttgttgtggataagccacttgctgcctttgtttggtgggtaattgcttcgagcataagaaacagcgtatgctgctataaacgtctttttgcaacgcgaaaaaaaaaataccatagaaaaaagaaaaacaaaaaagtgaaggcacagaagagagaatcaaaggttgcaagattttatcactaaggctatgaagaaccattgcttaagctgatgagaatgaaaactgatcatgctggactagttattaatgctgaagaaagaacgctttccttgac

SEQ ID NO: 2027 - DNA, 692 bp, Zea mays
  Clone ID: TF_ZmC369_109
tgggaccctcgggccggccgggacgcaacctcccactgcattctcgaattccgattcccaatccagcaaaccctaccagccttttgcaaactcagagagggacccgatggcacccaaggcggagaagaagccggcggcgaagaagcccgcagaggaggagcccgcggccccggcggagaaggcccccgctgggaagaagccgaaggcggagaagcggctcccggcgggaaaatccgccggcaaggaaggcggtgttgacaagaaggggcggaagaaggccaagaagagcgtggagacgtacaagatctacatcttcaaggtgctgaagcaggtgcacccggacatcggcatctcctccaaggccatgtccatcatgaactcattcatcaacgacatcttcgagaagctcgccggcgaggcggccaagctcgcccgctacaacaagaagcccaccatcacctcccgggagatccagacctccgtccgcctcgttctacccggcgagctcgccaagcacgccgtctcggagggcaccaaggccgtcaccaagttcacctcgtcctaagctcctttctagtaggtccttaagcgccgtggcgccttttgactgtatggaatgtttgtcatctgaaagttgatctgagcagtgcaatatataattctggcaaaaaaaaaaaaaaaaaaggccccta

SEQ ID NO: 2028 - DNA, 871 bp, Zea mays
  Clone ID: TF_ZmC369_110
cattgggtacctcgaggccgggccgggacgcaacctcccactgcattctcgaattccgattcccaatccagcaaaccctaccagccttttgcaaactcagagagggacccgatggcacccaaggcggagaagaagccggcggcgaagaagcccgcagaggaggagcccgcggccccggcggagaaggctcccgctgggaagaagccgaaggcggagaagcggctcccggcgggaaaatccgccggcaaggaaggcggtgttgacaagaaggggcggaagaaggccaagaagagcgtggagacgtacaagatctacatcttcaaggtgctgaagcaggtgcacccggacatcggcatctcctccaaggccatgtccatcatgaactccttcatcaacgacatcttcgagaagctcgccggcgaggcggccaagctcgcccgttacaacaagaagcccaccatcacctcccgggagatccagacctccgtccgcctcgttctacccggcgagctcgccaagcacgccgtctcggagggcaccaaggccgtcaccaagttcacctcgtcctaagctcctttcgagtaggtccttaagcgccgtggcgccttttgactgtatggaatgtttgtcatctgaaagttgatctgagcagtgcaatatataattctggcatactattctcgcaatcgttttggggttcagaatgggactgacatcagagtaatatgtggcataccttctgatcctctgtactcgagaggattttgttgtggataagccacttgctgcctttgtttggtggataattgcttcgagcataagaaacagtgtatgctgctataaacatctatttgctatgtgacggcatctg

SEQ ID NO: 2029 - DNA, 703 bp, Zea mays
  Clone ID: TF_ZmC369_119
gccggccgggccgggacgcaacctcccactgcattctcgaattacgattcccaatccagcaaaccctaccagccttttgcaaactcagagagggacccgatggcacccaaggcggagaagaagccggcggcgaagaagcccgcagaggaggagcccgcggccccggcggagaaggcccccgctgggaagaagccgaaggcggagaagcggctcccggcgggaaaatccgccggcaaggaaggcggtgttgacaagaaggggcggaagaaggccaagaagagcgtggagacgtacaagatctacatcttcaaggtgctgaagcaggtgcacccggacatcggcatctcctccaaggccatgtccatcatgaactccttcatcaacgacatcttcgagaagctcgccggcgaggcggccaagctcgcccgctacaacaagaagcccaccatcacctcccgggagatccagacctccgtccgcctcgttctacccggcgagctcgccaagcacgccgtctcggagggcaccaaggccgtcaccaagttcacctcgtcctaagctccttttctagtaggtccttaagcgccgtggcgccttttgactgtatggaatgtttgtcatctgaaagttgatctgagcagtgcaatatataattctggcaaaaaaaaaaaaaaaaaaagggcggccaaagactagtgagcta

SEQ ID NO: 2030 - DNA, 709 bp, Zea mays
  Clone ID: TF_ZmC369_133
gggaccctcgaggccggccgggctacgcaacctcccactgcattctcgaattccgattcccaatccagcaaaccctaccagccttttgcaaactcagagagggacccgatggcacccaaggcggagaagaagccggcggcgaagaagcccgcagaggaggagcccgcggccccggcggagaaggctcccgctgggaagaagccgaaggcggagaagcggctcccggcgggaaaatccgccggcaaggaaggcggtgttgacaagaaggggcggaagaaggccaagaagagcgtggagacgtacaagatctacatcttcaaggtgctgaagcaggtgcacccggacatcggcatctcctccaaggccatgtccatcatgaactccttcatcaacgacatcttcgagaagctcgccggcgaggcggccaagctcgcccgttacaacaagaagcccaccatcacctcccgggagatccagacctccgtccgcctcgttctacccggcgagctcgccaagcacgccgtctcggagggcaccaaggccgtcaccaagttcacctcgtcctaagctcctttcgagtaggtccttaagcgccgtggcgccttttgactgtatggaatgtttgtcatctgaaagttgatctgagcagtgcaatatataattctggcatactattctcgcaaaaaaaaaaaaaaaaaagcggccctcg

SEQ ID NO: 2031 - DNA, 700 bp, Zea mays
  Clone ID: TF_ZmC369_33
aggaccagcctaagccaccagcgctcgtcacctccaatcaacaaattcccaatccgccgcttcccatcccgcgttcgccgctccatttgatcgaattcccgatggcacccaaggcggagaagaagccggcggcgaagaagcccgcagaggaggagcccgcggccccggcggagaaggctcccgctgggaagaagccgaaggcggagaagcggctcccggcgggaaaatccgccggcaaggaaggcggtgttgacaagaaggggcggaagaaggccaagaagagcgtggagacgtacaagatctacatcttcaaggtgctgaagcaggtgcacccggacatcggcatctcctccaaggccatgtccatcatgaactccttcatcaacgacatcttcgagaagctcgccggcgaggcggccaagctcgcccgttacaacaagaagcccaccatcacctcccgggagatccagacctccgtccgcctcgttctacccggcgagctcgccaagcacgccgtctcggagggcaccaaggccgtcaccaagttcacctcgtcctaagctcctttcgagtaggtccttaagcgccgtggcgccttttgactgtatggaatgtttgtcatctgaaagttgatctgagcagtgcaatatataattctggcatactattctcgcaaaaaaaaaaaaaaaaaaaagtacct

SEQ ID NO: 2032 - DNA, 993 bp, Zea mays
  unsure (1)..(993): unsure at all n locations
  Clone ID: TF_ZmC369_43
cgaggccgtgccgggaaaaaaaaaaaaaaaaaaaaaaaaaaaaaaaaaaaaaaaaaaaaaaaaaaaaaaaaaaaaaaaaaaaaaaaccgccccgacttttgggcaacggatattttgggttttcgcatcgatgaaaaacgtagcaaaaggcgatccctggggggaattgcaaaatcccgcgaaccttcgagtttttgaacgcaagttgcgcccgaagccttttgggggggggcaggtttgcttgggggtaacgcacgcaacctcccactgcattctcgaattccgattcccaatccagcaaaccctaccagccttttgcaaactcagagagggacccgatggcacccaaggcggagaagaagccggcggcgaagaagcccgcagaggaggagcccgcggccccggcggagaaggctcccgctgggaagaagccgaaggcggagaagcggctcccggcgggaaaatccgccggcaaggaaggcggtgttgacaagaaggggcggaagaaggccaagaagagcgtggagacgtacaagatctacatcttcaaggtgctgaagcaggtgcacccggacatcggcatctcctccaaggccatgtccatcatgaactccttcatcaacgacatcttcgagaagctggccggcgaggccgccaagctcgcgcgctacaacaagaagcccaccatcacgtcccgcgagatccagacctccgtgcgcctcgtgctccccggcgagctcgccaagcacgccgtctctgagggcaccaaggccgtcaccaagttcacctcctcctaggcttgcacgctcgccctttgtaggcatctctntgtgttgatgttccccttgttgtagttatatgttgctggtttctctgtcggcgctgctcgtaactgcgtcatgtaaccctgcaaggacntggtttatttgtgaatctcnancacttttgttggtgatcactcatgttctanaaaaaaaaaaaaaaaagcggccc

SEQ ID NO: 2033 - DNA, 780 bp, Zea mays
  Clone ID: TF_ZmC369_59
cggacgcaacctcccactgcattctcgaattccgattcccaatccagcaaaccctaccagccttttgcaaactcagagagggacccgatggcacccaaggcggagaagcggctcccggcgggaaaatccgccggcaaggaaggcggtgttgacaagaaggggcggaagaaggccaagaagagcgtggagacgtacaagatctacatcttcaaggtgctgaagcaggtgcacccggacatcggcatctcctccaaggccatgtccatcatgaactccttcatcaacgacatcttcgagaagctcgccggcgaggcggccaagctcgcccgttacaacaagaagcccaccatcacctcccgggagatccagacctccgtccgcctcgttctacccggcgagctcgccaagcacgccgtctcggagggcaccaaggccgtcaccaagttcacctcgtcctaagctcctttctagtaggtccttaagcgccgtggcgccttttgactgtatggaatgtttgtcatctgaaagttgatctgagcagtgcaatatataattctggcatactattctcgcaatcgttttgggggttcagaatgggactgacatcagagtaatatgtggcatatcttctgatcctctgtactcgagaggattttgttgtggataagccatttgctgcctttgtttggtgggtaattgcttcgagcataagaaacagtgtatgctgctataaacgtctttttgcaacgcgacgccaaaaaaaaaaaaaaaaaagcggcc

SEQ ID NO: 2034 - DNA, 703 bp, Zea mays
  Clone ID: TF_ZmC369_93
ttgggaccctcgaggccggccggaacgcacctccactgcattctcgaattacgattcccaatccagcaaaccctaccagccttttgcaaactcagagagggacccgatggcacccaaggcggagaagaagccggcggcgaagaagcccgcagaggaggagcccgcggccccggcggagaaggcccccgctgggaagaagccgaaggcggagaagcggctcccggcgggaaaatccgccggcaaggaaggcggtgttgacaagaaggggcggaagaaggccaagaagagcgtggagacgtacaagatctacatcttcaaggtgctgaagcaggtgcacccggacatcggcatctcctccaaggccatgtccatcatgaactccttcatcaacgacatcttcgagaagctcgccggcgaggcggccaagctcgcccgctacaacaagaagcccaccatcacctcccgggagatccagacctccgtccgcctcgttctacccggcgagctcgccaagcacgccgtctcggagggcaccaaggccgtcaccaagttcacctcgtcctaagctcctttcgagtaggtccttaagcgccgtggcgccttttgactgtatggaatgtttgtcatctgaaagttgatctgagcagtgcaatatataattctggcatactattctcggaaaaaaaaaaaaaaaaaagcggcc

SEQ ID NO: 2035 - DNA, 852 bp, Zea mays
  Clone ID: TF_ZmC369_94
ggaccctcgaggccgggccgggacgcaacctcccactgcattctcgaattacgattcccaatccagcaaaccctaccagccttttgcaaactcagagagggacccgatggcacccaaggcggagaagaagccggcggcgaagaagcccgcagaggaggagcccgcggccccggcggagaaggcccccgctgggaagaagccgaaggcggagaagcggctcccggcgggaaaatccgccggcaaggaaggcggtgttgacaagaaggggcggaagaaggccaagaagagcgtggagacgtacaagatctacatcttcaaggtgctgaagcaggtgcacccggacatcggcatctcctccaaggccatgtccatcatgaactccttcatcaacgacatcttcgagaagctcgccggcgaggcggccaagctcgcccgttacaacaagaagcccaccatcacctcccgggagatccagacctccgtccgcctcgttctacccggcgagctcgccaagcacgccgtctcggagggcaccaaggccgtcaccaagttcacctcgtcctaagctcctttcgagtaggtccttaagcgccgtggcgccttttgactgtatggaatgtttgtcatctgaaagttgatctgagcagtgcaatatataattctggcatactattctcgcaatcgttttggggttcagaatgggactgacatcagagtaatatgtggcataccttctgatcctctgtactcgagagggattttgttgtggataagccacttgctgcctttgggttggtgggaattgcttcgagcataagaaacagtgtatgctgctataaacatctatttggt

SEQ ID NO: 2036 - DNA, 352 bp, Zea mays
  unsure (1)..(352): unsure at all n locations
  Clone ID: TF_LIB4730-036-R1-K1-H3
cctccattcccgagtctccagccaaccacatccagtccaccccatccccctcgaccccgacaaccccgagtcccgacccgatggcgcccaaggccgagaagaagccagcggagaagaagccggcggccgaggagaaggcggagaagacggccgcaggcaagaagcccaagtccgagaagcgcctgcccgcctcgaagtcctccgggaaggagggcggngagaagaaggggaagaagaaggccaagaagagcgnggagacctacaaaatgtacatgttgaaggtgctaaagcaggtgcacccggacatggggatgtggtgtaagttatgggcatgatgaactggttgatgaac

SEQ ID NO: 2037 - DNA, 683 bp, Zea mays
  Clone ID: TF_LIB4729-067-R1-K1-G7
tcctcttatttcttatcagacgatcccttcttagctaactaaatccctagtcgccccgcatcggtggcgcacgacgccgagaagaaacccgcggcgaagaagccggcggaggaggaccccgccgccgaggaggcccccggcgagaagaagccggaggaggagaagcggctccctgctgggtagtctgctgccgagggaggcgggtagggcacgaggggcaagaaggacggcaagaacagcgtggcctcctacaacatcttcttcttggaggtgctgaaggaggtgcaccccgtcattgtcttctcctccgaggtgatgttcatgatgaacttctttattgacgatttctttgagaagcttgctgatgacgccgacctgctcggctgttataacaagaatactatcatctcctcccgggagatccagtccttcgggcgcctccttcttgccggggaggtcgagcagcacgccttctacgagggcaccgagggcgtcaccaagatctcctcctactatgctgggccgccgcttgttggaggattttctgctgtgatcacgtttgttgctgttagtaggtgctgctggctgctggcttttatggatgtctactatccggctggaacagctgtgttatctgataggaccgtgatggtgattattccaccccgttttttttttttttt

SEQ ID NO: 2038 - DNA, 361 bp, Zea mays
  Clone ID: TF_jC-zmXLIB3527P015Bh10d1
cgcagagcgggggtacgggcgcccccgtctacctggccgccgtcctcgagtacctggtcgccgaggtgctggagctggccggcaacgctgccaaggacaacaagaagacccgcatcatcccgcgccacgtgctccttgccatccgcaacgacgaggagctagagaagctgctgtacggcgccaccatcgcccacggcggagccctccccaccatcaaaccggtgctcctgcccacgaagaccgctgagacggccgccgcccaggatgccaagccgcccaacaaggccgtcccgccccccaagaaggcatagaggggcgggcgcctttaccgctgcgaagtcgaatgctcgtgttcagtaga

SEQ ID NO: 2039 - DNA, 710 bp, Zea mays
  Clone ID: TF_LIB4185-036-R1-K1-H7
tcgagtttttttttttttttttttttttttttttttttttttttttttttttttttttttttttttttttaagggactgcaaacacaatacagttacttttttacataaaaaacatcaaccgagcccaaaaaacaaacgcaggggcaactaccaccggggaaacacacctaaccgtactactattgtactactgcaaaaaggaaacgagggcccgtcgcatggctcgcctaggagctagggaacttggggacggttttggggccctcggaaacggggtgcttggcgagctccccgggaaggacgaggcggacggaggtctggatctcgcgggacgtaatggtaggctttttgttgtaccgcgccagtttggccgcctccgccgccagtttttaaaaaatgtcgttgatgaaggagttcatgatggacatggccttggacaaaatgccaatgtccgggtgcacctgtttcagcaccttgaaaatgtaaattttgtacgtctccaccgacttttttgccttttttttcccctttttttcgccaccctccttgcctggggacttgcccggggggagccgtttttcggccttgggctttttccccgccgtggccttttccgccgccggttcctcctccggaggctttttgggggggggctttttctcggccttgggcgccattggaatagggcggggggttcgggattgggctt

SEQ ID NO: 2040 - DNA, 642 bp, Zea mays
  Clone ID: TF_ZmC520105_1
actatctcagtccccatcttccctgcctccagcaaactcacacatctcaccaccggagctcccaatcccacccgaagcggcagccatggcccccaaggcagacaagaagcccgtcgccgagaacaaggtggagaaggcggcggagaaaacccccgccggcaagaagcccaaggccgagaagcggctgccggcgggcaagacggcgtccaaggaggccggcggcgaggccaagacgaggggccggaagaagggcagcaaggccaagaagagcgtcgagacgtacaagatctacatcttcaaggtgctgaagcaggtccaccccgacatcggcatctcctccaaggccatgtccatcatgaactccttcatcaacgacatcttcgagaagctcgccggcgagtccgccaagctcgcgaggtacaacaagaagcccaccatcacctcccgggagatccagacctccgtccgcctcgtcctccccggcgagctcgccaagcacgccgtctccgagggcaccaaggccgtcaccaagttcacctcctcctagactgacggcgtgtagttggtttctgtatctgtactctgcttatctatctatctgcaagtagcggtagcggtagcagtgcctgtgctgggtgattg

SEQ ID NO: 2041 - DNA, 754 bp, Zea mays
  unsure (1)..(754): unsure at all n locations
  Clone ID: TF_LIB4826-019-A1-N1-F2
ccggccggggctattcgtgtcctggcatccgcagagagcttgttccgtccaggcaaccaaaaagcaagttgccccgccgcgcagaggaagaagagagcagaggaggatggctcgtacgaagcagaccgcccgcaagtccacgggaggcaaggccccccgcaagcagctcgccaccaaggcggcgaggaagtcggcgccgacgaccggcggcgtgaagaagccccacaggtacaggcccggaaccgtggcgctgcgcgagatccgcaagtaccagaagagcactgagttgctgattaggaagctgccgctccagaggcttgtcagggagattgctcaggatttcaagacggatctgcgcttccagagccatgccgtgcttgctctgcaggaggcagcagaggcctacctggttggtctcttcgaagataccaatctgtgcgcgatccatgcgaagcgcgtgaccatcatgcccaaggacattcagctggcaagaaggatccgtggcgagagggcgtaagtctgtcgacgggaggaagaactctgcgctcgttttgtgtgttcgcctctctcaccctgtaagttttgtgaaaagataatctagtaaactgtacttggnctgtttgactgtagccgcagtagcgtctgcgcataccgttggctgttggcgtgtctggagtcttttatccatccattctagtactacttaataatcgtgatatatcaccgggttgctaaacgtgatccagacttaact

SEQ ID NO: 2042 - DNA, 713 bp, Zea mays
  Clone ID: TF_LIB4762-109-Q1-K1-E12
cattgggtacctcgaggccggccgggatcgaacgatctattctccctagaatatataacagcagatcctgcatgcgaacgaaagcgctagcccccttcgtactgtctcgatgggccgcaccatcctcacggctaggaactcctctgacgacaaggcgtcaaggaagcgcctggtcaccaatgttcctgatcaagtctgccccaggccactgcctgtactgaacaagccccatcgtcttccgccccgataccgttatgctccgggaaatacgcaagaaccaaaagagcacgaacttgctgatcctaaagctgtcgatctaacaactgctgtgtgagatcgaccaaaacttcaagaccgacctccgcttccagagctccggctgcgccgcgctgaaataagagtccgaaatctacctcgacgggctcttcaaggacaccaacctctgctgcattcacgtcaaaagcgacaccatcatggccaaggacatccatttcgcccggcgtatccctggttataagacctaggattcttaccggtggatgtagtaatcagcagcggccgtttctgtcatcactgactgaatagaaggtgtatagatgtgccgaatgtctgtagctagagttatcggtgaaatcatgatgtatctgatactacactggtgtgaataactatgtctatgcatggccaatgaaggtctcccttatcatctccct

SEQ ID NO: 2043 - DNA, 476 bp, Zea mays
  Clone ID: TF_LIB3637-255-Q6-N6-H9
gggtggctgaagatcccctccctggggccccacatacaataggacccaagggcccaaactggggcagggcacatcccatccccagatctagacccgagcatgccccagcccacagggcaaaggaaatccctactttctaagccctcgggggggaccaggcgcccctcttgggggacctgggctccttggtgccggcgctggcccccttttccgccaccttcttgggccggaacaccgagtggttttcggggaggaccccccccggccccagggacccccctcccaccaaattccccagctccccctgggtgcggatcccccggagcccctggcgcggaacaaaccccctctttttggtggctttcgccgagttccccgccaactccaaaacctcgcgggggaggccctccaggacagggggcaggcaaaccggggcgccacggcccaccccctggaactacccgcccttttttagg

SEQ ID NO: 2044 - DNA, 566 bp, Zea mays
  Clone ID: TF_LIB3969-010-Q1-M6-G2
tccaccgcggtggcggccgcccttttttttttttttttttttaagaaacatgtttttttctatatccattaggggtgacataaagaaacttgggcgaaaaaggtacactagccaattacaattggccgtttacagacctacacatgcacaacactatatcctacttgaaaccctctgccttgtaggagaggaacttgaagaacttcttgggcgacttggttctacttgctcccacccgtggacgccttctccgacgttttcttgggcaaaataaccgagtggatgttgggcaacacgccgcccagggccacgggaacactggtcacaagattcccgagctgctcggcattgtggatagcaaagaccacgtgccccgagacgatgctcgccttgttggtgctcttggcagaaaagctggtgagctgcatgacctagcgggcaggttctacatgacggacgttaagcagacggaggtaccggtgccgacgcactgagcgtaccggcttttcttgacgtagcaccccatgcgggcgaaaaaaaactggagcccggtcttcacggacctc

SEQ ID NO: 2045 - DNA, 295 bp, Zea mays
  Clone ID: TF_LIB3150-075-P1-N1-F7
tcttcctttcgccctcaaattcgttccgtccaggcggggttgatatcgagcagggaaggagaggtgaagatggctcgtacgaagcataccgcccgcaagtccaccggaggcaaggccccgcgcaagcagctcgccaccaaggcggtgaggaagtcggcgccgactaccggcggcgtgaagaatccccacaggtacaggccctgcaccgtggcgctgttcgagatccgcaagttccagaagagcacggtgctgctcattcggaagttgcccttttcagtgcctggttcgtgagatc

SEQ ID NO: 2046 - DNA, 759 bp, Zea mays
  Clone ID: TF_LIB4766-007-R2-K1-D10
ccggggatacaaacccgtcctctgtccgtcctaccccaccgctcacctcggcttggctttctcccctcttccgcacccgcttctcgctccggattccggattccctctgctctttccctaacgaaggtagccatggcggggagaggtaaggcgatcggctcaggcgccgccaagaaggccacgtccaggagctccaaggctggcctccagttccctgtgggaaggatcgccaggttcctcaaggccggcaagtatgccgagagagtcggcgccggcgcccctgtctacctcgctgccgtgctcgagtatcttgctgctgagaacaatgggcggattttggctgaagatctaaacctatggttcttgagctggccagcaatgcggcacgtgacaacaagaagacccgcatcgtaccgcgccacattcagctcgccgtccgcaacgacgaagagctctcccgcttgctgggcacggtgaccatcgctagcggggggggaatgcccaacatccataacctgctgctcccgaagaaggccggcggcggcagcgccaaggctgcggctggtgacaaggactaagtccttgactacgcctgggggcacctccaggatgctgccgtatcaacagtgtctgtgtagtacgctagctgttccttgtagctgggtatttgggggtggtgtaacactggtaaactaagatactctttgtggttgctaaggattaaaatctgtatttggtgctataaaaagggcatccttg

SEQ ID NO: 2047 - DNA, 489 bp, Zea mays
  unsure (1)..(489): unsure at all n locations
  Clone ID: TF_LIB4740-009-R1-K1-F6
ggccggggctattcgtgtcctggcatccgcagagagcttgttccgtccaggcaaccaaaaagcatgttgccccgccgcgcagaggaagatgagagcagaggaggatggctcgtacgaagcagaccgcccgcaagtccacgggaggcaaggccccccgcaagcagctcgccaccaaggcggcgaggaagtcggcgccgacgaccggcggcgtgaagaagccccacaggtacaggcccggaaccgtggcgctgcgcgagatccgcaagtaccagaagagcacggagctgctgatccgcaagctgcccttccagcgcctggtgcgcgagatcgcgcaggacttcaagacagacctccggttccagagccacgccgtgctggcgctccaggaggccgccgaggcctacctcgtcggtctcttcgngggccccnccctctgcgccctgctcgcttngcgcgtcgccttcttgcccctgggcctcctgctcgccc

SEQ ID NO: 2048 - DNA, 338 bp, Zea mays
  Clone ID: TF_LIB3357-004-P1-K1-G11
cgcacagggctacaccaaccaacagcaggggaaattctcccattccactttattttatgcgggtaatatatggctgcccgcaacgggcggcaagggcctgtgcaaggacggatctaaccgccaccggaaggtgctccgggacaacatccaggggatcacgaagccggctatccggcggctggcgcgcaggggcggcgtgaagcgcatctccgggctcatctacgaggagacccgcggcgtcctcaagatcttcctggagaacgtgatccgagacgccttcacctacaccgagcacgcgcgccgcaagaccgtaacagccatggacgttttttacgcac

SEQ ID NO: 2049 - DNA, 871 bp, Zea mays
  Clone ID: TF_ZmC6351_58
cattgggtacctcgaggccggccgggagatttcccaactttttgttcctcgcgccgccgccgccgccgccgtgacggaaggaagaggaggagcaaggagcacgacgcgatgggtcactccaacgtgtggaactcgcaccctaagaactacggccctggctcccgcgtctgccgggtctgcgcgaaccctcacggtctgatcaggaagtacgggctcatgtgctgcaggcagtgcttccgcagcaacgccaaggacattggtttcatcaagtaccgttgaagaggccactgtgctgctgtggagaacttcctacatcaaagaaatgggtccttcattagaaggcctaatttatgcgctttagctttttgttcagaacttgagactcatgtgttaaactcgacttgttaaagttttgatggctactttgtgcttgttggaccagctataatcagaagattgaaattttctcacgcaaaaaaaaaaaaaaaaaaaaaaaaaaaaaaaaaaaaagcgccactaatctcgccttccgaggaaactcaccagcccaccacagacccgagcggaagaagccatgtccgggcgcggtaagggtggcaaggggctcggcaagggcggcgcgaagcgtcaccggaaggtgctgcgcgacaacatccagggcatcaccaagccggcgatccggcggctggcgaggaggggcggcgtcaagcgcatctcggggctcatctacgaggagacccgcggcgtgctcaagatcttcctcgagaacgcatccgcgacgccgtcacctacactgagcacgcccgccgcaagaccgtcaaccgccatggacgtcgtctacgcgctcaagcgccagggccgcaccctctac

SEQ ID NO: 2050 - DNA, 281 bp, Zea mays
  Clone ID: TF_LIB3357-035-P1-K1-H3
cggccgaatccgtcgccacgcgtccgacagtgaccgatcctgctgaatcttctcgtgctcatggccgacaacaacagaggagtcaccgcggagggccccggagcactgctctaagctggcgcagtggccggcacgcgggtgagaagcccaccgtttcgcccggaccgtcgcgctccgcgagatccgcaggtaccagaagagcactgagctgctcatccgcaagctccccttccagcgcctcgtccgcgagatcgcgcaggaacttcaaagactggatctga

SEQ ID NO: 2051 - DNA, 381 bp, Zea mays
  Clone ID: TF_LIB3070-005-Q1-N1-B3
ccaaactcgtgagcactatgtactagtgacgcacaagccacgatatagccattatacagacatggactccaacgacaccggatcatgaagccaagggaaagaagggagcggacggccgcaaggactgcaatccaaggaagaagtcagagtcggaggccgtgaaggctatacttcaattgcacgtatgccgcatcgtacgctacttgaagaaaggccgatacacgcaacatgtcagcacctgcgccaacgtctacctcgcagctgtactagaatacctcgccgctgaggttctggagctcgccggtaatgctgccagggacatcaagatgactcgcattattacgagccacgagcttatggcgatccggaacgacgaggagc

SEQ ID NO: 2052 - DNA, 1257 bp, Zea mays
  Clone ID: TF_ZmC2834_1
gccggccgtgccgggagacaccacaccagtgtgctcagtgctcactgctcaccataataacgctgcacctcttttcatttcaccatctcctgcccccttaaaaaaaagactcaccgtcgacacgccctcccgtcccgagagttctgaatcgaaaccgtcggccacgagagcagtgcgaggcgcccaccgcgatggctcgaaccaagcaccaggccgtgaggaagacggcggagaagcccaagaagaagctccagttcgagcgctcaggtggtgcgagtacctcggcgacgccggaaagggctgctgggaccgggggaagagcggcgtctggaggtgactcagttaagaagacgaaaccacgccaccgctggcggccagggactgtagcgctgcgggagatcaggaagtaccagaagtccactgaaccgctcatcccctttgcgcctttcgtccgtgtggtgagggagttaaccaatttcgtaacaaacgggaaagtagagcgctataccgcagaagccctccttgcgctgcaagaggcagcagaattccacttgatagaactgtttgaaatggcgaatctgtgtgccatccatgccaagcgtgtcacaatcatgcaaaaggacatacaacttgcaaggcgtatcggaggaaggcgttgggcatgatatataatatccattctgattgcatcattcttgtgaatttgtttgtaggagctagacattagtgttgttgaatgctgcatggttcctaatccttttcgcagtctaacatctgtggagttagtatgttacatggcaacagctgaacatctgtggactataactatatggcaacagccgaagattgtgtctgtgggataactggttgttttggttgctcttcagtagtttgtttgcttcagtctgcagtatggactatggagtaaactgcatgctgaaacccgaaccactgctgaaacggcagttgccaggatagcaggagggcctttatgcacagtggaattgagtagagaactgagtaaaccatggttctttctccttttgaactggaacacacacagttggatcttgtttctcttcttatgccattgtcatcgtgtttataaggggtgtaaatggtacaaatattatctgcccgtattcaaatttgatctatctaagaaggctgaaatccgatccatattcgagtccacgtattcagtacccgacctgtatctgaattatattcatacccatatactcaaagttggatatt

SEQ ID NO: 2053 - DNA, 1158 bp, Zea mays
  Clone ID: TF_ZmC2834_2
aattcggcacgaggccctcccgtcccgagagttctgaatcgaaaccgtcggccacgagagcagtgcgaggcgcccaccgcgatggctcgaaccaagcaccaggccgtgaggaagacggcggagaagcccaagaagaagctccagttcgagcgctcaggtggtgcgagtacctcggcgacgccggaaagggctgctgggaccgggggaagagcggcgtctggaggtgactcagttaagaagacgaaaccacgccaccgctggcggccagggactgtagcgctgcgggagatcaggaagtaccagaagtccactgaaccgctcatcccctttgcgcctttcgtccgtgtggtgagggagttaaccaatttcgtaacaaacgggaaagtagagcgctataccgcagaagccctccttgcgctgcaagaggcagcagaattccacttgatagaactgtttgaaatggcgaatctgtgtgccatccatgccaagcgtgtcacaatcatgcaaaaggacatacaacttgcaaggcgtatcggaggaaggcgttgggcatgatatataatatccattctgattgcatcattcttgtgaatttgtttgtaggagctagacattagtgttgttgaatgctgcatggttcctaatccttttcgcagtctaacatctgtggagttagtatgttacatggcaacagctgaacatctgtggactataactatatggcaacagccgaagattgtgtctgtgggataactggttgttttggttgctcttcagtagtttgtttgcttcaggtaaccatgctgcgaactatgatgttttcattctcggtttgcttcagctaaccgagatcgattcagtctgcagtatatggactatggagtaaactgcatgctgaaacccgaaccactgctgaaacggcagttgccaggatagcaggagggcctttatgcacagtggaattgagtagagaactgagtaaaccatggttctttctccttttgaactggaacacacacagttggatcttgtttctcttcttaggccattgtcatcgtgtttctaaggggtgtaaatggtatctgtccgtattcgaatttgatctatctaacaaggctgaaatccgaaaaaaaaaaaaaaaaaaaaaaaaaaaaaaaa

SEQ ID NO: 2054 - DNA, 730 bp, Zea mays
  Clone ID: TF_ZmC2834_4
attcgctcctcccgaccgccgccgtcgccgcctcctctccccagcacccggagctcgaccgaacgccgctcaccgtcgacacgccctcccgtcccgagagttctgaatcgaaaccgtcggccacgagagcagtgcgaagcgcccaccgcgatggctcgaaccaagcaccaggccgtgaggaagacgcaggaaagggctgctgggaccgggggaagagcggcgtctggaggtgactcagttaagaagacgaaaccacgccaccgctggcggccagggactgtagcgctgcgggagatcaggaagtaccagaagtccactgaaccgctcatcccctttgcgcctttcgtccgtgtggtgagggagttaaccaatttcgtaacaaacgggaaagtagagcgctataccgcagaagccctccttgcgctgcaagaggcagcagaattccacttgatagaactgtttgaaatggcgaatctgtgtgccatccatgccaagcgtgtcacaatcatgcaaaaggacatacaacttgcaaggcgtatcggaggaaggcgttgggcatgatatataatatccattctgattgcatcattcttgtgaatttgtttgtaggagctagacattagtgttgttgaatgctgcatggttcctaatccttttcgcagtctaacatctgtggagttagtatgttacatggcaacagctgaacatctgtggactataactatatgac

SEQ ID NO: 2055 - DNA, 706 bp, Zea mays
  Clone ID: TF_ZmC2834_5
cggccgggccgggatctcctgcccccttaaaaaaagactcaccgtcgacacgccctcccgtcccgagagttctgaatcgaaaccgtcggccacgagagcagtgcgaggcgcccaccgcgatggctcgaaccaagcaccaggccgtgaggaagacggcggagaagcccaagaagaagctccagttcgagcgctcaggtggtgcgagtacctcggcgacgccggtgagcgcgtgcgtgcggggatcagttccctccttttgccttttttgtgggctgctcttacttgcttgcaagctgtttgatggaatgcaggaaagggctgctgggaccgggggaagagcggcgtctggaggtgactcagttaagaagacgaaaccacgccaccgctggcggccagggactgtagcgctgcgggagatcaggaagtaccagaagtccactgaaccgctcatcccctttgcgcctttcgtccgtgtggtgagggagttaaccaatttcgtaacaaacgggaaagtagagcgctataccgcagaagccctccttgcgctgcaagaggcagcagaattccacttgatagaactgtttgaaatggcgaatctgtgtgccatccatgccaagcgtgtcacaatcatgcaaaaggacatacaacttgcaaggcgtatcggaggaaggcgttgggcatgatatataatatccattctgattgc

SEQ ID NO: 2056 - DNA, 545 bp, Zea mays
  unsure (1)..(545): unsure at all n locations
  Clone ID: TF_uC-zmflteosinte067f04b1
tcagagagggacccggggggacccatggcggagaagaagccggcggccaagaagcccgcagaggaggagcccgcggccccggcggagaaggcccccgctgggaagaagccgaaggcggagaagcggctcccggcgggaaaatccgccggcaaggaaggcggtgttgacaagaagggtcggaagaaggccaagaagagcgtggagacgtacaagatctacatcttcaaggtgctgaagcaggtgcacccggacatcggcatctcctccaaggccatgtccatcatgaactccttcatcaacgacatcttcgagaagctcgccggcgaggcggccaagctcgcccgctacaacaagaagcccaccatcacctctcgggagatccagacctccgtccgcctcgttctacccggcgagctcgccaagcacgccgtctggagggcacaaggccgcaccaagtcacctcgcctagctcttttagtaggccttagcgccgggcgcctttgactgatggaatgttgcattgaagttgaccggcagngattttc

SEQ ID NO: 2057 - DNA, 585 bp, Zea mays
  Clone ID: TF_LIB4730-049-R1-K1-C4
tgggtaccccctcgaggggccggccgggactcggactcacacgcgaatatcagagcactcacgccccgtccgaactcgagagtcataatcaagagacctactcgacctccctgtccccagcgctagcccgatggagccgaagcgaagcagagcagagacgcaagtcgatcgaggcgcaaaggggtcgcggaagcagctggcgacgaaggcggcgcgcacgtcgtcgccgtcgacgggcggagtgaagaaaccgcaccggttgcgcccaggcaccgttgcgctgcgcgagatccgcaagtaccagaaaagcacgaagctggtgatccgcaagctcccgatccagcgcctggagcgcgagatcgcgcaggacttcaagacggacctccgcttccagtcctccgccgtcgccgcgctgcaggaggccgtcgaggcctacctggtgggcctcttcgaggacaccaacctttgtgccatccacgccaagcgcgtcaccatcatgcccatggacatccagctcgcgcgccgcatacggggcgagcgcgcctaggcggttcggtttgggcgcctgctcgctactgttggagg

SEQ ID NO: 2058 - DNA, 632 bp, Zea mays
  unsure (1)..(632): unsure at all n locations
  Clone ID: TF_LIB4977-005-R1-K1-A4
ttgggtccctcgaggccggccgggccgggactcaccctcttcaatctccccagcaatccctagcagaagccttccatcctcactcgctcgatggcccgcacgaagcagacggtgaggaagtccaccggcggcaaggcgccgaggaagcagttggcgactaaggcggcccgcaagtctgcccctgcgaccggcggagttaagaagccccaccgcttccgccccggtaccgtcgcgctccgggagatccgcaagtaccataagagcacagagctgctgatccgcaagctgccgttccagcgcctggtgcgggagatcgcgcaggacttcaagaccgacctacgcttccagagctccgctgtctccgcgctgcatgaggcggctgaggcctaccttgtcagtctcttcgaggacaccaacctctgcgccatccacgccaagcgcgtcaccatcatgcccaaggacatccagcttgcccgccgcatccgtgacgagagggactaagcatcgtatattctgtcatcagcgcccgatcagaacatgtagagatgtgctgagntctgtagtttgtgctactgtcaaatcatcgagtacctggttgttcactgctgtaacttgatatcatgatgcatatg

SEQ ID NO: 2059 - DNA, 652 bp, Zea mays
  Clone ID: TF_LIB5026-038-Q1-XP2-B2
gccggccggtccgggacacagcaatcttcaatctcccgagcaaagcaaagctctagccttccatcctcactcgctcgatggcccgcaccaagcagacggctaggaagtccaccggcggcaaggccccgaggaagcagctggcgactaaagcggcccgcaagtctgcccctgcgaccggcggagtgaagaagccccaccgcttccgccccggcaccgtcgcgctccgggagatccgcaagtaccagaagagcacggagctgctgatccgcaagctgccgttccagcgcctggtgcgggagatcgcgcaggacttcaagaccgacctacgcttccagagctccgctggctccgcgctgcaggaagcggctgaaggctaccttggcgggctcttccaggacaccaacctctggggcatccacggcaagggcggcaccatcatggcccaggacattcagcttggccgccgcattcgtggggagagggcctaagcatcatatattctggcatcaatggcccaacaaaagaaggaaagaagggctggggtccggaatttggggtactggccaatcatccaagaagtgggtggtcaccggtggaacttaatatcctggtggctatggaatggcaatggactatggtatccgttctccag

SEQ ID NO: 2060 - DNA, 531 bp, Zea mays
  Clone ID: TF_uC-zmroteosinte019g10a1
aacaaggttaacaactgatgtatatggtagacggacataggatcactgatcaacattcaaataaccagagcaatgcattaccaccatgactaaattcataacacaggcaaaagccactgcaccacttagacacaccagccaaccaccactactaccacgagaagcggcacatcacagtgcttgcttgagaagcagacacaacgacgcctactagaaggcggctaagacgaggtgaacttggtgacggccttggtaccctccgagacggcgtgcttggcgagctcgccggggaggacgaggcggacggaggtctggatctcgcgggaggtgatggtgggcttcttgttgtagcgggcgagcttggcggcctccgcggcgagcttctcgaagatgtcgttgatgaaggagttcatgatggacatggccttggaggagatgccgatgtcggggtgcacctgcttcaggaccttgaagatgtagatcttgtaggtcttcacgctcttttttgccttcttcctacccttcttgtcg

SEQ ID NO: 2061 - DNA, 723 bp, Zea mays
  Clone ID: TF_LIB4762-139-Q1-K1-C10
cattgggtacctcgaggccggccgggacgaacatacaatctgactcgagcgtatctctctcatcggattcgcatcttttgctgtatcacaccaccgtgaaaccccagcaggcgcatcgatgtggcctaaggggcataagaaggcgggtgcgaagagccagcgcaggaggagcccgctgtcgcgaaggccccggcggaccaacaagcccaaggacggataagcgcctcccggcggccaagtcgaccgagaaagaacggggccaccagagggcgaagaagaacgccaagaactgctagtacacctactacatctacatcttcaaggtgctgaagtgcgaccactcgcacatctacatctcttccgagggcatgtctcgatcatgaactccttcatcaacgacatcttcgagaagctcgtcgttgaggctgccaagcttgcgcgctaaaacaagaagcccaccatcacctctcgtgagattcaaacctctgtccggcttgtccttcccggtgatgtcgacaagtacgcgctgtccgagggtaccatgggcgccactaagctcacatcatcttagatttgaggaagtagctattggcctggcgttggctagctgagtgctcaatttgcctgctactaatagtgcgatgactatccattgtgtagttgtgttgcgctaagaagtgagctacactgatgatatgtttgacattgttttttatgcatgtg

SEQ ID NO: 2062 - DNA, 779 bp, Zea mays
  Clone ID: TF_ZmC369_61
ctcctcgcatttcttcccatccccccttcgcaacccaaaccccaactcgccccgcatctatggcgcccaaggccgagaagaagcccgcggcgaagaagccggcggaggaggagcccgcggccgagaaggcacccgccgggaagaagccgaaggcggagaagcgggtccccgctggcaagtccgctgccaaggagggcggcgagggcaagaggggcaggaagaagggcaagaagagcgtggagacctacaagatctacatcttcaaggtgctgaagcaggtgcacccggacattggcatctcctccaaggccatgtcgatcatgaactccttcattaacgatatcttcgagaagctcgctgctgaggccgccaagctcgcgcgctataacaagaagcccaccatcacctcccgagagatccagacctccgtgcgcctcgtccttcccggggagctcgccaagcacgccgtctccgagggcaccaaggccgtcaccaagttcacctcggcctaggctgcgctgccgccgcttgcaggattgtctcctgtgttcacgtgtattgctgtagttaggcgctgctggcttctatgtctgttacccatctgtctgtagcaactgtgttatctgataggaccgtaatggtgcttatttaacccagctatatgtttctatgtgaaccatctctctatcggttgttgagtacctttatattgtgatgttgatgtgaatatgtttaataaaacgtgtcagtttctaaaaaaaaaaaaaaaaaaagcggcc

SEQ ID NO: 2063 - DNA, 777 bp, Zea mays
  Clone ID: TF_LIB5025-063-A1-XP1-B8
gccggcagggtcgggaattgtcatcacaaccactctcttcgactctttcatccatctcaataaagtctttcagactcctcaatcacctcttttttaaccaaccaccccaaaccacccaaccttcaaaatgactggcggcggaaagtctggcggcaaggcctctggttccaagaacgcgcaatcgcgatcttccaaggctggtctcgcgttccctgttggtcgtgtccaccgtcttctccgaaagggcaactacgctcagcgtgttggtgccggtgctcccgtttacctcgctgccgttctcgagtacctcgctgccgaaatcctcgagttggctggtaacgctgcccgtgacaacaagaagactcgtatcatcccccgtcatctccagctcgccatccgaaacgatgaggagttgaacaagcttctgggtcacgtcaccattgcccagggtggtgtccttcccaacatccaccagaaccttctgcccaagaagacgggtaagactggcaagaacgctagccaggagctgtaaatggttcatttggttcttgtttttccatgcgatggctggttgtttgggttgtcatgacaaaggggtcacggttcaagggttcatacggttgtttttcatcagtttattcgcgcgttagggttgtacaataatcccccacggctatggtcatgaaataagaatacttcaaagatctaaaaaaaaaaaaaaaattttaataataatattattattaaaggtaaaaaaaaaaaaaaaaaaggccccta

SEQ ID NO: 2064 - DNA, 462 bp, Zea mays
  Clone ID: TF_LIB4976-032-R1-K1-G8
atggctgtagctggctcctgcgcgtaattctaaagcgatcgcggacctcaggccatgttttttttatcctttttctctccactctagaggggcattagcgaggagatctaactcgcgtactccgagtccgcgttcacaggattccctggatcctcaaaacaggcaaagactcctctattaccgaatccttcaaccccaagtgccacgccgcctgcctctagaacatctcttgctgggttctctctgactttacggcggcgccacggggaacctcaagaacacccggatatggccgcaccacatccagctttatgtgttctccgaccactagctgacaaaactgttgaggacatccaccatcccgagcggtgctgttatgcctaccatccatcagcctctgctctccagtaatgctgactcctccaacgccagtgacaacaaccacaacaactgcgactgctt

SEQ ID NO: 2065 - DNA, 486 bp, Zea mays
  Clone ID: TF_3341037
tttttttttttttttttcccggcaaaaatactaaatttccaagttcctaatttttttttttttttttcccggcaaaaatactaaatttccaagttcctaagcatcaaatctaagaggaccattacaatccggcgggccggatttattgagcaagcaagctagctactaggcgggtagggtaggggactggggaaaggacacagcaaagaacccttctaacagatccgcggatcccgcagcgcgctcagttgctggtgaacttggtgacggccttggttccctcggaaacggcgtgcttggcgagctctccggggaagactaggcgcacggaggtctggatctcgcgggacatgatggtgggcttcttgttgtaccgcaccagcttggcggcctcgccggccaacttctcaaaaatgtccttgatgaaggagttcatgatggacatggccttggaggatatgccgatgtcggggtgcacctgcttca

SEQ ID NO: 2066 - DNA, 603 bp, Zea mays
  Clone ID: TF_LIB4762-048-R1-K1-H7
ccctcgaggtcgggcgggacacgcgaatcctaaatctgcccttgccgccgccactgcccgatccaggtgtgcagactgctccctcctcctctccgctccgaatggcccgcacgaagcagacggcgcgcaagtcgaccggcggcaaggcgccgcggaagcagctggccaccaaggcggcgcgcaagtcggccccggccacgggcggcgtgaagaagccgcaccgcttccgccccggcaccgtcgcgctccgcgagatccgcaagtaccagaagagcacggagctgctcatccgcaagctccccttccagcgcctcgtccgcgagatcgcgcaggacttcaagacggacctgcggttccagtcctcggccgtggcggtgctgcaggaggccgcggaggcgtacctggtggggctcttcgaggacaccaacctctgcgccatccacgccaagagggtcaccatgatgcccaaggacatccagctcgcccgccgcattaggggcgagagggcttgagctgacgcgctgctgctgttcgttgttgtaatgactagagtagatggtggtgggtgctttctatgccgtgcctattttgctatttcgggcg

SEQ ID NO: 2067 - DNA, 693 bp, Zea mays
  unsure (1)..(693): unsure at all n locations
  Clone ID: TF_LIB4719-012-R1-K1-F1
ctctaatctaggttgggggaaataggcctcgcgggtcgcaaaccgctctctgctgatttgggatttgggaggcgctcgagttttcaggtaaactatagtttagtgacccatggctcgtactaagcaaactgctcgcaagtccactggagggaaggctcctaggaaacaacttgccaccaaggctgcccgtaagcctgcacctacaactgggggagtaaagaagcctcaccgttaccgccctggaactgttgctcttcgtgaaatccgcaagtatcagaagagcactgacctgctcataaggaagcttccgttccaaaggcttgtcagggagattgcccaggatttcaagactgatcttcgtttccagagccatgcggtgcttgcgctgcaggaggctgcggaggcgtacctggtgggtctattcgaggacactaatctgtgcgccatccatgccaagcgcgtgaccatcatgcccaaggacgttcagctggctaggaggatccgtggtgaaagggcctagattctctatttattgctactgngagtggctccgtagtatggtttgcatctgttcgatgcttgcttttgtgggagtttacgtttgtggggtgttcgaatttgtaatattcatncgtagtggacaagtggtaagaagtgccgcaatctgactatgttttcaaatctataatcgct

SEQ ID NO: 2068 - DNA, 416 bp, Zea mays
  unsure (1)..(416): unsure at all n locations
  Clone ID: TF_3341197
taggcaattcgccgcagcctctcaccctcgcgagtcnccacctcccgcagtaggcaattcgccgcagcctctcaccctcgcgagtcnccacctcccgcagcccgcggaggatgatcccgcgacagataatgtggataatgctccggcggggaataaacccaaggccgataagcgcctcccggcgggcaagtccaatgagggcggcgagggctataaggggaaaaagaatgcgaataaatccgtggagacctacaagatctacatcttcgaggtgctgaagcaggtgcaccccgacatcggcatctcgtccaatgccatgtccatcatgaactccttcatcaacgacatcttcgataagctcgcggccgagtccgccnagctggcgcgctacnaccagaagcccaccatcacctccc

SEQ ID NO: 2069 - DNA, 451 bp, Zea mays
  unsure (1)..(451): unsure at all n locations
  Clone ID: TF_LIB3595-023-Q1-N6-C2
ggaaaaaccncaacttataactacaacagggggaacatcaacacaaggaaatgcctacaaagggcgagcgtgcaagcctagggagaggtgaacttggtgacggccttggtgccctcagaacggcgtgcttggcgagctcgccggggagcacgaggcgcacgggggtctggatctcgcggggcgtgatggtgggcttcttgttgtagcgcgcgagcttggcggcctcgccggccagcttctcgaaaatgtcgttgatgaaggagttcatgatggacatggccttggacgagatgccgatgtccgggtgcacctgcttcagcaccttggaagagtagatcttgtacgtcttcacgctcttcttgcccttctttttgccacgcttgccctcgccgccctccttgccggcggacttgcccgcggggacccgcttctccgccttgggcttcttccc

SEQ ID NO: 2070 - DNA, 638 bp, Zea mays
  unsure (1)..(638): unsure at all n locations
  Clone ID: TF_LIB4730-002-R1-K1-E2
gacaaccccgagtcccgacccgatggcgcccaaggccgagaagaagccagcggagaagaagccggcggccgaggagaaggcggagaagacgaccgcaggcaagaagcccaagtccgagaagcgcctgcccgcctcgaagtcctccggcaaggagggcggcgagaagaaggggaagaagaaggccaagaagagcgtggagacctacaaaatctacatcttcaaggtcctaaagcaggtgcaccccgacatcggcatctcctccaaggccatgtccatcatgaactccttcatcaacgacatcttcgagaagctcgccggcgaggccgctaagctcgcccggtacaacaagaagcccaccatcacctcccgcgagatccagacctccgtgcgcctcgtcctcccaggagagctcgccaaacacgccgtctccccttcttacaagggttcttcgtcgtgtcctctacccctccccctccccgcctatgtatgtgctgtgaaaattgtgatgttctcgtcgggtgaacaaggccagtagctagcttgcctgcttcataaatcgtgcccggattgtaatgggcctctttagatttgacgccccctgttttggaaatatagttgatnccgtgccttccctgctc

SEQ ID NO: 2071 - DNA, 746 bp, Zea mays
  unsure (1)..(746): unsure at all n locations
  Clone ID: TF_ZmC584870_1
acctaaagaatccaattccccaccagccccctcgcaccttccggcgaatcaccgcacctctccccggcgaagcagcagcgtccgatggcccccaaggcggagaagaagccggctgccgcggagaagactccggcggccgagaagaccaccgcgggcaagaagcccaaggccgagaagcggccgcccaagtccaaggagggcggcgccgacaagaggaagaagaaggccaagaagagcgtggagacgtacaagatctacatcttcaaggtgctgaagcaggtgcacccggacatcggtatctcctccaaggccatgtccatcatgaactccttcatcaacgacatcttcgagaagctcgccggcgagtccgccaagctcgcccgctacaacaagaagcccaccatcacctccagggagatccagacctccgtccgcctcgtcctcccgggcgagctcgccaagcacgccgtctctgagggcaccaaggccgtcaccaagttcacatcctcttagataggctgttctctgtcttcgtggttgatcgatggttctctgtaatgctcgttagctgttcggaccatgtcgctgtgtaacttgtgctggtgttgtggcaacatactgtttcatcatctcgtgaatcagtaactttgcttannaannaaaaaaaaaaanaaaaaanaanaaaaannnnnttggatggctgattctccaccggtacatcccgtcaccggtaaaaaaacttattc

SEQ ID NO: 2072 - DNA, 845 bp, Zea mays
  Clone ID: TF_ZmC369_137
cattgggtacctcgaggccggccgggagccaccgaaatcttccgtctccaaatcctcctagcgaattcaccacagcttctcaccaccgctaccttcgatggcacccaaggcggacaagaagccggcggcgaagaagcctgcagaggaggagcccgcgacagagaaggcggagaaggctccggcggggaagaagcccaaggccgagaagcgcctcccggcgggcaagtccgccggtaaggagggcggcgagggcaagaaggggaaaaagaaagcgaagaagtccgtggagacctacaagatctacatcttcaaggtgctgaagcaggtgcaccccgacatcggcatctcgtccaaggccatgtccatcatgaactccttcatcaacgacatcttcgagaagctcgcggccgagtccgccaagctggcgcgctataacaagaagcccaccgtcacctcccgcgagatccagacctcggtgcgcctcgtcctccccggcgagcttgccaagcacgccgtctccgagggcaccaaggccgtcaccaagttcacctcttcttaaggttcatagtactaggctgggtggtgttggtagacgtggctcaatttatctggtaggggtagtgatggatgatatgatctgcgtctatttgagctgttaagactgatgaacattgttccacgtcacgttgtgtttgatggacattgttccagatcacgttgttaagactgcagaactgtgtctgacatggaacaagtatgatacttgaaatttctgtgagtgcattgaaacgtgaaatctgcagtccttaaaaaaaaaatctgaaataaaaaaaaaaaaaaaaaaa

SEQ ID NO: 2073 - DNA, 706 bp, Zea mays
  Clone ID: TF_ZmC369_69
cattgggtacctcgaggccggccgggagccaccgaaatcttccgtctccaatcctcctagcgaattcaccacagcttctcaccaccgctaccttcgatggcacccaaggcggacaagaagccggcggcgaagaagcctgcagaggagcccgcgacagagaaggcggagaaggctccggcggggaagaagcccaaggccgagaagcgcctcccggcgggcaagtccgccggtaaggagggcggcgagggcaagaaggggaaaaagaaagcgaagaagtccgtggagacctacaagatctacatcttcaaggtgctgaagcaggtgcaccccgacatcggcatctcgtccaaggccatgtccatcatgaactccttcatcaacgacatcttcgagaagctcgcggccgagtccgccaagctggcgcgctataacaagaagcccaccgtcacctcccgcgagatccagacctcggtgcgcctcgtcctccccggcgagcttgccaagcacgccgtctccgagggcaccaaggccgtcaccaagttcacctcttcttaaggttcatagtactaggctgggtggtgttggtagacgtggctcaatttatctggtaggggtagtgatggatgatatgatctgcgtctatttgagctgttaagactgatgaacattgttccacggcaaaaaaaaaaaaaaaaaaggggcggcc

SEQ ID NO: 2074 - DNA, 554 bp, Zea mays
  Clone ID: TF_ZmC1223464_1
ttttttttttttttttagcggaaacaaattaatttcagaaagcgacaaatacaaaagtagcaatgacaaggaagagaactaaggagcgaggtggaaacaatcaaacttcctgagagactttggaagttttgtcctttgatttggcaggaaggagctccgagtgaatctgaggaatgacacctccctgtgagatatctttttggcctaggagcttgttcaactcctcgtcgttccggatagcaagttggagatgacgggggatgatacgggacttcttgttatcacgagcagcgttgccagccaattcgaggatttcggcggccagatactccaagacggcagccaggtacacaggggcaccggctccaacgcgttgggcgtagttacccttccggagaagtcggtggatacgaccgacagggaattggagaccagccttggacgatcgggattggctcgcggctttgtcgcctccggctttgcctcctttaccaccagacatgctgtgtgttgggttgttttggtttgggttaggtttgtgggtggttgggctc

SEQ ID NO: 2075 - DNA, 385 bp, Zea mays
  unsure (1)..(385): unsure at all n locations
  Clone ID: TF_LIB4729-091-Q1-K1-H12
ctcccgccggcccgcctcccctctcccgcgacncgcaccccgnctcccggttgaaccaaatccctcgcctcatcaccccagcgccagccgccctatcgccctgtcgcgcgaagcaatggcgccccccggcaaggcgattggcgctggcgccgcgaacaaggcgacgtccaggagctccaaggctgggctgccgttcccagccggcaggatcgcccgtttcctcaaggccggcaagcacgccgagggcgtgggcgccggagccgctgccacggtgggcgctgaccaggagagcccgggggcggcggccagggggcgcggggggaacggagacggggggagggggcggggggggaggcggggggggggnnggggggggggggcgggg

SEQ ID NO: 2076 - DNA, 758 bp, Zea mays
  Clone ID: TF_ZmC114_32
tctcgattttttccggcctcccattcctcgcgcggcgaccacccgattcgaagcgtgcggagagaccgaagaagcgggagagatggctcgtaccaagcagactgctcgcaagtccacgggagggaaggctcccaggaagcagcttgccaccaaggctgcccgtaagtctgcccccaccactggtggagtgaagaagcctcaccgctaccgccctggaactgttgccctccgtgagatccgcaagtatcagaagagcactgagctgctgatcaggaagctgcccttccagaggctgctgaggcataccttgttggcctgtttgaggacaccaacctgtgcgccatccatgctaagcgtgtgaccatcatgccaaaggacattcagctggcaaggaggatccgcggcgagagggcctaatcgccacctcaaacatcgtgacaaaaacatgaagtcctggggttattgttaatctggtgccattgtaaggacatatgagtagggtttgttttgtggatcgcaagtttctcttctgctactgttgctgctacctttgctggtgttattgctagggtcgaatacttaagttaactatgcgctgacagtctggactagcagtgttatgtgcgctgctggaccttgcgcgcaatgctgtggccgatttgttcgttaatgtcaagaattgtgttacagtgcgtgtatatatgtgtgtcgccgcatttttatttttgagaattgttttaagctgatgtttcgtcacc

SEQ ID NO: 2077 - DNA, 321 bp, Zea mays
  Clone ID: TF_LIB148-002-Q1-E1-B12
tgtagttgtacatatatcaacgcaagaccacggcatcgaaggcgctgctgatgcataccttgttggcctgtttgaggacaccaacctgtgccccatccatgctaagcgtgtcaccatcatgcccaaggacattcacctggcaatgaggatccgccgcgagagggcctaatcgacacctcgaacatcgtgacaaaaaaatgacctcctgcggttattgttaatctgatgccattgtgatgacatatgagtagggtttgttttgtggatctcaggtcaaaacggcggtccaccagtccaggtcgattcgggaaggcactctca

SEQ ID NO: 2078 - DNA, 328 bp, Zea mays
  Clone ID: TF_LIB3206-021-P1-N1-D8
aaaaaacacggcatttcctattccattgggaatgacataaagcaacttgggcggagcgaatacacagccaatcacattggccggttacaacctacacatgacaacatcggatccgccttcaaaccctatgcctttttgggggactgggcgggctttttgggcgacttggcctccttgctcccgccggtggacgccttttccgccgtttttttgggcaacaagaccggattgatgttgggcaacaccccgccgcgggcgatggtcacgccggtcaaaaacttcccgagctcctcgtgattggggatcgccagcaacacgtggcgcggga

SEQ ID NO: 2079 - DNA, 517 bp, Zea mays
  Clone ID: TF_LIB4730-061-R1-K1-A9
ggaaggagagaagcaaggagagcgtgccgagtcgcaaggattggcgggccacaggaagatagttggatgttgaggaccgtgaaggctgagctcacagatccccgtcgggcgatgggcacgctacattgaagaagggcacggtacgcgcagggtggcgggaccggtgcccccgtttacctcgccgatgtcctggaatacgtcttcgctgaggttctggagctcgtcggtaatgctgtcagggacaacatgaagactcgcattattccgagccacgtgcttctgacgatccggaacgacgaggagatcggtaagctgctgtgcggcgtgaccatagctcacggaggggtgctcaccaatatcaaccctgatatgctgcccaagaagactgagagagaggcgtacagtgtcagatagcaaggaggcaaagtcaaccaagaaggccgccaagtcccctaagaaggcatagactgactgtccggagtgatctgatgcttaacatgaccttgctaccagtatg

SEQ ID NO: 2080 - DNA, 528 bp, Zea mays
  Clone ID: TF_jC-zmX700552707a1
attcggctcgagagcgaatccttagcattttattcgcaggctgtgctgcatcacaccgccgggaaggcccattagccgcatcgatggctcctaaggcggataagaagtcggctgcaaagaagccagtggtggatgagcctggtggcgacaaggcccacggggggaagaagccaaaggccgagaagtgcctcccggcggccaagtaggccggcaatgatggcggctacaagaagggtaagaagaaggctacgaagtggggggagacctacaagatctacaccttcaaggtgctgaagcaggtccacccagacatcggcatatcttccaaggccatgtccatcaggaactccttcatcgacgacatcttcgacatgctcgccggcgaggctgccaagcttgcgcgctacaacaggaagcccaccatcacctgtggggagattcaaacctcaggccgccttgtcctggccggcgagctcgccaagcacgcggtcttcgagggcaccatggccgacactaagttcacatcat

SEQ ID NO: 2081 - DNA, 1044 bp, Zea mays
  Clone ID: TF_ZmC369_144
caaaaaaaaaaaaaaaaaaaaaaaaaaaaaaaccgaaatcttccgtccccaaatcgaccgagcgaattcaccacagcttctcaccaccgctaccttcgatggcacccaaggcggacaagaagccggcggcgaagaagcctgcagaggaggagcccgcgacagagaaggcggagaaggctccggcggggaagaagcccaaggccgagaagcgcctcccggcgggcaagtccgccggtaaggagggcggcgagggcaagaaggggaaaaagaaagcgaagaagtccgtggagacctacaagatctacatcttcaaggtgctgaagcaggtgcaccccgacatcggcatctcgtccaaggccatgtccatcatgaactccttcatcaacgacatcttcgagaagctcgcggccgagtccgccaagctggcgcgctataacaagaagcccaccgtcacctcccgcgagatccagacctcggtgcgcctcgtcctccccggtgagcttgccaagcacgccgtctccgagggcaccaaggccgtcaccaagttcacttcttcttaggctcatagtactaggctgggtggtgttggtagacgtggctcaatttatctggtaggggtagtgatggatgatatgatctgcgtctatttgagctgttaagactgatgaacattgttccacgtcacgttgtgtttgatgggcattgttccagatcacgttgttaagactgcagaactgtgtctgacatggaacaagtatgatacttgaaatttctgtgagtgcattgaaacgtgaaatctgcagcccttgaaaaaaaaatctgaaatacaactgcgtgttcatgatcaagttcaggatgcaggcacattttgtatcctatcattagtgctatttggtttatatatttataatgtaatagctggctaatatgataatgttaaattatatttctttaaaaaaaaaaaaaaaaaaaaaaaaaaaaaaaaaaaaaaaaaaaaaaaaaaaaaaaaaaaaaaaaaaaaaaaaaaaaaaaaggggcggccgc

SEQ ID NO: 2082 - DNA, 993 bp, Zea mays
  Clone ID: TF_ZmC369_65
aattaccagatttccaagttcctaaagaatgagaataatagcaagcggagagatacaactatattccacaacagggacatcaaatctaagaggaccattacaatccggcgcgccggatttatagagcaggcaagctagctactaggcgggtagggtgggggactggggaaaggacacagcaaagaacccttctaacagatccgcggatcccgcagcgcgctcagttgctggtgaacttggtgacggccttggttccctcggagacggcgtgcttggcgagctctccggggaggactaggcgcacggaggtctggatctcgcgggacgtgatgcggacgcgtgggcggacgcgtgggcggacgcgtgggcggcggcgaagaagcctgcagaggaggagcccgcggcagagaaggcggagaaggctccggcggggaagaagcccaaggccgagaagcgcctcccggcgggcaagtccgccggtaaggagggcggcgagggcaagaaggggaaaaagaaagcgaagaagtccgtggagacctacaagatctacatcttcaaggtgctgaagcaggtgcaccccgacatcggcatctcgtccaaggccatgtccatcatgaactccttcatcaacgacatcttcgagaagctcgcggccgagtccgccaagctggcgcgctataacaagaagcccaccgtcacctcccgcgagatccagacctcggtgcgcctcgtcctccccggtgagcttgccaagcacgccgtctccgagggcaccaaggccgtcaccaagttcacttcttcttaggctcatagtactaggctgggtggtgttggtagacgtggctcaatttatctggtaggggtagtgatggatgatatgatctgcgtctatttgagctgttaagactgatgaacattgttccacgtcacgttgtgtttgatgggcattgttccagatcacgttgctaaaaaaaaaaaaaaaaaaggccccta

SEQ ID NO: 2083 - DNA, 638 bp, Zea mays
  Clone ID: TF_ZmC584893_1
ctcgaatcctccagtcctcccctcgcgccccaaacaacccgatccctcgtcctctccacctccgccgaaaccgccatggcgcccaaggccgagaagaagcccgccgcggagaagaagccggtggagacggagaagaagcccaaggccgagaagcgcgtgcccggcaaggacggcggcgccgacaagaagaagaagaaggccaagaagagcgtcgagacgtacaagatctacatcttcaaggtgctcaagcaggtgcaccccgacatcggcatctcctccaaggccatgtccatcatgaactccttcatcaacgacatcttcgagaagctcgccggcgagtcggccaagctggcgcgctacaacaagaagcccaccatcacctcccgggagatccagaccgccgtgcgtctcgtcctccccggcgagctcgccaagcacgccgtctccgagggcaccaaggccgtcaccaagttcacctcctcttagattgctgccgtccgtccgagtctgtttagtatggtctggtctgaatttgttcccgtgttaaaacatattacagggggttagattcccctatcgaacagtgtaaaatgagtccgatttgctgaatcaaagaatcatccagtggttgtctcagt

SEQ ID NO: 2084 - DNA, 1411 bp, Zea mays
  Clone ID: TF_ZmC21094_1
ctgctatctatctcttttctgaaggaaaaaaaagttcagcgcgcagttaagcatagcaggacgaccacgacgatgtatcacccgcagtgcgagctcctgacgatggcgcacgaaacgccggacctggacgccggccagccgcacctaaccgtctccggcgtcgccagcatcccggcagagctgagcttccacctgctgcactcgctcgacgccgcggcggcggtcaatcccgtcacggcgccgccgcagtccaccatcgactacttcctcggcggcgccgatccccaccagcaggccatgcagtacgagccgctgccgcccgccgcgggcggccaccaccagtacaccatggacatgttccgcgactactgcgacggccactaccccaccgccgagccgtacatccgcgggacaatgactggagccctcgtgttcggggccaccgacgacgacgactcggccgctgcctacatgcccggggggcactttgagacctccccgccgccgccacgcgccaccggccgcggcaggaagcggggcagggcgctgggcggcggcttccatgcggtgctggccaacggcgtcgagaagaaggagaagcagcgccggctgcggctcaccgagaagtttacggccctcatgcacctcatacccaacgttacgaagactgatagggcgacggtgatctcggacgcgatcgagtacatccaggagctggggaggacggtggaggagctgacgctgctggtggagaagaagcggcgtcggagggagctgcagggggacgtcgtggacgcggcgccggctgcggtggttgctgccgccggtgaggcggagagctcggagggcgaggtggctcctccgccgccggccgtgccgcggcagccgatccgcagcacgtacatccagcgacggagcaaggacacgtccgtggacgtgcggatcgtggaggaggacgtgaacatcaagctcaccaagcgccggcgcgacgggtgcctcgcagccgcgtcgcgcgcgctggacgacctccgccttgacctcgtccacctctccggcggcaagatcggtgactgtcaaatctacatgttcaacaccaagattcacaaggggtcttcagtgtttgcgagtgcagtggccggtaggctgatggaagtggtggacgagtactaggctaccatgcacttgaatttctagctagctctacgtaccgcgctgctatgaatctagctatagcgtttcttggatgaaagactagttagttgttaccttctatctttgcttcaattaaatccgcttgctcgttacagactgagtttgtttctaaatgtcaaggttgttttggtcaaattgaataaattggcacactggcctgtgaggttattatatatatttatgtgtttattactggtct

SEQ ID NO: 2085 - DNA, 1015 bp, Zea mays
  Clone ID: TF_ZmC3534_3
gctcaacttaaatagaatatgaacacaggcaagtgtttagaggatggcaaaaggaagggttctggagaggacagttcatcactacgttctctaggtgaaaccagtgcattgcagcgagaagtcagcatggagtgtgctgatgagaaggcgggtgatgctagagccaagagagaggactacgtgcatgtccgggcaaagcgcggccaagccaccaacagccacagccttgcagaaagagtagtttctacctcttaagcaacatttttctttgagcgacatagttaacgctccgattgaaatgcctcaattctgttgcttacggtagcatgcctgtccgaactgcagtttcgaagggaaaagataaatgaaaggatgaagcttcttcaagaccttgtcccaggttgcaacaagattacaggcaaggccatgatgcttgatgagatcataaactatgtgcaatctctgcagcgacagattgagttcctttcgatgaagctctcagcgatcggccctgggctcaactgtgacctcgacctacaagatatcctctgcacacaagatgctagctctgcttttccaggatacaacctgcaaacgagcaatgtgcatattaatctgtacagagcatctgaagaaggtttctcacacaggaacaggatcatccctagtccagcaaatgttcacgtgacaagaaacgcccagctatctgcatttcctcagagaggagttatctggaacgaggagctttgcagcatcgcttcagatagaaatgctgattcaatgaaagtggagtgacattgtggcaactgacaagccggcagtttaatggtgatcaactctgaaagtcttgacaagttgggttgctactgaggtgcctttcaagttgcagtggtagcacgacttctcttgggatgagctagttaacttttggtatttgagaggaattctggtgtgtccacccatcctgtacagttattagaataactaatcaaaggagtactgtgaaattcttgcg

SEQ ID NO: 2086 - DNA, 1409 bp, Zea mays
  Clone ID: TF_ZmC14919_2
ctgatcccacactgcaacaagactgacaaagcatctatactagacgagacgattgagtacctgaagtccctccaaatgcaagttcagatcatgtggatgacttctgggatggtgccaatggtgtttcctggtgctcaccaatacatgccaccaatggctctaggcatgaattcaggttgcatccctgcagcacaaggcctaagtcagatgcgaagattaccatacatgaaccaccccatgccaaatcatatccctctgaactcgtctccagctatgaatccaatgaatccactgaacactgtgaaccagttccaaaacggtcacctcagggaggtaccaagacctggaccccatgtttatggacaccaaatagcacaagccgaagaacacaacagaatactggaagtggcagctagtactgttataccaacttctaaggcagggcaaccacctacttttgatggagtttagagtggtcataaatcctgtaaggtgttgcactgataatctgacgatgcatagcgttggtaccttgagttgtatatctgtgcagtagtgtcagcagcatactctttgacatctaagcttggttctagagttattaataggagcctagtataggtaacaagattgcaagacaactacctgtctaccaccatattctctgtggaagaactggagctgcatactgctgtgcagtacagtgttcaagagagaatggaacagatgagtatttgaagcacaacctgaacaggaaatggtcttctttctggcaatcgctgaaaatactgacgtgatgaggagcagattgcatccctatggctgtattgtaatatatctacatcaacatggcaatacgtgtctggacttggatgctacagttacatgtaaatgcagagttgcaggtttggtcggcaggagcatacatcttcacacgacgtggacagtggactacgggccgagacagtggcccaggcacgacacggctcttatatcaggctagcccagacactatttaatgtgtcatgcctcaggccggtccacgagacacggctgaccatctataccacatactctactcctccacggcaacagttcagcatcctcctggcaatggcaacggttcagcgtcctccatggcaactgtgcggagccctagactagacctgctgcaagatggcagaccctcatcttcagagcggattgggtttggatcccctgtactcctccttgctcccctgttgctttcagttcgtctcacggttattgttcagacttcagatacatatgtcgttgtgcctggttggctgtatctggacatcagtttccgtgttgctactattttcccccctgtatttctttataacggacattcaccttataaatatacacacaaaacctctatttct

SEQ ID NO: 2087 - DNA, 1556 bp, Zea mays
  Clone ID: TF_ZmC25517_1
gcccccgggaaacaagaaaaagaaaaggccgggccggaggggcaaagctgtaaacttgagctggaagcactgcgcccctgtcttcacaccagtttgctgtttctttttcaccccgagcgcgagaactagggcgaccgcagcactacgcccctgctgcccatgtcttcgtcggggcctttgccggcgaccggaacccaccacggcagtcaaagggcagagtgtaaatcccagggttccacttctgcacgcaaggtacaaaaggctgatcgtgagaagatgcgaagagataaattaaacgagcagttccaggacttgggaaatgcacttgatccagaccgtcccaggaatgataaggcaactatacttggtgacacaatccagatgctgaaagatttgactactcaggtgaacaagctgaaagctgaatacacgtcactttctgaagaagcgtgtgagttaacacaagaaaagaatgagcttagagatgagaaagcttcactgaaatctgaggttgataatttgaataatcagtatcagcaacggatgcgggtgctatacccatgggttggaatggagccttctgttgtcatggggccacctcctgcatatccctacccagtcccagttccaataccctctggtgctgtacccatgcatccgcagttgcaaacataccacttcttccacagtcaagcttctggaaccatcccaaacacatgcatcccttacatggcatatacacaaccctgccatcctcccactgatcagccgtctaaccaacttaatactccagttgcccattcaagtagtcataggtctaactctccagctcaagactgtagaagcaagtcatctacattgcagcaaccaagctgtggagtgagaagcagtgatgctggtgatattgcaactgatctggaattgaagactcctggttcttcatgtcaatcacatgcagagattgctaacaacgattcctcttcggatttgaaaacaaagaagcattgcataaagcagattaatgattgcactctcactgaaagcagtagttcaagcagatgctcttccaatggtcccccagatgtttctaatagtgctattgatgaataagctgcttgacgaccgattaacatacaaaacgttgactggtatagattgagaaaagatctcgtttaaccacccataagtgagctcccaactctatatgcagtgtaatttgctattgttgctagcttatttacatagaagtggtcagattctaatgtgatgactcacaaattgggaggcgtggactttgtagataatctcatgattgttagtggtaaaagtttggtggaagggaaaaaaggagagaacaaaatcatagacagcagcatctatggtggttcggtagggactccaggactaggtatggtgagcattgtcagtgttcggcatggcaggtagatattcataataactggattctagtaccattgcatagttcgtcctagactggcattttacataaatttctgtgtcaaatatgtaaataactcgagggcggataactggat

SEQ ID NO: 2088 - DNA, 1657 bp, Zea mays
  Clone ID: TF_ZmC6825_1
aattcggcacgagggctacagcaaagtcgtgttaaaagtcgcccatctgcacagctatccattgggagtagatcgaggaccatcctcgctaccctgcaggccggcactgcactgcactgcagtctacagaactcgtcagtcacagatcggtgcaggcggtctgcacctgcatcacctaaccaattcctcgattagtctgctgttgcgatttgcgaggcaggtcagctgcaatctttttgcagcagccactaaacctgtaccaagtcttcttgcctgagggcagaggcaggctccgtcagtcacgccggcggcgtacagatcatggaggactttggcggctggaatatgcagtatgcagcagagctatgcctgccaagccgccgggacgacgacgacgacggcctcctcggtgatttcctaggcggcggcggtttggacatccgttctgaccatggcggcctcaacctgccctcgtcgcaccctgctgtccagaaccttgtgccctgccacggcggcgtgagtctttccgtttccgacgccttcatgggcctggacacggcggatatgctcgctagcgtcaccggcgcactggactgcagcctcctcgacacgtttgcttgcggttcggacgccgtcgtcgtcgccgaggagcccgccgcgcagcccaccgcgtcgagcaacgccttctccggatacagcagcaccacgggcggcaattacggcaacatctcctccggcgagtccaacacgtacggcggcagcggcggaggccatgacacggaggttgcgtcgccgacctgcgcctcgaagcggaagctggccggcaagtaccctgcaatagccgcgtcggcctcggccacagccacgacgacaacggcggaggggcaggttgcagccccgcggcgtggcacgaagcgcgactccgcgacgtcgtcttcgtcgaccagcgccacggtcgccgggcatggcggcggcaaccatgcggccggaggaggcgggtcgtcatcggtcggcgacgggaacgggtacgagccggactcggaggcaatagcgcaggtgaaggagatgatctaccgcgcggcggcgatgcggccggtgcaccagctcgtgtgcggggccgccggcggcgagccgccgtcttcgtcccagaacaagccgcggcgcaggaacgtgcggatctcgagcgacccgcagacggtggcggcgcggctgcggcgggagagggtgagcgagcgcctgcgcgtgctgcagcggctcgtgccgggcggtagccggatggacactgcgtccatgctcgacgaggcggccggctatctcaagttcctcaagtcgcaggtcaaggcactggagagggcaaaccctagtagtaatggtggctacaacgacagcagcttcctgccgcagaattacacggggtgcctctgtgtcgacggtggcaccagtgttgcctttggaagcgatggcgccattgggggctacgtaaaaccaggtaggaacatgcaccggtagcgatgcaataatgtaaccattgatgcgagtgagcgatatatgagagaagtactgcagtactgctactggattttgagtttaataaggctttactgtatttctgagtaataataatcaaaacgatttgatttaaaaaaaaaaaaaaaaa

SEQ ID NO: 2089 - DNA, 1391 bp, Zea mays
  unsure (1)..(1391): unsure at all n locations
  Clone ID: TF_ZmC35411_1
aattcgaaggattaatctcatcccaactttatacgaatgttcttatcaagagtgtggatccatatataaataaagtattcaacgcagatagcagatccaccaacgctgaaacgcatgctcagcctccattgaccaaagcctgcctcggacctccactttggaaaaatggagaaggaagaacatcgctatcaacatcatcttccatttcatcctgtatctaaactttgtcaaccatttgcgcaggccgcagacacactcatacatcagtcccttttgattagtccatatacacccactaccagaaaaagcagcccccccaccacaaagtgtatggctagctagtgcactacagacccggaaagaaacattatgagagcatgccagactcttttagcagctccctctctccatcactcacactcatagggggcattgaaagatggaggagcatgagcaggttattgcttaccatatccttgcaattaaagcacctttgaacaaaagatcggaaagggaaaggcgatatcatataccatttggtacaacttcaagtggagaggatcttttaggtcttttttccctgcctcctccttgttagtgaatcgaagccggcatttctatcttacgctttgattggtaggttaacgcctgctaacagccccgaaaggatgcaagttacgcttgctgccactatactaggaaggagtgttgggttctggttttactggttgtccgtcctgcgaatgttgcgtgtcatagattgccatggcgagcgagatgggcatcatgcagagtgctttggactggaggaattgcatcgctgccccaatgtcttcttccatcagctttgcgatctgtctttctgtgccgtccgttgaccacttctcccaaatctgctgtttgctcccactatcacttgcttcccccttaactgaaagtgggatatcagcgaccagctgtgccacagcaccagcaccacccagcctgctcatgcttagaaccttgacttgaagcctcagaaacttcacataatcgaggatctcatctagcataactgctctatctgtcttgtttctcgtgcccaccaattcctgtagggccctcatcctttntgctattctctctcttcttagcctctccgcgatgctgtgggggtcggtcgcctgcccacgccgcgcccgcacctttggcctcggtgccggcggttgtggcccgactgccgcaccgccttgcttcggctgctgcgcgtggaacacctgggtaggcggggtggcacggaggtggggtggctgcacaccgccgccgaacaccggcgggaagagcccagggagctgtatagcctcccggtccgccttgccaccgtcggcgtgcttcccacttccggaagcctc

SEQ ID NO: 2090 - DNA, 309 bp, Zea mays
  Clone ID: TF_700085722H1
tggtggactgcgccgcgggcctcggggcctgcaatgtaggatcccggcctgtcggagagctgcggcgcgttcggcgctggcgctggcgctgcgccgtagccggccctggcgtccaagaataagagggtcgaggggaagccgtccatgaacctgatggccgatcgctgctgccgtaagcgcctcaacgaccgcctctccattctacgctccgtcgtgccctagattagcaagatggaccggacttcgattctgggcttcacgatctactacattaaggagctgctggtgagtatcaatctgctttaggaa

SEQ ID NO: 2091 - DNA, 503 bp, Zea mays
  Clone ID: TF_jC-zmXLIB3527P075bd10a1
gcgaggcgtggctgcgcgactcacccacggagcattgccgagagggtcagttcatctactcgatccttcggtccttcccaaacgattcgctaaaaaaaagcacggcgcaatatatggtgccacactctgccagctttgatgctagctggatgtcagcacagaaaccaatttcgttttccttgttcgctggcgtacgttcaggaaagaaggacgaggatcagcaagaggctgaagaagctgcaagacctcgtgcccaacatggacaagcaaacgaatacgtcggacatgttggaccttgctgtggagtacatcaaagagctcaaggaccaagttgagaagctaaaacacgaccaagcaaactgctgttgcctaggcaacaagagctgctgctgatgctggagaagcagacggaggagggtttttacgccgtaacaatgtgactgttaaaccagagctgttgcttcaggagaccaggccgcgggcagaagtgcgtgacatgtgga

SEQ ID NO: 2092 - DNA, 680 bp, Zea mays
  Clone ID: TF_LIB5116-051-A1-PF1-E3
aattctccgcaggaggatggcttcttctactcacaccatggcgcgtgccatgccgattccagtcaagggacggaatgtaaagcccagagttcggttaccgctcgcaaggttcacaaggctgaccgtgagagaatgcgacgagacaaattgaatgagcagttcctggaattgggaaccacacttgacccagatcggcccaggcatgataaggctactattcttggtgatacagttcagatgctcaaggattagacttctcaagtaaacaagcttaaagctgaatactcttctctctttgaagaagaatgtgagttgactaaagaaaaaaatgagcttcggagtgaaaaagcttcgctgaagtctgatgtggataatttgaacaaccactatcagcaacgtattcaaatgttatacctgtgcactacaatggagccttctgtactcgttgggccacctccatcatatcccttctcgctccaagttcctatacccgctggtgctgtaactatgcatccacagcttcagccatgcccgttcttccaaaatcaaacttcaggagccatctcgaatccatgtactccttacatggcatacagtcaatcctgtcaggctcctagtgatcaaccatctagccagttcagtactccagttctgctttcagtagtaatcgatctcactct

SEQ ID NO: 2093 - DNA, 1207 bp, Zea mays
  Clone ID: TF_ZmC4799_1
ggcgagtgacacacgcggcagtgcggcacgcctactatcttgcgcgcgtgcggccggccggccatggatccgttctacttcggcccggaccagctggatgccgccgccgccgtcgacgaggactacctgacgagcctcggcctggtggtcctctcgccggagccagtggcgccgttgcctggcggcgcatttgaggcgtaccagcggcgtgcgccggcgttgctggagcactccctgcagacgatgagccggcggtacagtggagagcagaacatgcaccggaggatgttcagttacctgagacgcgtagctcatgacgccggcgccgccgtggtggcggccccagcgttcccggcgcccgcgcgcgagagcgttcccggcttcggggttggcacgtcgcaggcgccgcgaagctcgcggttccggaacatcatgcgcgagcggctgcggcgggagcgcctcagccagggattcgccgacctccacgctcttctgccccacggcgcgtcgtcaaaaggtggcaagaacgacatcgtcggcgcggcggccggctacgtcagggagctggtggccaggaaggagcagctcagcgccaggaaccaggagctcctagagaaggccgcgagccgctggaagcagcagggaggcacgaggagtggtgtcgggcggggcatggtggtgaaggtgcaagccgagagccaagaccattcgatggcgcttggtgcgtttgtgagggtgctccagcggctcaaggccatggaggccgggctgcaggtgacggcgatccggacgcgcttctccgcgggaggcgtgtggatgaacatcggagtggaaggccaggtatccgcttgtgatgtggacaagtcaataacaaacgccttgatagagctggaggggaacgatccaagaagcagcaagcccagattcagctgtcaagtcgaaactgtccagatggattgatcttgtttagttgtcgatcaaaatatagtagcagctagagatgataatctatctgctgccgctttaaaccaattattcagaatgctgcagctataatttataggaacaaaatactatagaaaagtaaaggctggtggattaaagccacaacgaagaggctggatctttttccaacatctgctgaaacacaagcggaagaattcaatttataccattcttaaacatggtggatctaagaaacaccact

SEQ ID NO: 2094 - DNA, 782 bp, Zea mays
  unsure (1)..(782): unsure at all n locations
  Clone ID: TF_LIB4729-053-R1-K1-G9
ccggaccgccaccccaggcgcccaccgtcagcgtcctccccaccttcaccgcctcctacgcccagccgcaagcgcctcaacgaccgcctctccatgctacgctccgtcgtgcccaagatcagcaagatggaccggacgtcgatcctgggcgacacgatcgactacatgaaggagctgctggagaggatcaagctgctgcaggaagagatcgggcagcagcaggaggaggcgccaggcatgctcagcgtcttccgggagctcaaccccaacgagatggtggccaggaacacccccaagttcgacgtggagcggaaggagggcggcgacacccgggtggagatctactgcgccgccaagccggggctgctgctgtccacggtgagcacgctggacacgctagggctcgacatccagcagtgcgtcgtcagctgcttcaacgacttcggcatgcacgcctcctgctccgagatgcagagggaaatgatcagcgccgacgcgataaagcaggagctgttcaagaacgctggctatggcggaggctgcttgtagaggggcatgtcatcatggcatgggaggaagaagaagaagaggcagcaataaattaatcttaagcagctgtgggagcagcagtagtagtatcagttcaggtccagtagcgggaaaggcaggcagggaanagatttgggaggcctttntgcaatccgtctcccccatcataacccacttcgatctatccatgttagcagtaccgtgtccgttcgtcctatagcatcatgcaggat

SEQ ID NO: 2095 - DNA, 875 bp, Zea mays
  unsure (1)..(875): unsure at all n locations
  Clone ID: TF_ZmC8592_3
tgctttgctgctggnaaagttcagcagacttgctctgcagttgttgaatgacatggcatgttgttcctttcacctttcttattattatgtaaaaggatcttttttcaattcaagtttttgtgcctctaacagtgctagagaaaagatgagatggaactttgatgataaggtctttgaagcctcaaacagagtcttgaacattgtcttggatgctgtgaacaaaataaggtctctgaagtctccagtagatacaaatgaaagatggtctgcttttgcacttttccgaggccaagagatataacatatacgacaatggcgatgaaatgatggaagcaaatgtgcaaaccaagctggtgctgtgtgaatttgtgatgagcaatccaagtgatacaacacaacctctatccaatactttgccttcgtccttcaagacttccgcaagaggagcaactcagtccacaagtagcaaagaaaagctcgtctactcatagtaagtgtggaagtgggcagctatgtgaacaccaatgatgttttcaaggagcccaatgatgtcttcaaggagcctggcagcaataaacgtttgaggtcaggatccaatgatgtgcatgtgccaacatctaaagcttctagggaaaaattgaggaggaacaagttgaatgacaggtttcttgaattggggtctacattagaaccagggaagccagtaaaagctgacaaagctgctatcctaagtgatgttactctcatggttattcagcttcgttcagaagcacagcagctgaaagaaactaatggtagtcttgaagaaaagatcaaagaactcaaggttattcagccttttcttttgaacactgttaacccacagataatgcatt

SEQ ID NO: 2096 - DNA, 1037 bp, Zea mays
  Clone ID: TF_ZmC2238_2
aaaaaaaaaccactcatcaggcgagacgcgagaagatcaatgcgaggatggagctgctcaaggagctggtccccggctgcagtaaggtatcaggaacagcgttggtgctagatgagatcatcaatcatgttcagtctctccaaagtacttgtcaatgaggcttgcaactgtaaacccgaggggcgattttggtgggctagatagctttctgaccacggagataaatgtatcattagagtatcatggctggcccacatattactttcaagaacgtcttggaaaatgttcagatatgcacacttgctgaagtttaagcatttctgagtgtggaaggatagcaagcttcaactgcaagaacggaatcgacttggagcaggtaacctggccagaaatgggtgttcatggagcaaggcagctgatgcaactccaacagcagttctggcatggtgatttggcgcatccacaccaagtggtttcacagtgggaaaagcggggggatggccatcctcccgtcttcagcaactccagtccctctctcttcggctatgatctaacaagctctggagcccagcaaaacccggcgagcaagctaaagaccgagctttgatcgacaacggtaaatagcatgtcaggggagcaagatggacatatggggggagggggacacagaatttcagcaaattgatcaaggcacaaacgagctgcgaatgaatgatggctgtggatggttgatgtcaagcccagcgaaatcaacattttcagagaggggatgtacatatagcgatagagatactgttggtgttgagctgaagacggggatgcatatgatgggcgaggataccgcagtcgttggagagacaggcaagccctgttgctatcgttgcagagatggccaagcgataccctggtttcgttactgatgatgatgacattcttagtgtatttctgacgactataatggcagtcttaaggttatatgggcagcattttttacgaacgcaagacatttcaacaagcattggaaaatttggcaaccc

SEQ ID NO: 2097 - DNA, 863 bp, Zea mays
  Clone ID: TF_LIB4746-137-Q2-K1-C12
cattgggtacctcgaggccggccggggtgatcatcgatacgttcacttcaccgttgttcacactgttcgtgtatgcccaccgaaccatcaagccatcgagccatcaaaccatcgtttttctcatccatcgtcgattctggaaatgaactataccggctacaccatcgggtccaattcagactactctcctgcgcaggagatgctgtcttatcccgaccaacttgggggcacgtacatccctgataactacacaacgtctcctggattctcgctcgaatcttttttcgaccaggctgcatttccatcagctgatgtgtcaacaatctttcccaaggaacagggccaatacgccacattcccttcaagtggtgcttccacaacaaatgacatggcgggcaacagaataagctcccactcgacttcgcgacacccatcggatgccgccccgcttggtaagctcgaacagttctcgttcggcttttccttcgacgcgctatcaaccgagccgtttgaaagagcctgcttctccccaaatacccacatatcctccaggactccttccctctgcggcgacgcatcggaaaagacctcatcaccctcatcacttactctttcgccatgcagtctcaagcgcgaatccccttcgtcccctgactcggcctcagaagaacaacctactcctccccggcctcaacggaagcgaggccgaccacgactcgaccgcaacgaaacgatatcaagcacttcctcgcctaagggcccgaagactggacgactgccgcacaatcaagttgaacgaaaatatcgcgagggtctcaatgcagagttggagagactacgcaaggcagtgccgacattgaccc

SEQ ID NO: 2098 - DNA, 981 bp, Zea mays
  Clone ID: TF_ZmC1150_1
ctcgatgatcaggcaaagcaactaacttctaaagccttgcgtctcgagaagggagaaagaagataagtgagaggatgaagcttcttcaagatcttgttcctggatgcagtaagatcactggcaaggcagtcatgctcgatgagattatcaactatgtgcagtcattgcaacgacaagtcgagttcttgtcaatgaaactcgcaactgttaaccccgagcttggctttgacattgagcagatcatatccaaacaaatgctgctttcacaagacagacatcttgctttctatggagtcgatccaggatcaagcggccttactggcccatttaaccaaggaatcatgcagccagcattgatgtgcaccatttctaatcccgccgatgttttgcacggagctattcacgacgtgtcaacaatgaaccagataccttctatgtgggaaggacttcagaatatgcctcagatgaacttcaaccctggcgtggcagccgatagcggcaccaacaactctggctccatgaagatcgagcagtgagcttctgtatagctccggaattgttctgtgaatcatgaatcgtcgaaaagcgctcacggggtggagtcttttttgtatagctggaggcctaaccattcatgccggtttccttctgttgcttccatactgtgcgacacattgtttatggtacggcaaatgaggatcatgtacagctggagctggaaaactgatgccactgtaaatttctgctgtgttttggcctgtggaaattgggatggaaacctattaccatccatgaaatccaatggcagaagcttgttggaactagggaccaggtgctgaatgctgatgggccaacatactagaatggaatagtaggtacaaaaatgcagagtttgaagcctctttgtcggaaattccatggaacatgcaatgtaaggtttcatcatgcaatggaaggaaactcattattgttaatcttccc

SEQ ID NO: 2099 - DNA, 976 bp, Zea mays
  unsure (1)..(976): unsure at all n locations
  Clone ID: TF_ZmC37662_1
ttttttttttttttttttaggaatcaatccagagctcaaatccataacaaccgaacagagcctgacacggatttgactggcacctgatttcgattcggaatttcatgagatagagctagctaactgaacagggcaaaagcatgtaccaagaactagaacagaccaggaaggagaacaccggcattattttctactctatcagactaattaaaggaagactagcaggtctgtaacggtctcaaactgttaaaagacgaaaaccaaccctgagactggaaacaccagttcatgtaaacttccccttagctacattgttctttcttttctctctctctctgtctctttttcagcggtcttgttgtcctagctcacggcatcacgccgccatggaacccagcggactgcaggagcacggacttgatctcctccggcagaagcccagggccttccttgcacagctcggccttgaagatgtccaaggaaaacccattgaagcaactgatgacagcttgctggacatcgaggccgaggccttcgatcgctctcatggcagagagcaggagaccgggcctgcgagcgcacagcatgtggatgttcactgcccggccttccctcatcctcacctcaaccctcggttgctgaaaagtagggctaggcaatgcgcttgggcacagctcttccttcacgcgagacggtaaagtgggcagcgtcggggtcagagggtggaagcttgtgggcgtcggaggcagcgaggccgtggaaggggacgactccagatcattctgaagatcgttgatcttctgcagcagctccttcaggtactcgattgcgtcgccgagaatggaggccctgtccatcttgctgatcttgggcacgacggaccggagcatgtagagccggtcattaagcttcttcccggcgacgggcgatactgccatgaggttattggccggcaaccccttcctcttaccctncc

SEQ ID NO: 2100 - DNA, 630 bp, Zea mays
  unsure (1)..(630): unsure at all n locations
  Clone ID: TF_LIB3279-183-Q1-K6-C7
cggacgcgtgggcgctctcgctctcgggtctcgggtctccaccagtctccgctctctggacgccggaaatgcagatggactcctacaactacaactacgccagtttcttccacgacgaggctccgtccttctacccgcacgttgccgtgccgccctccccggagctgcccatcggcctcattgcctcgccaggggagccggagccgcccttcgcgccgccgatgccggccgcgttccaggactacccgccgggcgccgtggccgtgggggtgggagcgccgttcgggggggccagcgtgcacgggcaggcgatcgacgcgatgggcgggggcgacgggcagcgcgagcagagcatggcaatggcggaggacggggaggagccgccgccgtcgagagcagccgcgggttccggcacatgatgcgggagcggcagcggcgcgagaagctgagccagagctacgccgacctgcacgcgctggtggcggcccggtccaggggcgacaagaactccatcgtgcaggccgccgccgtgtacatccacgagctgaggggcgcgcggaaccagctgcagcgcccggacgaggagctcaaggcccgcatcctgngccacgacgccgggcagcagtgcgt

SEQ ID NO: 2101 - DNA, 1882 bp, Zea mays
  Clone ID: TF_ZmC14684_1
ttccaagtacgtggaaccttctgagacggctatcctacgtgtacgctagcctccaaacttcaaagcgcgtctctgcagggctcgcacgtgctctttttccctcctcaccccgaattaacaatcgcgaaatcccaggtttgacctttcccccagccttgttgttccagtgggacccactacacccatgtcccttcttcctcgcacacgcgggacactgcacctgatcctctcaagccctcaacacgccaatttgaccacgtgaccgtaatcttgatccacgccctccttgcacttgcaccgcaccggtgcctatttaacccgcgctcgaacaactctctgccggcaacgcaaccaactcgctctcggctctcggctctcggctctccaccagtctccgctctctggacgccggaaatgcagatggactcctacaactacaactacgccagtttcttccacgacgaggctccgtccttctacccgcacgttgcggtgccgccctccccggagctgcccatcggcctcattgcctcgccaggggagccggagccgcccttcgcgccgccgatgccggcctcgttccaggactacacgggcgccgtgggcgtgggcgtaggggtgagagcgccgttcgggggtgccagcgtgcacgggcaggcgatcgacgcgctgggcgggggcgacgggcagcgcgagcagagcatggcaatggcggaggacggggaagagccggcgccccggcggcggcagccggcgggaggccccgccgccgccgccgtcgagagcagccgcgggttccggcacatgatgcgggagcggcagcggcgcgagaagctgagccagagctacgccgacctgcacgcgctggtggcggcccggtccaggggcgacaagaactccatcgtgcaggccgccgccgtgtacatccacgagctgaggggcgcgcgggaccagctgcagcgccggaacgaggagctcaaggcccgcatcctgggccacgacgccgggcagcagtgcgtcaaggtgcagttcgaggtggacgagccggcgtccgccatcgactccatgatcggggcgctcaggcgcctcaagggcatggacgtcagggccaggggcatccgctccagcctgtccgggcgcaggctgtggacggagatgaatgtggagaccacgatggcggccgacgaggtggaaaggggcgtggaggaggctctgctgcaggaagtggagaggaagcagcagcagcagcttggagctgggagcgccgcccctggttttccaggcccgtcatcgcacgtgcaaaacgtgttttgacacgcgatcctcccccacaacaagaagccaaaaagaaacatgaaccccgagcctcatttcttgattctttttttttaagaaccggatgcgcaaaacgagcatccgcgtccctggctctattgatttgtttttaagtagaaatcggtgctgtttgtgtacaagtgttgtcgcagcctccaagtgagattttgagcacgtgtataaagttctagggctcgtgttcttacaacacacacacacaaaaaaaaagagacgtgcggccagtgaggactgaggacatgtgggcagggatcaagtgggccggaggaagcgggcgagaaatggggtcgagggacaggcacgttccggtcgtgccgtgtggagattcctagccgcggcggcaaccggtcaccagtgtgctctcgttgtccttggtctctactactcctgctacaaatggtgacgcctttattttatcgtgtggagtggatgtaaatggacgccaccacaataaatcagagtcctaaattaattttagtttaaaaataaataaataaaaatagagtatgattcttatataataatgggc

SEQ ID NO: 2102 - DNA, 612 bp, Zea mays
  Clone ID: TF_LIB3689-204-Q1-N6-A6
cttccatacttgtcagattaaacatcggcccagccatgtgatacgtcctttttggtcgttagtcaccctggccctctgccttgcgcgctctccgggagcagcactccgggtgcggcgccggcgggcatgatgctgccgccgggccccggcacgtggtgaagctctgcagcctgctgcacggccttcgccgtcgcccccagcggcggcgggtagtagctcacgccctgcgcgtagtgctggacctgcggtggcggcggcgccggctgcaggtggttgacgccgatgtagtgcccgtacggctccgtgatgcccaccgcgggcatgtggccccggtaggccggcaccgggcccacgctcaccggcgcgctgggcaccaccggttgcggggccatgaacggcagccgcggcatggacggccgcgccgccgccgctgccgcgcccatcccgacgcccatccgaggcaggtactggtgtacgccggggaacatcaccgccggcggcgccgcgatgccggcgctgcccatccacatcatctgcacttgcagctgcagcgacttgaggtactcgatcgcctcgtcaagcattgacgccttgtccgtcttgttgcagtga

SEQ ID NO: 2103 - DNA, 420 bp, Zea mays
  Clone ID: TF_uC-zmflb73012g11b1
tcgcccttgcgtccgcgacatgagcaagagacccagagggaagcggctgtctggcatctctgagaccgtggcgccagggaaagggaagcacgcgcggccaaaggcaggcacaaagaaaaaggccgaggctgcatcggtggcggccgccgctgctgctgccggccataacaccgactacatagacgttcgggcccgccgaggccaggccaccataagccacagcctcttcgagcgcttgaggagggagaggatcagctagcggatgccgcacctgcaggagcttttgcccgggttcagaaaggtcacggtcaaggcctgcatgcttgacgagatcatcaactacatgcagtccctgcagaagcaagccgagttcctgtccatgaagatcgacgctttcaacccggtggtgagcttccacat

SEQ ID NO: 2104 - DNA, 1774 bp, Zea mays
  Clone ID: TF_ZmC5874_1
attttttagaaatgcgcggcacacgacaggaattttgatccgccttcctatgttggccgggcgcaaactcgtaggataacgcctactatacggaaccccgtcgggaattaatgcgcccgtcctcgccagtcgccacgaccgcagcaatccgccgcccttggccgtgccccgtgctgccgtactcgtaatccgtgaggggaagcgtccgcgctccgggccccgccgccgatagttccttcaagggagcgatgagcgcgcggtcgatggagacggtggaggaggacgtggaggagtacagctggcgggaggtggtgctgccgcacctcgtccccgtggttcccggcgcgcaaccggagctcgagcgggagaccggggagcggcgccgcggcagggacctcctcgtcgccgtcgacttcggcccgaactccaagcacgcctttgactgggcgctcgggcacatcgcgcgcatggccgacacggtccacctcgtccacgccgtctccagtgtgcaaaatgagattgtgtatgataaaagtcgggagctcatggaggatttagcagtcgaggcattcaagacgttactggtccggaccaaggccagaattgttgaaggagacgctggaaaagttatttgccgagaagcagatcgactgaagcctgccgctgtcattcttggtacacgtggtagaggccttattcaaagtgtgttgcagggaagtgtcagtgagtattgcttccacaactgtaaagcagccccaattatcattgtgcctgggaaagaagctggtgaacagtctgtgctttgaaggaagatgagtaggagagttgttcctgttcgttgtactgtcagtttaggtgataaagtgttgtatattggtgctggtttgttgtgggaacatgtccttaagtgctttgctttgcttgtaatctgaagctctgaaccctctgtctggcttggttatgaaggaatgcttagaaaccgggagagtagcagacaaacatataacacaagaaatgtacttgtattgccattgctgacagaatacttcattagtacagttgatatgaataaagaatcttcagccacaagtttttttccccgtggttaaaactccagcaatgaggattaattcttctcacatttccattttgaggttgtctagcaagcagccactttctaccgactgaaattgtgcatcaaatccgctgaacaaattctgggagccaatatcccaggcagcagttccattcacgttgaggcacggctcgatggtcgacggtccggcggccaccgaaaccgacggggcagccgacacagggcagctcgcggcggcgggcgcgtacaggttgctgaggaccatttccagcccaaagccagtggagcctgccgctgcagacgggtgcactacctgctgcatggggctcatgctcatctgaaggcaggacggctccagctggccggccgccgggccgcacgcatgcttcagctggcggccgaagaggtcctcgacgatgtcgaagctcaccaccgggttggaagcggcgatcttcatggacaagaactcgacttgcttctgcagggactggacgtagttgatgatctcgtcgagcatgccggccttgcccgtgaccttgctgcacccgggcaccagctcctgcaggtaccgcatccgctcgctgatcctctccctcctcacctgcacgccaatccacccggccatgagttctgacttctgacgcacgcggcagggtcgtcggtgcccacgaactagca

SEQ ID NO: 2105 - DNA, 610 bp, Zea mays
  Clone ID: TF_LIB3912-048-Q6-K6-D12
gctaggtacaaggaaagggcgtgcatggctggcatggggatcatcggaatcgagctcgtcggttacccgttgcgtgtaggcgggcggcatgagggagcggagcgcggcgaggtactcgttcatctgcttgcgccggttgcgctccacggcaatgtggaccatgcgctggctctccacttcctcctcgttcttcagtggcctcatccttcgccgcttccttcttccggttccggccgccgctgtcgcggtcacagcaagtgccgccggggcatcctgaccggcgccgccactcgcgctccccacggacgacgccacaggcagcgcgcgggcagccggctcctgcaggagctgtggcggcgagcacccggccacgtcccggccgccgccagcgccactaccgatctcgaccacgccctccattccactaaaaaacaggccactccaaggccctcctgctgccatggcaccacacccaaagcgactgccttgctgggaaagcaccacggcctccagtgccatcccttcagggtctcgcctctcaagaaaccagcagcagcagcgtgcagagtgcatacccgagctagaatccgagaaaattaggtcgtctctc

SEQ ID NO: 2106 - DNA, 1176 bp, Zea mays
  Clone ID: TF_ZmC3274_1
attgggtacctcgctcgagccgcatcatcgtcgtctccctaccgcaatcgaagaaagggccgggctcaaccgagccctcaaatcgccgcatcgcgcccctagctctctccgtctccctcatcctgacctcgattcgagctagtttcgggaagcaaaggtatcggatcaacccccttgatcacccatggtgcccagggatagggcgcacagcgccgctgctgccaccgcgcccccgacggagaagcccgttcaagggcctatccagaacaacaagtgcgaaaagaaggctccaaagaaggtgcataaatctgagagagagaaacgtaagcgggacaagcagaatgatctctttggtgagctgggaaacatgctagaacctgatagacagaacaatggaaaggcatgcatattaagtgacactacacgaatacttaaagatctactttcacaagtagaatctcttcgaaaggagaacaacacgctgaagaatgagtctcattatgtcgctttggagagaaatgaactactggatgaaaccaatatgatccgtggcgaaatatcagaccttcaaaacgagatgaggatgcggctagaagacaactctatctggagtcatgacacttctagaccaaatcttacagcaccccatccagcgaccacagtatttacattgcagcattcaccacatccacaagtcattgcaacaatgacacttcctctgcaacagccagcagtcgttgagcaatcttacgctgccccacggcgggagctacagctattccctgaagctgcacccactgaagatactgagccaccacaaaacgaggggacctctaatcatgtgatgcggccgcaggccaggagcccaccagcaatgaccactttgcctgggcatgtatatccagtccttccaagagtggaagatgagcaacgcagcagcggcactactggtagcagaaaggaaggcggggtaggcaaccgttaacagctcgagtacaaaacgagagatctggctcacagtttgaaaagttctcgtagtttcaactttaatgtttccattctagctgatgtgctaaagaaaccttaaaacctatgcggctgtgcctgcacatgtaaatatcattccactctgtattacccgaacttaatcttcaactagttacttcgatgggtgcc

SEQ ID NO: 2107 - DNA, 575 bp, Zea mays
  Clone ID: TF_ZmC3753_1
cccacgcgtccggccgaccttcaaggtgaggaaagagaagctcggggacagaatcactgcgctccagcagctagtctcgccttttggaaagacggatactgcatcggttcttcacgaggccatcgaatacatcaggttcctgcatgaccaagtagcttccctgagctctccctacctcgggtgtgggcggcccgtagtgcagcagatacagcaacgacgacaggcgaaggacgacggcggcgccgcggcgaaggaggacctgcgaagccgagggctgtgccttgtcccggtggcgagcactacgacttatgcagtggccgctggtggcgagacggcgccggagttctggctccctaactttgggggcacactacggtagggacagagacagagacatgaatatagtagcgtggacatggagatcttggtagctagctaggtctcgtaggcatgtatttgtagctaataaggccgtattctcatgtctgatgcaaaagcaaatgaataaacctgaccagtcgatccccctaaaaaaaaaaaaaaaaaaaaaaaaaaaaaaaaaaccccccaccaac

SEQ ID NO: 2108 - DNA, 1347 bp, Zea mays
  Clone ID: TF_ZmC35784_1
gtaccctccgggccggccgggaatctggatccacccccgccccgagccagctcgctataaaggcacccctctccctttctgtctccctcgcagctcagttactcactccggcctccagcttttcctttgcgccccagggccggaagagcccacacaccaccaccaccactagatagccagcgacgatcgagccgcgcgccggtggacgcgcacatacacgcggtagcttccttctcaagcctagctagccccatcctgcgcgcaggcggcggcagcgagaattgacgtgcgacgacgagcttgtgcttgctagctagagagcgaggatgtcgagccggaggccgtcgtcgcgtggcaacatctccgaggacgagatcaacgagctcatctccaagctgcaggccctgctccccagctcccgccgccgcggctccggccaggcgtcgacgacgaagctgctcaaggagacctgcagctacatcaagagcctgcaccgggaggtggacgacctgagcgaccggctgtccgacctcatggccaccatggaccacaacagccccggcgcggagatcatccgcagcatcctccgctcctgatcgcccacgcgcctcctactgcggcggcgccggccggcgcgcgagagagcgaggtcggcgacgacctcgatcgccgacaacgacgaccgcgcgcgcccgcgccccccggcccatctgttctctccaccggctggccgccgggagccgagctcaattagctagggtatatctcaacctctctctctctctctctctcgctcgctctacatgtgtgtgtacctttctcttcctttcacctgcctgtctcctccctagatctgagatcatgtggctagctctcccatatcaaaatgtactagctacacgcgcacgtatggtggtctctgctaagcctaagcttcactgggtagtagggtactagtagcactaggggcttaagcaagctaagcttatcctcctcatcagaatcacattagctcgcaccgcactctctggcttctcgtcgatcgtcttcgtcgtcctcgctcctccgacccacatgatggctagctctccatgtgccgcttctcctctcgcacgtgccgcttctcctcttgtgttcgatatgttgtattgtttccatgtaaatttagtcggtggcctggatcgagttggctagctctctctacaggcaagagacaaccgaccgaccactactatcctagagcaaattgattatcgtcatgatggtgtactgttcaagcttttattaacgacttttaatttacttgctaaaaaaaaaaaaaaaatcatgccagaaaaaaaaaaaaaa

SEQ ID NO: 2109 - DNA, 640 bp, Zea mays
  Clone ID: TF_ZmC35784_4
cattgggtacctcgaggccgaattcggctcgaggctccggcctccagcttttcctttgcagcgcagggccagaagcccacacaccaccaccactagacagccagcgacgatcgagtcgcgcgccggtggacgcgcacatacacgcggtagcttccttgtcaagcctagccccatcctgcgcgcaggcggcggcagcgagaattgacgtgggacgacgagctgagcttgcttgctagagagcgaggatgtcgagccggaggccgtcgtcgcgtggcaacatctccgaggacgagatcaacgagctcatctccaagctgcaggccctgctccccagctcccgccgccgcggctccggccaggcgtcgacgacgaagctgctcaaggagacctgcagctacatcaagagcctgcaccgggaggtggacgacctgagcgaccggctgtccgacctcatggccaccatggaccacaacagccccggcgcggagatcatccgcagcatcctccgctcctgatcgcccacgcgcctcctactgcggcggcgccggccggcgcgcgagagagcgaggtcggcgacgacctcgatcgccgacaacgacgaccgcgcgcgccccccgggccatctggtctctccaccggc

SEQ ID NO: 2110 - DNA, 318 bp, Zea mays
  Clone ID: TF_20803362
tagctgttggctgttgccggttcgcagtttcgcacgtactcgcgacttcgcaagccatcggcttcccgcctctcttcctttcaaaaaagaaagaaacagctaaaggctcaagcaacacggtggtgcctgtcgggattgacgaagctagcagcggaggtggcgatggacggggagtgctcaccgatggcagcaacgacgcggagcgggacgggcagaagccacagcgaggcggagcggaagcggcggcagcgcatcaacgcccacctcgccacgctccgcaccctcctccctgcggcgtcgcggatggacaaggcggcg

SEQ ID NO: 2111 - DNA, 566 bp, Zea mays
  Clone ID: TF_ZmC1210628_1
tttttttttttttttttggagaaaaaaaaatgaatagtccactagatttagctgagcgtagctagatgaaataaaccatctcatattatgagaaccgttagataaaaaaattgaaggaaacggcaggaaccattgaatgaacatgcatgcacacctgaagatggaggctatagaatgtcttgttcccaaaggtggagtaggttgatgagctgatgaggtgaaggcctgcgtcctccagcacctttatgcacttggagagagggagagccgtggctgccacattgctgtgcaggctgacctgaaccatgatctccgtgtcgttgaggcaagtagcagaaacaatgggagtagttacgatctcgctggtgttgagaactcccggcttgcagttggcgttggtcagctcccgcttcctcctctccaggttgtccacctgcttctgcagctccgggatgtacttgaggactcgggacacggtggtggggatgctcagcttcttggtgtggtcagcgtccgggaggagggagcggagcgaggagtaaaggtcgttgagctgcttccgtcgg

SEQ ID NO: 2112 - DNA, 594 bp, Zea mays
  unsure (1)..(594): unsure at all n locations
  Clone ID: TF_LIB3632-010-Q1-K6-F2
ggggcgcggggacgagtanaccgtgtcgtcgtccatttgggttttgggcatcgatcgagtagtagcgatggcgctggaggccgtggtgttctcccagccccaggcggcggcgggccacttcggctacggccgcggggactcgacgacgtacgcggtgccgtggtgcgacctgctacagggaggcgtaggaggaggagggggagggtttggcgatctctgcgcggcgggcgagtgggacctcgacatcgacacctgggccgccgccgccgccgccgccgcgcccaccgtggagctggggggcgacgactgggactgggaggcgctctcccgggactaccagtcctcggacgcctccacggagtactaccacggcggcagcaggaaggcggcggcggcgcccgagcctgcggggaggaggaagcggaggcgcgccaaggccgtcaagaacaaggaggagatcgagagccagcgcatgacccacattgccgtcgagcgcaaccgccgccgccagatgaacgagtacctcgccgtgctccgctccctcatgccgccgtcctacgcgcacaggggtgaccaggcatccatcgtcggtgg

SEQ ID NO: 2113 - DNA, 859 bp, Zea mays
  unsure (1)..(859): unsure at all n locations
  Clone ID: TF_ZmC584642_1
ggccgggcccgggaaagcaaaaaggttgggcggaaaagtctcccacctttacgcggcgacggcggtggcgacgacgacggcgagctaggttgccgcggcaccgatgtctctccctccgaccgacggcggcgacgattggttcctcgactgcggcatcctcgaggacctcccggccgctgcctgcggcgctttcccgtgggacgcatccgtctcctcgtccaatccaagtgcggaagtaggcagccatgtgaacaagttagatctccccaaggattccggcagcaataaacgcttaaggtcagagccctgtggtaggccgacatctaaggcttgtagggaaaaagtgagaagagacaagctgaatgacaggttccttgaattgggtactacattggatcctggtaagccagtaaaagctgacaaagctgctatcctgagtgatgcgactcgcatggttactcagcttcgtgctgaagcgcagcagctaaaggatactaatggaagtctagaagacaagattaaagagttgaaggcagagaaggatgaacttcgtgatgagaagcagaagctgaaactagagaaagagacattagagcaccagatgaaacttttgacggcaactccagcctatatgcctcatcctactatgatgccctccccgttcgctcaggctccgatggctcccttccatgcacagggacaagctctaggacagaaactgatgatgccctttgttggttacccaggatatccgatgtggcagttgatgcccgcctctgaagtcgacacctcaaaggacagcgaagcatgcccgcctgntgcgtgatatgcntggaccgcttaaatcgcatgaactcat

SEQ ID NO: 2114 - DNA, 1200 bp, Zea mays
  Clone ID: TF_ZmC3491_1
gtcgacccacgcttcctcaaggacaaaaaaaaaaaaaacagagcgcagcattggaggcgaggaagagctgtcggccggagatggacaagtactgggaggagacgcagcgctacctggagtacgaggagctcagcatctatttggaggcgcaggaggacgccatgtcttgctacgactccagctcgccggacggctccatctcccactcgtcgtcgtcggcggcggcgtgcggcaacaagaacatcctgatggagcgcgaccgccgccgcaagctcaacgacaagctctacgcgctccgcagcgtcgtgccgaacatcaccaagatggacaaggcgtcgatcatcaaggacgccatcgagtacatccagcagctgcaggcggaggagcggcgggtgctgcaggagctgcgcgtgctcgacgacgacaccgccgccgccgccaccgcgcaggtggagtgctgcgacgtcgacgggggcctgctgcgacgggaagccgagcgcgcgaagaagatgaagcgcgcgcagtccgtcgccagcggcgcgcagtctgctccgcctccgcctccgcccgcgccgccgcacgtcgaggtgctggagctgcgcgtgtcggaggtgggcgaccacgtgctggtggtcagcgtgacgtgccgcaagcgacgcgacgccatggccagggtgtgccgcgccatcgaggacctccggctccgtgtcatcactgccaacgtcacctccgtcgccggctgccacgtgcacaccgtcttcgtcgaggtagataaaatcgaccacatccaagtgaagaacatgattgaggctgctctcacgttgctcgacgcccccggaagcccccacagctcgatgagctattacgagacctaactatgttgagcaatgcttttcggacgtctactaggtcaacaactcagtccacaattaaccagaaaggagtatgtcgtgttttgctacaatgtgcttgttgtgttttttttcaacatcacccctaagagatgatggttgtttcctctaagatgcagctagtgtaccaagcaatgtttggacttcgtgtcatacatcaccacgagagtgacatgtatttgtgtactataacatgtatatgctaaagaaaataacaaggggacttgtctttcgaatgaagagctatcaaatatgctgtcctcataaaaaaaaaaaaaaaaaagtccac

SEQ ID NO: 2115 - DNA, 1862 bp, Zea mays
  Clone ID: TF_ZmC14059_1
catggtgagggacgagccgagctttttccaccagtggcagtccgacacgctgctggagcagtacacggagcagcagatcgcggtggcgttcggccagggggagccggtggaccacgccgtggcggcggccctggcgacggcgatgcccatgcagctgcagcagcccgcggcggccgagcagccgcaccaccgcccgcgcaaggcggccaaggtcaacaccagctgggactcgtgcatcacggagcagggctcccccgccgcggactcctcctcgccgaccatcctctccttcggcggccacaccgcgttcgccaaggccgagccgacgacgcaccagccgcccagcggtgcgccgggtactacggcgccgccgccgccgccgcgaaggcgccgaagcaggagatgatggacgccgccgcgatgccgccgttccagcaggcgcgcccggccaagcgttcctacgacgacatggccgcggtggccgaggccgccaacgcgccgtccgccaacacgcgcccggcctcccagaaccaggaccacatcttggccgagcggaagcgccgcgagaagctcagccagcgcttcatcgcgctctccaagatcgtcccgggcctcaagaagatggacaaggcatccgtgctcggcgacgcgatcaagtacgtgaagcagctgcaggaccaggtgaaggggctggaggatgacgcccggaggcgcccggtggaggcggcggtgctggtcaagaagtcgcagctgtccgccgacgacgacgagggctcctcctgcgacgacaactccgtgggcgccgaggcctccgccacgcttctgccggagatcgaggcccggctgtcgggccgcacggtgctggtgagggtccactgcgacaaccgcaagggggtgctcatcgccgccctctccgaggtggagcgcctcggcctctccgtcatgaacaccaatgtgctccccttcaccgcctcctccctcgacatcaccatcatggccatggctggtgacgacttctgcttgtctgcaaaggatattgtcaagaagctaaatcaagcgttcaaatcacccttctgatgggattagcttaatctatgtcaacttttttcccattagccttaaggatttgaggctaatggttaggttatcaggtccttccttgcctttgcttccgaagagagttgcttgcagtccccaagagtccccccacacaaagatagccatttccactggttttttgctacatgggtgcagagattgatcacctagctagttacctacttaccatcccattttatctgtctctccagttttttacatggtttgatgttgtcactccatgtttttgggagagagcagattgtaaaaaaaaaacagcctttttttctagggctttgctatataggcctggggagtttgacttttacaaacctaatttttctttctccccttcgcccgtatgttgccctttaattcaccttgttttttccatgagaggatggtgtttttcaaacaccagcacctaccttcgccgtcctctcaaccttgatcacactgctcccagaaaaagcttcagttgtggagaaaatggcgccgtctttttttttaatcagctctgagggggactttgcaagccttgatttggaagtactgtagggatgcctcacttctattgtttctgttttttttgagggtcctacaagttggccgccacttgaaacttgatggagcctttgcctatagttttcacatgtgagttttgttgtcacaggacaggatgaaggtgtagttgttgtcatctcttgtttactctcatagaagcataaataaataaatgtgctcgtttggtaccttggtaacaa

SEQ ID NO: 2116 - DNA, 401 bp, Zea mays
  Clone ID: TF_ZmC14059_3
gctcccccgaggactactcctcgccgtccatcctctccttcggcggccaccacgccaaggcgcccaagcaggagctgctcgacgccgccgccgccgcgctgccgtcgttccagcaggcgcgcccggcgcccaagcgctcctacgacgacatgatggccgaggccgccagggcgcctgccgccgccgccgccgccgcacgcccggcctcacagaaccaggaccacatcttggccgagcggaagcgccgcgagaagctcagccagcgcttcatcgcgctctccaagatcgtcccgggcctcaagaagatggacaaggcatcggtgctcggcgacgcgatcaagtacgtgaagcagctgcaggaccaggtgaaggggctggaggatgacgcccgaaagcgcccg

SEQ ID NO: 2117 - DNA, 1996 bp, Zea mays
  Clone ID: TF_ZmC13586_3
ccacgaaatggaaatggtcacttccaaattgcacgagctggaattatatactcttctgatcttcttcaccgtctctttatagcgtgatatgcgtttctggcttcttgcttacgtgaaggattattagtaaggcgcgtgatggcgctctcagcttccccggctcaggaagaactgctgcagcctgctgggaggccgttgaggaagcagcttgctgcagccgcgaggagcatcaactggagctatgccctcttctggtccatttcaagcactcaacgacctcgggtgctgacgtggacggacgggttctacaatggcgaggtgaagacgcgtaagatctcccactccgtggagctgacagccgaccagctgctcatgcagaggagcgagcagctccgggagctctacgaggccctccggtccggcgagtgcgaccgccgcggcgcgcggccggtgggctcgctgtcgccggaggacctcggggacaccgagtggtactacgtgatctgcatgacctacgccttcctgccgggccaaggcttgcccggcaggagttccgcgagcaacgagcatgtctggctgtgcaacgcgcacctcgccggcagcaaggacttcccccgcgcgctcctggccaagagcgcgtccattcagacaatcgtctgcatcccgctcatgggtggcgtgcttgagcttggtactactgataaggtgccggaggacccggacttggtcagccgagcaaccgtagcattctgggagccgcaatgtccgacatactcgaaagagccgagctccaacccgtcagcatacgaaaccggggaagccgcatacatagtcgtgttggaggacctcgatcacaatgccatggacatggagacggtgactgccgccgccgggagacacggaaccggacaggagctaggagaagtcgagagcccgtcaaatgcaagcctggagcacatcaccaaggggatcgacgagttctacagcctctgcgaggaaatggacgtgcagccgctagaggatgcctggataatggacgggtctaatttcgaagtcccgtcgtcagcgctcccggtggatggctcaagcgcacccgctgatggttctcgcgcgacaagtttcgtggtttggacgaggtcatcgcactcctgctcgggtgaagcggcggtgccggtcatcgaagagccgcagaaattgctgaagaaagcgttggccggcggcggtgcttgggcgaacacgaactgcggtggcgggggcacgacggtaacagcccaggaaaacggcgccaagaaccacgtcatgtcagagcgaaagcgccgggagaagctcaacgagatgttcctcgttctcaagtcgttggttccctccattcacaaggtggacaaagcatccatcctcgccgaaacgatagcctatctaaaggagcttcaacgaagggtacaagaactggaatccaggaggcaaggtggcagtgggtgtgtcagcaagaaagtctgtgtgggctccaactccaagaggaagagcccagagttcgccggtggcgcgaaggagcacccctgggtcctccccatggacggcaccagcaacgtcaccgtcaccgtctcggacacgaacgtgctcctggaggtgcaatgccggtgggagaagctcctgatgacacgggtgttcgacgccatcaagagcctccatttggacgctctctcggttcaggcttcggcaccagatggcttcatgaggctcaagataggagctcagtttgcaggctccggcgccgtcgtgcccggaatgatcagccaatctcttcgtaaagctatagggaagcgatgaaagggcgctacatgtgaagcttaattaatggaagcaaacttgtatttcttgtgcaaaagcttactatatatttctgcaaaacctggtgtgccttgttttgattttcagtcgccaattgtgcccttgtttttatcaagtgatgatctacaaaatatataaggaatctttg

SEQ ID NO: 2118 - DNA, 2473 bp, Zea mays
  unsure (1)..(2473): unsure at all n locations
  Clone ID: TF_ZmC14919_1
ggcctctctcctttctcgagagagcgaagtaaacgggacagcggctgcagccacccagtgtacgagcgctccgacttgtgtgctctcatgccgtgctgctacagagctgcctcataaaagctccctgagcctgctcctgtttgcagcttgcaaggcgccaaggacggacggaggcgacgactcgcaaggtagctctgctcgggcgaggcagcagcagcacgcagcagtactccgttcagaatcaggagagaagacgttgttctccgggcactcgagtcgaagtcctgacgagatggacggcaatgcgaggtcggcggcaacgaatcagaagaagcccgtcgtcgcggacgacgacctcgtggagctgctgtggcacaacgggagcgtcgtcgcgcagccccaggcgcaccagaggccggcgcccacctacgaccccgaccgcccgggcaccagcggcctcaccggcgaagagaccgccgcgtggttcccggacaccctcgacgacgcgctggagaaggacctgtacacgcagctctggtacagcaccatcgccgacgccgccccgcagcacgagggaacgctcccgggccctacctcgcagccttcgccttcgccgcccgttgggagcagcggcgtcgagtcgagctgggctggcgacatctgctcgaccttctgcggaagcaaccaggtgctcaggacgccggcaaggatcagggggaaggacgcggcattgcagtcggagttgccgagcaataccggcgcgcacgacggcacatcgtcatccggcgggtctggaagcaactatgggggatccgggctgcccagtgacagcgtccatgtacagaagagaaaggggaggtgtagagacgactcagatagtccgagtgaggatgccgagtgtgaggaggcaagtgaggaaacgaaaccatcaaggcgatatgggacgaaacgccggactcgtgcagctgaagttcacaatctctcagagaggagaagaagggaccggatcaatgaaaagatgcgcgcgttgcaagagctcatcccgcactgcaacaagactgacaaagcgtcgatattagacgagacgattgagtatctgaagtcactccaaatgcaagttcagatcatgtggatgacttctgggatggcgccaatgatgtttcctggtgttcaccaattcattccacagatggctctaggaatgaatccaggttgcatccctgcagcacagggcctaagtcagatgccaagattaccatacatgaaccacaccctgccaaaccatatccctctgaactcgtctccagctatgaatctaatgaatccactgaacgccgcgaaccaggtgcaaatcggtcacctcagggatgcaggtagccacgtccttcacctagatggcgggcgagcagcagtggtaccccaggtaccaggaccaggaccccatgtcgttcatggacatcaaatagcacaagccgaagaacacaataagatactggaagtggcagctagtactgttataccaacttctaaggcagggcaaccaccaactttccatggagtttagagtgatcaaaatcatgccttaagctgtatatctgtacagaagtgtcagaaccatattctttgacatgtaagcttagttctagagttattatcaggagtcttgtataggttacaagacaacagcctgtctaccgccgtattctatctacggaagaactcgagctgcatactgctgtgcagactgcagtacagcgttcaagagaattgaatgggatcaagaaagggtctttcttttctggcaatccctggaaatactgacgtgatgaggagcggatggcatctctgtagctgcgctgcagtgtatctacatcaatatggcaatgcttgtctggacacgaatgctacatctacatgtaaatgcagagttgcaggtagatagcaacccctctcccctgagatgccaactccgactcctgtcctactgtgtgtactgatctgtacagcaagcaatattcaatcagcagtcaattcctaggaaaaaaaaaaacagcactttgggtctccaaagattgaagttgttgatgtcaccggtgttgtagtacccgcccaccaaatccacctgcactccggatatagatatactatacatcgaggtcaggtggtcatcgtagtgctgggtgtcgtcgctgaggctggactcgctgagctagggagcccggccatacggttgcccggcgacagcttgccggagcgtgggtcctcgaaggagatgatggacttggcgaccgcgtcagcgtagttgaagttcgcggcaaggcccagagtgaggagcagcagcaacacgatacacatgttgatgagcaacctgctcagggtctccatggctggctagtgaagtctccgtgagctcgagtggagagganaggcgagggcacaatgagganagnnnnnnnnnnnnnnnnnnnnnnnn

SEQ ID NO: 2119 - DNA, 463 bp, Zea mays
  Clone ID: TF_jC-zmXLIB3527P004ce08d1
tttctcgccgtctgatagtgcagcaggagacaggccgacaaccaccgctgccagaatcactacctagagagagacacgcggggagctgctagtaggcaggaccaactcaagatgccccagacaatgacctgccgcagatggcactctggaaggaggaaccgtcaggacgatgttttttagaggagagggaggaggaagcggagagccagcagatgacccacattgctgtggaccgcaaccgacgcaagcacattaacgagcacctcagcgcgctacgatcactcatgccgtcagaccacacgcatcggggcgatcaggcattcatcgagatgcggctcgatcaactgcggcaaggagctggatcagctgctgcagacgctggaagcccggaggccacacccgcagggcagtgcctacgcacgaaatcccgacgacacggccgccgaagcggactaactcacct

SEQ ID NO: 2120 - DNA, 1561 bp, Zea mays
  Clone ID: TF_ZmC26240_1
aattcggcacgaggcctatgtcctcctctatcctcctcttcgtctatctcttcctcctctttcctgttccattacgcagtgcagtctatactacactactacagtgctgctgcaactgctactccgactactagtaactagtggtagcagtagcaccaaggccggagtagtttatatgttgtggacagctagccctcgctgctcgtagtcgtagctccaggcctccggctgctgctgccgccgccgccgccacagggagagctagctaggaggtatataggtatagccgtatagctagctagctgctgctgcgtgaacggggaagaggggagggggggctgctgttgcagtgttgcctgttggcctgttgcaggctcagctcgcaagtcgcgagtcgcgtctgcagcagctgctgcctcagggaggggctcattactccctcgttgcgtgctgcagttattgcttgctaccgctagctactgtgtacgttttggccttgccaataagctctaatggagaggatgcagctgcaactgcaagggtccatcgccttttcgctggtaagttcacatacactacacagccaggggagggggcagccgggcaggcaatggagcacgcacgcagcttccatttgtagcggcaggcagcttctttctggaggaagctccgtcgtaaatgcaatggagtattaattctcctgctcctgctgcatgccgctgctgcctcctctagtcttgacgcttcctttcccttccatgccctctctgcattgttcacctttgctagtacttccctctcatgtcgtcgcagtggcagctctgccgccggcacccacgcacgcacgcacgcacaattcaatgcgcaccactgtactcgctctctgtgcttcctgctaggagatcgacatcgactcgactactaggagtatctttaatgtcgttgctgctgctcccctttctcgatcggcttgctgatgatgtgcctttcttgctccccttccggcgatggcgtggtgatgacgacggtggcggtaatggaacagtgggcagacaagcagcagcaggcggccagcaccaacgccgcagcggcggcggcgcagatgcccttcctggcgctgctccagggcgcgggcgttgtggtggaggcggagcagcaggaggagcagcaccacgacgggcgcaagcggcaggccttcgcgcgcgccgtctccgaccttgatctgctcgagagctgcgtcacgcaggcggtagctcccgcagcggcggcgtctgcgcccgtggccggcaggaccgagaggcggaggaagcggcagaggccccgcgcgcgcgccgcgccgccgccggagaagcgcaagaagcccgaggaggccgagagccagcgtatgacgcacattgctgtggagcgcaaccggcggcgcctcatgaacgaccacctcgcctcgctccgctccctcatcccttccagctacaccccgcgcggcgaccaggccacggtggtgggtggcgcgatcgactacgtgaagcagctggagcagcagctggtggcgctgcaggcggcc

SEQ ID NO: 2121 - DNA, 873 bp, Zea mays
  Clone ID: TF_ZM4442.C1.o15.fg
atggacgacctgctctcgccctgctcgtccttttccccgccctcgccggcgtccttcttctcccacgccggccacccagtcatcgagttcgcctcctgtgaggtccccgagcaatggctactcgacgacctcgtcgtcgccaagaacgagggctatgacgacgtggacgacctgtggcccgtgcggagctcgctctccccggactccgaggtctccgagcagccgcttcctccccagccgccgccaccgtcacagcaggagctgacgagcgtcacggcggccccggcgcagcagcagcagcgcctcgggaagcggcgtgggcggaaacccgggccccgcccggacggccccgccgtcagccacgtggagtccgagcggcagcggcgggagaagctgaaccggcggttctgcgacctccgcgccgccgtgcccaccgtgtcgcgcatggacaaggcgtccctgctcgcggacgccgcctcctacatcgcggagctccgcggccgcgtcgcgcggctcgaggccgactccaggcgtgccaccgcggcgaggtgggaccccgccgtaacggcggcggcctccgccagcgccgccgctatggggctggcgggagccggcggcggcgccgacgaggcggtggaggtgcggatgctggggccggacgcggccgcggtgcgcgcgacgagcgcgggcccccacgcgcccgcgcggctgatgggcgcgctccggtctctggagctccacgtgcagcacgcctgcgtgacccgcgtgaacggcgtgaccgttcaggacgtcgtggtcgacgtggcgactccgctgcaggacgacgacggcggactccgcgccgcgctgctccagatgatgcaggacagctag

SEQ ID NO: 2122 - DNA, 1685 bp, Zea mays
  Clone ID: TF_ZmC3240_1
tcgaggcctggcacgggtagtcccaccgcacccgactccttggatttgaattagattccggtttccctttctccgcccgctggccggggcccgctcgccgggcaacacataagcacgcgcccgcgttggcgtattctattcgccaagagccaaggggattggggaggccgtccatgttgcgtgttgtttagacgcgccaaaaggcaaaagcgtggaggaggctcatcaagcacaagcacgccacgcgatccacacacggcaagcaacgcccagggctcgtgctcgccccgcgacccgcgaaagatctgtgctggttcgctcgctcgctcgcgccgcgccgccgcgtgggggtgccgatgagctgcgcggggcaggccggcgggtggctgctcgactacgcgctggtggaggaggagatccagggctccgagttcatctacatggtcgacgacccggccgtctccagcgtgatactggggtttgatgctcccaggaaggaggacggcgtccaggacaaccccggcgccaagaagagatcccggccggagtccagcgcgccacccggcaccaaggcttgccgtgagaagctccggcgagacaggctcaacgaaaggttcaacgagctctgtgccatcttggaacccggcaagccacccaaggccgacaaagtcgctatcctaagcgacgctgcccgtctcctgaaccagctgcagggcgaggcccagaagcttaagcaatcgaacgaatcgctccaggagtccatcaagagtcttaaggctgagaagtccgagctgcgagacgagaagacgaggctcaaggctgagaaggagaggttggagcagatgctcaagggcgtcgtcagccacgccgcggtggctgctccggggcccttcgtcccgcaccctgctgcggtcgctccatctttccaccaccacccggcggcgtttgctcaggctggaaagttcgtcccgtaccccagctacccgccgccggctgcgttctggcagtggataccgccgacgtccctcgacacgaccaaggaccccgcacactggccgccggtcgcctagccgacctaccacctcaccgtggcatcattcatcggtgatgcgttgccgtgtgtactgaatttgatcgaagcatgcctgaaaaaagaaaccttggctgctgctcgtgtcaaggacgtgatgtgctgaagttcaggcgatctaggtcggctggagaagtctatgtaacagccataatgctaaagcaatgaaagtgatatattaattgaatcgggctagtgtttcctgaaactacggttatttagacattgcctggaaggctagaacaatgcaaacttgggtaacattgtgactgaaaaatgaaaccttggcgctgctcgtgtcaaggacgtgatgtgctgaagttcaggcgatctaggtcggctggggccgtatatctgaccgcctggtggtctaaaatgcaaatttggctaacattgtgggctgcaataccgatactggggtttgatgctcccaaatcagatcaaggaacagggcggtttttccacataacgctgtgtgtaagaaagacaaagtgccaagcggcgtatacgccaccaagatctcgcaggaggagtacctcaacgcgccaggcgagacctactccgttaccctcaccgtgccgggaacctacggctt

SEQ ID NO: 2123 - DNA, 1084 bp, Zea mays
  Clone ID: TF_ZmC3240_10
atgagctgcgcggggcaggccggcgggtggctgctcgactacgcgctggtggaggaggagatccagggctccgagttcatctacatggtcgacgacccggccgtctccagcgtgatactggggtttgatgctcccaggaaagaggacggcgtccaggacaaccccggcgccaagaagaggcaatctttctcttcttccttcctttctgttgaccctcaacataaacggaaaagtgtccacatcacactaagtccaattctgttgcccctgaagtccgtgggcataatttgctgtgctttcctgtttccctttcttctacgcagatcccggccggagtccagcgcgccacccggcaccaaggcttgccgtgagaagctccggcgagacaggctcaacgaaaggttcaacgagctctgtgccatcttggaacccggcaagccacccaaggccgacaaagtcgctatcctaagcgacgctgcccgtctcctgaaccagctgcagggcgaggcccagaagcttaagcaatcgaacgaatcgctccaggagtccatcaagagtcttaaggctgagaagtccgagctgcgagacgagaagacgaggctcaaggctgagaaggagaggttggagcagatgctcaagggcgtcgtcagccacgccgcggtggctgctccggggcccttcgtcccgcaccctgctgcggtcgctccatctttccaccaccacccggcggcgtttgctcaggctggaaagttcgtcccgtaccccagctacccgccgccggctgcgttctggcagtggataccgccgacgtccctcgacacgaccaaggaccccgcacactggccgccggtcgcctagccgacctaccacctcaccgtggcatcattcatcgtgtttgttgttgcccatctgtgtttttgattaaaggtcgctctgtgtcagttgtaagtgctgtgttcatcctcggccccaccaaacccatgcatcaaccagcatggactgcggatcgatgggtgctgttacccccgtcaggctttattctaagttaaatcctaaggaaaaaaatggtgcttcttggtgctgc

SEQ ID NO: 2124 - DNA, 846 bp, Zea mays
  unsure (1)..(846): unsure at all n locations
  Clone ID: TF_ZmC3240_4
attgggtacctcgaggccggccgggtagcgaatttgctttctcgtaattaactccactttgagagctactactntgtgcgaattcgtttccctttcttctacgcagatcccggccggagtccagcgcgccacccggcaccaaggcttgccgtgagaagctccggcgagacaggctcaacgaaaggttcaacgagctctgtgccatcttggaacccggcaagccacccaaggccgacaaagtcgctatcctaagcgacgctgcccgtctcctgaaccagctgcagggcgaggcccagaagcttaagcaatcgaacgaatcgctccaggagtccatcaagagtcttaaggctgagaagtccgagctgcgagacgagaagacgaggctcaaggctgagaaggagaggttggagcagatgctcaagggcgtcgtcagccacgccgcggtggctgctccggggcccttcgtcccgcaccctgctgcggtcgctccatctttccaccaccacccggcggcgtttgctcaggctggaaagttcgtcccgtaccccagctacccgccgccggctgcgttctggcagtggataccgccgacgtccctcgacacgaccaaggaccccgcacactggccgccggtcgcctagccgacctaccacctcaccgtggcatcattcatcggtgatgcgttgccgtgtgtactgaatttgatcgaagcatgcctgaaaaaagaaaccttggctgctgctcgtgtcaaggacgtgatgtgctgaagttcaggcgatctaggtcggctggagaagtctatgtaacagccataatgctaaagcaatgaaagtgatatattaattg

SEQ ID NO: 2125 - DNA, 862 bp, Zea mays
  Clone ID: TF_LIB4764-117-A1-K1-E8
cctcgaggccggccgggacccggcctctctctcatcctcccttctcttccctctctcttctctctaccgcgaccgcgccaaggatcaagcgcacgcgacgtccgacgccccgaccgcctcgacccgcctgcgcccaggaagacccgacgccgccaggcgacccctcacctctctcctcccttccctcgggaccagggcaacgcacaacgcgccgacggtgaccagtagcccgctctggcaccagctcggcagctcctcccatcgcatctcccctgctaggccttctcgtcccgctcggaagatgattcagctggtgcatgcgaggaacctattgtgctgaaataaagtaccagctcaagaggtcctagccgctcctcaaaggattcaaagagcctctacgcaaagaggagaagggagaggatcaatgaaaaactaaggacgctacaacagctaattcctaatggcaccaaagttgacatgagcactatgctggaggaagcagttcagtacgtcaagtttctgcagctgcaaataaaggttgggacaaaagtggctgcagtttccctcaagacaaatactacgactcacaaaattttgggggtgctaacaaaagggaacacacagattgtatgtcatattatcagccccattcgccacgcgctccgttgctgaagcccccgcccgcgccgtccaggagggatctggaataacaggagcctgatggaagcatgaagattttttaggctcctctgctcctggagctggacatgatgggccaagtcatttatattggggctaacaacaaaggttgatcagttttgcctagtcccagtaccatacaaagatgggtcagtgaacctga

SEQ ID NO: 2126 - DNA, 1517 bp, Zea mays
  Clone ID: TF_ZmC18277_1
cattgggacctcgagccggccgggccggagtagtgggtaaccttggtctccactacctgctgccaagtgccgacgcgagtccgtccctcttctcctccgcatccaaagaaaccagaccacaagacatcgagagaacagttgcggccttgctggcacggggatagatcttctccactccaatggcgggcttctcacggccgaacaactcgctcctcctcaagatgcctgcgactttggccagtagccacaccccgaacctctcaagcctcctgttctacgaccagaaccatggccaagctgtaaatgcaaatgcagcagcgatgacgatggtggaggacgacgcctcactccagagctcatctgcagtgctcgacacctccccgcagccacagggcagtgctgctgctgcgtctccgatggagaggaagaggaagcctgcagaagacagtgctacactcagctctgctcaatccaaggaggattgcaagcagcagcaggagagcaagagcaggcggggaaagaggccccacaacaaggaggctaatactgaggagaagagcgctactgaagacgaggccaccagggggtacatccatgtgagggcgaggaggggtcaggcaacggacagccacagccttgcagagagggtaaggagagagaggatcagtgagaggatgaggatgctgcaagcactggtccctggttgtgacaaggttactggaaaggccctgattctggatgagattatcaactatgtgcagtccctgcagaaccaagttgagttcctttccatgaggattgcctccatgagcccagtgctatatgggttcggactggatagtgatggcctccatgaccacgcacaaaagatgggagtcatgttccaggaagcccttgcaatggcaggtccagtgctgagccaagccagcccagcagctccatctgaagccatcatggacaccaccacaccttactcactgcatggccatggccagggttccatctctttttcccaggacaatggcagcagcacttacctgatgcagcatcagcaagcagcgggggagccaacaagacagcaggagctgctcagccagttggtgttcaacaacatgtgctctttccagtaggggtggggagcatttgggtgagaggaagcgaggaatggaccccacattgacaataggaaggaaataatgctgcgagatttggtaggagcatgcacgtaccagatgagtttgagatgttggatctagtccatccccttgtctggatttggagagagcagtagcaagtagatcgagcctgctgtttgtttacacattttgagagactttgtagtatttgtaactcctttattgggcattgtccatgaggattttctcagcggctgcaccttccatctcaccgtgttgttgtagttcttgagcaatcggttgttagtacatacgagagctattttgttctttgccaaacagtgattgactgttccatccaagaaaaaaaaaaaaaaaaaa

SEQ ID NO: 2127 - DNA, 578 bp, Zea mays
  unsure (1)..(578): unsure at all n locations
  Clone ID: TF_LIB3597-024-Q1-K6-H7
ggntggttgaattttagccggnggcagagcgggagcgggcgcagtgtgcgcgggacgcgagcccccgagcgcgcagaggcgccgccgctgagagccccccggcccgccgcgccgacccgcccgcggagccccggccgcgcagccagcatgaagcgagcccacccggactacagctcctcggacagcgagctggacgagaccgtcgaagtggagaaggagagcgcggatgagaatggaaacttgagttcggctctaggttccatgtccccaactacatcttcacagatcttggccaggaaaagacgaagaggcatcattgagaagcgccgacgggaccggattaataacagtttgtctgagctcaggcggctggtacccagtgcttttgagaagcagggatctgctaagctagaaaaagccgaaatcctgcagatgaccgtggatcacctgaaaatgctgcacacggcaggaggaaaaggctatttcgacgcgcacgcccttgctatggactatcggagtttggggttccgggagtgcctggcggaggtggcccgatatctgagcatcattgagggact

SEQ ID NO: 2128 - DNA, 827 bp, Zea mays
  unsure (1)..(827): unsure at all n locations
  Clone ID: TF_LIB4764-112-A1-K1-B8
tgggtacctcgaggccggccgggacgccacctgcttctgagcttctccacccggtctctctctcatcctcccttctcttccctctctcttctctctaccgtgaccgcgccaaggatcaagcgcacgtgacgcccgacaacccgactgcctcgacccgcctgcgcccaggaagacccgacgccgccaggcgacccctcacctctctcctcccttccctcgggaccagggcaacgcacaacgcgccggcggtgaccagtagcccgctctggcaccagctcggcatctcctcgcatcgcatctcccctgctaggcctcctcatcccgctcggaagatgattcagctggtgcatgcgaggaacctattgtgctgaaacaaattaccatctcaagaggtcctagacgctcctcaaaggattcaaagagcctctacccaaagaggagaagggagaggatcaatgaaaaactaaggacgctacagcagctaattcctaatggcaccaaagttgacatgagcactatgctggaggaagcagttcagtacgtcaagtttctgcagctgcaaataaagtgttcagcgctcagggtgccttggaagtacgctagcttgttgtcatgaagaaatcattcaagttccttccactgaagttgatgcataaggctgcaacaccatctagtggagggtgttctggacaaagaaagcttgtaccttanaacaggaggatacaagaagctggagtggttgtctgaagggctttgaactgcttgaagcattagtgtagctttggtgcttttgtgactgatcagctctggagcagctagaatgatat

SEQ ID NO: 2129 - DNA, 1060 bp, Zea mays
  unsure (1)..(1060): unsure at all n locations
  Clone ID: TF_ZmC261576_1
ggcgcgcgagaggaggagcaagnacaacgagaagatgaaagcgctgcagagcctgatacccaactccaacaagaccgacaaggcatccatgcttgacgaggccattgagtatctgaagcaactgcagctccaagtgcagttggtgggggcaacattacagcgtcaagctctggggcagtgatgccaccagtaaaccaaagttcaggacttcaagtatttgatccattaaatcctccacgagaccaaccactgtcttttgtattaccaaatgtagacaaaaccattcaagaagctccctttcacttggaatcatcgcagttccaccctcgaccatttcgaatgcctgaatcttctgaggtgaggtagtggcaaagcaccagctaacttcaattcaaggaagagttagtatgccaggaattggtatgaaccccattaggcaagaatcatccactgtaaaagctgatcagtttgatggttgctcacatagcaaagagtgactacgagatatgtgccacaaaatgcatgacaagttcagcttaggaaatggcaaccgatgaggaccgaaggcaagatgacacagttcagtaacccagctgacagcctggcacgcaggcttcccctttattttcctctgttactgcaatagtaacttaaatttttaggcttcccctttattttcctctgttactgcaatagtaacttaattttttttaggcttcacctttcctttttgtttgaaaattagcagggcagtattaattaatagtacaaaaccatgtatcaccaagatttcaggggttgaaacttgaaatgccaatattcaccaagctttcgttttttttttcaaagagtaatttgcaaaggttgtaatgccctctatagcctatagcagacttaacaagcactacaatagaagacagcatcagcagagtcaatgcgtatacacctacaagggaacncaacccatgaagagagttaacaacaagaaggaaacttgtgctgtaactccacatctgttcattcatgacctagtaattaaaggatcagaataagcttcgcc

SEQ ID NO: 2130 - DNA, 342 bp, Zea mays
  Clone ID: TF_LIB3245-181-P1-N2-A2
gcaaaaggaagggttctggagaggacagttcatcactacgttctctaggtgaaaccagtgcattgcagcgagaagtcagcatggagtgtgctgatgagaaggcgggtgatgctagagccaagagagaggactacgtgcatgtccgggcaaagcgcggccaagccaccaacagccacagccttgcagaaagatttcgaagggaaaagataaatgaaaggatgaagcttcttcaagaccttgtcccaggttgcaacaagattacaggcaaggccatgatgcttgatgagatcataaactatgtgcaatctctgcagcgacagattgggttcctttcgatgaaac

SEQ ID NO: 2131 - DNA, 1560 bp, Zea mays
  Clone ID: TF_ZmC3534_1
aattgactgtgcccagctctcgatctactccaccctttaagtaaggcaacttcagttggcagacctggcaatgacaagctagaaggttaccaggcattccccctcccccaaaatgattgcaacgacatcgcactgagtccaagtatcagagtaggatgatgtattcccctccgcgcaccgatcccgacagagaggaagagcagtgcttctcaatcggaagtaatctgcttgcttcactagaccattaccataccatggattttgatgagcctgtcgtctccccaatgaccaatgcaggcatgcaagagggggttcagctctacagttctactggagatgctcaactaaatagaaatatgaacacaggcaagtgtttagaggatggcaaaaggaagggttctggagaggacagttcatcactacgttctctaggcaaaaggaagggttctggagaggacagttcatcactacgttctctaggtgaaaccagtgcattgcagcgagaagtcagcatggagtgtgctgatgagaaggcgggtgatgctagagccaagagagaggactacgtgcatgtccgggcaaagcgcggccaagccaccaacagccacagccttgcagaaagatttcgaagggaaaagataaatgaaaggatgaagcttcttcaagaccttgtcccaggttgcaacaagattacaggcaaggccatgatgcttgatgagatcataaactatgtgcaatctctgcagcgacagattgagttcctttcgatgaagctctcagcgatcggccctgggctcaactgtgacctcgacctacaagatatcctctgcacacaagatgctagctctgcttttccaggatacaacctgcaaacgagcaatgtgcatattaatctgtacagagcatctgaagaaggtttctcacacaggaacaggatcatccctagtccagcaaatgttcacgtgacaagaaacgcccagctatctgcatatcctcaggttttcattcgacgcccttgaacagcttcaagtgctttcctatgtcgattatactagtttctgccatggcagagaggagttatctggaacgaggagctttgcagcatcgcttcagatagaaatgctggtagccattcaatgcaagtggagtgacattgtggcaactgacaagccggcagtttaatggtgatcaactctgaaagtcttgacaagttgggttgctactgaggtgccttttcaagttgcagtggtagcacgacttctcttgggatgagctagttaacttttggtatttgagaggaattctggtgtgtccacccatcctgtacagttattagaataactaatcaaaggagtactgtgaaattcttgcgatctggtggagaaaatagcggacaattttcgtctggaatttctgacacaactgagttagtgctttggtggggtgtggctccacctaattatttagttgtaatagctggcagagctctatgactataactgcttgagattcgtgacaacgaatttaaattggccaaataaaacaccgttcttcggtatt

SEQ ID NO: 2132 - DNA, 1417 bp, Zea mays
  Clone ID: TF_ZmC412624_1
aggtgacactatagaagagctatgacgtcgcatgcacgcgtacgtaagctcggaattcggctcgaggccgcgcaccagctgctcccgtggctcggcgcggcgcccttctccgagccggcggccgtggcgggcctcggcgccgccatgggggcctacgcctgcgacggcgtcggcgggctcgggcatggcggggtgttcggcttcggtttcgacgccgcggtgcagcagcagcagcagcagcagcgcgcggcggacgggagcggcaaggcggtggtggtgtccgggctgctggggagcctgcaggcggagctggggcggatgacggcacgggagatgatggacgccaaggcgctggcggcctcgcgcagccacagcgaggccgagcgccgccgccggcagcggatcaacggccacctcgccaggctcaggagccttctccccaacaccaccaagacggacaaagcgtcgctgctggccgaggtgctggaccacgtgaaggagctgaagcgccagacctcggcgatgatggcggccaccgacgccgacgccgacgccgacgacgaaggcgccgggcggacgcaggcgcaggcgcaggcgcagctgctgccgacggaggccgacgagctgtgcgtggacgcgggggccgacggcgccggccggctcgtggtgcgcgcgtcgctctgctgcgaggaccgcccggacctcatcccggacatcgtccgcgcgctggccgccctccagatgcgcgcgcgccgggccgagatcaccacgctcggcgggcgcgtccgcagcttgctcctcatcaccgcggacaggagagcggacgtccagcgcggcggcggcggcggcggcggcgacggcgacgacgacgaggaggaggaggatgaggaggagggcggcgagcgcgctgcctcgcaccggaggcacgagtgcatcgcgtcggtccaggaggccctgcgcggcgtcatggaccgcaggacggccagcagctgcgacacgtcgtcgtctggtggcggcggcgggagcattaagcggcagcgcatgaactacggcgcgcaggagcagtgttcggtgtagcattcatgcatgcgcgcgcacacacacacacggcgttttccagcagcgtggtatcgagctgtgcgtctttatgctttgcattgcattgcatggatgcatgaacgcatatatatctgcaagttatttagcgtagctacttgctagtataagtttagccgtcgtttcaaaagcctttgggcgccatggtttcttcttcgggtataatggtgtgtggtgcatatgcatcagtgcgtggcagcggtaactgcttcaggctcagccattcagtggggagcgttttatgtatcccttttgtatgttcatgttgtcacgcacacggtaccggttactgatttcttgg

SEQ ID NO: 2133 - DNA, 762 bp, Zea mays
  unsure (1)..(762): unsure at all n locations
  Clone ID: TF_LIB3205-339-Q1-K1-B8
cccacgcgtccgggcgtggtcacaatccaaggaggtgcggttttcatgcgcaccagcgctggcggctggtaacctgcaccaggatatgcctctgggaagacctggcaacaacatgactccccaggggaaaatggagaccaaaaggcttgtgaggttgcagtcgctactccatcgctctgctccggcaatggcgagtcctggcgcgaacaaaagaggaagagtcaggccgaatgttctgcaagtcaagacgatgatcttgatgatgagtccggtgggatgcgaggatcaggcggcagaggtacgaagcgcagccgcaccgcggaggtgcacaatttgtccgaaaggaggagaagggacaggatcaatgagaaaatgcgcgccctgcaagagctcatccccaactgcaacaagattgacaaagcctccatgctggatgaagcgatcgagtacctcaaaaccctccagcttcaagttcagatgatggccatgggaagtggactgtgcattcctcccatgctgctgccgcgagccatgcagctgcaaattccttcaattgctcatttccatcatctcggcatgggattgggttatgggatggggtgtcctcgatatgaacagcacagcggcagttccatttcagcccatccctggtgctcactatacttgtccgatgatcccaggcacgccaccacaaggtcttggaattggaatgcctggcacaaacacgatgccagtgtttggactccctgggnncagcatcca

SEQ ID NO: 2134 - DNA, 1780 bp, Zea mays
  unsure (1)..(1780): unsure at all n locations
  Clone ID: TF_ZmC8592_2
cctcgaggcctgtccggactgcggcggccgagatgaacgcgcggcttcctcccccaatggcgcccttcccaaaccctcgacgcgctgctctcgcccagatcccgcgtggcttccttccctcggctgccgagatgcatccctcttccccagctgctctcccccaccaaaccctcgacgcgcggcttcaacagagccccagcccgagcccatcccgccttcaatgccggatctcgccccatcgccaccaacgacgtcgtcaagtggtccaacatcgatccctctagcttttaaagcctctggatcctccgcagacgacgtcaagttgtccaacatcgatgtccaagagttcatcgccttcgatccggtctacggggcccagtgctagagaaaagatgagatggaactttgatgataaggtctttgaagcctcaaacagagtcttgaacattgtcttggatgctgtgaacaaaataaggtctctgaagtctccagtagacccacgcgtccgcccacgcgtccgtccacttttccgagccctcccagggtctcacctcgaggccggccgggactgaaaggccccacgaacttttactctagccctcccagggtctctcttcggcggcggcgatgtctctcgccccggacccggcggacggcggcgccggcaccggcaccggcgacgactggttcctcgactgcggcatcctcgacgacctcccggccgcggcctgcggggccttcccgtgggacgcgtccccgtcttcttccaaccccagtgtggaagtgggcagctatgtgaataccaatgatgttttcaaggagcccaatgatgtcttcaaggagcctggcagcaataagcgtttgaggtcaggatgcaatgatgtgcatgtgccaacatctaaagcttctagggaaaaaatgaggaggaacaagctgaatgacaggtttcttgaattggggtctacattagaaccagggaagccagtaaaagctgacaaagctgctatcctaagtgatgctactcgcatggttattcagcttcgttcagaagcacagcagctgaaggaaactaatggtagtcttgaagaaaagatcaaagaactcaaggccgagaaggatgaacttcgtgatgagaagcagaagctgaaattggagaaggagagtttagaacaccagatgaagctgatgacatcgactccaacctacatgcctcatccgaccctgatgccggcgcctttccctcaggcacccctagcgccgttccatgcccaggggcaagctgcagggcagaagctgatgatgccctttgtcagctatccggggtacccaatgtggcagttcatgccgccttcagaggtcgacacctcgaaggacagtgaagcgtgccctcctgttgcataatcgcttcgattggcggctggtcgtgctcacaccatgcgaattagtcgcaactgaagcccccccctagctgtcgattcattgattggctataactgctgttgttatatttgtagttcgttggtgaccaagtaagctgctgatatctgtggcggggcgccctactatagaggctactgataccccttcaatggctgtacatttttttactgttattctttttgcggagaaaagaagaatgtttgttcttgttctccacagcaacaatgtcacataccctattattctatatatatgtcgtgtattttatatttaacaaaaaaaaaaaaaaaaaaaaaaaggggcggccaaaaaaaaaaaaaaaaaaaaannnnnnnnnnng

SEQ ID NO: 2135 - DNA, 1264 bp, Zea mays
  unsure (1)..(1264): unsure at all n locations
  Clone ID: TF_ZmC312_1
ggtgggttctttgcgccgctgccggcctcgggcttcaacgacgccgggatgagctgggacgacgaggacgagatcgaccaaagcgtcgacgcctcctcgatggccatctcggcctccatggagaatgctgcgggcgcggtggcgggggcaagtggcgccggcggtggcagcgggagaggcaagaagaaagggatgccggccaagaacctcatggcggagcgccggcgtcgcaagaagctcaatgaccgcctctacatgctgcgctcggtggtgccgaagatcagcaagatggatagggcttctatccttggcgacgcaattgagtatctgaaggagctcctgcagaggatcagcgatcttcacaatgaacttgagtcagctccgagctcttcgcttgttggaccaacatcagctagcttcaacccatcaacaccgacattgcagacatttcctggccaggtcaaggaagaactttgcccgggctcattcccaagccctactggacaacaagccacagtcgaagtcaggatgagggaagggcatgcagtcaatatccacatgttctgtgcgcgtaggccaggcatcctgctgtcgacaatgacggccctcgacagcctaggcctcgacatcgagcaggcggtcatcagctgcttcaatggctttgcgatggacgtgttccgagctgagtgcgcggatggtcctggaatggtgcctgaagaaattaaggccgtgctgatgcacaccgccggcctccacaacgcaatgtagccggtccgaaaacgggccaccgccaggatgacgacgatcctcctcctttctactaagggcttcggttcggaagcggcataagattaagctgtggtggccattggttttctggggcaagtgatgaattttaagatgatgaggctcgccatctcgggcatgaggcatgagtgatgatgtaactatgggattcttttttttcttctcattagcctaatgtcggattttctcctctctgatacacttgtggtgtaatagaatctatgctgcgtgttgaacaatatatggtggtgaatggtgatgcggtagctagcatcaaactcagtgcctgttggtcagagatcgatggtgcaaagagagacgagttcattcatcagcgtccagcaatgattttgactggctatgggtccgtccgtccttgattcgaatcaaatgaattgaatcctctggcttcttgttatttaaaagttgtgggntgttgggggtattaatattnggg

SEQ ID NO: 2136 - DNA, 908 bp, Zea mays
  unsure (1)..(908): unsure at all n locations
  Clone ID: TF_ZmC112780_1
cggggnaaccgtcccgtctccaatcataaatgcacccgccgtttgcgatgcgacggacgacgacgcggccggaggagagggaggcccgcgaccgaggcgaagcgcaggaccgccggcactgcagccgatcgaaaggcgctctcaaaagctctgcgctgcgctggcagctttgagctttctcgggccggagaaaagccgaaacaaacaaacggactggccgagtcgaggagagagagagggtgagagggagaagagaaggcggagagagaaagcgagctgaggagcgcaggcgctgtcgctggcgaggacatgctcgcggcagcgcggtatgggctcaaaccataggcgtgtcaggaacggtggagagcggcgaccactactcgccttcgtctcggtcctcgcgcgctcctgggctgcctcttggtgctagaaaccctcgcgtcgcgggagcttggttgcgactgcaagcgccaagctgctgtgctgtgccgtgggtggcggcggcgggagtggaagtggaaccgcagccggtgctgtgatggacgcgcagcagcagctggatttggtcatgcgtcaccagagcatggccaccgtctgcgagagcgaggacgcgctggggtcgtcggagtcggatcccgcgaggccggcgcgcccgcgcggcaagaggagccgcgccgccgaggtgcacaacctctccgagaagaggaggaggagcaggatcaacgagaagatgaaggcgctgcagaccctcatacccaactcgagcaagacggacaaggcttccatgcttgatgatgccattgagtacctgaagcatcttcagctccaggtgcagatgttgtctatgaggaatggcctctatctgcccccaggaaacctggtctggagcacccgagactctggcaccc

SEQ ID NO: 2137 - DNA, 2817 bp, Zea mays
  Clone ID: TF_ZmC1150_2
cggcaaagcgaggccaagccactaacagccaaagccttgcagaaagactagggagaaagaagataagtgagaggatgaagcttcttcaagatcttgttcctgaatgcagtaagatcattggcaaggcaatcatgctcgatgagattatcaactatgtgcagtcattgcaacgacaagtcgagatcatatccaaacaagtaaagccacccactcgatcaccatatctccctctaggatcaagcggccttactggcccatttaaccaaggaatcatgcagccataattgatgtgcaccattgccaatcccgttgatgttttgcatggagctattcacgaggcgtcaacaatgaaccattattgatttgtccactgttatgttcgttgctggtgcaatcatgggatacattatgttcactgaacctacgcgcccagttcaaacggaacttacacctctatctcgtggcttccaagattgcgggctagtctacggtaattgttcatttctggactctagatagaaaagaaaattatggcctctagctcaagtcacataatgcatataatgaaatataatcaagttcaatcacaatatgaatacttaaatgcttttatgtggcaagttatattcttctgatattgtgctttttcggtgcaggtgatgaatccaataaccaaatatccttggacttttattgtagctttttgtgtgcatttgttccgatacttaacaattaacattatatgacaccatagtttctctaatcacatgtaactccatctagccatctaggtttgtcctaagtcaaacatatcttttaattttgattagaaatatctataaaaaataattgtcttaaataagcagagttatttggttttagtaatgaatttagcaatgccaatgctatttttatcgttctatataaattttagatattcatggtcaaacttaaaaatgtttgacttggacaaatatagatagacctacacatgcattgtgattttaggaagtcctacaattctcctccccaaagtctgctatcaacttctaacagttagtccagttttcatgaacaaatttagttttaatcattctatgttgtgccaaccgccagcaactaataatcagagctgggtcatatcatcatatcatagtagattgtatagctttcttccctgtgcatgcttactggttactagatgaaaaaggtcgtgttacgttatggcgcactcctctcctttgaataggacatgctttcacactctcaattcggcatatccttctagagactagctgtgagttgggtcctaaatgtttcttccatgttcaattcgaatggcattgttgtgttaattagccgtcctgttttgtatttttttcctacaagttatagtggttacattaatgactaaatcaagatcttgacccactttattgatgacacccttttttcttcttattgcttctcctatcgtctctgagtttgtcattccattcaaacacgaaatttgtgtcagtatagatgccatggaaattttggtttagcttgagtattttgtagatacttcattcttgagtattcttgagtttgccttgttataaattgcagcacactccaatggtcttctaaatgaatagcacactatagtcaagagtatgacttaccaaattcattattggttccaagcatcttgaaagagaagtccatcgtctctcttactgtcatctcagcatggctaacagaagcacgcagcgacaagattaccccacatgttgtatcatggtttactagctagagaggctactcaagatgaggaatttgaagttatgtatggtgaggacgatgatgaagacaaagatgacgaggatgatgatgattatgatacaaagaccaagggggctactggagggggaagggcagcagcgaacgacctgttgagtgcaagcaggagtgagtgctgcacattgaatattggcatgcattggttgtggagcaattagtctggttctacttgatgcaaggtcattgagttattgaagtgatattttgtcgaatattttatatgccattgcaaagcacgggcatctaactagtctttcttatatatgtacactacaatacataatcatttatgccattgtttactacaaatatatatattaggcaactcttgaactggttgcaaggaatatttccactaaaaaaaaaaaaaaaaaaaaaaaaaagggggggccgcagataccttccatgtgggaaggacttcagagcatgcctcagatgaacttcaaccctggtgtggcagctgatagcggcaccaacaactctggctccatgaagatcgaacagtgagctgctgtatagtagcttcgaaattgttgtgtgaatcactgaatcatcgtaaagcgctctcgagatgaagctttttttgtatagctggaggcctgaccatttatgctggattcctgcggttgctcccatactgtgcggcacattgtttatggtatggcatatggatcgtgtacagctggagctgaagactgattccactgtaaatttctgttgtgctttggcctgcgaaaattgggatggaaacctagtagcatccacgaaattcaaggacagaagcttgttgggattgggacttgggaccacgtgctgaatactgatgggcctaaacgtactagacgagtactaatagaatcgtagttgtaggtaaaaaaatgcagagtttgaaaccagtggttttgtcagaaattccatggagtttgctatatttatttatgatatcaaaacagaaactgaatggccgctgac

SEQ ID NO: 2138 - DNA, 1293 bp, Zea mays
  unsure (1)..(1293): unsure at all n locations
  Clone ID: TF_ZmC3246_1
atcacccntttttttccgcccaccaccacgcaccaaccgacccgccacgaacttcatcgcatcaaggcccctggcgtctcccgaaaatccaaagggccccctcccccgcgcctccgcggggaccttgttaacaatctgggccgcatccagggggggcattctgcaaagggcgagcccggttcgttctcgacctttcgtctcgctctcgcccgcccgcccgaccccgcggagccctagcctagccttgcccccgaccgcggattccccctcggccgccgcgcgcccgcacccgcacccgcgatgatgaactgcgccggaggcggagaccccgtggaggacttcctgatctccggcgccgtcgacgacgaagatctagccatcttctgcgacggaggacttgggattgagggtgtcaatggagatgcttgtggatttgagcagtctaatttgggcaaaaggagtagagatgaaccatgttcatctggtctaaaatccaaagcttgtcgtgaaaaaatgaggagggacaagctgaatgacaggttcctggaattaagttcggttatgaatcctggaaaacaagcaaagttggataaagccaatatcttgagcgacgcagcccgtatggtggcacaacttagaggtgaggcagaaaagcttaaagaatcaaatgagaagctgcgggagaatatcaaggacctgaaggaggagaagaatgagctccgcgaagagaaagtgaggctgaaggtagagaaagataggctggagcagcaagtcaaagccatgagtgtagctcctacaggatatgttccccatctccctcatccagcttcataccacccggctgcatttgctccatttgtgccgccacagcaagctgcaggcaacaaaagtgctccaatccctgcacctttccctgggatggcaatgtggcagtggctgcctccgaccatcgtggacacaactcaagacccaaagctctggccgcctaatgcttaggggcagctagctgccttggggtgttgactcgccaatcgccatgccgtttcatgcattgggcggcagatcagagtatcagttagtaggtccctggagaggaggaatcaagtttcgcaactcgcgtcatgtttatgctgtaacagttgcttccagcagtcgtcatcaacttgctttgttctattgaagggtgatgcatgtaattaatatgtggatcttaaccctctagctggcaaatgtgtcctttgctgcctaaaaaaaaaaaaaaaaaaaaaaaaaaaaaaaaaaaaaaaaactcga

SEQ ID NO: 2139 - DNA, 929 bp, Zea mays
  Clone ID: TF_ZmC13338_1
cccggtcgacccagcgtccggccggcgccgccgacatggtcaccaacttcagcaccattgacccgcagttcggcctgtccaactcgtccctggagctgcccggcatggacgactacctgcagctgcagcaggactccgtcgcctgcagagtgcgtgcgaggcgtggctgcgcgactcacccacggagcattgccgagagggaaagaaggacgaggatcagcaagaggctgaagaagctgcaagacctcgtgcccaacatggacaagcaaacgaatacgtcggacatgttggaccttgctgtggagtacatcaaagagctcaaggaccaagttgagaagctaaaacacgaccaagcaaactgctgttgcctaggcaacaagagctgctgctgatgctggagaagcagacggaggagggtttttacgccgtaacaatgtgactgttaaaccagagctgttgcttcaggagaccaggccgcgggcagaagtgcgtgacatgtggagcggcttccatgactcagcttcctcttttcttggttgttccacggactagcgaccggggtgccaacggcttgaagactaggagataacaagtaggacgatgttgtaatttagttaccgcgacgcggtggctctggctttcgtgtaaagaagtcctccctttcaacgcgactgggattgttgttgctggtaaaattgttgtaggaatatcatctgtgctccatttttcatcgagctcatctttttttttgtttatgtcgaactgcttttcgacgaaactgagaaaccggttaaacacgaccaagcaaactgttgttgcctaggcaacaagagctgctgctgatgcttgagaggcagactgaagaaggtttttatgccgtaacaatgtgactgttaaaccagagctgttgctttaggagaccatgccgt

SEQ ID NO: 2140 - DNA, 1326 bp, Zea mays
  Clone ID: TF_ZmC34773_1
gggcaagtttcggttttccagtgttctctccgttctctgagcggctccctctccatcattactctctctccaccgcaagtgtgcacactgcacagtgccactgaccactgcgagctctccctccagtttcacacaccctgatctgttcgcatcagtctcccggtcgcaagcgcctccgaaaccctagactcgcctcgcgagttgcttcgcttctcctgcccccgatggagccgtccccggcggtcgctgcggagctctggtgctcaccgcacctcgccgcgggcggcggccgcccgttggaggcgacctcggccgtcacggagaagagcagcggcggccgcggaggaggcggcgccgtccggaggaggccgagggagaccccggtgtccgaggatgactcgtcccggatcgtctccacttccggcggtggcggcggccaggatttgactgatctagaagcaaagcgttccaaaacaaataagtccagtaataataaaggcagtctaagaacagaggttgaaactgactcaagaagtgctggcaaggctgttagtaaaaacattccagcagcagagccaccaaaacaagattatatccatgtcagggcaaggaggggtcaagcaactgatagtcatagtcttgcagagagggcacgtcgtgagaaaataagtgaacgaatgaaagttctccaagatcttgtgcctggatgcaacaaggttattggcaaagcatcagtacttgatgagataattaattacatccagtcgttgcaatgtcaagttgagttcctgtccatgaaactagaggcagtgaatgcccaggcaaaccagggagttgaagtatttccagccaaagattacggttctcagacatacaacacagctcctgggctgacatttgatacgcaaaccagtagagaatacgcccagggcacgtcgacctcggaatggcttcacatgcagattggcagtggctatgaaagggtttcatgaacgagatgaatccaggcagccgctaaataaagtgaaccatgatcaatcatggccgtgcttgtagatcattctttttcattttttttgaaaccatcatgttccagacgcattttttattcatgcttggagctgtaattccagccggaacatgtatttttgatgaggcgctcatttgtttccccatctgaatctcaagactgtttctgctgttcatgtattccatggaatttctgtagatcgcgttcgtctgtcagaaggatgaataaatcagttgatgctttgattttgaatcaaaaaaaaaaaaagtgggcggacgtgtgggcggacgcgtggg

SEQ ID NO: 2141 - DNA, 1335 bp, Zea mays
  Clone ID: TF_ZmC8592_1
attgggtccctcgaggccggccggggccctggctcaaaaaaaaaaaaaaaaaaaagagaaccatgaacctcgaggccggccgggaccaagagatccacgaatatacccatcccattccccacaaggctccgtcccttcggcggcggcggcgatgtctctcccccctggcccggcggacagtggcgccggcaccggagacgactggttcctcgactgcggcatcctcgacgacctgcccgccgcggcctgcggggccttcccgtgggacgcgtccccgtcgtcttccaaccccagtgtggaagtgggcagctatgtaaacgccaatgatgcattcaaggagcccaatgatgtcttcaaggagcctggcagcagtaaacgtttacggtcaggatccagtgatatgccaacatctaaagcttgcagggaaagaatgaggaggaacaagctgaatgacaggtttcttgaactggggtctgcattagaacctgggaagccagtgaaagctgacaaagctgccatcctaagcgatgctactcgcatggttattcagctccgttcagaatcacagcaactgaaggagactaatggcagcctcgaagaaaagattaaagaactaaaggccgagaaggacgagcttcgcgacgagaagcagaaactgaaactggagaaggagagtctagagcaccagatgaagctgatggcatcggctccagcctacatgccccatccgaccctgatgccggcgcctttcgcccaggcgcccctagctccattccatgcccagggccaagctgcagggcagaagctgatgatgcccttcgtcggctacccagggtacccaatgtggcagttcatgccgccttcagaggtcgacacctcgaaggacagcgaggcgtgccctcctgtcgcatgatcaccttgatggggctggtcctgctcacaccatgtggattagccgcaactagttgtcgttgtcgatccattgatggggtataactgatgttcttaggctatctccagcagcctctctatcctattctctatcttactccctattttaaattttactctataaacagtacagtctatagtgtaagacaatgttttgcatgtttatatccacactttgctggagatgggcatggtagtctgttggtgaccaaggaagctgtgatatctgtggcgaggtgccctgctagaggctcctttaatgggtgtacaattttcgtggtggaaagaagaatgttcgttcttgttctccatagcaacagtgtcatattatctatctatgccatatatattttataaataaaaaaaaaaaaaagcgaacgctgt

SEQ ID NO: 2142 - DNA, 845 bp, Zea mays
  unsure (1)..(845): unsure at all n locations
  Clone ID: TF_ZmC8592_5
gggaccctcgaggccggccgggccgggactcttctcatcttctcctgtcatgtatgcgctgatgctgctatgatattaattttgagagtaatttgcagtgatcttgttgtttgacctttttttttcttgctttactgaaagcggtccactccatatgctcagaattcaatgccttacatgtagctagttgtctgattactttcgtccatgaatggtttccagttaattggttgagaacaggtactagccaaatacgaaaaaaaagttcatgtccagttggagctgctaatcacccttatatttcacagtgtggaagtgggcagctatgtaaacgccaatgatgcattcaaggagcccaatgatgtcttcaaggagcctggcagcagtaaacgtttacggtcaggatccagtgatatgccaacatctaaagcttgcagggaaagaatgaggaggaacaagctgaatgacaggtttcttgaactggggtctgcattagaacctgggaagccagtgaaagctgacaaagctgccatcctaagcgatgctactcgcatggttattcagctccgttcagaatcacagcaactgaaggagactaatggcagcctcgaagaaaagattaaagaactaaaggccgagaaggacgagcttcgcgacgagaagcagaaactgaaactggagaaggagagtctagagcaccagatgaagctgatggcatcggctccagcctacatgccccatccgaccctgatgccggcgccttttcgccccagcgcccctagctccattccatgcccanggccaagctgcagggcagaagctgatgatgcccttcgtcggctacc

SEQ ID NO: 2143 - DNA, 1177 bp, Zea mays
  Clone ID: TF_ZmC28558_1
gcgagggggaggaggggagccccgtgaagctgtccaagccggagcaggccggcagcgacagctccgtcgaggacggcggcgcgcagaaccagaagccgccgccgccggggaaggggaagaatgccaagccggtggagcctcccagggactacgtccatgtccgggccaggagagggcaggctaccgacagccacagcctcgcagagagggtgagaagggagaggatcagccagaggatgaaggtccttcaggacctggtgccaggatgcaacaaggtgatcggcaaggcgctcatgctcgacgagatcataaactacgtgcagtcgctgcaacggcaggtcgagttcctctccatgaagctcgcaaccgtcaacccactggacctgagcaacctgcccacgctcctacaaaaagatatgttccaggcctgcggcgcttcggcaagctcggtcttctcgctggagagctgcagcccggggttcccgttcggcgggcaaggggacgtgttccagtccttcgtcccgaacggcctggagaacccgtgcggcggcctgaacccgctggacctggctctgtcccaggctaccggcgggcagttcggtttccaggacggaacggccggcacaaacctgcagcaaaggaactactgggaggaggaggaggaggacctgcagagcgtgttccacatcgacgacaacgggcagagccaggagcacggggcctcagcttcagcacaaagcttccatggtcagcttcaaccacaagagggccacatgaagatggagttcttctgatcgggcctcgacacccagccgccgacggccgagggagcgacctgtacatagcgaagactcgaggtacaagtacaaaagcaccagcggcggtggcggcggcggggacggaagctctgaagctatagctaacagcaagtccgtacatgtaggcccttccttgcccttggagaggcgagttcttcgctcgccgtagcgtgaaccagggggtgggcgatcgtgtgatttctttgaacgttttcgatccggcgattaatttgattgattaacacagccaccccgacgatagcgtacgtagcaatcacccgaacagtgaagctgtcacttttgtgtataagataatgcatatggtgcagatattagtatcaaaagcgcttctctctttt

SEQ ID NO: 2144 - DNA, 725 bp, Zea mays
  Clone ID: TF_LIB5116-057-A1-PF1-A9
gttctttttcgtgttccttgcaattttgactgagaaaaaaactcattgaacgcccgcgccgctccgatcttcttttccggcgacggcggcggtggaggcggtggtggcagtttggcttcgctcttccttggtctgaggatctccacccgcagtttgtgcaggatttggttgccgtgcggtggtcggccggctagggcaggcggcggggccggtctcctctctcatgcagaatcgaatacaatcccatcctgccggagcctcgtcctctgcctccagcggcggagacggctctggttcaggcttctgtctcagtgatataatggaaatcgatgctggcagcggaggagaccacaaagcaccaggctccccgaggtccaagcattccgctacagagcagagacgtcgctgcaaaatcaatgagagatttcagatacttcgtgatcttgtaccacaaagcgaccagaagagagataaggccacattccttttggaggtgattgaatatgtcaaattcttacaagaaaaggtacaaaagcatgaagcatgtgctggtggagactggagccaagaaaatacaaaattggcgccttggagtagcaatcgagtaccagttgacctcatgccaggtgtagcacccacaacaaaaattggctctgctggaaactttctggacaacagcatccccaccatgccagaaatgctgcaaaatgctgaaacagtagtag

SEQ ID NO: 2145 - DNA, 2832 bp, Zea mays
  Clone ID: TF_ZmC9134_1
aattcggcacgaggttcgggtttgcgccataatcccacggaatccgcattctgaaccatttccttcgctttccccttcgccctctctctctcccagtctccacccaccatttctcctctttcccggggggcggctgcaccttgccctcccccatgaacctgtggacggacgacaacgcctccatgatggaggccttcatggcttctgccgacctccccaccttcccctggggagcgccggccgggggcggcaactcgtcggccgccgcggcgtcgccgccgccgccgagatgccagcggcgatggctcccgggttcaaccaggacacgctgcagcagaggctacaagccatgatagaggggtcgagggagacctggacctacgccatcttctggcagtcctcccttgactccgccaccggcgcctcgctgctcggctggggggacggctactacaagggctgcgacgaagacaagcgcaagcagaagccgctcacgccctccgcccaggccgagcaggagcaccgcaagcgcgtgctccgcgagctcaactccctcatctccggcgcggcggcggctcccgacgaggccgtcgaggaggaggtcaccgataccgagtggttcttcctcgtctccatgacgcagtcgtttctcaacggttcgggcctccccgggcaggcgctcttcgccgggcagcccacatggatcgcctctggcctctcctccgcgccgtgcgagcgcgcgcgtcaggcctacaacttcggcctccgcaccatggtatgcttccccgtcggcaccggggtgctcgagctcggctccaccgacgtcgtgttcaagaccgccgagagcatggctaagatccgctcgctctttgggggcggagcagggggtggctcgtggccgcccgtgcagcctcaggcgccgtcgtcgcagcagcccgccgccggagccgaccacgcggagacggacccgtccatgctatggctcgccgacgcgccggtcatggacatcaaggattccttgtcgcacccgtcggccgagatctccgtctccaagcctccgccgcatccgccgcagatccattttgagaacgggagcacgagcacgctcacggagaaccccagcccctccgtgcacgcgccgccacccccgccggcgccggctgctccacagcagcggcagcaccagcaccagaatcaggcgcaccagggcccgttccgccgggagctcaatttctcggacttcgcgtccactccttccttggcggcgaccccgccgttcttcaagcccgagtccggcgagatcctcagcttcggcgccgacagcaacgcccggaggaacccgtcgccggtacctcccgccgccaccgccagcctcaccaccgctcccgggagcctcttctcgcagcacacggcgaccatgacggccgccgcggcgaacgacgcgaagaacaacaacaagcgctcaatggaggccacctcccgggcgagcaacaccaaccaccacccggcggcgacggcgaacgagggcatgctgtccttctcgtcggcgccgactacgcggccgtcgacgggcacgggcgcgccggccaagtcggagtccgaccactcggacctggacgcgtctgtgcgcgaggtggagagcagccgcgtggtggcgccgccaccggaggcggagaagcggccgcgaaagcgcgggcggaagcccgcgaacgggcgcgaggagccgctgaaccacgtggaggcggagcggcagcggcgggagaagctgaaccagcgcttctacgcgctgcgcgccgtggtgcccaacgtgtcgaagatggacaaggcgtcgctgctcggcgacgccatctcctacatcaacgagctccggggcaagctgacgtcgctggagaccgacaaggagacgctgcagacccaggtggaggcgctcaagaaggagcgcgacgcgcggccgccctcgcactccgctgggctcggcgggcacgacggcgggccgcgctgccacgcggtggagatcgacgccaagatcctggggctggaggccatgatccgcgtgcagtgccacaagcgcaaccacccgtcggcgcggctgatgacagcgctccgcgagctcgacctggacgtgtaccacgccagcgtgtccgtcgtcaaggacctcatgatccagcaggtcgccgtcaagatggccagccgcgtgtacacgcaggaccagctcagcgccgcgctctacagccgcctcgcggagcccgggtctgccatgggcaggtaatcaaggaggagagctgctcagctcgcctgtggctgccggattaggggacgacactgatactactgctactcaccaccggactgtcctgtcgtggtcaccacggttacaacacgataggcagaaagattcaggagggagggagacgacgacgatgccggtgctgtataaactttagaaggatggatggatggatgatgataccgagcttctgctgctgttcatcatcatcttcttgtgtttttgctagtagcgtgttaattagcaggattaagcaaccaacaagtgtccaaccgttgttgttaattaagtacatgttgtgagcgacccaaaaaaaaaaaaaaaaaaaaaaaaaaaaaaaaaaaaaaaaaaaaaaaaaaaaaaaaaaaaaaaatgtgagctgtgatgatgatggatcgaccgatgttagcgttgggttggatcgaaaactgtgtatagtatatggatcagcagtcgtcctatccggtggacgatgccctgatcctgatgtatgtatttttacagcaggatttcgctttgccatggagtcaggctaattgttcccc

SEQ ID NO: 2146 - DNA, 610 bp, Zea mays
  Clone ID: TF_LIB3597-024-Q1-K6-G11
catgcacgcccccaactgatgcagcacctcaagtccgcagcgcccggcagcccaagcggatttcggggagctcagacccggaggaacccttgcggagagacagcccccctcccgggagccccttgcaggacagtcctcaccccgacgttccgctactgcagacgggagtgcacagtggccccggctcgccgcgccatggagcggatccccagcgcgcaaccgccccccgcctgcctgcccaaagctccgggactggagcccggagacctacctgggatggattttgcccacatgtaccaagtgtacaagtcgaggcggggaataaagcggagcgaggatagcaaggagacctacaaactgccgcaccggctcatcgagaaaaagagacgtgaccggattaacgagtgcatcgcccagctgaaggatctcctacccgaacatctcaaacttacaactttgggtcacttggaaaaagcagtcgttctggaacttaccttgaagcatgtgaaagcactaacaaacctaattgaccagcagcagcagaaaatccttgccctgcagagcggtttacaagctggtgagctgtcggggagaaatgttgaagcaggtc

SEQ ID NO: 2147 - DNA, 963 bp, Zea mays
  Clone ID: TF_ZmC3797_1
cgacgacgacgaggaacatggacatggagaggacccgccgcaggaagctcaacgagaggctctacgcgctccggagcgtcgtgcccaacatcaccaagatggacaaggcgtccatagtcagggacgccatcgcccacatcgagcatctgcaggagcaggagcgccgactgctcgccgagatatccgttctccagtcttctgacgacggcaccgccgccgccgccgccgtcaagacggaggacgctgccgccactgggggtgctgcgtacgacgtcgacagcgtcccctggaggaagaagccgagggcggtgccactgccgtccgtgtatttcaccgacaacccgacgagctccatctcgtcatctccgccagtccgaatcctggaggtgcaggtctcgcaggcaggggagagggtggcggtggtgagcctctggtgcagcaggggcagggacgccgtgggcaagatttgcctcgcactggagccgctgcgcctccgggtcgtcacggccaccatcaccgcgcgcggcgacactgtcttccacacactgttcgtggagacaggagaaacgggtggtgctcggctaaaggaggcgatactggctgctctcgctcggttcaacgtcctcgctaacgctgaccaagtcgtccatgagttactgggatgattgatgcggtggcatctcggacagcaacacctggtgttgttgtcgttgtcaccactctcgactgtccgattcaataatgatgtacctagggctgacaataggcctcaaattttacactataaaacttaaggattaaatcggattaggatcggctttgtttctattcatttttgaactacaaattatttagggccttaacaaatggtgaagaggcatttggatcgtgatccattaccacccctagatgtacctcaggaatgtttgaatatgatgtcattgccatttcttggcctgaagt

SEQ ID NO: 2148 - DNA, 945 bp, Zea mays
  Clone ID: TF_ZM3641.C1.o6.fg
atggcggcgcagatgcccttcctggcgctgctccagggcgcaggcgtcgtggtggaggcggaggcggaggagcagcagcagcagcacgagcacgacgggcgcaagcggcaggccttcgcgcgcgccgtctccaaactcgacctgctcgagagctgtctcacgcaggcggtggatcccgcggcggaggcgtgtgcgcccgtggccagcaggacgaccgagaggcggaggaagcggccgaggacccgcgcgcgagctgcgccaccgccggagaagcgcagcaagcccgaggaggccgagagccagcggatgacgcacatcgccgtggagcgcaaccggcggcgcctcatgaacgaccacctggcctcgctccgctccctcatcccctcccgctacatcccccgcgtgagccatgcaatgcaaagcccatgcatgcatgctgcgttccgtttcgatctgacgacgcaacggttacatgcaatgcagggcgaccaggcgacggtggtgggcggtgcgatcgactacgtgaagcagctggagcagcggctggtggcgctgcaggcggccgcgggcgcgcggcgcggcagcagtgccgcgtcggacgacggcgtgttcctcgtgtccccgcagtacgcgagctactcgggctcgcgcggcggcggcggcggcctcggcgtggacgtggaggcgacgggcgcggtgggcgggcacgtgcgcgtgcgcgtagcggggaggcggtggcccggccggctcgtgcgcgccgtcgccgcgctggagggcctccgcctcgcggtcttgcacctcgccgtcacctccgtcgggcgtgacgccgtcgtgtgctgcttcaacctcaagatggaggaagggtgcgaggtggcaacggcggacgaggtggcgacggtggtgcaccagatcttcgcctgctccgccgctggcgcatgctgctga

SEQ ID NO: 2149 - DNA, 521 bp, Zea mays
  unsure (1)..(521): unsure at all n locations
  Clone ID: TF_jC-zmXLIB3527P004be08d1
gtgctcgccgggggagatcctgcaggagctgggtgacaacggtgctgccggctcactacctgtggcgtctgcggggagtgcgagtggcggcgccggtcaggatgccccggcaatggctgcggcagcggcgtccggaaggaggaagcggtggaggatgatgccagtgaagagcgaggaggaagtggagagccagcggatgatccacattgcggtggagcgcaaccgccgcaagcagatgaacgagcacctcgccgcgctccgctcactcatgccgccggcccacacgcaacggggcgatcaggcatccatcgtcggcggcgcgatcaacttcgtcaaggagctggagcagctgctgcagtcgctggaggcgcggaggcgttccccgcagtgcgctgcctacgccgtcgatcccgacgacgcggggccgttcgcggacttcctcaccttcccgcagtactcgatgtgcgccgtcattgcggccccagagaacactggccaccaccgngagggcggcgccgtcg

SEQ ID NO: 2150 - DNA, 602 bp, Zea mays
  unsure (1)..(602): unsure at all n locations
  Clone ID: TF_LIB4073-014-Q6-K1-H9
cggacgcgtgggcggacgcgtgggcagcaaccaactctctgcgttcgtgtgtgtgtgttcatcctcatcggatttgtgtcattcgtgtgataggattcaacagaaaactactactcctgtggcagcaggaagaaagcgacaggaggagcaaggaggtctcatcctgcagaaacacacaacctgacagagaagcgacgaaggcgcaagatagacgacaagttgaagacccttcgacagctcgttccagggtgcgatgacaagagcaaccaagcctcaattctggaccagaccatccagcacatcaactcactgcagcaacaaatccaggtccaacctaaggcaatctcgttggggtgcgatgccatcaagccaccagcagtttacccagtcgtgctgccacagggcacggctgtcgctgccgccggcgagctgctgccgcctgcagccgcgcttcctccagcggtgctggccatggcggcgagagggcatgtccggccagggttggcgcccttgcaccacctccgtcgttggtgcctttcggtccctttcttccagtggtgactcaattntgaagacacaggcagcagctgctgcgatcatat

SEQ ID NO: 2151 - DNA, 926 bp, Zea mays
  unsure (1)..(926): unsure at all n locations
  Clone ID: TF_ZmC792773_1
cgttgctgtcgattttgcaaggatcgaggctggccgggccgggaaccaaccccggccgtcagctggcaaaatggaggactcgagcctgttcctgcagtgggcgatgagcacgctgcggcatgagcaacaacccgcggcagccgtcaacgacgactgcagcagcgaggcaacgttcccctcactccaagcgctccgcgaggcctcgcatgcggccgagatggtccaggagctgatcggagaagccccagcgaacagctggagctcgggcgacaccaccgacggcagcataggaggcaacagcaactcggtccctggccctgctgcggcggccatggagcacgatgtctggcctgctgcgtcgtcgaagacctctccggccaggcgcgccttgagcaggagcagcagcgacaccaaccctcccgtgagctggaacttcagcgccgcagcctcggcacagctggccggcagcgccgacggcatgctgccggaattcgcccccaagagcgccctaccgccggaccaagcgtacggatcaccgcgggcaaggagagccggcttgaagagcctggcgggatccatgtcgtcggcggcgtacgctcaagaccacatcatcgcggagcggaagcggagggagaagatcaaccagcggttcatcgagctctccaccgtgatcccaggcctcaagaagatggacaaggcaacgatcctttcagacgcgaccaagtatgtgaaagaactccatggaaagctcaaggacctggaggctggcggcagcaaccggcgcaagagcantcgagacggtggtgctcgtcaaaaggccgtgccctcatgctgcgcccgcgccggacgacgatgccctcccattgtcagcgtcgtcaggcacgccggctgagacgaagacgcagctgccggagatcgaggcccgg

SEQ ID NO: 2152 - DNA, 1768 bp, Zea mays
  unsure (1)..(1768): unsure at all n locations
  Clone ID: TF_ZmC10010_1
ggccgctttttttttttttttttaaacccagcaagcaacataganaatgtgcaacgagcagtagtccttatccctctacgtcaatcgcagggaaaacaatctcaagtcagacaagaagccggccgggttggaagacacatacatatattctccctcgctctcaaacccttttccactcacgaagagcagagctgttgctagagctggtcgtcttcctcttcctcttcctcctcctgcctcgatctgacgagagctcagccttgccttagtctcgccatcgcagaaggcagaagcactagttcctgacagccacaaaaccaaccaaaggccaagctaccgtgaggcgagggaaagggaaagatcacatatcgcctattcgcctacctctgcgtgcatcagaagatgatccccttcataaagatgaaacattcccattccctccactagaagctccgggaggacgcagcaagctcaccgaagccagcaaccgatggatcagaggcgcgtcacggcgaggttcggcagcaagacgagctcggagcggaggatgctgcggcgagtgaggctccccttctggtcctgccctccaaaccggcctccaggcacctgagcgcctcaaatcctcgatagaacagctggtctcgtgctcccctcccccctgtctctctactctgactttctttctttctttctccgctccgctccccgtgcccctcctgctccttggaccctgcctgttctgtcagtcagtctccctccctagaacggcatggctctgcgttttgtgtgatctcgtcgcgagcctgtccgccggtgccggtgcctcaatccccttgggagaagcaagggctcctgtctggtccgtgttcttgggaaccagggccttggtactgctgctgccgcgtgcttcactgcttcctggctgcctccgatcctctcgtctcgtgtgtgaaagaaacattccggacccacgcgtccgcccacgcgtccgccgcaacttgctggatgcaagagctgccctgtccctgccctgagcccctgtttccatcggaaaaggcaacagctcttgcgtgcttggcacctgccgagtaattcgttatatatacagtgctcccacgaagcactagttggcagctgctgcgctgttatgttcttgtgcctcgtggatcgtccccgtcggcctcgaagctttccacgacgaaatggacgacatgggctccgtccccttcgccgacgccgggctcctcgacgggttctacggcggtagccatggacatggtggtgactacgagctgctcgctagccagctgggagcgggagcgtcgtcgacgtcgcctgccatcttagacggcagcgtgccgctggtcgacgccgcggcctccgcggaggaggcgacgaggagtaagggagaccacctccaggatgacaaggcggcgatggcgctcaagagccacagcgaggcggagcggcgccggagggagaggatcaacgcgcacctcgccacgctccggaccatggtgccctgctccgacaagatggacaaggccgcggtgttggctgaggtgataacccacgtgaagaagctcaagtccaccgcggcgcacatccgagaccgctgcgccgccgtcccggccgacgcggacgacgtcgtcgtcgagctggtccatggcggcgcggcgccgccgtcggccggaggcggcgtcctcgtcagggcgacgctcagctgcgacgacggcgcagacgtgttcgcggacgtcaggcacgcgct

SEQ ID NO: 2153 - DNA, 1393 bp, Zea mays
  Clone ID: TF_ZmC18771_3
cgctgtcaggccacagattcgtcatccgactccgatgaggctgcatcctgtcgtcctcgactgttgactgctgtcgaggtatgctgcgcccgccatggagaatcagtgaacttttaccagagcgtcgacgcgtcctccatggagaatgctgcgcccgcggcggcagcgggggaggcaagaagaaagggatgccggccaagaacctcatggccgagcgccgccgtcgcaagaagctgaatgaccgcctctacatgctgcgctcggtggtgcccaagatcagcaaggcttctgtaacacgggcgcttaagaaaggcactacacttgattctgtcatagagatgctgaagggggttacacctgagctttcttgccccattgttcttttcacatactataatccaattctgaaacgtggtgtgggaaacttcatgtctactatcaaacaagctggcatacatggacttgtagtgcctgatcttcctttggaggagacagcgttgctgaggagcgaggccattatgcacaacatagagctggttcatacccactctcatctttgcatgcaccacttgcacaaagtttgttgcgtacttgtgttgctatctgggtgctaactaaattcttactcgagatgggacctatcaaatcttcagcttgggctctgcccattccagacctgcaaatatacacagttgcaaaagatcttctgggcctttgcagcaacccagccctagaagcgggtctagctacttgggctcacacatgtcaacggggtttgtccagtccactaaattcaggataggttacatcaaggccttttttatttctttttgtaacctggtttggtaccacacctaatagctttgcttattaatcatggtggaccaatcaacagaatagatatcttgagtgtaatgtacttggtattgttataaaagcttcctttatcgaagaaaatcttgagtgtcagccatataccattttttattttgcatgattgcttgcaggtgctgcttacaacgccaaccacgccgacagatcggatgaagggaattgcacaagcttcagaaggatttctctatcttgtgagcgctgtaggggttacaggtgcacgctcaaatgtaaacttacgtgtagaacaccttcttagggagatcaagaaggtatattttttggtgtctatgacatgtggggccagtggcatacaaatggttatcttcctggctttacaggttacagacaaaccggtagctgttggtttcggtgtatcgactccagagcatgtgaaacagatcgtgggctggggagcggacggtgtgattgttggcagtgcgattgtgaggcagttgtgtgaggctgctactcctgaagagggtctggaaaggctcgagga

SEQ ID NO: 2154 - DNA, 1539 bp, Zea mays
  Clone ID: TF_ZmC252_1
ctgagggcgggcatggccacggcggactccctcgcaggtagcggtagcaggctaaagggccagctgagcttctcgtcacggcaggggtcattgatgtcccagatctcagagatggacagcgaggaggtcggagggagcagcccagaggctgccggcggaggcagggggtacatccctgggtacccaatgggctggttctgggtgggaggactcatcggctctcatgtcagacaatttgtctggcatgaaacgcccccgggactcgtcggagcctggccagagcggccttacgcaccagttcagcgtgcccaagacgtcgtctgagatggcaactattgagaaattcctccagttccaggacgccgtgccttggaagatccgtgccaggcgggggtgcgccactcatccacgcagcatcgctgagagggggaggagaacaaagatcagtgagcgaatccgaaagctgcaagaactcgttccaaatatggacaagcaaaccaacacatctgacatgctggatttggctgtcgactacatcaaggatctccagaagcaggttaaggtgctaaaggagagccaagataattgcacctgctcagcaagcaagaaccagcagcactcctgctgaaaccgtaatgctcactgtacatgacctcgaaagcatgtccactcgggaaagaaaaagatgtaagacagctctcatgcatgttgtttcatgaggttttgaactgcagcagttgagaggctttatctaccaggcagtgtagcttttgtatgagcgaagggggatggagcaatggcatcatcaagcattcaagtgattgggagaagggtaaaaaaagtggggagagatatatatataggagaaacaactgtatagtttggctgtagcttttctatatatacacacacgcactaccctttcagtagaaagtggttaatttacctatgttagagcatctccaagagaggctctaaacatggtcctattttaaatatagggctcaaaaccataaaacatccttccaacagcggccctattttataaaatttcatcaaatggttataaaaaaaaaaaaaaaaaaaaaaaaaaaaaaaaaaaaaaaaaaaaaaaaaaaaaaaaaaaaaaaaaaaaaaaaaaaaaaaaaaaaaaaaaaaaaaaaaaaaaaaaaaaaggggggggcctttttaaggaaccaaattttacttcccggggctggcaaaataaaaattttttttaggggcccccaaattaaaattccggggcggtggttaaaaaacttggagcggggaaaacccctgggttacccaaaataatgcccttggggcaaatcccccttttgccaggtggggaaattaaaaaaaaggcccccccgatccccctttcaaaaaagtgccccaccctaatgggaaaagggaccccccctttaccggggcaataaaccgcggggggtgggggggtttccccccaggtggccccttacattggacggcgcctaagcccccgttcttttggttttttttccttttttttttttg

SEQ ID NO: 2155 - DNA, 626 bp, Zea mays
  Clone ID: TF_LIB4729-044-R1-K1-F12
agatctgccgacttcacaacttttcagaaagggtaggtaggttgttatcgtcgaccacgcgcgtatgatacgtgtggacgacggatcgtgcatgaccctgctgtgggcgtttgatctcgtgtttaatttgtctagaacacttgtagaggagaagggacaggatcaacgagaagctgagagcgttgcaggagcttcttccaaactgcaccaagaccgacaaagtttccatgctagatgaagcgatcgactacctaaaatccctccagctacagcttcagatgctggtcatggggaaggggggaggaatggcaccggtggttcctcctgagctgcagcagtacatgcactacatcacggccgaccccgcccaccagatgatgcctccgccgctgcggccctccgccgggcagctgcagcccgccgccggccggcagtttcagataacccaagcagcagcagcagcagccaacaacgacaacgacccccagcgacgacgacagtccaacgtcgagtcggacttcttgagccagatgcagaacctgcacccctccgatcagccgcctcatcatcacaacttcctcaggccgccgagattgcagctctttacgccggaacagaggggcggc

SEQ ID NO: 2156 - DNA, 1816 bp, Zea mays
  Clone ID: TF_ZmC2238_1
caggctctccctaggtccctacctctccaatcttctccttccttgaccccagcggaggaggagccagggcgtgcgagtgcgaactgcgaacgcagcagcagggggttaggcgcgcacggcacaccagtgagtgccatcccctctcgcctcggcgccgtctccctataactaatggcgccactcccccctagcgccgcctccggtcccgtgtcctcctcccctcgttcccttgtcccggacgcctgcgccgagccgatgcgccgcgcctcgccgccgcaggagctccccgtcgccaggggcgagatccaggcggcgctggcccccgccaatgcctcctccgcgggcgcccacggaggcggaggctccttcacggcgctgctgggactccccacctcgcaggccatggagctgctcctcccccgcacgacgccccccgccctagccacagcgcccgcgccaaccttcccctccgacccgcacctcgtggaccgcgccgcgcgcttatccacgttcgcgcccccgtccccgtccccatcctccacgatgacggaccagcccctccccgccgccgctaacgccggcaagcgcaaggccgaccccgtcgaccgtgcccccaaggggaaggcggcgaagaaggggaagacggcggaggagaagctcgcgggcggcgacggcgacgacgagaagccggcgtacgtgcacgtgcgggccaggcggggccaggccacggacagccacagcctcgccgagcgggcgagacgcgagaagatcaatgcgaggatggagctgctcaaggagctggtccccggctgcagtaaggtatcaggaacagcattggtgctagatgagatcatcaatcatgttcagtctctccaaaggcaagttgagtacttgtcaatgaggctcgcagctgtaaacccaagggtcgattttggtgggctagacagctttctgaccacagagtgtggaaggatagcaggcttcaactgcaagaacggaatcgacttggagcaggtaacctggccagaaatgggtgttcatggagcaaggcagctgatgcaacttcaacagcagttctggcatggcgatttagcacatccacaccaagtggcttcacagtgggaaaagcgtggggatggccatcctcccgtgtttagcaactccagtccctctctcttcggctatgatctaacaagctctggagcccagcaaaccccggcgagcaagctaaagacggagctttgagcgacgatggatggtagatagcattgtcaggagagcaggctgaacatatgcggtgggggcgcagcagcgacatgatttcagcaagttgaccaggtcaggctacaaacgggctgggaatgttgatgtgaagcgcatggagaccaacattttcagagacagagaggatgtacatatagcgatagagaatactattggtgttgagctgaagacgggaataccatagttgtattgtagagatgggcacgccctgctgctatcgctgaagagatgggagggcgagcgatactccggtctagttgctggtattcttggtgtatttcttactataatggcccaatcttaaggttatatgagcagcaatttttatgaaccaaaacccaaaaaaaaccatcatgggtcatcatatacccttctcgaatgcatttcaacaaaacatgaatgtagcacagtataactacatgtaacacacgtgcttgttacaatcctactgttccaagccattctaggttttctttaaggcatacggattttgttacatatttatatatggcttttgttatgtactttcaga

SEQ ID NO: 2157 - DNA, 1211 bp, Zea mays
  Clone ID: TF_ZmC2238_3
cccccctgggtcgacccagcgtccgcgccaaccttcccctccgacccgcacctcgtggaccgcgccgcgcgcttatccacgttcgcgcccccgtccccgtccccatcctccacgtccccggccccgcccctccccgccgccgctaacgccggcaagcgcaaggccgacgagaagccggcgtacgtgcacgtgcgggccaggcggggccaggccacggacagccacagcctcgccgagcgggcgagacgcgagaagatcaatgcgaggatggagctgctcaaggagctggtccccggctgcagtaaggtatcaggaacagcattggtgctagatgagatcatcaatcatgttcagtctctccaaaggcaagttgagtgtggaaggatagcaggcttcaactgcaagaacggaatcgacttggagcaggtaacctggccagaaatgggtgttcatggagcaaggcagctgatgcaacttcaacagcagttctggcatggcgatttagcacatccacaccaagtggcttcacagtgggaaaagcgtggggatggccatcctcccgtgtttagcaactccagtccctctctcttcggctatgatctaacaagctctggtaaaccttgcacgcagtcctatatcaccttcctgaatgaatttagttgtttgtcgcttacttcacatatcacagcctggcttgccccacaacttttgtctcttagtttgtcccgccagtgctctcttgagaacaaagtgtactgataggtaaatttaaaaatttgctgtccaaaacctgaggtgaatattttctactatctaggggaagtttctgaagtatacaaagctatttatagtcatggccaaatcttgaatatgctagcatagtagcattgctgttatattggcccagatagcaaatagacacagaaacacaggtgaagcaaaagacatacagaagcatgtggcagtacagtgaccaagtgttttgcattagctaataaacgtgatagagagccagagatcccaactaggagtccctctgtttgcttatggaatttggaaacaacacagatatctaatttgagttgccgcgccctttttcagaggaaaacttctatttccactgcttcagaactatcagcattatccacttttcatactaacaaaaaccatgagcccaggacttcgctagaaagattagcagattagagtgt

SEQ ID NO: 2158 - DNA, 1502 bp, Zea mays
  unsure (1)..(1502): unsure at all n locations
  Clone ID: TF_ZmC18277_2
gccggccggtccgggactctcacttcctgccagtgccaacaagtcccctcttcttcgtctccaaagagacaaaacccaagagaggatcgtacgtcgtagggatcttgttcaatggcggacgcggacctgacaccaaaccactcgctcctcctcaagatgcctgcggcttcggcccacgcccactccccaagcctctcgagcctcctgttatacggccaggagagccatggcgaagcagcgcctgcaaacgcaaatgcaaatgcggcagcagcaacggtggaggacgccgcctcacttgagacctcttctgcagtggttgacagtgcatctccaatggagaggaagaggaaggctacagcagaagacagtgctgcaatcagctctcctcaaccaaaggactgcaagcaggagagcaagagcaggagggggaagaggccccgaaaggagaccgaggagaagagcagcactgatgaagacgaggcctccaaggggtacatccatgtgagggcgaggaggggccaggcgacagacagccacagcctcgcagagagggtgaggagagagaggatcagcgagaggatgaggatgctgcaggcactggtccctggctgcgacaaggttactggaaaggccatggttttggacgagatcatcaattacgtgcagtccctgcagaaccaggtcgagttcctttccatgaggattgcctccatgagcccagtgctgtacgggttcggaacgaacagtgaaggccttcatgatcatcacgcaccanagatgggaggcgtgtcgttccaggaagccgccattgcagtgccagcaggtccagcggcagcggtgagccaagctagcagtaggccggctccatctgaagccaccatgaacaccgcttgcactaccacgccctactcagtctcactgcaggcccaggcttccatctcattctctccctctcaggaaaacggcggcacttattacctggtgcagcaagcggtgggggagcaggcaacgaggcaggaggagctgctgctgagccagttggtgttcagcaacatgtgctcgttccagtaggggggcagggcaggcaagagtgtttgcgcgagcggaagcgaggaaagagacccccacccacacacccatgcacattgagtcattgacaataggtactgttgcaagctaagtttcattgattgggaggccgacgactgaaaggaggaaatgatgctgcaagatttggctagtaggagcgccagatgagtttcagatccgagcggcaagcggagcctgctgtttgtttgcacattttgagagactttgtagtttgtaatgtttctagctcctgtatgacgattttctcggcggctgcacctgacctgcccaccgtcaccagctcaccgttgtagtagtctccgatgagcaaatcggttgttaatacgtaagagaggagagctatttttgttcttaggcaaacaatgcttaactgtttcattattcaacgaccc

SEQ ID NO: 2159 - DNA, 400 bp, Zea mays
  Clone ID: TF_LIB3356-049-P1-K1-D8
tatgaacacaggcaagtgtttagaggatggcaaaaggaagggttctggagaggacagttcatcactacgttctctagtaaggaagctagaagcttccattgctttctctcatcggatccactccctctatttcatcctactgtacatgtaaatgtattactgcaggggaaaccagtgcattgcagcgagaagtcagcatggagtgtgctgatgagaaggcgggtgatgctagagccaagagagaggactacgtgcatgtccgggcaaagcgcggtcaagccaccaacagccacagccttgcagaaagatttcgaagggaaaagataaatgaaaggatgaagcttcttcaagaccttgtcccaggttgcaacaagattacaggcaaaggcatgatgcttgg

SEQ ID NO: 2160 - DNA, 1240 bp, Zea mays
  Clone ID: TF_ZmC25915_1
aaatcccctctcgctccataaaccaaccctcccaccatcaccaaagatatatactattactacatagttaacaaactttatctgcctcctgtcctgctaatctatatatcccctctccactactgctaccttctctcgcgcgtctctgctcaaagaataatgtcagcgtagcctagctagctcatagggattcctctttcatccctcctgagatcgacgatctcaccaattaagaacacacgcgcacacagcagctacgtacgtacctagctagctagcatgatggaccatcagctgttcgacgaccccttcgggagcagcatctcgtcgctggaggcggaaatcttctccgccgccgcccagctgccgccgtcgccgccgtggccagacatcgacctcgacgacgactacgacatccacgacctctccgcgccggccgccaacgccgctacgtcctcgggcggcggctacggctccggcggctccggcggccacaggaagctcagccacaacgcgtacgagcgcggccgccggaagcagctcaacgagctctactcctccctccgctccctgctcccggacgccgaccaaactaagaagctgagcatccccaccaccgtgtcccgagttctcaagtacatcccggagctgcagaagcaggtggacaacctggagaggaggaagaaggagctgaccaacgccaactgcaagccgggagttctgaaaaccaccaaggccgtaactcccattgtttctgctacctgcctcaacgacacggagatcatggttcaggtcagcctgcacagcgatgtggccgccacagctctccctctctccaagtgcatcaaggtgctagagaacgaaggccttcatctcgtcagctcatcaacctactcctccgcctttgagaacaagacattctacagcctccatcttcagagaagtcaaagaacgatgaaggaggagtgcccggcattctgcgagcaactggagaagatcgtcaggaagaaagcaggggcgtagccagctgcagcctgcaggaggagtgtgctggcgcatgcgttcaccattcctctgcgtgctactccagccataagcacacacagctagctaattaaggtattttagtctgtaaataatggactgtgtagtcgtgtgtgtgtgtgtgtgtcgtaactgtgaaagtcgccgatggatgcataatatatatgtggtttttcccttaaaaaaagaacaaaac

SEQ ID NO: 2161 - DNA, 1255 bp, Zea mays
  Clone ID: TF_ZmC1916_1
cattgacttccccagcagagcagggaaaccgctcccagtcccagtctctcacctgaggtgactggcgtctcttgtcgcgagccgccagaagcttcggcccctgacgcgtgggggccccgtccgcccccgcccccgtccccacgttgccggccatggcggggcagccaccgccgtccggggcctccgaggacgacttcctcgagcacttcttcgccttcccctccgcggcctccgccggcgctgccgggggccacgcgggcgccggtgttggcggggaccaccccttccccctcgccctcagcctcgacgccgccgccgaggccaagccggaccgtgatcccgtgcagctcgccggcctcttcccgccggtgttcgctggcgccggcggcgtgcaccagccgcacctccgcggcccaccgcctccgcagatgttccaggcgcagccgaagccgggcgagggaggcatggcgccgcagccgccagccccgcggcccaaggtgcgcgcgcggcgggggcaggccaccgatccccacagtattgcggagaggctaaggagagagagaattgcagaaaggatgagggcattgcaggaattagtccccaacacaaacaagacagatagggcagccatgctagatgagatccttgattatgtgaagtttcttaggcttcaagtaaaggttctgagtatgagcagactgggcggtgctggcgcggttgcgcagctggttgctgatattccactctcagtcaagggcgaggcaggcgacggcgggggcgcgccgcagcagcagcagcagcagcacgtgtgggagaagtggtcgacggacggcacggagaagcaggtggcgaagctgatggaggaggacatcggggcggcgatgcagttcctccagtccaaggcgctgtgcatgatgccggtctcgctcgcgatggcgatctacgacacccagcaccccctggacggccacggccactcgctgaagcccgagcccaacgcgtcatcctagtacagtaacgtcgtccttagcgtgccttccaattccaacacccaccccccttctccctaaaaagtactgttaggcgccgatattatccggaagaaaaaaagaagtgtatgatataccgagcgtgcgtttccagtgtgctgacccgtgggataggaaaggaccgaaaattgttggtatatgatgatgtagcctcctgtttgcctgttctgtttcaaatcaaagcaatgctcatgcatccaggttcc

SEQ ID NO: 2162 - DNA, 610 bp, Zea mays
  Clone ID: TF_LIB3587-269-Q1-K6-D12
ccccgcgtccgcaagctgtttgtttcatggggtgcggggaacgaggaggtcggggagctcgactccatcgacgcaatgaccatggagcagctcgccaaatccctcgccgacgagctctgggatcagcctgctactactactcatcatcaagaacagcagcaagtagaattatcggatgcaggggcggcaactcacgaacacgacaggattcccctttctcggagacatgagccgcaggtcgtacgccgaggctgacgagggcttcctcccgacgacggcggccatcagcgcaggcggcaacgacagcttgttctccttcaccggcggcaagtcgaagcagctgagcttcgcttctcgagagccgaagcacgaaagcaacggcggcggcacaactgcagctgggacaccgatggagagcagtaaaggagggcggagggcgagctccggcgtgcatgagcacatcgtcgccgagaggatgcgccggcagaagatgaatcaccagttcgcggctctggcgtccatgatccccgacataaccaagacagacaaggtgtctctcctggggagcactattgagtacgtgcagcacctcaggggcaggctcaaggcc

SEQ ID NO: 2163 - DNA, 826 bp, Zea mays
  Clone ID: TF_ZmC39148_1
ggccgcttttttttttttttttttaagtaagaaagtaatacgcgttcttgcgatggagcacatgtagtaagctaggtccaggcttcatgatatggctacaagttgtggaaggagcatgcaaaacagggcgcaggctgttaggacattggaatctaaacgggagatggctttgatttgatgccggggactgcactgcgtcgttgagccagccgtctaggatccggacacttcatctcccatggattggacttgctaggggcttcaccgcgcgcagcatttccttggcgcccccattctccggctggaccgccgcggaggacgcccccttctggcccgatatcgccgacgccagcgcgacgggcatgaggcacaggcccttgctctgcaggtactgcatcgccgtcgtcatgtcgctctccatcagctgggccacctcctgctcgaacgctgcgccgtcccggacctcggacgacgacggcggcaggctgcctccgcgtgcctgctgctgcctgcctgagcctgacctaggggacagcagaagaccaccaccggagttctcggtctgagactgtgtaaggagcgggacgacggcttccgtcgcgcccagcctgctcatgctgagaaccttcacttgcagctggagaaatttgacgtattcgatgatctcgtcaagcatggatgccttgtcagtcctgttggagttcggaacgagctcctgtagattcttcatcctgtcagagatcttctcccttcggagcctctccgcaatgctgtgtggatcagttgcctggccccggcgagccctgacgcgcggcttaggagctcc

SEQ ID NO: 2164 - DNA, 621 bp, Zea mays
  Clone ID: TF_ZmC693_10
tactttcttggacttatctgatgctaaccaactctccacaattctctcatctcaatcttattctctagccttatcccagctaatcttaatcttattctctagccttatcccagcttggctgttgcctctcgctccctatgatgcccatgacagaagccaatctgacatcgagccctgggcgtattcccttggcgtttgtgggtccaacgtcaggctaggagcagtattatatggcgcaacaccaaaatctttggttggaaaagctacagttgcattgctcacatgagcattaatcgcttcaagtttcatggacaaaaactctacttgacgctgtaaagactggatgtaatttattatctcatcaaggactgatgctttcccgataaccttgttgcatccagggacaatatcttgaagaactttcatccgttcacttatcttctctcgtcgtgctctttctgcgaggctatggctgtccgttgcttgacctcttctagccctcacatggatgtagtcttttggtggctctttaggtgcaggctttttatcagcagacttgctagcgttccctgaatttgtttcagcttctgtccttctgtcatttttttcactaggtgtaga

SEQ ID NO: 2165 - DNA, 827 bp, Zea mays
  Clone ID: TF_ZmC253117_1
gacgtcgtggccgcggcatttctctccgccgctgctgctcgtggtgcttgaggcggtggagtactgcgggaagctgaagaagccggcgaacgggggggagcagctggcgccgcctgctgctggccgccgctcccggctctgcttcaggctcttttggacctccagcgactggagcagctgctccagctccctcacgtagttgatcgcgccacccacgatcgatgcttggtcacccctgtgcgcgtgcgacggcggcatgagggagcggagcacggcgaggtactcgttcatctggcgccggcggttgcgctcgacggcaatgtgggtgatccgctggctctcgatctcctccttgttcttgacgaccttggtgcgcctccgcttcctcctccccgccgccggctcgggcgccgccttcctgctgccgtggtccgtggaggcggcgtccgaggaggagtggtcccgcgagagcgcctccccccagtccctgtcgtcccccacggtgggcgcggcccagcaggtgtcgaggtcgtgctggtcgacccactcacccgcggcgcagacatcgccaaaccctcctcctcctcctccccctccctgcagcaggtcgctccacggcaccgcgtacggcgagtccccgcggccgcagccgaagtggcccgcctggggctgggagaacaccacggcctccagcgccattgcttgctactcgatcccagacccagatagacacgcccgcgcgggttggtggtggtggtgtgcgtgtgacggatggacggatggatgcgaacgaacggctaggtggcgcgcacgggcacgggggcgag

SEQ ID NO: 2166 - DNA, 522 bp, Zea mays
  Clone ID: TF_LIB3595-016-Q1-N6-F5
atgttgaagtggattaatgtgaaatttaaactaaaatccacactaaactactctaacacatgtaaatcaagatgaatacatgtgcaatctaaacgtacattaactgacgcagctatcactaacatgcgaggcctactctgcctgctaatgaacttgttgcatgtacagactagctactatcgtctcaattccaatatatacctcctcgatcagtcctcaccatgtaacgtaacgcaactatgcgagctgaactggcccccctgagaaaaagtggcgcggctcctttttaacgggtgaactggccctgcagctcgccggcggagcaggtgcagctggcgcggccgtcgttcagtaccttgacctgcttctgaagatccttgatgtagtccacggccagatccagcatgtcggcagtgttggtttgcttttccatgttgggcacgagctcctgcagcttccgtatccgctcgctgatcttcgtcctcctcacccgctcggcgatgctgcgcgggtgggtggcgc

SEQ ID NO: 2167 - DNA, 2896 bp, Zea mays
  Clone ID: TF_ZmC848_2
cggggaaggatttttccccgtttacatccccgcgggggggagaacctttcccccaccccatcccctaatggaggaattccccgcggggattcggggatcggggccccattgccatctctaatcccttgtgttccggggtgttgggggtggtgatcgccgttgaaggacctgaacctgccagcagccctgccgcagccgaccaggacgccaccgcagcagcagatgggctccccgggactgctgcggtacaggtcagcgccgagcacgctgctcggcgaggtgatgtgtggtggtgatcaggacttccccgcggctggcggcgcagggcacggaccaccggaccacgccgccgcggacaacgtcctcgcgcgctttctcgccgggcaccactccgagacccgcgactgcaagcctccccgccccgccgccgccgctcacttcatggacgaagctgccgtcgcgtccatggccgcctcacagcagcagcagctcatgtaccagtcgcagcaggagcagcagatggccgccatggaggggctgtaccgcaacgtcagctccggcggcacggagcacggtgcagccgttggcgctggtaacaacagcctgatccgccagagcagctcccccgccggcttcctcaaccacttgaacatggacaacgggtacgggagcatgctccgggtgggcatgggcggcggcgggttcaggaacggcgtcagcgacgcgcggctcaaggggcagctgagcttcccgtcccggcaggggtcggtgatgtcgcagatctcggaggtgggcagcgaggagctcgacggaggcggcggcagcggcagccccgaggcggccggcagcaacgccagcggcgcggcgcgtgggtacagcggcatcccggggtacccgatgggcggcctcgcgtccggcgcctggccggacgaggcgtcgccgtcgccgacgtccggcgcgaagcgcccccgcgactccggccccgcgctgcagcagccgctggcgccgcagctcagcctgcccagcggaaagaacaagggcggcagggcggcctcggcggagatggcggcgatcgagaagttcctccagttccaggacgccgtcccctgcaagatccgcgccaagcgcgggtgcgccacccacccgcgcagcatcgccgagcgggtgaggaggacgaagatcagcgagcggatacggaagctgcaggagctcgtgcccaacatggaaaagcaaaccaacactgccgacatgctggatctggccgtggactacatcaaggatcttcagaagcaggtcaaggtactgaacgacggccgcgccagctgcacctgctccgccggcgagctgcagggccagttcacccgttaaaaaggagccgcgccacctttttctcaggggggccagttcagctcgcatagttgcgttacgttacatgttgagacctcgcaagagaagagccaagctctggcgctttggcatacgagacctgttgatccaacacatactggtatcagaaaataggcaacagtcagctgaagaaggttcatcagaggaccatgaggacaacacaggattacttgatctagtgctatgggctgcagttgaaggtgtatcatcatcatcagacgatgaggacgaggacgacgacgaggaggaggaggcggcggcctctgatggctctgaatagtagtcaaccgatctttcagggttgtttcaaaattgtaaatatacaacaataagccatcactcttctcatgtattatataatagaactatgatttattagcttgtcaaaaaaaaaaaaaaaaaaaattccccgtcttccttgtttaccattcctccccaaaacacatcctgcgatcctcgaagcctccgccgagcatcgatcatgtcggcctactgcggcaagtacgcggatgagctcatcaagaatgctgcctacatcggcacccctggcaagggtatccttgctgctgatgagtcaactggcaccattggcaagcgcctttccagcatcaatgtcgagaacgtggaggagaaccggcgggctctccgtgagctcctgttctgctgccctggtgccctccagtacatcagcggtgtgatcctcttcgaggagaccctctaccagaagaccaaggatggcaagccttttgtcgatgtcctcaaggagggaggcgtcctccctggcatcaaggtcgacaagggcacgaggttgttggcaccgacaaggagaccaccacccagggccacgatgacctcggcaagcgctgcgctaagtactacgaggccggtgcccgctttgccagtggcgtgctgttctcaagatggccccaacgagccgtcacagcttgccattgacctgaatgctcagggtctggctcgctacgccatcatctgccatctgccaaggctggatatgttgatcgctgcgcttactgttgctctcttaagcaccggccgggccggcagtccccatcggtccccggcggctgggtagcacgctcccctacacagctagtgcagcaaagatggaccccccccaaggcctggacatggacctgactgagaccgagatagagaggaaccccgccatcgtttgcagtgcatgcgcgcgagcagcatgtacagcgccggagcgatcgagggaggctcgctggactgctggatcgagcagtgtggcatcatcaagtattcaagcgactggaggaaggaaggaagaatcgagtcatgggaccgaggaggaagaacgaatgaattgtacagtgctgtttcccttctttttttcttttttttttgctgtaacacttttgctacatctgtgctgctgctgctgcagcatatgccgttgcccattgtttactacgttaagaatcccagtgagagtagatcgagg

SEQ ID NO: 2168 - DNA, 1070 bp, Zea mays
  Clone ID: TF_ZmC3763_1
cgcgtacgtaatgctcggaattcggctcgagatttaccagtgatgatgagagagatggaatggtcggggtaccaggggtctcaggaaatattttccaggagatagatgggaggcagttcgacagcccaatactggggagtagaaagcagaaaggtggatttggcaaaggcaaaggaaaagctaactttgcaactgaaagagagaggagggagcagtttaatgtgaagtatggggctttaaggtcactgttcccaaaccctactaagaatgacagggcctctatagttggagatgccattgaatacatcaatgagcttaatagaacagtgaaagaactgaagatcctacttgaaaagaagaggaacagcgctgacaggaggaagatactgaagttggatgaggaggcagctgatgatggggaaagttcttcaatgcagccagtgagtgatgatcaaaacaatcagatgaatgggactataaggagctcctgggttcaaaggaggtccaaggagtgtgacgttgatgtccgcatagtcgatgatgaaataaatatcaaattcacagagaagaagagagccaactctttgctttgtgctgcaaaggttctagaggagtttcatcttgagctcatccatgttgttgggggaatcattggagatcaccatatattcatgttcaatacaaagatacctaagggctcttctgtgtacgcatgcgcggtggccaagaagctcctcgaagctgtggagataaagaagcaggcttataatatcttcaactagacataccaatcataatgtttatccagacaacttagcatgctggtctgctctttagcatctaataaggtgcttgcttatcacttatcagagactgaccacattgataagacttctttgatgaatgctgcaaactttcttgatagcttcttcatgctgaacttcttgtcttcttttttgtacactttaacagtcatgttggaatatgtggtgcttctgatttgctggcattgccactctttgctgaataacgtaaaaaaaaaaaagaagggcggccgacgagaaaacagc

SEQ ID NO: 2169 - DNA, 1134 bp, Zea mays
  Clone ID: TF_ZmC1926_1
cggacgcgtgggacggcggcgagatggggttccttgacgtcgtcgagcccaaggcggcgtcggcggcactggtggacggcgccgcgggcctcggggcctgcaaggtggagcccggcctggcggagagcggcggcgcgttcggcgctggcgctggcgctgcgccgccgccggccctggcgtccaagaagaagagggtcgaggggatgccgtccaagaacctgatggccgagcgccgccgccgcaagcgcctcaacgaccgcctctccatgctacgctccgtcgtgcccaagatcagcaagatggaccggacgtcgatcctgggcgacacgatcgactacatgaaggagctgctggagaggatcaagctgctgcaggaagagatcgggcagcagcaggaggaggcgccaggcatgctcagcgtcttccgggagctcaaccccaacgagatggtggccaggaacacccccaagttcgacgtggagcggaaggagggcggcgacacccgggtggagatctactgcgccgccaagccggggctgctgctgtccacggtgagcacgctggacacgctagggctcgacatccagcagtgcgtcgtcagctgcttcaacgacttcggcatgcacgcctcctgctccgagatgcagagggaaatgatcagcgccgacgcgataaagcaggagctgttcaagaacgctggctatggcggaggctgcttgtagaggggcatgtcatcatggcatgggaggaagaagaagaagaggcagcaataaattaatcttaagcagctgtgggagcagcagtagtagtatcagttcaggtccagtagcggaaaaggcaggcagggcaaagatttgggaggcctttttgcaatccatctcccccatcataacccacttcgatctatccatgttagcagtacgtgtccgtccgtcctatagcatcatgcaggatgcaaaggttgccctgtgctgctgaatctttctcctatatactattctatttaattaacaagagcaaagctcgctgcctttcttctgatgaaagaaaaaaaaaggggtgcatctggcgactagctctcttcttatctgcagggttctatattcataagcatgttgttgcaccacacaacct

SEQ ID NO: 2170 - DNA, 1492 bp, Zea mays
  Clone ID: TF_ZmC7965_1
cacggccatcgtggcgagggcaaccaagctgagcgctactcgcagtcgcagttgttgcctgcccagcatgcagctctaactcaccccgtgcagcagacgccgagtcgtggcaggtagctaggaaggagggccggagggaagggaagggcaggccatggcgctggaagccgtggtgttcccgaaggagcacctagcgggcactgccaaggcgcgctcggcgtcgtcactggcctgcggcttccgcaccgaggaggtcgaggacaacggcggtgtggttctgcaaggagaggccggcgcggccaccacgtgggagtactgggacgcggcgctctgcccgtgctccactgcacctgctggtgccgtggaggagtgctgggacgtgcggcaccggctctccgcgtccccaccgccgccggcgccctccgccgccgtcgcagcgccatcgtccgggcacggcaaggcagctgccgcggcgcggcggagacggcggcaacgcccgaaggcggtgaagaacacggaggaggtggagagccagcggcgcaaccacattgccgtggagcgcaaccggcggcggcagatgaacgagtacctctccgtgctccgctccgccttgccgccctcctacccgcagcggggtgaccaggcgtcgatcgtggccggtgccatcaacttcgtcaaggagctggagcacctgctgcagtcgctggaggcgcagaagcggcggcgccaggggtgcaccgagccaccggcgccggcgccgttcgccggcttgttcacgttccctcagtactccaccgccgcgacgggtgtcgtcgctggctctggtgacggtgctggctgcggcgcagcgggggcgcggcgtggcgtggccgacatcgaggtggccgtggcggagagccacgcgagcgtgaaggtggtcacgccgcggcggcccaggcagctgctgaggatggtggtggcgctgcagtgcctcggcctcaccgtgctccacctcaacgtgaccaccaccgccgaccagctggtcttgtactctctcagcctcaagatggaggacgagtgccggctgtcgtcggtcgacgacatcgccgccgcggtgaacgacatactcgccaagatctccgacgagcgcgccagccgtcacctagtagccgcgtagtgtagcggcaactctgttttagcaggtgtcatgtattgttgttgcaacaccaccaattcgatcctagtacatggaaaacgcactggcaagtcgcaattggcgccactgtcacgcggtgctaccacgcgctccatacgtcgtttgcgtgaaattaaacatgtatcggttggaccagctcagtctcttgcagcgctacttttttagtagtagtatataaaaaaaaaaagtgcctcctgggattcagaatcattcacgtcgatctcgcatcggaccagcgctaattattagcgcagatctgtcgagatgcctgcgactgcgtgtgcacacgggtgacct

SEQ ID NO: 2171 - DNA, 1405 bp, Zea mays
  Clone ID: TF_ZmC11694_1
ggcgccaacaaaagaggaagagtcaggccgaatgttctgcaagtcaagacgatgtaagcagaggatctgagatagggagtcggtggtatgtggctacgcacaccttgtacttactgctaacaattcgtaaaaaaatggttttgttcaggatcttgatgatgagtctggtgggatgcgaggatcaggcggcagaggtacgaagcgcagccgcaccgcggaggtgcacaatttgtccgaaaggaggagaagggacaggatcaatgagaaaatgcgcgccctgcaagagctcatccccaactgcaacaagattgacaaagcctccatgctggatgaagcgattgagtacctcaacacccttcagcttctaggtaagatgaaggccgtgagaaatagacggtgcactcctcccatggtgttaccgcgcgccatgcagctttgaatcaattcattgactcaggcccatcgtctttgtactgaaagagatcatggctggtgattttcaggtctcgactaccaagctgccgtgtctgaacatccgctcccactcaccatggaagagcttaacgagtttcatgattcgccaaccagatgtatcacttgaaaaaggtccaatcaatcaagatggatttggtggcgggatgtttaggcttagcgagctaagatgctccatagttttgtgtaatttgtagatggaacgggtcttcctgttaggccaaacctggcacctcaagtcccagccgtcatggctaacatggtgcaggagcaacagcaaggcgtagcgactcagcagcagcagagtctgaataatgaagctcaacagaaagcaaataccggagatccacaaatactacaaaaatagatgaagagatcttcgccagtaatcagtttctggatggtggtggcaacaggactaatactatagggagaaatgaggctgaaacataaaaacggtcagcaagtgccagtgtgtaacctgactcgagctaaacttgacacaaatcatggaacttggcagagcgttattatcctaatagataacatggctgatgattttcaggtctcgactaacaagctgcaggtgtgaatatcagcaccaactcatcatggaagagcttaacgagtttcatgattcacgaagcagatctatcacttgaaaaaggtccaatcaatcaagatggatttggtggcgggatgtctagcttagcgagctaagatgctccaaagttttgtgtaaaatgtagatggaaccttgttacaagtaacatttcttggcagcgatgccgttttcaggtgttttttttttttgttgcttcactgaagttttcttgagtcaatatatcttattttcccagcccttaagtgatcatatgcccaaagatatctgtgtggctctgctttaactcct

SEQ ID NO: 2172 - DNA, 912 bp, Zea mays
  unsure (1)..(912): unsure at all n locations
  Clone ID: TF_ZmC223756_1
cccagcgtccgcacctcgcgnattgcgatccctttccaacaanatcaccggcaccaccacttgcattggagtcgtgtgagccacatggacatggaggaacagttgctgcacctggagcacttcatgcccagcagcccgggcttctttgacgtcggcagtggccacgaccccgcccacttcccgaacggcgggttattcgtcgagcaggtcggcgccaccgacgacggcgggtgggtggaggaactcatgcagctgggcgaggagctgttcggcggtccgggcgatggcggcatcatgggcgacgccgacgaccactaccagcagtggcagtgcgacgacgacgtcgacggcggctccccagacggcggtccgccaccgagcgtgtccttggacggcgacgacgcgagcccaggggagcaaggcgccggggagctcgcctccgagccgcaccgcgaggacggcgacgacgtgtcgggcgcgacgcggaagcggagggaccggtccaagaccatcgtgtcggagcgcaagcggagggtccggatgaaggagaagctctacgagctcaggtcgctcgtccccaacatcacaaagatggacaaggcgtccatcatcgccgacgcggtggtgtacgtgaagaacctccaggcgcacgccaggaagctgaaggatgaggtcgccacgctggaggcccggccgagatcgcctacccgacaggaccagccgcagcacggccggcgcgcggggcccggccgacgacgccagcagcagcagcagcaggtggagcgccgcgacgcggggagcgcgggcgccggcgcccgggtgacgcacgtgggcgcggcgcaggttggcgacggcaggttcttcgtgaccgtggagtgcgagcggcgggacggcgtggcggcgccgcnctgc

SEQ ID NO: 2173 - DNA, 1244 bp, Zea mays
  unsure (1)..(1244): unsure at all n locations
  Clone ID: TF_21212345
ccacgcgtccgggctacacggcctatattccgtactcgtgaacctcgtgctgacgtgctcacacagtcactccgtttagctcaaatccttatcggcgactcggcgtcggagctcacgaccacgaccgcttccacgccctcgaccccgaacccccaatcccggacgcgaccgctgaaccctagcatactccggccatctgccgccggccccggcgatcccccgccatggcctcccccgagggcacaacgtgggtcttcgactgtccccttatggacgacctcgcggtcgccgccgacttcgcggcagcccccgcgggaggatttttctgggcagcgccgccgtcgctgcagccgcaggcgccagtgcagtctgtcgttgccgcgtcggctcccaacccatgtatggaaatcagtagctctgtggactgtggtcaggaaaaagaacagccaacaaataaacgtccaaggtcagaaagtactacagaatcaagcacaaaagcatccagggagaaaattagaagggacaagctgaacgagagattcttggaattgggtgccattttggagccagggaaaactcctaaaatggacaaaacagctatattgagtgatgctattcgtgtagtaggtgaattgcgtagtgaagcaaaaaagctcaaggattcaaatgagaatctccaagagaagattaaagagctgaaggccgagaagaatgagctgcgagacgagaagccaaaggctgaaggccgaggaaggagagcctggagcatcagatcaagttcctgaatgcccggccaagcctcgtaccacaccacccagtgatcccagcctctgcgttccctgctccccaggggccagcaaccgccaggcacaagctgatgatgcctgtgattggctaccctggattcccgatgtggcagttcatgccgccttcagatgttgacacctctgatgaccctaggtcttgtcctcctgtggcgtagaagccgtgcgaaatcctgttggaaagaggcgatgctgccctccattgattcaaatcttgatcggtccgcatgttgttggtgtagttgaattccagaactgaaggggatgttacatgtgtcnggacggtgacatggggtgatctgatgatccctttgtatattatatatggtatgggtataaatnaattccgcgaaccanaanctnatgtngatcggtggattaacttatgttctattcttgcctgtttgtcctataacccac

SEQ ID NO: 2174 - DNA, 1128 bp, Zea mays
  Clone ID: TF_ZmC2546_1
cggccgggagctcaatccttatcggcgactcggctgggcggcgtcggagctcacgaccacgaccgcttccacgccctcgaccccgaacccccaatcccggacgcgaccgctgaaccctagcatactccggccatctgccgccggccccggcgatcccccgccatggcctcccccgagggcacaacgtgggtcttcgactgtccccttatggacgacctcgcggtcgccgccgacttcgcggcagcccccgcgggaggatttttctgggcagcgccgccgtcgctgcagccgcaggcgccagtgcagtctgtcgttgccgcgtcggctcccaacccatgtatggaaatcagtagctctgtggactgtggtcaggaaaaagaacagccaacaaataaacgtccaaggtcagaaagtactacagaatcaagcacaaaagcatccagggagaaaattagaagggacaagctgaacgagagattcttggaattgggtgccattttggagccagggaaaactcctaaaatggacaaaacagctatattgagtgatgctattcgtgtagtaggtgaattgcgtagtgaagcaaaaaagctcaaggattcaaatgagaatctccaagagaagattaaagagctgaaggccgagaagaatgagctgcgagacgagaagcaaaggctgaaggccgagaaggagagcctggagcagcagatcaagttcctgaatgcccggccaagcctcgtaccacaccacccagtgatcccagcctctgcgttccctgctccccaggggccagcagccgccgccaggcacaagctgatggtgcctgtgattggctaccctggattcccgatgtggcagttcatgccgccttcagatgttgacacctctgatgaccctaggtcttgtcctcctgtggcgtagaagcgtgcgaaatcctgttggaaagaggcgatgctgccctccattgattcaaatcttgatcggtccgcagtgttgctggtgtagttgattccagaactgaaggggatgttacatgtgtcggacggtgacatggggtgatctgatgacccctttgtatattatatatggtatggtataaataaattccgtgaccagaagctaatgtct

SEQ ID NO: 2175 - DNA, 1400 bp, Zea mays
  Clone ID: TF_ZmC2546_2
acgcgtccgggtttttaccaaaacaattcttatagaagcggactgaaaagctggggcgtttggcagtccgcaacagattttggtggccggaagttgaaaaaagcccaaacaaacagggccacagtatggaaatcagtagctctgtggactgtggtcaggaaaaagaacagccaacaaataaacgtccaaggtcagaaagtactacagaatcaagcacaaaagcatccagggagaaaattagaagggacaagctgaacgagagattcttggaattgggtgccattttggagccagggaaaactcctaaaatggacaaaacagctatattgagtgatgctattcgtgtagtaggtgaattgcgtagtgaagcaaaaaagctcaaggattcaaatgagaatctccaagagaagattaaagagctgaaggtctatactatttcatgtggccaagttataaatggtgctgttcagatgggaggtggcacgtgatgtgttgtttaggcacttcatactattccattttcttgatttatgatccccttttccatttggtcattttttttcttatctagatttaattcatccagtcaaataacatgggaataattattagtacacctgtcattctccctccagtttgtggtttagtttattttgggttgcttgcattagcaactttatatccacataatgcgtttttttttcttaaatggttaaaccctgcagctgtataacaatatggacatttgtcaattcttttctctactgtatacacttctttgctacgtgttccataaaatatatagaggtttatgattcagcatctcatgtgctgcaaaaggctttggccttcgattttgctggttgttcatcagaaaaacaatctcaccctgaaatactttccttttgcaggccgagaagaatgagctgcgagacgagaagcaaaggctgaaggccgagaaggagagcctggagcagcagatcaagttcctgaatgcccggccaagcctcgtaccacaccacccagtgatcccagcctctgcgttccctgctccccaggggccagcagccgccgccaggcacaagctgatggtgcctgtgattggctaccctggattcccgatgtggcagttcatgccgccttcagatgttgacacctctgatgaccctaggtcttgtcctcctgtggcgtagaagcgtgcgaaatcctgttggaaagaggcgatgctgccctccattgattcaaatcttgatcggtccgcagtgttgctggtgtagttgattccagaactgaaggggatgttacatgtgtcggacggtgacatggggtgatctgatgacccctttgtatattatatatggtatggtataaataaattccgtgaccagaagctaatgtct

SEQ ID NO: 2176 - DNA, 1319 bp, Zea mays
  Clone ID: TF_ZmC1313_1
ggcaaaggccgggtgaaaaaagatgagtacatagctaggtacaggcacccagtcctgtcatgacgtaaaagcttatagaattcagatggcataaatactactatgcagggccaaaggttggtgggacgaacggaccagcaggctagcaggtcatccagaaagctttcgtgctcctccatttctaggctagctagcttagctggggctggacgacctttcaggcatacgcatgcaagtacctgcagtcggttcataagaggaggaggaggaggccatgtggacgacgaaggagccaagtagaaaaggcaggcaccgcaaccaacggtaaagctggtgatcgagcaagttttgtcaagagcgagctcatggaggatggcagcagtgctccaagacgggctactccggcccccacccgcaggagcagatctgccgacttccacaatttttcagaaaggaggagaagggacaggatcaacgagaagctgagagcgttgcaggagcttcttccaaactgcaccaagaccgacaaagtttccatgctagatgaagcgatcgactacctaaaatccctccagctacagcttcagatgctggtcatggggaaggggggaggaatggcaccggtggttcctcctgagctgcagcagtacatgcactacatcacggccgaccccgcccaccagatgatgcctccgccgctgcggccctccgccgggcagctgcagcccgccgccggccggcagtttcagataacccaagcagcagcagcagcagccaacaacgacaacgacccccagcgacgacgacagtccaacgtcgagtcggacttcttgagccagatgcagaacctgcacccctccgatcagccgcctcatcatcacaacttcctcaggccgccgagattgcagctctttacgccggaacagaggggcggcggcggcggcctgcctaacacgagccacaacgccggctggatttccgggaggagttcctcgtataattttatggagtgacgtgtgtgctcctgatgatgctgccaaaattaatttgaaacaaccgttctcatcttgaactcagaagacggcgtcagcgcactctgggaccttcagctagcgtgtggtggtgtccatgcatgaatgaatgcagtagtagttatatatatattagcaagctagttgtgtcattaaataaaggaacgctgtgtgactgtgatgctgctgctgctgctcgttttgctatctgaatcgcacaccgttcaattcctcccaaaaaaaaaaaaaaaaaatttgcggcgatcgtacgtgttcgattcatgcaaa

SEQ ID NO: 2177 - DNA, 1148 bp, Zea mays
  Clone ID: TF_ZmC3246_2
gggtaccctcgaggccggccggggcaaagcgcgcgcccggacggcccggttcgttctcgacctctcgtctcgctcatccgcccgccccccgaggaaggaaccctagcctagccttgctccgaccggtcgccgcggcgactgcgacgatgatggactgcgctggaggccgagaccccgtggaggacttcctcctcggcggcgccggcgccggcgacgacggagatctcgtcgccgtcttctgcgacgacggaggacttgggattgagggtatccatggagatgcttgtggatttgagcaatctaatttggggaaaaggggtagagatgaaccatgttcatctggcccaacatccaaagcttgtcgtgaaaaaatgaggagggacaagctgaatgacaggttcctggaattaagttcagttatgagtcctggtaaggaagcaaagttagataaagcaaatatattgagtgatgcagcccgtatggtggcacaacttagaggtgaggcagaaaagcttaaggaatcaaatgagaagctgcgggagaatatcaaggatctgaaggaggagaagaacgagctccgtgaagagaaagtgagactaaaggtagaaaaggataggctggagcagcaagtcaaagctatgagtgtagctcctacaggatatgtaccccatctccctcatccagcttcataccatcctgctgcgttcactccatttgcgccgcctccagccaacaaaagtgctccaatcccagcaccgttccctgggatggcgatgtggcagtggttgcctccgaccatcgtggacacaactcaagatccaaagctctggcccccaaatgcttaggggcagctaccttggaatgttgactcattgtgccttttcatgcatttggtgggcaaatcagtgccagttaggtccctggagactggagaggaatcaagttcgcaactcgcgccatgtttatgctgtaacagctggtttccagcactagttatgaacttactttgttctactgaagggtggtgcctgtaattaatatatggatcttaaccctctagttggcatgtatatcatttgttctattcgagagctgcattttaaggaccaaaaaaaaaaaataaaaaaaaaaaaaaaaaaaggccccta

SEQ ID NO: 2178 - DNA, 2357 bp, Zea mays
  Clone ID: TF_ZmC21109_1
gcccttcagagctcaggtgtggatctgtcccaaaccagcatctcgctccagatcaacctcgaagcgaagccagggcaaggtcgtcggagccggagagggaggaaggtggagaacctctacctgcgtcacgtgacaactgtctcctgacccacaggagcggcggactccctctgctcgccgcgcgcggcctgttccggttcggtcggcggccgacggccggcggcggaggcagcaggaagctactgtaccaaccggcccaagagaattgcgggtccagaggcagtgatggcggggcgctacgattgacgtgctacgagactggacgctctctcttggattggttgcacatcgcgtgctcggcgatgggctgagaccccggctgtggattctttttgatttgatcgctcccgccgccatcccctgtctagcccattgtctttacgtagtttccgattgaagacggaagattcccagtgcgcattgtgtagccgctcgtgttggacaccggcttccattcagctgagcagctccttcgcgtagatgaggcactagccgcaccatcaggacctcgtcgcgaaccagcacgcgctgcccctgcccggcggcgtcggcaccttcagcatcagccccgcgcccgtgtccgtcgcgctgccggcggccgtcgtcaagtcggagccgccgttcgtgctcaggggccaggatgcagagaccgaccacatggctagcgcagggcaccagcagcagtgggcgctccccttcgccggctccttgcaggtcagtccgccgccgcagcaggcgcctccggatagaaagggccgcggcggcgccggtggcggggtcatggagtctggctccagatccagcggcggggcggggttcgacgacgacgacggcctcaccacgcgccgcgaggtctcctcttcgctccaagatttggcagtaagggtggaccggaagggtgggagctgcagcgatggcggtacggatcaggggccaaacacaccacggtcaaaacactcggccacagagcagcgcagacgcagcaagatcaatgataggtttcagatacttagggagctgttgccacacaatgatcaaaagagagacaaagcaacatttctcttggaggttattgaatatatacgttttttgcaagagaaagcgcaaaaatacgaggcaacattcccagaatggaaccaagaaaatccaacgatgcttccgtggagtaaaggccaaatcccaggagattccccgcctgacccttcacatttcgatgagaaatggatcctcccctggatctaatttcactgggaaacttgatgataatcacaacatagtgacatctgcagctgcatcaggggcacaggatcaggcagaaaccgaccacatggctagcggatgctacagatcagcagaaactacggcgaattttacaaataatgctatgtctcagtcccaacctcaatggactggtccgtcccctgtggatgactctgcagtgaacagtgagacgcttaacaaccagcagttggtgattgatgaaggaacaatcagagtgtccagtaactattcccaagagttgcttaactcgttgactcatgcccttcaaagctcaggtgtagatttgtcccaagccaacatctctgtgcagatcaacatgggaaagcgtgccgccaagagacccgctgctggtgtatccagcaactccaaggaaccagctgatccggcatctagcaacgaattagggcatcagttgacgctgtcgggtgccggtgccgactgcctctctcacgcaacaaagcggcataaacggagcaacagctgatggccgctctccctcacctcgctccccgaccgacggacggacggatgacggattggtgacattcttcttttccctcccagccaacggggaggctcgtggattggctggctggctgtacattgtgtgctgtgcttggtgacaagctgagacctccggcgtattctttgattcgatcacccccgcgcccgccatcccattgtttacgtagagaagaggaaccgtggagcttttcatcgcggattgtgaagccgctcttgtacacaggcttccattcaatgtgagaagcttccccctccttgacacatctccgtgttgtagacctgtagccacctgtaagatatgtgatgatgcccaacaatcaactctgccagaccactggctagtcgagttgttgggttactttatgtacggtgttctgttatgctgggagtgtaattgccccgccgtctcagtgaactgttcgtcagttgtgtgcctgttgtgccaaaaaaaaaaaaaaaaaaaaaactcgagactagttctctcctcgtgc

SEQ ID NO: 2179 - DNA, 2332 bp, Zea mays
  unsure (1)..(2332): unsure at all n locations
  Clone ID: TF_ZmC1877_1
cctttttctcctcccccctccccaaaccgccgcctcctctccccccctcgacctctccggtgctcatagtctcacccgagtcacctccacacacacacacacctcgaggcggcgacactctcggacacacacacaccgatacacggacacatacacgcgctctccctcctcctcctcctcctccagtcccggcaacggaaggtccactgcggcgccggcctcactggcatcaccatattgccaaccgcgcatattttcagtttgtagaagccatcttttaaagaacattttgggcagagattgccagtactattacttgtggttaacatggacttctcagctggttcctacttctcatcatggcctgtcaattctgcttctgagagctacagtttggctgatggttcagttgaatcctatggaggagaaggaatcatgccaccttcaagctacttcatgacagccagatcagatcacaatttaaaattcagtgtgcatgaacaggattccactatgcttccaaacgaccaattgacctatgctggcgctaggcagactgatctattacctggcgagactccatctagggataagctttgtgagaatcttctggagcttcaacgactgcagaataacagcaacctaccgagtaatttagtgcccccaggggtacttcagcacaattcaacacctggggcctttcatccgcagttgaatactcctggactttcagaactgcctcatgccttatctagttcaattgatagtaatggaagtgaagtttctgcttttctcgctgatctaaatgctgtttcttcagcctcagctttgtgttccacattccaaaatgcttcttcattcatggaaccagtaaatctagaagctttcagttttcaaggggcacaaagtgattctgttttgaacaaaacaacccatccaaatgggaatatctcagtatttgacagtgctgccttggcatcactacatgatagcaaagagtttatcagtggtaggctcccctcatttgctagtgtccaggaaacaaacgtagctgctagtggtttcaagactcagaagcaggagcaaaatgcagtgtgcaacgttcctatccctacgttcactgcacgtaatcaaattgcagttgctgcaatgcccggatcactgatccctcaaaagattccttcatggatcaatgaaaacaaaagtgagggtcctgttagccatccttctgatgtacaaatccaaccaaattcagttggaaatggtgttggtgtgaagccacgagtaagggctcgtcgtggacaggcaactgatcctcatagcattgctgaacgacttcgcagagaaaaaatttcagataggatgaaaaatctacaagatcttgtcccgaattctaataaggcagacaaggcatccatgctggatgaaatcattgattatgtgaaatttcttcagcttcaggtcaaggtgttgagcatgagtaggctaggagctccaggagcagttcttccccttctcgcagaatctcagactgagggttaccgcggtcaacttctgtcagctccaaccaacgcacaaggattactggacacggaagaatcggaagacaccttcgccttcgaggaagaggttgtgaagctaatggaaaccagcatcacaagcgcaatgcagtaccttcagaacaagggactctgcctgatgccagttgcccttgcttccgccatatccacccagaagggcgtctccgccgcgtcaatccctcccgaacagtgaaataaagacatgctgctgctcccatgagtacgaggaaacaactgcagaagacagaaaactcaagatggctgaagaatgcagcaaagcccgtatagagtacagggtaggaagttagtctgaccagtgttcatgacctcatctactaatttgcttttcagaatcagctttttggtatctattgcgcataagttggtttttccttttcccttgctctgtctctctctctccctggggccgtatccgggtgctccgtggatagttgcgtttcagaaacttgaactgtatctggatgatctatctggtttctcttttgtgcatagaaaaaactgtaaaatcttctggttctgttctgctagatgagataaaagcccggaccgggctctcctcccccccaatccccaattccccattgtcttcgtcctgcatccggacctgtggccccttttccggctgtcagtttgttagctgtagccatctaccatcagtttccaaggatctgctgtaaagcgttggcagggaacgtctgccttctgtnnnnnnnnnnnnnnnnnnaaaaaaa

SEQ ID NO: 2180 - DNA, 784 bp, Zea mays
  Clone ID: TF_ZmC1877_4
ctgatgtacaaactcaaccaaattcagctgttaatggtgttggtgtgaaaccacgagtaagggctcgtcgtggacaagcaactgatcctcatagtattgctgaacggcttcgcagagagaaaatttcagataggatgaaaaatctgcaggatcttgtcccaaattccaataaggcagacaaggcatccatgctggatgaaattattgattatgtgaagtttcttcagcttcaggtcaaggtcttgagcatgagtagggtaggagctccaggagcagttcttccccttctcacagaatctaagactgagggttaccacggccaacctctgccacaaggattactggacgcactagactcggaagacagcttcgtcttcgaggaagaggtcgtgaagctaatggagaccagcatcaccagcgcgatgcagtaccttcagagcaaggggctctgcctgatgccagtcgcccttgcttccgcaatatccacccagaaaggtgtgtccgctgctgcagtccctcctgaacggtgagataaagacacgctcctcccccatgagcacgaggaaacagccgcagatgacagaactcagacggctgaagaatgcagcaatgcaaagcccgtagagtgcagcataggaagttagtctgtgaccagagcgcatggcctcgtctactaatttcgctctcagaatcagctttttttttcgtacctattgcgcatcagttgattttgcctttttgccttctctcttttctttttggccgatttcatcaggttgcatat

SEQ ID NO: 2181 - DNA, 576 bp, Zea mays
  Clone ID: TF_ZmC178986_1
aagaaatgtatggaagcctgaccaccaggtacacaacagtgcaatggacgagctcgtctgccccgccgcctcatcatgcagctctccctcgcccacctccttcttcgcggccggccacgtaccggagctcgagttcgtgtcctgggatgtcccggaggaatggatggagggcaccgactggttcgatgaacctttggatggcgacgagggctcgcgctcggcgggcaacgacctgtccggcgaaccgccggcgcctgcgccgaagcggcggcgtggccggaagcccgggccccggaccaacggccccactctcagccacgtggaggccgagcggcagcggcgggacaagctcaaccgccgcttctgcgagctcagggccgccgtgcccacggtgtcccggatggacaaggcgtccctcctcgcggacgccgtcacctacatcggggagctgcgcgaccgcgtcgagcagctagaggctgaggcgaagcaggcctcggccgctgtcaccaccgcggtggcagcggccagccactcgttcgcccccctgcacgagaagctggggctggaggtgcggat

SEQ ID NO: 2182 - DNA, 1085 bp, Zea mays
  Clone ID: TF_ZmC9134_3
gaaagcgttttttgaagcccgcgaacgggcgcgaggagcgggtgaaccacgtggaggcggagcggcagcggcgggagaagctgaaccagcgcttctacgcgctgcgcgccgtggtgcccaacgtgtcgaagatggacaaggcgtcgctgctcggcgacgccatctcctacatcaacgagctccggggcaagctgacgtcgcagcagcccgccgccggaggcgaccacgtggagacggacccgtccatgctatggctcgccgacgcgccggtcatggacatcaaggattccttgtcgcacccgtcggccgagatctccgtctccaagcctccgccgcatccgccgcagatccattttgacggcgggagcgggatcatggggctggaggccctgatccgcgtgcagtgccacaagcgcaaccacccgtcggcgcggctgatgacggcgctccgcgagctcgacctggacgtgtaccacgccagcgtctccgtcgtcaaggacctcatgatccagcaggtcgccgtcaagatggccagccgcatgtactcgcaggaccagctcagcgccgcgctctacagccgccttgcggagcccgggtctgtcatgggcaggtaatcaggcaggagagctcatcagctcacctgtgcctgccggatagggacgataccgatacactgctacccaccacggggactgtcatcgcggtcaccatggttacaaaacacacacacgcacgataggccttagagattcaggaggtggaggacggcggcgacgatgatgatgctggtgttgttgaaaactctagaaggatggatggatgatgacacctagcttccggctgctgttcatcatcctcttgtgtttttgctagtagcctggtaattagcaggattaagcagccgtcaagcgtcacccccgttgttgttaattaagtacctgttgttgtgagctgtgacgacgaaggatcgaccgatgttttagcgttggttgaatccaaagctgtatataggatgtatgtattattacagcaggaattcgcttgcaactgaaaaaaaaaaaaaaaaaaaaaaaactcgagagggg

SEQ ID NO: 2183 - DNA, 1092 bp, Zea mays
  Clone ID: TF_ZmC13338_2
gaattttcggggcgacccacccgtccggtttgtccagttcggcctgtccaactcatccctggagctgcctttcatggacgactacctgcagctgcagcaggggtccgtttcctgcagagtgcgtgcgaggcgtggctgcgcgactcacccgcggagcattgccgagagggaaagaaggacgaggatcagcaagaggctgaagaagctgcaagaccttgtgcccaacatggacaagcaaacgaatacgttggacatgttggaccttgctgtggattacatcaaagagctcaaggaccaagtcgaggtacgtacgtatcgcttggtgtgcaaacaaaaataacactatctcttaccatgctaaaaataatactatctcttacctaggcaaaaataatactatctcttaccatgctaaaaaacatggatccttgcagaagctaaaacacgaccaagcaaactgttgttgcctaggcaacatgagctgctgctgatgctggagaagcagacgggggagggtttttacgccgtaacaatgtaacttgtggagcggctttcatgacttaacttccttttttttttggttgttcgggaaagaaggacgaggatcagcaagaggctgaagaagctgcaagacctcgtgcccaacatggacaagcaaacgaatacgtcggacatgttggaccttgctgtggattacatcaaagagctcaaggaccaagtcgagaagctaaaacacgaccaagcaaactgctgttgcctaggcaacaagagctgctgctgatgctggagaggcagacggaggagggtttttatgccgtaacaatgtgactgttaaaccagagctgttgcttcaggagaccaggccgcgggcagaagtgcgtgacatgtggagcggcttccatgactcagcttcctcttttcttggttgttccacggactagcgaccggggtgccaacggcttgaagactaggagataacaagtaggacgatgttgtaatttagttaccgcgacgcggtggctctggctttcgtgtaaagaagtcctcccttaaaacgcgactgggattgttgttgctggtaaaattgttgta

SEQ ID NO: 2184 - DNA, 838 bp, Zea mays
  Clone ID: TF_LIB4758-026-R1-K1-A7
caggccggccgggacatttttcgcggatctgaaaccggcaacgagcgcgccatggatggttgcagagctgtccttactggagacatgcaatggcacgaggcgacgatgagtaacagcagctgcgactctgatcatcttcaccgcgagaggggagagcaaggcttgatgagctcgcagcttcagcagcagctggaacagatctacatgctgatggacatggagctagagcatgagctgcacctgcaccacaacgtgccaccgcagggctgtagccagcggcagctgtcgtcgccgttcctgcctttcgccgtcagctccgatgtgacctcgtcgcccgtgctcacgtcgtcgagcaccacaaccttttgtcaacagccagccgaggcctcaccctcacccctggacacgccattttccccactcccctacagctactctgacacgatcccggacctggaagagatcatgagccgaccacggcacaaggacggccacgcggagtccagcatcagtgcattcaggcagtgcgtccggcacctccgccccaagaagaagctaaagcagggcggctgcgggcagagggcgatcaagacggccatgtcggtcttggcgagaatgcacagctcaaggctttcccagtggcagagacagatctcctcgacggagatggcggcggcagtgccgtccgacgagagcaaaaacgtccagcttctgcacgtccggtcggagcgcaagcgccgtgagaagattaacgacagcttcgaggctctcaagaatgcgttgcccccttcctgctcgcagcgagataaacatccatactgatgaggggcagggacta

SEQ ID NO: 2185 - DNA, 2276 bp, Zea mays
  Clone ID: TF_ZmC3765_1
cctttgcctacaagcccctctctctctctgtctctctccctctccctcccgtatggtctatgccctcccaccctctttcgtagcgcttcttcctatgcctctcgccggaacggaacagcagatagcatctcaatctccagtggctgtgggcatctttccttttcctgccataggctctaggccgtgacgggagctagcttctcgcttgcgtgcgtgcttgctccggctatcatattgcctgcctgcctgcctatgaacctctccggccaatggaggagctacttcttcttctctagcctttctcgtctctgatccacccattgaccttcggtgcgcccggccactctgcgccggcctctcgcgtgcgtctctcgtgtgagtgctacaggcaagcgaagcgatggacatgaacgagagcggcgagaaagggatggagggcaacgcgtcctccggcatcccggtggactggcagacccaattcagcgccgccgccttctcgtgcgcgccgccgccgcagcagcagcaggttcccatgatggactccgccttcgcgtccgccggcctgtgggcgtccacctcccaggccatggcgctctccgacgcgggcggaaggtcggccgcgcgggccggcttcttggcgccggtccccggtttcctcccgcagggcctcgcccatttccccgtggactccggcttcatcgagcgcgccgcgcgggcttcctgcttcgcggcggcggcggcggcggggtgatggctgccttcggcgcagcagctgatcatcaacccatgaacagcgcgttcagtggatcctcggaggcgctgctggaccaccagaggacgaaggacggcagcgacaagggcgagccggagctcggccggaacggccacgacggggttctgagctcggaggcggctgctgcgggggactgctcgtccaaggggacgtccgactccaagaagaggagaaggcctaacgaggtgatgggaggcgatcaggtccagtcgtcgaacctgcccgccgactcagcgaacgagagcgtgcacagcaaggacaagggcgaggagagcagcctggcaacaaccaccaccggacccggcaagtcgaaaggaaagggggcgagagagacctccgagtcccagaaggaagactacatccatgtccgagctcggcgcggacaggcaaccaacagccacagcctagcagaaaggttgaggagggagaagattagcgagaggatgaagctgctgcaggacctcgttcctggctgcagcaaagtcactgggaaggcggtgatgcttgacgagatcatcaactatgtccagtccctgcaaagacaagtcgagttcttatcaatgaagctcgcaacggtaaacccaaggctcgacctcaacatagaagggcttctatcgaaagatcttctccgcttccctggcgttccttcgtcttcccttggattctccccggaaatgatgcacccacagctgcagctctcgcagccaggcctgatccagggcggcgctgccggcatggccaatccggacgtgttcaggagaatcatgcaggcacagttaagcgcaaaggacgggtctcagatgccgccccacgcattgaatggggcattcagtgacgtcgcgcagcagcagatggcgtacccgtcgtcccaggacctgagcatcgggccgtcgcaggacgggtttcaaatgtgactgaacatgcccagctgcacatactagtaaaagatgcaaaaaaagggcttcttccatctgaggagtatctgatcggcgaacgtgcgggcgcgcagggggccgcgtatagctgcctgctggtgccgggagcagcagcgcctgctcagcgcgacgccttgaaccgcgtcgacccacggctgtgcctgtgctgctgcatcggtcaggtttttttatcgtgttcagaaggaactgaggaaaagctcgtggcgctggcctgtggcgttgcctggatagatggctggaaattctgtctgtttcggcggtcgcgtgcattcatggcatggcgcgcagtgcagtaacagtgggctgcgtgttggcacttggcacagcgaccaaatgagctgctgcaggatgtgatgcaacgcgaggagccttgttttgttagtagtttccaatgctttttttttgtttttgtttgcataatagctaagggtgcaagaaaacactcataaatttgggggtggggggcggcggtccggcgatgtctatgttgaaacatcatacatttggcaaatttctccttgcgccac

SEQ ID NO: 2186 - DNA, 1310 bp, Zea mays
  unsure (1)..(1310): unsure at all n locations
  Clone ID: TF_ZmC848_4
cccagcgtccgcggacgcgtgggcggacgcgtgggcggacgcgtgggcgagcgccgccgacaacgtcttctcaaggttcctgcccgacgaccaccacatccgggacgacaagccgtcgcctgcccacttcccgagtgcggccgacatggcctcccaccaccagcaggagcaaatgatgttgcactcccagtcccagtcccagcaccagcaggagacgggtaggtccgggggcggcctctaccgcaccgtcagctctgccatggaagcgggcggcactggcgtcggcgccgccagcagcctgattcggcagagcagctcccccgccgggttcctggaccatttcggcatggacaacgggtacggggcgatgctgagggcgagcatgggcatggggttccaggaaggtgttgccagtgactccctcgcgggcggcggcggcggcggcggtagcggcaggctcgggggccagctgagcttctcgtcgcggcaggggtcgctcatgtcccagatctcggagatggacagccaggaggatgtcgtcgtcggagcgagcagccccgacgctggcggcggcggggacgccgcctacatgccggggtacccgatgagctccggcgggtgggacgactcgtcgtcggcgctcttgccggacagcctgcccgcgacgaataaacgcccgcgggactcgttggagcacggcggcgggctggcgcaccagttcagcctccccaagacgtcgtcgtcggaggtggccgccatcgagaagttcctccagttccaggacgccgtcccctgcaaggtccgcgccaagcgcgggtgcgccacgcacccgcgcagcatcgcctggcgggtgaggaggacgaagatcagcgagcggatacggaagctgcaggagctcgtgcccaacatggaaaagcaaaccaacactgccgacatgctggatctggctgtggactacatcaaggatcttcagaagcaggtcaaggtgctgaacgacggccgcgccaactgcacctgctccggcggcggcaagctgcaggacccgttcaccagttagaaggagcagcagccggcgcgtagcagtgcgcggccatgcatggcccgccgcaaggccggcctgactgacgcctccgtgccggccggcggctaagctcgcttcgagcgctcctcctcgattggagtaagagtcgtcgaagtatagtagtatcagtgtacgtgttcggctttacatagttaactgaatgagtagtacgtagtctgttatacatgcaagttncttnnnnaaaaaaaaaaaaaaaaaannncccccc

SEQ ID NO: 2187 - DNA, 2755 bp, Zea mays
  unsure (1)..(2755): unsure at all n locations
  Clone ID: TF_ZmC21109_2
cccagcgtccgcccacgcgtccggtagtatactagaagaggaggaggagagggagaagacgaagcgaagccatagcaaggtcgtcggagccggagagggaggagggtggggaacctcttcctgcgtcacgtgacaactgtctcctgacccaccggagcggcggactccctctgcgcgccgcgcacggcctgttccggtgcggtcgcaggccgacggccggcgacggaggcagcaggaagctactataccaaccggcccaagagaattgcgggtccagaggcagtgatggcggggcgctacgattgacgtgctacgattatgggcatccaagggaacaaggcggcgacgcacgagcacgacttcctctcgctgtacgccgccgccgccgccaaggacgctcctctcctgctacacgactccaaggcgccgcctccttctcaaggtaatttcctcttgaagacgcacgacttcctgcagccgttggatcagaagccgggagcgccgccggagccgtcgccgctgcccgcttccgccgcggagagcaggcaccagccgcagcagcaggtcgtcgtcgcgaaccagcacgcgctgcccctgcccggcggcgtcggcaccttcagcatcagccccgcgcccgtgtccgtcgcgctgccggcggccgtcgtcaagtcggagccgccgttcgtgctctggggccagcctgccgcgacgctccatccgggcgcgcgagggcaccagcagcagtgggcgctccccttcgccggcgccgggcaggtcaggctgccgccgcagcaggcgcctccggatagaaagggccggggcggcgccggtggcggggtcatggagtctggctccagatccagcggcggggcggggttcgacgacgacgacggcctcaccacgcgccgcgaggtctcctcttcgctccaagatttgacagtaagggtggacaggaagggtgggagctgcagcgatggtggtacggatcagcggccaaacacaccgcggtcaaaacactcggccacagagcagcgcagacgcagcaagatcaatgataggtttcagatacttagggagctgttgccacacagtgatcaaaagagagacaaagcaacatttctcttggaggttattgaatatatacggtttttgcaagagaaggtgcaaaaatatgaggcaacatttccagaatggaaccaagaaaatgcaaagatgcttccatgggtaattgcttcattctccaaagctccaatgcttgctagttgctactgctgtcagggaaggaacagtcaattcttgattgtctgtgtctgaatgtagttatacatttttgcagtcaaatatgtattttcgatcattctggaaaaatgcacaggcaagtgtttgttgctaacaatgcatttgccttactgaatcgttaatgatgtatcaataatttccgaccaacaccttatgcattcttgttatccttgtgctgcagagtaaaggccaaatctcaggagattccccgcctgacccttcacatttcatgagaaatggatcttcccctggatctaatttcactgggaaacttgatgataatcacaacatagtgacatctgcagctgcatcaggggcacaggatcaggcagaaaccgaccacatggctagcggatgctacagatcagcagaaactacggcgaattttacaaataatgctatgtctcagtcccaacctcaatggaccggtccgtcccctgtggatgactgtgcagtgaacagtgagacgcttaacaaccagcagttggtgattgatgaaggaacaatcagagtgtccagtaactattcccaagagttgcttaactcgttgactcatgcccttcaaagctcaggtgtagatttgtcccaagccaacatctctgtgcagatcaacatgggaaagcgtgccgtcaagagacccgctgctggtgtatccaccaactccaaggaaccagctgatccggcatctagcaacgaattagggcatcagctgacgctgtctggtggcggtgccggtgccgacggcctctctcacgcaacaaagcggcataaacggggtagcagctgatgtccgctgtccctcacctcgctccccaacggacggatgacggattggtgacattcttcttttccctcccagccaacggggaggctgtacattgtgtgctgtgcttggtgacaagctgagacctccggcgtattctttgattcgatcacccccctcgctcgccatcccattgtttacgtagagaagaggaaccgtggagctttccatcgcggattgtgaagccgctcttgtacacaggcttccattcaatgtgagaagcttcccccctccttgacagatctccgtgttgtagacctgtagccacctgtaagatatgtgatgatgtccaacaaacaactctgccagaccactggctagtcgagttgttgggttacttatgtacggtgttctgttttgctgggagtgtagttgccccgccgtctcagtgaactgatcgtcagttgtgtgaaaaaaaaaaaaaaaaaaaaaaaaaaaaaaaaaaaaaaaaaaaaaaaaaaaaaaaaaaaaaaaaaaaaaaaaaaaaaaaaaaaaaaaaaaaaaaaaaaaaaaaaaanaaaaaaaaaaaaaaaaaaaaaaaaaaaaagggggggcggcttttaagggaacccaagtttacttccccggggcttgcaaaagaaaaagctttttttttaggggccccctaaaata

SEQ ID NO: 2188 - DNA, 1237 bp, Zea mays
  Clone ID: TF_ZmC21109_4
aattcggcacgaggcaccaccagcagggcaccagcagcagtgggcgctccccttcgccggcgccgggcaggtcaggctgccgccgcagcaggcgcctccggatagaaagggccggggcggcgccggtggcggcgtcatggagtctggctccagatccagcggcggggcggggttcgacgacgacgacggcctcacgacgcgccgcgaggtctcctcttcgctccaagatttgacagtaagggtggaccggaagggtgggagctgcagcgatggtggtacggatcagcggccaaacacaccgcggtcaaaacactcggccacagagcagcgcagacgcagcaagatcaatgataggtttcagatacttagggagctgttgccacacagtgatcaaaagagagacaaagcaacatttctcttggaggttattgaatatatacggtttttgcaagagaaggtgcaaaaatatgaggcaacatttccagaatggaaccaagaaaatgcaaagatgcttccatggtcaaatatgtattttcgatcattctggaaaaatgcacagagtaaaggccaaatctcaggagattccccgcctgacccttcacatttcatgagaaatggatcctcccctggatctaatttcactgggaaacttgatgataatcacaacatagtgacatctgcagctgcatcaggggcacaggatcaggtagaaaccgaccacatggctagcggatgctacagatcagcagaaactacggcgaattttacaaataatgctatgtctcagtcccaacctcaatggactggtccgtcccctgtggatgactctgcagtgaacagtgagacgcttaacaaccagcagttggtgattgatgaaggaacaatcagagtgtccagtaactattcccaagagttgcttaactcgttgactcatgcccttcaaagctcaggtgtagatttgtcccaagccaacatctctgtgcagatcaacatgggaaagcgtgccgccaagagacccgctgctggtgtatccagcaactccaaggaaccagctgatccggcatctagcaacgaattagggcatcagttgacgctgtcgggtgccggtgccgactgcctctctcacgcaacaaagcggcataaacggagcaacagctgatggccgctctccctcacctcgctccccgaacgacggacggacggatgacggattggtgacattcttcttttccctccc

SEQ ID NO: 2189 - DNA, 1105 bp, Zea mays
  Clone ID: TF_ZmC252_2
ttgaaaaaccggctcgaccgcacgcgtccgcggacgcgtggggctcaggtgaggagaacaaagatcagtgagcgaatccgaaagctgcaagaactcgttccgaacatggacaagcaaaccaacacatctgacatgctagatttggctgtcgactacatcaaggaactccagaagcaggttaaggtaagcaatccagtaagttctctgcagatgagcacttgtcaggccctgtttggaacctaggtctaatagttagccggctaacaaattgttagctgggctgagccaactaatgagctctagaggttccaaacatggccttatttagaaagacaaccagccctaagcagtaaggtctaaaaccaaactatacttacttgttgcccttcaactgaaaggagaaagtcacatacagcgttctgttaaacttatctgaaatagacactctaaaacagactttgagagtccctttctgttctgtggtctgttcattgaaggtgttaaaggagacccaagctaattgcacctgcccagcaagcaagagccagcagcactcttgctgaagccctgatgcacgctatacatgacctgcagaactcgaaagcatcttcacttgggatagaaaaagatgtaagacagctctcattttttttgtgggtttgaactgtagcatttgaggcttatctaccagacagtgtgtagctttatatgagcacaggggaatggaacaatggcatcatcctcaagcattcaagtgatagggagaagggtaaaattggggagatatataggagaaacaactgtatagtttcgttgtagctttgctatatgtatactacactttcggtataaagtggttaatttacctctattgctagttgtagcagctgtaaatgtgccgcagataagttgtagaaaaacttggatgcgttcaatgcgagcgatagtgtttcgactcaaaaaacatatcatcgttgggttaaaaaaaaaaaaaaaaggaaaaaaaaaaaaaaaaaagggggctcttaaacctaaaattttggttccttttaaaaaaggtgaatccctcgctctccaaattttggtccttttagggagccttaat

SEQ ID NO: 2190 - DNA, 849 bp, Zea mays
  unsure (1)..(849): unsure at all n locations
  Clone ID: TF_LIB5116-009-A1-PF1-D8
agatttaagggaagcaggatattctattgctgggagtagaacttgggcggcatggatcagcttgacgagcaatcgttcctggacgagctcatgtcgctgcgccgggaggaggcgccgtcgccggctccgtggcaggcgtatccgggcagcggcatgatgacgacgagcgacctcctcttctacggcggcgagggcaccaccgaggcgagcagcggcatggactttgccgggccgtttcagcagcccatggcgccaccgccggccacatctccgcaccggccgcacgagaagttcaacttcgactgcctcagcgaagtatgcaacccttacggcagctgcgtcggcggcgtacctaagcctggggtcgtccacgcggctggccaggcgtatgccctccaggatgccatggcgcagaacggcacgagtggcggcaagctgcatcacggtggtggcaggcgtcgtcgtccccggcgccgttcgtgttcgcaggtgtcgccggggagagctcggagatgaccaggggcgccttctccggcgcccacgctagaagcaagctcaacggtggcactacgtccaagaacctcatggcggaaaggcggcgccggaagcgtctcaacgaccgcctctccatgctccgctccatcgtgcccaagattaccaagatggataggacctcgatcctcggggacaccatagactacgtgaatgagctaaccgagcggatcaaacccttcgagggagagatcggcgccacgcccggaggatctgaacctgctngacaccacgaagaatttctccagcgggtacagtgaggagatgccgatgaggaatccaccaagtttgtcatcg

SEQ ID NO: 2191 - DNA, 2605 bp, Zea mays
  Clone ID: TF_ZmC13586_1
cccaaggttcgtggcatatctgtaggcatctaccccgtcttcgtcgtccgctcctcactagctaccaagaggtcgccattattgccaacatagagtgtacgtggatgtctatatatatgcctacttgcacccatatggcataggcgttcgatccccttagcgcggaggagagctcctccggttcttctctacccttcgcatggaagttcttgcattgcttcgttgcttctctagtttcttccttctacgtctttccagcatacgcatgcccctcgtccgccggttcacgaggcatcgtctgatgatcagtagataataagcaatataatactgatctagaatcgagttgttgtactcttcgcagataggcgcgtgatggcgctttcagcttcccgagttcagcaggcggaagaactgctgcaacgacctgctgagaggcagctgatgaggagccagcttgctgcagccgccaggagcatcaactggagctacgccctcttctggtccatttcagacactcaaccaggggtgctgacgtggacggacgggttctacaacggcgaggtgaagacgcggaagatctccaactccgtggagctgacatccgaccagctcgtcatgcagaggagcgaccagctccgggagctctacgaggccctcctgtcgggcgagggcgaccgccgcgctgcgcctgcgcggccggccggctctctgtcgccggaggacctcggcgacaccgagtggtactacgtggtctccatgacctacgccttccggccaggccaagggttgcccggcaggagtttcgcgagcgacgagcatgtctggctgtgcaacgcgcacctcgccggcagcaaagccttcccccgcgcgctcctggccaagagcgcgtccattcagtcaatcctctgcatcccggttatgggcggcgtgcttgagcttggtacaactgacacggtgccggaggccccggacttggtcagccgagcaaccgcggctttctgggagccgcagtgcccgagctccagcccgtcaggacgagcaaacgagaccggcgaggccgcagcagacgacggcacgtttgcgttcgaggaactcgaccacaataatggcatggacgacatagaggcgatgaccgccgccgggggacacgggcaggaggaggagctaagactaagagaagccgaggccctgtcagacgacgcaagcctggagcacatcaccaaggagatcgaggagttctacagcctctgcgacgaaatggacctgcaggcgctaccactaccgctagaggacggctggaccgtggacgcgtccaatttcgaggtcccctgctcttccccgaacccagcgccgcctccggtggacagggctaccgctaacgtcgccgccgacgcctcaagggcacccgtctacggctctcgcgcgacgagtttcatggcttggacgaggtcctcgcggcagtcgtcgtgctccgacgacgcggcgcccgcagcagtagtgccggccatcgaggagccgcagagattgctgaagaaagtggtggccggcggcggtgcttgggagagctgtggcggcgcgacgggagcagcacaggaaatgagtggcactggcaccaagaaccacgtcatgtcggagcgaaagcgacgagagaagctcaacgagatgttcctcgtcctcaagtcactgcttccgtccattcacagggtgaacaaagcgtcgatcctcgccgaaacgatagcctacctcaaggagcttcagagaagggtgcaagagctggagtccagtagggaacctgcgtcgcgcccatccgaaacgacgacaaggctaataacaaggccctcccgtggcaataatgagagtgtgaggaaggaggtctgcgcgggctccaagaggaagagcccagagctcggcagagacgacgtggagcgccccccggtcctcaccatggacgccggcaccagcaacgtcaccgtcaccgtctcggacaaggacgtgctcctggaggtgcagtgccggtgggaggagctcctgatgacgcgagtgttcgacgccatcaagagcctccatttggacgtcctctcggttcaggcttcagcgccagatggcttcatggggcttaagatacgagctcagtttgctggctccggtgccgtcgtgccctggatgatcagcgaggctcttcgcaaagctatagggaagcggtgaaggggcagctggaaatttggacatcgacgggcatggaaggcttcatgggatcgaagcaaagatgtatttcttgtttctttagataacagacatgaatcggacctctatatcaacaattatatgggcatgaatacttaagactccagcccttaacacgtagaaactcaaaaaagaagagaggaagctaaagactaagcgtaaggtatatttggaagtaaattatttttatagtttctaagcaatcccatggtttataggaatactagagtgtttatggcataaggtgtttggttgcattcataaaacctatattttcaaagtcatagcattctagataccatgatatttttgtaatattggaaactacactccaacgcaaagtttttatgacatggct

SEQ ID NO: 2192 - DNA, 1785 bp, Zea mays
  Clone ID: TF_ZmC12850_1
ccccgcgtccgccccgcgtccggccacgcgtccgcccacgcgtccgcccacgcgtccgcccacgcgtccggcctcgttcgcttcgctttcccccaaatccaccgcgggctcgagctcggaggagaggagacgagacgacccaagactttctcacccccctttgcttcctgcgcaattcctgcggcagcgcctttctctctttcaatggacagcgactacgttgccagcctgctcatgggcatgggctcatccgcccctgcgctcgacttcgccgcgctggacgccgggttcctcgaaacgctctgcggcggcggcggcggcctcttcggggtgtccggggtcgccgcgggggccgggtgtggcggcgtgtccccggaggggtcgtcggtgtccgacccggcgtgggcgcgcgccagggacgatgacaatgtcaggaagcgcaaggcgccgcccacggggtccgccggcggcaaggaagcctgcccgggcaaggctgcggaggccaagggtccggacgggaagaggtgcagagtgggcggcagcgacagcccggtgaagccgaaggtagaggaggtggcggcgagcgacgcctcggttgaactcaaagcgcagaagaagggcaaggggaagaccgccaagccggcagtcgaaccgcccaaggactacgtccatgtccgggcgcggcgagggcaggcgactgacagccacagcctcgcagagagggttagaagagagaagatcagccagaggatgaagtttctgcaggacctagtgccaggatgcaacaaggtggttggcaaggcactcatgctcgatgagatcataaactacgtccagtcgctgcagcagcaagtcgagttcctgtccatgaagctcgccactgtgaacccacagcttgacttcagcaacctgtcgacactcctacacaaagacatgtaccaaccatgtggcccttcggcaaattcggtctttccactggaaagtgacggtgcagctttcccattctgtgaccaagcggatcttttccacagctttggttcgggttcggctgctatggaggatcagtgctctctaagcctgctagacacggctctgccccacgcggccaacccacagtttgcttttcaaaagcagcagagggacttctgggaggatggcctacagaacgccttgcctaccggtagtgagcaaagacaggaggaggatgggcttttagtacccaactttgatggccagttacatgctgaccagacaaaggttgagttctagtccctggtgatcctcccaaggttgatatttttgtatataggtggggtaccaagacctgtggcaagcaaagcgtctctctctctctgtgtgtccgaagctgaccatcattagagtctaggcctgcgaactgatttcgttccgtgataatgctgcatgtatggcatctcggttcttcccacagagatcatgtgatgtgatcgacctcgagaaattaaaagtagattgtgtactagatatggcgcaaatattacatgcgccatcttctaaagttgtactgattggtatgtaagggcgctgggtggtgttggaacggataccgtgtactgtttgttgcttttttttccctctagtattaatgattatgatgacgaaagtccaagtataaaaaaaaaaaaaaaaaaaaaaaaaaaggcctcgaaaaattagttgactcctctcagcttgttgcaattgtgtctgtgtcctggtaccttttttttctgcaggtgttgtaataaaatgtaaaaagctgatctg

SEQ ID NO: 2193 - DNA, 1878 bp, Zea mays
  Clone ID: TF_ZmC12850_2
gtgctgacgggcctgtatacgctatccttcgtgagcgctgccgtagtataacccggtggtaacccactggcgtaagcattccaccgtgccgtgctacgcgacggacgcggcgcgcggcccacaacccaaccgcagcggcaacaaccgctctataaagcaatccccaccgacctaccggctccggggccaaaaaaaaaaacggctcggtcgcttcgctttcccccaaatccattgcagactcgagctcgcagtagacgagacgacccaagacctcctcaccctccctttgcttcctgcgcaattcctgcggcagcgcctttgtttgtttcaatggacagcgactacattgccagcctgctcatgggctcatccgcccctgcgctcagcttcgccgcggtggacgccgggttcctcgacacgctacgcggcggcggcggcggcgggggcctcttcggggtgcccgcggaggcagggtgtggcggcgggtctccggaggggtcgtcggtgtccgacccagcgtgggcgcgcgctagggactacggcaatgccaggaaacgcaaggcgccgcccacggggtccgccggtggcaaggaggcctgcttgagcaaggttgcggaggccaacggtccggacgggaagaggtgcagagtgggtgccagcgacagtccggtgaagccgaaggaagaggaggctgcggcggcggcggcggcgagcggcgccttggttgaagtcaaagcgcagaagaagggcaagggaaagagctcgaagccggcagtcgaaccgcccaaagactacgtccatgtccgggcgcggcgggggcaggcgactgacagccacagccttgcagagagggttagaagagagaagattagccagaggatgaaatttctgcaggacctagtgccaggatgcaacaaggtggtcggcaaggcactcatgctcgatgagatcataaactacgtccagtcgctgcagcagcaagttgagttcctgtccatgaagctcgccactgtgaacccagagcttgatttcagcaacctatcgacactcctgcacaaagacatgtaccaacagccatgtggtggcccttcggcaagttcggtctttccactggaaagcgccggcgcagcttttccattctgcgagcaggcggatcttttccacagctttggctcgggtggtagcggtagcggtagtggtatggaggatcagtgctctctaagcctgctgctagacacggctctgccccacgcggccagcccacagtttgcttttcaaaagcagcaaagggacttgtgggaggatggcctacagcatgctttgcctacccctactaccggtagcgagcaaaggcaggaggaggatgggcttttagtacccgacccttgatggccagttgcaagctgatcaggcgaaggctgagttctagcccgtccctggtgatctgcaagggctggtatttttgtacataggtggtggtggtaccaagacctgtgtgtgggctgtgtgtttcaagcagagctctcctctgctaagctgaccatcattagagtttaggcctgcgactgcgactgcgagctggaattcattccgtgatactgctgcacgtatgtcacatggcgactcgattcttgccccccatagagatcgtgcgacccatctcgtgaaaaattggagtaggtcgtgtgctaggtagatatggcgcaaatattacatgcgccatcttctgaagctgtactgattattactcctatgtaagaccgctggtggctggtactggagcgatactgtgtcctgtttgttgctttttttttgatcttacgattatgacgaaagtgcaagtatatgaggtttctctcctttagcttgctttgctgc

SEQ ID NO: 2194 - DNA, 542 bp, Zea mays
  Clone ID: TF_LIB3607-057-Q6-N6-A4
cacatgctggcattatatatgttttccctaaaaaaggtagtacaaagctatgatcagttgggaagagaagatcgaagctagtagcgctaatatattgatttgcctccttatttatcttcgaacgaggtggttcgttattctttctttcggatcattaaacgttcgatccagagcgctgtgttctctgctagctaattcagctgccccctctgagactgcgacgccgacgacaatatggcgtcgagcgcctccctcacttgggagatctccggcgccttccctccctgtgccggccagaattcgtctgttgccagaaccttgacttgcaactggaggaacttaacgtagctgatggccttctcgagcatggtgaccaggtcgaccttggtgccgttgggcaccagctcctgcagcgcccgcagccgctcgctgatccgctcgcgccggttcttggccgcgaggctctggggatctttggttggggctgtggacgcgagcttggccttgctcgccttcctgcccgcgccgcagtgcttcttgtt

SEQ ID NO: 2195 - DNA, 2563 bp, Zea mays
  Clone ID: TF_ZmC13586_2
taggcgttcgatccccttagcgcggaggggagctcctccggttcttctctacccttcgcatggaagttcttattgcattgcttcgttgcttctctagtttcttccttctacgtctttccagcatacgcatgcccctcgtccgccggttcacgaggcatcgtctgatgatcagtagataataagcaatataatactgatctagaatcgagttgttgtactcttcgcagataggttcgttccttcacatagaagcgagtacagactacagaccacacagtatcagctggcacgaaacgaaaatggttacttgcaaattgcatgcacgagctagaattatattcttctaatcttcttcgttgactttctggcttcagcaggcgcgtgatggcgctttcagcttcccgagttcagcaggcggaagaactgctgcaacgacctgctgagaggcagctgatgaggagccagcttgctgcagccgccaggagcatcaactggagctacgccctcttctggtccatttcagacactcaaccaggggtgctgacgtggacggacgggttctacaacggcgaggtgaagacgcggaagatctccaactccgtggagctgacatccgaccagctcgtcatgcagaggagcgaccagctccgggagctctacgaggccctcctgtcgggcgagggcgaccgccgcgctgcgcctgcgcggccggccggctctctgtcgccggaggacctcggcgacaccgagtggtactacgtggtctccatgacctacgccttccggccaggccaagggttgcccggcaggagtttcgcgagcgacgagcatgtctggctgtgcaacgcgcacctcgccggcagcaaagccttcccccgcgcgctcctggccaagagcgcgtccattcagtcaatcctctgcatcccggttatgggcggcgtgcttgagcttggtacaactgacacggtgccggaggccccggacttggtcagccgagcaaccgcggctttctgggagccgcagtgcccgacgtactcggaagagccgagctccagcccgtcaggacgagcaaacgagaccggcgaggccgcagcagacgacggcacgtttgcgttcgaggaactcgaccacaataatggcatggacatagaggcgatgaccgccgccgggggacacgggcaggaggaggagctaagactaagagaagccgaggccctgtcagacgacgcaagcctggagcacatcaccaaggagatcgaggagttctacagcctctgcgacgaaatggacctgcaggcgctaccgctaccgctagaggacggctggaccgtggacgcgtccaatttcgaggtcccctgctcttccccgcagccagcgccgcccccggtggacagggctaccgctaacgtcgccgccgacgcctcaagggcgcccgtctacggctctcgcgcgaccagtttcatggcttggacgaggtcctcgcagcagtcgtcgtgctccgacgacgcggcgccggcagtagtgccggccatcgaggagccgcagagattgctgaagaaagtggtggccggcggcggtgcttgggagagctgtggcggcgcgacgggagcagcacaggaaatgagtgccaccaagaaccacgtcatgtcggagcgaaagcgacgagagaagctcaacgagatgttcctcgtcctcaagtcactgcttccgtccattcacagggtgaacaaagcgtcgatcctcgccgaaaccatagcctacctcaaggagcttcagcgaagggtgcaagagctggagtccagtagggaacctgcgtcgcgcccatccgaaacgacgacaaggctaataacaaggccctcccgtggcaataatgagagtgtgaggaaggaagtctgcgcgggctccaagaggaagagcccagagctcggcagagacgacgtggagcgccccccggtcctcaccatggacgccggcaccagcaacgtcaccgtcaccgtctcggacaaggacgtgctcctggaggtgcagtgccggtgggaggagctcctgatgacgcgagtgttcgacgccatcaagggcctccatttggacgtcctctcggttcaggcttcagcgccagatggcttcatggggcttaagatacgagctcagtttgctggctccggtgccgtcgtgccctggatgatcagcgaggctcttcgcaaagctatagggaagcggtgaaggggcagctggaaatttggacatcgacgggcatggaaggcttcatgggatcgaagcaaagatgtatttcttgtttctttagataacagacatgaatcggacctctatatcaacaattatattggcatgaatacttaagactccagcccttaacacgtagaaactcaaaaaagaagaaaggaagctaaagactaagcgtaaggtatatttggaagtaaattatttttatagtttctaagcaatcccatggtttataggaatactagagtgtttatggcataaggtgtttggttgcattcataaaacctatattttcaaagtcatagcattctagatacca

SEQ ID NO: 2196 - DNA, 3081 bp, Zea mays
  Clone ID: TF_ZmC2137_2
atggcagcttcagcgcctccaatctacttctgcgccgcccccgctttctgcccttgccggccccacgccaagcctgacagcaaggatgtcgatgaggcccgcgtgacgatggctcccacaactccaatctgccttcgcgtcgccccagctccccgtccatgtcgagttcgagtaggacgaggacgaggagggcagcgccaacaaagtggaagggacgggctcgacaccttcatgctcttctacaccgtcttctccgtcatcgaccccaagtgcgacgcccgcgactcacacgtcccgatgagcaccaaccaacgataccgtctcttcccacgtcgccaattccacaacacactccacctcctcaacgactcacgcctgctccgcgaccttcggttcagattcttcatcgccaagtgcccgcacccccattggccactgccgctctgccagggacatggaagagaggaaccaatttcttcagcatggtctaaacacaggcaagaccccatacaagagggccagtccatcggcgtcatcgccaacgacgttgacaagaacggcaagccacacaaggtcaggctctactccatcgccagcagcgctaacggcgactttggcaactccagacaggttttgccgtcgctggctggattgcctgatttgctttgcagattttcctgccatttgatttgcttcagtgttcttctagcatttctattggagttgtatgtgttcctgaaactgacacctgtgaaaaggcgtctgttcaaccggggctgcaaagaacaacactgtgaatcgtattcatgtataattgccattgtttctgtagtccatcctgacggctggagaagcaaatggcaaattaagctttgctatgtgcctacgttacctgggtgccatgttttcattagaggaaagggttccatcaaagatccagggaagattcttggttacagtctcaatgaagcacatcagctgctgcaggagtgtaggcagcagcagatgaacctcgacgagctcctagagaagaagtgctccactctggctaacagaggtgatggcggctcagatcagtccggcaccgccccttcgtcccccccacacgtcttcggatctgcaacccccctacgcgcaggtaccagtgggcagtggcacacacatcataaggatgaagatttgaaccaagatgagaagtgggagcagctcgttcatctcttgaaggggattgcggtcgaaacagagaagttccaagcgacaccactatctcaggaagtgctgattgtatggggagaccacgaccaactgttcccggtggagaaggcgtttgcagttcatagttcttttaaagactcctctgagtgttgctgctttccagtgacaaaaaagattccaagaaaccacttcttgtcttcctccactggctgcctgtcatcttgctctaaaacaatcgcagtcttgcaagttgttgttgctgctcctacccctgcctctgcaattgggtttgagggatatgagaagcgcctcgagatcagcttctatgaggcacctatcttcgctgaccccaacggaaggggattgaatcgtttggctggagttgctgctgggcttcctcacgaccttggccttgcatctcaaacaaggcataaggctgaaaggtcacccggtttggcgaagatctttcggaaggatttgaaccttggtcggccttcagtcgggctggtggtcggtgtatctaagtgtggatgagaggacatgggagcagaggagtgctgttggtggaacctcattgctaccgagtgtccagaaaggtttgcagaattttagttggagtcaggctcgtgggctgaattcccatcagcagaagtttggcaatggtgtgttgattgtgagcaataatgaggctgcacaccgcaacaacggagcagtggacagccctagcacagcccagtttcagcttcaaaaggtgcctcagcttcagaaactgcaactccagaaattgccggttgttcagaagacaccgcagctagggaaccagcagcctatgcagacacaggtacctaggcaaattgactttagcgctgggagcagttccaagcctggtgtgttggttacaagggcagctgtcctggatggagagagtgcagaggtggatggcttgtgcaaagaggaaggggcgccgcctgttatagaggaccgacgaccaaggaagaggggaagaaaacctgccaacgggagggaagaaccacttaaccatgtcgaggctgagcggcagaggagggagaagctcaaccagcggttctatgcgcttagagctgttgtgccgaacatatcgaaaatggacaaggcgtccctgctgggcgatgcgataacgtacatcactgacctccagaagaagctcaaagagatggagacggagagggaaaggctcctggagtctggtatggtggacccaagggagcgtgcgcctaggccagaggtggacatacaggtggtgcaggacgaggtccttgtacgagtgatgtctccaatggagaaccatccagtcaagaaggtcttccaagcgttcgaagaggcagaagtccgtgtgggcgagtcaaaggtgacgggcaacaacaacaagggacagtggtgcattctttcatcatcaagtgtcccggcactgagcagcaaacgagggagaaggtgatagcggcaatgtctcgcgcgatgagcagttgagcatagcagctgtaggatcagactggcacggtagaaggtggccggtttatccaggttgcgaacaagaggcggcggcggcggctgaagcagcccgtcgattgttgataggagagttgtaggtggagagaagcaagataagattcttctgacttaagcaatgcagcagcaaccaaaaaaaaagaattggggctctagttaagcagccattctacggtaggtttcttttggttgtggtccgaccccgaccgtttagttctgatgtttttgctttggaaggatggataccgtgttcgttgtgtaagcctgatgatgcagcagaaccataaacagcaatacatgtttttcttattcttcttcttc

SEQ ID NO: 2197 - DNA, 831 bp, Zea mays
  Clone ID: TF_ZmC579456_1
cattgggtacctcgaggccggccgggaagcctgctcatggaatgggcgatggacacgctgctgcaggaggaggagcctgcggcgctctacgacggctgcggcgaggcagtagccgtcttcccctcgttgcaagggctccgcgacgcctcccacgcggcggagatggtgcgggagctgatggccgccgtcgaaaccgacgacgcggcaaacagctggacaacgagcggttctggcggcgaggtcaccgacggcggcagcagcggggccactgaccctgcagcccccgcggctgcggaggccgcggatttctacggcggctccgggccgccacactcgcccaactcgttcccgagcggcaaaaccaacaccagtctgcccacggtgagggtgagctggaacttcgtcaccggctcggcggcggcgcagcctcgcagcgacggcgtgctggagaaaggcgccgtcccgatacgccgcgtgccgccggagctggcccaccgccgccggtcgccgccaccgccgccgagaagagcccaccacccaacacgcggcatgggagccgcgtcgtgcacgccggaacacatcgtcgcggagcgcaaacgccgggagaagatcaacaatcgcttgatcgagctctccaccgtcatcccaggactcaagaagatggacaaggcgacgatcctctccgacgcagccaagtacgtgaaggagctccagcagcggctcaggcccctggaaagagctgccgccgccgccgccggcagcagcaggaccaaagcgccgacgacgacggacgagaatggcggctcccggtcgccgacgtcggcatcgtcg

SEQ ID NO: 2198 - DNA, 552 bp, Zea mays
  unsure (1)..(552): unsure at all n locations
  Clone ID: TF_ZmC944_3
gtttttagttgggccagctttgcttcgtatatatttttttctatctaattatacatccgcttatattattctgtgtttcgttgcagaaacgaagggacaggatcaaccagaagatgaaaacgctgcagaagctcgtcccgaactcgaacaagacagacaaggcgtcgatgctggacgaggtgatcgactacctgaagcagctgcaggcgcaggtgcagctgatgagccggatgggaagcatgatgatgcccatggcgatgccgcagctccagatgtcgatgatggcccagatggcacagatggcgcagatggcgcagatggcccagatgaacatgggctccctcggccagccgggctacgcaggcctcacgccgcccatgatgcacccgccccccttcgtccccgtgtcctgggacaccaccgncaccgtcaccaccttcctcgccccgcaggccggcagcggcacggtgccagcggacgccttctacgccttcctagcttgccaagcgcagcagaacgggcagcagcaaccgggtagcatggaggcgtaca

SEQ ID NO: 2199 - DNA, 1373 bp, Zea mays
  Clone ID: TF_ZmC28831_1
gaaaaaaaaaaaggaagactggaaaagcatcggcacgggcggtaggataaagtagcatagcataccacaaaaggtgctgcttgacagatggcaagcttcccacacctcacgcagatggagcatggcctagccagtggtgcctcccatggcacgccgagcttcttcttctgccatggcacagccacggcggattcagcctcgctggagacctcgtctggtgttctcgacacctccccacgaggcacttcttctgacgacaacaaggcctgcaggaagcacaaggaagatagtggtgccagcttcagctctgctcgctccaaggactcaaactcaaaggaaagcagcaaaaggagcggaggaaaaagagacagaagcagcaagaaggtggacgaggaggagcccaaggggtacatacatgtcagggcgaggagaggacaagcaacggacaaccacagccttgcagagagggtgaggagggagagaatcagtgagaggatgcgggtgttgcaggccctggtccctggctgtgataaggtcactggaaaagccctcattttggacgagatcatcaattatgtgcagtccttgcagaaccaagttgagttcctttccatgaggattgcttccctgagccctgtgctgtatggttttggcatggacagtagtgatgctttcagtgaccttataactcagaagatcgaagggatggcccaccatgaggcgttcgcgatgcctagcagctctgtcctgaacggcactccgtcggaagctctcgtggacacgcacacctccagctcctccccgtcctacgaggtccacggcgacggcggcaccgccagcgtctctttccctcaggacagtggcagctacatggtgcaaacagtaggtgagccaaggcaagagctgttcagccaagtggtgttcagtaaccacatgtgccctttccagtagggagagagcgagaggatggaaggacgacaggaagcaataatgttgagatcctatggaggtggaggccaccaccagacgagtttgtgatgttggacgcaatccatcccctcgtcggtggccgtaacgggaacccctgcggtagctagcattagcagtagtaataatagtaggctgttggttacatcatcctgttagatctcaaggtctctgtcggtaccgcatcatctagtaggcattgttgctgcttagcttttgggctctcttattaccaagggttgcatgcatgccattgtattgtactctccaattggaaaaaaaagaaaaaaaatatcatttgttcataaaaaaaaaaaaaaaaaaaaaagaaaggccgctctcttattatcaagttggtggcatgcatgccaggtatttagcaccaa

SEQ ID NO: 2200 - DNA, 619 bp, Zea mays
  unsure (1)..(619): unsure at all n locations
  Clone ID: TF_ZmC178000_1
gcgagcgagtgagtcagtgaggctgggatagcagcagcagtgcgccgcactcaacttctcttcttgccgtgcggtgcggcgcggcgcggggaggcaccgcacggccgcaagcaatgccgcgccggcagaggacgcgcagcagcgaggagctcaaggcggaggacttcgtcgactcggtgctcaacttcggcggcgaggaggaggatggggaagaggagaagcaggaggccggcggggacggccagccggcggcggagttcaagtccaagaacctggaggccgagcggaagcggcgcggcaagctcaaccgcaacatcctcgcgctcagggccgtggtgccgaacatcaccaagatgagcaaggagtccaccctctcggacgctatcgacctcataaggaagctccagaaccaggtccttgagctgcagcgccagctcgccgactcgcccggagaggcctgggagaagcagggcagcgcgtcgtgctctgagtccttcactgccacggaaaacatgccgtatcagggtcagatcgagctggttcctctggggccatgcaagtaccacctcaggatcttctgcaagaaaggcnncggcnngtcttcacncaaggggtgctg

SEQ ID NO: 2201 - DNA, 406 bp, Zea mays
  Clone ID: TF_LIB3245-506-P1-K1-G5
gggcaaggaggggtcaagcaactgatagtcatagtcttgcagagagggtaagtggaatgtaacattttctgttgtaaaaatgctattgtatgaatttcaagtggtctaaaacggtaggagcatcacttctgtaagttacatacaacatgaacttgaccacttaaagatcttgttgttttaacaggcacgtcgtgagaaaataagtgaacgaatgaaagttctccaagatcttgtgcctggatgcaacaaggttattggcaaagcatcagtacttgatgagataattaattacatccagtcgttgcaatgtcaagttgagttcctgtccatgaaactagaggcagtgaatgcccaggcaaaccagggagttgaagtatttccagccaaagattacggttctcagaca

SEQ ID NO: 2202 - DNA, 1080 bp, Zea mays
  Clone ID: TF_ZmC238625_1
cctccatagtataaaatgctcagatttttgaagtacttttcgaaagagtgtttttaaaaaccgctgtttggcaggctctggttttttttccggtgccaaagccctgaccctaatgcgactcaagaatcatctgccgcttgctctgaaagggactactcccgtatgccgtttctggggaagcaacccttgctaacgcctgcctgacagcctccttcagagacctgaggcttgcacctgcacttccccagccgtcctccatgcacagcacgaacacatgccgcgcccttcctcctaacgaggtcatgttggccctcaccgtcttcagcctcaggccatggaacgcctgggcgagcccggcgacgaggtccggccggtcggcgcagcttatcgaggcccttatgtagacggacctgtcggcgccggcgtcgccggtgtggagctcgatggagacctcgtcggtctccgggggcaggggcgtgctctgggtggtggtggtggcggcctcgcttgctttcctcttcaggagcttcacttgctccaccactctggcaagcaaggtggccttgtccatctgcctggtatcaggaaccatcctcctgagcgtagccagatgagcgttgatcctctcccggcgccgccgctcggcctcgctgtggactttcagggccctcgcctccgtcgcactcctccccgaccccgacgacgacgacatgtccggcggcggcgctacccgcacggccggtggagcggcgctttcctgctgccggggcagaagaactggactacccccggccccgagcgctgaagggtcacggccatcgtatggctgcagctcctgcttcccttgcagaggttggcgcgcagccattgaaccaggcatcatcctcacctgcagtgcaggttcgtttcaaataaaagtggtgcaacaacgtcttgtcatctcattctctggaatgagtgatatgcatatgcttgtgtgcgagatgtgatcatcttcttatgatatgagtgatgacagacaggcgtactgcggtgtatagtgtgctcgttgatttttcccggccggctcgaggtaccaat

SEQ ID NO: 2203 - DNA, 1386 bp, Zea mays
  Clone ID: TF_ZmC16354_1
ggagcagatggcggagctggtgatggcgcagtgcggggtgccgagcggcggcgaggggggcgcgtggccgccgggattcgcgtgggacggcggcgccgcggacgcgtcgcgtgggatgtacggcgatgcggtgccgccgtcgctcagcctgttcgacgccgccggcagcgtcgcggcggacccgttccaggcggtgcagcaggcgccgggcgccggtggtggtggggtggacgacgtcgccgggtggcagtatgctgctgcggctgggagcgagctggaggcggtgcagctgcagcaggagcagcagccgcgcgatgcggactcggggtccgaggtcagcgacatgcagggggacccagaggacgacggcgacggcgacgcgcaggggcgtggcggcggcaagggcggcgggaagcggcagcagtgcaagaacctcgaggcggagcggaagcggcggaagaagctcaacgagcggctctacaagctcaggtcgctcgtcccgaacatctccaagatggaccgcgcggcgatcctcggggacgccatcgactacatcgtgggcctgcagaaccaggtgaaggcgctgcaggacgagctggaggacccggcggacggcgccggcgcccccgacgtcctcctggaccacccgccgccggcgagcctggtggggctggagaacgacgagtcgccgcccacgagccaccagcacccgctcgccgggaccaagagggcccgtgcggcggcggaggaggaggaggaggagaaggggaatgacatggagccgcaggtggaggtgcggcaggtggaggccaacgagttcttcctgcagatgctgtgcgagcgccggcccgggcgctttgtccagatcatggactccatcgccgacctgggactggaggtcaccaacgtcaacgtcacctcccacgagagcctcgtcctcaacgtcttccgcgccgccaggcgggacaatgaggtggcagtgcaggcggacagactgagggactcgctgctggaggtgatgcgggagccgtacggcgtatggtcgtcgtcggcgccgcccgtggggatgagcggcagcggcatcgccgacgtgaagcatgacagcgtggacatgaagctcgatggcatcatcgacgggcaggcggcaccgagcgtcgcagtgggggtttcagaggatcactacggcggctacaaccatctcctccaatacctcgcttgatcattatttaattgcgttcgttcatgttgaaagttcgatcaaactatcaaaggatggatcaactaataaaaacgggatccatatataagtaactgtgaattgcgatcattaattgtatgcatacaagcatatggtcgtggattaaagtttgttaattgggttttctc

SEQ ID NO: 2204 - DNA, 545 bp, Zea mays
  Clone ID: TF_ZmC222321_1
cgggccctaggccgtcggcgcggcgggggcgggcgcggagaggccccggcggaagaacgtgcgcatctcgagcgacccgcagacggtggcggcgcggctgcggcgcgagcgcgtgagcgagcgcctgcgcgtgctgcagaagctggtcccggggggcagcaagatggacacggcgtccatgctcgacgaggcggccagctacctcaagttcctcaagtcccaggtccaggcgctggaaaccctaggcacgacgacggcgaccaacgccaacagcagcgcgagcgccaccaccagcaggagcagcgcggcgagcaggtcgccgcagtacaactattacggcggcggcggcaataataataatcctgccggctttcttggattcagtaacgttatttctccggctgggtatgtaaatccgggtggatcgtcgtcgaatactggcagcaacaaactgctgttttagtgactgttcttgtgtgattgttgtttgtcgtccggagcggacgatgcacatacacatgcatgcatgcatgttgctgtttcac

SEQ ID NO: 2205 - DNA, 797 bp, Zea mays
  unsure (1)..(797): unsure at all n locations
  Clone ID: TF_LIB4976-045-A1-K1-G9
acttctctccacttcctgccaagtgccaacaagtcccctcttcttcgtctccaaagagacaaaacccaagagaggatcgtacgtcgtagggatcttgttcaatggcggacgcggacctgacaccaaaccactcgctcctcctcaagatgcctgcggcttcggcccacgcccactccccaagcctctcgagcctcctgttatacggccaggagagccatggcgaagcagcgcctgcaaacgcaaatgcaaatgcggcagcagcaacggtggaggacgccgcctcacttgagacctcttctgcagtggttgacagtgcatctccaatggagaggaagaggaaggctacagcagaagacagtgctgcaatcagctctcctcaaccaaaggactgcaagcaggagagcaagagcaggagggggaagaggccccgaaaggagaccgaggagaagagcagcactgatgaagacgaggcctccaaggggtacatccatgtgagggcgaggaggggccaggcgacagacagccacagcctcgcagagagggtgaggagagagaggatcagcgagaggatgaggatgctgcaggcactggtccctggctgtgacaaggttaatggaaaggccatggttttggacgagatcatcaattacgtgcagtccctgcagaaccaagtcgaggtaataaaaacacaaaccatgaaccaagtcgaggtaatacaagcatggttttggattaactgctaaaaatctgccacttcatcagacagtntcagacggncattaatctgcaaatcacac

SEQ ID NO: 2206 - DNA, 680 bp, Zea mays
  unsure (1)..(680): unsure at all n locations
  Clone ID: TF_LIB3689-245-Q1-K6-D2
nganaatctataatcttttggaaaaataaaagagagagagaaagagaaaagctcgcgtttttattcggtgtccgttcgtcgttccagggaggagaagccgcaggcgtcttcggcggttccttcgccggatcgctccaccaccaccagcagcagcagcagcattttcaatcacatccgcagcaaacggcgccgttgccggggcagggcttcggtggaggcgcgggcgcgtccggcggcgtgtcgcagccgcaggccggcgctgcgtgcggaggcgccgccgcgccgcccaggcagcgggtacgggctcggcgcggccaggccaccgacccccacagcatcgcggagcggctccggagagagaggatcgcggagaggatgaaggcgcttcaggagctggtgcccaacgccaacaagacggacaaggcgtcgatgctggacgagatcgtcgactacgtcaagttccttcagctccaagtcaaggtgctgagcatgagccggctaggtggcgccgctgccgtcgcgccgctggtggccgacatgtcctcggagggtcgaggcggcgtggcggtcgcggccgggagcgatgatgggctggcggtgacggagcagcaggtggcgaagctgatggaggaggacatgggcaccgccatgcagtacctgcaagggaagggcctgtgcct

SEQ ID NO: 2207 - DNA, 1725 bp, Zea mays
  Clone ID: TF_ZmC6843_1
gcttgtctttcctttctccctccccttcgagccaccaacccgggatgcagcccactacgcgggaaatgcaggccatggccgccgccggccagcagatctccctcgacgacctccgcgcggcagcaggcggcgtgcacgacgacttcctggaccagatgctcggaggcctgccgccgtcggcatggccggagctgtcgtccgcggcgggagggaaggcgccggatggcggcgcgcaggcggagcagatgcagcaccagccgcagcacttgggtgggggtgggggcctgtacgacgactccgccttgctggcgtcgcggctccggcagcaccaaatcagcggcggcggcggcggggaggccgtgaagcagatggtgctgcagcagctggccgatctgaggcaggaacaccatgtgttgctgcagggcatgggccgctcgacctcgacgggcggcagcagagacggcggcctgctcctcccgctctctctcggcagtggcggatcgggcggcgacgtgcaggcgctactcaaagctgtagccgactccgccggaggagaagccgcaggcgtcttcggcggttccttcgccggatcgctccaccaccaccagcagcagcagcagcattttcaatcacatccgcagcagcaaacggcgccgttgccggggcacgggtccggtggaggcgcgggcgcgtccggcggcgtgtcgcagccgcaggccggcgctgcgtgcggaggcgccgccgcgccgcccaggcagcgggtacgggctcggcgcggccaggccaccgacccccacagcatcgcggagcggctccggagagagaggatcgcggagaggatgaaggcgcttcaggagctggtgcccaacgccaacaagacggacaaggcgtcgatgctggacgagatcgtcgactacgtcaagttccttcagctccaagtcaaggtgctgagcatgagccggctaggtggtgccgccttccttttgtggaccgtgcgtgtgtgtgttgtgcagggtcgaggcggcgtggcggtcgcggccgggagcgatgatgggctggcggtgacggagcagcaggtggcgaagctgatggaggaggacatgggcaccgccatgcagtacctgcaagggaagggcctgtgcctcatgccggtctccctcgcctccgccatatcctccgcgacgtgccacatgcgacctccggtgggaggaccgggcctcggggtcgccgccgccgccgcgcaccacatggccgctatgcggttgccgccccacgccatgaacggcggcgccggagccggagccgacgccgtgccggcctcacccagcatgtccgtgctcacggcgcagtcggccatggcgcccaacggcgccgggggtgggactgatggcgagggctcgcactcgcagcagcagcagcggcatcatcccaaggacgccgcgtccgtgtcgaagccgtgatccgctcgtgaacgtgaaggcaacggccgccgtgacactaacggcgcaaccatgacatgacactcggagctgacaaagtgggctctttggcgggcccacccacgggctctcggcactgcagctggccctccgaccttcccccttttcgcattttattcccagtgtaaccattgtttttttttccttgtttaatattaatcccatgtattatcgattcgcaaatgcaaggctggttctcctctgcttgctttgcgccaaaaaaaaa

SEQ ID NO: 2208 - DNA, 1290 bp, Zea mays
  Clone ID: TF_ZmC32276_1
gccggccggttccgggtaagaacagtctgtcgctgcggtggggaaagctgctggcgacaggtggaaatccctgagcgagtcggacaaggctccctatgtagccaaggctaacaagctcaagctcgagtacaacaaggccatcgctgcctacaacaagggcgagagcactgcagctaagaaggctcctgccaaggaggaagaggaggaagatgaagaggagtctgacaagtccaagtcggaggtcaatgacgaggatgatgaagagggtagtgaggaggatgaagatgatgacgagtgatggagctcctcgagacaatggaccgtgcttcatccaacaatggagctggctacgcaaggccccgtggatgactccttaaaggagcctatatccatggactagaaatattctctttcatgtccacattgggacctcgaggccggccgggacacgctacgtgtgtaatctcgcttcggcgaagcgcggggcattccttttcctcctccccctttgcggcttctcgcagcgctgcgaatcccaatccgcaccgatccgacgcgaatcgatcgagaggcagggggcagcactaatcgaatcgagactagcgccatgaacccgagaggccatcgtagcaacagaacttctctcttcgatggcattgaggagggtggaatccgagcaacatcctattcttctcatgagatagatgagcaagaaaatgatggagctattgatggactgcaggatcgtgtcagcattctcaagcggttgtcaggcgatatccatgaagaggtggagactcataacagaatgctggaccgaatggggaacgatatggatacttcaaggggttttctgtctgggaccgtggacaaattcaagatggtatttgagaccaaatcaagccggaggatgggaaccctcgtcgcatcattcgtcgccctttttctgctggtttactacttgaccaggtagaagacatgacatgctggaaatggtcatctcatcatctgcgtgccgtgccgtatagatagataccttgaaaacccaccgtcctgagtgccaaagtatatgttgatgtgggtgtttcgtcaactctgcactgtacaacacgactacagcgtgcgtgctgggtcgatcctatgttctcttgttgcgggattcaagtttgttgtccgttccttccctttggcatgtcatgtgtatggtatttagtagcataacaacaacaaaaaaactgtataaagaagctttgattgagcactaaaaaaaaaaaaaaaaaacccgagcat

SEQ ID NO: 2209 - DNA, 960 bp, Zea mays
  Clone ID: TF_ZmC1672_5
tttttaaccgtttgagactgcagttagttgtgatgtgctttgttgttcttacgatgaatgtgccggtctagtttcgtctgggttggcccctctgcttggccgcgtttgtcgtttagatctatccaaatatcatcgtttgttgatttcgaaattggggctgttttgctcatgatttcagttcaaacttcaccatgcttcatgttttggaattgtaattggtggctatgttaattgtctagacaattgtttagacttcagttcagatttgtggacttgctgctgcgtaatgctatcctctgacactggcggtttggttcaataagttgtgcgggcttactattttgttgaattcgatgttgaaatctgttcgttcctagaagggttttgttcaacttgcatattcacttcaacgctccgatgcagtatacgtttgttcccttgcccgccctttgacgttgtgcagtttctgaatcgcaggagaaggctccctacgtatctaaggccgagaagctgaaggttgagtacacaaagaagatggacgcctataacaacaagcagtctggaggaggacccacattgtctggtgattctgacaagtccaagtccgaggtcaacgacggggacgaggagggtgatgagtgatggatgacgggtgaaactctgggctgcccaagtgcttgcagtcagcagggaaatctcatcgtcgttgggcctaaccgggctttgctgctccgtagcgtctggaagctgtctgtcttttgagatgctgtagactagtagtgcctgctctgagttagtaattgaaagtgttgtccctgaagtgatgctgtttagttggtagtgtgttcgcttcttcggcacttatacttacccccaagcatcaacgctgcctgttttaaatctcaataggtgctgttttaaatctcagatctcaatatatgactactgatcgctgaatag

SEQ ID NO: 2210 - DNA, 360 bp, Zea mays
  Clone ID: TF_LIB143-063-Q1-E1-G12
aaacgttttcgtgctcaaacaaccaaaccttaatccccattaaggcccaagggctccagaataaatccatggcacagtccaacggctggcaacccaggctctccgttaaggaaaaaaaggttgaaaaggacccaacaatcccaaaaaggcccccaaccccttcctcctcctcaagggagaatttaaggaaggattccaaggaaaaccaccccaagttaaagcaagtctccctgattggcaaggctggttgtgacaagtgaagtcctgtccgattccgagaacgctcactacgtgtctaaggcagagaagctcaaggctgagtacaccaagaagatcgacgcttacaacaacaagcagtct

SEQ ID NO: 2211 - DNA, 814 bp, Zea mays
  unsure (1)..(814): unsure at all n locations
  Clone ID: TF_ZmC677_15
ctggtncgcctgcgagtaccggtcggnattccggggnaacgaggtttctctttttccttgtgatagttgngacggtgctcttggttaagctattatgcggctgttgttgcaggctccgggcgggcggcgccgccggaaagcgcaagaaggccgccgcgagcggcaagcccaagcgcccgccctccgccttcttcgtcttcatgtctgaattcaggcaggagtatcaggcgctgcaccctggcaacaagagcgttgcgaccgtgagcaaggcagcaggnggaaaagtggcgtgctatgtcagatcaagagaagcaaccatatgtggaccaagctgggcagaagaagcaggactatgagaagactaaggcaaactttgataagaaggagagcacaagctcaaagaaggctaagactgaggatgaggatggctcaaagtgagtacgtgaggacgaggatggcagcagtgacgaggaaaacgatgacgatgagtaaacactgtctccaaggccacgaggtagcaaatcaagtgttaggtccccaattagcttactgttttgctgcctttaaatgttaagttgtttcaaacaggtgtttatgaaggggatctattagtttcgcgatgtcgttagtttagtgcattagcaaagaaaaagccaaatgctgctagctgttctgttgcttttcttttgctaaccacttgtgtcacaactttctgtacctgcttcattgactaatctagtgactagtcagttattggttaaaaaaaaaaaaaaaaaaaaaaaaaaaaaaagtactctgcgttgttaccactgct

SEQ ID NO: 2212 - DNA, 589 bp, Zea mays
  Clone ID: TF_LIB4742-022-R1-K1-E8
ctcgaggctttggccgggatcgcacaacacgccgctcccggacacgaaaggcaaacctaccaccatcacgaccagccaggaacagacatgtgtgattagagctacggtcgcgatgcgaaagcacccatgctatccagtagcaaaaccgtaggtgcagcccaccatgaagggcaaggctagacacctccaaaaaggacgagggcaggctcctgacgaccaggagcccacggaaagcgcaagagggcgggcgcgagcgccattgttaagcgaccgccctgcgctcttatcgtgctgatgtctgaatttaggcaggaacattaggcgctgtacactgacaacaagagcgtggcgaccgcgagcaaggcaccaggggaaaagtggcgagctatgtcatataaagagaagcatccatatgtggaccaagtctgctcagaagaagcaggactgtgaggagactagggcaaactgtcacaacaaggagagcacaagctcagagaatgctattactgaggatgatgatggttctaaggacatgttgaagactaggatggcatgactgacgagcaaaacgatgactaggaggaaacag

SEQ ID NO: 2213 - DNA, 293 bp, Zea mays
  Clone ID: TF_700354730H1
ccgtattcgtgctcacacacacaaaccgtagacgcgatcaggctcaaacgtctcaagctgcgatcgaaggacaggtacaccacaggcgactcaaggctctcggtgatgaagcccaacgctgagtaggacccatacaagcgcaagatgcctcagagcgcgttcttcgtcttcatggaggagttctggaaagactacgaggataagcaccctcatgagaagcaagtctccctggttggcacggctggtggtgccaagtggaagtcactgtctgatgacgctgatgctccctaagt

SEQ ID NO: 2214 - DNA, 335 bp, Zea mays
  Clone ID: TF_LIB4729-108-A1-K1-F3
gccggccggagtcccaccaccccaccctctgtcttcgcctccgctgccgattcgaaagcacccgtcctgtcccctcgcaaaaccctagctccagccaccatgaagggcaaggctgacacctccaagaaggacgagggcaggctccgggcgggcggtgctgccggaaagcgcaagaatgccgccgcgagcggcaagtcctagcgcccgccctccgccttcttcgtcttcatgtctgaattctggtaggagtatcaggtgctgcaccctgttttcaagagcgttgcgaccgtgatccaggcagcaggcgaacagtgccgtgctatgtgagatcaaga

SEQ ID NO: 2215 - DNA, 419 bp, Zea mays
  unsure (1)..(419): unsure at all n locations
  Clone ID: TF_uC-zmflteosinte92e09b1
cttcngttctcccagnagccaccgcggcattttttgcttcttttacgaatcgtcatcctcctgtcgaccggacctccccaaaacgttcgcccgcacgccgttttccccgccgtgaatccttcctcctcccgcgatggagacattcccgccaagggcaggaaggggaaggccggcaaggaccccaacaagcctaagagggctcccagcgctttcttcgtgttcatggaggaatttcgcaaggagttcaaggagaagaaccctaagaacaagtctgtcgctgcggtgggaaaagctgctggcgacaggtggaaatccctgagcgagtcggacaaggcttcctatgtagccaaggctaacaagctcaagctagagtacaacaagggcattgcagcctacaacaagggcgagagcactgcagc

SEQ ID NO: 2216 - DNA, 838 bp, Zea mays
  Clone ID: TF_ZmC677_11
ccgggagattttcgtgggcggataagcacattcacgcacatccacccgccgccacgcatcgcacgaactcccggtccgaaaggcaaaccagccaccagtcccaccaccaccaccctctgtcttcgcctccgctgccgattcgaaagcacccgtcctgtcccctcgcaaaaccctagctccagccaccatgaagggcaaggctgacacctccaagaaggacgagggcaggctccgcgagcggcaagcccaagcgcccgccctccgccttcttcgtcttcatgtctgaattcaggcaggagtatcaggcgctgcaccctggcaacaagagcgttgcgaccgtgagcaaggcagcaggggaaaagtggcgtgctatgtcagatcaagagaagcaaccatatgtggaccaagctggacagaagaagcaggactatgagaagactaaggcaaactttgataagaaggagagcacaagctcaaagaaggctaagactgaggatgaggatggctcgaagtcagaggttgatgatgaggatggcagcagtgacgaggaaaacgatgacgatgagtaaacactgtctccaaggtcacgaggtagcaaatcgagtgttaggtccccaattagcttactgttttgctgcctttaaatgttaagttgtttcaaacaggtgtttatgaaggggatctattaatttcgcgatgtcgttagtttagtgcattagcaaagaaaaagccgaatgctgctagctgttctgttgcttttcttttgctaaccacttgtgtcacaactttctgtacctgcttcattgactaatctagtgactagtcagttattggttcc

SEQ ID NO: 2217 - DNA, 1448 bp, Zea mays
  unsure (1)..(1448): unsure at all n locations
  Clone ID: TF_ZmC677_3
tcgggnatcacgcacatccacccgccgccacgcatcgcacaaacgcgctcccggtccgaaaggcaaaccagccaccagtcccaccaccaccctctgtcttcgcctccgctgccgattcgaaagcacccgtcctgtcccctcgcaaaaccctagctccagccaccatgaagggcaaggctgacacctccaagaaggacgagggcaggctccgggcgggcggcgccgccggaaagcgcaagaaggccgccgcgagcggcaagcccaagcgcccgccctccgccttcttcgtcttcatgtctgaattcaggcaggagtatcaggcgctgcaccctggcaacaagagcgttgcgaccgtgagcaaggcagcaggggaaaagtggcgtgctatgtcagatcaagagaagcaaccatatgtggaccaagctgggcagaagaagcaggactatgagaagactaaggcaaactttgataagaaggagagcacaagctcaaagaaggctaagactgaggatgaggatggctcgaagtcagaggttgatgacgaggatggcagcagtgacgaggaacgctatgcgcttccccacccaaaaggcaaaccaaccaccagtcccaccaccctccgcctccgcctgcgccacagctgccgattcgaaagccctcgtcctgacccctcgcaaaaccctagctccaaccaccatgaagggcaaggccaacgcctccaagaaggatgagggcaggctccgggccggcggcggcggcgccggaaagcgcaagaaggccgccgcgagcggcaagcccaagcgccctccctccgccttcttcgtcttcatgtctgaattcaggcaggagtaccaggcgcagcaccctagcaacaagagcgttgcggccgtgagcaaggcagcaggggaaaagtggcgctctatgtcagagcaagagaagcaaccctatgtggaccaagctgggcagaagaagcaggactatgagaagactaaggcaaatattgagaaggagagcacaagctcaaagaaggctaagactgatgacgacgatggctcgaagtccgaggtcgatgatgaggatggcggtagtgacgaggaaaacgacgacgacgagtaaatagtatctccgctgtcgtgaggtagcaaatcgattgttaggtccccaattagctcactggtttgctatctttaatgttaagttgtttggaacaggtgtttatgaaggggatctattagtttcgtgaggttgttagtttagtgcattagcaaagaaaaagccgaatgctgctagctattacgttgcttttcttttgctaatcacttgtgtcacaactctctgtacctgtttcattgactaatctagtgactagtcagttatgggtttaatgtttggttttggttttatatatttctttgttgcatccgaaaaaaaaaaaaaaaaaagcggcc

SEQ ID NO: 2218 - DNA, 948 bp, Zea mays
  unsure (1)..(948): unsure at all n locations
  Clone ID: TF_ZmC677_4
naacgcgctcccggtccgaaaggcaaaccagccaccagtcccaccaccaccaccctgtgtcttcgcctccgctgccgattcgaaagcacccgtcctgtcccctcgcaaaaccctagctccagccaccatgaagggcaaggctgacacctccaagaaggacgagggcaggctccgggcgggcggcgccgccggaaagcgcaagaaggccgccgcgagcggcaagcccaagcgcccgccctccgccttcttcgtcttcatgtctgaattcaggcaggagtatcaggcgctgcaccctggcaacaagagcgttgcgaccgtgagcaaggcagcaggggaaaagtggcgtgctatgtcagatcaagagaagcaaccatatgtggaccaagctgggcagaagaagcaggactatgagaagactaaggcaaactttgataagaaggagagcacaagctcaaagaaggctaagactgaggatgaggatggctcgaagtcagaggttgatgacgaggatggcagcagtgacgaggaaaacgatgacgatgagtaaacactgtctccaaggccacgaggtagcaaatcaagtgttaggtccccaattagcttactgttttgctgcctttaaatgttaagttgtttcaaacaggtgtttatgaaggggatctattagtttcgcgatgtcgttagtttagtgcattagcaaagaaaaagccaaatgctgctagctgttctgttgcttttcttttgctaaccacttgtgtcacaactttctgtacctgcttcattgactaatctagtgactagtcagttattggttcaatatttggtcttggttttatatatttctgtgttgcattctgtttgccctacggaagttgaggtgattcgttccttatgaatgggtcaatagctgcttctgactcttcggtgaatttgtgattcggttaattt

SEQ ID NO: 2219 - DNA, 884 bp, Zea mays
  Clone ID: TF_ZmC677_5
cacgcacatccacccgccgccacgcatcgcacgaactcccggtccgaaaggcaaaccagccaccagtcccaccaccaccaccctctgtcttcgcctccgctgccgattcgaaagcacccgtcctgtcccctcgcaaaaccctagctccagccaccatgaagggcaaggctgacacctccaagaaggacgagggcaggctccgggcgggcggcgccgccggaaagcgcaagaaggccgccgcgagcggcaagcccaagcgcccgccctccgccttcttcgtcttcatgtctgaattcaggcaggagtatcaggcgctgcaccctggcaacaagagcgttgcgaccgtgagcaaggcagcaggggaaaagtggcgtgctatgtcagatcaagagaagcaaccatatgtggaccaagctggacagaagaagcaggactatgagaagactaaggcaaactttgataagaaggagagcacaagctcaaagaaggctaagactgaggatgaggatggctcgaagtcagaggttgatgatgaggatggcagcagtgacgaggaaaacgatgacgatgagtaaacactgtctccaaggtcacgaggtagcaaatcgagtgttaggtccccaattagcttactgttttgctgcctttaaatgttaagttgtttcaaacaggtgtttatgaaggggatctattaatttcgcgatgtcgttagtttagtgcattagcaaagaaaaagccgaatgctgctagctgttctgttgcttttcttttgctaaccacttgtgtcacaactttctgtacctgcttcattgactaatctagtgactagtcagttattggttcaatatttggtcttggttttatatatttctgtgttgcattaa

SEQ ID NO: 2220 - DNA, 854 bp, Zea mays
  unsure (1)..(854): unsure at all n locations
  Clone ID: TF_ZmC176449_1
cccaaaatcggcgattgactcactcgaggccggccgggatacaattctcccacccaaattcgtctctacactcaacacgcctcaatacgtctttgtgactacatcaacaccacaaatccctttcttctaaattcatccctcagagcacaatcaaaatgcctaaggctgctgctcccgccaagcgtgcgaccagaactaagcgggccaagaaggaccccaacgctcccaagcgcggcctgtctgcctatatgttctttgccaacgaacagcgtgagaacgtccgtgaggagaaccctggtatctctttcggtcaagtcggcaagctcctcggtgagcgatggaaggccctcaacgagaagcaacgtgctccctacgaggctaaggctgccgctgataagaagcggtatgaggacgagaagcaggcctacaatgccgatcaggaagaagaggagtcttcttagaatggagcctccgatgtcaaacccaagcgtcgctcgcagaagaagtctgaatcggattagtcccagcaccagcgccgtgttgtagattctggccaggaagtccttcctctttgcattttggtctgggcggtgttgtatgatggcacaggaagagtgccttgttttttactaggaattttctcgggttaaggccgtccccgatgttatgatncttgagggcgatcgattgagctactggctttctatttcagtgtccttggccatgggnaaacagatcgtggaactcgnaggatcatggggacgagggaaacgcaatgcntttgtacaattaaagggaactcccgacccanataantcgaaactacgnnaaaaaacataaacgtcatnctacca

SEQ ID NO: 2221 - DNA, 406 bp, Zea mays
  Clone ID: TF_ZmC176449_2
cccaaaatcgcctctgcactcaatacgcttctgtacgtcttcgtgactacgtcaacaccacaaattactttcccccaagttcacctcccagaaatcaatcaaaatgcccaaggctgctgctggtaagcgcggtaaggccgagaagaccaagcgcggcaagaaggaccccaacgcccccaagcgtggcctctccgcctacatgttcttcgccaacgagcagcgtgagaacgtccgtgaggagaaccctggtatctctttcggtcaagtcggcaagctcctcggcgagcgatggaaggctcttaacgagaagcaacgagctccttatgaggccaaggctgccgctgacaagaagcgatacgaggatgagaagcaggcctacaacgccgaccaggaggaggaagagtct

SEQ ID NO: 2222 - DNA, 684 bp, Zea mays
  Clone ID: TF_4995920
ctccgctccccagtccccccgcaccctagccctcagcaaaccctaaccgctcgtcgccatgaaggacacctcgttcaaggccaccggcgccaagcgcaagaaggtcggcggcgccaagcgcgggctcacccccttcttcgcgtttttggctgagtttaggccgcagtacctggagaagcaccctgagctcaagggcgtaaaggaggtgagcaaggcggctggggagaagtggcgctctatgtcggatgaggagaaggcgaagtatggcagtagcaagaagcaggatggcaaagcaagcaagaaggagaacactagctccaagaaggccaaagctgatgttcgggagggagatgaagcagaaggttctaacaagtcaaaatctgaggttgaggatgatgagcaggatggtaatgaggatgaggatgagtaaatagtacgatggggaacagcagctttgcaattgagtgtttgctgctttacttatttttctatatgctgttccttttgatgttatatgctgtaaggaaaatctgtacatgatggtaccttagggtatggcatgctggagttcccctttagggtccgttcggttgacacggaatgggctaccggaactgttcctagccggattgcttcactaatttgtataagttttgatcagcaggaacaaaaaaaaaaaaaaaa

SEQ ID NO: 2223 - DNA, 828 bp, Zea mays
  Clone ID: TF_1845196
atgaagggcaaggccaacgcctccaagaaggatgaggccaggctccgggccggcggcggcggcgccggaaagcgcaagaaggccgccgcgagcggcaagcccaagcgccctccctccgccttcttcgtcttcatgtctgaattcaggcaggagtaccaggcgcagcaccctggcaacaagagcgttgcggccgtgagcaaggcagcaggggaaaagtggcgctctatgtcagagcaagagaagcaaccctatgtggaccaagctgggcagaagaagcaggactatgagaagactaaggcaaatattgagaagagcacaagctcaaagaaggctaagactgatgacgacgatggctcgaagtccgaggtcgatgatgaggatggcggtagtgacgaggataacgacgacgacgagtaaatagtatttccgctgttgtgaggtagcaaatcgattgttaggtccccaattagctcactggtttgctatctttaatgttaagttgtttggaacaggtgtttatgaaggggatctattagtttcgtgaggttgttagtttagtgcattagcaaagaaaaagccgaatgctgctagctattatgttgcttttcttttgctaatcacttgtgtcacaactttctgtacctgtttcattgactaatctagtgactagtcagttatgggtttaatgtttggttttggttttatatatttctttgttgcattctgtgcggtctacggaagtcatctgtgctgtatgaatgatgaatatctgcttgtggctcgtttcagtttagtgagtttttgtttaaaaaaaaaaaaaaaaaaaaa

SEQ ID NO: 2224 - DNA, 914 bp, Zea mays
  Clone ID: TF_ZmC677_10
gccgccgccgccggcccggagcctggcctcatccttcttggaggcgttggccttgcccttcatggtggttggagctagggttttgcgaggggtcaggacgagggctttcgaatcggcagctgtggcgcaggcggaggcggcgccggaaagcgcaagaaggccgccgcgagcggcaagcccaagcgccctccctccgccttcttcgtcttcatgtctgaattcaggcaggagtaccaggcgcagcaccctggcaacaagagcgttgcggccgtgagcaaggcagcaggggaaaagtggcgctctatgtcagagcaagagaagcaaccctatgtggaccaagctgggcagaagaagcaggactatgagaagactaaggcaaatattgagaaggagagcacaagctcaaagaaggctaagactgatgacgacgatggctcgaagtccgaggtcgatgatgaggatggcggtagtgacgaggataacgacccacgcgtccgaatttttttttttttttaatatgggcacaagagctttatttatgtccccaacacacgacgatgatgagcgaattgaaataaaggataatggaggatggaggtagtgacgaggataacgacgacgacgagtaaatagtatttccgctgttgtgaggtagcaaatcgattgttaggtccccaattagctcactggtttgctatctttaatgttaagttgtttggaacaggtgtttatgaaggggatctattagtttcgtgaggttgttagtttagtgcattagcaaagaaaaagccgaatgctgctagctattatgttgcttttcttttgctaatcacttgtgtcacaactttctgtacctgtttcattgactaatctagtgactagtcagttatgggtttaatgtttggttttggttt

SEQ ID NO: 2225 - DNA, 863 bp, Zea mays
  unsure (1)..(863): unsure at all n locations
  Clone ID: TF_ZmC677_14
cgaaagccctagtcctgccccctcgcaaaaccctagctccaaccaccatgaagggcaaggccaacgcctccaagaaggatgagggcaggctccgggccggcagcggcggcgccggaaagcgcaagaaggccgccgcgagcggcaagcccaagcgccctccctccgccttcttcgtcttcatgtctgaattcaggcaggagtaccaggcgcagcaccctggcaacaagagcgttgcggccgtgagcaaggcagcaggggaaaagtggcgctctatgtcagagcaagagaagcaaccctatgtggaccaagctgggcagaagaagcaggactatgagaagaccaaggcaaatattgagaaggagagcacaagctcaaagaaggctaagactgatgacgacgatggctcgaagtctgaggtcgatgatgaggatggcggtagtgacgaggataacgacgacgacgagtaaatagtatctccgctgtcgtgaggtagcaaatcgattgttaggtccccaattagctcactggtttgctatctttaatgttaagttgtttggaacaggtgtttatgaaggggatctattagtttcgtgaggttgttagtttagtgcattagcaaagaaaaagccgaatgctgctagctattaatttgcttttcttttgctaatcacttgtgtcacaactttctgtacctgtttcattgactaatctagtgactagtcagttatgggtttttttgccaaaaaaaaaaaaaaaaaaaaaaaaaaaaaaaaaaaaaaaaaaaaaaaaaaaaaaanaaagggcggccgccgactagtgagctcgtcgacccgggaattaattccggaccggtacctgcaggc

SEQ ID NO: 2226 - DNA, 575 bp, Zea mays
  Clone ID: TF_ZmC677_21
tctcccacgcgtccgcgaaagccctagtcctgccccctcgcaaaaccctagctccaaccaccatgaagggcaaggccaacgcctccaagaaggatgagggcaggctccgggccggcagcggcggcgccggaaagcgcaagaaggccgccgcgagcggcaagcccaagcgccctccctccgccttcttcgtcttcatgtctgaattcaggcaggagtaccaggcgcagcaccctggcaacaagagcgttgcggccgtgagcaaggcagcaggggaaaagtggcgctctatgtcagagcaagagaagcaaccctatgtggaccaagctgggcagaagaagcaggactatgagaagaccaaggcaaatattgagaaggagagcacaagctcaaagaaggctaagactgatgacgacgatggctcgaagtctgaggtcgatgatgaggatggcggtagtgacgaggataacgacgacgacgagtaaatagtatctccgctgtcgtgaggtagcaaatcgattgttaggtccccaattagctcactggtttgctatctttaatggtaagttggctggaac

SEQ ID NO: 2227 - DNA, 905 bp, Zea mays
  Clone ID: TF_ZmC677_6
accaccctgtcccgcgtccctgccttttcccgttcacgtacacacacgcgaccaaaaaccgcacaaacgcgctcggcgcttccccacccaataggcaaaccaaccaccagtcccaccaccctccgcctccgcctgcgccacagctgccgattcgaaagccctcgtcctgtcccctcgcaaaaccctagccccaaccaccatgaagggcaaggccaacgcctccaagaaggatgagggcaggctccgggccggcggcggcggcgccggaaagcgcaagaaggccgccgcgagcggcaagcccaagcgccctccctccgccttcttcgtcttcatgtctgaattcaggcaggagtaccaggcgcagcaccctggcaacaagagcgttgcggccgtgagcaaggcagcaggggaaaagtggcgctctatgtcagagcaagagaagcaaccctatgtggaccaagctgggcagaagaagcaggactatgagaagactaaggcaaatattgagaaggagagcacaagctcaaagaaggctaagactgatgacgacgatggctcgaagtccgaggtcgatgatgaggatggcggtagtgacgaggataacgacgacgacgagtaaatagtatttccgctgttgtgaggtagcaaatcgattgttaggtccccaattagctcactggtttgctatctttaatgttaagttgtttggaacaggtgtttatgaaggggatctattagtttcgtgaggttgttagtttagtgcattagcaaagaaaaagccgaatgctgctagctattatgttgcttttcttttgctaatcacttgtgtcacaactttctgtacctgtttcattgactaatctagtgactagtcagttatgggtttaaaaattggttttggtttt

SEQ ID NO: 2228 - DNA, 506 bp, Zea mays
  Clone ID: TF_ZmC190193_1
attcggctcgagtcaaccgcaaacctcaccgttctggtcgtaggaagaaaaacaaaagaaggtgggaccccaattatccaaagccgaataggagtggctataacttcttctttgctgaaaagcattacactctcaaaactctctacccaaacagagaaagggagtttaccaaaatgattggccagtcatggaacagtcttagcccagaagaaagaatggtttatcagaacattggcttaagagacaaagaaaggtacaagagagaattgacggagtacaaagagaagatgaagcttaggcagacctcagaagttggacgtccatagaatctcattggtacccgtttgtggaggcgaaagaatggcttagaaaatttttataatctgttgacttttacgtgcatattgttgtggataatggtccactggactgtggtctacagaactattgtttttttcttttcaaaagagaaaactagtgtctattgttagtcagagaccctttca

SEQ ID NO: 2229 - DNA, 664 bp, Zea mays
  Clone ID: TF_ZmC518120_1
atctccccccggcgagcccacccccaagcacacgcagcgcccgcctccaccaccccacccctctctccgatctcaaggttggcggccggcggcaggatgaaggccaaggcgggctcccgcgccggcgactccaggctcgcggtgaagaagagcaaggccgagaaggaccccaacaagcccaagcggcccccgagcgccttcctcgtcttcatggacaccttcaggaaggagtacaaggagaagcaccccgacgtcaagcaggtctccgtgattggcaaggccggtggtgagaagtggaagtctctgagtgatgctgagaaggctccctatgctgccaaggccgagaagctcaaggccgagtacgccaagaagatcgacgcctacaacaacccgcaggcaggagaggcgtccggcgactctgacaagtccaagtccgaggtgaacgacgaggatgacggcagcgagggcgacgagtgaagcggcacgccaagcagccgcagcagggggagggggtctctggaacgtggccgttgctgctcattgctggtgtcactgatcgatgatggatgttcgctgctagtttagctccatggtagtccctccctctctttcaggttgctgctgctgatggcgatgatagaaatggtagctctagtcccatcta

SEQ ID NO: 2230 - DNA, 641 bp, Zea mays
  Clone ID: TF_LIB5116-064-A1-PF1-E12
tttcaaacattctccccctttcgttgtccttccccgtcccattccctccgcttcccagtccgcagcagttccgcaccgacaccctcaccctccccaaagccctaaccgctcgcccgctccgccgccatgaggtccaaggccaacggagacaccgcgttcaaggcctccggcaagaacaagacggccaccggcggcgtcgccaagccgaagcgcgcccccacccccttcttcgccttcctggctgagttcaggccacagtacatggagaagcaccccgaggcaaagggcgtcgcggccgtcaccaaggcggctggggagaagtggcgcagcatgtcggatgaggagaaggcaaagtatggcggcaagaaggcagatgccccagcaagcaaggcggtgaacaagaaggagagcaccagctccaagaagaccaagactaacgctgacgaagaaggttctgacgttgaggatgatgaggaggatgaggagtaaatagtagatgagggaacagcagcggtgcaaatcagcgtttgctgcttagggtttagattgccatgtcgatgtccggattatgtaatgttatgtaaggagaatgtttagatgcgtactcctgggctgtggcatgctggagatgtctttgtttg

SEQ ID NO: 2231 - DNA, 1550 bp, Zea mays
  Clone ID: TF_ZmC677_2
cccacgcgtccgcccttgcgtccgccgggccgggccgggacacgcccaaccaccaccaccaccctctctgtcttcgcctccgctgccgattcgaaagcacccgtcctgtcccctcgcaaaaccctagccccagccaccatgaagggcaaggctgacacctccaagaaggacgagggcaggctccgggcgggcggcgccgccggaaagcgcaagaaggccgccgcgagcggcaagcccaagcgcccgccctccgccttcttcgtcttcatgtctgaattcaggcaggagtatcaggcgctgcaccctggcaacaagagcgttgcgaccgtgagcaaggcagcaggggaaaagtggcgtgctatgtcagatcaagagaagcaaccatatgtggaccaagctggacagaagaagcaggactatgagaagactaaggcaaactttgataagaaggagagcacaagctcaaagaaggctaagactgaggatgaggatggctcgaagtcagagcttgatgatgaggatggcagcaccgcgagcgaaccgggaaacgcgctcggcgcttccccacccaaaaaggaaaaccaaccaccactcccaccaccctccgcctccgcctgcgccacagctgccgattcgaaagccctcgtcctgacccctcgcaaaaccctagctccaaccaccatgaagggcaaggccaacgcctccaagaaggatgaggccaggctccgggccggcggcggcggcgccggaaagcgcaagaaggccgccgcgagcggcaagcccaagcgccctccctccgccttcttcgtcttcatgtctgaattcaggcaggagtaccaggcgcagcaccctggcaacaagagcgttgcggccgtgagcaaggcagcaggggaaaagtggcgctctatgtcagagcaagagaagcaaccctatgtggaccaagctgggcagaagaagcaggactatgagaagactaaggcaaatattgagaaggagagcacaagctcaaagaaggctaagactgatgacgacgatggctcgaagtccgaggtcgatgatgaggatggcggtagtgacgaggataacgacgacgacgagtaaatagtatttccgctgttgtgaggtagcaaatcgattgttaggtccccaattagctcactggtttgctatctttaatgttaagttgtttggaacaggtgtttatgaaggggatctattagtttcgtgaggttgttagtttagtgcattagcaaagaaaaagccgaatgctgctagctattatgttgcttttcttttgctaatcacttgtgtcacaactttctgtacctgtttcattgactaatctagtgactagtcagttatgggtttaaaaaaaaaaaaaaaaaaaaaaaaaaaaaaaaaaaaaaaaagaccataaggacccacaagctcccgccttctgttccctttcactgagtgtgaattgcttcgattggagggacccggcccctcgctcgcctcctgcctgtgtttggtttccggtcgctatttctcaccccttgcctagccca

SEQ ID NO: 2232 - DNA, 715 bp, Zea mays
  Clone ID: TF_LIB5025-006-R1-XP-E8
gccggccgggccgggctaataataaataaaaaatgtcattgagcaagttattcagcaatttaacgattcaaacgcgtagcattagcagctacagacatatgcaccctaccaaatttgttagcattttgcaaaatgtaccaatgaaaccccgtagtgcttggcaagtctatatcagggagcacctcaaaggcacaaagacaacccaagagggattgaccaaatcttcaaccgaattatctgccaagtggaaagctttatctgaacatgagaagcagaaatattacactatatatgaatcagaaaaggacgcttatgaaaaagcctttgctgtagctgtgaacaatgcttcgcctaaacaattttaccaagaaaatttgttgagaaaaaaatacaagttgcccttgttggttgatcccaaaaaaccaaagagaccacttaatgcatatttatcttactatcaagcacttagagattccaaacatgcttcaatggaaggacaacctgttgctgaacaagctaaaattgttggacgtttgtataaggagcttcctgaatcagaaaagaagatttataaagacaaggctaatcaagcaatggaacaatacaagaagcaagtagctgaatacaacagagaagctggtatacatgcctaagaatgaactttaatttttttttttttttttgggaaaataaaccttttttgtcttttattttt

SEQ ID NO: 2233 - DNA, 748 bp, Zea mays
  Clone ID: TF_ZmC37456_1
gggtacctcgaggccggccggggaaaaccgaccaccatctccacctcgccgccgccgctcggatttccctctacctcaccctgtccggctccatggcgaccgccgcggtggagagcaagaggggcagcgcccggggccgcaaggcgctcgtggccgtgctcgacaacgaggctaacatctccgccgggaaggctgcccaggccgccgatctctcgtcctgctcagcgcagaagaaggcgaagcgggcgccgtcaaggagcagcaaggccaaggccgccgcggcgtcggcggtcgtggtcgtggacgacatagccgagctgcaggggatgctggagcgcctgcggctggagaaggagaaggcggaggagatggttagggagcgggatgaggtcatccggaagaaggaggaggagatcgagaccagagacaaggagcaggagcgtctccaggccgagctcaggaaggcgcaacgcgccaaggagttcaagcctaccgtgagcttccccctcgtcaagtcgttgctggagaaagagcaagaagcagacgacaagggaaagaagaagaaggggaagggcggccacgagaggaagaagccgtgcccggcgtacgtgctctggctcaaggaccagtggaccgaggtcaagaaggagaaccctgagcccgacttcaaggaggtgtccaacacgctgggcgccaagtggaaggctctgggcgccgaggagaagcagccctatgaggatcgataccg

SEQ ID NO: 2234 - DNA, 1033 bp, Zea mays
  Clone ID: TF_ZmC137_2
aactgaactttaaccaaacaccgccgaaggcaaccagcccaaccttcacgcaccgcatttcccaagggaaccataccagagcggcagagccttcccctccgctccccagtcccacccgcaccctagccctcagcaaaccctaaccgctcgtcgccatgaagcacccctcgttcaaggccaccggcgccaagcgcaagaaggtcggcggcgccaagcgcgggctcacccccttcttcgcgtttttggctgagtttaggccgcagtacctggagaagcaccctgagctcaagggcgtaaaggaggtaagttgcttcttctcaccctaggcatgtagctgggtttcgcttaggtggctggtatatgcctttgctcgtcggtgactttgcttataggtgagcaaggcggctggggagaagtggcgctctatgtcggatgaggagaaggcgaagtatggcggtagcaagaagcaggatggcaaagcaagcaagaaggagaacactagctccaagaaggccaaagctgatgttcgggagggagatgaagcagaaggttctaacaagtcaaaatctgaggttgaggatgatgagcaggatggtaatgaggacgaggatgagtaaatagtacgatggggaacagcagctttgcaattgagtgtttgctgctttacttatttttctatatgctgttccttttgatgttatatgctgtaaggaaaatctgtacatgatggtaccttagggtatggcatgctggagttcccctttaacccgaagagccggatacttttgccagcctcgtcagcatgtgtaaacagttgttttcttgttttatcgacttattgggtgactacccaagagttggtttgtagtcaatgaggtatgctgccccctgtggtgctacgcagctgcagcaacatcagatggtcaggctaaaatcatgttgtgggatctgattctaatgatgcttatttagtactattacaaatatctatcgttgcttatataaatttgttaaaccttgagatatttttacc

SEQ ID NO: 2235 - DNA, 877 bp, Zea mays
  Clone ID: TF_ZmC677_13
ctatagaagagctatgacgtcgcatgcacgcgtacgtaagctcggaattcggctcgagccaccctccgcctccgcctgcgccacagctgccgattcgaaagccctcgtcctgacccctcgcaaaaccctagctccaaccaccatgaagggcaaggccaacgcctccaagaaggatgagggcaggctccgggccggcggcggcggcgccggaaagcgcaagaaggccgccgcgagcggcaagcccaagcgccctccctccgccttcttcgtcttcatgtctgaattcaggcaggagtaccaggcgcagcaccctggcaacaagagcgttccggccatgatgtcttattttttcgtgttggtggatcaggtgagcaaggcagcaagggaaaagtggcgctctatgtcagagcgagagaagcaaccatatgtggaccaagctgggcagaagaagcaggactatgagaagactaaggcgaactttgagaagaaggagagcacaagctcaaagaaggctaagactgatgatgacgatggctcaaagtctgaggttgacgatgaggatgacgaggacgatgagtaaatactgtctccgcagtcatgagatagcaaatcgagtgttaggtccccaactagcttaccggcttgttatctttaatgttaagttgtttggaacaggtgtttatgaaggggatctattagtttcgtgaggttgttagtttagtgcattagcaaagaaaaagctgaatgctgctagctgttctgttgcttttcttttgttgctgctagctgttctgttgcttttcttttgctaaccacttgtcacaactttctgtacctgtttcattgactaatctagtgactagtcagttattggttt

SEQ ID NO: 2236 - DNA, 709 bp, Zea mays
  Clone ID: TF_ZmC1209466_1
ttttttttttttttttgaccttcgtatccttttttttctactttatttcgtagccaatgaagaaaacaacaacaaatgtaatcaagaacagatagagtagcagtaatagtagtacacatttagaagaacaagacagaaacagttgtacacaaaaaaatagagagaaagagagagaaaaagagacaagcacgagttttatgtgttcaaatatctcttttttcacatacaaaacaagaatgtcattctacaacaatataacaagtagtatatagaaaaaaaattctgaactcgacaaaggaaaaggataaggaacggttagagatttaattttattttagtttatttattcttcatcgtcttcatcttcatcatcgtcatcatcatcatcatcattatcttcatcggatgatttcgattttgctgcaggtttctttttaccacctttagctggtgcagcctttttgcttccacctttagcagcacctttaccgcctttggcaggtgaactactagcaccaccaccaccgcttttcttgtattcagcaacacgtacttcatacttttgcttttcaacagcggctttttgttcataacgttttctaacatcatcactaacttttttccatcttgcaccgatttcttttgaaatatcaccaacggataatgatggactttttttcttatatctggtcgtcatcttgtgaaaaga

SEQ ID NO: 2237 - DNA, 520 bp, Zea mays
  Clone ID: TF_LIB3067-045-C4_FLI
ccaacgcctccaagaaggatgagggcaggctccgggccggcggcggcggcgccggaaagcgcaagaaggccgccgcgagcggcaagcccaagcgccctccctccgctttcttcgtcttcatgtctgaattcaggcaggagtaccaggcgcagcaccctagcaacaagagcgttgcggccgtgagcaaggcagcaggggaaaagtggcgctctatgtcagagcaagagaagcaaccctatgtggaccaagctgggcagaagaggcaggaccttcaaagggtggtgccaccagagcgagaactgcatcaccgtctgcaagagcgagggcaataccggcgggttctgcaagctcggggcttgcatgtgcaccaaagagtgtgtcgggagtactggcgctgctggtgctaataaagccccacagcagcatttgagttgatgagtagtaatgaagaacgcttttgttatgccagcgcaagctctagaatttgaggccgagatgaccaaaaataaatgattttgtt

SEQ ID NO: 2238 - DNA, 689 bp, Zea mays
  Clone ID: TF_LIB4729-127-A1-K1-B9
accctccgtctccgcctgcgccacagctgccgattcgaaagccctcgtcctgacccctcgcaaaaccctagctccaaccaccatgaagggcaaggccaacgcctccaagaaggatgagggcaggctccgggccggcggcggcggcgccggaaagcgcaagaaggccgccgcgagcggcaagcccaagcgccctccctccgccttcttcgtcttcatgtctgaattcaggcaggagtaccaggcgcagcaccctagcaacaagagcgttgcggccgtgagcaaggcagcaggggaaaagtggcgctctatgtcagagcaagagaagcaaccctatgtggaccaagctgggcagaagaagcaggactatgagaagactaaggcaaatattgagaaggagagcacaagctcaaagaaggctaagactgatgacgacgatggctcgaagtccgaggtcgatgatgaggatggcggtagtgacgaggaaaacgacgacgacgagtaaatagtatctccgctgtcgtgaggtgtttatgaaggggatctattagtttcgtgaggttgttagtttagtgcattagcaaagaaaaagccgaatgctgctagctattacgttgcttttcttttgctaatcacttgtgtcacaactctctgtacctgtttcattgactaatctagtgactagtcagtta

SEQ ID NO: 2239 - DNA, 1008 bp, Zea mays
  unsure (1)..(1008): unsure at all n locations
  Clone ID: TF_ZmC677_7
cattgggtacctcgaggccggccgggctccgcctccgcctgcgccacagctgccgattcgaaagccctcgtcttgtcccctcgcaaaaccctagctccaaccaccatgaagggcaaggccaacgcctccaagaaggatgagggcaggctccgggccggcggcggcggcgccggaaagcgcaagaaggccgccgcgagcggcaagcccaagcgccctccctccgctttcttcgtcttcatgtctgaattcaggcaggagtaccaggcgcagcaccctagcaacaagagcgttgcggccgtgagcaaggcagcaggggaaaagtggcgctctatgtcagagcaagagaagcaaccctatgtggaccaagctgggcagaagaagcaggactatgagaagaccaaggcaaatattgagaaggagagcacaagctcaaagaaggctaagactgatgacgacgatggctcgaagtccgaggttgatgatgaggatggcggtagtgacgaggaaaacgacgacgacgagtaaatagtatctccgctgtcgtgaggtagcaaatcgattgttaggtccccaattagctcactggtttgctatctttaatgttaagttgtttggaacaggtgtttatgaaggggatctattagtttcgtgaggttgttagtttagtgcattagcaaagaaaaagccgaatgctgctagctattacgttgcttttcttttgctaatcacttgtgtcacaactttctgtacctgtttcattgactaatctagtgactagtcagttatgggtttaatgtttggttttggttttatatatttctttgttgctttctgtgcggcctacggaagtcatctgtgctgtatgaatgatgaatatgtgcttgtggctcgtttcattttaaaaaaagaacccganggaaaaatataccaactgatattgttttgggacaaggactattctgggaaggggctttnggtcagattacactcaagaattaacatgacatg

SEQ ID NO: 2240 - DNA, 1387 bp, Zea mays
  Clone ID: TF_ZmC4984_1
taccggtccagaattaccgggtcgacccacgcgtttactcagggttctccttcttgacctccgtccacttcaaggaggtttccaaaacgctgggcgccaagtggaaggctctgggcgccgaggagaagcagccatatgcggaacggtaccgccaggagaaagaggcctacctgcaggtggttggccaggagaagcgcgaggccgaggcgatgcagcttctcgcgcagcaaccgatgcagtggaccgccaaggagctgctgggtcagtacctcaagttcaggcaggaggccgaggagggtgactgcaagaaggggaggaagaagaagagcaagaaggacaaggacccctccaagcccaagcagcccatgtcggcctacttcgtgtactcgcaggagaggcgtgccacgctggtcgcggagaagaagagtacctgagattggcaagatcaccggggaagaatggaagaacatgacagaaggtcagagggctccctatgaggaggtcgcgaggaagcagaaggaagagtaccacaagcagatggaggtgtacaagcagaagaaggctgaggaagctgctagtcttgagaaggaagagcaggagcataagaaaatcatgaagcatgaggctctccagctgctcaagaagaaggagaaggcagataatatcatcaagaaaaccaaagaaaagcgccagaagaagaaacaggagaacgctgatcccaaccggcccaagaggccagcctcttcctttcttcttttcagcaaggaagagaggaaacagctgatcgaggaacgcccgggcatcaataactcaaccctgaacgcgctcatcacggtgaagtggaaggaactgagcggcgaggagaggcaggcctggaatgcaaaggccgcgcctgccatggctgcgtacaagaaggagatggaggagtacactaaggcccaaagctcatctgcttgacagaataactaattcctgcgagtgagctttggttacaaggatcctcatctctgaatcctggtgtggtagattacttcgtgtgatctttagctttgtgtgaccttattagtcgcagcaatcagtgtaatggcggttcatatggtttagtggcagtttatattgttgccacgagcccaggaattgagtaatctttcagttctgacagaataactaattcctgcgaatgatctttggttacaaggatcctcatctctgaattcctggtttggttagattacttcgtgtgatcgttagctttctgtgaccttattagtcgcagcaatcagctgtagtgccccccaccccatggttttctgatcctgttttattgttgccgcgcccccccgaattgagtaatctttcagttctgacaaaaaaaaaaaaaaaaaaa

SEQ ID NO: 2241 - DNA, 689 bp, Zea mays
  unsure (1)..(689): unsure at all n locations
  Clone ID: TF_ZmC4984_2
ggccgagctcaggaaggcgcaacgcgtcaaggagttcaagcctaccgtgagcttccccctcgtcaagtcgttgctggagaaagagcaagaagcagacgacaagggaaagaagaagaaggggaagggcggccacgagaggaagaagccgtgcccggcgtacgtgctctggctcaaggaccagtggaccgaggtcaagaaggagaaccctgaggcagatttcaaggaggtgtccaacacgctgggcgccaagtggaaggctctgggcgccgaggagaagcagccctatgaggagcggtaccgccaggagaaggaggcctacctgcaggtggttggccaggagaagcgcgaggccgaggcgatgaagcttctcgaggagcagcagatgcagtggaccgccaaggagctgctggatcagtacctcaagttcaggcaggaggccgaggagggtgactgcaagaagggngaggaagaataagagcaagaaggacaaggacccctccaagcccaagcagcccatgtcggcctacttcgtgtactcgcaggagaggcgtgccacgctggtcgcggagaagaagaatgtacctgagattggcaagatcaccggcgaagaatggaagaacatgacagaaggtcagagggctccctatnaggaggtcgcgaggaagcagaaggaagagtaccacaagcag

SEQ ID NO: 2242 - DNA, 706 bp, Zea mays
  Clone ID: TF_ZmC13336_1
aagaaggaccccaacgcccccaagcgcggtctctctgcttacatgttcttcgccaatgagaaccgtgagcgcgtccgagacgaaaacccaggcattgcctttggtgcccttggtcgtaagctcggtgagctgtggaagggattgagcgacgccgagcgcaagccatacgaagacaaggccgccgccgacaagaagcgttacgaggaccagaaggccacttacttggctggtggagatgacgatgaagaatcttcctaaatatctttttcaatatttctttcaactccaaagagacgagaaagaaaaaaaaatcatccctcagtgtatgattatatttcattaggaattttttcctctggtcgtcggtctgatggttcttgtcttgctcttacctatgatatcgcttgcatagcctatgctaatggctatctctttgacacgtttctcttttattaatctctggttcctacggtatgggctgacggggttctttgtattctttccacgtggttgttacttctttttatgtgatgccagttcgttttcttagttacggttgcgcgaggggtttttagtcaaatatggaaaatctttgtgcttttcgtctgatctcatcgtccgattcatgtaattcgattgcacgcctacgaaaactaagtgtctaggaaaataggagacaaagtcagaagaaagcagatgaaattat

SEQ ID NO: 2243 - DNA, 1066 bp, Zea mays
  Clone ID: TF_ZmC1672_1
gctcgtatcggggagcattgggtacctcgaggccggccgggcgggcactcgcatcagagcggcgccggcctacaaccgttttcgtgctcacacacccaaaccttagtcgcgatcaggccccaaggactcgagatgaagtcgagggcacggtccaccgccggcgactccaggctctcggtgaggaagaccaaggctgagaaggacccaaacaagcccaagaggcctccgagcgcgttcttcgtcttcatggaggagttcaggaaggactacaaggagaagcaccccaatgtgaagcaagtctccctgattggcaaggctggtggtgacaagtggaagtccctgtctgatgccgagaaggctccctacgtgtctaaggcagagaagctcaaggctgagtacaccaagaagatcgacgcttacaacaacaagcagtctggagaccccacggcgtctggtgattccgacaagtccaagtccgaggtgaacgacgaggacgaggagggtgacgagtgatgtatgacggatgaaactctgtccaagtgtttgcagtcagggaaaaaatctcgtcgttgtcggcctaaccgggttttctcgaaggactttctagatgcagtagattagtgccgtcttctgagtagtttccttgcaagtgtcgtcccgtccctggagtgaggcagtttagtttgtagtttcttcgcttcatcggcactcgaccgttgttggattgggatgtttagcctgcagtctgtacttaccccaagcatctatggtgcctgttttaaatctcagatcacaatagacgtttgttttaaatcacaaaaaaaaaaaataataaattctcagatcacaatagacgtttttcctaaaaagtaaaaaaacgtccctggagtgaggcagtttagtttgtagtttcttcgcttcatcggcactcgaccgttgttggattgggatgtttagcctgcagtctgtacttaccccaagcatctatggtgcctgttttaaatctcagatcacaatagacgtttgttttaaaaaaaaaaaaaaaaaaatccgtagggcctctaaa

SEQ ID NO: 2244 - DNA, 1182 bp, Zea mays
  Clone ID: TF_ZmC1672_3
acgccacgataaggccaaacaagcggtaaccttgaacaagggaagagaattgacttcctgggtcagtcatagcaaatgcatcggcagctgcgcatgcaatgaagtccagggctgccaactgagatgagaagttcctacgtgctcacacacccaaaccttagtcgcgatcaggccccaaggactcgagatgaagtcgagggcacggtccaccgccggcgactccaggctctcggtgaggaagaccaaggctgagaaggacccaaacaagcccaagaggcctccgagcgcgttcttcgtcttcatggaggagttcaggaaggactacaaggagaagcaccccaatgtgaagcaagtctccctgattggcaaggctggtggtgacaagtggaagtccctgtctgatgccgagaaggctccctacgtgtctaaggcagagaagctcaaggctgagtacaccaagaagatcgacgcttacaacaacaagcagtctggagaccccacggcgtctggtgattccgacaagtccaagtccgaggtgaacgacgaggacgaggagggtgacgagtgatgtatgacggatgaaactctgtccaagtgtttgcagtcagggaaaaaatctcgtcgttgtcggcctaaccgggttttctcgaaggactttctagatgcagtagattagtgccgtcttctgagtagtttccttgcaagtgtcgtcccgtccctggagtgaggcagtttagtttgtagtttcttcgcttcatcggcactcgaccgttgttggattgggatgtttagcctgcagtctgtacttaccccaagcatctatggtgcctgttttaaatctcagatcacaatagacgtttgttttaaaaaaaaaaaaaaaaaagcggcctcgagctctgatggagacagaagggtttctttagttactaaagcaggataaagacgacttatggcagccatcctatccttccctccataaatttcagcacctgcaacgtatatatttgtgctgcgcttgaaaccaatagctgctagcataagcacagcctcttcaggtgcaaggggacatttgccttcggaccgtaagaaagcagcagagggcaactttgtcatcttcttgagttctgacaacacaggaaagtgaatttggcgataagcttctagttcgtccggacgcgtggg

SEQ ID NO: 2245 - DNA, 928 bp, Zea mays
  Clone ID: TF_ZmC1672_4
ccggccgggatcacgtagtcctagcggagggcagtagcaagcggcgcgccgcgcggccaatgggaggcgagtggccggatcggtgacgtgcctaaaaaatttcagatcccgcgcaaatgcccaccgccccttactttaaaagccgcccccttgtgggcctcggttgcgactcgcatcagagcggcgccggcctacaaccgttttcgtgctcacacacccaaaccttagtcgcgatcaggccccaaggactcgagatgaagtcgagggcacggtccaccgccggcgactccaggctctcggtgaggaagaccaaggctgagaaggacccaaacaagcccaagaggcctccgagcgcgttcttcgtcttcatggaggagttcaggaaggactacaaggagaagcaccccaatgtgaagcaagtctccctgattggcaaggctggtggtgacaagtggaagtccctgtctgatgccgagaaggctccctacgtgtctaaggcagagaagctcaaggctgagtacaccaagaagatcgacgcttacaacaacaagcagtctggagaccccacggcgtctggtgattccgacaagtccaagtccgagggtgacgagtgatgtatgacggatgaaactctgtccaagtgtttgcagtcagggaaaaaatctcgtcgttgtcggcctaaccgggttttctcgaaggactttctagatgcagtagattagtgccgtcttctgagtagtttccttgcaagtgtcgtcccgtccctggagtgaggcagtttagtttgtagtttcttcgcttcatcggcactcgaccgttgttggattgggatgtttagcctgcagtctgtacttaccccaagcatctatggtgcctgttttaaatctcagatcacaataaaaagaaaaaaaaaaaaaaaaaagcggcc

SEQ ID NO: 2246 - DNA, 381 bp, Zea mays
  Clone ID: TF_ZmC146668_1
cgccggcaagcgcaagaaggccaccacgagcggcaagcccaagcgcccgccctccgccttcttcgtcttcatgtctgaattcaggcaggagtatcaagttcaacaccctggcaacaagagcattacggctgttagtcaccttgcactctgctctccctttattttttggtgcgtttgcagatgtgattctttgttcgtattggtggatcaggtgagcaaggcagcaggggagaagtggcatgctatgacagattaagttgcattgtacaatcatatatggaagcagctcaaggatgcaccaaaatgatcaacttccaaacgtatggaacatgtgaaacctgtagtctgtagatgcaaaaatgatctgatgataccataatt

SEQ ID NO: 2247 - DNA, 742 bp, Zea mays
  Clone ID: TF_LIB4738-132-A1-K1-D9
agctccctctcctctggctgccgctctccacagtcctcgggctccaagccttgcgtaaaccccgacccccacgcgcatagatgaagactaggtcgcagacgtcgccgaagcctctcaagacggtggcgatggctcccaggccgagcagcaccaagcggaagccgaggcccaagccggcggggaagggcgacccccgcgcacccaagaagccacccaccgccttcttctacttcatggaggattttcgcaagatctataagcaagaaaaaccaagtgtaaaatcaatgcaggaaatagggaaggcatgtggcgaaaaatggaatacaatgacatttgaggaaaaggtcaagtattatgatatagctactgagaaacgtgcagaatttgagaaggcgatgattgaatataacaagaaaaaggaaagctgaacatttgtctgttccaaattcccgatggttcactgtaactggatgaatcaatcagctgtatattacagaactgtgatttttagtggaatttataaataccactagttggaaccgtcagctcacgcagatatgtatcttttgtagtcgacttgcacattttgatgacaccgagtcttctacccggtgtttttcatctggagataatttgtgtttcgtgctaactgctcgttaaattgcttattatagagttgtatgtatgattgtgtatataataatgtcctccaacgcaaaaaaatatatatattatcacagcg

SEQ ID NO: 2248 - DNA, 743 bp, Zea mays
  Clone ID: TF_ZmC2000_1
cgagggcggcctcgaggcgggactgggctccctctcctctggctgccgctctccacagtcctcgggctccaagccttgcgtaaaccccgacccccacgcgcatagatgaagacgaggtcgcagacgtcgccgaagcctctcaagacggtggcgatggctcccaggccgagcagcaccaagcggaagccgaggcccaagccggcggggaagggcgacccccgcgcacccaagaagccacccaccgccttcttctacttcatggaggattttcgcaagatctataagcaagaaaaaccaagtgtaaaatcaatgcaggaaatagggaaggcatgtggcgaaaaatggaatacaatgacatttgaggaaaaggtcaagtattatgatatagctactgagaaacgtgcagaatttgagaaggcgatgattgaatataacaagaaaaaggaaagctgaacatttgtctgttccaaattcccgatggttcactgtaactggatgaatcaatcagctgtatattacagaactttgatttctagtggaatttatagataccactattggaaccgtcagctcacgcagatatgtatcttctgtagtcgacttgcatattttgatgacaccgagtcttttactggtggttttcatctggatataatttgtgtttcgtgctaactgctcgttaaattgcttattatggagttgtatgtatgattgtgtataaaaaaaaaaaaaaaaaagcggcc

SEQ ID NO: 2249 - DNA, 603 bp, Zea mays
  Clone ID: TF_LIB3078-029-Q1-K1-F11.R2
cccacgcgttcgcctttctccttgtctccgtctctcggcaggcggaccgtcagaggcaattttgccctgaattctaccccggtgagcgggaccgccaccgggattccctgctccaagcgcggatctgagcgctgcgcttcgagtccgcggtcgaatgcgccaagaagggggccaaatacaagggcgccgccaaggtcgatgccaagatggcggtgaagaacaagggggccgagaaccccaacgggggcacgaaagggaacgccgacaaggaccccaactagcctaagagggcttccagcgctatgttagagttcatggaggaatttcgggaggagatcacggagaacaaccctctgaacaagtctgtcaatgctgtggggaaagcttgtagccacaggaggaaatccctgagcgattcgtataaggctacctatgtaaccaaggctaacaagctcaagctggagtacaataacgacatcagtgactacagcactggcgatagcactgctgctaacaaggctcatgacgaggaggaagaagaggaatatgaagaggactctgacgagttcaatgacgaggacaatgacgagggtcatgaagagg

SEQ ID NO: 2250 - DNA, 260 bp, Zea mays
  Clone ID: TF_LIB3151-003-Q1-K1-E11
tcgatccaagtcacatactaagagtgccaagctatccgcgaaattccaagctggaaagaaatgggagaaagcttcccaggatccaaacaagccaaaaagaccccctagagccttctttgctttcatagaagagttccgtgagcaatacaagaaggatcaccctaaaaacaaatcccctgcgggtgtcggaaaagcttgtggagattaattgaagagcttgtcttaaactaaaaaagcaccttatgtatctaaagcataaa

SEQ ID NO: 2251 - DNA, 1001 bp, Zea mays
  Clone ID: TF_ZmC137_1
ttgggtacctcgaggccggcgggtacctcgaactgcacccgggcccgggaacaaatcccgccgaaggcaaccagcccaaccttcacgcaccgcatttcccaagggaaccataccagagcggcagagccttcccctccgctccccagtcccacccgcaccctagccctcagcaaaccctaaccgctcgtcgccatgaaggacacctcgttcaaggccaccggcgccaagcgcaagaaggtcggcggcgccaagcgcgggctcacccccttcttcgcgtttttggctgagtttaggccgcagtacctggagaagcaccctgagctcaagggcgtaaaggaggtgagcaaggcggctggggagaagtggcgctctatgtcggatgaggagaaggcgaagtatggcggtagcaagaagcaggatggcaaagcaagcaagaaggagaacactagctccaagaaggccaaagctgatgttcgggagggagatgaagcagaaggttctaacaagtcaaaatctgaggttgaggatgatgagcaggatggtaatgaggacgaggatgagtaaatagtacgatggggaacagcagctttgcaattgagtgtttgctgctttacttatttttctatatgctgttccttttgatgttatatgctgtaaggaaaatctgtacatgatggtaccttagggtatggcatgctggagttcccctttaacccgaagagccggatacttttgccagcctcgtcagcatgtgtaaacagttgttttcttgttttatcgacttattgggtgactacccaagagttggtttgtagtcaatgaggtatgctgccccctgtggtgctacgcagctgcagcaacatcagatggtcaggctaaaatcatgttgtgggatctgattctaatgatgcttatttagtactattacaaatatctatcgttgcttatataaatttgttaaaccttgagatatttttcaaaaaaaaaaaaaaaaagcggcc

SEQ ID NO: 2252 - DNA, 1033 bp, Zea mays
  Clone ID: TF_ZmC15996_1
tccctcgcgtggcgtgtctattgggtatctcgaggccggccgggccgggatccatcaatcctcatcgccacccaacccgccgagtccccaagcaagttgagcatccatccatccatggcgggaggcaagtccaccggcaatgccgcgcgcagcaggaagcgcgtcgaggcaaccgtcctcaagcgctccagggacgggagcgccttcaccagatgcgaggcctgcaacaaggacgtccccgtcgtcctcatcgacatgcacagctgcagcctcgacgagaagatcaggatgacgctcgaggcgcaggtcgtcgagaagaccgtcgaggtcgccagtgcggaccgcaagaagtcctccgccaagggaggtggtaacaaggacgccaagcgcaagcgctcgcccaccgccttcttcctcttcatggacgacttcaggaaggagttcaaggccacccatcctgacaacaagagtgtcgctaccgttgcaaaggaaggaggggagaggtggaagtccatgacagacgaggagaagaagccttacattgaaaaggccgcggagctcaaggctgaggccgagaatggcgagggcagtggtgagaacaatgttgccactaagaaagccaagacagatgaccaggaggtggatcagccagcaaagaagctcagaaagtgcaaggctcttcacgaggacgaggatgacgatggtgaccaggaagacgaggatgagaagaacgagttggatgacgacatgtagatggcagaggccactctcccatctctgtaaatggatggcagatgtgagcgtcttgttagaaatgtcacttgtttcaagctagagggaagagggagagtagtcagtagtgaatatcccccgttatcgttgctacatgaatgaactattctatgatgcagttctgtctgctttcatctccatccaacacatgtactcaatgcctttttcttttctggattttctatattacatccattgctccaaaaaaaaaaaaaaaaagggcggccgccaccgcggtgga

SEQ ID NO: 2253 - DNA, 1002 bp, Zea mays
  Clone ID: TF_ZmC15996_2
cggacgcgtgggcggacgcgtgggcggacgcgtgggcggacgcgtgggctgacgcatgttctccacgcgtccgcgccacccaacccgccgagtccccaagcaagttgagcatccatccatccatggcgggaggcaagtccaccggcaatgccgcgcgcagcaggaagcgcgtcgaggcaaccgtcctcaagcgctccagggacgggagcgccttcaccagatgcgaggcctgcaacaaggatgtccccgtcgtcctcatcgacatgcacagctgcagcctcgacgagaagatcaggatgacgctcgaggcgcaggtcgtcgagaagaccgtcgaggtcgccagtgcggaccgcaagaagtcctccgccaagggaggtggtaacaaggacgccaagcgcaagcgctcgcccaccgccttcttcctcttcatggacgacttcaggaaggagttcaaggccacccatcctgacaacaagagtgtcgccaccgttgcaaaggaaggaggggagaggtggaagtccatgacagacgaggagaagaagccttacattgaaaaggccgcggagctcaaggctgaggccgagaatggcgagggcagtggtgagaacaatgttgccactaagaaagccaagacagatgaccaggaggtggatcagccagcaaagaagctcagaaagtgcaaggctcttcacgaggacgaggatgacgaaggtgaccaggaagacgaggatgagaagaacgagttggatgacgacatgtagatggcagaggccactctcccatctctgtaaatggatggcagatgtgagcgtctagttagaaatgtcacttgtttcaagctagagggaagaggaagagtagtcagtagtgaatatcccccgttatcgttgctacatgaatgaactattctatgatgcaaaaaaaaaagcttaaaaaaaaaaaaaacacatgtactcaatgcctttttcttttctggattttctatattacatccattgctcc

SEQ ID NO: 2254 - DNA, 1384 bp, Zea mays
  Clone ID: TF_ZmC1306_1
gagattttggctgagaagtacaaggataggcttgagagctcttataggggtctaatacatgaggtattctccaaggtccttcgtggcctgtctagtgctaaagtgacacggccaagtacattccgcagttgcctagatggatatgcagtcaaatcatcacttaaagctgaagatggtttgctttatccactcgaaaagggcttcttctttctgccaaagcccccaacactaattcctcatgaagagattgagtatgttgagttcgagcgtcatggtgctggaggtgcaagtatatcatctcattactttgaccttttggtcaagctgacaaatgatcaagaacttctcttcagaaacatccaaaggaatgaataccataacctcttcaacttcatcagcggtaagcatttgaaaattctgaatcttggagatggacaaggtagaactagtggtgttactgctgttcttcagagcactgatgatgattctgttgatccacatctggagcggataaaaaatcaggccggtaatgaggaaagtgatgaagaggatgaagattttgtggcagacaaggatgatagtggatctccaaccgatgattctgatgcagaaggctctgatgctagtatgagtggaggagaaaaggagaaaccttccaagaaggaagctagtagctcaaagccgcctgtgaagaagaagcagaagagtgggccagatgaaggttctcaaaaaaagaagccaaagaagaagaaagatcccaatgcccctaagagagctatagctccattcatgtacttctcaaaggctgagcgagctaatatcaagagcagcaatcctgaactggcgaccacagagattgcaaagaagctcggagaaaggtggcaaaagatgacagcggaggagaggcagccatatgtggagcagtctcaggtcgacaagcaacgctatgcagaagagtctgcagcctaccgtggtgcagccgctcagcagggctctggtgctggatcggaatgaaggtttaatcgtctcgacagttaacttgcaaggctggatgattgagtcgtcagaataaagctggaatacccaaaaacctaagctgaatgtcatcgtttgacctgttgggttgttccggaattcaaccaggattcattctagttcatcaatgcttatattaattaggcaagcaatctggtctggaatcgatcgaggccgttccctggaaccgaacatacccctaagcaaatcctgccaggtaggacaaaatgtagcagcaggtttaaacaaatttcagagaagtacaagtattttttgcataagaagtacacaattacaactgttttgacatgtatcatagaactacaattaattcccttttggcgccatg

SEQ ID NO: 2255 - DNA, 1187 bp, Zea mays
  Clone ID: TF_ZmC1306_2
aaccattgtagccaacatgtttttatgaatctgatatagcatcttgtcccttcataatttttttaagcggtaagcatttgaaaattctgaatcttggagatggacaaggtagaactagtggtgttactgctgttcttcagagcactgatgatgattctgttgatccacatctggagcggataaaaaatcaggccggtaatgaggaaagtgatgaagaggtattgcttcccttagttaacgactcaatataagtttactttctgtcgattgcatgtacatttttgtgtaacccctcttcaaagtaggatgaagattttgtggcagacaaggatgatagtggatctccaaccgatgattctgatgcagaaggctctgatgctagtatgagtggaggagaaaaggagaaaccttccaagaaggaagctagtagctcaaagccgcctgtgaagaagaagcagaagagtgggccagatgaaggttctcaaaaaaagaagccaaagaagaagaaagatcccaatgcccctaagagagctatagctccattcatgtacttctcaaaggctgagcgagctaatatcaagagcagcaatcctgaactggcgaccacagagattgcaaagaagctcggagaaaggtggcaaaagatgacagcggaggagaggcagccatatgtggagcagtctcaggtcgacaagcaacgctatgcagaagagtctgcagcctaccgtggtgcagccgctcagcagggctctggtgctggatcggaatgaaggtttaatcgtctcgacagttaacttgcaaggctggatgattgagtcgtcagaataaagctggaatacccaaaaacctaagctgaatgtcatcgtttgacctgttgggttgttccggaattcaaccaggattcattctagttcatcaatgcttatattaattaggcaagcaatctggtctggaatcgatcgaggccgttccctggaaccgaacatacccctaagcaaatcctgccaggtaggacaaaatgtagcagcaggtttaaacaaatttcagagaagtacaagtattttttgcataagaagtacacaattacaactgttttgacatgtatcatagaactacaattaattcccttttggcgccatgaaaatacagcacctttgatacttgactaatactatgagaatagcttt

SEQ ID NO: 2256 - DNA, 1572 bp, Zea mays
  Clone ID: TF_ZmC677_1
cccacccgggcggcgcgctcccatccgccggccgggatcgcacaaacgcgctcccggtccgaaaggcaaaccagccaccagtcccaccaccaccaccctctgtcttcgcctccgctgccgattcgaaagcacccgtcctgtcccctcgcaaaaccctagctccagccaccatgaagggcaaggctgacacctccaagaaggacgagggcaggctccgggcgggcggcgccgccggaaagcgcaagaaggccgccgcgagcggcaagcccaagcgcccgccctccgccttcttcgtcttcatgtctgaattcaggcaggagtatcaggcgctgcaccctggcaacaagagcgttgcgaccgtgagcaaggcagcaggggaaaagtggcgtgctatgtcagatcaagagaagcaaccatatgtggaccaagctggacagaagaagcaggactatgagaagactaaggcaaactttgataagaaggagagcacaagctcaaagaaggctaagactgaggatgaggatggctcgaagtcagaggttgatgacgaggatggcagcagtgacgaggaaaacgatgacgatgagtaaacagtctccaaggtcacgaggtagcaaatcgagtgttaggtccccaattagcttactgttttgctgcctttaaatgttaagttgtttcaaacaggtgtttatgaaggggatctattagtttcgcgatgtcgttagtttagtgcattagcaaagaaaaagccgaatgctgctagctgttctgttgcttttcttttgctaaccacttgtgtcacaactttctgtacctgcttcattgattaatctagtgactagtcagttattggttcaaaaaaaaaaaaaaaaaaaaaaaaaaaataaaaggtgcattccaaggcggcaggggaaaagtggcgctctatgtcagagcaagagaagcacccctatgtggaccaagctgggcagaagaagcaggactatgagaagactaaggcaaatattgagaaggagagcacaagctcaaagaaggctaagactgatgacgacgatggctcgaagtccgaggtcgatgatgaggatggcggtagtgacgaggaaaacgacgacgacgagtaaatagtatttccgctgtcgtgaggtagcaaatcgattgttaggtccccaattagctcactggtttgctatctttaatgttaagttgtttggaacaggtgtttatgaaggggatctattagtttcgtgaggttgttagtttagtgcattagcaaagaaaaagccgaatgctgctagctattatgttgcttttcttttgctaatcacttgtgtcacaactttctgtacctgtttcattgactaatctagtgactagtcagttatgggtttaaaaaaaaaaaaaaaaaaaaaattaaaaaaaaaaaaaaaagggcggccgccaccgcggtggatgtgctgtatgaatgatgaatatctgcttgtggctcgtttccagtttagtgagtttttgttttgtgactcaggttaatttacatgagtttgtttgtgactgttaaaaaaaaaaaccacaccc

SEQ ID NO: 2257 - DNA, 1006 bp, Zea mays
  Clone ID: TF_ZmC677_12
cccacgcgtccgcccacgcgtccgcccacgcgtccgggccaacgcctccaagaaggatgagggcaggctccgggccggcggcggcggcgccggaaagcgcaaaaaggccgccgcgagcggcaagcccaagcgccctccctccgctttcttcgtcttcatgtctgaattcaggcaggagtaccaggcgcagcaccctagcaacaagagcgttgcggccgtgagcaaggcagcaggggaaaagtggcgctctatgtcagagcaagagaagcaaccctatgtggaccaagctgggcagaagaggcaggaccttcaaagggtggtgccaccagagcgagaactgcatcaccgtctgcaagagcgagggcaataccggcgggttctgcaagctcggggcttgcatgtgcaccaaagagtgtgtcgggagtactggcgctgctggtgctaataaagccccacagcagcatttgagttgatgagtagtaatgaagaacgcgtgggcggacgcgtgggcggacgcgtgggcggacgcgtgggcggacgcgtgggcgcgctcggcgcttccccacccaaaaaggaaaaccaaccaccactcccaccaccctccgcctccgcctgcgccacagctgccgattcgaaagccctcgtcctgacccctcgcaaaaccctagctccaaccaccatgaagggcaaggccaacgcctccaagaaggatgaggccaggctccgggccggcggcggcggcgccggaaagcgcaagaaggccgccgcgagcggcaagcccaagcgccctccctccgccttcttcgtcttcatgtctgaattcaggcaggagtaccaggcgcagcaccctggcaacaagagcgttgcggccgtgagcaaggcagcaggggaaaagtggcgctctatgtcagagcaagagaagcaaccctatgtggaccaagctgggcagaagaagcaggactatgagaagactaaggcaaatattgagaaggagagcacaagctca

SEQ ID NO: 2258 - DNA, 256 bp, Zea mays
  Clone ID: TF_700351302H1
ggaagaccgaggctgagaaggacgcagacatgcccaagatgcctccgagggcgttcttcgtatttatggaggagttcaggaaggactacaacgagcagtaccccagtgtggagcaagtatcgctgattggcaacgctggtcgtgacgagtggaagtccctgtctgatgccgagaaggctcactacgtgtctaaggcagtgaagctcaaggatgagtacacgaagaagatcgacgtttacagcaacaagcagtctgg

SEQ ID NO: 2259 - DNA, 2522 bp, Zea mays
  Clone ID: TF_ZmC26216_1
acctcgaggccggccggtgaccatttcgctgtggctctatttggggatgtcgtcgctgcgccgcgcgctccgctctaccgcctccgcaccgcagagccgcagccaagcaagctgcgcccctggacttggcctcaccggtgaagcggagcttgaggataggcggtgctcgggagataccaagcggtcggccgcaggcgccacgtcggcggagatgacggacggtcaccacttcaacaacatcctcctcggagggcgcggcggcacaaaccctggtcagtttaaagtgcattctggtggacttgcatggaagagacaaggtggaggaaagaccattgagatcgacaaagctgatgtaactgcagttacttggatgaaagtccccagagcatatcagcttggagtcaggattaaggctggcctgttctacagatttattggcttccgtgaacaggatgtaagcaacttgaccaacttcatacaaaagaatatgggtgtcacaccagatgaaaaacagctttctgttagtggccagaattggggagggattgatatagatggaaacatgctaacctttatggttggttcaaagcaagcatttgaggtgtccctaccagatgttgcacaaacccagatgcaaggaaaaacagatgttctcttagagcttcatgttgatgatactactggagccaatgagaaagactccctcatggatttgagttttcatgtgcctacttcgaatactcagtttgttggggatgagagtcgccctccggctcatattttatgggagaccatattgaaatttgctgatgttggttcttctgaagaaccagttgtcacatttgaaggaattgcgattcttacaccaagaggacgttatagtgttgaacttcatctgtcatttctgcgactccaaggacaagctaacgattttaaaatccaatacagcagtattgttcgcctctttcttttgccaaagtcaaacaatcctcatacatttgttgttatcactcttgacccaccaatccgtaaaggacaaacattgtatcctcacattgttattcagtttgagacagaggcagtagtggaaagagatctggcattgagtaaagaactgttggttgaaaaatacaaggacaggcttgaggaatcttacaagggtctaatacatgaggtatttaccaaagtccttcgtggtctatctggtgctaaagtcacaaggccaggttctttcagaagttgccaagatggatatgcagttaaatcatctctcaaagctgaagatggactgttgtatccacttgaaaagggtttctttttcctgccaaagccacctacactcattcttcatgaggagattgagtttgttgagtttgaacgtcatggtgctgggggtgccagtatatcatctcactattttgacctccttgtcaaactgaaaaatgaccaagagcatctcttcagaaacattcaaaggaatgaataccacaacctcttcaatttcatcaatggaaagaacattaaaataatgaaccttggaggagatggtcaaggtgcaagtggtgtagttacagatgttctacgagacactgatgatgatgctgttgatccacatctagagcgtattaagaatcaggccggggatgaggaaagcgatgaagaggatgaagattttgttgcagacaaggatgatagtggatctcctactgatgactcaggtgatgaggaatcagatgctagtgatagtggtggtgaaaaggagaaatcatccaagaaggaagcaagcagttcaaagccagttcagaaaagaaagcataaggccagggatgacgaaggacaagagaagaaaaagccaaagaagaaaaaagatccgaatgctccgaaacgagccatgaccccgttcatgtatttctcaatggctgagcgaggaaacatgaagagcagcaacccagatttgcctacgactgagatcgcaaagaagcttggggagatgtggcaaaagatgtcaggcgaagagaaacagccttacatccagcaggcccaggtcgacaagaaacgttatgaaaaagaatccgctgtctatcgcggtgaagctacagtcgatgtggattctgggaacgagtctgactagagatccaagctcttgggctggcatggtggcacgggatgaaagtctagtgccatgtgtgctattgttatgtcagcaaccgttgcctccaacattgctgacagtaaagagagtttctctcgcagcttacctctgcagggcaaaagaatgtacgagtgtagtctagtgattttgtgtaaaacaaccaacatacgtggttttctgagagatggtaagacgtcagtttaactgttgtcgattggctgttttgccccctctcaaaaaaaaaaaaaattataaaataaatcaaatatagggaagggaaataatttaggggcgtccttttttaaggatccaatcttacctcactcttgcatgcaacgttatagcttcttttataggggctcctaatttt

SEQ ID NO: 2260 - DNA, 790 bp, Zea mays
  Clone ID: TF_LIB4742-042-R1-K1-D11
attgggtacctcgaggccggccgggactcccgtttacgtgcacacctccaaaccctcatcacgatccggctccaaggtctcgagatgaagtcgagggcgaggtccggcggtggcgactccaggctctcggtgaggaagaccaaggttgagaaggacccaaacaagcccaagaggcctccgaccgcgttcttcgtcttcatggaggagttcaggaaggactacaaggagaagcaccccaatgtgaaacaagtctcagtgattggcaaggctggtggtgacatgtggaagtccttgtctgatgccgagaaggctccctacgtatctaaggccgagaagctgaaggttgagtacacaaagaagatggacgcctataacaacaagcagtctggaggaggacccacattgtctggtgattctgacaagtccaagtccgagggtgatgagtgatggatgacgggtgaaactctgggctgcccaagtgcttgcagtcagcagggaaatctcatcgtcgttgggcctaaccgggctttgctgctccgtagcgtctggaagctgtctgtcttttgagatgctgtagactagtagtgcctgctctgagttagtaattgaaagtgttgtccctgaagtgatgctgtttagttggtagtgtgttcgcttcttcggcacttatacttacccccaagcatcaacgctgcctgttttaatctcaataggtgctgttttaaatctcagatctcaatatatgactactgatcgctgagtaaaaaaaaaaaaaaaaagcggccctcga

SEQ ID NO: 2261 - DNA, 1243 bp, Zea mays
  Clone ID: TF_ZmC1672_2
agggttttgttcaacttgcatattcacttcaacgctccgatgcagtatacgtttgttcccttgcccgccctttgacgttgtgcagtttctgaatcgcagggccgggccggccgggccgggactcgcacgttaacgctacacactcccgtttacgtgcacacctccaaaccctcatcacgatccggctccaaggtctcgagatgaagtcgagggcgaggtccggcggtggcgactccaggctctcggtgaggaagaccaaggttgagaaggacccaaacaagcccaagaggcctccgaccgcgttcttcgtcttcatggaggagttcaggaaggactacaaggagaagcaccccaatgtgaaacaagtctcagtgattggcaaggctggtggtgacatgtggaagtccttgtctgatgccgagaaggctccctacgtatctaaggccgagaagctgaaggttgagtacacaaagaagatggacgcctataacaacaagcagtctggaggaggacccacattgtctggtgattctgacaagtccaagtccgaggtcaacgacggggacgaggagggtgatgagtgatggatgacgggtgaaactctgggctgcccaagtgcttgcagtcagcagggaaatctcatcgtcgttgggcctaaccgggctttgctgctccgtagcgtctggaagctgtctgtcttttgagatgctgtagactagtagtgcctgctctgagttagtaattgaaagtgttgtccctgaagtgatgctgtttagttggtagtgtgttcgcttcttcggcacttatacttacccccaagcatcaacgctgcctgttttaaatctcaataggtgctgttttaaatctcagatctcaatatatgactactgatcgctgaatagatttcatgctctcttgattgactgcgtgaaaaagtgatgtatgacggatgaaactctgtccaagtgtttgcagtcagggaaaaaatctcgtcgttgtcggcctaaccgggttttctcgaaggactttctagatgcagtagattagtgccgtcttctgagtagtttccttgcaagtgtcgtcccgtccctggagtgaggcagtttagtttgtagtttcttcgcttcatcggcactcgaccgttgttggattgggatgtttagcctgcagtctgtacttaccccaagcatctatggtgcctgttttaaatctcagatcccaatagacgtttgttttaaaaatc

SEQ ID NO: 2262 - DNA, 1092 bp, Zea mays
  Clone ID: TF_ZmC1258051_1
cctccttggcaggagccttcttagctgcagtgctctcgcccttgttgtaggcagcgatggccttgttgtactcgagcttgagcttgttagccttggctacatagggagccttgtccgactcgctcagggatttccacctgtcgccagcagctttccccaccgcagcgacagacttgttcttagggttcttctccttgaactccttgcgaaattcctccatgaacacgaagaaagcgctgggagccctcttaggcttgttggggttttttttttttgactttcgatgatatattctgtgcttggaaactgattcgatgtgagattcgcatgatcgttgccacacggtaaacgtacactgactcctagtgctcctaatttacttagttctaatgacggccaattaacacatgccactaatcgctagcttcacattacagttcactgctgcgtttccacgcgagagacgtgcggttcaaggcacccgcacacagaaagcagaacctgcctggcccagtggggcccgccacgcctagacatacgactcgccgccacaagcaaccactctgctctagcctctagcagagtagtcagttaataattaataaaaaaacaacactagtactagctttttactccgattcgatgccgccacacggcagcccacgcgtttcccgccctgagcatccgaaagggcgccacggcacgacgacgaggcccgagcacctaggggggtaaaaggtaacgccgttatatgacgctgacggctgcaccggctgacgccgtgaggcctgtcactgtcacgaagtcctcgccctcccaccacggcaggcagtcgaactccgccgccaccgccttcgatggcgccgtcgctgtgccgaggtcgccgagctccccaagccccgaatagaggaactcgaacgccggcagggcgggtgcggccggcgtctcgtcagcggcgtgacggagaacagagatcggagacgagaacgggcagaccagggcggtgccgtccaccgcctgcgaatccagtgacgcgggcgctgccgccgggaccagggccgatgcgagggcctctccgtgtcgtgccgaatc

SEQ ID NO: 2263 - DNA, 490 bp, Zea mays
  Clone ID: TF_LIB3597-037-Q1-K6-H11
ttggtgatcggcgacagtggtatctgttaaagatggcgcctcaaacctgtatctcggcgctgagactccggctgtgcgtgacgggattccagcccagcttctgccaccaggtcggcaatgacgcgccgaagctgaaggtcaggccgaccgtgtacgaaagggagcggaggtgctcgtccgccgggagcccgacgtcgagcggcaccaggaagcgcgtcggtggctggagatgtcggccgggagcggcagcggcgacgaggacgacgacgagggcgatctcaagaatctgggtctgtccaaggaccatgccgccgtgctcgaggagtgcttcaaaacgcaccacaccttcacttcgtaacagaacgcaggactggccagccgcctgggcctccgggcgcggaaagtgtaggtgtggttacaaaaccggcgcgcccgaaccaaactgaagcagacggtagtcgactgcgaatacctcaggcgctggtgcgag

SEQ ID NO: 2264 - DNA, 1453 bp, Zea mays
  Clone ID: TF_ZmC2781_1
gcacgagcaaagccgaagcaaacaaatctctcgtgcttagccctagctagctactggtccttttcttctcctctcccgtcttcgttactcggatcacgaaatctatagctactaattactggcgatggaggatctctcggatcttggaggccacggccacccgggtgctgctgcctggcggcccgcggcgccatcattggcgtcctcttccaaggtctcggtgcaagtctacaccgtcccaagctcagctgctaccggccgtgaagcccgaggtcaaggtgttgcaccaatgatgcatgcgtctagcgtcgctggccatggcggccgcgctgctgatctagaccccgtcaaggccaagatcgtctcccaccctagctaccaccgcctgctcgccgccttcttggactgccacaaggtcggctgcccgccggaagcggccgaggagatcgcggcggtggcgcgggagcgcgaggcgtggcagcgtgcagccgcgggcgacgtcgcgcacacaaggccggacccggagctcgaccagttcatggagtcctactgcgagctgcttgtgacgtggaaggaggagctgacccggccgctccgggaggcggaggagttcctgacgacagtggaggcgcagctcaactccattaccaacaccgggccaaccatgggagctttcatctcttcagctgcagctgcagataaaactggagtcgtcgatatgtccgacgatgaacaagaagaaggcagcggcatggaggcagaagtagccctgggcatcgatccttgctccgatgacaaggagctcaagaagcagctcctcaggaaatacagcgggtgtttgggcaacctgagaaaggagctgtgcaagaagaggaagaaagacaagctccccaaggaggcccggcagaagctgctcagttggtgggagctgcactaccgatggccctacccctcggagatggagaagatcgcactggcggagtcgacggggctggagcagaagcagatcaacaactggttcatcaaccagcggaagcggcactggaagccgtcggaggagatgcagttcgcggtgatggatgggttccacccggccccgcccaacgccgccgcgttctacgtcgacgcacgcctcgtgggagcaacgccggcgatgttctacgcccggccggatcatggggctcatcatggcctctggcacaattgattcagcccacgcacgctaccatgaagtattgaagtgtgcgcctgaaaacctgcatgcatgccgtagcttaattagcctataaatatgaatgatctgcacaatgaactggagatcgagaaagaaccctactgcattactgtacccccgttgttgcaccaagaaactttacatgtcatgaacagcaaagactgtgcctccttaatgctacaggtttgcggcattttgcataaaaaaaaaaaaaaaaaa

SEQ ID NO: 2265 - DNA, 615 bp, Zea mays
  Clone ID: TF_ZmC44427_1
acaagcacattctagcgcgccagacaggactgtcaagaagccaggtttccaattggttcatcaacgccagggtgaggctgtggaagccgatgatagaggagatgtacacggaagaagtgaacccgaaaccggccgacgacacaagccaaaaccctagcgccggtggcggcgtcggcgtcggcgtcgccatcaaacctgagcagcaggtgagcacagctgcggcgggagccaccatcggaggcggcggcggcggcgaccatctgttcggtcctagttatcccagcatgtacgggagccacggcggcgccgtgtcgcttaccctagggctccagcagcagccgtttgcgtcgacgatgatgcaccagcgacgaccactgatgacgtttcaaggtgacgagcaagagccggcgctgccgtacagagaccttatgggctctcagttactgcatcatttcgctgggtagcttgttacctacacatgcttgctagctagctaggagggtgggtatacggtggctaaatttttatatatattaaagacaaggtaaattttgtttaaatttcttgtcgactaaacgatcgatatatataccaaattaagcacacagattgttt

SEQ ID NO: 2266 - DNA, 504 bp, Zea mays
  unsure (1)..(504): unsure at all n locations
  Clone ID: TF_jC-zmXLIB3552003af03b1
cccacgcgtccgccgcaatcaaggttgtcacgcccgacgaggatggctgccagtcaccgcacggccggtccgggccccagcgacggctccagcgcaggcgcgaggaagaagctccaactcaccaatgagcagtcgacgctgctcgaggactccntccgcgcccacaacatactctccaacgcgcagaagcaggagctcgcacggcaggtggatctcagcgccaggcaggtggaagtgtggttccagaacacacatgttcagataacatgttttgcatgaactaccctctgtatctaacaaaaagaagttcaagtttgcaggaaacaaccacaatcgaattgttgcaagtgcgtcccacgatctgaagacaaaaagatctgttgtccattagcaacaaagtgctacagaggctgtgttctgtgtaccagtacttgatagtgagtttcagaatgaacctataactatttccaacatcgacaagaaggatggtgaaaattttcatga

SEQ ID NO: 2267 - DNA, 1480 bp, Zea mays
  Clone ID: TF_ZmC1681_1
cctcgaggccggccgggccctctctctctctctctccaaccacaacggaatcgaaggcaaaccaatagacatccttattaacttggcctgatgcactcctccattcctcagacaatcaaatatccccagatagctaggtggttggcacgcatggagaagcagctgcctgctcttaccggtggctcaaaggcggccaccacgacgcccttctacctcgccttagatcacagagccgccgccacgtcgtcttcaccgccggcggaggcgccaacactgccgccgtctgctgcggctgtctcagatccttctagacagtccaacagcgataggggatccgagataatcaaagccaagatcatgtctcaccctctctatccggctctcttgagagccttcatagattgccggaaggttggagcgccgctcgagattgtcggtcggctttctgccctcgctgatgacgtcgaaacgaattcagacggcagacaagaagaacaaccagcagacccagagctcgatcagttcatggagatctactgtcacatgttggtaaggtacagacaggagctcacaaggccaatccaggaagcggacgaattcttcaaaagcatggaggcccagatcgactcattttcattagatgacaatggctatgaagaaggaggcggttcctccgacgaagatgagcaagaaaccgtcgacttgggcggccttccggtccctgagaccggcagcccgtccggagagggcaaggagctgaagaaccacctcctgaacaagtacagcggctacctgagcagcctctggagggagctctcgaggaagaagaagaaaggcaagctgccgagggacgcccgccagaagctcctccactggtggcagctgcactacagatggccctatccctcggagctggagaaggcggcgctggcggagtcgacggggctcgacgcgaagcagatcaacaactggttcatcaaccagcggaagcgccactggaagccggcgccgccgacgatggcgctaggcacaccagattacaggatgggccagcacggcggcggtgcttctagcagctcggcctccgctggtctccgcgtgcaggggcagtacttcaccggcggaagctcgtatccccgtggcccgtgacgatgcatgcgtcgcctgcaggctgagcgcgtgaggtgtcgacatggattgttgccgtgcatgcatgcatatcagcatacgtatacatacatacgtgatcattatttgggtatagatggtgtggacgtgtcgtgtttcctatacagaaatttgattgtctccttacttgcattgctcatacgcatacatatctacatatatgcagctgatgccagagttataaagttgtaactatatattattattatttgtcttactaacatgagagcagttgtacacgtaaaaaaaaaagaatgcatggatgttccttctaaaaaaaaaaaaaaaaaaa

SEQ ID NO: 2268 - DNA, 592 bp, Zea mays
  unsure (1)..(592): unsure at all n locations
  Clone ID: TF_LIB3606-036-Q1-K6-E1
gtctaactttcagttcctgaagggatgataatgagccaattacggaacacaagcaaggtcgctgccagtgatggtattggcaaggatgatatggcaaactttgcgcttatgggtggtggagcagaccacctgaggggaaacagcgtgaacacgttcagccaggctcacaacatttggaggcctcaaagaggcttcctgagcgtgcagtgtctgttcttcgctcatggcttttcgagcacttcctacatccgtacccaactgatagtgacaagcagatgctggctaaacagacaggcctaacaaggaaccaggtgtcaaactggtttatcaacgcaagggtgcggctctggaagcccatggtggaagagatccacaacctggagatgcggcagcagntgcagaagaacacgtcggcggtggacaagacccaactcggcatgcagcagctgatccagcactcgtcggcaaactcccggcagcgggggcaaagcagcggcggcacgacgagaaaccaagacgagctgcccccgnggatgccccacgacatggnaggccagggccagcagcagcagcagcnagtgagcttcgctta

SEQ ID NO: 2269 - DNA, 2396 bp, Zea mays
  Clone ID: TF_ZmC2191_1
ccggccgggaatgatctttgcggccaggacggaacctttgcagaaagaaaggcgcccggaggtaggggtagaggtagagcccgagagcccaacacctccaccagcagcaaagcaccaccaccagagccgagcgcacaaaagcgcgcggccgagacgcgggacaaagcaacgggcagcctgtactgcccgcttctagctgcagctaccctccagtcccagttccagccccggccaggcgctcgcaaagtgcggagccgccctctcttcgagtcttcgctcgtggtctctctctccaggtcgtgcagtacgatccatatcccggagctcttgcgcgagcgacatgtcctcggcggcgggcggtggatacggggctgcgggcggcgccgagcaccagcacctgttgctggggcaggcctcggggcagctctaccacgtgccgcagcacagccgccgcgagaagctgcggttcccgcccgacccggccgactcgcccccgcccactgcctggccggcgcctccacccttctactcctacgcgtcctcgtcgacgtcgtcctactcgccgcatagcccaacgctggcgcacacgcagctagtggcgcacgcgctacctgccggcgccggggcccaaatcccgagccagaactttgcgctctcgctctcttcggcgtcctcgaaccctccgcccgcgccgcggaggcagctcgccgcgggggtagccgctgggccgtacggcccgttcacgggctacgcggccgtcctcgggcggtccaggttcctgggccccgcgcagaagctactcgaggagatctgcgacgtgggcggacggcccccgcacctggaccggcgctccgacgacgagggtatgctcgacatggacgcggcggggggcgtggaccacgagatggacggcggtgactcctgcgctaccgctgaggcgggcgccggtctcgggcgccgagcagcagtggaggaagacaaggctcatctccctcatggatgacgtctgcaggcgatacaagcagtactaccagcagctgcaatccgtgatctcctcgttcgagactgttgcagggctgagcaacgcggcccccttcgctttcatggctcttcggacgatgtcgaagcacttcaagtgtctgaaggggatggtgatgagccagctacggaacacgagcaaggtcatcgccaaccatgggattattgccaaggacgatatggcgaacttcgcgctcatgggtggtggagcaggcctcctgaggggaaacagcgtgaacgcgttcagccagcctcacaacatttggaggcctcaaagagggcttcctgagcgtgcagtgtctgttcttcgctcatggctgtttgagcacttcttgcatccgtatccaactgatagtgacaagcagatgctggctaaacagacagggttaacaaggaaccaggtgtccaattggttcatcaacgcaagggtgcgtctctggaagccgatggtggaagagatccacaacctggagatgcggcagctgcacaagaccacatcggtggaccagaatcaactcggcatgcagcagcagaaccaccactcgtcggacggcagcgggaggccttcctccgacccttcgaactcccagcggggccaaagcagcggcatgacaagaaacctcagctctcgggcaccacgccacatccaggacgacgagctctcccagatgccccacgacatggcaggacaggtgagctttgcgtacagtgggctcccccccgcgcaccacggtctcgcgctgtcacaccaccaccacccccagcaagcgcaagctgaggcggttggtgttggcggcgtggccgccagcagcggcggcggcgtttccctcacgcttggccttcaccagaacaacaacaacaacaacagggcctatatcgccgagcccctcccggccgcgctcccgctcagcctcccgcaccggttcgggctggaggacgtgagcgacgcctacgtgatggggccgttcggcggccaggaccgccatttcagcaaggggatcggtggtgggcacaacttgctccatgactttgtcggttgatcaaattcgtccctggaagtgtttgtcggcatgtattgtattgttaggggtagtagggcagtggaagagagacgaccgtttggtccatctgcatccaagaacgctgtcgatatttgccaactcgaggtctatagagtggttgacgacataccgttgaagatgtgttccagttgtatgttgtagagttgaacgaaccctatctgttctaatcccagctggtgtggcgttaacacatgtaccgctgttccttcgacatggcaactgaaggtgaaggttgaaaactgtgtggttattaaaaaaaaaaaaaaaaaagcggcc

SEQ ID NO: 2270 - DNA, 477 bp, Zea mays
  Clone ID: TF_LIB3067-032-F8-R1A
cggacgcgtggacggacgcgtgggcggacgcgtgggcggacgcgtgggcactggcggagtcgacggggctggagcagaagcagatcaacaactggttcatcaaccagcggaagcggcactggaagccgtcggaggagatgcagttcgcggtgatggatgggttccacccggccccgcccaacgccgccgcgttctacgtcgacgcacgcctcgtgggagcaacgccggcgatgttctacgcccggccggatcatggggctcatcatggcctctggcacaattgattcagcccacgcacgctaccatgaagtattgaagtgtgcgcctgaaaacctgcatgcatgccgtagcttaattagcctataaatatgaatgatctgcacaatgaactggagatcgagaaagaaccctactgcattactgtacccccgttgttgcaccaagaactttacatgtcatgaacagcaaagactgtgc

SEQ ID NO: 2271 - DNA, 702 bp, Zea mays
  Clone ID: TF_LIB5117-049-A1-PF1-F11
acttccacggtcaccagttccagcggcctgcacgtacgtagctactgttactcgtagagagcaggaacgacagatccaacaaggagatcaatggagatgactgttaacgggagggacaccgagcaccaccaccaccttggtcttgccctcggcctcggcctcgggctcagtctcggcatgtctggtacgacgtctcctgtggagccggcggcaccccagaccgctgctgcgccgtcgtcgaagctggggctggggcagcagtcctggaatggcgccggccttttctttccggcctcctccggcgagcaacgctcgcatgcagatgaccggaggcttgcggcgttggcgtgccacgagatgccgttcctgcgcgggatcgacgtcaaccgagcgccgaccacggggggcgcgaggggcagctgcggtgccagcgaggacgaggagcccggcgcgtcgtcgcccgacagcacgctgtccagcctcagcggcaagcgcggcgcgccaacgaggagcgccggcggcgagcaggagcgtaccggcgcgggcagcgacgacgaggacgactccggggccggcggcggcgggtcgcgcaagaagctccgcctgtccaaggaccagtccgctgtcctcgaggacagcttcaaggagcacagcaccctcaaacccaagcagaaagcggcgctggcgaggcagctggggctg

SEQ ID NO: 2272 - DNA, 439 bp, Zea mays
  Clone ID: TF_LIB3066-028-Q1-K1-E9
cccacgcgtccgcccacgcgtccgcccacgcgtccgatcactacgttctgcaaaacggtgttctagaagagcaccagctagggagcagaataatgaacatactcagagtgagcagcttcatggttctgcaagtgagcagcaagctagagagcaacttcatggttctgtaagtaaacagcaaactgaagttcttcgctccaatgtcagcagtggcgatgcctcaaaatgtcattttggccctatagttactcagaagctgaaggaacattttgaaaaagatccatatccttgccgtgcaacaaaagagggtctggcacaagagctaggactgacatttaatcagatcagtaagtggttctctgccacccatcattattcaagagatgctgttgccaagaaccaaaaatacccaggagaaaatactactgagaataatagt

SEQ ID NO: 2273 - DNA, 2480 bp, Zea mays
  unsure (1)..(2480): unsure at all n locations
  Clone ID: TF_ZmC1775_3
ccggcctggccgggggagaaggttttccctgaggcagcttcaattgccaacggttctaaacaagttgatacttctgatctgctgccagatcatataaagcacagtgacaaccctgcattggttgaagggctgatggtgaatgaagtcaggctttctgcagaggatgacagcaaaggggatggtgacttcgatccgtcaggtccagattctagtgaagaccaaaaagatggattgaactcagaagagtcagatttcacatctgactctgatgatttttgtgctgagattgccaaatcttgtggccaggatgaagtctcggcatctccattatcaaatgtgataaaccatacttatagaatgaaactcagggccagcaacaaccgctctaatgaagaaaaccatgatcatgtatttatggacatggagctagggcaagacatggtgctaccagtttcaagcaggcggcaggtggaacggttggattacaaaaaactatatgatgaggcatatgggaaagaatcatctaattcaagtgatgacaaagagtggtctggaaaagaactattagaaggcagngaaacagattcacttagtgagcgacctcatcctgtaaaacggtgctctagatgagcacaagcagagcagcagaataatgaacatacaccacagagtgagcagcttcatggttctgcaagtgagcagcaagctagagagcaacttcatggttctgtaagtaaacagcaaactgaagttcttcgctccaatgtcagcagtggcgatgcctcaaaatgtcattttggccctatagttactcagaagctgaaggaacattttgaaaaagatccatatccttgccgtgcaacaaaagagggtctggcacaagagctaggactgacatttaatcagatcagtaagtggttctctgccacccatcattattcaagagatgctgttgccaagaaccaaaaatacccaggagaaaatactactgagaataatagtagcacaatctttgatggtatacaagtaatagaacccaattttggtttgatagataaaccagatgcagatacaaatgacatgatttctgaaaagttgatggtacaaattaatcttaacgaaggcattgaagaggatatcccaccgagccaatatactaccaggtgtgaagagaaattaactatgactcaagctgccatctcaagggaagctggacctccaggttatggtcctggagaaaactttcttcaggtcagttcaaggattactagctgtgagcagagtgtgataatggctcctagcgctatcgcaagaggagttggtccaccaggatatacgcctggagaacaccagggcaatggggctccatggaatacaagctatgagcgaagaccgtttacgagtcctgcgactagctcaagagaagtcggacctccaggatatgggcctgaagaaaaccaaggcagtggcatttcctgtaatacaagcagagagcaaatattgtttatgagccctacaaccatctcgagagaacttggtccaccaggatatttgcccagagaaaaccagcgcagtgacacttcatggaatacaagctgcgagtcgggactatttatgagtcctgcgaccacctcaatagaacatggtccaccaggatatgggcctggagaaaaccaggagaatgacagtacaagctgcgagttgagaatgtttacaagtcctacaatcgtctccagagaagttggcccaccaggataccagcagggagtgtttatgagtcctaaaaccatctcaagagaagtctgtcctccaggatttgggtctggagagaaccagggcaacgacactacatggtacaaacagagcgcgtttacaagtcctacaaccatctcgagagaagtcggtccgccagggtatggacaggaagatcagggcaatggtggttcttggaacacgagttgtgagcagggagtgtttacgagtcctactagaggcatctcaagagaagtcggtccgccaggatacgggcccggggaaagtcagggcaataccacttcgtggatttcgacctgccagcagagaatgcttgcaggaatccagagaactggtggctcaaggagtatggacttggaagcctttccaccgggatacggacctggtggtgcttcagggagtgtcataagcccccaagctcggtctgcagagaatgtagaattttcggacgaggctagaaaaaaggctatacagcgggagctgagacggcggcagaagttcaggtgaaggcaatatatccagtcttcaagacaagacaatatatccagtcttgatggctgaatgagtgggcgaccttagttgccatcaagcaaaacccttgttgtatcagctgcttatcttccttttacagacttgcttggtttgtcaaggatttcttatgtgaaccctcttgaacctgaagtattcaatgcgctgtgaatttgtgc

SEQ ID NO: 2274 - DNA, 436 bp, Zea mays
  Clone ID: TF_LIB3067-036-Q1-K1-B12
cagcaatggcatggcgtcctcaccctcgcccttcttccctccaaacttcctcctccaaatgcggcagacgccctccgatcatgacccccaagaacaccaccaccttcctgctcctccccttcatcttcaccacaaccccttcctcccctcctctcaatgcccctccctgcaagacttccgaggtatggcgccaatgctgcggaagcgcccgacgatgtactgcggcgcggacgacgtcggcgtcggaggcgaggaggcgaactgcggcgcgacgaacgaggacgaggtgtcggacgacggctccctgcaagccggcgggcccggggagaagaagcggcggctgaacgtggagcaagtgcggacgctggagaagaacttcgagctcgggaacaagctggaaccggagcgcaagctgcaactggcgcgcgcgcttggc

SEQ ID NO: 2275 - DNA, 575 bp, Zea mays
  Clone ID: TF_ZmC115778_1
atataccaattaattcgtgttcaatttgtttgtccactacgtttttaattacgtacaaattaagcatatacctacctttttacatacatgcatgcatgcacagtacactatacgccattgatgaggtgagagctagttttttccatcggcaccacccgtacgtacgtatcacgaggtcgtcgccgacggctgccggcggagcagtggggggacgacgacggtgaagggtccgaaatgaggaggccagctggcgaacaaggtggatggcggtggtgccgctgctgatggagcgccactgatagcagcctcgctgacgtcgttatcgcatgagctagggcacactcgggctgtggccacgccgaaccctgctgctgcaccgtaaaacgggtaggcggcggagcaaagacgccgcagatccgccacctccctctgcagcctccggttctcctgcgctagcttctcgcaccaacgcttcaggtactcgcagtccacctccgtctgctttagcttacttcttgctcttctgttctggaacaagacctccacctggcgcggtcgaagtttcagccgcttcg

SEQ ID NO: 2276 - DNA, 2206 bp, Zea mays
  Clone ID: TF_700221310_FLI
tattttctaatcaagataaaactggagcagaatttgctagatgcttactctggagatggatggaatgggcaaagccgagagaaaataaagccagagaaggaactgcaacgtgccaggaaacaaatcataaaatgcaaaattgctatacgtgatatcatccgccaacttgatttgtatacttctactgggagtgttgatgacccactaatgcctacagatcagtccaccaatcccgaacataccatgtgctcaacatgcaagtctcatgaatcatttcccagcaataaaattatcttctgcaaagggccctgcaaaagggcatgtcatgagaaatgtttggaacctcccttaaacaaaagcgtacttccaacaagtagccatgggtggctttgcaaattctgtttgtgcaaggtgaggattttagaaactattaatgcacatctagggacgagttttacagtgaagtgccactttgaagatatattcaaggaaactactgaactaatagactctgaggatgcactagatgaagattggctttctgagtattcaggtgatgaggactatgatcctgatgaaaatgaggccagtggcgactgtatggacagcggggagaagattatgtctgatgattccaatggttcaggaagccccctttattctccaaatgacgatattcctgacttcatatcagcagacttaaatgttgtggaagggttttgtcataccaatttagatttaggcattgatgccgttgaagatgattttgcacagatcctcacctaccaaaggccaagaagagatgttgattatagaaggcttaacgaggaaatgtttgggaaaataaccgggaatgaagaacagagcgaggacgaagattggggccatgaaaggagaaagaaaaggacgcattcaggtgttgctggggataattctgttggtttcttgaacgttatatctgatgaaaagagccagaagaaggggagaaaacttttcaggattcctcctgcagctgttgaggtacttcgcagagcttttgctgaaaatgagcttccaccccgggatgttaaagaaaatctctcaagagaattgggaatttcttttgaaaagattgataaatggttcaaaaatacacggtgtgctgctctcagagatcggaaggctgaaggaaacagtcataatacagctcccagcaaaagctcaaaaaataaaggaaaagctggaatctcaggcaagactggaaggaatggtcatgttactggtccctgcaataatttgagaacaaatgaagaaaaaacaggtatatcggggaagtttgattcaggagacaactcttgtttggttcccttctctgaagtcatcaatgtgcctacgcgattgccacacaactttgagatgaggaagatggaatcaactagaagtcctgcgaggctacacaataaaggagggtgcctgtctgcaacaatccaaattaaggagagtacattgttacccacaggcaagccttgttggcagtcagaaatgagccatccaacaactaatgaagtgagcacttcagcgcaagctactacttggatcgacgcgggggcgtgtgccgaggagcaagaacctactccttgggtggacatcggggcctcagactaccagcctttcctggatgtgatcgacgacatgtgcggacttgagtggaggctgcagagactgaaggagaacatgctctcatctagcatagacggccaaaccgccgccagtgagagtgacaaaagaaaccagaccgtggtgctcgtgccaactgccgagctcaaggaaaaactgccgcatgacggtttattcgggcattattgcccataggtcttatatacatagcggataaactgtacagagaaccaagaagaagaagaaaacaaaagggaaacagcaaacagacaggtgcccgcttacataccggtccatactgtcaggcactgctctcctttcttgggcctcgacacgactaatactgtgctagtccagaacagatgagccatagccattacctgtgtgcctcggaggttcagttcatatgttgtatgtatatcagaagagtcgtgcttagtagtagcaagaacctagtcctgatccagaccgtgaatctggatcatcttgtcgtgtggttgtaccgtgcagaacagacagatgtcggctagtcgtttggttcttaaggaag

SEQ ID NO: 2277 - DNA, 2899 bp, Zea mays
  Clone ID: TF_ZmC1207_1
atgggccccttcttttccgcgtccgctgctttggcttcgcctcgcggtcgcccagtcgcagcagcaacaccgcccccggcctcgctttgcagccccctccctccaccgcctcctccacgccctagcgctccggcccccgccccgagctcgtcgtggccggctgcgctgcggtgcccgcacctgtgggggcgtgcgggccggtggtgaaacgacccgcgacctcggtgcctctcgacgtctgcccgcttcctcgccggcgccattttgttcgtctaaatcccctgtgataagcaccactgctcgtgatgcattcttcggaaaataaactgggttggaatgagacctctatggggttggttcctgtaccaaaaagaccagctagacctgatgcttcccaccaatgcaaatctgattcctttatgaagcgatcaccaaggaaagttagaaatgctactctggcaaaaagcataaagagcaagtaccactatagtcccctcaaacagcggaagggttcagattctgttcctgggaaaatcgtaacaggactaaccgcaaggaaaaagaagaaaaggaaaatccaaattacagacgaggcaactcgtttggaacgaagagcgagatattttctaatcaagataaaactggagcagaatttgctagatgcttactctggagatggatggaatgggcaaagccgagagtaaataaatctagagagggaactgcaacgtgacagaaaattaatcataaaatgcaaaattgctaaacgtgaaatcatcctgcccaatcgatggccatgaagagatgttgattattgatggctcactgatgacaagagagcagaccaccaatcccgaacataccatgtgctcaacatgcaagtctcatgaatcatttcccagcaataaaattatcttctgcaaagggccctgcaaaagggcatgtcatgagaaatgtttggaacctcccttaaacaaaagcgtacttccaacaagtagccatgggtggctttgcaaattctgtttgtgcaaggtgaggattttagaaactattaatgcacatctagggacgagttttacagtgaagtgccactttgaagatatattcaaggaaactactgaactaatagactctgaggatgcactagatgaagattggctttctgagtattcaggtgatgaggactatgatcctgatgaaaatgaggccagtggcgactgtatggacagcggggagaagattatgtctgatgattccaatggttcaggaagccccctttattctccaaatgacgatattcctgacttcatatcagcagacttaaatgttgtggaagggttttgtcataccaatttagatttaggcattgatgccgttgaagatgattttgcacagatcctcacctaccaaaggccaagaagagatgttgattatagaaggcttaacgaggaaatgtttgggaaaataaccgggaatgaagaacagagcgaggatgaagattggggccatgaaaggagaaagaaaaggacgcattcaggtgttgctggggataattctgttggtttcttgaacgttatatctgatgaaaagagccagaagaaggggagaaaacttttcaggattcctcctgcagctgttgaggtacttcgcagagcttttgctgaaaatgagcttccaccccgggatgttaaagaaaatctctcaagagaattgggaatttcttttgaaaagattgataaatggttcaaaaatacacggtgtgctgctctcagagatcggaaggctgaaggaaacagtcataatacagctcccagcaaaagctcaaaaaataaaggaaaagctggaatctcaggcaagactggaaggaatggtcatgttactggtccctgcaataatttgagaacaaatgaagaaaaaacaggtatatcggggaagtttgattcaggagacaactcttgtttggttcccttctctgaagtcatcaatgtgcctacgcgattgccacacaactttgagatgaggaagatggaatcaactagaagtcctgcgaggctacacaataaaggagggttcctgtctgcaacagtccaaattaaggagagtacgttgttacccacaggcaagccttgttggcagtcagaaatgagccatccaacaactaatgaagtgagcacttcagcgcaagctactacttggatcgacgcgggggcgtgtgccgaggagcaagaacctactccttgggtggacatcggggtctcagactaccagcctttcctggatgtgatcgacgacatgtgcggacttgagtggaggctgcagagactgaaggagaacatgctctcatctagcatagacggccaaaccgccgccagtgagagtgacaaaagaaaccagaccgtggtgctagtgccaaccgccgagctcaaggaaaagctgccgcatgacggtttattcgggcattattgcccataggtcttatatacatagcggataaactgtacagagaaccaagaagaagaagaaaacaaaagggaaacagcaaacagacaggtgcccgcttacataccggtccatactgtcaggcactactctcctttcttgggcctcgacacgactaatactgtgctagtccagaacagatgagccatagccattacctgtgtgcctcccaggttcagttcatatgttgtatgtattaatgtatatcagaagagtcgtgcttagtagtagcaagaacctagtcctgatccagaccgtgaatctggatcatcttgtcctgtggttgtaccgtgcagaacagacagatgtcggctagtcgtttggttctgaagtaagaaactataagcatgcgtgattttggcccgtgcgtgacaaaaaaaaaaaaaaaaaaaaagggcgg

SEQ ID NO: 2278 - DNA, 2970 bp, Zea mays
  Clone ID: TF_ZmC295_2
tttttactcgtcaagtcattgctttggttgtctttttcattttttttttggtcatctgaggtagcgttatgtgtttataacctcttcgattcttgttcttcctctttgggcttgcaggcaaaaccacctgcttacgatcttgcagtcatcatcacgctattagttgaggataatttcgcgcacaagagcaattcggcacgaggatggagaggatgtggcccgcgcctcgctgtcctgctcgctctcgccgtcttcaccgccgtcgccgcagcggccacggacgaggtgcgcgcgcagtccacctacatcatccacctcgccccaggccacccggcgctgtaacccgccaccggggcggattggaagtgggaggtgggtatccttcctccactgtcctttttcatctctctctctctcttttctctctctaaaagactttgctaattggcctgctagccggtctccctcccccggcctctttccctttcagctggaggagatagatgagagagaggatcagaggaagcaggaaggagagagggatatataggccggtgtcttctgtagagagagagattgagagcaaaagggaaataaaggagctctcgcaggcactcggtactgacatgagtgatctcatgctcttgataccttggtactcttacatcaccccttcttcaccttcttcttgttcttgctcatccctcctctccggccctctcttcctcctgcctctctctagctaggacgatcttcaacaaccctctccccctctaattctctttccccatatagagagaataaaggagagagagaggcgaaggcaggcagctaattttcttttgttcaagggaaaggacagcacgtgccggagctcataagctggtagctgcatcagttcctgaggcaaaaccacctgcttacgatcttgcagtcatcatcacgctattagttgaggataatttcgcgcacaagagcacgacaagccgagatttttgggggcgtcggcgtcgacctgtaggcgatggcggcgtactaccacggtggcgccggcacggacatccaggccagcaccgacggcctgcagacgctgtacctcatgaacccgagctacgccggcggctacgctgacgacggcggcgcgtccacgccgggggcggccaacatgatgctcctcaactcggccgtgaccaccatgacgccggcgtccttcgcgcaccaccaccagcagcagtcgccgccggccgcgcagcagcacttcgtcggcatcccgctccaggtccaggcgccgccgccgtcgggctacaacctgtggaccccggccatggctggcggcgccgcggacatgtcgccgcaggcgcaggcgcagactcccggcgccgcgggtgctgctggggtcagcgccgtgctcagcctgtcgtcccgcgaggcgccgccggtcaccgtggccgcggtggccgcctgcaccgacgagggcaagtacctgggcgtgtcggccacgccgcaggggcagatggtcatgagctccaagtacctcaaggccgcgcaggagctgctcgacgaggtggtcagcgtcagcaagggcgtcgaggacgctaagacggccgctgccgccgcgaccaagagcctggccgcggtgaagaagaaggaggactcggagggcgcgtcaggtggcggcaccgacgacggtgccggcgcaaagagcggcggtggtgccgcgccagagatgtccacggcggagcggcaggagatgcagatgaagaagagcaagcttctcaacatgcttgacgaggtggagcagcggtaccggcagtaccacgggcagatgcaggcggtgtcgtcgtcgttcgaggcggcggcgggggccgggtcggcgcggacgtacacggcgctggcgctgcgcaccatctcgcggcagttccggtgtctgcgggacgcgatcgcgtcgcaggtgcgcgcggcgagccgggcgctgggcgaggacgcggacgccgccgtcgccgggggccgcaccgtggggtcccgcctccgctacatcgaccaccagctccggcagcagcgcgcgctgcagcagctcggcatgatgcagggcggcgcctggcggccccagcgcggcctccccgagcgctccgtctccatcctccgcgcctggctcttcgagcacttcctgcacccataccccaaggattcggacaagatcatgctcgccaagcaaaccgggctcaccaggagtcaggtgtccaattggttcatcaatgcgagggtgcggctgtggaagcctatggtggaggagatgtacctggaggagacaaaggaccaggacgctggaggcggcggcaacgacgagggcaagtccggtggcggcggcagcaagagcagcgacaccgtcgacggcgtcatgccgagggcggacgtgatgtccaagtccgcggtgcgcgtgggaggcggcggggcgggggcggagagcgcgtccaccaacaagggcatccatggctcctccctgctcgagctcggcggcggcgatcaccagcagtcccacgcggggttctacgacgacgatgaagacgacggcgacgacgtgatggggcggaggctcaagaaggcgcgcggcaacgagccggcgccggcgttccaccacgtgcacgacatagccacgctgcacgcgcaggccgcggcggccgccgactagaggtctcgcaggataggtaactagttgatacccaaacattgtacaagattttatatgtagatcatagggattggggggtatacagtaaagtatgcgaaaagggtatattggaactggacttagtgtatgctgtagaaattggcctactagtattatctgcagcaattcagtatttgttttgcttactgtaaacatagcacattgtgattcattggcagccccatgtgttgttagatgacattgtggaaaatgctgctccagtgagatgtttgttggtgccc

SEQ ID NO: 2279 - DNA, 580 bp, Zea mays
  Clone ID: TF_ZmC106001_4
ggcggccccagcgcggcctcccctagcgctccgtcaacatcctccgctcatggctcttcgagcacttcctccacccgtacccgagcgacgccgataagcacctgttggcgaggcagaccgggctgtccaggaaccaggtctccaactggttcatcaacgcccgtgtccggctatggaagcccatgatcgaagagatgtatcagcaggagtgcagagagctcgacggctcctcggccggcggagggggccccgagtccgtcaacgacccctccggcgccgacgactcgcactccccgaccaccaccggcgcagcgcagctcccgcaacagcaacatcacctcggcacggtgcctggggtgatgccccacaagcccgacccgggcgccgccggtccctcggctgcggacgcggcgttcgtcgggatcgaccctgtggagctccttggcggtggcgcggacgacttgtacgggcggttcgagcccggggtgagggtgcgctacgggcccgctgcggcaggcgctgcagccggcgacgtgtcgctgacgctgggcctgcagcacgccggcgccggcaacgccgc

SEQ ID NO: 2280 - DNA, 1271 bp, Zea mays
  unsure (1)..(1271): unsure at all n locations
  Clone ID: TF_ZmC11178_2
cctcgaggccggccgggcccctcttctcctctagcttctccttctctctccttcctggacattctctctctctcctctctctctaccatactcagacgagcagaagcagctagggacaccataggcaaactacttcagcaagaaattaaactatctcctacgcaagatcagaagaaactgtgtatggagcaagaagaggttggcctcgccctgggcctctccctcggctctggccaccaccaccaggagctcaagccccaacatccgtcgcatccgtgtgcggcgttgttggagccttctctgtcgctcggcagcccggcgaccaaggatgatggcccgaccgcaccggtgaggaggttcgctgccgtgaaaagggagctgcagacgatggaggggaacgacgacgaggccaccggcagggtacttgtctactcagtggcgtcgtcggcggtggttactgccgacgacgacgaagggtgcaacagcagccggaagaagctgaggctgtccaaggagcagtcggcgctgctggaggaccacttcaaggagcacagcaccctcaaccctaagcagaaggctgctttggccagacaactgaacctgagcccaaggcaagtgggaggtttggttccaaaacagaagagccagaaccaaactgaagcagacagaagtggactgcgagattctcaagcgctgctgcgagacgctaacagaggagaaccggcgtctccaccgcgagctccagcagctccgcgcctttttcatgcccaccgccgccgccgccgcgctctccatctggtcctctgncagcgccttgttgccaccggagcatctgccgccgccggagccaccgccggtgcagaaaataagcctaaggcgggcggccccggcggccgagcgccacacgtgttcagccctttcaccaattctgccgcctgctgaacacgcatacatatgtatatacatgcatgcgcacacatatatacgtatgtggtgcttagcgctagcggctagccacgctctatcattcatcgatggtcatctactagctagatagtaattggttcactagctagatggcatatattcctgtcccctccccccttaattcattagctttgttttttcacaagctaattaatgaattgatagcggcgtcgcgtgaggacgaaaaaaaaaaaaaaaaaaaaaaaaaaaaaaaaaaaaaaaaaaaaaaaaaaaaaaaaaaaaaaaaaaaaaaaaaaaaaagggggggcccgttttaaaagaac

SEQ ID NO: 2281 - DNA, 615 bp, Zea mays
  unsure (1)..(615): unsure at all n locations
  Clone ID: TF_LIB4735-005-R1-K1-G6
agcagtggtaacaacgcagagtacgcggggatggaaatgatggatcagacggtatgggctttggccccctaatactgacagagggtgaacggtccttagttgagcgtgtacggaaggagctgaagaacgagcttaagcagggttacaaggaaaagcttgtcgatatcagggaagagatcatgcgcaagcgcagggctgggaaacttcctggagataccgcatctgtactgaaagcttggtggcaagctcattccaagtggccgtacccaactgaagacgacaaggccaggctggtgcaggaaacggggttgcagctaaagcagatcaacaactggttcattaaccaacgcaaacggaactggcacagcaacccaacatcctcggctgaaaagaccaagaagaaaaggtgatgatggcccagagcaatcttggcaaaagctagagatgtccactatactttattatggcgaagtacattctccctcacttcgtaggcaagagggaaaggtatcttgggtgacttgagtggccacctaatgcgcaagtttgaccacgtgtggngctggggttgggtagtgaccctcacagtatagcattcgctaacgtgatgtgggt

SEQ ID NO: 2282 - DNA, 1122 bp, Zea mays
  Clone ID: TF_ZmC1104_1
gggagggccgtccggcggggaggagctcgacctcttcatgacgcactatgtattgctcctttgctcatccacgcgtccgcccacgcgtccggcagcatgtacgtgttcatgcaatggaagcagtgatgggttgctgggagcttgaacaatctttacaaagcctaacaggggcatctcctggtgaaggcactggagcgaccatgtctgatgatgaagacaaccaggtggatagcgaagccaacatgtttgatggaaatgatggatcagatggtatgggctttggccccttaatgctgacagagggtgaacgatccttagttgagcgtgtacggcaggagctaaagaacgagcttaagcagggttacaaagaaaagcttgttgatatcagggaagagattatgcgcaagcgcagagctgggaaacttcctggagatactgcatctgtgctgaaagcttggtggcaagctcattccaagtggccatacccaactgaagacgacaaggcacgactggtgcaggaaacgggattgcagctaaagcagattaacaactggttcatcaaccaacgcaaacggaactggcacagcaacccaacatcctcgggtgaaaagactaagaagaaaaggtgatattgatccagagcaatcttgacgatgctaaacgtccactgtgtactttatggcgaagtacattaccctccctccgtagccaggagcggagatgtgcatcttgggtggcccagtggtcacttaatgccccaagtttgaccacgttgtgggactggtgctagtagtgacctctgcagtatagtaatattcactaatgttgtgggaatcatgtggtgtataaccggcgaacgggagggagtaatttatgttttattgtaattgtctatctttaccttgtaatgatattttagggagaatcccaagatctcagaatggccgttcactgtattgtcggtggtaaaagtggtgggcaatcatcgtgttcagattacctccagaagggtatgcaatggctcgaatgttccatgtcgtgtttagctggttgtcgtttgtcttacttcctgctgagttggatacttgattccttcgaagatgtaaagcacccatcgatgcc

SEQ ID NO: 2283 - DNA, 925 bp, Zea mays
  unsure (1)..(925): unsure at all n locations
  Clone ID: TF_ZmC1104_2
caaggaacagctgcagcagcatgtacgtgttcatgcaatggaagcagtgatgggttgctgggagcttgaacaatccttacaaagcctaacaggggcatctccgggtgaaggcactggaggaaccatgtctgacgatgaagataaccaggtggatagtgaagccaacatgttcgatggaaatgatggatcagacggtatgggctttggccccctgatactaacagagggtgaacggtccttagttgagcgtgtacggaaggagctgaagaacgagcttaagcagggttacaaggaaaagcttgtcgatatcagggaagagatcatgcgcaaacgcagggctgggaagcttcctggagataccgcatctgtactgaaagcttggtggcaagctcattccaagtggccgtacccaactgaagacgacaaggccaggctggtgcaggaaacggggttgcagctaaagcagatcaacaactggttcattaaccaacgcaaacggaactggcacagcaacccaacatcctcggctgaaaagaccaagaagaaaaggtgatgatggcccagagcaatcttggcaaaaagctagagatgtccactatactttattatggcgaagtacattctccctcacttcgtaggcaagagggaaaggtatcttgggtgacttgagtggccacctaatgcgcaagtttgacgacgtggtggggctggagttggtagtgacctcagcagtatagcattcgctaacgtgatgtgggtgaatcacgtgttgcagtagaaccggcgagcgggaggggggtaatttatgttgtattgtaattgtgttttttattaccttgtaatgatattttagggagaatcccaagattcatattcgcaaaaaaaaaaaaaaaaaaaaacaacccctntcgctgttaccactgct

SEQ ID NO: 2284 - DNA, 750 bp, Zea mays
  Clone ID: TF_ZmC1104_4
gcttgtcgatatcagggaagagacatgcgcaaacgcagggctgggaaacttcctggagataccgcatctgtactgaaagcttggtggcaagctcattccaagtggccgtacccaactgaagacgacaaggccagactggtgcaggaaacggggttgcagctaaagcagatcaacaactggttcattaaccaacgcaaacggaactggcacagcaacccaacatcctcggctgaaaagaccaagaagaaaaggtgatgatggcccagagcaatcttgggaaaagctagagatgtccactatactttattatggcgaagtacattctccctcacttcgtaggcaagagggaaaagtatcttgggtgacttgagtggccacctaaggctttgtttgggtactctagcattgaccccaatccacatgtgttgaggtggattggggtgtaaattagtttaagttacacctcaatccacctcaatacaagtggattgaggtcaataccagagtacccaaactaagcctaatgtgcaagtttgacaacgtggttgggctggagttggtagtgacctcagcagtatagcattcgctaacgtgatgtgggtgaatcacgtgttgcagtagaaccggcgagcgggaggggggtaatttatgttgtattgtaattgtgttttttattaccttgtaatgatattttagggtgaatcccaagattcatattcgcaaaaaaaaaaaaaaaagcgggcgcttggg

SEQ ID NO: 2285 - DNA, 1736 bp, Zea mays
  Clone ID: TF_ZmC895_1
ggagagccaggggttgttagaacaagtccagtctagagagggagcgaaccaaaagggagaaataacaaaaaaaagaatagagacacacacacacagctctgttcttcttattccaatcctctctcatcttgctggttcatccttgggatcggctctgtcgtcccctagctagttcgttcggtgctgtggtttctgccgctgtatccaagaactcttgctcttgctgagtctgggacttcagttccttgcagagccaggctttacatatcttgggtgccgcacacagtatctatgcacctttgacaacaccaatctgattctgatgacaacaacagccactatctcccgtcatccttgcatcgatctgtcagctggcgtcgcctcgtgcttctgaagacgatggccacattcttctccacttccacgaaccagagggacctcgccggaggcggcggcgacatgtcgtcgttccaccactacgcctactcggacccaccagccggcggcctcatgcctttccccgccaccatcgtgtcgtcggaaggccacgtcgcgcacggcggtgacgacggcggcaggggcgcgttcgtggacgtgaacgcgagggacgggccgacgggcggcgccgagatgggcctgcagacgcagctgctcatggcgaacgccgcgtcggcggtgcagcaccaggggctgtcgcttagccttggcacgcagggggtgccggtgtctctttaccagtaccgccaggcgcaggcaggcatggccgccgccgcctttctaagcccggaccaggcgtcggcggcggcgagcaggagcgcgcagagcatctacgtccagaactccaggtacctcaaggccgcgagggagctgctggacgaggtggtcaacgtccaggacgcgatcaagcggaagggggacaagagccagcagggcaaggattccggcggcggcggcggtggcggcgagggcaaggacgccgagacgagcgacgagaaggctggcgagcacgaggggaactcctccgcgccggagctgtcgccgtcggagaggcaggacctccagaacaaagtgtcggcactgatggcgctgctggatcaggtggaccgcaagtacaggcactaccaccaccagatgcagatggtgatgtcgtccttcgacgcggtggccggcgccggcgcggcgaggccgtacacggcgctggcgctgcagaccatctcgcggcacttccggtcgctgcgcgacgctgtcggcgcgcaggtgcagtcgctgcggcggagcctgggcgagaaggacgggtccgcgcagggaggcgggctgccccggctgcgctacatcgaccagcagctgcggcagcagcgcgccatgcagcagttcggcatgatgcagcagccgcagcacgcctggcgcccgcagcgcggcctcccggagtccgccgtctccgtgctccgcgcctggctcttcgagcatttcctccacccgtacccgaaagattccgagaagctgatgctcgctaggcagacaggcttgtctaggggtcaggtgtccaactggttcatcaacgcgcgcgttcgactgtggaagccgatgatcgaggagatgtacagggaggagttcggggcggagatggactcgcactcgtcgtcggagaacgcggcgggcaacaagggcaaggacgaggcgatatcctcggaggaccacgaggagttccagagcccgtcgagcgccgccgcggccgc

SEQ ID NO: 2286 - DNA, 760 bp, Zea mays
  Clone ID: TF_LIB4757-069-Q1-K1-F12
cctcgaggccggccgggttagtgtttcaggaagaaacttggagaggatgacgatgcatctggcaaagagggcaaactaattcgccttcgttatatcgatcagcaaataaggcaacagcgagctttccaacagtatggtatgctacagcaaaatgcttggaggccacagagggggctacctgaaaattcagtctcgattctccgggcttggctttttgaacacttccttcacccgtatccaaaagactctgaaaagctaatgttatcgagacaaactgggttaacaagaagtcagatttcaaattggttcatcaatgcccgtgtccggctgtggaagccaatgatcgaagacatgtacaaagaagagataggtgaggcagagctagactccaactcctcctctgacaatgtgcagccgaacaaggacaagccaccatcttccgaagaaaaggaccataagacctcaacaagccaggtttgccaaaccagccagcttggcgaatccaaagccaacattggtggagtggtgagcttttgtggagcgccagccggcggcttccacaacgatgccaaccccgatgacagcttcatgagcctgatgctgaaggcccagagaccgggcgaaaccgatggcagcggtctcctccatgatgccgtcgctcatcactccgatgagagcgcgcggttcatggcgtacacctgacagagtttgggaggtatgggaacaacaacgtctcactgactctggggttgcagcacgc

SEQ ID NO: 2287 - DNA, 2943 bp, Zea mays
  Clone ID: TF_ZmC352_1
cgactacttttccgttgggtgctggtgtttgttgcagctagtgggtggtggtgcaggaattttttattccgggggcaggaagacggaggacgaggaggaggaacaagcgagagatagagagagcgctctcctatcttcttttgcttttggtattgttatcttgggatctgattttgtccccatacataccgagcgggagggaagggggcttgggttttctttctcctctcttctcttcttctcccctctcaccctcttctcctcccaaggctgactggccgtcggctcgggtctggggacagcaatccctgccgtcttgccatgctccccacgaggagcacaccgtcagagtgattctgcagaagtattcattctactggcgtgctgagcaggtgcaggagctctaataagcctagtgcgcacttcagtcatcagccaagtgattgaaaagggcaagtcagctgaaatattggttccgagggctctgtagttgcttatccacgctcgcctatgcctttgcgctgatcttgacaactcaaagcttggatatggctacttattactcgagccctggcagtgaaagagattcacaaacaatgtactcagcagagtcaggcaatgtatcatatcccgtgccatcagccctagggaactttctttatacgaacaatgcatcttctggaccttatacagaatttagtggaattgtccagcctcagcagaatttcatggaacttactggccatccttcagcaatgtcacatgattcgtcatccaatgaagctaccaacatgggcagttcactcactgaacagcgctcttttggtcctttgaaagatatgagaaatgagatgttgatgcatttgatggatggagcacacagcagtggcagtgatctcatccacaatgatgctcatagcactgtacagctcgaatttggcatgttaaacaaccacaactcaacaagtgttccattagcaccaggccaagggctgtctctgagcctcaatacacatatcttggcgccttcctatccacactggtctgcaaagcaagacttactaacaccaaattcttaccagggtgatgacaacagaatgaagaatatgcagtctgaggcctcacaggcaatccgtaactctaagtatctgaaggcagcacaggagttgcttgatgagattgtcagtgtttggaagagtgttaaacagaaaacagataaaggcccttctgaagcaggaaagtcttatagatggaagactgatggggggactaaaagtgagggagtatcttttgatccgcaagagtctggtgccaatacagcagctgagctttcaactgctgagaaacaagagctccagaataagatggcaaaacttatgactatgttggacgaggtggataggaagtacaaacactattatcatcggatgcaacttgtaatgtcatcgtttgatatggttgctggtgctggagctgccaagccttatactgcagttgccctccagacaatctcacggcatttccgatgtctaaaggatgctatcaatgatcaaattagtgttatccggaagaaacttggagaggatgacaatacatccggcaaagagggcaaactaacccgccttcgttatattgatcagcaaataaggcaacagcgagctttccaacagtatggtatgctacagcaaaacgcttggaggccacagagaggactacctgaaaattcagtctcgattctccgggcttggctttttgaacacttccttcacccgtatccaaaagattctgaaaagctaatgttatcgagacaaactgggttgacaagaagtcagatttcaaactggttcatcaatgcccgtgtccggctgtggaagccaatgatcgaagacatgtacaaagaagagattggtgaggcggagctagactccaactcttcctctgacaatgtgcagcggaacaaggacaaggcaccatcttccgaagaaaatgaggaccataagacctcaacaagccaggtttgccaaaccagccagcttggcgaatccaaagccaacattggtggagtgatgagctttagtggagcgccagccggcggcttccacaacgatgccaaccccgatgacagcttcatgagcctgatgctgaaggcccagagaccgggcgaaaccgatggcagcggtctcctccatgatgccgtcgctcatcactccgatgagagcgcgcggttcatggcgtaccacctgacagagtttgggaggtatgggaacaacaacgtctcactgactctggggttgcagcacgccgagaacacccagccgggcttccccggcgtcagagaccaagacatctacaactccacagctcctctcaacgtcacctccacatcttcagagtatgattcggcgagccaaatagatcaacaacaacggcagcggtttgaggtgtcacctctgatgcatgatttcgtggcctgaatttcagctgacgcactggaaaacgtggggaagtgacttgtcatttgtagtgccaggacgaacaatatgcctggactgaattttcaggcgtggaaatgtagctgtagttgtaattggggggtacagaatggacgaggtatatagcataaatgttatgtaaatttagtgggggcaggggtgatagtggtaaagaaatcctgtaaagatggaatacattttatacgtgtaaaatacgagtatttaagggccacgctgtaaaaatagatttacatgtaactgtaacgagtgtttgtaatgagtgtaaagaactgccacatgccatattttcgatgggtgagaagatatagaaatattattttctttgttaaaaaaaaaaaaaaaaaaaaaaaaaaaaaaaaaaaaaaaaaaaaaaaaaaaaatataaaatgtgcacgttgttttgttgaaaatttgaattaattttggtgcg

SEQ ID NO: 2288 - DNA, 565 bp, Zea mays
  Clone ID: TF_ZmC114837_1
cccgggcggcggcggcgtctttgcggcggccgggttgatggccaagggggggggggcgcccaggctgcgggtcatcgaccagtgcctgcggcagcaccgggcgtaccagaccggcgtcgtcctcgagagccagccgtggagaccgcagcgcggcctgccggagcgcgccgtctccatcctccgggcgtggatgttcgagcgctgggggggcccgtatccaagcgacgtggacaagcacatcctggcgcgccagaccggcctgtcacgcagccaagtctccaactggttcatcaacgcgagggttaggctgtggaagccgatggtggaggagatgtactcggaggagatgaaggaccccaaggagggcgcctgcagtaacgcgaacagcagcgtgaacactggcgccggctacgcctccgaggagctagggcagccgctggggcacgggggcgcctgtggtggcgtggacgagcagaagccgacgcgggcgcagctggtccacgacgccgggtcgctagcatcagtcgtcagcatcggcagcagcagggaccagcagcagatcagc

SEQ ID NO: 2289 - DNA, 1215 bp, Zea mays
  Clone ID: TF_ZmC32595_1
gtcgtaagctgatccttagagcggcgcgcggaggggtgatagcggcagctgctcaagggggagatcgcggtgcacccgctgtgcgagcagctagtggcggcgcacgtggggtgcctgcgcgtggccacgcccatcgaccacctccccctcatcgacgcccagctcgcgcagtccagcggcctcctccactcctacgccgcccaccaccgccccttcctctccccgcacgacaagcacgacctcgactcgttcctcgcgcagtacctgatgctgctgtgctcgttccgggagcagctgcagcagcacgtccgggtgcacgccgtggaggccgtcatggcgtgccgcgagatcgagcagtccctgcaggacctaaccggggcgacacttgaggaagggacgggggcgaccatgtcagaggacgaggacgaggcgccgatgctggaggtgggcctggatatgggctccgacgggcacgacatgatgggcttcggcccgctcatgcccaccgactcggagcgctcgctcatggagagggtcaggcaggagctcaagatggagctcaagcagggtttcaagtcgagaatagaggatgtgcgggaggagatcctgaggaaaaggagggccgggaagctgcctggggacaccaccagcatcctcaagcaatggtggcaggagcactccaagtggccataccccacggaagacgataaggctaagctcgtcgaagagaccggcctgcagctgaagcaaatcaacaactggttcatcaaccagaggaagaggaactggcacaacaactcccagacgtcaaccctcaaatcgaagcgtaaaaggtgatggaggagagctagctgcaccgtatataccgtgtatgtaacgcacacctgctgacacacatgtacacatgtataccataccaacacgctaatcaaacggagctctgcatggcgactgtactcacggaaataaagaggaccatatcgaccggttcaactgtatatctagccattagtctgaccactggcatatttgtttgctgcggctgatactttgagctgatgatgtgtgggctcacagcatactttattcttgttcttattgtgttgacatagtttgtcccccataatattgaggattaaaaaaaaaaagaataaaccgaaagggagggcaacggtacccatgggcctatgggggaggggattacgcgcgctgact

SEQ ID NO: 2290 - DNA, 2219 bp, Zea mays
  Clone ID: TF_ZmC13862_1
ccgccgcgcttttgctgatccgtgtgctctgtgtgtgtgtgcgggcgcgcgcgcgcgcttcaacttgaagaagcgcgggcgatcaagatggcgcacgaccccagcctgggcttcgcggactacttctcggcggcggcggcggcggcggcggcgggcgccacggcgatggacgacgacgtcggggcgtcggagctctatggcctgcatgccgacgacatggagttcctcggcatgcgtgggctggccgccatgccccccgccgcggcacaccaccagcaccaccaccatcacggccacagcaaggccggtgcgctcctcgacgacgacgacgcgggggtggggccagacgtcagcggctccgcggacgacgccaccatgcgcttcctgagcgagcagcagcagcagcagcagcaccaggcgccgctgtcgctgtcgctgtgccggccggacgtgacgacgacgttgcacgagcagcaccacctcgccggcggcggctcctcgtcccggtaccatcaggagcagcagccggcggcgtgggtgcagcagcagcagcacgactactcgccgtcgccgcagatccaggccatggacgcgctggagctgcagcggctcaaggacaagctctacatcatgctggaagaggtggaccggagataccggcggtactgcgagcagatgcgggcgctggcgggcgggttcgaggcggtggccggggagcgcgcggcggcggcgtacacggcgctggcgtcgcgcaccatctcgcggcacttccggagcctccgggacggcgtggtggcgcagctgcaggcggcgcgcagggcgctcggggagaaggacgtggcggtgcccgggatgacgcgcggggacacgcccaggctcagggtgctcgaccagtgcatccgccagcacaaggcgctcacccaggccgccggcatgatggagagccacccgtggcgcccgcagcgcggactccccgagcgcgccgtcaccatcctccgggcgtggctcttcgagcacttcctgcacccgtatccaagcgacgtcgacaagcatatcctggctcgccagacgggcctctcacggagccaggtgtccaactggttcatcaatgcgcgggtcaggctctggaagccaatggtggaggagatgtacgtggaggagatgaaggccgagggccagcaggacggcgggggccagcagcaggcaggcgtcgccaacaaccctaaccctagcagcgccgcccacgcccacgcctccgaggcggctgaggacgatgggcgcggggacagcggcggcgcagcagccgtcgtcgaccggaagccgacgcgggcgcagctcctgcacgacgccggctcgctcgcctcggtcgtcaacatcggcggcggatcgcgcgcgggattcggcatcatggaccacctcgacttcgacgcctacggcggccaccacgccggcgccgtgtccctcacgctgggcctgcagcagcacgactcccacgccgacaccggcggcgtcaacatcgcgttcggcgcgccgccgcccgcgcaccaccacgggtacctgttcgctccgacgacggcggcggcaggccatcagatgggcgccggcgtgcacccgggaatacaccaccacgtccagttcagcggcgccggcgccggcatcgacggcggcgaggcggcgcacgggcaggagcactaccggggcctgcagggcggcggcgggttccacctcctgcgtgacctggccgggtgatctgctccatccaccaccgcccgtgcatccgcggtcggccgcacgcgagctctagctgcgactccgagtgagctgagcgatggggacgtcgtgccggcgcctagctagctaccgggtgtccgccggattcatggcacgcactcgatcgcgcgtgcgctcatccggccacagcggatttgtttggcttgttgcttgcctggctcgtgccggtctccatcggtctcgatcgccgccggcggcggcttggccgggcccgggtctagctggctagctagctgccctagttatacataatatatgtatttgtagcgtgtacagatcgggtcgcgatcgagcagtttggacgcgcgcaggtgcagctagtactagtagctagcccgccggaactgcgtagttgatcaaacacgcattgcatgcaggttaattgcattgtttatcaaattcttgaaggattcgacgacgtacggccc

SEQ ID NO: 2291 - DNA, 1551 bp, Zea mays
  Clone ID: TF_ZmC2618_1
ctgcgtccgccacttgactcccatcccctctcgcgtggtccttctcctgctcccgctcccgctgctcctcatcttctcgcgccgcggcccccagcctttccccgccgctacctctctctaattgggcggcggcctgccggtccgatggcgttcaactaccacgaccacgcgctggcgatggaccccgcggcggccgccgcggttggggcggccgcgaaccctagctttgtctccggaggtggcatggccggggggcccggctgggagagggagaaggcggccatcgcggcgcacccgctgtacgagcgtcttctcgaggcgcacgtcgcctgcctccgcgtcgccacccccgtcgaccagctcccgcgcatcgacgcgcagatagcggcgaggcccccgcccatggaggccgcggctgcggctgctgcggcgggcggagcacactcgggaggcgaggagctcgacctcttcatgacacattatgtgttgctcctctgttcattcaaggaacaactccagcagcatgtgcgtgttcatgcaatggaagcagtcatggcttgttgggagctcgaacaaactttacaaagccttacaggtgcatctcctggtgagggcactggggcaactatgtctgacgatgaagacaatcaggtggacagtgagagcaacatgtttgatggaaatgaggggtcagatggaatgggatttggcccattaatgttgactgagggtgagagatccttagttgagcgcgtccggcaggagctaaagcatgagcttaagcaggggtacagagacaaacttgtggatattcgggaagagatattgcggaagcgaagagctgggaaactccctggcgacactgcttctaccttaaaagcatggtggcaagctcattctaagtggccgtacccaaccgaggaagacaaggctcgactggtgcaggaaacagggctacaactgaagcagatcaataactggtttatcaaccagcgtaagcggaactggcacaacaattcggcgtcatcctcgtcggacaaaagcaagagaaaaaggaacactgcaggtgatgggaacgcagaaccagcctggtagggcatggtcggggaacgaagtttatgtaaataatgcttctactgtgaagagttccatcatatttgttgctccagaaaagaccctcagaccggtgtttcctgaacccatattcatacaaagacatcagacgatgaataatgttgcgagtagtcaaataaaataaataacttgtatagtgaataactagaaactagcattcatcgttttggtattgtatagcgctagagtgtaattgtttggtcggactgtcttgtataatggtgtaaggttcaaatgcattttgacctagcattcgatattgtattttgtgatgttaaaaaccattggattcgttttgtgttttatccgtggaatagggacactgtttagtgttgccctcaattcggccatgtcgtgttgtcaactaaaaaaaaaaaaaaaaaaaaaaaaaaaaagggcggccgtcgcgcctagaac

SEQ ID NO: 2292 - DNA, 689 bp, Zea mays
  unsure (1)..(689): unsure at all n locations
  Clone ID: TF_ZmC32595_2
cccgggcaagatagagntgtgagggaggagattctgaggaaaaggagggccgggaagctgcctggggacaccaccagcatcctcaagcaatggtggcagcagcactccaagtggccataccccacggaggacgataaggcgaggctcgttgaagagaccggcctgcagctgaaacaaatcaacaactggttcatcaaccagaggaagaggaactggcacaacaactcccagacgtcaaccctcaaatcaaagcgtaaaaggtgatggagagctgcgccaccatgtactgcacacctgacacgtataccaattaccaacacgctaatcaaacgacgtacggccatgcatggcgactcacaagaaataaagaggatcgatcgattcaactgtatatttctagtcattagtcactagtcagagaggtgacaggttcatgacacacacaaacacacgtacactagtctgaccactggcatatttgcttgctgctgtgattaatatattttgagccgatcatgtgctcggagcatactttattcttgttattattgtatagcatagtttgtccaccccaccccctgtgcacatatatacagtgacctgatctgaccatctcacctgctggcaggaagagatcgaagaacagagaggttaattgcatgtaccatgacaatgccaaaaaatctaaa

SEQ ID NO: 2293 - DNA, 475 bp, Zea mays
  Clone ID: TF_ZmC105851_1
ggccaacaagctggagccggacgcaaggcgcagctggcccgcgcgctggggctgcagccccgccaggtggccatctggttccagaaccgccgcgcccggtggaagaccaagcagctggagaaggactacgacgcgctgcgccgccagctggacgccgcccgcgccgagaacgacgccctcctctcccacaacaagaagctccagacagagatcatggcgctcaagggaggcggaggagggaggcaggaggcggcgtcggagctcatcaacctcaacgtcaaggagacggaggcgtcctgcagcaaccgcagcagcgacgagaacagctccgagatcaacctcgacatctccaggccgcctcgggccgccgacgagagccccgccgccatggacagctaccgcggcatcccgttctacgcctgcgcccgcgccgacgacgtcgaccagctccagctcctgcacagcgggggccacc

SEQ ID NO: 2294 - DNA, 1043 bp, Zea mays
  Clone ID: TF_ZmC311845_1
ccgggctcgagtttttttttttttttttttttgatcggaattttaaggttaaataaataacaagaaatcttagttccactcgaccaacagcatgcaagcgccaaattaaatgaactggcgatgatccggcttcactaccggcacgggattcagactccggcagttctatataaacacgccagggagattacaaatatatatgggtagatcgcagggtggcatgcagcgatgcttgtatctggaaacagccatcttatctttatatacctgcatccctgctgctgacttaattgttcaggcctccattattcctgcggaggccttcttgagatcctcgtacatctcctctatcatcggcttccacagccgaacgcgggcgttgatgaaccagttggagacctggctcctgctcagtccgctcctggctgctaacatctccttctccttgtctctcgggtacgggcggaggaagttctcgaacatccaggctttgagcacggccacggacttctccggcaggccgcgctgcgggcgccacgattgctggtcgccgcgcctgagctgccgcagcgcccagtgcttctggatgaaggccgactcccagctgcgctccctgtcggccagcgacagcgacgacgacgacgacggctgattacctccccgcgtggccgccgcgatctcgccggtgatccgcgccctgagcctccggtgcgtcgctgacaccgcgcgctgcgcaaacagcgtcgagagggcgccgccgccgccgcccgggcgcacaaggctgccgtacttcgacgccgcattctggatctcgtccaggcattgcttgcaccgttggtccattatctgtagcagtttctggaagtcgttcttgagctcattgtggtgctcttccgagctaacaaacaccgacgggttcgggttggatgacgtcgtcttggagcaataacttgacgatggcagcgggcagctcgcctcaccgccgccggcgaacccggccacgtcttgcagcaggcggatgacgaactcgtccaacacctgct

SEQ ID NO: 2295 - DNA, 1192 bp, Zea mays
  Clone ID: TF_ZmC74_263
ggccaaatcacaagcttttacacgtatagtatagtgtgtttcatctttacaagatcctttcccttttccttttcacccctatcaccccaacccacctacgctacattacatttcctgctataccaccaatctgtgtatacaattgaaaaactacaggctactacaacccaatgcttcctttcaggcacatatgtaacacatatataatcatctgaggtactctcttccgttccaaattataaaacgttttgggtatatatctaaacacatcttatatttggtatagcagaggccatgaatttagaaaagccaaaaaaaaaacgtcttgcgatttggaacggagagtgagtataggcaaacgaacaatcacgccacaaaatcatggagaaggggcgactgctcgaaccgttgccgctgatccatctggctcatggactcgtagtccggcgacgccacgctgacaccgagaggagcggcggtggcattgtagatgtcgtcgtctccgacaccgattccgacaccggggaagctctgctgagcgtgcggaaccgagaggctgctgctggagcgctgcagccccagggtgagcgacacgttgccgttgccgtacctgcccagctccgccaggtggtacgccatgaaccgggcgttctcgtcctggtgctgcgccacggcgctgtggtggaggaggaggccgccgccgccgtcgttcggtcgctgctccttgagcatcaggctcatgaagctgtcgtcgtggtcgtggtcgtggccaggctcgttctggaataaccccatgggcgctccagcggcggcggcggcgacgctcatggccctcatgctggctcctcctggtggctcgctcagctggctgctgctctcgcagacggcccgcggcgtgcagcagcttctcgccaggtggtcctccttgtctcgcgaagacgccgtcttggccttgcttcctgctggcgcgttgtcggaggaggagttggagtcttgctcgatgtctccggtctcttccttgtacatgtcctcgatcatgggtttccagaggcggacgcgggcgttgatgaaccagttcgaaatctgactcctcgtcaggcctgtttgccttgccagcatcagcttttcagaatccttagggtacctgcaggacagtgccatcagccatgacaagatggtgaggaggaacccg

SEQ ID NO: 2296 - DNA, 1392 bp, Zea mays
  Clone ID: TF_ZmC30025_1
ggcacgagcggatagatgtggttagttgctctactgtttatgataactttctgccgtttaggatgtctgtgggtaccagttcataaataggcgtgcgtgccgtggaccttggtgttgctacttgctaccaatggtcatggcgaagcagcagcatgacaaggggttgccgaagcaagctcgcaatgagcccgcgccgttccggctcgagcagtgttgccgctgcgacgatgcccaccgtcaggccgacgacgagtccatggatgctgctgggtctgctggcccgctgcacctgactctcggcccgctcggctcggccgccggcccccgctgctcgtgcggtgtcgcgccggcgccggcgccggcgctggcggcgcccgcaacggtggccgtcctccgcgggtcccggtacatgcggccggcgcaggagctgctgggcgaggttgtgcgcgtggccgacctggcggctgccgacgacgaagacgaggaccaggcgacggagcggctcgagggcggcggtcaccgggcagcgcgtcgggcggccgggaacgacggcgacggcgtccaggccaagctcctctacctgctcagcgagctggagagcaggcgggagcgctacttcggcgagctggagcgcgtggtgtcgtcgttcgagccggcgctgggcggcggcgcggcggcggcctacacgaccctgatggcgcgggccatgggccgccacttcggcaacctgcgccgcgccatactgcgcaggctcaggctccaagccgccgccgcggcgaggaggtctctgcggcgcggcggcgaggaccaggacgacgacgacgacgacgacggcgacagcgacggcgaggtgaccgaggagctggtggacaggttggctcggcggacgaagctggccgcggcggcgcgggcggagcaagcgtggcggccgctgcgtggtctgccggatggctccgtggccgtgctccgggcgtggctcttcgaccatttcctccacccgtaccccaacgacggcgagaagctgaggctggcggtgaccaccggcttgagcaggcgccagatatccaactggttcatcaacgcgcgcgtgcggctgtggaagcccatgatcgaggagatgtacaaggacgagttctccgacggttccgccgtctccagctacgacgacgccagcgccagcggcgcctcctcatcctcctgagtcttgaccacctcgccctcgagaaagtttatctagctaattcatcactcggttgattggtcctgttgctttgggattatattaatttatttatatccatgcttaatcatgtgcctctcttgtatttttttttagaaaaggacatactccttcaaaatctagcgacttttcgaaaaaaaaaaaaaaaaaaa

SEQ ID NO: 2297 - DNA, 1452 bp, Zea mays
  Clone ID: TF_ZmC352_3
caaaacttatgactatgttggacgaggtggataggaagtacaaacactattatcatcagatgcaacttgtaatgtcatcgtttaatatggttgctggtgctggagctgccaagccttatactgcagttgccctccagacaatctcacggcatttccgatgtctaaaggatgctatcaatgatcaaattagtgttatccggaagaaacttggagaggatgacaatacatccggcaaagagggcaaactaacccgccttcgttatattgatcagcaaataaggcaacagcgagctttccaacagtatggtatgctacagcaaaacgcttggaggccacagagaggactacctgaaaattcagtctcgattctccgggcttggctttttgaacacttccctctcccgtatccaaaagattctgaaaagctaatgttatcgagacaaactgggttgacaagaagtcagatttcaaactggttcatcaatgcccgtgtccggctgtggaagccaatgatcgaagacatgtacaaagaagagattggtgaggcggagctagactccaactcttcctccgacaacgggcagcgaaacaaggacaaagcaccatctcccgaagaaaatgaggacctgcagaccccaacaagccaggcttgccaaaccagccagctcggccagtctaaagccatcgttggtggagtgatgggctttagtggagtgctagccggcggcttccacaccgaggccaaccccgacgacagcttcatgagcctgatgctaaaggcccagagacctggtgaaaccgaaggcaccggtctcctccacgatgccgtcgctcaccactcggacgacggcgcccggttcatggcctaccacctggcagagttcgggaggtacgggaacagcagcaacgtctcactgacgctgggcttgcagcacgccgagaacagcctcgcagtcccaccaaacactcagccaggcttccccggcgtcagagaccaagacatgtacaacgccacagctcctcctctcaacgtcgcctccacgtcttcagagtatgattcggcgagccaaattgatcaacaacagcaacggcagcggttcgagccgtcacctctgatgcatgatttcgtggcctgaatttcagctcgcccactggaaaacgtgggggaaaattactgccaatttgtagtgtgtgccaggacgaataacttgcctggactgaattttcaggcgtgggacagtagctgtagttaacgattggggattggggggtacagtacaggaggtatatagcgtaaatgtgatgtaaatttagtgggggtgatagcggtaaagaaatcctgtaaagatggaatgcatttatacgtgtatttaagggccatgctgtaaaaatagatttacctgtaatgagtacttatgatccaggtaatatatatactgtgcacgctgttga

SEQ ID NO: 2298 - DNA, 1385 bp, Zea mays
  Clone ID: TF_ZmC352_4
gggctgtgcgggcatacctggtctctccgaattgtccagttttttggtgtctgtccgccgggttcttgagctggcttggggatctgtagctttgagagcttcatcggggaattcctgcggcttgggggggttcttgcggttgtgttgagtggcctttcttgtggaagtgcagagtgattctgcagaagtattcattctactggcgtgctgagcaggtgcaggagctctaataagtctagtgcgcacttcagtcatcagccaagtgattgaaaaggtgcaggcaagtcagctgaaatattggttccgagggctctgtagttgcttatccacgctcgcctatgcctttgcgctgatcttgacaactcaaagcttggatatggctacttattactcgagccctggcagtgaaagagattcacaaacaatgtactcagcagagtcacgcgttcgttttccttcacccgtatccaaaagattctgaaaagctaatgttatcgagacaaactgggttgacaagaagtcagatttcaaactggttcatcaatgcccgtgtccggctgtggaagccaatgatcgaagacatgtacaaagaagagattggtgaggcggagctagactccaactcttcctccgacaacgggcagcgaaacaaggacaaagcaccatctcccgaagaaaatgaggacctgcagaccccaacaagccaggcttgccaaaccagccagctcggcgagtccaaagccatcgttggtggagtgatgggctttagtggagtgctagccggcggcttccacaccgaggccaaccccgacgacagcttcatgagcctgatgctaaaggcccagagacctggtgaaaccgaaggcaccggtctcctccacgatgccgtcgctcaccactcggacgacggcgcccggttcatggcctaccacctggcagagttcgggaggtacgggaacagcagcaacgtctcactgacgctgggcttgcagcacgccgagaacagcctcgcagtcccaccaaacactcagccaggcttccccggcgtcagagaccaagacatgtacaacgccacagctcctcctctcaacgtcgcctccacgtcttcagagtatgattcggcgagccaaattgatcaacaacagcaacggcagcggttcgagccgtcacctctgatgcatgatttcgtggcctgaatttcagctcgcccactggaaaacgtgggggaaaactactgccaatttgtagtgtgtgccaggacgaataacttgcctggactgaattttcaggcgtgggactgtagctgtagttaacgattggggatttggggggtacagtacaggaggtatatagcgtaaatgtgatgtaaatttagtgggggtgat

SEQ ID NO: 2299 - DNA, 848 bp, Zea mays
  Clone ID: TF_ZmC437205_1
cctcgaggccggccgaattcggcacgaggcccacacgaattgccgccaccaccccacacgacatcctacaaccccagcctcattccaccgggcccgcacctcagaccacaggtggacgaggccacctgccggccagcttctccggccaccaccgtcgaccgtgtaaaacttgcactgacgaagcctaccttcttatccggcggcggggccatggggttctcgctgtaccccaccaagtcgtcgacgcgcacgccgttgagcaccagcttcttccgccacaagttcccggccgccgcggtgtccttctgatcaggctagctccggccgcccggcggtcgacctcgctccgcgcttcaagaagaggtggaggagcgtacatacagacacgagcgccgccgttggtgggtggtgcggcggacgggcggcgcaagcggccgttccagctgacggcgcacgatgagctgcagctgcagctgcagctccagctggacgacgagctgtgcggcctggactacgagctccatgggccgcagcaggagcggacaacgaagcggcggctgacggcggagcaggtgcgggagctggagctgagcttcgaggaggagaagcggaagctggagcccgagcggaagagcgagctgggcgcggaggctcggcatcgcgccgcgccaggtggccgtgtggttccagaaccgccgcgcgcggtggaggagcaagcagctggagcaggacttcgaccgcctcagggccgcgcacgacgacctcatcgccggccgcgacgcgctcctcgccgataacgatcgtctccgctcacaggtgatcacgttaactgagaaactgcaaacgaa

SEQ ID NO: 2300 - DNA, 1082 bp, Zea mays
  Clone ID: TF_UC-ZMFLMO17002E04_FLI
ccggcgggtgtcctttttgtcttcgagcagaagcagaaaatcgcgttggcgaagcaactgaagctgaggccacggcaggtggaggtgtggttccaaaacaggcgagcaaggacgaagctgaagcagacggaggtggactgcgagctgctgaagcgctgctgcgagtcgctgagcgaggagaaccggcggctgcagcgggagctacaggagctccgcgcgctcaagctcgccggcccgcacccacaggcgccgtcgtcgtcgcccgccgccgcgacgcagggcgtgccggtgccggtgccgccgccgttgtacgtgcagatgcagatgcagctcagcagctgccgatgctgccggccgccacgctgagcctctgcccgtcctgcgagcgcctgcgcggcgggcccgccgcgcccaaggccgagcccgacaggccccaggcagccaaccaccgtttcttcaaccccttcacccactccgccgcctgctgatgatcatgatgatgttgcttgcgcgcgcctgcgctgcgcaccagcaccagcacgcgcatctaccttggcggcttggcgtacgtgcgcgtgcatgatgcaagagcaagcaacacgcagcggcggcagcgaacagatagcggcaccgcccaccaccgcagatactagctaccacgtatacactccgacgatccatccacctcgcgatcgcgtacgtcacaagtaacatgtgatcctccgatcctctggctattttcttgatccggaggggttaaagttacttgtcagtgttcccatcagctaatcgatcgatcgatcgatccaccatagattcataggcttgataggaggaggtagtagtcaaaatagccggtccgtccatccatccatgtatatttttgcgcatgcatgctgtaattctgtccctctcgatcggtcggccgatctactggaaatttttttttgctgcagcatgaggatagacccatttgcaaatcaataacacaactaaaacgttacttggtggacttgtaggtagggtctatcctcttttttatgaggggctacaaacatcctaatttagagctgggttgcaac

SEQ ID NO: 2301 - DNA, 1615 bp, Zea mays
  unsure (1)..(1615): unsure at all n locations
  Clone ID: TF_ZmC2618_2
attcggctcgaggctcccgctcccgctgctttttatcttctcgcgccgcggcccccagcctttgcccgccgctacctctctctaattgggcggcggcctgccggtccgatggcgttcaactaccacgaccacgcgctggcgatggaccccgcgaaccctagctttgtctccggaggtggcatggccggggggcccggctgggagagggagaaggcggccatcgcggcgcacccgctgtacgagcgtcttctcgaggcgcacgtcgcctgcctccgcgtcgccacccccgtcgaccagctcccgcgcatcgacgcgcagatagcggcgaggcccccgcccatggaggccgcggctgcggctgctgcgcacgagggagcacactcgggaggcgaggagctcgacctcttcatgacacattatgtgttgctcctctgttcattcaaggaacaactccagcagcatgtgcgtgttcatgcaatggaagcagtcatggcttgttgggagctcgaacaaactttacaaagccttacaggtgcatctcctggtgagggcactggggcaactatgtctgacgatgaagacaatcaggtggacagtgagagcaacatgtttgatggaaatgaggggtcagatggaatgggatttggcccattaatgttgactgagggtgagagatccttagttgagcgcgtccggcaggagctaaagcatgagcttaagcaggggtacagagacaaacttgtggatattcgggaagagatattgcggaagcgaagagctgggaaactccctggcgacactgcttctaccttaaaagcatggtggcaggctcattctaagtggccgtacccaaccgaggaagacaaggctcgactggtgcaggaaacagggctacaactgaagcagatcaataactggtttatcaaccagcgtaaggggaactggcacaacaattcggcgtcatcctcgtcggacaaaagcaagagaaaaaggtaatatcacaagaaactagactaagcttctgcttccacatccttgacacctttctggtttctgtttgctgtatgcttatgcttgtaataaaggaacactgcaggtgatggaaacgcagaaccagcctggtanggcatggtcggggaacgaagtttatgtaaataatgcttctactgtgaagagttccatcatatttgttgctccagaaaagaccctcagaccggtgtttcctgaacccatattcatacaaagacatcagacgatgaataatgttgcgagtagtcaaataaaataaataacttgtatagtgaataactagaaactagcattcatcgttttggtattgtatagcgctagagtgtaattgtttggtcggactgtcttgtataatggtgtaaggttcaaatgcattttgacctagcattcgatattgtattttgtgatgttaaaaaccattgtattccgttttgtgttttatccgtggaatagggacactgtttagtgttgccctcaattcggccatgtcgtgttgtcaacttcatattaaacttcaaagttgtttgtatttaataaacttcaaacttcatatataacacgaggttgtggtatagtttcccgattt

SEQ ID NO: 2302 - DNA, 929 bp, Zea mays
  Clone ID: TF_ZmC32182_1
aacacttcctgcacccatatcctactgatggagacaagcaaatgcttgctaaacaaacgggtttaacacggaaccaggtatccaactggtttataaatgcaagggttcgtctttggaaaccaatggtggaagagatccacaaccttgagatgaggcaggtgcacaaacaccctgttctcgacaagggccagcacgtgctgcatcaccaaacccagcattcgttcgagagcagtggaaagccttctgacccttccgactctcagcttggccaaagcagcagcatcacgaggaaccacaacatccctgcgtcccagggatttgccgatgagctctccgagatgtcccattctattcagcaggggcaggtaaccttcgcatacaatgggatgtcggcgccacaccacagcctcgcttcgtcacagcaccaccagcaggccgggccgatgagcggcattggtggcgcggggaacggtggcgtctccctcaccctcggcctccaccagaacaacagagtctgcatagccgagccactcccggcgtccgtccctcccaacctcgctcaccgttttgggttggaggaggtcagcgacccctacatgatgggctctttcgggaaccaggaccggcatttcggcaaggagattggcggccatttggtgcatgattttgttggctgacatggcagctgctgctgcattgttgcttctggtcagctgatctgatctcagcttgctgatggtgcacaagcatgtatttgtaccactactagtatgttagaatggtatataagtgtatcacttggtggctttggcttgatcagtttgaatcaattcctgaggatggagaaaaaaaaaaaaaaaaaaaaaacaaagggcggcggacgcgtggccacaccctaacatactacaacattcaaaaagagagcaccc

SEQ ID NO: 2303 - DNA, 1048 bp, Zea mays
  Clone ID: TF_ZmC1389_7
gtctcggcctgggcgtggcggcattccagcccagcttctgccacccggccggcaatgccgcggcggagcgggaggccagcccgaccgcggcggacgagagggagcggaggtgctctcccgccggcagcccgacgtcgagcggcagcggcagcggcagcgggaagcgcgtcgcggcggagaggtcggccggcagcggcgacgaggacgacgacgggggtgctcgcaagaagctgcggctgtccaaggaccaggccgccgtgctcgaggagtgcttcaaaacgcaccacaccctcactccggtaagggcgtaactaaggcttcatccttcgatccgacagacgtcgccgttcctcgccgtctgtcggtcggctgatttgatcttggcggtggccggtgggtgggtgggtggctgaccaaggttgtgtccgtctcggcgctgcagaagcagaaggcagcgttggccagccgcctgggcctccgggcgcggcaggtggaggtgtggttccagaaccggcgcgcccggaccaagctgaagcagacggaggtcgactgcgagtacctcaggcgctggtgcgagcagctcgccgaggagaaccggcgcctgggcaaggaggtcgccgagctcagggcgctgagcgccgcgcccgcgccagcggcccctctcaccgccctcacaatgtgcctctcctgcaggcgcgtctcctcttcatcctgctcatcctcgccgcctaacacgcacgcgcatgccgctgcagctggcactggcaggagcgtggcggcggcggcggcgacgacgttgcccgcccaccggcagttcttgtgcgggttcagagacggcgggccgccggattggactgcggacggccgggtgcagaaaggaagtgctgcgatagagttcattaacctcagtagcatcgatcatgttttgttaccttgctatctatcttggcgtcaatataggccttgaaatccgaagttaccctgatgatgatgaaatgggtggtgtcaccaaaaaaaaaaatctttctataaataaaaaaaataaata

SEQ ID NO: 2304 - DNA, 3336 bp, Zea mays
  Clone ID: TF_ZmC354_4
aattcggcacgaggtcgccgctagctttccggttccccctgctgctcctcccctccgtcctcctcctcaccctccccgcgggccgcgcgactcggcagccaagcaagcaacagcacaacacccccgcaccgccgccactcctctctctctctctctctctctctctctctctctctctctcgcaccaccaccatggcgtcgggcggctgcgctctcgccccgaggctatgactcggcgccgcccgtggccgtggctctccgtattctccgtctccccgcgacgacgacaacccctcctcctccgactccgactcctccctgggcggcggtgctagccagatgtcgacggcgctggcggtggtcgggggcggcaaggaccggccgtcgcccggcggcggcggggcgccgcaggtggacacgggcaagtacgtgcgctacacccccgagcaggtcgaggcgctcgagcgcgtctacagcgagtgccccaaacccagctcgctgcgcaggcagcagctcatcagggagtgccccatactcagcaacatcgagcccaagcagatcaagggtctggttccaacccgctctgccagatgaatgccttcttcctgttcattcttggtttatgccaatcaagaactacaagggaatccccggaatccactgtttgctagctgtttgcttttttaggcgtgcctgccactaaatcgtgtttccatcgtcgttggtagatgccgggagaagcagcgcaaggagtcctctcgtctacaaaccgtgaaccggaagctgagtgcgatgaacaagctgttgatggaggagaatgaccggctacagaagcaggtttcccgtctcgtctttgacaacgggtatatgaagaatcgactccacagtccttctgtagccaccaccgacacaagctgtgagtccgtggtgacaagtggtcagcacaaccaacagcaaaacccagcagttctgcatcctccacaaagggatgcgaacaacccagcaggtctactcgctattgctgaggagacattggcggagttcatgtccaaggcgaccggaactgctgtcaactgggtgcagatggttgggatgaagcctggtccggattccgttggaatcatcgctgtttcgcacaactgcagcggcgtagcagcacgagcttgcggccttgtgagcctcgagcccacaaaggttgccgagatccttaaggatcgcgcatcgtggtatcgcgattgtcggcgtgttgatatcctccatgttatccctacgggtaacggtggaacgattgagctgatctatatgcagacttatgcactgacaactctggcggaaccgcgcgacttttggacactacgatacactagtggtcttgacgatggcagtcttgtgatctgcgaaaggtcattgacccactccactggaggtccttctggacctaaaactccagattttataagagctgaggtgcttcctagtggttatctgattcgaccttgtgatgggggaggttccatgatttacattgtggatcatgttgatctgaatgcttgtagtgtccctgaggttcttcgaccgctctatgaatctcctaagatactggcacaaaagatgactgctgcggcgttgcgtcacattaggcaaattgcacacgaatcaagtggtgaaacgccctatggtgctgggcgacagccagctgttctcagaactttcagtcaaaggctcagcagaggcttcaatgatgctgtgagtggctttccagacgatggctggtcttctttgttgagcagtgatggtgctgaggatatttcaattacaatcaactcatctccaaacaaacttattgggtctgatgtcagcccttccccattcttttctgccatggggggcggcatcatgtgcgcaaaagcgtcaatgctactgcagaatgtgccacctgctctacttgtgcgatttttgagggagcatcgctctgaatgggctgaccctggtgttgatgcttattccgctgcctctctgagggccaacccatataatgttccgggtttaagggctggtgggtttatgggcaaccaggttatactaccccttgcacgcaccgtggagcatgaagagtgcttggaggttattcgacttcaaggacatggctttagccatgacgaggttcttatgtccccggatatgtttcttctgcagttgtgcagcggcatcgatgaggatgcgccgggtgcttgtgcacagcttgtcttcgctcctatcgatgaatcttttgctgacgatgcaccgttgctaccctctggcttccgtgtgataccgcttgatgctaagacggatgtgccatctgccacacgtacccttgaccttgcttctgcgctcgaggtcggatcaggcggaggtctgtgtgctttaagcgatagcgggtcaggcacgcgcagcacgaggtcggtcctgaccatcgccttccagttctcgttcgagaaccacctccgcgagagcgtggcagcgatggccaggcagtatgtcagggcagtgatggcgatcgtgcagagggtggccatggcgatttctccctctcgccttggcccgcatgtcgaactgaagcatccgccaggctctcccgaggcactcgcactagcttcgtggattggcaggagctacagggcgcacactggaacggagatccgctggtcggacactgaagacgcggcgggctctcccctgacgctgttctggaagcacagcgacgccataatctgctgctctctaaagccggctttcacactcaagttcgccaacagcgccggcttcgacatactggagacgacggtcgcgaacgtccaggacctgcagctggaggcggtccttgatgacgggggacagaaggccctggtcgcacagctccccaagatcatgctgcagggcctggcgtacctccccggcggcgtgtgcaggtcgagcatggggcggcaggcgtcgtacgagcaggcggtggcgtggaaggtggtgggcgacgacggcgcgccgcagtgcctggcgctcatgttcgtcaactggaccttcatctgatcctcctccgctcttgacgttcacagcctcgatgcctcactcggcagcgtcagatcggttgccgcctttatcctatcctactacgtattactagttgctttccgttgcacctgtgtactacaactgctcgagacaatgcccccctgctgtctgtttatggcctaagtctactgtggtggatcgggagttggagaacaatgcccctgctgtctgtttatgtgtgagacttaaccctattactactgctgttatcattgaatctttgtgatc

SEQ ID NO: 2305 - DNA, 373 bp, Zea mays
  unsure (1)..(373): unsure at all n locations
  Clone ID: TF_uC-zmflteosinte017a09a1
caacccgaaactgtatatgggcggatgagaaggagcaatcagttcaatcactactacacctcaacaatcaccgtcgtgctggcacacgtgcttagcttttaccgtgcatgccggccctcacgaccccagccggtacatcccgccgtccgccatgaacggcggcgccggcctgtccatgtacagcgctgcggtgccctgcgcgacgtggaacccgccctccatcatcgcgaacggcatgtactttgacnccngtttccagtgccgcttccgatggttgatgaaccagttggtgatctgctttggagccagcccggtcgtctctgccagcgccatttttttcgtctcagaagggtagggccacttgtagtgcagc

SEQ ID NO: 2306 - DNA, 796 bp, Zea mays
  Clone ID: TF_ZmC13584_1
tcttccccacgcgtccgcaccttccatcgacaaaatggaggtaccgcgcctcccccagggtgcccttccatccatggcgttgccgcggccgtccccgcaatcaactcccagatctcgtgctcacctccccgcaatcaaggtcgtcacgcccgatgaggatggccgcgagtcgccgcacggcggtccgggccccagcgatagctccggcgcaggcgcgaggaagaagctccggctcaccaatgagcagtcgacgctgctcgaggacaccttccgcgcccacaacatactctccaacgcgcagaagcaggagctcggacggcaggtggatctcagcgccaggcaggttcatatcgtcttctgcgtgtatgtagttgtttcttcttcaattctctttgtggggaaaacattaattgggattttcccagcaatcagcttgataggcgacatcatcattgtcgggatcttctacttcattggatttgcattgttctgcttggaggcttttctgaacatgtgggtcattcagcttttgcacccttctgatcaattcagaagagaacccggagaaccatgcacttgtggagttgttcatctggaaagtgacaccattattgaatatgattgatcgactttggggtcaatagtggcacaacaaggttctccatcgactcaagaaccaagctgttaatgaggacacctttcggtgttcatatgagtttggatggaaacctcgggttgctttgttgtccaattcctgttaatgttatctacacttacaaataaacgttgttgttgc

SEQ ID NO: 2307 - DNA, 806 bp, Zea mays
  Clone ID: TF_ZmC1202393_1
gaatacgggcagcagctgctcaccataggttccgacagtccccaccatcatctcgctgggaggcaatggaggcggaagcacaggtggcggcggccctatgactgggacgctaacctcctcgtcccttagctgcctcttggccggcggtttccggtccttgagccggcggtggcagaaccacatctgaagctgcctgtctgtgaggttcaactgcaccgacagctccgcccgcttcgtctcgttgggatacgagtcctctgcgtacgtcctctcgaggacctccagctggtagggcgtcttcatgacgcgcttcaccggcggcttcccgccggatccagacgcgccaggagcgctactcgcaccgccaacggctgcgggggccgacggagggccgggactccctgccgccggcccggagcccccgtcgtcggaggactccattcccgactgaccgttaccctagattcgcctccgccagacaacaaaacacaacacgcgaagaccaggccgacacagaagaacaacaaaacctaatcacacgctacggcgaattccgagatatatacagaggcgccaagcccgaatcgagcccgcggctcgatccgcgcgacgaattccaccaccgacgggcgacagcagcaggtaacgtcgcagcgcagacgcgaggtagaacaggatcggtgggcgcgccgcgccccagcacggacgcggagaagtaatagggacgcgggcgcgaggaggagcaacacgggaggccacggatgcaactccatcctccgcccgacagcaacggaattcgagctcgg

SEQ ID NO: 2308 - DNA, 5354 bp, Zea mays
  Clone ID: TF_ZmC1775_1
gagaagccggtccgccaggttatgggcctggggaaagtcagggcaagactgcctacagatgcaaatcagtaccaggcgtgctctccgtgagctctacgcctctacctgtgtcttggcgacgactgggcgaccgacgacgcagccgtaggacaggcgaccgacgacgcagccgtaggataggcgaccaggtcttcctgttggctcttgcccttcgccggcgacgagcacccgccaggccacaacgacattgggaacaagtgtatgacatacaaacccccaagctcggtctgcagagtcagaagtatcaccaagcaaaaggtatcccttgaggtctgcacacagtagtggtagagttcttcgctctgccttagccaataataataaggacagtgagcctctgaatgcagctgctgctacccaagctactgtgaaagaaagaagtggcaaccagctagatagtcctaatagcactgtcaggctacttcgttctacgtcaaatattaaggacgaggcacatagcgggcctcttaatgacaggatcattgataagccagctgcaaataaaagaaaacgtgccaatccctcacaggttggaagtcccagcagcagtgtcagggtgcttcgctctgcaataaaaaataaagatatggcgcgcagtgagcctcaaagtgacaggaccgctggtgaggcagctacaaataaaagaaaaaacgccaattcctcaaaggtggggagtctgagctctggtctcagtgtgcttcggtctgcttcaaaagctaaggatgagacatgtatcaaacctttaaatgatagtcctgctgttgaaccagcttcaagtaaaagaaaatgcaccagtccgtcaaaggtgggaagtcccagcaacagtgtcagggtgcttcgatctacttcaaaatataagaatgagacatgtaccgagcctttaaatgatagtggtgctgttgaaccagctgcaaataaaaggaaaggtgtcagtcgttcaaaggagggaagtcccaatagcagtgtcagggtgcttcgctctgcctcaaataataagattgatgtatctattgagccactgaataatagtactactggtcaacctgctgcgaaaagaaaaaaaaaaaacagttcctttaagagcagtgccagggtgctttgctctacctcagaaaggaaaaatgaggcatctagtgagcctttaaatgatagtactgctgctcagccagctgcgaggaaaaagaaaggtggtgcaatgccaaagactgataacccaaagattggtgtcagggttcttcgctctgcctcaggaaagaagaatgagacatgtactgagcctgtaaatcggagtacttctcgtgaaccaactgtgacaaaaaaaagaaattgcaagccttcaaaggatcgcggtcccaagaaggactacttaaaaatttgtcaaagaattaaatatattttgaatcgaatgaagtatgaacaagcctttattcaggcttatgcaagtgaaggttggaaaggccaaagtttggaaaaaataagacccgagaaggagcttgaacgagccaaggcagaaatccttcaatgcaagttaagaatccgggaagcttttcgaaatatggactctcttttatcgaaggggaagcttgaagaatctttgtttgattccgcaggagaaatttcaagcgaagatatattttgtgctgtatgtggctcaaaggatgttactttacaaaatgacatcattctttgtgatggagcctgtgacagaggattccaccagaattgtttgagccctcctttgctaactgaagaaattcctccgggggatcaaggatggctttgccctgcatgtgtctgcaaagcagactctatagatgcattaaatgaacttcaaggaagcaaactctccattcatgactcatgggtgaaagttttccctgaggcagcttcaactgccaatggttctaaacaagttgatgcttctgatctgctgccagatcatataaaggacagtgataaccctgcattggttgaagggctgatggtgaatgaaatcaggatttctgaagaggatgatagcaaagcggatgacctcggcttgccttcggaggactcaggggatggtgacttcgatccgtcaggtccagattctagtgaagaccaaaatgatggattgaactcagaagagtcagatttcacatctgactctgatgatttttgtgctgagattgccaaatcttgcggccaggatgaagtctcggcatctccattatcaaatgtgataaaccatactgatagaatgaaactcagggcctagcaatagacgctctaatgaagaaaaccatgatcatgcatttatggacatggagctagggcaagacatagtgctaccagttgcaagcaggcggcaggttgaacggttggattacaaaaaactatacgatgaggcatatgaggaagaatcatctaattcaagtgatgaagaagagtggtctggaaaagaactcttagaaggcagtggaacagattcacttgatgagccttcgtcctgtaaaaggctctctagaagagcaccagcagggcagcagaataatgaacttacaccacagagccggcctcatggttctaacagtgagcagaaaactgaagttcttcgctccaatggcagtagtagcacaggacggaagtatgatcctgaagttacccagaaattgaaggtgcattttgagaaagatccatatcctagccgtgaaacaaaagaaaatctatcagaagaactaggcttgacatttaatcaggtctccaaatggttctctagtactcgtcactattcaagggttgcttctgccaaaaaagaaatgcatcctgacagccatacttgtgagaataatgatgagacaactgtagacagcatgcaagcaaaacaacccaatgctggggtgatggaaaagttgacgggggatagaaatgacattgtttctgagaaaccgatggtgcaggacaatcttaaccaaggggcgatggaaaagttaactagggatagaaatgacattgttcctgagaaacaggtgatgcagagcagtcttaaccaatgtaataatgaagatatcccgctttctggaacagaaattgagatggagtcttacgaacaagaatcatctgaaagcagtgatgaagagtggtccacacttagcacaccacgaaaaacaaaattacaagaccatggaaaatcatcagttactgaatcacttcgttctgcaaaacggtgttccagaagagcaccagctagggagcagaataatgaacgtattcagagtgagcagcttcatggttctgcaagtgagcagcaaactgaatttcttcgctccaatgtcagcagtggcaaggtctcaaaatatcattttggccctatagttagtcagaagcttaaggaacattttgaaaaagatccatatccttgccgtgcaacaaaagagagtctggcacaagagctaggactgacatttaatcagatcagtaagtggttctctggcactcgtcattattcaagagatgctgttgccaagaatcagaaacgcccgggagaaaatactactgtgaataataatagcacaacctttgatgacatacaagtaatagaacccaatgttgggttgatagataaaccagctgcagatgtaaatgacatgatttctgaaaagttgatggtccaaattaatcttaacgaaggcattgaagaagatatcccaccgagccaatatgccaggtgtgaagagaaaataactatgactccagctgccatctcaagggaagctggtcttccaggttatggtcctgggagaaaactttcttcaggtcagttcaaggaatactagctgtgagcagagtgtgataatggctcctagcgctatcgcaagagaagttggtccaccaggatatgcgactggagaaaaccagggcaatggggctccatggaatacaagttatgagcgaagactatttatgaatcctgtgaccagctcaagagcagtcagtcctccaggatatgggcctgaagaaagccgaggcagtggcatttcctggaatacaagcagtgaacaaatattgtttatgagccctacaaccatctcaagagaacttggtccaccaggatatgggcctagagaagaccagtgcagtggcacttcatggaatgcaagctgcgagttgggagtatttatgagtcctgtgaccacctcaagagaagacagtccgccaggatatgggcctcgagaaaaccaggagaatgacaatatgagatgcgagttgagaatgtttacaagtcctacaaccatctccagagaagttggcccaccaggatatgagcttactggaaaaaacaagggcaacggcgcttcatgtactacgaattaccagcagggagcgtttacgagtcctgaagccttcccaagagaagcctgtcctccaggatttgtgtctggagagaaccagggtaacgacactccatggtatatgagcagcaaacagatggcgtttacgagtcctacgaccaaccctagagtaggtccgccagggtatggacaggaaaaccagggcagtcgtgtttcttggaatacgagttatgagcagggagtgtttatgagttctacaaacatctcaagagaagccggtccgccaggttatgggcctggggaaagtcagggcaatatcacttcatggatttcgacaggcgggcagagaatgtttacaggtccttcaactatcccgaacgaagtcgggcagcaaggatatggcccttcaggaatcccgggaacggatggctcaaggagtatggacttgaaagcctttccaccaggatatggacctgctggagaaaaccagggcggtggtgcttcagggagcgtcataagcccccaagctcggtctgcagagaacgtagagttttcagacgacgctagaaaaaaggctatacagcgggagctgagacggcggcagaagttcaggtgatggccgtgatgcgaacttctgatcctgctcatcgaattttgactacggattactactttttaagactacatatccagtcttgatggctgaatgagtgacgaccctagttgtcgagacgcaaaaccttttgttgtatgtgttccttttacagacttccttggcttgtcatgaatttctaatgtgaacttgtgctgtgaacttgttgcaaaacctcttgaacctgaagcattcaacatgctgtgaacttgtgcagttgctcttcttctgcatgagttcatgttatctgggttgcacggcatgcaatttcccattgctagaagggtcagataacactgactcgggcccgg

SEQ ID NO: 2309 - DNA, 1448 bp, Zea mays
  Clone ID: TF_ZmC508_4
gccggccgggctgcgactgcccagctcgcaataactccttcctccccatctccccgttctcccatccgccgttcccctccgcttcctcctaccatggcgtcttcttcctccccgagatctcgccatgctagctctcccgccttctgctagccagctgcgagcacggagcgctcgttttcgggcttcctgcatgcgatatcaccgacgaaacgtgtctctggaagaaggcatcacaggccgggatcggagaatgaaagctgacgatatagatgagctagggtttgcgaggcactagctgggaccgtacgtaccgtgctgccattgttcatgactccggcaaggcgcatgccggcgatgatcggccggaataatggcgtcgcgttcgggtcctcgtcagcgctatctttaagccaggtgattattccggctgacttcctagacagccatcatctgcagcaagcgttcgagcagcaactctttgaacagatcccatccaccgcagtggatagcagcgacaacattatccacggtcgctccgacgcgctggtggacgagtttgagagcaagtcgtgcagcgagaatcccgatggcaccgcctccggcgatgatggccagggggacgaagaccctaaccagcggccaaacaagaagaagcggtatcaccgccacacccagcaccagatcgaagagatggaggccttcttcaaggagtgtccacacccggatgacaagcagcgaaaggagctgagccgggagctcggtctcgagccgctgcaggtcaagttctgttcccagaacaagcgcacacagatgaagaaccagcacgagcggcaggagaacgcgcagctgcgcgcggagaacgacaagctgcgagccgagaacatgcggtacaaggaggcgctgggcacggcctcgtgccccagctgcggcggcccggctgccctcggcgagatgtccttcgacgagcaccacctccgcctcgagaacgctcgcctccgtgacgagatcgaccggatctcgggcatcgccgccaagcacgtgggaaagcccatggtgtccttccccgtgctctccagcccgctcgccgccgccgccgccgccgcccggtccccactcgacctcgccggcgcctacggcgtccagtcagctgctgcgggcctcggcgccgaccacgtgctgttcggcgccggtgccggcgatctgctgaggagcgtgtcggccgggcagctcgacgcggacaagcccatgatcgtggagctggccgtcgcggccatggacgagctcctccggatggcgcggcctgacgcgctgctgtggggtggcggcgcgtcggcaggggcgcagcagcagcagctggacgaggaggagtacgtccggacgttccccgctgggctcgggccgaggcagtacgggctccgtccggaggcgtctcgggacagcgccgtcgt

SEQ ID NO: 2310 - DNA, 610 bp, Zea mays
  unsure (1)..(610): unsure at all n locations
  Clone ID: TF_LIB3591-095-Q6-K6-G2
cttcctcctctcgcccagcagcctagctacttgagcgagnagagctccagctgaggaagtgagaggtcgtggtccgagaggcgtgcgtgcgtggccatggacggcgccgaggacgacgggacggagtggatgatgcatggtgccggagggaagggaaaaggcggcggcgcgctcgacaagaacaagaagcgcttcagcgacgagcagaccaagtcgctggagtccatgttcgcgacgcaggccaagctggagccgcgccagaagctgcagctggcgcgggagctcggcctgcagccgcgccaggtcgccatctggttccagaacaagcgcgcgcgctggaagtccaagcagctggagcgcgagtactcggcgctgcgcgacgactaccacgcgctcctctgcagctacgagtccctcaaggacgagaagcgcgcgctcctcaagcaggtcagggatcaggatgatgcaaataaagctcatgcatcatgcatgccctccatcgatctcccatgcatctctcgttcgttcgttcgttcgcgcactgcactgcacgcgccccatgctgatctatatatatgtatgctcgaactcagaagatcatgcatatatg

SEQ ID NO: 2311 - DNA, 1591 bp, Zea mays
  Clone ID: TF_ZmC254_1
gcgcccgcgctcccccccccctcctgcctccctccctccctccccccgccccccagcctacttacccgagcgagcccccccccagggaaggaaggggccgggcccgggccgcggggcgtgcgtgcgtgccaaggcaagaaaaaaaaaaaacaaaacgagcgcaggccgggctggctctggcagtccggctggcaggagagaattggcgagggattgggatcgggagcgaattcccagccagcccctgtctagagagggacaggccgcgcgcgcacgcacgccaccgcgttccattggccgcgtcgttgccatcacgccgacgactaaactagtcgatcacaccaagctcacaggctctcgatcgcctgtgatcgggctgccctgccgcctcttgctcccttcctcctctcgcccagcagcctagctacttgagcgagacgagctccagctgaggaagtgagaggtcgtggtccgagaggcgtgcgtgcgtggccatggacggcgccgaggacgacgggacggagtggatgatgcatggtgccggagggaagggaaaaggcggcggcgcgctcgacaagaacaagaagcgcttcagcgacgagcagaccaagtcgctggagtccatgttcgcgacgcaggccaagctggagccgcgccagaagctgcagctggcgcgggagctcggcctgcagccgcgccaggtcgccatctggttccagaacaagcgcgcgcgctggaagtccaagcagctggagcgcgagtactcggcgctgcgcgacgactaccacgcgctcctctgcagctacgagtccctcaaggacgagaagcgcgcgctcctcaagcagctggagaagctggccgagatgctgcacgagccgccgcagggcaagtactacggcggcaatgcggacgacgtgcgctcgggcggcgtcggcggcacgaaggaggaggaggagtccacagacgcctgcgccggggccgcgctctactcgtccgagtgcgctggcggtggcaggttcatcgcgcacttcttggcggacgacgacgtgggagcagccctcttccggccgccgtcgtctccgcagccgaccgctggcttactcacgtcgtcggggccgccggagcaccagccgttccagttccactccggctgctgctggccgtcgtcgtcggcggagcagacctgcagcggctcgcaatggtgggagttggagtccctcagcgagtgacgtacgatgatcacaagcggccgggggtcactcggttccaagcacacgtaactggccgggccaatacgagttcgttcgtagcggtctcgtcactcgtcagctagccctgcagagcaacggtgtacatagcttcagtagatcgaagtccaggtccaggtctgcccatcaagcagtttcttcttctcgccatcgatcatcgatcatgcatgcaaaagattttttttctctctcccttgctaccagatcatgtaatccagcaggaacatgtagagaaagatcaaacgaggttatagatcgagaaggtcgcctgcatatgcgagctagtctattcttttccgaatgcatggcggctttcttcgttc

SEQ ID NO: 2312 - DNA, 1349 bp, Zea mays
  Clone ID: TF_ZmC3817_2
cattggacccttcgggccggccggggggcctctgatgaggccaatggccagcaatggcatggcgtcctcaccctcgcccttcttccctccaaacttcctcctccaaatgcagcagacgccctccgatcatgacccccaagaacaccaccaccttcctgctcctccccttcatcttcaccacaaccccttcctcccctcctctcaatgcccctccctgcaagacttccgaggtatggcgccaatgctgcggaagcgcccgacgatgtactgcggcgcggacgacgtcggcgtcggaggcgaggaggcgaactgcggcgcgacgaacgaggacgaggtgtcggacgacggctccctgcaggccggcgggcccggggagaagaagcggcggctgaacgtggagcaggtgcggacgctggagaagaacttcgagctcgggaacaagctggaggcggagcgcaagctgcagctggcgcgcgcgctgggcctgcagccgcggcaggtggccatctggttccagaaccggcgcgcgcggtggaagacgaagcagctggagaaggactacgacgcgctgaggcgccagctcgacgccgtcaaggccgacaacgacgccctcctctcccacaacaagaagctccaagccgagatactggcactgaagggcagggaggcagcaggggggtcgtcggagctgatcaacctgaacaaggagacggaggcgtcctgcagcaaccgcagcgaggacagctccgagatcaacctcgacatctcgcgcacgccgccggcgtccgagggccccatggaccatccgccgccgccgccgccgcaccacgccgccggcggcggcttgatccctttctacccttccgtcggcggccgacatagtattgccgccggcgtgggtatggaccaactcctgcacgcctccaccccgaagctggagcaacacggtgacggctgcgccgtcgccgtccaggccgcggagaccgccggcagcttcggcaacctcctgtgtggcgtcgacgagacgccgccgttctggccgtgggccgaccaccaccacttccattgatcgatcatcgtccatcacaaacgatggcgatcgacactgtagtgagtagaaatatcggaggaaaggaatttatttggacaattctggcgagtgcatgcagcaagggaggagagaaaaaaaaggtcgtgtactcgtgtgtgatatctggtccatattggcggggtaggcgggtagctgcctgcctagctggtcatgcatggtgggaactgggaaggggttgtaaatggggaataagtggagaggcggtgtaatttaattaggtagattttggtctgagttc

SEQ ID NO: 2313 - DNA, 1685 bp, Zea mays
  Clone ID: TF_ZmC3817_3
ttgggtacctcgaggccggccgggccgatcctccgatgaggccaatggccagcaatggcattgcgtcctcactctcgcccttcttccctccaaacttcctcctccaaatgcagcagacgccctccgatcatgacccccaagaacaccaccaccttcctgctcctccccttcatcttcaccacaaccccttcctcccctcctctcaatgcccctccctgcaagacttccgaggtcacgcgcagatccatccctatagcgagctagctagctagctagtcaacagcctccgacgcctaatccgatcgatccatcggctggtcctgacacatgcgctggcgcctgtggttgatgcgtgcaggtatggcgccaatgctgcggaagcgcccgacgatgtactgcggcgcggacgacgtcggcgtcggaggcgaggaggcgagctgcggcgcgacgaacgaggacgaggtgtcggacgacggctccctgcaggccgtcgggcccggggagaagaagcggcggctgaacgtggagcaggtgcggacgctggagaagaacttcgagctcgggaacaagctggaggcggagcgcaagctgcagctggcgcgcgcgctgggcctgcagccgcggcaggtggccatctggttccagaaccggcgcgcgcggtggaagacgaagcagctggagaaggactacgacgcgctgaggccgcagctcgacgccgtcaaggccgatcactgattacgcgatcatctcctctccggatacttggcatatcaacagaacattttggttgggcgggccagaacatttgtacactgatatatactaacagccagcgattaatcaatcgatcgcttctgatgcatgcagatactggcactgaagggcagggaggcagcaggggggtcgtcggagctgatcaacctgaacaaggagacggaggcgtcctgcagcaaccgcagcgaggacagctccgagatcaacctcgacatctcgcgcacgccgccggcgtccgagggccccatggaccatccgccgccgccgccgccgcaccacgccgccggcggcggcttgatccctttctacccttccgtcggcggccgacatagtattgccgccggcgtgggtatggaccaactcctgcacgcctccaccccgaagctggagcaacacggtgacggctgcgccgtcgccgtccaggccgcggagaccgccggcagcttcggcaacctcctgtgtggcgtcgacgagacgccgccgttctggccgtgggccgaccaccaccacttccattgatcgatcatcgtccatcacaaacgatggcgatcgacactgtagtgagtagaaatatcggaggaaaggaatttatttggacaattctggcgagtgcatgcagcaagggaggagagaaaaaaaaggtcgtgtactcgtgtgtgatatctggtccatattggcggggtaggcgggtagctgcctgcctagctggtcatgcatggtgggaactgggaaggggttgtaaatggggaataagtggagaggcggtgtaatttaattaggtagattttggtttgagttttgatagtattttttttatctttttgagtcttcgttttttttttctttgcgatcttcttttttctttttggttgttgacacatataaatttgtgaattggcaagcatacaggc

SEQ ID NO: 2314 - DNA, 675 bp, Zea mays
  Clone ID: TF_LIB4172-024-R1-L1-A4
aattcggcacgagggccgcgcggctcggcaggcagccaagcaagcaacagctgcacaaccccccagcaccgccgccactcctctctctctctctctctctctctctctctctctctctcgcaccaccaccatggcgtcgggcggctgcgctctcgccccgaggctatgactcggcgccgcccgtggccgtggctctccgtcttctccgtctccccgcgacgaagacaacccctcctcctccaactccgactcctccctgggcggcggtgctagccagatgtcgacggcgctggcggtggtcgggggcggcaaggaccggccgtcgcccggcggcggcggggcgccgcaggtggacacgggcaagtacgtgcgctacacccccgagcaggtcgaggcgctcgagcgcgtctacagcgagtgccccaaacccagctcgctgcgcaggcagcagctcatcagggagtgccccatactcagcaacatcgagcccaagcagatcaaggtctggttccagaaccgcagatgccgcgagaagcagcggaaggaggcctcgcgcctgcagactgtgaaccggaagctgactgcgatgaacaagctgttgatggaggaagatgacaggctgcagaagcaggtctcccgactcgtgtacgagaatggatacatgcgacagcagct

SEQ ID NO: 2315 - DNA, 847 bp, Zea mays
  unsure (1)..(847): unsure at all n locations
  Clone ID: TF_LIB4739-120-Q1-K1-C7
gaggccggccgggctctcccatccccgtctcgccgctagctttccctttccccccgctgctcctcccctccgtcctcctcctcaccctccccgcgcgccgcgcggctcggcaggcagccaagcaagcaacagctgcacaaccccccagcaccgccgccactcctctctctctctctctctctctctctcgcaccaccaccatggcgtcgggcggctgcgctctcgccccgaggctatgactcggcgccgcccgtggccgtggctctccgccttctccgtctccccgcgacgaagacaacccctcctcctccaactccgactcctccctgggcggcggtgctagccagatgtcgacggcgctggcggtggtcgggggcggcaaggaccggccgtcgcccggcggcggcggggcgccgcaggtggacacgggcaagtacgtgcgctacacccccgagcaggtcgaggcgctcgagcgcgtctacagcgagtgccccaaacccagctcgctgcgcaggcagcagctcatcagggagtgccccatactcagcaacatcgagcccaagcagatcaaggtctggttccagaaccgcagatgccgcgagaagcagcggaaggaggcctcgcgcctgcagactgtgaaccggaagctgactgcgatgaacaagctgttgatggaggagaatgacaggctgcagaagcaggtctcccgactcgtgtacgagaatggatacatgcgacagcagcttcacaatccttctgctgcgactacagacacgangctgtgagtctgtggtcacaagtggtcagcaccaccaacagcaaaacacagcagctcccgcgtcctcac

SEQ ID NO: 2316 - DNA, 535 bp, Zea mays
  Clone ID: TF_ZmC102447_1
cccttctcccccctcatctactccccctttttttgttcctgtgcctgtgcattggcttgtgatgggggccacttctccttcaggcctggagctcaccatggctgtccccggcctcagctcctcctctggctcagaggggtttgtttgcaacaacaatatcagcaacaacggtggcgggaacatgagggacctggacatgaaccagccggcgagcggcggcgaggaggaggatttcctgatgggcggcgtggaagaggacgaggaggagcggggcgccggcggaccgcaccgcccaaagaagctccgcctctccaaggagcagtcccgcctcctcgaggagagcttccgcctcaaccacaccctctcaccgaagcaaaaggaggccttggcgatcaaactgaagctgcggcccaggcaggtggaggtctggtttcagaaccgcagggcaaggactaagctgaagcacacggagatggagtgcgagtacctgaaacgctgcttcggctcgctgacggaggagaaccgccgcctgcag

SEQ ID NO: 2317 - DNA, 1182 bp, Zea mays
  Clone ID: TF_ZmC8754_1
cggccccccccgcgcgaccgcgcaaccggctgctactacacacaaacacagctagccggcgctgccaggttggctttggcgagcaacgacgacgacgacggcgctcaggactcaggtgctttcggttcaggcggaggagggcatggagcgcggcgactgccagttcacggtggtgccgccgcggcagtacgacgaggcccagttcatgcaccagctgatggtggccggcgaccagcaggaccccgcgggcgcggggcggggagctgccgccgccggcggggagaggaagcggcggttcacggaggagcaggtgcggtcgctggagacgacgttccacgcgcggcgcgccaagctggagccccgggagaaggcggagctggcgcgggagcttggcctgcagccgcgccaggtggccatctggttccagaataagcgtgcgcggtggcgctccaagcagctggagcatgactacgccgcgctcagggctcagttcgacgcgatgcacgcccgcgtcgagtcgctcaggcaggagaagatcgcgctcgccgcgcaggtagacgagctgcgggggaggctgaacgagcggcaagaccagagcggcagctgcgaggtcaacgacgcggaggcggcggcggacgacaagaggaacaatagcaccagctccctcgtgcaggacgacggcgccacgccgccgccggctgcagtagacgcctccgaggactcggcggcgaccggcgagtactacgaccacgtcgcgtacgagtacgatggcctgcacgaccccttcgtctgcgccactccggacctgtgggatacgtggccgctgctggagtggaacgcggtggcctgaaacctcgatcgtgtactcgtcgtcatgtctctgtatctagtgcacgtgtggtggattcatggtgattccttatatagctagctagccccaactagctaccgagccagttgatccggggagggatcgacgggtaacagacgatagagagctgggtaattaggaatcaggagcgaccggcggctgtggagggaaaaggatcgatcgacaatgtccggccaccgtgcacctatcatgttcgttggttcaccactgaagtttgaaccccctctctcccgaacatggatcctaaggggcccggtggccggacaatgtcgatcgatcccttttttccc

SEQ ID NO: 2318 - DNA, 1155 bp, Zea mays
  Clone ID: TF_ZmC8754_2
gaatacgtgcagagcaacagcatgcgtaagcgtaacccacgtgcgacaccatttgcctcggctctgaagtctgaaccacctctctcacgaacatggatcctaaggtgcacggtggccggacattgtcgatcgatccctcttttccctccacagccgccggtcgctcctgattcctaattacccagctctctatcgtctgttacccgtcgatccctccccggatcaactggctcggtagctagttggggctagctagctatataaggaatcaccatgaatccaccacacgtgcactaggtacagagacatgacgacgagtacacgatcgaggtttcaggccaccgcgttccactccagcagcggccacgtatcccacaggtccggagtggcgcagacgaaggggtcgcgcaggccatcgtactcgtacgcgacgtggtcgtagtactcgccggtcgccgccgagtcctcggaggcgtctactgcagccggcggcggcgtggcgccgtcgtcctgcacgagggagctggtgctattgttcctcttgtcgtccgccgccgcctccgcgtcgttgacctcgcagctgccgctctggtcttgccgctcgttcagcctcccccgcagctcgtctacctgcgcggcgagcgcgatcttctcctgcctgagcgactcgacgcgggcgtgcatcgcgtcgaactgagccctgagcgcggcgtagtcatgctccagctgcttggagcgccaccgcgcacgcttattctggaaccagatggccacctggcgcggctgcaggccaagctcccgcgccagctccgccttctcccggggctccagcttggcgcgccgcgcgtggaacgtcgtctccagcgaccgcacctgctcctccgtgaaccgccgcttcctctccccgccggcggcggcagctccccgccccgcgcccgcggggtcctgctggtcgccggccaccatcagctggtgcatgaactgggcctcgtcgtactgccgcggcggcaccaccgtgaactggcagtcgccgcgctccatgccctcctccgcctgaaccgaaagcacctgagtcctgagcgccgtcgtcgtcgtcgttgctcgccaaagccaacctggcagcgccggctagctgtgtttgtgtgtagtagtagc

SEQ ID NO: 2319 - DNA, 734 bp, Zea mays
  Clone ID: TF_LIB4172-013-Q1-L1-G12
gtccggaattcccgggtcgacccacgcgtccgcgtggaggaagctgctccctccgaagcagtaaaccagcatttctgtttgtttgtttgttttgcccttagttccgtcactccaaatctacccaccaaggaccctgaccctgtccactccaggcgaatcgagaccgtccggctgggtccccccaatttgggccgactttgcgcctccaaacaaccttagcatgatgtcttatctaaagcaaccgccttacgcagtcaatgggctgagtctgaccacttcgggtatggacttgctgcatccctccgtgggctaccccgggccctgggcttcttgtcctgcagccaccccccggaaacagcgaagggagaggacgacttttactagggcacagctcgacgttctggaagctctgtttgccaagacccggtacccagacatcttcatgagggaagaggtggcactgaaaatcaacttgccagaatccagggtgcaggtatggtttaagaatcgaagagctaagtgccgccaacagcagcagcagcagcagaatggaggtcagaacaaagtgaggcctgccaagaagaagagctctccagctcgggaagtgagttcagagagtggaacaagtggccagttcactcccccctctagtacctcagtcccaaccattgccagcagcagtgccccagtgtctatctggagtccagcgtccatctccccactgtctgacccct

SEQ ID NO: 2320 - DNA, 2940 bp, Zea mays
  Clone ID: TF_ZmC260_66
cgtaagcttggatcctctagagcggccggcccttttttttttttttttttttttttttttggtacaacattccatcttacaagaaaatcaacatcgatgaaaacaatgcatcttctgcatcctgtcatagcagcatcgtgctgccgttacttgtaattgagcccttcctgcaatgacagtaatcgctgcaaacaaatctgtaggatagctaatacctatagagcgacccagaaatcagaggaagccctcagttggcaaagaacgggaatcaatagcccccacaggaaagaaaagaaaaagaaaaaaaactgaatgacgtgcttgttagttgactggcatgatctaatgagagctagctgacttgcaatggtatatctatgttttttggctaccagtgtagagtcatacaagccaagtttcaaggcccatagacctgcaaatttcaggagcaatccaaattctggctcatgtctttgtctacaaacttcatcgtcccattttcttcttcaactcctgctgtattgctttttgcctgccctgccttctctgtaaggtcaggccacagattctgatccgcggcagaatcaacttttgacccggcttttaggggaactcttgctaaggttctttcttgatccgacttttgaagaaaccgcttttttagagatggtagcatccctgtttatgcatacattagattcttccatcacagtcccctctggttctttaggttgcatactaggtgtcactgggctattagtattttgggggctatgcttatctggactgatgcctttcctggaagaagctaaccttgcaaaatgacgcctattttcaaaccatctgttgacctgatgaaatgttagccctagttcttctgccaagctttctttaagagaacgactagggtatggttgtgtcttaaaatgttcatgtagcttctgactaatcactggaccaaaatgtcctttcctatctttgatattgctgccattagaagtaagatctccatgtttctcatctactgaaccatgaagagaatgcaagctttctttagtgttttgtgtagtcagttcattatggtgcgcaactctagagccttttcctgcaggagaaccaacttcaccctcttcattgctttttattggtgtgttcttcccagaccattcttcttcatcactagaatcagatgatgcttcaccatatgcctcatcatacagccttttgtagtccaaccgttcagcttgacgtctccttgatactggtaaaaccacactctggtctatttcagtctccatagggtcgtcagcagaacttgttgtgttagactgagcagtgttcttttccatatcacccaccctgacatcgggtaatggaggcgatgaaacttcatcatgtccaccagattttttaatctccttacaaaaatcatccgagtcagacgtgaaatcagactcatcagaatttgacttcttttcgacatctttatccgaatcaggacctgctggatcatagtcatcatcctctgaatcttcagaaggtaatcccaggtcatcaaccttctttttatctatcaaaggttccaaatcatcagaacaggttaagaagtcagagtcgtcagagtctgatcctccgtcatcatcctcttcctcttcagaagatccttcttccttactagccacatgctcttcaggcatattggggtcaaaatcattgtcatccgaatcatcagatggaagatcaaatgcttcatcttgcttagagccattggtcatagcagctgcctctggaaaaactttctcccaagggtcctcaatggagatgtcactgccctggagttcatttattagatctatacagtctaacttgcaatcacatgctgggcagagccatccttcatctcccatgggaatatcttcagtacgcagaggaggatttagacagttctggtggaaccctctgtcacaagctccatcacagagaatgatatcattacccaatgtagcatttttcgaaccacaagtagcacaaaagatatcttcacaagatatttctccttcagaatcaaataaagattcgtcaattttccccttggatagaagagaatcaatattttggaagacttcccgtattctcaatttgcatcgtaagatttctgatttggctcgttcaagctccttctcaggtcttatcttatccaaactttgatttttccagccttcactagcataagcttcaattaggctttgctcataattcattcggttcaaaatgtatctaacccgtttacgaatttgtgagaactcatctgtcgaatttttgtttgaggctctgctcctttttcttctcttggcagctggttgtcctggaggctgcacatgctcagtagatgttgtctttgaacctgatgtagagcgaagcaccctgacatcaatatcagatgacctcaatgtatatgcctgacctgttagtccttgggaaccctttttacctctgtttgctgcccttttatagtttttccttatccccaagttatttggcacagtttgagatgcagacagcaaaactggatgctcaagggtctcaggattctgactagagctcgtaccattttcaatctcaccattaccctcagccggaacgtgaactgtctttttttccatagtatatgatcaccaaaatttcatcaatttacagtagacagaaagcagtctcagcaaacctgtcttctgaggacaacaataaaaaagatctatgtggccaagccagattcaccagcaccttgaaatcgctgcgagctggcgacgcagcgccgcggagaagcttccaggcccggcggctctcctcctctcctgcgtggggcgagtgtggcggggaggaagagcgggaggcgtggccgcgtgagcgaagcggcgggcagaataaaaagtgtctatgcac

SEQ ID NO: 2321 - DNA, 1086 bp, Zea mays
  unsure (1)..(1086): unsure at all n locations
  Clone ID: TF_ZmC26143_1
ctcgagtttttaggtctaaactcgcaaataaaatttctggggtctaaacgtaaatttttatcgcaaaaggagctaaaaaaacaaaaaattcggacagaacgcgctatcggtttcactttcactcacagctattacacatgcgaaaatgcatacagtaatttttttttggcacgagatttggcggtcggtccccgcgggaagattgctctgctagttccacatccaccaccagctgacctggccggcgtcctcgtcgtcgccgtccgcgtggtgggtgtgttcggagaggaacgcggcggcggcttcttcgtcggcgtagtagctgcatccctcgtcgctgccggcgccgtcgtcgtcgtccgactggatgcctccagcgccgtgggttactggacccatcgtcccgcagccgtggtactggtcctggacctcggcgccggggaagtacgactcgacgctgctatcgacggccgcgccgccgatcctgccgttgtacaacagcgcgtccgccgcgtccaccaccgcgctcccgccgctgcccgtgctcagcctgtcctcggacttcacctgccgctcctcgaacgccgccgcctctgcctccggctccggctccggctccggttcctcgacgtcatcggccacggaagccctgacaacgcccaccgccggcaacgccgccgcggcgccgttggcgtcgccctccgtcgcctccttctctcgcagcttctcggtcaacgacaccacctgtgagcggaggcggtggttgtcctggagaagggcgtcgtggtccgcgcggagggcgtcgaaggaggccttgaggcggtcgaagtcgcgctccagctgcttggtcttccaccgggcgcgccggttctggaaccacacggccacctgccggggctgcaggcccagcttgcgcgccagctccgtcttgcgctccggctccagcttgttctcctcctcgaagctcctctccagcaggtgcacctgctccggcgtcaggcggcgcttcttctccggcagctngctcgtcgtagtactcctcctcgaggagctcgtcgggcgaggtgtagaagggcggacgctggg

SEQ ID NO: 2322 - DNA, 1339 bp, Zea mays
  Clone ID: TF_ZmC894_2
ggctgtaccggccaaaaaaaaaaaaacaccagaaaaaacaaataccggatagatattaaagcagctcgatcgtcgacttaaacggtggcacaaaaaggttcttccttttcgcagctccatcgtccaccaacctcctccgattcggccgtcgtagcgtatagccgaattgccccactccgggactctcgccagcttctccggccgactagaggctgtttccggcgagtgctcggctgatctcctccgcgcggctgaggagatcacgcggtccgctcgggggggctggggcgtgcatgatgggactttggttgattccgacgatggagactccggcgaggcttctgtggagcaccagcttcttccgccacaaaatcgccgacatgcttgcatcctcctcctgcttcttatagattcccacccctcgccgtcgtcgccggcagctagctcgctagcttctgtacatacgtcgacgccatatctagtcctcctcatccagtcccgataagtgataactaataattaaggcaaagaatctccaagcttgcttcgacgaccttgcattgatccatggagtccggacggctcatcttcaacgcgcccggctccggcgccgggcagatgctcttcctggactgcggcgcaggcggtggtcccggcggcggcttgttccatcgaggcgggagaccgatgcttggccttgaagaagggcgcggcgtaaaacggcccttctacacctcgcccgacgagctcctcgaggaggagtactacgacgagcagctgccggagaagaagcgccgcctgacgccggagcaggtgcacctgctggagaggagcttcgaggaggagaacaagctggagccggagcgcaagacggagctggcgcgcaagctgggcctgcagccccggcaggtggccgtgtggttccagaaccggcgcgcccggtggaagaccaagcagctggagcgcgacttcgaccgcctcaaggcctccttcgacgccctccgcgcggaccacgacgcccttctccaggacaaccaccgcctccgctcacaggtggtgtcgttgaccgagaagctgcgagagaaggaggcgacggagtggcgacgccagtgtcgcgccgcggcggcgttgccggcggtgggcgttgtcagggcttctcgcgtgaccgatgacgtcgagaaccccggcggcgttcgagcggcaggtgaagcgacaggctgagggcagcggcgggtcgtggtgaattctcgcacagctgttctgaaacagctagtgtagtgtattaatgagcggaacagtgccccccaccgttatataaatgactgttaaatgatcgtat

SEQ ID NO: 2323 - DNA, 1418 bp, Zea mays
  Clone ID: TF_ZmC11791_1
cctcgaggccggccgggaggacgcccaacagctaacactcctgtatccgagctactactcctagtcctagtacaggctacagaggcagagcgagcaaaactgcctgtacatagcaaccatcaacggcgaccgatccaagtagtgagcattagtggatctactacgtacatatatagaaggaaacagctgcagctctctctctcgctgtttcctgcgtgatctgcttgtgtagctactagctagctagcggagcggaacccatgggctgcgaggaggaagagaggctgctgttcccgtccttcgtctttcccgagagcttcgcggaggccgccacccccggctccggtggtgagcagaagaaggctcggcagcgtcggaggcgcaagccgcggccggcggagggcggcgagggcgcggacgagcaggccaggaagcggcggctgagcgacgaccaggcgcggttcctggagctcagcttcaggaaggagcgcaagctggagacgccccgcaaggtgcagctggccgccgagctgggcctcgacgccaagcaggtggccgtctggttccagaaccgccgcgcccgccacaagagcaagctcatggaggaggagttctccaagctccgcgccgcgcacgacgccgtcgtcctccacaactgccacctcgagaccgagctgctgaagatgaaggacaggctggcggaggtggaggaggagaagacgaagctcgtcgcggcggcggcggcggcggccggcggcgcagcgggcgcagggagcagcagcccgagctcgtcgtcgttctcgacggtgacgcaccacccggccgcggcgctgcaggtggggcagttcggggtggagccggaggaggccgccgacctcgcctacatgaccgagtacgcctacaacagctacatgaacatgatggacctcgcgcccgcctacttcggtggagtcgtctacgactacgaccacttcaactgatccacgagcatgcaggaggaggaggagggaagctacaagacgaaggaaggattgactggcctatcagctaggtactattttcgtgttaatggatggatggaccgatttgcagggcgcgcgtagcagtagtagcaatcaaggtcactagtatagtctgtcagtacgacgacgtcgatcagtcaatgtctcctgacgataattattaagtcgatctattcagtagtaacttgttaagccatgtagattagtagcagctggtaatctttgtaaatgtgtgtggattatcatgcaagtgcgcgcttatcatgatcgaaccagtggtctctgcgatgtaatattggggggaacgggggttaatcggaatcagaaaatgcatgcttgtagatgctttaattggtgaaaaaaaaaaaaaactcgagactagttctctcctcgtgc

SEQ ID NO: 2324 - DNA, 1172 bp, Zea mays
  Clone ID: TF_ZmC1389_8
cagccagctccattctatctactgctactctcagtactatatatctatccgcagttccatagttcttccagctgctctacacatacacatacacgctagctctagctctcacatcgattgagatcatcagagaggtggaagaagaagaagctaagataccagatcgaggaagagaggcggtgcggtggttggtagatgatggagagggtcgaggacttagggctcagcctcagcctcagctcgtccctcgcgtctcctcgcactcaccatgtcgccaccatgctgctacgcgctccaggtaaatatataatgcaatttgtctatatatatctctgtactaagtagctatgcttggatctatcagagagtaactgtgaatgaccatatcaattaagctgtagctagctctagtgtacatgtgtgagtcttatgtctgtctgactatatgtaagattagtagtcagcaactaaataccgtacgtgtatgagtatggctgtcactcggatgcatcacatataatgtatcagagaagaggttcctggagatgccactgctgctgcccgcgaagcggacgaccgaggtcaccggcgaggatggcctgcgaggcggcagcgatgaggaggacggcggctgcggcatcgacggctccaggaagaagctccggctgtccaaggaccagtccgcggtgctcgaggatagcttccgggagcacccaactctcaaccctcggcagaaggcagccttggcgcagcagctaggcctgcggccccgccaggtggaggtgtggttccagaacaggcgcgccaggtacgtacgtagcgcacatgcgatatgtcgccgcgcgctagctcgtgtgtgctgatgatcagcaagcatgcactgcatggccgggatttctctctcttttctgcccctcgctcgatcgcttcattcggtcgtgcaggacgaagctgaagcagacggaggtggactgcgagtacctgaagcgctgctgcgagacgctgacggaggagaaccggcggctgcagaaggaggtgcaggagctccgcgcgctcaagctcgtgtcgccgcacctctacatgcacatgtccccgcccaccaccctcaccatgtgcccctcctgcgagcgcgtctcctcgtccaacggcaactccgcagctgccacggcggc

SEQ ID NO: 2325 - DNA, 3212 bp, Zea mays
  Clone ID: TF_ZmC508_1
gatccgccctcgaggcgctctcttttccgcccatgccggaggtcttcttcctcccggagctctcgccatgcccgctctcccgcctcctgctagctagcctagcctagccagctgcgtgcgtgcgtgcatggggacgcggatcgtttcctgcatgcgatatcaccaacgcttcgctggaagaaggcgtcgtcacaggcagggattgaagaacgaaagctgatcgatggtagagagcaagagccagctagggtttgggagctgaggctaggaccgtacgtcgtacgtacgtgctgccattgttcatgacgccggcaaggcgcgtgccgccggcggcgatgatcggccggaatggcttcgcgtttgggtcctcgtccgcgctgtctttaagccaggctgacctcctagacagccatcagctgcagcaagcgttccagcagcagctcttcgatcagatcccgaccaccaccacagtggacgatagcagcgacaacctcatccatggccgctctgacacgctggtagatgagttcgagagcaagtcctgcagcgagaatcccgacggaacctctggtgacgatggcctggaggaagaccccaaccagcggccgaacaagaagaagcgataccaccgccacacccagcaccagatccaagagatggaggcgttcttcaaggagtgcccgcacccggacgacaagcagcggaaggagctgagccgggagctcggcctcgagccgctgcaggtcaagttttggttccagaacaagcgcacacagatgaagaaccagcacgagcggcacgagaacgcgcagctgcgcgcggagaacgacaagctgcgagccgagaacatgcggtacaaggaggcgctgggcacggcctcgtgccccagctgcggcggcccggctgccctcggcgagatgtccttcgacgagcaccacctccgcctcgagaacgctcgcctccgtgacgagatcgaccggatctcgggcatcgccgccaagcacgtgggaaagcccatggtctccttccccgtgctctggggatcggaggatatttatcagtggggagtcaagaacgcacctctcgacctcgccggcgcctacggcgtccagtcagctgctgcgggcctcggcgccgaccacctgttcggcgccggtgccggcgatctgctgaggagcgtgtcggccgggcagctcgacgcggacaagcccatgatcgtggagctggccgtcgcggccatggacgagctcctccggatggcgcggcctgacgcgctgcgtcgtgttgttgttgcttcggcagggacgtagcagcagctgctcgtggacgaggaggagtacgtccggacgttccccgctgggctcgggccgaggcagtacgggctccgtccggaggcttctcgggacagcgccgtcgtgatcatgacctgcgacagcctcatcgagatactcatggacgcgaaccgattcgcggcagtgttctcgagcatcgtgtcgagggcttccacgcacgaagtgctgtcaactggtgtggcagggagctacaatggtgcattacaagtgatgtcgatggagtttcaggtgccgtcgccgctggtgccgacgcgcgagagctacttcgtgaggtactgcaagaacaacccggacgggacatgggccgtcgtcgacgtctcgctcgacagcctccgccctagcccggtcatcaagtgccggcgcaggccgtcaggttgcctcatccaagagatgcccaatggctactcaaaggtgacctgggtggagcatgttgaggtcgacgacagatcagtgcacaacctctacaggcctttggtcaattcaggcctcgcgtttggcgcgaagaggtgggttggcacactggaccggcagtgcgagcggctcgccagcgccatggccagcaacatccccaacggcgacctcggtgtgatcacaagcatagaggggaggaagagcatgctgaagctggcggagaggatggtggcgagcttctgcggcggcgtgacggcgtctgcggcgcaccagtggacgacgctgtcgggaagcggcgcggaggacgtccgtgttatgaccaggaagagcgtggacgacccgggcaggccgccgggcatcgtcctcaatgctgccacctccttctggctgcccgtcccacccaagagggtcttcgacttcctccgcgatgagacctctcgcagcgagtgggacatcctctcgaacggtggtgctgtccaagaaatggctcacattgccaacggccgggaccatggcaactgtgtctccctccttcgtgtcaatagtgcaaactcgaaccagagcaacatgctgatcctccaggagagctgcaccgacgcctcgggctcgtacgtggtgtacgcgccggtggacgtggtggcgatgaacgtggtgctcaacggcggcgacccggactacgtggccctgctgccgtcgggcttcgccatcctccccgacggaccaccgccggccggtgcggctccgtcccacggagagggtttggacgctggcggcggcgggtccctcctgacggtggcgttccagatcttggtggactccgtccccaccgccaagctctccctcggctccgtagccaccgtgaacagcctcatcgcctgcaccgtcgagcgcatcaaggccgccgtctgcgcggaagccggcaacccgcagtagacatccatccatgcaatatcgaggagggagaaggggggcatgcagcaaggttttgtggaaatgttagtggggagtcaagaacgcacctcagactctccttgccgtgtggtgctcataaaggaaaaagaaggcgtcaccactatgcaaggggggatggttcgggtattgacttcgccgtccaatcaaactactacagaaaggacgtacgggtgctgtggagaagatggatcgatgctgtttctagggtttacttcctcattgttcgtggtgctgccgtagttcaggctaaggtgcctgtgcctgctcgcagtcgtagctagagaacacagagatttgttgcctctgatctttcctttttggatttgcaaagatttgtagatcagtcatttcgtaaaccgatgcgccttggctaaaacgcgcccgttcgttgttgttcgatcgtagctgccttttgctattcataaaacgatgcaatttcaaccactgagtttcttctagaaaaaaaaaaaaaaaaaa

SEQ ID NO: 2326 - DNA, 294 bp, Zea mays
  Clone ID: TF_ZmC62880_1
cgttcgtatccttctctcgtcttcctctccttctccaattcctctccgagagcttctagtctagcactccgttaacaatcgagtaatccacggcgcggcagtaatgtacttatatgtgctaccaggtagtgagcagacgaaggctcggcagctgagcgacgggcaggcccggaagcggcggctgagcgacgggcaggcgcggttcctggagctcagcttcgggaaggagcggaagctggagacgccccgcaaggtgcagctggccgccgagctgggcctcgacgccaagcaggt

SEQ ID NO: 2327 - DNA, 1595 bp, Zea mays
  Clone ID: TF_ZmC1455_2
actgcctccatcatcctcccagagagagagagagagcccgggagccgagccggttcaaccccatgaataccgctgctgcagagatcacggcctgcttctgcgtctgcagctccagcagtagcaacagcaggggctgcagtgcaaacgactgctagttcccctttccccgcatgatctctgccccttcccctaccttctcttgttcttgcttgcacgacccttttccttgtgcgctagctgccgcttcttcttcgtcttcctggagctccccgcatccacacatgccccaagaaccagacaataaaacaacacggaaccatcggagtctttttctactactatttccagcgattttattatatggatgtgtgcacaggtgcacgtagataggtagaatagaagggagattatagctagctagaggcagcgagcagctcggttgctgggacacgcgatcgagctacagcaaagaagactgcagggtggcgcggcgggcatggaggatctgtacagcatccacccggggatctcgcgccacggggcggcggcgactagcgaggcgtccggggtcgccggtggaccgggctcacccccgcccccgcccccgccggcggcggatctgacggagctggtcaaggcgcagatcgccgggcacccacgctacccgtccctcctctccgcctacatcgactgccgcaaggtgggcgcgccgtcggaggtggccacgctgctggaggagatcggccgggagaggtgcgccgccgcctccgccggcggggaggtcgtcggcatggaccccgagctcgacgagttcatggagacgtactgccggttgctggagcggtacaaggaggagctgtcgcggccgttggacgaggcggcgtccttcctcagcaacgtcaggacgcagctcagctccctctgcggcggcgccgcctcgctctccgatgaaaatgaaatggtggagtcctctgagaacgagccatgctcaggcgacacagacgcgacgacagacccagggcaggagcacagctcgcgcctggccgaccgcgagctcaaggagatgctgctgaagaagtacagcggctgcctgagccggctgcggtccgagttcctgaagaagaggaagaaagggaagctgcccaaggacgctcggtcggcgctgatggactggtggaacacgcactaccgctggccgtaccctacggaggaggataaggtgaggctggcggccatgactgggctggacccgaagcagatcaacaactggttcatcaaccagcggaagcggcattggaagccgtcggaggacatgcggttcgcgctcatggagggcggcgtcgccggatcctcctccgggacgacgctctacttcgacacgggcaccatcgggccgtgatcacctctgacgacaagccgtttcgaattgagggcaaattgttggttgatacggagatcagttcattttgtcggattcattgtgtatatgcatgggcgacaacgtgtattgtcgggtacacagtatgtagtggcatgtaaagacaccgtaacaatataacatgaattgtttaattgcctgttgcattttgatcaag

SEQ ID NO: 2328 - DNA, 1626 bp, Zea mays
  Clone ID: TF_ZmC1455_3
aattcggcacgagggcactgcctccatcatcctcccagagagagactgagagagagagagcgcagccgaggcagttcgcccgcatgtatcccgctgctgcagagatcacgcccagcttctgcgcctgcagctccagcagtagcagcaccaggggctgcagtggaaacgactgctagttccccttctccccatgatctctgccccttcccctaccttctcttgttcttgcttgcacgacccttttccttgtgcgctagctgccgcttcttcttcgtcttcctggagctccccgcatccacacatgccccaagaaccagacaataaaacaacacggaaccatcggagtctttttctactactatttccagcgatttgattatatggatgtgtgcacaggtgcacgtagataggtagaatagaagggagattatagctagctagaggcagcgagcagctcggttgctgggacacgcgatcgagctacagcaaagaagactgcagggtggcgcggcgggcatggaggatctgtacagcatccacccggggatctcgcgccacggggcggcggcgactagcgaggcgtccggggtcgccggtggaccgggctcacccccgcccccgcccccgccggcggcggatctgacggagctggtcaaggcgcagatcgccgggcacccacgctacccgtccctcctctccgcctacatcgactgccgcaaggtgggcgcgccgtcggaggtggccacgctgctggaggagatcggccgggagaggtgcgccgccgcctccgccggcggggaggtcgtcggcatggaccccgagctcgacgagttcatggagacgtactgccggttgctggagcggtacaaggaggagctgtcgcggccgttcgacgaggcggcgtccttcctcagcagcgtcaggacgcagctcagctccctctgcggcggcgccgcctcgctctccgatgaaatggtggagtcctctgaggacgagccatgctcaggcgacacagacgcgacgacagacccagggcaggagcacagctcgcgcctggccgaccgcgagctcaaggagatgctgctgaagaagtacagcggctgcctgagccggctgcggtccgagttcctgaagaagaggaagaaagggaagctgcccaaggacgctcggtcggcgctgatggactggtggaacacgcactaccgctggccgtaccctacggaggaggataaggtgaggctggcggccatgactgggctggacccgaagcagatcaacaactggttcatcaaccagcggaagcggcattggaagccgtcggaggacatgcggttcgcgctcatggagggcggcgtctccggatcctcctccgggacgacgctctacttcgacacgggcaccatcgggccgtgatcgatgcgatagatacctctgacgaattgggggcaaattgttggttgatactgagattagttacatgaagcaatatccgctgtcattttgtcggattcattgtgtatatgcatgggcgacaacgtgtattgtcgggtacacagtatgtagtggcatgtaaagacaccgtaacaatataacatgaattgttcaattgcctgttgcattttgatc

SEQ ID NO: 2329 - DNA, 1662 bp, Zea mays
  Clone ID: TF_ZmC1455_4
cattgggtacctcgaggccggccgggattccttccctctttcccgatctcaattcggcacgagggcactgcctccatcatcctcccagagagagactgagagagagagagcgcagccgaggcagttcgcccgcatgtatcccgctgctgcagagatcacgcccagcttctgcgcctgcagctccagcagtagcagcaccaggggctgcagtggaaacggccgctgctagttcccgttctccccatgatctctgccctttcccctactttttcttgttcttgcttgccccttttccttctgcgctagctgccgcttcttcgccttcctggagcttcccgcatccacacatacctctaaagaaccagacaaataaacgacacagaaccgtcggagtcgtcttctactactgtctccagtatatgggtttgttgtgcacaggtgcgcgtagataggtagaatagaaggcagattatcgctcgaggcagcagcttggttgctggggcacgcgatcgagctccaggcaagaagatttgcaggaaggcgcggcaggcatggaggatctgtacagcatccacccggggatctcacgcgccgggggcgcggcgactagcgaggcgtccggggtcgccggtggaccgggctcacccccgcccccgcccccgccggcggcggatctgacggagctggtcaaggcgcagatcgccgggcacccacgctacccgtccctcctctccgcctacatcgactgccgcaaggtgggcgcgccgtcggaggtggccacgctgctggaggagatcggccgggagaggtgcgccgccgcctccgccggcggggaggtcgtcggcatggaccccgagctcgacgagttcatggagacgtactgccggttgctggagcggtacaaggaggagctgtcgcggccgttggacgaggcggcgtccttcctcagcaacgtcaggacgcagctcagctccctctgcggcggcgccgcctcgctctccgatgaaatggtggagtcctctgaggacgagccatgctcaggcgacacagatgcgacgacagacccagggcaggagcacagctcgcgcctggccgaccgcgagctcaaggagatgctgctgaagaagtacagcggctgcctgagccggctgcggtccgagttcctgaagaagaggaagaaagggaagctgcccaaggacgctcggtcggcgctgatggactggtggaacacgcactaccgctggccgtaccctacggaggaggataaggtgaggctggcggccatgactgggctggacccgaagcagatcaacaactggttcatcaaccagcggaagcggcattggaagccgtcggaggacatgcggttcgcgctcatggagggcggcgtcgccggatcctcctccgggacgacgctctacttcgacacgggcaccatcgggccgtgatcacctctgatgacaagccgtttcgaattgagggcaaattgttggttgatacggagattagttacatgaagcaatatccgctgtcattttgtcggattcattgtgtatatgcatgggcgacaacgtgtattgtcgggtacacagtatgtagtggcatgtaaagacaccgtaacaatataacatgaattgtttaattgcctgttgcattttgatc

SEQ ID NO: 2330 - DNA, 1478 bp, Zea mays
  Clone ID: TF_ZmC1389_6
cattgggtacctcgaggcccggggggaccatttcattccttccttccttcccctcgctcgccttcctggcttcttcctccccagcacgcacacgcacacgcacacacccagccttttggctgccctgccggccgtcagagagagaaaccgagctctaactaactgaagtggcggccacatagctagctactcttctgatcctgagcgcgcacgcgccatggctcaggaggacgtgcacctggacgacgcaggcctcgcgctgggcctgtccctcggcagcggcagcggcggcgcctctggtgcggcgcgccacggtggtatcagccgccggctgagcagggaggtgcggctgccgtcgccgcacccgctggagccgtcgctgacgctgagcttgccggacgaagcgaccgcgaccgggtccggcgggggcggggccgcgcacagcgtgtcgtcgctgtcagtggcgggcgtgaagagggagcgcgtggatgacgccgagggagagcgggcgtcgtctacggccgcgttgccgcgggcctgcgccggcgccgaggacgacgacgacgacgggagcacgcggaagaagctgaggctgaccaaggagcagtccgcgctcctggaggaccgcttcaaggagcacagcaccctgaacccgaagcagaaagtcgcgttggcgaagcaactgaagctgaggccacggcaggtggaggtgtggttccaaaacaggcgagcaaggacgaagctgaagcagacggaggtggactgcgagctgctgaagcgctgctgcgagtcgctgacggaggagaaccggcggctgcagcgggagctgcaggagctccgcgcgctcaagttcgccccacacccacaggcgccgccgtcgtccgcgacgcaggccggcgcggcggcgggcgtcgttccggcgccgccgccgccgttgtacatgcagatgcagatgccggccgccgccacgctgagcctgtgcccgtcctgcgaccgcctggccgggcccggcgccgccgccaaggccgagcccaggcccaaggcagccgccacccaccacttcttcaaccccttcacccactccgccgcctgctgatgatgagggcagggcagcacgcagccacgcaacgcagcggcagtaaacagagcaccgccccgtgcagataataccacgtctgtacgtgtcacaagtaattaacaaacgtatggtcctcctctctatctattttcttgatccggagggctaagttagttgttttcgtgtcgatcccaaatgcatcagctaatccatcaatcataggcttgatagagtagtcgaaaaaaatagccgtagctttcctagcactccctccgccccccccccccccccccatccatgtatatttctgttgtaattctgtccctctctcgcggtctacttgctcccttttcgattggagtacgtagctcctttgcctttttgtttttggttttttgtt

SEQ ID NO: 2331 - DNA, 830 bp, Zea mays
  Clone ID: TF_ZmC24942_3
accggtcacggccttcccgggcttaaaccccactggtgccttgccctgtggtcctcgctccttgatccactcctcctgcagctcctcctcgcacagcacgtctcctctccccggcctccctctctttctctgtccttggtcctctccccagcagcctccctctctctttctctatccctggtcctctccagataacctgacacagtggtcacgcttgacaaggagagagaaaggcgttgcagcagctgatccgcgcccgcccggccgggagcgcaggcgaaggatggaacaatacgacgggctctttcctcccgcctacgtggactcctcctcatccctcctcctggtgcccaacgccaacggcactgcgcaggaggagagaccgagagcgcggcgcaggaggcgtcgagcagcgaggtgcggcggcggcggtggcgagctggacggaggaggggaccacaagaagcggcggctgaccgacgagcaggtagagatgctggagctgagcttccgggaggagcggaagctggagaccggccggaaggtgcacctggccgccgagctcgggctcgacctgctctatgttcctgactatgcctacgctgacagcagcgtggtcgagtggtttagcctgtatggactgatgtaatcgatggtatggtatgccatcgtcgtcggcagattaattctagctagctactcatcgtagcgtgtcattgctgtgctgaattgctgatttctatgtgcgccctcttaatcatatgtacataaatcaagctatcaattactggcaaaatatagccagctagcagcaactagtactttaattc

SEQ ID NO: 2332 - DNA, 1278 bp, Zea mays
  Clone ID: TF_ZmC1389_14
ctctcatgtctttaaaccctcgctctccccccccacttcttttatcccttcatcgtctatcagccagctccattctatctactgctactctcagtactatatatctatccgcagttccatagttcttccagctgctctacacatacacatacacggtagctctagctctcacatcgatgtgagatcatcagagaggtggaagaagaagaagctaagataccagatcgaggaagagaggcggcgcggtggttggtagatgatggagagggtcgaggacttagggctcagcctcagactcagctcgtccctcgcgtttcctcgcactcagcatgtcgccaccatgctgctacgcgctccagagaagaggttcctggagatgccactgctgctgcccgcgaagcggacgaccgaggtcaccggcgaggatggcctgcgaggcggcagcgatgaggaggacggcggctgcggcatcgacggctccaggaagaagctccggctggccaaggaccagtccgcggtgctcgaggatagcttccgggagcacccaactctcaatcagaagcagaaggcggcgctggcgaagcagctgaacctgaagccgcgtcaggtggaggtgtggttccagaaccgcagagccaggtgaacaaagcagcgcccttgaagcagcacacgcatgccatttatactgactcatcctccgtggctaatactagtctaataataatattatcgttcaggacgaagctgaagcagacggaggtggactgcgagttcctgaagcgctgctgcgagacgctgacggaggagaaccggcggctgcagcgggaggtggcggagctgcgcgtgctcaagctcgtggcgccgcaccactacgcgcgcatgccgccgcccaccacgctcaccatgtgcccctcctgcgagcgcctcgcctccgcgtccgcgtccgccgaccaggcgggccgtgcagggccctgctggggccctctccccgtgttcgtcgacggcccagcccggaggccgtgatccacgaccacgatatggcatgagatggatgcgcttgctaatcgctaccgctagctaagtagctagtgctaattagggctggatcttctttttttctttgtttggttcttattatactcgcaggctattacagcttagtagtgtttattagtccgatatgataaaaatcttcgttgtttggcagtgttttatttgctgaaaaatagataacgatgtcttatgtctttgtactcataagtgatgcaaaattgtctt

SEQ ID NO: 2333 - DNA, 2129 bp, Zea mays
  unsure (1)..(2129): unsure at all n locations
  Clone ID: TF_ZmC3383_1
agggcacccttcttgtcgcgccggctggccccgttgccggcgcagcggcggcgaaccatggcggggggccctgccgccgcactcccctcacggtcgtggcgctcgggcccggcgctttagtggatgccgcgccgtcccgcgggatctttggcgttgagagcaaacccagaaaggaaaaaggaaaaaaagaaaacagagagaggggagagtgggagacggtcggagacagaggcctcactcctccacactctcagtcgtcttccagtcccagcgctttcttggatcgcgaggaaaccactcggggagtttgcagttgcagagaactgtatcggccgaagtggttgcacggtgtgttggccttggccatgcgccacggcagggaacagagacgagcagcagggaggcagcaatggaggcgctcattgaccctgctctcgctgtaaagatagtcccgcggtgccctccgaattccacttgatccaactctcgacatgaagcggccacgcggcgctactccctccctgtctgcgatgcccaatcatcaggaagatgacggctacggcgtggtcgggatggaggcggacgtggacgtggacgtggacgaggagatgatggcgtgcggcggcggcggggagaagaagcggcgcctgagctccgagcaggtgcgcgcgctggagcggagcttcgaggtggagaacaagctggagccggagcgcaaggcgcggctggcgcgcgacctcggcctgcagccgcgccaggtcgccgtctggttccagaaccgccgcgcccgctggaagaccaagcagctggagcgcgactactccgcgctccgccagtcctacgacgcgctgcggcacgaccacgacgcgctgcgccgcgacaaggacgccctcctcgccgagatcaaggagctcaaggcgaagctcggggacgacgaggcagcggcgagcttcacgtcggtcaaggcggagccggcggcctcggacgggccggcccccgcgggggtggggtcgtccgagagtgactccagcgcggtgctgaacgacgcggacccgcccgtggcggaggcgccggcgccggcgcccgaggtgcagggcacccttcttgtcgcgccggctggccccgttgccggcgcagcggcggcgaaccatggcggggtgttcttccacgggagtttcctgaaggtggaggaggacgagacgggccttttagacgacgacgggccgtgcggcgggttcttcgccgtggagcagccgccggcgatggcgtggtggaacgagcccgcggaacactggaactgaaccgaggtggacgcggcagtgcagcgtagtagaatcgggatctcggacgagcggtggaggaataaccgaatagaggaattcggagcgataaagaaggggcttttctgcaaattttgtaaaacggggttttacctagccctactttttgtcaattctcgagcgtattagcagtagacagtagtagtagtctgggtcggaacccagtcaagctcagcgcctgggttgcgtttggactccagtgcagaattgcgtagaggatttagaggaagagcggagctgagctgagcgaggcaggagtaaaggacaacctgtatgtcactgttagtgggcccagtgccacgtgaaagtcaggcactgttggtgcccattgacggccggacttgccagcgacgcggatgggcgacgtgaacgtgtctggccgagcagtgcgctcgctccctccccccaatgggccatggcctcttccgcgaaagcgtgctcccctgtaagtatctgatttggatgctagccaaggctgctggatgattacttcgattatctaaaaaatctgatttggatgctcgccgcaaaaacaatggctcgctgcggagggaatcggcagcggtgccgtcagattgtggaatgtgttcaacggttatctgttggattaatgtggctgtggccagattgtaccccgctgattagtcaatgccattggctcaagaaactaaatcgccgccgccgaggagaacaaggtgcatgacactttctgctcgacgccgtgtgaggcccggcagggnatggacctggtgttgcgacaggagtcccttcgacctctcacagcactcc

SEQ ID NO: 2334 - DNA, 1936 bp, Zea mays
  unsure (1)..(1936): unsure at all n locations
  Clone ID: TF_ZmC3383_2
cattgggtacctcgaggccgggcgggattgcgggaactgaaagcaaaccaaaaaagaaagagagggggagagacacagaggcctcactccacacactgtcttgtctctcagtcccagagctttcttggatcgcgaggaatccactggaaattttgcaattgtagtagagaactgtatcgtccgacgaaggtgcatggtgttggccatgggtcacggcagggaacagagacgagcaggtcggcgctctccccccagctcattgatcctgtcctcgctataaggtagtcctgcggtggcctccgaatttcactcgatcgaacacgacatgaagcggccacgcggcgccagtccccctctggctgcgatgaccaatccgaacgatgatggttacggcgtggtcgggatggaggcggacgcagacgcggacgcggacgaggagatgatggcgtgcggcggcggcggggagaagaagcggcgcctgagctccgagcaggtgcgcgcgctggagcggagcttcgaggtggagaacaagctggagccggagcgcaaggcgcggctggcgcgcgacctcggcctgcagccgcgccaggtcgccgtctggttccagaaccgccgcgcccgctggaagaccaagcagctggagcgcgactactccgcgctccgccagtcctacgacgcgctgcggcacgaccacgacgcgctgcgccgcgacaaggacgccctcctcgccgagatcaaggagctcaaggcgaagctcggggacgaggaggcagcggcgagcttcacgtcggtcaaggcggagccggcggcctcggacgggcctccccccgtaggggtggggtcgtccgagagtgactccagcgcggtgctgaacgacgcggacccgcccgtggcggaggcgccggtgccggaggtacggggtactcttcttgacgcgcccggcgccgtggcggcgaaccatggcggcgtgttcttccacgggagtttcctgaaggtggaggaggacgagacggggctcctggacgacgatgagccctgcggcgggttcttctccgtggagcagccgccgccgatggcgtggtggaccgagcccacggaacactggaactgaaccgaggcggaggtagatgcagcgcagcgtagactcgggatctgggccgagcggtggaggaataaagaattcggagcgagaggcgggggcttttctgcaaattttgtaaaatggagttttacgtagccctctttcgtcaattctcgcgcgaatattttagcagtagcagtagtctttaggaacccagtcgagatcagtacctggttgcgtttggactcgaatgcaaaaacaaaaaaaatgcaagaaaaagagatgagaccaaacactgatgcagaaaggggagagagggacagtgggaagaggagtgtagaggaagagctgagcgaggtagggagtaaaggacaagctgtatgtcactgttagtgggcccagggccacgtgaaagtcaggcattgttggcgcccaattgaccgccggacttgtcagtgatgcggatcggcgacgtgaacgtgtctggccgtgcgctcccccaatggcctcttccgcggaagcgtggctctggctccttcgtcgacctgtcgtgcgtctctgtatctaattttggatgctcgccgacgccgctagatagctgtttggatgccgtgccgtgagaaatggcgatcgtttttgtgccctcttgctcgagcagatgcttgtccttgttataaaaaaaaaccctgcgaggtgttatataggctagtgtggggttctatctttttctccaataaatatgtagccctttataataactaatgaataaaagataacgcaagaaaaagattttctacctataaattnnnnnnnnnnnnnnnnnnnnnnnnnnnnnnnnnnnnnnggtctagagcg

SEQ ID NO: 2335 - DNA, 1961 bp, Zea mays
  unsure (1)..(1961): unsure at all n locations
  Clone ID: TF_ZmC3383_3
gggagagacacagaggcctcactccacacactgtcttgtctctcagtcccagagctttcttggatcgcgaggaatccactggaaattttgcaattgtagtagagaactgtatcgtccgacgaaggtgcatggtgttggccatgggtcacggcagggaacagagacgagcaggtcggcgctctccccccagctcattgatcctgtcctcgctataaggtagtcctgcggtggcctccgaatttcactcgatcgaacacgacatgaagcggccacgcggcgccagcccccctctggctgcgatgaccaatccgaacggtaacttccagcttctcctgttttgtttttcctgcgggaatccattgtatttgggggnggtgatgtcgtggcggaacgcgtgcggaggattgagtcctcttgcgtgttcccagatgatggttacggcgtggtcgggatggaggcggacgcggacgcggacgcggacgaggagatgatggcgtgcggcggcggcggggagaagaagcggcgcctgagctccgagcaggtgcgcgcgctggagcggagcttcgaggtggagaacaagctggagccggagcgcaaggcgcggctggcgcgcgacctcggcctgcagccgcgccaggtcgccgtctggttccagaaccgccgcgcccgctggaagaccaagcagctggagcgcgactactccgcgctccgncagtcctacgacgcgctgcggcacgaccacgacgcgctgcgccgcgacaaggacgccctcctcgccgaggtagttgtcgacgttatgccgttatacaagctgctggacgagcacgatgacgcgcgcaatggctgaccgccggcctgaccccctcggttggctgcctgaatttctcctagatcaaggagctcaaggcgaagctcggggacgaggaggcagcggcgagcttcacgtcggtcaaggcggagccggcggcctcggacgggcctccccccgtaggggtggggtcgtccgagagtgactccagcgcggtgctgaacgacgcggacccgcccgtggcggaggcgccggtgccggaggtaccggggtactcttcttgacgcgcctcggcgcccgtggcggcgaaccatggcggcgtgttcttccacgggagtttcctgaaggtggaggaggacgagacggggctcctggacgacgatgagccctgcggcgggttcttctccgtggagcagccgccgccgatggcgtggtggaccgagcccacggaacactggaactgaaccgaggcggaggtagatgcaggcatgcagcgcagcgtagactcgggatctgggccgagcggtggaggaataaagaattcggagcgagaggcgggggcttttctgcaaattttgtaaaatggagttttacgtagccctctttcgtcaaaaaaaaaaaattatatacgccgccatattcgcaagccaccgcaaccgaagccggccttcgccgccgcccccgcccccgccgcctctgcgatccccgcaaggtcgcaaacatgtctaccgtgctccagcgcccgacccccggcacggtccagtgcttcggccgcaagaagacggctgtggccgtcgcctacaccaagccggggcgcgggctgatcaaggtgaacggcgtcccgattgagctcatcaggccgcaactgctccgcctcagcacatacaaaccatcctgctggcagcgtgcaggttcaccaccaggggattgtttttataacaaggacaagcatctgctcgagcaagagggcacaaaaacgatcgccttttctcacggcacggcatccaaacagctttctagctcgagcagatgcttgtccttgttataaaaaaaaaccctgcgaggtgttatataggctagtgtggggttctatctttttctccaataaatatgtagccctttataataactaatgaataaaagataacgccag

SEQ ID NO: 2336 - DNA, 652 bp, Zea mays
  unsure (1)..(652): unsure at all n locations
  Clone ID: TF_LIB3689-215-Q6-K6-D4
ctctagcttgatttgttgattccatggatcttggtacttgggcgttccattcgatcttggcttggaggaattcttgtgtactgattggggttgccatgtgggagtgacgaaggcgggagaccgatgcttggccttgaagaagggcgcggcgtaaaacggccctttttcacctcgcccgacgagctcctcgaggaagagtactacgacgagcagctgccggagaagaagcgccgcctcaccccagagcaggtgcttctgctggagaggagcttcgaggaggagaacaagctggagccggagcgcaagacggagctggcgcgcaagctgggcctgcagcctcgccaggtggccgtctggttccagaaccgccgcgcccggtggaagaccaagcagctcgagcgcgacttcgaccgcctcaaggcctccttcgacgctctccgagcggaccacgacgccctcctccaggacaacaaccgcctccgctcacaggttgtgtcgttgaccgagaagctgcaagagaaggaggatgcgacggagggcggcgccaccgctgacaccgccgcgccggcggtggacgtcgaggcttccttggccgacgacgtcgaggagccagcagagcctgcggcgacgttcgaagtgctgcnnagagtga

SEQ ID NO: 2337 - DNA, 2575 bp, Zea mays
  Clone ID: TF_ZmC894_1
ataaaataaactgatttatgtaaaatctttttattgttcaaacagacactcaataaataaataaatgacaaattaagcttacaggaagagtatatatgtatatgtatatgaatgtaatccacctattgcgccccgccattgtcttgtctcgcatgcgtccttgaacacaactttctccgtaggatgaatcagagaacgaatacaagtcggcagaaaagaacacggttgtacattaaacaaccttgcaatccaagctggtctcgttatatatacagcggtgatggtcccttgacggaaggtcctgagtgagatctgaccatgcctttgagacttcatgtgggcaacgtttctctcctctcagcgcaaaaagatagatcctctgctctaccggcctaccacgttcgtctcccgcgccggccacccaccgctgccaccgagggtaaaaccgtcaacccgccttgccccggcgcctataagaagttccctctccatttcgtcagccgggagttccagagccctccagagcaaaaaaaatatattatcgaatactaaagcattttcctcgtcgatagaatatagaattttaaaaagggagcgaaataggttttttcctttttgcagctccgtcgtccaccaacctcctccgatccggccgccgcagcgtagccgaattgtcccctcgctagcttctccggccggctagaggctgtttcaggcggcctcgatctcctccgcgcggctgaggaaggagatcacgcggttgctcaggggctggggcgtgcatgatgggattttggttgattccgatggagactccggcgaggcttctgtggagcacgagcttcttccgccacaagatcgccgccatgctcgcctcctcctcctgcttcttatagatcccaccccctcgccgtcgtcgtcggcacggcagctagctcgctagcttctgtacataggtcgacgcgccatatagatactagtctcggattaagcgataattaaggcaaagaatctccaagtttgcttcgctcttgcattgaaccatggagtctggacggctcatcttcaacgcgccgggctctggcgccgggcagatgctcttcctcgactgcggcgcaggcggcggtcccggcggcggcttgttccatcgaggcgggagaccgatgcttggccttgaagaagggcgcggcgtaaaacggcccttcttcacctcgcccgacgagctcctcgaggaagagtactacgacgagcagctgccggagaagaagcgccgcctcaccccagagcaggtgcttctgctggagaggagcttcgaggaggagaacaagctggagccggagcgcaagacggagctggcgcgcaagctgggcctgcagcctcgccaggtggccgtctggttccagaaccgccgcgcccggtggaagaccaagcagctcgagcgcgacttcgaccgcctcaaggcctccttcgacgctctccgagcggaccacgacgccctcctccaggacaacaaccgcctccgctcacaggttgtgtcgttgaccgagaagctgcaagagaaggaggatgcgacggagggcggcgccaccgctgacaccgccgcgccggcggtggacgtcgaggcttccctggccgacgacgtcgaggagccagcagagcctgcggcgacgttcgaggtgctgcaggaggtgaagtccgaggacaggctgagcaccggcagcggcgggagcgcggtggtggacgcggacgcgctgctgtacggcaggttcgccgcggcagttgatagcagcgtggagtcgtacttccccggcggcgaggaccactaccacgactgcgggacgatgggccccgtgaatcatggcgccggaggaggcatccagtcggacgacgacggcgccggcagcgacgaggggtgcagctactacgccgacgaagccgccgccgccgccgccgcgttcttcgccggacacgccacccaccaccacgcggacgaggacgaggacgccggccagatcagctggtggatgtggaactagacgttcgatcttcccacgccgatcgatcgaccgtcttcgaatcctgtgtcaacaagaagaaaaaagaatcgtgccgtgatttttctttgcgcaacgctgctgtaagcctgtaatggtgaatttctagctatggttatgccgttatgaaggaagaaagtgtatgcatgcatggtagggtaaagagtgggtaattaatatcgttgatcatcccagtcactcgtggtgttccagaagatcaatggagttgggggagaaataagtgcgcatagaggcaagtactactctttttatggcacagtgcctatgtcaaatcagggtgttattaccagttggttttttttaaaaaaaaatactgtactattacgcattttcgcacatgatttagctgtgagttctgcacagtgaaactgaaacagctagtgtagtgtattaatgaatggaacagtgccccccaccgaaaaaaaaaaaaaaaaaaaaaaaaaaaaaaaaaaaaaaaaaaaaaaaaaaaaaaaaaaaaaagacttgaagaaagcttattg

SEQ ID NO: 2338 - DNA, 1189 bp, Zea mays
  unsure (1)..(1189): unsure at all n locations
  Clone ID: TF_ZmC894_5
ggccggccgggggagtgatttctgaccacgcctnttgagacttcaagtgggcaacgtttctcgcctctcagcgcaaaaagatagatcctctgctctaccggcctaccacgttcgtctcccgcgccggccacccaccgctgccaccgaggtctggacggctcatcttcaacgcgccgggctctggcgccgggcagatgctcttcctcgactgcggcgcaggcggcggtcccggcggcggcttgttccatcgaggcgggagaccgatgcttggccttgaagaagggcgcggcgtaaaacggcccttcttcacctcgcccgacgagctcctcgaggaagagtactacgacgagcagctgccggagaagaagcgccgcctcaccccagagcaggtgcttctgctggagaggagcttcgaggaggagaacaagctggagccggagcgcaagacggagctggcgcgcaagctgggcctgcagcctcgccaggtggccgtctggttccagaaccgccgcgcccggtggaagaccaagcagctcgagcgcgacttcgaccgcctcaaggcctccttcgacgctctccgagcggaccacgacgccctcctccaggacaacaaccgcctccgctcacaggttgtttcatttgtgtcgttgaccgagaagctgcaagagaaggaggatgcgacggagggcggcgccaccgctgacaccgccgcgccggcggtggacgtcgaggcttccctggccgacgacgtcgaggagccagcagagcctgcggcgacgttcgaggtgctgcaggaggtgaagtccgaggacaggctgagcaccggcagcggcgggagcgcggtggtggacgcggacgcgctgctgtacggcaggttcgccgcggcagttgatagcagcgtggagtcgtactttcccggcggcgaggaccactaccacgactgcgggacgatgggccccgtgaatcatggcgccggaggaggcatccagtcggacgacgacggcgccggcagcgacgaggggtgcagctactacgccgacgaagccgccgccgccgccgccgcgttcttcgtcggacacgccacccaccaccacgcggacgaggacgaggacgccggccagatcagctggtggatgtggaactagacgttcgatcttcccacgccgatcgatcgaacggtcttcgaatc

SEQ ID NO: 2339 - DNA, 1681 bp, Zea mays
  Clone ID: TF_ZmC1455_6
ctgcctccatcatcctcccagagagagagagagagcgcagccgaggcagttcgcccgcatgtatcccgctgctgcagagatcacgcccagcttctgcgcctgcagctccagcagtagcagcaccaggggctgcagtggaaacggccgctgcttccgcccgttctccccatgatctctgccctttcccctactttttcttgttcttgcttgccccttttccttctgcgctagctgccgcttcttcgccttcctggagcttcccgcatccacacatacctctaaagaaccagacaaataaacgacacagaaccgtcggagtcgtcttctactactgtctccagtatatgggtttgttgtgcacaggtgcgcgtagataggtagaaccgtagaaggcagattatcgctcgaggcagcagcttggttgctggggcacgcgatcgagctccaggcaagaagattattgcaggaaggcgcggcaggcatggaggatctgtacagcatccacccggggatctcacgcgccgggggcgccgccacggcggccagcgaggtgtccggggtcgccggcggaccaggctcgccccctcccccgccgtcgcagccccctccgccgccgccggcggatctgacggagctggtcaaggcgcagatcgccgggcacccgcgctacccttccctcctctccgcctacatcgagtgccgcaaggtgggcgcgccgccggaggtggccacgctgctggaggagatcggccgggagaggtgcgccgccgcctctgccggcggggaggtcggcctagaccccgagctcgacgagttcatggaggcgtactgccgggtgctggagcggtataaggaggagctgtcgcggccattcgacgaggcagcgtccttcctcagcagcgtccggacgcagctcagctccctctgcggcgccgccgcctcgctctcagcaatatattatacgactgctaatcccgaaacgacaagttcattcaacatcgcattagtttatgaaatggtagggtcgtcggaggaggacgaagcatgctcgggaggagacacggaggcgacggagccggggcagcaggagcacagctcccgcctggcggaccatgagctgaaggagatgctgctgaagaagtatagcgggtgcctgagccggctgcggtccgagttcctgaagaagaggaagaaagggaagctgcccaaggacgcgcggtcggcgctcatggactggtggaacacgcactaccgctggccgtaccctacggaggaggacaaggtgaggctggcggcggcgactgggctggacccgaagcagatcaacaactggttcatcaaccagcggaagcggcactggaagccgtccgaggacatgcggttcgcgctcatggagggcgtcaccggcggcgggccctcgtccgggacaacgctctacttcgacacgggcaccatcgggccgtgaccaccacactaccagcttgggcaacgcaaagtgcatacgtttttctttgtgtatatgggcgacaacgtgtcggtaggcacactcagcatactggagctgctgtccagttcagttcagtgcatatggcctcgtaaaggactctgtaccatgatgatgtaatgctaactccaacccttctcacaaatttctatttttcttattttctattttatattt

SEQ ID NO: 2340 - DNA, 485 bp, Zea mays
  Clone ID: TF_ZmC13584_2
ttccgactagctccttccaccgacgacactccccacgcatcgacaaaatggaggtaccgcgcctcccccagggtgcccttccatccatggcgttgccgcggccgtccccgcaatcaactcccagatctcgtgctcacctccccgcaatcaaggtcgtcacgcccgatgaggatggccgcgggtcgccgcacggcggtccgggccccagcgatagctccggcgcaggcgcgaggaagaagctccggctcaccaatgagcagtcgacgctgctcgaggacaccttccgcgcccacaacatactctccaacgcgcagaagcaggagctcggacggcaggtggatctcagcgccaggcaggtggaagtgtggttccagaacacacatgttcagataacacacatgttcatgctcatgctgaccccacacagaacaatcagcaatgttatgctatatattcatttcttggacatgggcgggatcttctac

SEQ ID NO: 2341 - DNA, 1547 bp, Zea mays
  unsure (1)..(1547): unsure at all n locations
  Clone ID: TF_ZmC11178_1
cattgggggtcgcgagacccgtcggcccacgcgtccgagcttctccttctctctctctccttcctggaccattctctctatctcctttctctctctacacatactcagacgagcagaagcagctagggacaccataggcaaactacttcagcaagaaattaaactatctcctacgcaagatcagaagaaactgtgtatggagcaagaagaggttggcctcgccctgggcctctccctcggctccggccaccaccaccaggagctcaagccccaacatccgtcgcatccgtgtgcggcgttgttggagccttctctgtcgctcagcggcccggcgaccaaggatgatggcccgaccgcaccggtgaggaggttcgctgccgtgaagagggagctgcagacgatggaggggaacgacgacgaggccaccggcagggtacttgtctactcagtggcgtcgtcggcggtggttactgccgacgacgacgaagggtgcaacagcagccggaagaagctgaggctgtccaaggagcagtcggcgctgctggaggaccacttcaaggagcacagcaccctcaaccctaagcagaaggctgctttggccagacaactgaacctgagcccaaggcaagtggaggtttggttccaaaacagaagagccagaaccaagctgaagcagacagaagtggactgcgagattctcaagcgctgctgcgagacgttaacagaggagaaccggcgtctccaccgcgagctccagcagctccgcgccctcagccacccgcacccccacccggctgcctttttcatgcccaccgccgctgccgctgcgctctccatctgcccctcctgccagcgccttgttgccaccggagcatctgccgccgccgcaaccaccgccggtgcagataataagcctaaggcgggcggccccggcggccgagcgccacacgtgttcagccctttcaccaattctgccgcctgctgaacacgcatacatatgtatatacatgcatgcgcacacatacatatatacgtatttttctttagcgctagccacgctctatcattcatcgatggtcatctactagctagatagtaattggttcactagatggcatatattcctgtcccctccccccttaattcattagctttgttttttcacaagctaattaatgaattgatagcggcgtcgcgtgaggacgatggagcaccacgcatgcatatgattctagtagcaaaaacaagagatatatgtcttgtttaatttggtgttgcttctgcttagtatagtgcccactgctggtgctgtagctgtagctttaattagtaggtgttcctgatggatttcctcttgtattagttaactgtcagtcagggaatagtaatgatgacagcatgacaccacatacacatcccagtttatttggatgtggatccatgtatatatgcacatgccacatgacggatctgtttcaacaattaaatactatattgatttgtcttcagaagttttgcatatccccaaccccacaccccggnggtnn

SEQ ID NO: 2342 - DNA, 1520 bp, Zea mays
  Clone ID: TF_ZmC1389_2
gtctcggcctgggcgtggcggcattccagcccagcttctgccacccggccggcaatgccgcggcggagcgggaggccagcccgaccgcggcggacgagagggagcggaggtgctctcccgccggcagcccgacgtcgagcggcagcggcagcggcagcgggaagcgcgtcgcggcggagaggtcggccggcagcggcgacgaggacgacgacgggggtgctcgcaagaagctgcggctgtccaaggaccaggccgccgtgctcgaggagtgcttcaaaacgcaccacaccctcactccggtaagggcgtaactaaggcttcatccttcgatccgacagacgtcgccgttcctcgccgtctgtcggtcggctgatttgatcttggcggtggccggtgggtgggtgggtggctgaccaaggttgtgtccgtctcggcgctgcagagcggccgcggcggcggcatcgtcgtcgcccaacaacagcgcgagctccttcccgacggacttctccgcgcacggccaggtggcgcccggcgccgaccgcgcgtgctcccgcgccagcgacgaggacgacggcggctccgcgcgcaagaagctgcgcctctccaaggagcagtccgcgttcctggaggacagcttcaaggagcacgccacgctgaacccgaagcagaagctcgcgctggcgaagcagctcaacctccggccgcgccaggtggaggtgtggttccagaaccgcagagccaggacgaagctgaagcagacggaggtggactgcgagtacctcaagcgatgctgcgagacgctgacggaggagaaccggcggctgcagaaggagctatccgagctccgcgcgctcaagacggtgcaccccttctacatgcacctcccggccaccaccctttccatgtgcccctcctgcgagcgcgtcgcctccaactccgcgccggcgcccgcgtcatcgccgtcccccgctactggcattgcggccccggcaccggagcagaggccctcgtcgttcgcggctctgttctcgtcccctctgaaccgcccgctggccgcccaggcgcaaccgcaaccgcaggcgccggccaactcgtgaggcgctctctactctatctccggcgacgcgaacggaggtggatctggctgtaaatacgatcacctttttttggcttcctttttcttttgttttcacttgatgcggttcttgagattttttttttgtggattgccgatgggttggtttaccggtttattagagcgcatcatctggccgtcggattggactgcggacggccgggtgcagaaaggaagtgctgcgatagagtttattaacctcagtagcatcgatcatgttttgttaccttgctatctatcttggcgtcaatataggccttgaaatccgaagttaccctgatgatgatgaaatgggtggtgtcaccaaaaaaaaaaaaaaaaaaaaaaaaaaaaaaaaaaaaaattggtctaattgccttttaacggatacaagcatatatacatt

SEQ ID NO: 2343 - DNA, 2748 bp, Zea mays
  Clone ID: TF_ZmC19193_1
tcgcttgttctccctagttccgacccgaagcagggaatgagcttcggcgatctcgacggcggcgggtccaagcgcaagaagccgtacaaccgccacgcgccgcggcagatcgaacagctcgaagcgatgttcaaggaattccaccacccggacgagaagcagcgcgcgcagctgagcaggcagctgggcctggacccgcggcaggtcaagttctggttccagaaccggcgcacgcatttgaagaaccaactggagcggcaggagaacgcgaggctgaaacaggagaacgacaaactgcgcgtcgagaacctgtccatccgggaggccataagggacctggtgtgcagctgctgtggcggtccagcggtgctcggggagctgtcgcccgaagagcaccagctgcgcctcgagaatgcgaggctcagggacgagctcgctcgagtctgcaccgtcacttccaagttcattggcaagcccatgtctcacatggaactgctgctcgcgaaggagccgcatcctattacaggctcgtcactggaacttgcagttgctgttggtgttggttccggcgtgccatcgagcaaaatgcccgtctcgacgatctccgagttggccggcagcacatccagctcaacgggaacagtgaccacgcccatggtgactgcatccttgccgatggttagcattgtcattgacaagtccaagttcgcccagcttgcagtgagtgcgatgaatgagcttgtcaagatggcgcggatgaatgaaccgctgtggattccaaccattccctcacctggctcaccaatcatggagactctaaactttaaagagtacttgaaggcattctcaccatgtgttggagtgaagcctactgggtttgtgtctgaggcctctagggaatccggcattgtcaccattgacagtagcgctgctcttatggaggtcttcatggatgagagacgatggtcagacatattctactgcattgttgccaaggcatcaatcgttgaggagatcttacctggtgttgcaggaagcagaaatggtgcattgctgcttatgcaggcagaactacaaatgctttcacctcgtgtccctataagggaggttacatttctcaggttctgcaaacagcttgctgagggtgcatgggctgtagtggatgtttccattgatggactgcagacggatcagtgcctagatacaaacacgaaatgccggaggctgccttcaggttgcgtgttgcaagatacccccaatggctgcaaggtcacatgggttgagcatgcagaatatcctgaggcgtccgtgcaccagctctaccagcctcttatgcgctctggcctcgcccttggcgcagggcggtggcttgcaacactgcaacgccagtgtgagtgcttggccatcctcatgtcatcgcttgcagcgccagagcatgactcagcagcggtttctctggaaggaaaatggagcctgttgaagctggcacggaggatgatggagaacttctgcgcagggatgggcgcgtcatcttcccgcgaatggagtatgctggatggtttaacaggtagcatggggaaagacgtgcgggtcatggtgcagaacagtgtggatgaacctggggtgccaccgggtgtggtgcttagcgtcgccacagcagtatggctgcctgtgacccctgagcggctcttcaacttccttcgcgacgaggagctccgtgctgagtgggacatcctcagcaatggtggccctatgcagcaggtgctacgcattaccaagggccaactggatggcaactctgtggctctgctgagatccgatcatacagactcccacctgaacagcatcttgattctgcaagagacgtgcactgacagatctggcgcaatggtcgtgtacgccccggtggacttcccggcaatgcagcttgtgcttggtggaggggactcgaagaacgtggcgctcttgccatctggtttcgtcattctgcctgctgggtctagcgccggtggggttgggcacaagtcacgcggatcgctgctcacagtcgcattccagatccttgtgaacagccagcccacagcaaagctgacggtggagtcagtggacaccgtgtacagcctcatctcctgtaccatcgagaagatcaaggcggcacttcactgtgacgtctgttaacttgggaacaggaagcttcaggcatggaggcaaggcaacagctggtgatcagcctgagtcaagaacgaaccgcgcaaaacagtagtgacctttgctaggtggtacgggtccatagggctggcccgtagcacacagcaatggcggtggttcgggtattgactcagcctccaattgttctgggttaaattttgcattttggacctacgcctggccgggcaatgccatggttggttttggtggttttagggagtctggagtcatcggtgctttttgttggctggctcgtggttttttggtatcaggtttgcttttgtaaccatagatgtaggagagccccccttgatgttgatgatacagtcaatatcagacaaatgcagcattgtatcgtgagattccagtctcagatcactgtggatttaccttgtgtggaacagtaggacgaggagcggcagtttatgtaaaaaaaaaaaaaaaaaaaaaaaaaaaaaggagggttgtgtcatccaaaacaagcttcctgtttcgatagaggaaattgatacagttaatgactgggtgtcacagttttgt

SEQ ID NO: 2344 - DNA, 1185 bp, Zea mays
  Clone ID: TF_ZmC24942_1
ggcaccccagcttacttaacaccccagctggtgccttgccctgtggtcctcgctccttgatccactcctcctgcagctcctctccccagcctccctctctttctctgtccttggtcctctccccagcagcctcgcctccctctctttctctatccctggtcctctccagataacctgacgcagtggtcacgcttgacaaggagagagaaaggcgttgcagcagctgatccgcgcccgcccggccgggagcgcgcgcaggcgaaggatggaacaatacgacgggctctttcctcccgcctacgtggacgactcctcatccctcctcctggtgcccaacgccaacggcactgcgcaggaggagagaccgagagcgcggcgcaggaggcgtcgagcagcgaggtgcggcggcggcggtggcgagctggacggaggaggggaccacaagaagcggcggctgaccgacgagcaggtagagatgctggagctgagcttccgggaggagcggaagctggagaccggccggaaggtgcacctggccgccgagctcgggctcgaccccaagcaggtcgccgtctggttccagaaccgccgcgcccgccacaagagcaagctgctcgaggaggagttcgccaagctcaagcaggcacacgacgccgccatcctccacaaatgccaccttgagaacgaggtgatgaggctgaaggacaagctggtgctcgccgaggaggagctgacgcgtttcagatccgcgggcaaccacgcggtctccggtgacggcggagacgtcatggcccgtgccgtctgcagcgggagcccgagctcatcgttctcgactggcacctgccagcagcccggaggaggcggcggcggcggcgatcacctgggggacgacgacctgctctatgttcctgactatgcctacgctgacagcagcgtggtcgagtggtttagcctgtatggactgatgtaatcgatggtatggtatgccatcgtcgtcggcagattaattctagctagctactcatcgtagcgtgtcattgctgtgctgaattgctgatttctatgtgcgccctcttaatcatatgtacataaatcaagctatcaattactggcaaaatatagccagctagcagcaactagtactttaattcagatgtgtgttcttactgctaccccgatgatcag

SEQ ID NO: 2345 - DNA, 1062 bp, Zea mays
  Clone ID: TF_ZmC24942_2
cccgggcttaacaccccagctggtgccttgccctgtggtcctcgctccttgatccactcctcctgcagctcctcctcgcacagcacgtctcctctccccagcctccctctctttctctgtccttggtcctctccccagcagcctccctctctctttctctatccctggtcctctccagataacctgacacagtggtcacgcttgacaaggagagagaaaggcgttgcagcagctgatccgcgcccgcccggccgggagcgcggcgcaggaggcgtcgagcagcgaggtgcggcggcggcggtggcgagctggacggaggaggggaccacaagaagcggcggctgaccgacgagcaggtagagatgctggagctgagcttccgggaggagcggaagctggagaccggccggaaggtgcacctggccgccgagctcgggctcgaccccaagcaggtcgccgtctggttccagaaccgccgcgcccgccacaagagcaagctgctcgaggaggagttcgccaagctcaagcaggcacacgacgccgccatcctccacaaatgccaccttgagaacgaggtgatgaggctgaaggacaagctggtgctcgccgaggaggagctgacgcgtttcagatccgcgggcaaccacgcggtctccggtgacggcggagacgtcatggcccgtgccgtctgcagcgggagcccgagctcatcgttctcgactggcacctgccagcagcccggaggaggcggcggcggcggcgatcacctgggggacgacgacctgctctatgttcctgactatgcctacgctgacagcagcgtggtcgagtggtttagcctgtatggactgatgtaatcgatggtatggtatgccatcgtcgtcggcagattaattctagctagctactcatcgtagcgtgtcattgctgtgctgaattgctgatttctatgtgcgccctcttaatcatatgtacataaatcaagctatcaattactggcaaaatatagccagctagcagcaactagtactttaattcagatgtgtgttcttactgctaccc

SEQ ID NO: 2346 - DNA, 836 bp, Zea mays
  unsure (1)..(836): unsure at all n locations
  Clone ID: TF_ZmC24942_4
gcacccctcttacttaacaccccagctggtgccttgccctgtggtcctcgctccttgatccactcctcctgcagctcctcctcgcacagcacgtctcctctccccagcctccctctctttctctgtccttggtcctctccccagcagcctccctctctctttctctatccctggtcctctccagataacctgacacagtggtcacgcttgacaaggagagagaaaggcgttgcagcagctgatccgcgcccgcccggccgggagcgcaggcgaaggatggaacaatacgacgggctctttcctcccgcctacgtggactcctcctcatccctcctcctggtgcccaacgccaacggcactgcgcaggaggagagaccgagagcgcggcgcaggaggcgtcgagcagcgaggtgcggcggcggcggcggcgagctggacggaggaggggaccacaagaagcggcggctgaccgacgagcaggtagagatgctggagctgagcttccgggaggagcggaagctggagaccggccggaaggtgcacctggccgccgagctcgggctcgaccccaagcaggtcgccgtctggttccagaaccgccgcgctcgccacaagagcaagctgctcgaggaggagttcgccaagctcaagcaggcacacgacgccgccatcctccacaaatgccaccttgagaacgaggtgatgaggctgaaggacaagctggtgctcgccgaggaggagctgacgcgtttcagatccgcgggcaacccacgcgtctccggtgacggcggagacgtcatggnccgtgccgtctgcagcgggagcccgagctcatc

SEQ ID NO: 2347 - DNA, 565 bp, Zea mays
  Clone ID: TF_ZmC8754_4
cccgggagagagcccggctggggaggaagaaccgatcgaacaacttttcttttttctagctataggatccaacggacgtcgatcgggcgatcgacatggacaggccatgccaccaccagcaccagttcttcatgccgccgccgccgcagcagcagcagctttgcgtgccgatgatggacgacccgtcgtcgttcttggcggagatgggcatcgggggcggagatgggccgtcgtcgtccgcgaggggggagaggaagcggcggttcacggaggagcagatacggtcgctggagtccacgttccgcgcgcgccacgggcacgccaagctggagccccgggagaaggcggagctggcgcgggagctgggcctgcagccgcggcaggtggccatctggttccagaacaagcgcgcccgctggcgctccaagcagctcgagcacgactacgccgtgctccgcgccaagttcgacgacctccacgcccgcgtcgagtccctcaagcgcgacaagctcgccctctccacgcagttgaacgagctaagcgagaaaatgaaagaccgggagga

SEQ ID NO: 2348 - DNA, 1497 bp, Zea mays
  Clone ID: TF_ZmC254_2
cattgggtacctcgaggccggccgggaccgggaaactgttgctcccgctttggccggagagaatagaggagcgccggggagagctgcgagcagagacggggcgaaggatagggatcgcgagcgaattcccggcctctctgcccccgcgacagcgacgcgggcggggccgcgcggcacagcgctcgctacctatagagaccccggggggcagactggagagggacaggccgcgtgcgcacgccaccgcgcttcattggccacgccgttgccatcacgccgattaaactagccgatcgatcgcccagctcgcctgcctgtgatcgaccgggtcgctgcctccgatcctcttgctgcccagcaccctggctacttcagccagctagccaggttgagaccgactagctcgatctagctgctgaggcgtggccatggagggcgacgacgacggcccggagtggatgatggaggtgggcggcgcgggcgccacagggaagggaaaaggcggcgcgctggacaagaacaagaagcgcttcagcgaggagcagatcaagtctctcgagtccatgttcgccacgcagaccaagctggagccgcgccagaagctgcagctggcgcgggagctcggcctgcagccgcgccaggtcgccatctggttccagaacaagcgcgcgcgctggaagtccaagcagctggagcgcgagtactccgcgctccgcgacgactacgacgcgctcctctgcagctacgagtccctcaagaaggagaagcacacgctcctcaagcagctggagaagctagccgagatgctgcacgagccgcggggcaagtacagcggcaatgcggacgccgccggcgccggggacgacgtgcgctcgggcgtcggcggcatgaaggacgagtttgcagacgccggggccgcgccctactcgtccgagggcggtggcaagttcgcgcacttcacggacgacgacgtgggagccctcttccggccgtcgtctccgcagccgagcgccgctggcttcacctcgtcggggccgccggagcaccagccgttccagttccactccggctgctggccatcgtcgacggagcagacctgcagcagctcgcagtggtgggagttcgagtccctcagtgagtgagtgtctgagtgatcgatcgccagaccatgcgacggcgggtcactcggttccaacttccaagcacacacacacacacacgtaagcacgaatacgagttggtagcggtcatcagccccgagcgcacggtgtacatagctttcagtagatcgaattccaggcatgtccatcaacaagcagtttcttctcgtcatcgatcatcatgcatgcaaaagaaaattttctctcccccattgtcgtcgccgctaccagatcatgtaatccaggaacatgtagagaaagatcaaacgagcttatagagaagggaggtcacatgttcgatcgatcaaaaagaaaaaaaaaaaaaaaaaaagcggcc

SEQ ID NO: 2349 - DNA, 5109 bp, Zea mays
  Clone ID: TF_ZmC1775_2
cgccaagccttttgttcaccgttactccgttcaccccgcgaggcgtgactcgtgagctctccgtgtcttggcgatgactgggcgaccgacgatgcagccgtaggccaggggccccaggtcttcctctggtccttctccggcgaagagcaccggtcagcagttactgtggacgatgttcgtttgtgtttatcattttcttggtcttgttcggggcaacaacgacattgggaataagtgtacggcagacaaacagtaacatgggaaggaaaggctcagaaatgtcaccaagtaaaaggtatcccttgaggtctccacatagtagtggtagagttcttcgctctgccttagccaatgataataaggacagtgagcctctgaatgctgctgctgctacccaagccgctgtgaaaaaaagaagtggcagtcagttggatagtcctaatagcagtgtcaggttgtttcactctacatcaaaaaataagaacgaggcatgtagcgggcctctaaatgacaggatccctgataagccagctgcaaataaaagaaaacgtgccagtccttcacaggtgggaagttccagcaacagtgtcagggtgcttcgctctgcaataaaaaataaagatgaggcatgcagtaaatctctaagtgacaggaccgctggtgagccagctgcaaataaaagaaaaaacgtcaatcgctcaaagacggggagtctgagctgtggtgtcagggtgcttctatctgcttcaaaagctaaggatgagacatctaccaagcctttaaatgatagtgctgctgttgaaccagcttcaggtaaaaggaaaggcaccagtccgtcaaaggtgggaagtgccagcaatagtgtcagggtgcttcgatctacttcaaaatataagaatgagacatgtactgagcctttaaatgatagtggtgctgttgaaccagctgcaaataaaaggaaaggtgtcagtcgttcaaaggagagaagtctcaatagcagtgtcagggtgcttcgctctggcctcaaataataagattgaggtatctattaagcctctaggtaatagtactgctggccaaccagctgcgaaaagaagaaaaagcggcagttccttcgaggcaggaagccctgtgagcagtgccagggtgcttcgctctacctcagaaaggaagaatgaggcatctaagcctttaaatgaaagtactgctgctcaaccagctgcgaggaaaaaaaaaagctggggtaatttcaaagaccgacaatccaaagattggtctcagggttcttcgctctgcctcaggaaagaagaatgaagcatgtattgggcatgtaaatgatagtacttctgctgaaccaactgtgacaaaaagaaaccgcaagccttcaatggatcgcagtcccaagaaggactacttaaaaatttgtcaaagagttagatatattttgaatcgaatgaactatcaacaaacctttattcaagcttatgcaagtgaaggttggaaaggccaaagtttggaaaaaataagacctgaaaaggagcttgaacgagccaaggcagaaatcctccaatgcaagttaagaatccgtgaagcttttcgaaatatggactctcttttatccaaggggaagcttgaagaatctttgtttgattccgcaggagaaatttcaagcgaagatatattttgtgctgtatgtggctcaaaggatgttactttacaaaatgacatcattctttgtgatggagcctgtgacagaggattccaccagaactgtttgaaccctcctttgctaactgaagatatacctccgggggatcaaagatggctttgccctgcatgtgtctgcaaagcagactctatagatgcactaaatgaacttcaagggagcaagctctccattcatgactcatgggagaaagttttccctgaggcagcttcaattgccaacggttctaaacaagttgatacttctgatctgctgccagatcatataaagcacagtgacaaccctgcattggttgaagggctgatggtggatgaagtcaggctttctgcagaggatgacagcaaagcggatgaccttcgcttgtcttcggaggactcaggggatggtgacttcgatccgtcaggtccagattctagtgaagaccaaaaagatggattgaactcagaagagtcagatttcacatcagactctgatgatttttgtgctgagattgccaaatcttgtggccaggatgaagtctcggcatctccattatcaaatgtgataaaccatacttatagaatgaaactcagggccagcaacaaccgctctaatgaagaaaaccatgatcatgtatttatggacatggagctagggcaagacatggtgctaccagtttcaagcaggcggcaggtggaacggttggattacaaaaaactatatgatgaggcatatgggaaagaatcatctaattcaagtgatgacaaagagtggtctggaaaagaactattagaaggcagtgaaacagattcacttagtgagcgacctcatcctgtaaaacggtgctctagaagagcacaagcagagcagcagaataatgaacatacaccacagagggagcgccttcatggttctgaaagtgagcagaaaactggaattcttcgatccaatggcagcagtagcacaggacggaagtttggtcctgtagctacccagaaattgaaggtacattttgagaaagatccatatcctagccgtgaaacgaaagagaatatatcagaagaactaggcttgacatttaatcaggtctccagatggttctctagcactcgtcactattcaagggttgcttctgccagaaaagaaatgcatcctgacggccatactagcgagaataatgataccacgactgtagatagcatgcaagcaaggcaacccaacactgtggtgatggaaaagttgactgggaatagaaatgacattgtttctgagaaaccgatggtgcagaacaatcttaaccaaggggtggcagaaaagttgactagggatagaaatgacattgttcctgagaaacaggtggtgcagagcaatcttaaccaatgtaataatgaagatatcccgctttctggaacagaaattgagatggagtcttacgaacaagaatcatctgaaagcagtgatgaagagtggtccacacttagcacaccacgaaaaacaaaattacaaggcaacgaaaaagtatcacttactgaatcactacgttctgcaaaacggtgttctagaagagcaccagctagggagcagaataatgaacatactcagagtgagcaacttcatggttctgtaagtaaacagcaaactgaagttcttcgctccaatgtcagcagtggcgatgcctcaaaatgtcattttggccctatagttactcagaagctgaaggaacattttgaaaaagatccatatccttgccgtgcaacaaaagagggtctggcacaagagctaggactgacatttaatcagatcagtaagtggttctctgccacccatcattattcaagagatgctgttgccaagaaccaaaaatacccaggagaaaatactactgagaataatagtagcacaatctttgatggtatacaagtaatagaacccaattttggtttgatagataaaccagatgcagatacaaatgacatgatttctgaaaagttgatggtacaaattaatcttaacgaaggcattgaagaggatatcccaccgagccaatatactaccaggtgtgaagagaaattaactatgactcaagctgccatctcaagggaagctggacctccaggttatggtcctggagaaaactttcttcaggtcagttcaaggattactagctgtgagcagagtgtgataatggctcctagcgctatcgcaagaggagttggtccaccaggatatacgcctggagaacaccagggcaatggggctccatggaatacaagctatgagcgaagaccgtttacgagtcctgcgactagctcaagagaagtcggacctccaggatatgggcctgaagaaaaccaaggcagtggcatttcctgtaatacaagcagagagcaaatattgtttatgagccctacaaccatctcgagagaacttggtccaccaggatatttgcccagagaaaaccagcgcagtgacacttcatggaatacaagctgtgagtcgggactatttatgagtcctgcgaccacctcaatagaacatggtccaccaggatatgggcctggagaaaaccaggagaatgacagtacaagctgcgagttgagaatgtttacaagtcctacaatcgtctccagagaagttggcccaccaggataccagcagggagtgtttatgagtcctaaaaccatctcaagagaagtctgtcctccaggatttgggtctggagagaaccagggcaacgacactacatggtacaaacagagcgcgtttacaagtcctacaaccatctcgagagaagtcggtccgccagggtatggacaggaagatcagggcaatggtggttcttggaacacgagttgtgagcagggagtgtttacgagtcctactagaggcatctcaagagaagtcggtccgccaggatacgggcccggggaaagtcagggcaataccacttcgtggatttcgacctgccagcagagaatgcttgcaggaatccagagaactggtggctcaaggagtatggacttggaagcctttccaccgggatacggacctggtggtgcttcagggagtgtcataagcccccaagctcggtctgcagagaatgtagaattttcggacgaggctagaaaaaaggctatacagcgggagctgagacggcggcagaagttcaggtgaaggcaatatatccagtcttcaagacaagacaatatatccagtcttgatggctgaatgagtgggcgaccttagttgccatcaagcaaaacccttgttgtatcagctgcttatcttccttttacagacttgcttggtttgtcaaggatttcttatgtgaaccctcttgaacctgaagtattcaatgcgctgtgaatttgtgcagttgccttaatcaaaaaaaaaaaaaaaaa

SEQ ID NO: 2350 - DNA, 632 bp, Zea mays
  unsure (1)..(632): unsure at all n locations
  Clone ID: TF_LIB4744-009-R1-K1-B9
ctcggccgggagttgtttgcacctgtggcctctctctctctctctctctctctctctctctactccctctctcacacccgtcctgcagtcctgctcagcaaggaaggagatagggatcaccgccaactcgtttgtgcgtgcaactcggctcctgcttttccaagacccctgccgcagtctcacaatagaatcaccgccatttccgaatcccttccagagctcagctgccaagtgccggtcacagatgaagaggcaatccaagaggcccaccgccagccgtgactccccagaaacgggtacagtggacaagcagctggcgctcgcggagtccctaacggcgcggaagacggagcccgacgagctgggggagaagaagcggcgcctggcgccggaccaggtgcgcgcgctggagcgctgcttcgaggcggacaacaggctggacccggaccgcaaggcccgcgtcgcgcgcgacctcgcgctgaacccgcgccaggtcgccgtctggttccagaaccgccgcgcgcgctggaaggccaaggccctccaccgcgacttcgcggcgctgcgcgcgcgccacgacgcgctccgncgngacaaggacgccctcgccgccgagataagggagctgaggc

SEQ ID NO: 2351 - DNA, 592 bp, Zea mays
  Clone ID: TF_LIB3960-010-Q1-K6-B2
ctcttcctctcctctcctcgctaggagccccaagcgagcacgccgcccaccacgatgccagcgcgcacgggagccggccgctccgcctccgcctcctctccgctcccgcaccactagcgcgggagcccgatggcgagcagcagggggaggctgaggctctccccgcgcgcggcggcggcgccgcagctggacgcgggcaagtacgtgcggtacacggcggagcaggtggaagcgctggagcgcgcctacggcgagtgccccaagcccagctcgctgcgccggcagcagctcatccgggactgccccgtcctcaccaacgtcgagcccaggcagatcaaggtctggttccagaaccgcagatgccgggagaagcagcggagggagtcctctcgtctgcagaccgtgaaccggaagctgggtgccatgaacaagctgttgatggaggagaacgaccggctgcagaagcaggtgtcccgtctcgtcttcgacaacgggtatatgaagaatcggctccacagtccttctgtagccaccaccgacacaagctgcgagtctgtggtgacaagtggtcagcacaacaagcagcagcaaa

SEQ ID NO: 2352 - DNA, 842 bp, Zea mays
  Clone ID: TF_LIB5117-048-A1-PF1-F5
ccttccaacgccaaccaccccccaagaaaccggaaagcgaacggcatggcgaccccccgcagcgcagcacgccacgctccctcctctccctctcgcaggccatgacgcgccaccgtccttggcctccttcccatcctcctcctcctcatcctcttcctcttcgggtagtggcagcggcaccacaagcaaccggcagcggcgccgggaagaagatggcgaggctctccccgggggcggcggcgccgcaggtggacacgggcaagtacgtccgctacacgccggagcaggtggaggcgctggagcgcgtctacaacgagtgccccaagcccagctccctccgccgccagcagatcatccgggactgccccatcctctgcaacatcgagcccaagcagatcaaggtctggttccagaaccgaaggtgccgggagaagcagcgcaaggagtcctcccgcatgcagacggtgaaccggaagctgaccgcgatgaacaagctgctgatggaggagaatgaccggctgcagaagcaggtgtcgcgtctcgtctacgagaacgcgtcggtcaagagcctcaagactaagatccacaaggcttctgcggccaccacggacacgagctgcgagtctgtggtgacgagtggtcagcagcaagccctagcagccccgcgtccgcagagggatgcgaacaacccagctggtcttctcgcaatcggtgaggagaccttgacagcgttcctgtccaaggcgaccggaaccgctgtcgaatgggtgcaaatgatgggaatgaagcctggtccggattcatgggaatcatcgcttttcgcacaattgtattggcgtaca

SEQ ID NO: 2353 - DNA, 3495 bp, Zea mays
  Clone ID: TF_ZmC354_1
cccgggtcgcccagcgtccgccccgcgtccgcggacgcgtgggcgacccagcgtcgccagcgtccgcacgggtaccccgggtttccctttcccttgcgctcctccttcactcctcatcctcagcctccccgcaggccgcggctcggcaagcaagcaacaacccccgccactcccctccctcctgtgctgcctcctgcggaaaggtgtgcgaaaaacccaccatgcccacccccaaggcgtcgggcggcttcgctctcgccccgaggccatgacttggcgccgcccgtggccgtggctctccgtcttctccctctccccgcgacgacaaccccctcctcctccctgggcggcggcgggctagctagatggcgtcggcgatggtggtgttcgggggcggcaaggaccggccgtcgcctggcggcggtggggcgccgcaggtggacgcgggcaagtacgtgcgctacacccccgagcaggtcgaggcgctcgagcgggtctacggcgagtgccccaagcccagctcgctgcgcaggcagcagctcatcagggactgccccatactcagcaacatcgagcccaagcagatcaaggtctggttccagaaccgcagatgccgcgagaagcagcggaaggaggcctcgcgcctgcagactgtgaaccggaagctgactgcgatgaacaagctgttgatggaggagaatgacaggctgcagaagcaggtctcccgactcgtctacgacaatgggtacatgaagaagcagctccacagtccttctgctgcgaccacagacacgagctgcgagtctgtggtgacaagtggtcagcaccaccaacagcaaaacccagcagctctgcagtccacaaagggatgcgaacaacccagctggtctactcgctattgctgaggagaccttggcagagttcatgtccaaagcgacaggaactgctgtcgactgggtgcaaatggttgggatgaagcctggtccggattccattggaatcatcgctgtttcgcacaattgtagtggcgtagcagcccgagcttgcggcctagtgagccttgagcccacaaaggtcgcggagatcctcaaggatcgcccttcttggtaccgcgattgtcggtgtgtggatattctccatgttatccctacgggtaatggtggaactatcgagcttatctacatgcagacttacgcaccgagcactttggcggcaccgcgcgacttttggactctccgatacactagtggtcttgaggatggcagtcttgtgatctgtgagagatcactgacacaatcgactggaggcccatcaggacccaacactccaaattttgtaagagccgaagtgcttcctagtggctatctaattcgaccctgtgagggaggtggctccatgattcacattgtggatcatgttgatttagatgcttggagtgtgcctgaggtccttagaccactttatgaatccccaaagattcttgcacagaaaacaactattgctgcactgcgtcacattaggcaaattgcgcatgaatcgagtggggaaatgccctatggagggggccgacagccagcagttttgagaacatttagccagaggcttagcaggggtttcaatgatgctgtcaatgggtttccagatgacggttggtcactgatgagcagtgacggtgctgaggatgttactattgctatcaactcttctccaaacaaacttattggtcctcatgtcaactcttcccagctgtttactgcgatcggaggtggcatcctgtgtgctaaggcatcaatgctgcttcagaatgtgccacctgccctactagtacgatttctgagggagcatcgctccgaatgggctgatcctggtgttgatgcttattctgccgctgctctgagggctagtccatatgcagttcctggcttgcgtgctagtgggtttatgggcagccaggttattctgccgcttgcacataccttagagcatgaagagttcttggaggttattaggcttgagggacacagcctctgccatgacgaagttgttctgtcacgagatatgtatcttctgcagttgtgcagcggtgtggatgaaaatgcagctggtgcatgtgcacagcttgtgtttgcacccatcgatgaatcttttgccgacgatgcgccactgctaccctcaggcttccgtgtcattccactggatgcaaagacggatccaccatcaggcacacgcacacttgaccttgcatctaccctcgaggttggatctggtgggacaacgcgtgcttcgagtgacgcctccagcacctgcaacacaagatcagtgctgaccattgctttccagttctcatatgaaaatcacctacgagagagcgtcgcagccatggccaggcaatacgtcaggaccgtggtggcatcggtgcagagggtagccatggcaatagctccttcgcgcattggtggacagcttgaaatgaagcaaactccaggatctcctgaggcacacacgctggcaaggtggatcggcaggagctacaggttccacactggagccgaactcctccgcacggacacccaatgcacggatgcttccttgaaagcgctgtggcaacactcggactcgatcatgtgctgttccctgaaggctgctcccgtgttcacctttgccaaccaagccggcctggacatgctggagacgacgctgattgctctccaggacatctcccttgagaagatccttgacgacgatggcaggaaggcgctctgcaccgagtaccctaagattatgcaacagggcttcgcgtacctccccggtggcgtgtgtgtgtcgagcatggggcggccggtgtcgtacgagcaggcggtggcgtggaaggtcctgagcgacgacgacaccccgcactgccttgccttcatgttcgtgaactggtccttcgtgtgagaacccggtccccctagtagtagagccaagttgcctagcgtttgcggctctgttgtttgaactctgtaccccatgtaccgtcgcttttgcctgtgtccaggcaacctatgaaacacacctttgtagttgttcatcacccccgtggaacaaacagctttgtactagttgttcgtcttcgcttgcttgctatcttatgatggatcctggtttgctcctgaaaaggaaaaaaaaaaaaaaaaaaaaaaactgaggctcgcaacatcgctcggcagcgccagaccggatgccgccttttgccctactacgtatcattagttgcttttccgttgtgccgcctgtgttaagaatttgtgtactgtgtggatgatcgagaactgactctgtttgtttgtgtgtgtgtgtgtgcgtgacaaacaactacaacagctgtatgcgtgcctggtcgtggtctcgtctccccggcctgtcgccggcgacattgatcactgttgcaggttgcagtattactatttgctagttctgcttaaaaaaaaaaaaaaaaaactcgagagggggccc

SEQ ID NO: 2354 - DNA, 427 bp, Zea mays
  Clone ID: TF_uC-zmflteosinte108d01b1
gtgtttgggctgtcctagacgcctattgctgcattcgtgctctagtccagaagcatagctatttgagcgagagaagctcctgctgatgaagtgagaggttgtggtacgtgaggtgtgcgttcgtggacatcgacggcgcctaggacgatggtactgagtgtatgatgcatggtgctcgtacggaagggaaaaggcggagcgtcgctcgacaagaacaagaaggggttcatcgatgagcagaccacttcactggaggccatgttcgcaacacaagccatgctggagccccgccagaaactgcagctggcgcaggagcttggactgcagccgcgccatgaggtcatgtggtttcagaacaagcgcgcgcgcttgaagtccaagctgctggagcgcaagcactcggcgctgcgcgacgactaccatgcgc

SEQ ID NO: 2355 - DNA, 1634 bp, Zea mays
  Clone ID: TF_ZmC1455_1
cattgggtacctcgaggccggccgggccccccaaccttcacatttccacgtatgtagaatactccacctccacccccgtccatttcccatccccaacctctctctctcccccctaggagtgggagctcctggctccatctatccgcctgcagatatcacaagcttttcctgctgctgctgctgcagcagcacctgcagcttctccgtctgcagtgcgagcagctgctaaaaattcccccataagcctctggcttcctgcccccctcactttcttggaagcccagcacaacacgaggatcatattcactccctacagtggcgtactagaataccagttgtgcgcaaacagcggcagcagccgtgatgtacaggtgagctggctctgccgctccactccatggaggatctgtacagcatccacccggggatctcgcgggtcgtcggaggcgcggcgagcgaggcgtccgtcgccggcgccggcgccggcgggccctcgccgtcggatctgacggagctcatgaaggcgcagatcgccagccaccctcgctacccgtccctcctctccgcctacatcgagtgccgcaaggtgggagcgcatccgcatgtgacgtcgctgctggaggaggtcagccgggagaggcgccccgacgccggcgccggggagatcggcgtcgatcctgagctcgacgaattcatggacgcttactgccgggtgctggtgcgctacaaggaggagctgacccggccgttcgacgaggccgcgtcgttcctgagcagcattcaggcgcagctcagcgacctctgcagcggtggaagctcgccggcggctaccgccacgcactccgatgacatgatgggctcctctgaggatgagcaatgctcaggggacactgatgtgccagacatggggcaagaacatagctctcacttaggtgaccacgagctcaaggagatgcttcttaagaagtacagtggatgcctcagccgtcttcgttcagagttcctgaagaagcggaagaaagggaagctaccgaaggatgctcggacggtgttactagagtggtggaacacgcactaccgctggccttatcctacggaggaagacaaggtgaggctcgcagcaatgaccggtctcgacccgaagcagatcaacaactggttcatcaaccagaggaagaggcattggaagccatctgaggacatgcggttcgcgctcatggagggtgttgccggtgggtcttctgggacgacactctacttcgatacaggcacaattggaccctgaatcatacaccacttgggatgacaactggccagctcatattagtaataagatctggcatgtggagtgacgatctgctcggtgaaaattgaaaataaatctgctgagctgaggttgatcagactagtcagttgccctattattttacaagatcatgtgtatatggtgccgtcgtatcagaacaaactgtatgcatgtatgggcgaattgagacctgcaaaaggagtttaattagtagtttcaagtattggctcatggatttgtaatactcgctacccaatttaattgttagataggctgaagggcttataaaggtaaatttacttctgctcttccaaaaaaaaaaaaaaaa

SEQ ID NO: 2356 - DNA, 1899 bp, Zea mays
  Clone ID: TF_ZmC1389_3
caccgttgccgagccctcgcctcaccctcacagtcgtctcaggatgatgccccaggccagcgctagcctcgacctcggcctcagcctgggcctcaccctcacctcccagggcagcctctcctcctccaccaccaccgccggctcctcctccccctgggcagccgcgctcagctccgtcgtggccgacgtcgccagggcgcggggtgacgcgtacgcgcagcaccacgctggcgccgcgatgacgatgcgcgcgtccacgtcgcccgacagcggcgacaccaccaccgccaagagggagagggagggggagctcgagcgcaccggctccggaggcgtccgcagcgacgaggaggacggcgcggacggcggcgccggcgggcgcaagaagctcaggctctccaaggaccaggccgccgtcctcgaggagtgcttcaagacgcacagcacgctcaaccccaagcagaaggtgcagctggccaaccgcctgggcctccggccgcggcaggtggaggtgtggttccagaaccgccgcgcgcggaccaagctgaagcagacggaggtggactgcgagtacctcaagcgctggtgcgaccgcctcgccgacgagaacaagcgcctcgagaaggagctcgccgacctcagggcgctcaaggccgcgccgccgtcgtcggccgccgcgcagcccgcctcggccgccgccaccctcacaatgtgcccgtcctgccgccgcctcgcctccgcgtccgcgtccgccgaccaggcgggccgtgcagggccctgctggggccctctccccgtgttcgtcgacggcccagcccggaggccgtgatccacgaccccgatatggcatgagatggatgcgcttgctaatcgctaccgctagctaagtagctagtgctaattagggctggatcttctttttttctttgtttggttcttattatactcgcaggctattacagcttagtagtgtttattagtccgatatgataaaaatcttcgttgtttggcagtgttttatttgctgaaaaatagataacgatgtcttatgtctttgtactcataagtgatgcaaaattgtcttactactcctttgcatatataaggttttctttggttgttatttgcctctaaaaaaaaaaaaatgctaaaaaaaaaaaaaaaaaaaaaaaaaaaaaaaaatttttaactttcgctttttgtttctgtttctgtttgagacaggttaatataatcgccgtcgtccgagggtgtagtgtcagggattgatatccctgtacaccgattattggattgagatgcttctagctagtcttcgtactgataagcgtgcgtgcgtacgtcagagcaccacagtgctggaatggatgatgacatgagagacaggtagagaagcccagctgcgtggctcttggacctttctgcaggtgtacgtggtgtgtacacacgcacacccttttttatagtacatatatacggctcaaaaaaaaaaaaaaaaggccggcgggccccccccccaaggccgagcctaggcccgacaggcccaagacagccacccaccaattttttaaccccttcacccactcccccgcctgctgatgatgagggcagggcagcacgcaacgcagcggcagtaaacagagccccgccccgtgcagataataccacgtctgtacgtgtcccaagtaattaacaaacgtatggtcctcctctctatctatttttttgattccggagggctaagttagttgtttttgtgtcgatcccaaatgcatcagctaatccatcaatcataggcttgatagagtagtcgaaaaaatagccgtagctttcttagcactccctccaccccacatccatgtatatttctgttgtaattctgtccctctgtcgcggtcc

SEQ ID NO: 2357 - DNA, 4197 bp, Zea mays
  Clone ID: TF_ZmC12602_1
tttttctctttttttttttcccctccctcttgtttttttttttggctcgaaaaaacaacctaccaacgtaatcaaacgagcttgagtagcagcacaaacaggcggtgcagagagggaacaagtcaattcccgaaccaagacccttcttccctgatagcctgggatcagatggtcacaactggtttggttcgctcttgactcctcctctcgcaccttttctcttgctctcctaaacaatcaagtcctcagtctcttctaatacagagttacacggctctacgcccgaccattacgcgcgaactactaggtaaatctcccgtcttattattattacaaaaatcgaaataagcataccaatcgaagctaaccttcttcacagttctgacttctgagcaagggaacagaccgagagagagagagctaccagcagcaacacctgcatgaccaagctgccccggattgttttctgcgtgatagagaatcggccggcacaagtgagagcttgacaggaccctttcttttccagtagctgtagatgacaccgcactagcttcccaaaatgatcaaaatgcccccaccattctcttcgttcggtcaggggtatttttgtcattttaagaggcatatggcgggaaagagaagggggatttttgaactttccgtgtgttggtttcgggctcctgtcaaaccctctcttgcacctgcgatgtctgtcagcagaaacaaccggacctggaagtcaatttggcttttgttgtggtgtatggatctgctctcctctgctcccgctcttgctacttactactcggaggcagcagccgccggttcagcggccccgcccgccccagcgcccttgagcgcggctgtgatctggtggacggcgttgcagacgtggctgttgatcgcggtcacgctcgagaggttcagcttagccgagggcacagcgctagcgagcacctgcatgcccacggtgaggaggcagccgctggcgggctcgtcggcgttacctgctgggctgctttggccgtcgccggagcctgcggcgctggttgctgcagccgaagggttggcggccgggaagatggcgaagcccagcgggaggagagggatgtaggaagggtcctcgccgctcattgtcacttggatggcgtccacgtccacggtcgcaaacaccacgaggctcccgccgtcggggtgggtgctgctctcctgcagcatgagctccacgttctgggatgagttgcttgcagcattgattctaagaagagaaatgcaattctttgggtgtgatccatttgcaatatgtgccacttcgtgaagtgagcccccgcttgacataatctcaagctgacaacgctgttgttcatcggcaagaagctcgaagaccttctgatggttgaaaggaagccagcttgtagagacagcggttagaatgacaccgctgggctgccccggatccgtgttcttgcgagtagtgaccctgatcgtgtcctctgtagtttctgagagtgaagtccaagattggctcccagaagcactgatgttggcagagaaactagtgatcatccgctgtgacagcttcatcatatttgttctcgcctctggtgtgcggatcactcccaggtcggcgatgttgcgggcgagctcactggcaaggcgctcgcattggcgctggagcagggatacccagcgcgtggcgccgaaggcagagccgctggcgacgtagtccttgaacacctggtgcagtggcttctcctctccaacaatctccgtgtgctccacccacaccacgctagagtagccattgggcatgtcctggatgatgcaaccggaggggcgcctacagcaccttacaacagatggggtttgcagtgcctccagctggaacccctcggccgggaagtcgacgagggaccaggtcccctcgtcgccgttgtgcacgcagtacctgaagaacaccacctctcgcgcaggcaccaaaggagacgggaactgcaactccgcttgcatcaagaggagagatccactgcccatatgaccagatgcagatccatggtttatgacctgaatggttcttgccttggataggatcgaagggaacaactccatccacttgttagcgtccaggaaggcatccaccagcgtgatgctgttcatgataaccacggtgccgtcccttgatccctcggtcctggccgcggcgccgccaggggaggcactgctatcctgctggccgccgttgacaggccagctgaacatccgggcgtgctcgtcggctaccatgacctcggagctcgcgccacggcgccgcagccagagcgactcgcccgcgcggcacatcttggcgagggtcatggaaaatgctcggaggaggtcgagcaccagctgcctgtcctgctcctggacaggcgccatggcgcccatgaacgacggcgtggaggcgtggtgctcggcggttccggtgatctgctgcgacggcggcccgaggacggactggatgaggtcgccgcaacccatgactggggactggtcggtgaaatggcgagagtagacattcatgtcgaggtcgagcggcggcatgagcaccggcggcggtgccgataagcagaccagcgcggacgacgacatgctcggctgtcggccgccgccgtaccgggtcgcgatgcacgccaagcggtcgagctcgtccttgagcctagcgttctcgatgcggagctgctgctcctcgtacgacatctcgccgaggacggcggcgtggccgcagttggggcagactacgttgcggatggcggcctgcaggcggtagttatcgctcttgaggctctcgttctcggcgcggaggaggacgttgtcggcgcggtcctgctgcgccttcatctgggtgcgccggttctggaaccagaacttgacctggcggggtttgagccccagctcctggctcagcttcagccgctgcttgtcgtccgggtgcgggcactccttgaacagcgcttccatctgctggatctggtgtgccgtgtggcggtggtaccgtttcttcttgccgttggcggtggccagctgctgctgctgtccggcggcatccgccgtcgtctggagctcgaggccgctgtgctgcggcttctgctccggccggtcgtcgtccacgtcggcgaagctgagcaggccgtccaggtggccgctcccggagccgccgctgagctccatctccatctccagctgatccatgtcctcgtccttggccacctggactcgtgccgaattcggcacgagattaaacttgagtggcaatagcataaaggggaacattccaatctccctgggtaccatctctgtggtgcaagtactggatctgtcatacaatgagcttaatggatctattccagagagcctcggcgagctgacatcattacagatactgaacctgaatggcaatcgtctttctggtcgtgttccagccagtttgggaggaaggcctctgcacagagctagatttaacttcacggacaatgccggactatgtggaatacctgggttacgtgagtgtggccctcatctatccgtggctgcaaagatcggcatggctttcggcgtgcttttagctattctattcctagttgtattcgctgcgtgctggtggaagagacgccagaacattctccgtgctaaaagattagctgcagcaagggaagctccttatgcaaaatcaaggacccagttcacccgcgatgtgcaaatggccaagcatcaacggacacatgaaaatgctcggagcagcaacagtgaaggctcgccacatttgctttcctagctcggtgagaatactgcgacagtgacttggcttccatctattcttcagttcctcctttgtatgctcctctgcagtcttgaaagacgaagctgctgtacatactagctaggtcacgaatggtgtatatacttgtattttttttggtgatctagaactcagtccaggagagggatcagtctatcagatgagagaaattacccatttcatcctacttactgttctgattactgctgttgatttccccttcactgttcaagtatgcttattgtcagttttgtactctgtggtctgaagctctgcaaaactgccttttgccaggagctggagctccaggctgggctgtgctgtgctgagatatagagtgaattctgcaccttttcctaacc

SEQ ID NO: 2358 - DNA, 458 bp, Zea mays
  Clone ID: TF_uC-zmrob73033d11b1
ttcatgcgtccgcggacgcgtggggccgccggggggcctttggcgtcgccctgggtcgcctccttctctcgcagcttctcggtcaacgacaccaccttaatgaaaccaaccagagcaccaacagacgggcgactcctccgtcatcagcgacgtgctcggactcggagcgaggccgtggaacaaagctctgctcgcgcggttgctgagggcgagaggatgtaagtacctgtgagcggaggcggtggttgtcctggagaagggcgtcgtggtccgcgcggagggcgtccaaagaggccttgaggcggtcgaagtcgcgctccagctgcttgggcttccaccgggcgcgccggttctggaaccacacggccacctgccggggctgcaggcccagcttgcgcgccagctccgtcttgcgctccggctccagcttggtctccttctcgaagctcctctccagc

SEQ ID NO: 2359 - DNA, 841 bp, Zea mays
  Clone ID: TF_ZmC1389_5
cccacgcgtccgctcggccttcagtggccacctccggacggcggcatctgtcatgtagggcgcgacgaggcgccggcgcgcggcttcgacgtgaaccgggcgccgtcggtggcggggagcgccctggcgctggaggatgacgaggaggagccgggcgccgcggcactgtcgtcgtcgcccaacgacagcgcgggctccttcccgctggacctgggaggcccacgcgcccacgccgagggcgccgcggcgcgggccggcggcgagcggtcctcgtctcgcgccagcgatgaggacgagggcgcgtccgcgcgcaagaagctgcgcctctccaaggagcagtctgcgttcctggaggagagcttcaaggagcacagcaccctcaaccctaagcagaaggcggcgctggcgaagcagctcaacctccggccgcgacaggtagaagtctggttccagaaccgccgagccaggacgaagctgaagcagacggaggtggactgcgagtacctgaagcgctgctgcgagacgctgacggaggagaaccggcggctgcacaaggagctcgcggagctgcgcgcgctcaagacggcgccgcccttcttcatgcgcctcccggccaccaccctctccatgtgcccctcctgcgagcgcgtcgcctccggccccagccctgcctccacctcggcacctgcgtcgtccacgccgcctgccacagccgccaccaccgccatctcgtacgctgcagcagccgccgcacccgtgcgagccgaccaccggccctcgtcgttcgccgcgctgttcgcggcgacccgcagcttcccgctggcgtcccagccgcggccgc

SEQ ID NO: 2360 - DNA, 2194 bp, Zea mays
  Clone ID: TF_ZmC1389_4
cgccttcctggcttcttcctccccagcacgcacacgcacacgcacacacccagccttttggctgcggtggcgccgtcagagagagaaaccgagctctaactaactgaagtggcggccacatagctagctactcttctgatcctgagcgcgcacgcgccatggctcaggaggacgtgcacctggacgacgcaggcctcgcgctgggcctgtccctcggcagcggcagcggcggcgcctctggtgcggcgcgccacggtggtatcagccgccggctgagcatggaggtgcggctgccgtcgccgcacccgctgtccgtattcattccttcctgactttcctcctcccgcacgcagcgcagcttgcaacccgcaacgaaccaaggccgcgccgcgcgcgccctgccggccgtcaggaaacccatctaactgaagtggcggctacatactgctgtgctagctgctagctagctactcttctggtcctgagcgcacgtacgacatggctcaggaggacgtccacctggacgatgccggcctggcgctgtgcctgtccctccacggtaccagcagcagccggctgagcacggaggcgccgcgcacgctggagccgccgtcgctgacgctgagcatgccggacgaagcgaccgcgaccgcgaccggcgggtccggcggcagcggcggggccgcgcgcagcgtgtcgtcgcggtcagtggagggcgtgaagcgggagcgcgtggacgacgccgagggcgagcgggcgtcgtcgacggccgccgctgcgcgggccggtgccggcgccgagaattcggcacgagcgacagctccatcgattcatccaccgctatctctctctctttcaactgcaagggaaaccgagctcaaagtggcaaccatcaatggatattatggcgcttaatgcgagagacgaggagcagtacgggaacaaccatctcgggctcgggctgagcctcagcctcggcctcggcgtcgccaccgcggctccggtcgaggtcgagcccccgccaccgcccgcggcggcggcagcagcagcagcagcgagctatcagcgtcgcgcccatcacctccctccccgcgccgtagtggtggaagtggaacggccccggtctcttcttcgggacgacgatggatccatctctggagaggaaccagcagcagcagcacccggcggccgcgcgccacggccacgagatgccgttcctgcggggggtggacgtgaaccgggcccctgccggggagaccaggaggggtagctgcagcgaggacgacgaggagcctggcggcgcgtcgtcgtcgccaaacagcacgctctccagcagcctcagcgggaagcgcgcagcgccggcgaggagcggcggagaggtggccgaccacaccccgagagccggaggcggcagcgacgacgaggactccggcggtgggtcgcgcaagaagctccgcctgtccaaggaccaggccgccgtcctcgaggagagcttcaaggagcataacacactcaaccccaagcagaaggcggcgctggcgaagcagctgaacctgaagccgcgtcaggtggaggtgtggttccagaaccgcagagccaggacgaagctgaagcagacggaggtggactgcgagttcctgaagcgctgctgcgagacgctgacggaggagaaccggcggctgcagcgggaggtggcggagctgcgcgtgctcaagctcgtggcgccgcaccactacgcgcgcatgccgccgcccaccacgctcaccatgtgcccctcctgcgagcgcctcgcctccgcgtccgcgtccgccgaccaggcgggccgtgcagggccctgctggggccctctccccgtgttcgtcgacggcccagcccggaggccgtgatccacgaccacgatatggcatgagatggatgcgcttgctaatcgctaccgctagctaagtagctagtgctaattagggctggatcttctttttttctttgtttggttcttattatactcgcaggctattacagcttagtagtgtttattagtccgatatgataaaaatcttcgttgtttggcagtgttttatttgctgaaaaatagataacgatgtcttatgtctttgtactcataagtgatgcaaaattgtcttactactactttgcatatataaggtttcagttgtttgcagaaaatcgcgttggc

SEQ ID NO: 2361 - DNA, 960 bp, Zea mays
  Clone ID: TF_ZM5012.C1.o5.fg
atggatattatggcgcttaatgcgagagacgaggagcagtacgggaacaaccatctcgggctcgggctgagcctcagcctcggcctcggcgtcgccaccgcggctccggtcgaggtcgagcccccgccaccgccgcggcagcagcagcagcgagctatcagcgtcgcgcccatcacctccctccccgcgccgcagtggtggaagtggaacggccccggtctcttcttcgggacgacaatggatcagcagcagcagccggcggccgcgcgccacggccacgagatgccgttcctgcggggggtggacgtgaaccgggcccctgccggggataccaggaggggtagctgcagcgaggacgacgaggagcctggcggcgcgtcgtcgtcgccaaacagcacgctctccagcagcctcagcgggaagcgcgcagctccggcgaggagcggcggagaggtggccgaccacaccccgagagccggaggcggcagcgacgacgaggactccggcggtgggtcgcgcaagaagctccgcctgtccaaggaccaggccgccgtcctcgaggagagcttcaaggagcataacacactcaaccccaagcagaaggcggcgctggcgaagcagctgaacctgaagccgcgtcaggtggaggtgtggttccagaaccgcagagccaggacgaagctgaagcagacggaggtggactgcgagttcctgaagcgctgctgcgagacgctgacggaggagaaccggcggctgcagcgggaggtggcggagctgcgcgtgctcaagctcgtggcgccgcaccactacgcgcgcatgccgccgcccaccacgctcaccatgtgcccctcctgcgagcgcctcgcctccgcgtccgcgtccgccgaccaggcgggccgtgcagggccctgctggggccctctccccgtgttcgtcgacggcccagcccggaggccgtga

SEQ ID NO: 2362 - DNA, 3614 bp, Zea mays
  unsure (1)..(3614): unsure at all n locations
  Clone ID: TF_ZmC260_62
accgaaaatgcgtttgcatgaaaagcaggtacagacccatggccgcacactgaaattacaaagtcctctgttcgcatcacgcaagaggtttggtacaacattccatcttaccagaaaattcaacatcgatgaaaacaacacacatcttctgcagtacactgctgtcgttacggagccgtacgcttttgcagtgccaggagtcgctgcaaacaaatctgaaggataactaattcctatagagcgccccagaaatcagaggaagctctcagttgcctaagaacggaaagcaacggccccacacacacacaaaaaaaaaaaaaaaactgaatgatgcgcttgttagttgactggcacgaactaatgagaggcagctagctgacttgtaaagttgtaatggtatatctatgttttttggctgccgtcatagagccatacaaagccaaagtttcaaggtccatagcaccggcagcgaaatcacgacccgacctggaaatttcaggagcagtccaaattctggctcatatctttgtctacaaacttcatcgtcccatttttttcttcctcaactcctgctgtattgccttttgccttgccttctctgcaagatcaggccccggattctgatcctcagcagaatcaacttttgaccctcccacatcacttccaggggttcttgatccaacttttgaagacactgcttctttagagatggtagtacccccatttaggcatacattagattcttccaccacagtcccctcaggttctttaggttccatactagctgtcacttgactattagtattttgggggctatgcttatctagactgatgcctttcctggaagaagctacccttgcggaatgacgcctagtttcaaaccatttgttaacctgacgaaatgttaaccctagttcttctgccagactttctttaacagaacgactagggtatggttgtgtcttaaaatgttcatgtagcttctgattaattactgggccaaaatgtcctttcctggctgtgctgttgctgccattagaagtaaggtctccaggtttctcatctactgaaccatgaatagaatgcaagctttttttagtgctttgtgtagtcagttcatcattatggtgcacaactctggagccttttcccgcaggagaattggcttcaccctcttcattgctttttattattggcgtgttcttcccagaccattcttcatcatcactagaatcagatgatgcttcaccatatgcctcatcatacaactttttgtagtccaaccgttcagcttgccgtctccttgaatctggtaaaacaacaccctggtctatttcagtctccatagggtcgtcagcagaacttgttgttttagcttgagcagtaatcttttccatatcacccaccttggcatcgggtaatagaggtgatgaaacttcatcatgtccagattttgaaatctccttacaaaaatcatctgagtcagatgtgaagtcagattcatcagaacttgacttcttttcgacatctttatctgaatcaggacctgctggatcatagtcatcatcctctgaatcttcagaaggtaatctgaggtcatcaaccttcttgtctatcaaaggttccgaatcatcagaacatgtcaaaaagtctgagtcatcagagtctgatcctccatcctcatcctcttcagacgattcttcatccttaccaaccacatgctcttcaggcatattggggtcaaagtcattgtcgtctgagtcatctgatggaagatcaaatgcgtcatcttgtttagagtcatttgccatagcagctgcatctggaaaaactttctcccaagagtcctcaatggagatgttactcccatggagttcatttattagatctatacaatctatcttgcaatcacatgctgggcagagccatccttcatctcccatggggatatcttcagtacgcaggggaggatttaaacagttctggtggaaccctctgtcacaagctccatcgcagagaatgatatcattacccaatgtagcgtcattcgaaccacaagtggaacaaaagatatcttcgcaagatatttctccttcagaatcaaataaagtttcgtcaattttccccttggagagaagagaatcaatattccggaagacttctcgtattctcaatttgcatcgtaagatttctgatttggctcgttcaagctccttctcaggtcttatcttatccaaactttgatttttccagccttcgctagcataagcttcaattaggctttgctcataattcattcggttcaaaatatatctaactcgtttacgaatttgtgaaaactcatcagtcgaacttttgtttgaggctctgctcatttttcttctcttggcagccggttgtactggagcctgaacatgctcagtagatgttgtctttgaacttgatgtggagcgaagcaccctgacatcactattagatgacatcaaagtatatgcttggcctgttagtccttgggaaccttttttacctctgtttgctgcccttttatagtttttccttatccccaagttatttggcatcgtttgagatgtagacagcaaaactgaatgctcaagagactcaggattctgactagagctcgcaccattttcaatctcaccattgccctcaacaggacagtgagctatatttttttccatagtatatgttcaccaaaatttcatcaatttacagtagacagaaagcactctcagaaaaccatcttctgaggagcacagggcgtgttcggctggctgcaagccgacactgttgcagctgtttggattgctgcagctgcaattcatagagagaaaaatactgtagaagccgcagccgcagccggattgcagccgcagcaagccgcagcgaacaagctgattttctttagagtcaaggagaccttcaataaccccatgcctcccatactaataaaacgcaggatcttattagcgatagagatggctatcattaaaaaaagagctactctttctggcaatctctgtactctagtggcaatctctaaatcgacccatcagcggacacagtcgtgctagtcccactctttgtggcgaagaatcccggcttggatggagcctggagggtgaccgtgtcggttccaagcatcgtcacgacggacgacatcaccgggcgggcagcggggtccccctggacgcagagcagaccgatgtggatgcacctcagcacgtcgccctccgggaagcttccgcccagggacgggtccaccagctccgccaccgtcccggcctcccagtgctcccatacggtggtcaagaggtctccggacttgtgggagctgccgttgttcttcctcccggtgacgatctccagcaccatgacgccgaagctgaaggcgtccgatttcacggagtagttcccgcgcatcaggtattctggtgctaggtacccataggttccgacaacgcggctggtgacggcctgcgtctggtcccggccgaagatcctcgcgaggccgaaatctgagatcttggggttcatcttcacgtctagcangatgttgctggccttgagatcacggtggactaccttgagctggg

SEQ ID NO: 2363 - DNA, 2678 bp, Zea mays
  Clone ID: TF_ZmC1775_4
attcggctcgagatcctgaagttacccagaaattgaaggtgcatacttccgtcctgtgctactactgccattggagcgaagtatgatcctgaagttacccagaaattgaaggtgcattttgagaaagatccatatcctagccgtgaaacaaaagaaaatctatcagaagaactaggcttgacatttaatcaggtctccaaatggttctctagtactcgtcactattcaagggttgcttctgccaaaaaagaaatgcatcctgacagccatacttgtgagaataatgatgagacaactgtagacagcatgcaagcaaaacaacccaatgctggggtgatggaaaagttgacgggggatagaaatggcattgttcctgagaaaccgatggtgcaggacaatcttaaccaaggagcgatggaaaagttaactagggataaaaatgacattgttcctgagaaaccggtgatgcagagcagtcttaaccaatgtaataatgaagatataccgctttctggaacagaaattgagatggagtcttacgaacaagaatcatctgactcaagtgatgaagagtggtccatacttagcacaccacgaaaaacaagattacaagaccatggaaaatcatcagttactgaatcacttcgttctgcaaaacggtgttccagaagagcaccagctagggagcagaataatgaacgtattcagagtgagcagcttcatggttctgcaagtgagcagcaaactgaatttcttcgctccaatgtcagcagtggcaaggtctcaaaatatcattttggccctatagttagtcagaagcttaaggaacattttgaaaaagatccatatccttgccgtgcaacaaaagagagtctggcacaagagctaggactgacatttaatcagatcagtaagtggttctctggcactcgtcattattcaagagatgctgttgccaagaatcagaaacgcccgggagaaaatactactgtgaataataatagcacaacctttgatgacatacaagtaatagaacccaatgttgggttgatagataaaccagctgcagatgtaaatgacatgatttctgaaaagttgatggtccaaataaatcttaacgaaggcattgaagaagatatcccaccgagccaatatgccaggtgtgaagagaaaataactatgactccagctgccatctcaagggaagctggtcttccaggatatggtcctggtcctggagaaaactttcttcaggtcagttcaaggaatactagctgtgagcagagtgtgatactggctcctaccgctatcgcaagagaagttggtccaccaggatatgcgactggagaaaaccagggcaatggggctccatggaatacaagttatgagcgaagactatttatgaatcctgtgaccagctcaagagcagtcagtcctccaggatatgggcctgaagaaagccgaggcagtggcatttcctggaatacaagcagtgaacaaatattgtttatgagtcctacaaccatctcaagagaacttggtccaccaggatatgggcctagagaagaccagtgcagtggcacttcatggaatgcaagctgcgagttgggagtatttatgagtcctgtgaccacctcaagagaagacagtccgccaggatatgggcctcgagaaaaccaggagaatgacaatatgagatgcgagttgagaatgtttacaagtcctacaaccatctccagagaagttggcccaccaggatatgagcttactggaaaaaacaagggcaacggcgcttcatgtactacgaattaccagcagggagcgtttacgagtcctgaagccttcccaagagaagcctgtcctccaggatttgtgtctggagagaaccagggtaacgacactccatggtatatgagcagcaaacagatggcgtttacgagtcctacgaccaaccctagagtaggtccgccagggtatggacaggaaaaccagggcagtcgtgtttcttggaatacgagttatgagcagggagtgtttatgagttctacaaacatctcaagagaagccggtccgccaggttatgggcctggggaaagtcagggcaatatcacttcatggatttcgacaggcgggcagagaatgtttacaggtccttcaactatcccgaacgaagtcgggcagcaaggatatggcccttcaggaatcccgggaacggatggctcaaggagtatggacttgaaagcctttccaccaggatatggacctgctggagaaaaccagggcggtggtgcttcagggagcgtcataagcccccaagctcggtctgcagagaacgtagagttttcagacgacgctagaaaaaaggctatacagcgggagctgagacggcggcagaagttcaggtgatggccgtgatgcgaatttctgatcttgctcatcgaattttgactacggattactactttttaagactacatatccagtcttgatggctgaatgagtgacgaccctagttgtcgagacgcaaaaccttttgttgtatgtgttccttttacagacttccttggcttgtcatgaatttctaatgtgaacttgtgctgtgaaaaaaaaagaaaaaaaaccaaaaaatttattaataagggcggccgccgaaaagtatgctcgtcgagccgggaatt

SEQ ID NO: 2364 - DNA, 909 bp, Zea mays
  Clone ID: TF_ZmC1389_1
ccgggcgagcagcagtgaacgtacttacgtcttcccccagctagctagctatctaccttggtggtggcgattgatatatagattaaacatggcgcctcaaagcctggatctcgggctgagtctcggcctgggcgtggcggcattccagcccagcttctgccacccggccggcaatgacgcggcggagcgggaggccagcccgaccgcggacgagagggagcggaggtgctcgcccgccggcagcccgacgtcgagcggcagcgggaagcgcgtcgcggcggagaggtcggccggcagcggcagcggcgacgaggacgacgacgggggcgctcgcaagaagctgcggctgtccaaggaccaggccgccgtgctcgaggagtgcttcaaaacgcaccacaccctcactccgaagcagaaggcagcgctggccagccgcctgggcctccgggcgcggcaggtggaggtgtggttccagaaccggcgcgcccggaccaagctgaagcagacggaggtcgactgcgagtacctcaggcgctggtgcgagcagctcgccgaggagaaccggcgcctgggcaaggaggtcgccgagctcagggcgctgagcgccgcgcccgcgccagcggcccctctcaccgccctcacaatgtgcctctcctgcaggcgcgtctcctcttcatcctgctcatcctcgccgcctaacacgcacgcgcatgccgctgcagctggcactggcaggagcgtggcggcggcggcggcgacgacgttgcccgcccaccggcagttcttgtgcgggttcagagacggcgcgggccgtccatccatccatgtatatttttgggcatgcatgctgtaattctgtccccctcgatcggggggccgatttactggaaatttttttttgctgccgcc

SEQ ID NO: 2365 - DNA, 1529 bp, Zea mays
  Clone ID: TF_ZmC3817_1
ttccttgccactctctatttcccccagtgctagctctctctctctctctctctctcaaatactgcccatgcggcttgccctcctcgtttgatgaggccaatggccagcaatggcatggcgtccgcaccctcgcccttcttccctccaaacttcctcctccaaatgcagcagacaccctccgatcatgagcatcaagaacagcatcaccaccaccaccaccacgagcaccacctcgctgctcctccccttcatcctcaccacaaccccttccttccctcctctcaatgcccctcgctccaggacttcagaggtatggcgccaataatgctggggaagcgtccgatgtacggggcggacgtgcaggtcgtcggaggcgaggaggtgaacggctgcggcggcgtgaacgaggacgagctgtcggacgacgggtcccaggccggcggggagaagaagcggcggctgaacgtggagcaggtgcggacgctggagaagaacttcgagctcgggaacaagctggagcccgagcgcaagctgcagctggcgcgcgcgctgggcctgcagccgcggcaggtggccatctggttccagaaccggcgggcgcggtggaagacgaagcagctggagaaggactacgacgcgctgaagcgccagctggacgccgtcaaggccgacaacgacgccctcctctcccacaacaagaagctccaagccgagatactgtctctgaagggcagggaggcagggggctcgtcggagctgatcaacctcaacaaggagacggaggcgtcctgcagcaaccgcagcgagaacagctccgagatcaacctcgacatctcgcgcgcgccggcgtccgaggcccccctggaccccacaccgccgcccggcgccggcggcggcggcatgatccctttctacccgccttccgtcggcggccgtcctgcttctgctgctggcgtggacatcgaccagctcctgcacacctccgcccccaagctggagcagcacggcagcggcggcgccgtcgtcgtccaggccgcggaaaccgccagcttcggcaacctcctgtgcggcgtcgacgagccgccgccgttctggccgtgggccgaccaccagcacttccactgatagatcgcctcctcttgtccccgccacaagaaataataattctcaatgccacaattgcgatcaacgttcgatgcagccagatggaacagcggaggatcgattcttggcgagtggagcagcgagggagagagagagagagagagagcgagtaagcaaggttgtgtatgatctgatcgatcggcgaggtcgtagctgcgagatatgcgatggagctagtagctgatcatggtggaaagtggggtttgtaagcgcaataagcggagatgcggtgtaatttaattaggtaggttttggtttgagttttgatagtatctttatttttgcgtcttcattttttttttggtcttcgcgttttgttcgcttttttttttgttcacacatatataaatttgtgaattgtgatg

SEQ ID NO: 2366 - DNA, 3378 bp, Zea mays
  unsure (1)..(3378): unsure at all n locations
  Clone ID: TF_ZmC13476_1
gccggccgggtcggggcttttccctgttcctcccatccctccctgatctctcccatccccttctcctgggctggctggccagtgacggaccagccctctcccacctcgcacgcccctgtggctcctgaccttcccaccaccggagttaatgccgcctggcctggccgtctcgctgtgcgcggcgtgggacgtggtagcagtaccgcgcgtcgcggttggacgggccacgggcgtaagtgcgtaagcgaggacgcgaggtgaggtgtggcgcgtgtctccctgtcgcccgcagcttctttttattcctccggtccggttccgttccggggaatggattctggggagccggcgcggccgcggctgctttgatcccttgccgcctgcctggcctgggctctcgtaccgcaacgcaatttggcggcgtgcgtgttccttgcttagattggcgtgatccagctctgctccaaccgtagaggtgcgcgcacttgctgctagctaagaagcatctgcagtgatcgttccaggctcgtgaggaaactcatttgctcgaatcatgtccgactttgtcgggagcagatataccaagcaagaagatttccatgttttgttgagcaagaaagatcctggagaaccacctgaacataagcacgtcctgtggatggcacactggaccaaagcaagcagcaacaatggcagcagcaatcctttggagggtaccaccaagggcactactacgaaagatagcgagaccttgccttatgaattcacggaatctacggttgctaaaaggctcatggtaggagtaagccatggaagcgcctccatgcagcatgaccgacaattcaattctagtgtgtggggtatggcacgccatatttccaacgaattgggaccgaagaatagtgaacatgttgatgggtcttttgaaaaatttgtgaagaaggatgctgtgaacttgagagcaagggcagttgtgtcagaaacatactctgttcacaagctttcagagttaccgttggattttcagcaccttggggactccgacgatccaagtccagattggagccactttccnccgcaatcaaggttgtcacgcccgacgaggatggctgccagtcaccgcacggccggtgggggccccagcgacggctccagcgcaggcgcgaggaagaagctccaactcaccaatgagcagtcgacgctgctcgaggacaccttccgcgcccacaacatactctccaacgcgcagaagcaggagctcgcacggcaggtggatctcagcgccaggcaggtggaagtgtggttccagaacacacatgttcagataacatgttctaacctgccggagagtttgaccctattctcaacggccaagcgggctttcatcctgataatccagggccgtctgcatcccatgtgatggccctatcgtcacaagaatacatgatgcactcacatcaaacagctgacgagaacatggatacgtgcaaacctgcagaaggctttgcatctcgtgtagaagatcatgctggcttcaattcagatcctccagggccaaagttaaaagggcaattattggataccatgtcatgttcttgcagcaaggatgacaacaactcagcagattgtccaatagatgagcagcacacaagccactattttgcaaactcaaagcatgaactaccctctgtatctaacaaaaagaagttcaagtttgcaggaaacaaccacaatcgaattgttgcaagtgcgtcccacgatctgaagacaaaaagatctgctgtccataaacaacaaagtgctgcagaggcagtgttctgtgcaccagtacttgatagtgagtttcagaatgaacctataactatttccaacatcgacaagaaggatggtgaaaattttcatgatatgtataaatgtcttggcaaggctgtttcgtgtcctttgttaccttatgagcatcgtcatctgaatacacagagaacggaatctgcagaaaatttgaaagtctgcacgcttcctgatcatcaaactgcaaataaattgacagaaaagagtcatggtgagctgctgacatatggaccaaagccaaagaaaaatacaggctcttgcaaccgaagaagcctctatttattcgaaaagctaacgattccttccaaatcacaaagtgcatatcctaaaaattctgcgtcttcaggaaaatctagcggctttggagtttgtatgtacggcaccaatattggaagccagttattcggagcacagaatcaatcttcatctaagactgaaacattgcacagcgatgctcttattgggtccaaatcctcagcaggcattgcttcattatcggcacaaaaggacaacggttgcccagccccagccccagccccagccccagacgaagcgaaaagcgagcagctagcagctccgtcgtccaacaccaagcagggaggagaatcagcatacagtaaagaagatggatctcataatctcaacgaaggccacgatgtttcgtccaaagcagctatcggtagcaagcaaccatgcatgcctggagcaggaatcacgaacctggatctcatactctcccagatgagcaggatgagaaaccagattcccagtggcggtgtaactcagccaccaataggcgccgagccaagtgatagatggctcaagcgcctgcagctcggcgtaccagaccctgacgtccctggttccaagaccaagaggccaaaagtcggagacagtcctccgccacccaggcaaataaaccggtcctttgacgtggcactcccttgcaacccaggaaaacaggaggagcagagcttgaatggaggggggaaagtgcagggaagagcccccccgattccagagaagagcgtcagtcgctggatagggagatggtgccagggcggcactcctgttttccgtgaaggcccaggccagcagggaaggcaggcaacgaaacctgctggccggttgtccgaggagcttgaaggacagttctttccaagcactgcggcgatggcgatgatggggcgcgcgatgcacaagctccggccgtgcgagcagcagcagaaggggccattcgtggtgtggaagatagattgacctttttgggtgtcatatacttgtttctttaaaaataaaataaaataaaatgtaaggcaactgtgcattttgcctggctgtggttcatggtttattgctttaatttctggtagtggaagtagctaggtatagtgcctactgatggtgtaatgctttgctgtaccaaaagtgtaatactatactgtttactgtgtcgttcgttatggtgatgtacaccatggagtaatcgaatgggacagacgaatgaactggaactggaaggtgagcatc

SEQ ID NO: 2367 - DNA, 1196 bp, Zea mays
  Clone ID: TF_ZmC3309_1
atattacttataaccattacatatcacttagtatttggaattttccaaacttgtccgtgctgtaatcaatttatatacttcaattagctagttttcgtcaacttatgcatattttttattttaagttttgtgtaagtcattaaattcttcccctatatttctaagattcatcctaattacttgcatggtggccatacaaaattccacctgtagccggatcaactgaattttctgtttcgttcctcaggattgaggtttagcaatctgtactgtgaccctctaatcatccccggcggtcacaagatcacggcaaggcagcggtggcaaccaacaccgatgcagctgcagatcctggagagcatcttcgaccagggcaacgggacaccgagcaagcagaagataaaggagataacagcggagctctcgcagcacggccagatctcggagacgaacgtgtacaactggttccagaacaggcgggcacggtcgaagcggaagcaggccgctgcttccttaccgaacaacgccgaatccgaagccgaggcggacgaggagcctctcgccgacaagaagccgaagtcagacaggccgccgccgccgccgccgccgatccaggataataccaaggctacgggcgctctcagcgccgacagggtctctggtgggacgcgtcacttggacacgggtcatgaccagaccagtggcgtgatgtatgggtgcaacgacagtggcttgttgagatcgtccggcagttcgggccagatgtccttgtacgagaacttcatgtcgaatccaagaatcgatcgtttcccggcgaaggtggagagctcccggagcttcccccatctccaacaacacggggaaggctttggcatgtttggatgacatgcatgctgctgcgctgagttgccgtgtgaaaaatggaggtcgacacagcgtgcgttcgatttgctgacgtgaaagttttatcttggatggtacgtgttgcttatcacggtctggttgaccacctccgcggatggtagctagctagcttgaacgaacctgctcttttggagtagctgtaagaggttgatatatagtagtatttgcacgtagtctaattactctaaattatcagcatataattcttcatgtttgcagatttagcacgagaccagtcctacgctgctgctgctgagcagcaggttgtggtt

SEQ ID NO: 2368 - DNA, 3097 bp, Zea mays
  Clone ID: TF_ZmC39640_1
tccatatctcagtcacacactcacgcgcgcgcgggggccgggggccgctggacccgccgttctccttctcctccccccctcgttcctctcgtctcaccattactccctacacgcgccgcggctaggattccgccgaggagacgctgcgcgcgtggatctccggtgctgtcctgctagcgtgcgacgaggccaggcaggcgcgcggccggcgccatgagcttcgggagctattcgacggcgggtccggcggcggcggaggaggaggagggatgcagttcccgttcacgaccgggttctcgtcctcgccggccctctccctcggtctggacaacgccggcggcggcatggtcggccggatgctccccgtgggcggcgcccccgcggacggcgggatggcgagggacgccgccgacgccgagaacgacagccgctccgggagcgaccacctggacgccatgtccgccggcgccggcgccgaggacgaggacgacgccgagccgggcaacccgcgcaagcgcaagaagcgctaccaccgccacacgccgcagcagatccaggagctcgaagcgctgttcaaggagtgccctcacccggacgagaagcagcgcggcgagctcagcaagaggctcggcctcgacccgcgccaggtcaagttctggttccagaaccgccgcacgcggatgaagacgcaactggagcggcacgagaacgcgcttctcaagcaagagaacgacaagctgcgggccgagaacatggcgatccgggaggcgatgcgcagcccgatgtgcggcagctgcgggagccccgccatgctcggggaggtgtccctggaggagcagcacctgtgcatcgagaatgcgcggctcaaggacgagctcaaccgcgtctacgccctcgccaccaagttcctcggcaagcccatgcccgtcctctcggggcccatgctgcagccgaacctgtcgctgcccatgccgagctcgtcgctggagctggcagtaggcggcctccgtggcctagggtctatcccttccttggacgagtttgctggcggtgtgtctagcccgttgggcacggtgatcacgcctgcacgggcgaccggatctgctccgccgcctatggtgggcgtcgacaggtccatgctgctggagcttgcgatcagcgccatggatgaactagttaagctggcacaggttgacgagcccttgtggcttcccagcctcagtggctctcccgacaagaagctgctcaactttgaggagtatgcccactcgttccctccgtccgtcggcgccgtgaagcctgtgggctatgtatccgaggcctctagggagtctggcctcgtcatcattgacaacagccttgctcttgtagagacccttatggacgtgagacggtggtctgatatgttctcgtgcatgattgctaaggccacagtcctagaggaggtgacatctggcattgcaggaagtaggaatggtgcgctgctgctgatgaaggctgagctacaggtgctctcacctctagtgcccatcagggaggtcacatttctcaggttttgcaagcagctggctgagggtgcatgggcagtagtggatgtgtccattgacggattggtgagagatcacaactctggaacagcatccaacgccggaaatatacggtgcaggaggttgccttctggctgtgtgatgcaggacactcccaatggctactgcaaggtcacatgggtagagtatacggaatacgacgaggcgtcagtacaccagctctatagaccactcatccggtccgggctggcctttggggccaggcggtggcttgcaatgctgcagcgccagtgcgaatgcctggccatactcatgtcccctgatacagtttcagctaatgactcgtcagtcataacacaggagggcaagcgaagcatgctgaagctggcacggcggatgacggagaacttctgcgccggggtcagcgcgtcatctgcacgtgaatggagtaagctggacggcgctgcaggcagcatcggggaggatgtgcgggtcatggcacggaaaagcgtggacgagcctggggagccgccgggcgtggtcctaagcgcagccacatcggtgtgggtgcccgtggctccggagaagctcttcaacttcctccgtgacgagcagctgcgtgcggagtgggacatcctcagcaacggaggcccgatgcaggagatggccaacatcgccaaggggcaggagcacgggaactcggtgtccctcctcagagccagtgccatgagtgccaaccagagcagcatgctgatcctccaggagacttgcactgatgcatcaggctcgatggtcgtgtatgctccagtggacatcccggcgatgcagctcgtcatgaacggcggggactccacctacgttgctctgctgccgtctgggttcgccatcctgcctgatggcccaagcagtgtcggcgccgagcacaagacaggcggctcgctgctcaccgtcgccttccagatcctcgtcaacagccagccgaccgccaaactcaccgtggagtcagtagagaccgtgaacaacctcatattctgcaccatcaagaagatcaagacagcgctgcagtgtgacgcttgactgtcgcgtgtcgccgcagggggggtggtcggtgatgacgagcctgagtcaagaacgaacctcgtgcgggaaagaaacctttgctaggtgataaggatccagcttggacgggtctttagcacggagcaatggtggtggttcgggtattgactcggtctctgtcatctgcttcttctccatggcaacctgttgtctgatacgggatcttgaatagtgcgtggacaatgatgtggttagatggttaaaatcttttgtttcagtcccatcgtttcatcagggaatcaaactttgagttttggccgcctcgttgttagttgtaatatacagttcattttatattgtgaggtaagctatatgccatgtgtaaacatgagagctcaggaatgttgggtagcatcatgagtgtagctaggcatcgaactatcggccaataaaatcccacgcgtctgatcgataaaaaaaaaaaaatgttt

SEQ ID NO: 2369 - DNA, 2432 bp, Zea mays
  unsure (1)..(2432): unsure at all n locations
  Clone ID: TF_ZmC354_2
gccggccggggtcctctcccttcggcacgtcgctgcccactcccatcccacgcgagcacaaccaccacctactccctactccctacactactccccccgcaagcacgcccagcgccatggccatggcggcagcgcgcacgggggcctgctactccgcctccgcttcctctcctctcctgcactactagcgggtccgctggcgacgatggcggcggtggcgagcagggagaggctctccccgggcgccgcgccgcaggtggacgcgggcaagtacgtgcggtacacgccggagcaggtggaggcactggagcgcgtctacagcgagtgccccaagcccagctcgctgcgccggcagcacctcatcagggactgccccatcctccgcaacatcgagcccaagcagatcaaggtctggttccagaaccgcagatgccgggagaagcagcgcaaggagtcctctcgtctacaaaccgtgaaccggaagctgagtgcgatgaacaagctgttgatggaggagaatgaccggctgcagaagcaggtttcccgtctcgtctttgacaacgggtatatgaagaatcgactccacagtccttctgtagccaccaccgacacaagctgtgagtctgtggtgacaagtggtcagcacaaccaacagcaaaacccagcagttctgcatcctccacaaagggatgcgaacaacccagcaggtctactcgctattgctgaggagacattggcagagttcatgtccaaggcgactggaactgctgtcactgggtgcaaatggggcagaggcttcaatgatgctgtgagtggctttccagatgatggctggtcttgtttgttgaacaccgatggtgctgaggatattacagttacaatcaactcatctccaaataaacttgttgggtctcatgtcagcgcttccccattattttctgctatggggggtggaatcatgtgcgcaaaagcatcgatgctgctgcagaatgtgccacctgctctacttgtgcgatttttgagggagcatcggtctgaatgggctgatcctggcatcgatgcttattctgtcgcctctttgagggccaacccatacactgttccaggtttaagggctggtgggtttatgggcaaccaggttatactgccccttgcacgcaccttggagcatgaagagtccttggaggttattaggcttgaaggacatggctttagccatgaggaggtgcttatgtcccgggatatgtttcttctacagctgtgcagtggcgtcgacgaggatgcacctggtgcgtgtgcacagcttgtctttgctcctattgatgaatcttttgccgacgatgcaccgttgctgccctcaggcttccgtgtgataccgcttgatgctaagacggatgtgccaacggccaccacacgcacgcttgaccttgcctctgcgctcgaggttggatcaggtggaagcggcatgcgcgcttcatgcgatggttccggcacgtgcgccacgagatcggtcctgaccatcgccttccagttctcgttcgagaaccaccttcgcgagagcgtggcggcaatggccaagcagtacgtcaggggcgtgatggcctccgtgcagagggtggccatggcgatcgctccttctcgcctcggttcgcgtatcgaactgaagcatccgccgggctctcccgaggcacttgcactagctacgtggattggcaggagctacagggcgcacactggaacggagatccgctggtcggacaccgaaggcgcggactctccactgatgctgttctggaagcacagcgacgcgatactctgctgctctctgaagccgccggctttcacgctcaagttcgccaacagcgccggcttcgacatcctggagacgacgatggtgaacatccaggacctgccgctggaggcggtcctcgacgaggagggccagaaggccctgtccgcgcagctccccgcgatcatgcagcagggcctggcgtacctccccggtggcgtgtgcaggtcgagcatggggcggcaggcgtcgtacgagcaggcagtggcgtggaaggtggtgggtgacgacggcgccccgcagtgcctggcgctcatgctcgccaactggaccttcatctgaggctcgcaacatcgctcggcagcgccagaccggatgccgccttttgccctactacgtatcattagttgcttttccgttgtgccgcctgtgttaagaatttgtgtactgtgtggatgatcgagaactgactctgtttgtgtgtgtgcgtgacaaacaactacaacagctgtatgcgtgcctggtcgtggtctcgtctccccggcttgtcgccggcgacattgatcactgttgcaggttgcagtattactatttgctagttctgcttgcnnnnnnnnnnnnnnnnnnnnnnnnnnnnnnnnng

SEQ ID NO: 2370 - DNA, 496 bp, Zea mays
  Clone ID: TF_LIB4148-005-Q6-K1-H3
tccggtacagtggggcatatcgatatgctgccagcggttgttccatacaaaggatctctgagagagatagatgcaggaccaatgacaagctactaccgagagaaacgagaggggcactggccgagtatggcagcgggcgtggccatggacggcgccgaggcgaccgggcggactgggatgaggaatggcggcgataggcaaaggaaaatgcagcggcgcactcgacaagaacaagaacgctcctatgacgagcaaaccaaatcgatggagtccatgttcacaacacatgccaagctggatccccgccagaagctgcaactggctcgggagctctgcctgcatccgcaccaggtggccatctggttccagaacaagcgctcacgctagaagtacaagcgtctggagcgcgagtacttagctctgcgcgacgactaccacgcgcctactctgtaactactagtccctcaaagacgagtaagcgcacgcctcctcaagc

SEQ ID NO: 2371 - DNA, 358 bp, Zea mays
  Clone ID: TF_LIB3245-448-P1-N1-C8
cggcggttcacggaggagcagataccggcggtggagtccacgttccgcgcgcgccacggccacgccaagctggagccccgggagaaggcggaactggcgcgggagctgggcctgcagccgcggcaggtggccatctggttccagaacaagcgcgcccgctggcgctccaagcagctcgagcacgactacgccgtgctccgcgccaagttcgacgacctccacgcccgcgtcgagtccctcaggcgcgacaagctcgccctctccacgcagctttttgcttggtgcgcgcgcgtgcatgaccagttgaacgagctaagcgagaggctgagagaccgggaggatcctgccgccgccggct

SEQ ID NO: 2372 - DNA, 1441 bp, Zea mays
  Clone ID: TF_ZmC17115_1
cccccgcgtccgtgcccaacccaaccgctgcttttatttatacacctcctttggcctcttgcatcatcagctagtttacttgcgctgggcaagtctctagtgccagcttgtttacttgtagatccaggctctctcctctccaagcctttagcacagcaaagtcccagtgccatccctgttctgccgttgtatgtgaaccctcctatgcaatagcaagatctccatctctctcagctctctccagtttcatttccactcaagagttgagcacggatgaagaggccgaccagcagaggttcttcaatggtcagcgggcaagcaaccacagatctacaagaagatagctgcaggtccatggagccgcacggagtggacggcgatgctacggccgcggctgagcgcgacgacgtggacgccggggcgtacgacgaggaggaggacgaagaagaggagctcgcagggtcccgcggcggcctcggggagaagaagcggcggctggcagcggatcaggtgcgcgcgctggagcggagcttcgaggtagacaacaagctggacccggagcgcaaggcccggatcgcgcgcgacctcagcctccacccgcgccaggtcgccgtctggtttcagaaccgccgcgcgcgctggaagaccaagcagatcgagcgcgacttcgccgcgctccgcgtgcgccacgacgcactccgcgtcgagtgcgacgcgctccgccgcgacaaagacgccctcgccgccgagataaaggagctgaggggcatggtggaaaagcagatggaggtgaagctggagtccgcggcggaggagctgctgccggtggcgacgaggtcagcagcagcagccgctgtgtataacaaggacgggtcgacggacagcgactcgagcgccgtgttcaacgaggaggcgtcgccctacccttactccggcgcggccttagaccatcagcagcagcaagaaaccagccacccgctgggcttcacgggtttcacctccttcttgacgtcctctttcccttccgtataccatggggattcgcatttggaccaggaagcggacggcttcttcagcgccgccgccgccggcgacggattcttcgccgaggagcagagcgcaggcatcggcagctggtacggcggtgagggttggtagaacagcaacagctaagctgttggctgcctggaggctggagatcactcttggtatcgtatctaccattcttgtaaaatatggcgctgtacattatattatgcatgcatgggtccgggacgcggtaactatatactactatgtagagttaatttatatggagtagttaatttctgtatttttcactggcgggctgaaagcctgaaacacgggctacgagaggagataggccgggtaatacggttattgttctataaatcttggttgacatgcagttaatttttag

SEQ ID NO: 2373 - DNA, 1148 bp, Zea mays
  unsure (1)..(1148): unsure at all n locations
  Clone ID: TF_ZmC254_3
gccggccgggtcggggcacttgcacctgaacgtagttttctacgcattcagtccatacaggtcccttgagtcttgagcagcgaatcagcgaacgaaacagcaggtagcgcccgcggaatccaatcagcaacggcgtcttgtgtggcctcgtggatcgtgatccagcacgccgcgcgcaccgcaacgcccccgcgccgtaacaagcaccaccacttgctcgcacgcaccgcggcaccggtaaaatacgtgaccgccaccggcatactagtaccccgtgagctggcgctggctctggctctggctctggcagtccggctggcaggagagaattggcgagggatttttatcgggagcgaattcccaggcagcccctgtctagagagggacagggccacgcacgcacgccaccgcgctccattggccgccccgttgccatcaccgcgcccatcgccccatcctccgattaaactactccatcgctagtaagcagaatcgatcgatcacagcaagctcgcacacccgcgatccatcctccattagctcctcctcttctccttgctcctccagatcaggtgcatgacagcaccgcgcgctcaggtggccaccggcgagacctagctaggtagggagggaggctgggagggagggagcgatggagcagggggaggaggacggggactggatgatggagccggcggcggggaagaagggcggggcgatgatcgacaggaagaagcgcttcagcgaggagcagatcaagtcgctcgagtccatgttcgccacacagaccaagctggagccccgccagaagctgcagctggcccgggagctcggcctgcagccgcgccaggtcgccatctggttccagaacaagcgcgcgcgctggaagtccaagcagctcgagcgccagtacgccgcgctccgcgacgactacgacgcgctgctctccagctacgaccagctcaagaaggacaagcaagcgctcctcaaccagctggagaagctagcggagatgctgcgggagcccggcggggccaagtgcggagataatgccggcgctgcccgcagggacgacgtgcgcttggccgtggncggcatgaacatgaaggacgagttcgtggacgccggcggggccagcaagctctact

SEQ ID NO: 2374 - DNA, 2047 bp, Zea mays
  Clone ID: TF_ZmC12553_1
cccacgcccccctgctgtggcctctgctctctcctgccagttcacctgctgcctccggtgcccgctgctgtgcctcgctcgctcaccaccaccaatcgccaccccgtgcggcaccattccactgcacaaacagcgcgccactttcccaattcccgtcgcgtggcctccttccgttcctggcacactttgtgcgtcctgtagcgagggggtgatcggcgatggactgggggaacaggaccaaggccgccgccgccgctgcggcgccgtgacgagagggccgggggaggggaagggctcagaggatacgtcaaggtcatgaccgacgaacagattgaggtcctccgctagcgtgatctcgatctacgccaccctcggatagcgtggttggacaggaccaaggcctccgccgccgccgccgcagcggcggcggacgagagggctgggggagcggaagggctcgcgggatacgtcaaggtcatgaccgacgaacagatggaggtgctccgcaagcagatctccatctacgccaccatctgcgagcagcttgtcgagatgcaccgcgccctcaccgagcaccaggacaccattgcaggagagctgcgtatcattgcattaagaagaaaagccgaatacaaatggcctgcgaggctgcaaccccgggcaaaggagtccgaagaggaaacccaaagaaaatataaagaaactactaaaaaagagaaggccaggtcacaaccactaactacaacttcctaagaatttcctgatccaagagcacgcaaaccagctgctccaacaaaacaccaaagattgcgctcatccataagggaccggagatttgcataaactttttttagctttcattaggtcattttttaaatattccgtattccaatgattcaccctaattacttacattgatggccgcacaacatcccacctgtccctttttagaataatctttaaaacagacttcactgaatttgcccttcctcctgtacaagtgttttaatgctcctttgtaatgtatgcattgtcgatggaatatagtcccttcttttttttcccgatcaactgggtttttgtttcttcttcaggaattaggtttagtaatctgtactgtgatcctcaaattatccctggaggccacaagatcacagcaaggcaacgatggcaaccaacaccaatgcagctgcagatcttggagaacatctttgaccaaggcaatggaacaccaagcaagcagaggataaaggagataacggcagagctctcgcaccatggccaaatctcggagacaaatgtgtacaactggttccagaacagacgggcacggtcaaagcggaagcaggccgcttctttaccgaacaatgctgaatctgaagctgaggtggacgaggagtctctcaccgataagaagccgaagtcagatcggtcgctccaggacaacaaggctatgggcgctcacaacgctgacaggatatctgggatgcatcacttggacactgatcatgaccaaatcggtggcatgatgtatggatgcaatgacaacggcttgagatcgtctggcagttctggccagatgtccttctacgggaacatcatgccgaatccaagaatcgatcatttcccggggaaggtggagagctcccggagcttctcccatctccaacacggggaaggctttgacatgtttggatgacatgatgcggcgctgagttaccgtgtaaaatgtgatggttgacacatcgtgcgttcaatttgctgacatgaaagttgatgttggatgtccgtgttgcttatcacgttctggttaaccacctccgcggatggtagctagcttgaatgaacctactctttgggatagctgtaagaggttgatattatagtttgcccgtagtctatatacgctgaactatcagcatgtaattctccacgtttgcaaatttagcacgggtatgcagcagcctgtggttaaaccttcgtgtgtgtgaaaccatttcttgcttgcttttaagaaaaaaaaaaaaaaaaaagcggcccgctatag

SEQ ID NO: 2375 - DNA, 1612 bp, Zea mays
  Clone ID: TF_ZmC12553_2
cccacgcgtccgcccacgcgtcgggctcgaggccggccggggtggccggtgcgcgcgtccacaaccgccgccaccgccttcccacttccaatacgcctgctgccactttccccattcctgtctgaccatccccacgcccccctgctgtggcctctgctctctcctgccagttcacctgctgcctccggtgcccgctgctgtgcatcgctcgctcaccaccaccaatcgccaccccgtgcggcagccgcgctgccatcccgcggaggactggaggagcacgcatatccgagccttccctgccgcgtcgcatggactcatgctgtcgcgggccgcctcccgcatcgcctccaaccgggtgcctgcctagctggccgattttcttcctcgcgtagccccattccgcagcacaaatagcgcgtcactttcccaatttctatcgcgtgccccccttccgatcctgccatttcgtgcatcctgtagcgtctggcagtgcgggggtcatcggggatggagtgggtggacaggaccaaggcctccgccgccgccgccgcagcggcggcggacgagagggctgggggagcggaagggctcgcgggatacgtcaaggtcatgaccgacgaacagatggaggtgctccgcaagcagatctccatctacgccaccatctgcgagcagcttgtcgagatgcaccgcgccctcaccgagcaccaggacaccattgcaggaattaggtttagtaatctgtactgtgatcctcaaattatccctggaggccacaagatcacagcaaggcaacgatggcaaccaacaccaatgcagctgcagatcttggagaacatctttgaccaaggcaatggaacaccaagcaagcagaggataaaggagataacggcagagctctcgcaccatggccaaatctcggagacaaatgtgtacaactggttccagaacagacgggcacggtcaaagcggaagcaggccgcttctttaccgaacaatgctgaatctgaagctgaggtggacgaggagtctctcaccgataagaagccgaagtcagatcggtcgctccaggacaacaaggctatgggcgctcacaacgctgacaggatatctgggatgcatcacttggacactgatcatgaccaaatcggtggcatgatgtatggatgcaatgacaacggcttgagatcgtctggcagttctggccagatgtccttctacgggaacatcatgccgaatccaagaatcgatcatttcccggggaaggtggagagctcccggagcttctcccatctccaacacggggaaggctttgacatgtttggatgacatgatgcggcgctgagttaccgtgtaaaatgtgatggttgacacatcgtgcgttcaatttgctgacatgaaagttgatgttggatgtccgtgttgcttatcacgttctggttaaccacctccgcggatggtagctagcttgaatgaacctactctttgggatagctgtaagaggttgatattatagtttgcccgtagtctatatacgctgaactatcagcatgtaattctccacgtttgcaaatttagcacgggtatgcagcagcctgtggttaaaccttac

SEQ ID NO: 2376 - DNA, 1406 bp, Zea mays
  Clone ID: TF_UC-ZMFLB73016H05_FLI
gcggagcgcaagtagatagctgctgcgtcttcctggcctgagggtttcggattcatcagccgggccgccggggtcgccatcgccgccgttgggacggcggcggcggagtttggcgtcgagttcttcagagggttaggttaggtgcacgcgtctctcgcgttcctccttcccaactcgaattcctttctttccatacccgtccccatgacgttcgttcttccatgattcccttccatatttgctccagccaggccatccgcggctgcgtggctgctctcctgctattttaatgcctgccttctctccctctcacgcctcataaaaaaaactaataattccttgggatctgaggggatccgcgtggggttggtaggatcgcgggcagagattttagccaggactggaggaaaaccagtccgctctctctccatgagcttcggcggcatgttcgacggcgccggctccggcgtcttctcctacgacgctaccggcggcggcacgggcatgcacaaccccggccgcctcgtcccggccccgcccctgccgaaacctggcggattcggcgccacgggtctctccctcgggctgcaaacgaacatggaaggggctcagctgggcgacttgggtcgtatgggcctgattggcggcggcgggagcgggagcggaggcgacggggactcgctgggccgcggccgtgaggacgagatcgacagccggtcaggcagcgacaacgtcgacggcgcctccggtgacgagatcgacccggacaacagtaaccctcgcaggaagaagaagcgataccaccgccacacaccgcagcaaatccaagaactcgaagctgtgttcaaggagtgcccccaccccgacgagaagcaaaggatggagctcagcaagcggctcaacctagagagccgccaggtcaagttctggttccagaaccgccgcacgcagatgaagacgcagatcgagcggcacgagaacgcgctgctgaggcaggagaacgacaagctgagggcggagaacatgacgatccgggaggcgatgcgcaaccccatctgcgccaactgtggcggcgcggccgtgctcggggaggtgtcgctggaggagcagcacctccgcatagagaacgcgcggctcaaggacgagctggaccgcgtctgcgccctcgccggcaagttcctcggccgcccaatctcctctggcagctccatgtcgtcgtccctgcaaggctgctccggcctcgagctcgccgtcggctccaacaacggctacgggcccggtcccctcggcgcgtcagcgctgcagcccctccccgacctactcggcgccggccttccgggccccgtgggctcggccgccatgcgcttgcccatgggcattggcgccctcgacgttgcgctgcacgg

SEQ ID NO: 2377 - DNA, 3856 bp, Zea mays
  Clone ID: TF_ZmC3271_1
cgttgctgtcgattcttccgccctcttcgtgagtccttcccctaggcgctactcgtctgctctcctctcttcttgtcacgagctctcctctcttctttccagtagctcgctcgccaggccgccaagccacatgcagcatgtggcggagcgcaagtaggtagctgctgcgtcttcctggcctgagggtttcggattcatcagctgggctgccggggtcgccatcgccgccgttgggccggcggcggcggagtttggcgtcgagttcttcagagggttaggtgcacgcgtctctcgcgttcctcctgcccaagtcgagttcctttctttccatacccgtccccatgacgttccttcttccatgattcccttccatatttgctccagccaggccatccgcgggctgcgtggctgcgctcctgctattttaatgcctgccttctctccctctcacgcctcataaaaaaaactaataattccttgggatctgaggggatccgcgtggggttggtaggatcgcgggcagagattttagccaggactggaggaaaaccagtccgctctctctccatgagcttcggcggcatgttcgatggcgccggctccggcgtcttctcctacgacgctaccggcggcggcacgggcatgcacaaccccggccgcctcgtcccggccccgcccctgccgaaacctggcggattcggcgccacgggcctctccctcgggctgcaaacgaacatggaaggggctcagctgggcgacttgggtcgtatgggcctgattggcggcggcgggagcgggagcggaggcgacggggactcgctgggccgcggccgtgaggacgagatcgacagccggtcaggcagcgacaacgtcgacggcgcctccggtgacgagatcgacccggacaacagtaaccctcgcaggaagaagaagcgataccaccgccacacaccgcagcaaatccaagaactcgaagctgtgttcaaggagtgcccccaccccgacgagaagcaaaggatggagctcagcaagcggctcaacctagagagccgccaggtcaagttctggttccagaaccgccgcacgcagatgaagacgcagatcgagcggcacgagaacgcgctgctgaggcaggagaacgacaagctgagggcggagaacatgacgatccgggaggcgatgcgcaaccccatctgcgccaactgtggcggcgccgccgtgctcggggaggtgtcgctggaggagcagcacctccgcatagagaacgcgcggctcaaggacgagctggaccgcgtctgcgccctcgccggcaagttcctcggccgcccaatctcctctggcagctccatgtcgtcgtccctgcaaggctgctccggcctcgagctcggcgtcggctccaacaacggctacgggctcggtcccctcggcgcgtcagcgctgcagcccctccccgacctaccctctagtcacggtggcattccagatcctggtgaacaactgcgcttgcccatgggcattggcgccctcgacgttgcgcgtcagcaacctgctctcctgggcatcgaccgcaccgtcctcctcgagctggcgctcgccgcgatggaggagctcatgaaagtggcgcagatggacgagccgcctggctccgcagacccgacggcagcggcttggaggcgctcaacctcgacgagtaccaccgagcgttcgccagggtgttcgggccgagcccaacaggctacgtcaccgaggctacccgcgaggccggcgtcgccataaccagcagcgtagacctcgtagacagcctcatggacgcggctcggtggtcggagatgttcccgtgcatcgtggcgagggcgagcacgacggacatcatctcgagcggcatgggcggcacgcgcagcgggtcaatccagctgatgcacgcggagctgcaggtgctgtcgccgctggtgccgatccgtgaggtggtgttccttcggttctgcaagcagcacgccaaggggctgtgggccgtggtcgacgtctcggtggacgccatcctccggcccgacggcggccaccaccacgcgcagaacggcggcggcgccgggtacatgggctgccgcctgctccccaccggctgcatcgtgcaagacatgaacaacggctactccaaggtcacgtgggttgtccacgcggagtacgacgaggcggtggtgcaccaactctaccgcccgctgctccagtccggccaggcccttggcgcgcgccgctggctcgcctcgctccagcgccagtgccagtacctcgccatcctctgctccaactctctccctgcccgcgaccacgccgcgatcacgccggtggggcggaggagcatgctgaagctggcgcagcggatgacggacaacttctgcgccggtgtgtgtgcgtcggcggcgcagaagtggcggcgcctggacgagtggcgcagcggcgagggaggagacgctgctgggaacggcggatcagcagccgcgggcgagggcgaggagaaggtgcggatgatggcgcggcacagcgtgggggcgcccggggatccccccggcgtggtgctcagcgccaccacgtcggtgcggctgcccgccacgtccccgcagcgcgtgttcgactacctccgcgacgagcagcgccgcggcgagtgggacatcctggccaacggtgaggcaatgcaggagatggaccacatcgccaagggccagcaccacggcaacgccgtctccctcctccgcccaaatgcaactagtggcaaccaaaacaacatgctcatcctgcaagagacctgcaccgacccgtcaggctctctggtggtgtacgccccggtggacgtgcagtccatgcacgtcgtcatgaacggtggcgactccgcctacgtctctctcctcccctctgggttcgccatcctcccggacggccactgccagtcaccaaacactgcacatcagggttcaccaagctgcggcggtagcagcagcagcagcagcacggggtctctagtcacggtggcattccagatcctggtgaacaacctgcccaccgcgaagctcaccgtggagtcggtggagaccgtcagcaacctgctctcctgcaccatccagaagatcaagtctgcgctccaggccagcatcgtcacgccctagctattagcgggcatttgacatggattccggccgccggttctcagaaaaaaggacggagtagtcggatgccatgtcaaatgcttagctagaggacgacatgctgtgacggcgcagatgctaaacaaggctgtgctcgtacgtacgtcgatcgcttcacatcagaccggcggggaactggtgcttgagaaggcagtgaaagaaaataagggtattaaaataaattatgtagtagtgtggagtatttattgcatagagcaatatatatatggggtgaggtacacagggattaagtcaagaacgaaccgttcgctaggctttgattgcttgagcaaacacgttttgctatcgctcaagcttgttatatgctcatgtggtggttcgggtattgacttaagtctctggcaaaagaaagtgaaacaccacctattagggcttctcctatatataaaatatatatgtagcagtttgttttcaatgccttctcaagcaccagtttcccgccggtctgatgtgaagcgaccatcttgtgaagagttctgttcttttgttttgtctccgatatagcgaaatatagagatgagaatgtctttgtgtttgtaacgtttgtgtagtgttatttcgtttgagttgatatatatgacatgtacgctttgttcatgcatgtggaaaaaatatgttctagtgtagctcactttaaa

SEQ ID NO: 2378 - DNA, 3365 bp, Zea mays
  Clone ID: TF_ZmC14030_1
aattcggcagaggctttaaggctgtcacctttccccatcccctacgcccccccttcaggtgcaggggccacccttcctcctgctcccgcccctcaatcaatcacgacgccacagccgcacccccgcgaaccctagctcgcagtcgcaccgcgcgccggacgctgaccaggtgcctgctctatctcctgcggtggccgtcgcgctgccgccgccagacccgatccgtccgaccgtgccaagcgccccccctccggcgatcgatgcgaggcgccgcgggaggcggctcgggctcgggcaggctgtgaggagcctgtccgctcgctgcgtcgtgcgcctgccttccctcacggatcggcctcgccgcgcgtttgctttcccgcccacgcagggatcttcgcgagcggggagttgaagcgcgagatttgcgcggctacgattctgcgttgccgagggagcaagggaaccaatggctgcagcggtggcgatgcgagggggaagcagcgacagcggaggatttgacaaggttcccgggatggactcgggcaaatacgtgcgctacaccccggagcaagttgaggtgctcgagcggctctacatcgattgccccaagccaagctcctcacggcgccagcaactgctgcgcgagtgtcctatactctccaacattgagccgaagcagatcaaggtctggttccagaaccgaaggtgccgcgataagcagcggaaggagtcttcgcggcttcaggctgtcaacagaaagttgacggcaatgaacaagcttcttatggaagagaatgagcggcttcagaagcaagtctctcagttggttcatgaaaacgcgcacatgcggcagcagctgcagaatacttcattggccaatgacacaagctgtgaatcaaatgtcactacccctccaaaccctataagggacgcaagtaacccttctggactccttgcgattgcagaggagaccttcacagagttcctctcaaaggctactgggacagctattgattgggtccagatgcctgggatgaagcctggtccggattcggttggtattgtggccatttcgcatggttgccgtggcgttgctgcccgcgcctgtggtttggtgaatctagaaccaacaaaagtcatagaaatcttgaaagatcgtccctcttggttccgtgattgtcgaagtctggaagtgtttacaatgtttccagctggaaatgggggaacaattgaacttatctacatgcagatgtacgccccaacaactttagttcctgcacgtgacttttggacgttgcgatacacgacaacaatggaagatggcagccttgtggtctgtgagagatccttgactggttctggaggcggtccaaatgcagcttctgcacagcaatttgttagggctgagatgcttccaagtgggtatttagtgcgcccatgcgaaggtggaggttcgattgtgcatatagtggaccatctagatctcgaggcatggagtgttcctgaagtgcttcgaccactatatgagtcttctagagtagttgctcagaaaatgactactgtggcactgcgccaccttagacaaattgctcaagaaacaagtggagaagtagtgtacgccttgggaaggcaacctgcagtcctacggacctttagtcaaagactaagcagggggtttaatgatgccattagtggtttcaatgatgatggttggtctgtaatggggggagatggcattgaagacgttgttgttgcttgcaactcaaccaagaaaattaggaataccagcaatgctgggattacatttggagcgcctggaggcattatttgtgcgaaggcatccatgttactgcagagcgtcccaccggcagtactggtccgatttctgagggagcatagatctgaatgggctgattacaatattgatgtgtatttggcttcatcactgaagaccagtgcgtgctcacttcctgggttgcgacccatgagattttctggggggcagatgatcatgccacttgctcacacagtggagaacgaggagattcttgaagttgtccgccttgaaggacaacctcttactcatgatgaagcccttctttcaagggacatccaccttctccagctttgcactggaatagatgagaaatctgtgggttcctccttccagcttgtgtttgcaccaattgatgagcattttccggatgatgctccattgatttcctctggctttcgtgtcataccacttgatatgaaaacagatggtgtatcctctggtaggacgctagatttggcatctagtcttgatgtgggttctgctgcaccccaagcctcaggggatgcacctccagatgactgtaatttgagatctgtgctgacaatcgcctttcaattcccttatgagatgcaccttcaggacagtgttgctactatggcccgtcaatatgtgcgtagtgttgtttctgctgtgcaaagggtgtcgatggctatatctccctcccaatctggtctaaatgctgggcagaggatgctttccggcttccctgaagctgttacacctaccatatgggtatggcagagttatcactaccatctagagctggtgaagcattgttgaaaatgctctggcatcatcccaatgctgttctgtgctgctcctttaaggagaaacctatgtttacgttttttaaggagaaacctatgtttacgtttgcaaacaaggcagggctcgacatgttagaaacatcttttattgcgctgcaagacctgacgctagacaagatctttgccgagtcaggaaggaaagcaatattctcagatatctcaaaactaatggaacagggctacgcgtacctgccgtcgggcgtgtgcatgtcaggaatgggtcggcatgtatcattcgaccaagctgtagcgtggaaggtgctcggcgaggacagcagcgtccactgcctggggttgtgtttcgtcaactggtccttcgtttgacacgccatcccatggcctgtgtgatgagcaggccaatttttttgtatggtgatcccaatatggggaaaccatcagctgtgacagaaggctttatgttgcatgcactagttgtacgtcttgaatcgagtgtatttatgaagaaattggggggcaatagtgatgcacggctacacatgacccagcattaaccaaacaaccgcgtcgccagtttctttctattcgatcagggagatgcattttctggcaaaaaatcttctatttttttgttgcaaatttggtctgtatatggaactgctgctggacgccgagaaagcaaacatatgcggaaactcactatggctcgagaaaaaaacttatgaagaggttggatactgaat

SEQ ID NO: 2379 - DNA, 1233 bp, Zea mays
  Clone ID: TF_ZmC74833_2
cgggaacgtccgccaaacgtccgccttacgtccgcgtaccgtggggcccgtggtgctggcgcgcgacctcctcccgctccacatcaagcactacaacttctcctttgtccgccagctcaacacctaccaacctgccccgagcaaagagagcaagttagttggtgtaaatgcttcagcgaagcagggcagcaggcgtgggcagtcgggctggtccagggacgccagctcgcatctgacggtttccgtctgcaaaggtagcagcagacgtcgcctttgaccgtctatgcctcaatcccgcagatgcttgtccgtgttgttaagctgctcaagaacccccacttcatggcgaagcccgctgcgattgacttgataagaagcattattcaggctgaaggtgcttccacagagcaggcattatcatcagctctaacaagtattatggatgcgctgaagagtactgactggaatacaaggaaggctgcctcactagctctttcaagtattgcggtcagttctgggtatttggttacctctttcagaacttcctgccttcgctcccttgagcgtagtaaatttgacaaggtaaaaccggtacgtgacaccattatacatgcaattcagctgtggataagctattccagggtctcatactcctgaaccatcagaagctgggtcatcaacaaaagagaactactttggagaccatcatgacgccagaagtatacatgatggaggatcaagagatacttcttttaggagaacagatcatgggccttctgtatctgttatcagtggtagttctctcagttcagcaaagcggaggtctcctttatctattaacaaagtagccataaacaatgctgcaaatttgcaacggatgaagactggtgattggcgtgttgaggtgtcagttccaaagcagagtatgataccgctggttaataatgacgagaagggatccagtaaagcctgcagcctaaaagatacaaagagaaatgcatatgaaagtgttgatgtagacagtaagtttgactatgacattgtagatgataaacaagaatgctcctctgtgtcagaagtagccagcaggagttttgagacaaagcatgtcactactgctcaggaatgcactgaagattgtgattcagcagaagttacagaacaatgtcccaggggtcgagaaagtaagagcataggctcaacattacagatgttactactcatgacacacat

SEQ ID NO: 2380 - DNA, 826 bp, Zea mays
  unsure (1)..(826): unsure at all n locations
  Clone ID: TF_LIB4741-079-Q1-K1-H2
cagtatgtcggctcacccgaagcctataaattcctcgccgcccatttccctccgccgcctcctaatcctcaacacccgcgcccccaccgcgcccgtcgtatgccaccatgcaccgtcgcccgccccaccgcgcacgctaatgaccccgatgctgccgtacgccgaccgccgccgacgatgctgctggagcccaaactctaggacgaggaggtgccgctgcagcaactggcgaccccgggcaccttcgagtccctggaccagctgatgccggaggtggacgcgccggccgacccgcacccgctggaggggctgctgcacgggccgcagctgccgcccttcctgtccaagacgcaccagctggagagcgagccgagcgctgcacggagtcatctcctgaggcgctgccgacaacagcttcaccgggtgtgacccctccaccttcgcgcgcgacgggctgccgcacaacttccagcacaaccatttctccaccttcgctaggtagatcaacacctatggtctccgcaaggctcatgctgacacaaggcagattgctcgcgaagatctgctgcaagataccaagcatctattgaagacgatggtcaggcgcaggacctccccaagaaaacaaggtggcgttctgcctggcctgtcttctgtagaatccagcttggaccctgagctctcgcgctgacgagagagaagaaccgctgcttgaagaagtagcaagggtgacacaggaacacctccttactattgatgcaatgaacacgctgaatcactggctggtatctgcagaggaccggcagatgagnatggtctctttcct

SEQ ID NO: 2381 - DNA, 540 bp, Zea mays
  unsure (1)..(540): unsure at all n locations
  Clone ID: TF_LIB4757-078-A1-K1-B1
ccggccgggttnttacatctacatcgtccggttcggatcgtctccgccagccaggtgctggatccgtagcggcggcggcggccatggacaagagcatgctcggcgacctggatggcctccccgaggaggacaagatgcggatggccgccatgatcgaccagctccagatccgcgacaggttcgtgccataccaacgcatctcgtgggcggagcagggccgctccttcatggtgtggaagcccgtggagctggcgcgcgacctcctcccgctccacttcaagcactacaacttctcctttgtccggccactcaccacctacgtgagcacatccaaaacaccctctaccatctatacaacatctattctgttggtgactgagattgttgctgcaaaatcaaggtttaagtttgggtcgatttgtgtggcttttgtttatgtccaatcgaaactgatggaaaaaaaaactctcgcatccggcggcgttacagttgccttgtgacgatggaaaaacaatgctacatgtaaaaatgactaaaccc

SEQ ID NO: 2382 - DNA, 559 bp, Zea mays
  Clone ID: TF_LIB3912-037-Q6-K6-D2
ccccacgtgcgagagaaaagaggagatgctgatcgcgcttctgcttccttatccggagctctgccgaggagcgctgcacagggaaccggagcggcaactgccggatcgggatccttacgttgttgagcgtgttatcaaccatgctcagagccatcggcggctactgcaagggctacggcgccagcctccacaccaagccggagcaggatcaggaccacgctggacccgtcgtggcaccgaccgtggacatagacgagccacatggtgagcgaccccgccacgcactccggtgggcgctggggcggcttccacaacatcttccacgtcctctacccggactacttgttggactacttgttgaagtactacttcaagcaccgctacttccgcagcttcaaccggtacctcaacacctacgggttcacgaacgtggacacagaccggcacgagttcgtgcatgagtggcagctgcggctgctggcgctcctgctgccgctgatcaagcacgaagagaacaacgccggcgccggcgcccgcggactcggccaggacctgtacg

SEQ ID NO: 2383 - DNA, 798 bp, Zea mays
  Clone ID: TF_ZmC12124_7
cattgggtacctcgaggccggccgggcttccccctatttcaccgaccattttccccattttacagcggcgaatatctctcatctcccccgtcctctttgctgcaacacctcctacccacccgacgaaaatatcctaagcgccgacccgaatacccgattcgctcctcgtccggtcgattcctgctcctaatcgctcgaatcgagtccttgccccgtgttccgtgccacaatctgggcgcttggctcccgcgagccggggttcttgggcctgggcggaggccatggacaagccggtggcgccgggcattatcaaggaggagctcctggagcagcagccgccgacgcaggacggtgtgggtggcggcggggatgcgccgcgcccgatggaggggctgcacgaggtgggtcccccgcctttcctcaccaagacgttcgaccttgtggaggacccggccaccgacgccgtcctctcctggagccgcgccggcaacagcttcatcgtctgggacccgcacgtcttcgccgacgggctgctcccgcgcctcttcaagcacagtaacttctccagcttcgtgcgccagctcaacacctatctagatggaacaagatactggatgaagtaccaagaatcagattgttttgttctagaagactctactgaccaccttcacatgctatagtatattgcttatcaaaatgatcccttgacagatataaatatgcaaagtgaaggttacagcagagctcaagacatatggcatatgactgacatgatgatgaccatttctggtctattgc

SEQ ID NO: 2384 - DNA, 727 bp, Zea mays
  Clone ID: TF_LIB4705-001-R1-K1-H10
cgggaaactgctttattacaagctgtacagcatgcttgaggatagcagtatctctcacctcatctcttgggcagagaatggcgagagcttcgtcatgtcaccatctgcggacttctcaaaagtgctatcacaatactttaagcataccaatatctcttcattcgtgcgtcaactgaatatgtacgggttccacaaagaacgagacgtctttcatactgggcatccggagtcgaccttgtgggagttcaagcacggtaacgggaacttcaagcgtggcgatcttttgggccttcgggaaatcaagcgacgcgccagtcgacatgccctcgttcaccgcgagaacagctacgcaaagccatcatcctcgcacccaggtacgccagctgaggctatgcctatgccccctgagacctccgagtcacgtatgaccagcatcgagcatacgcttttcgatctcagcgcgcgattgcagaggagcgaggaagccgctcaatacatgcatgtgaggaattcagtgatcactgacacgatgggccggttactacacttcaatcaagagctgtcccgcaccgtcctgtcccttttcccttcggagagcccacattatagggatgtcatggcacttcaagcggggatccagaagcaggtggacgctgtgcgtgcccttgacgagcatcatgaagctccctatggcggccgtcagcattattttggcgcaatggagaac

SEQ ID NO: 2385 - DNA, 3183 bp, Zea mays
  unsure (1)..(3183): unsure at all n locations
  Clone ID: TF_ZmC2162_1
cattgggtacctcgaggccggccgggttcgttctgagctctctctctctctctctctctccctacccaccaaatctcgcagtcgcagcaggtcctaggtgctcccgaggaatccattcccaatttgcgttcccactcccaccaccgcttcttcccgtatcccttgtcctccctaatttcctctcacaaaaagcgggtgcggcttcctgccactcacctcggtctcggggggcgccgtgcggcgggcgcccgtgctgctggtttcgctccaggggagaaggggcagagggagtagagcaggttaggtccgtttgcgttttcttttgcgggtttgtaggtcaaaagctccgcgagcactttccgctccacctcctcacgctcggaatcaaatcgatgcccccctgatttggttcctggtatcggtgcatgagcttgctccaagagatctcccttttggttcggcgtcaggggttctgtgaggtcacgcggcttcttcctcttggcgctcctcacatgtccgggcgcttcgatctctgcccactgcgcgagtgattctgctgctgcagcagctgttaggtgcgcgcgggccgttatggggtgaaccgaagcgttcctcgcagggctgtgggtttattacgccgcctgtttgcttccccgcaccttgtccttgtgcccatacttctttgcttttgtcacgcctgaaccgtgtcttcttgtagtatctgaggcttggcagttggcaagtacaaactagcaacttgcttaggtataaagtatccagtgtctggtgcagagcccaaaggggtcacgaatcgttgatgcatagatctgcttctggctgagataaggctctaagttcgctctgttgatggggctaccatgagccacgggaacgggatgttgaattctgtcaaggtggagaggtggccagcagcagtcgctgcaaatggccagcctaggccgatggatgtgctccacgacggcagctcgccgccgttccttaccaagacgtatgacatggttgatgacccaaccacgaacgctgttgtgtcatggagtgccgccaacaatagctttgttttgggatcctcatatctttggcacggtgctgctgccaaggtacttcaagcacaacaacttctccagctttgttcggcagctcaatacttatggcttcagaaaggtggatcctgacagatgggaatttgctaatgaggagtttctgagaggtcagaggcacctcctcaaaaacattaggcgtcggaaacctccacactcatctccaaatcaacaatctcttggctcttacctcgaggtaggacactttggatatgaagaagagattgatcagctgaagagggataaacagctcttgatggctgaggtagtgaagctgaggcaggagcaccaaaatactagatcagatctacaggccatggaagagaaattacaagacaccgagcagaagcagcagcagatgatggcattcatggcacgagtcatgcagaaccctgatttcatgcgtcagctgatctcccagcgggagatgaggaaggagctcgaggatgctatctcgaagaagagaaggcgccgcatcgaccagggacatgaagctggtagcatgggcactggttctagcctggagcaagggccacagggagtgtttgaaccgcaggagccggtggaatcagtcgccaacggtgtgccatctgatctggagagttcgtctgttgaggcgaagggattggaggttcgacagggtgtttcttcaggtggttctgagcatctgaatggcaggccaagcggagagttaaatgatgatttctgggaggaccttctgcatgaggggggactcggtgcagatgcaggcaatgctgttggtcaggatgatatgaacatggacatggacccagatgttagcctgcctcaactgaaacaacatggtcccagacattagccgctcttgtgctatcacaatggctgtgactgtgagtatctttacagttatgctcgttatatccctgtggtgtacctgtttcgacgttcgtctctcgaccaaatgtcacgtcgactgcagtctccagttgttaatacagtctgttcagcacgctgatttaagtatttgggtcaagatgttcatataatcctgtggtatccagagatattatagtttgttttcgtaactgtttgcgcagagaccatgctatgttgcctgcaggctatcagtgtatttgttctaacagatcgcgacgctggtacaacgcagtgacctgccagactgggccactatgagattgtagggaaagaccagatagcttgtgtatgtaaaagtggtcattctatcattctatgtatgctgatccatagtagcctatcatgtgcaacgctattgccctttgggatttggcatttcactgtatataacatatcatcggctcatcgccgtattgccgcatcaaaaagaaaaatgaattacccaaagcggaaaacccacgcgtccgccnaagacaactatctgatcacaggctactgctacgacgtacaatggtacccactggtattgacagggcaactgataggtagctcgtgttcataaacctcataacaggaccccgatggaaatgttccgttctactggggcgttgacaccggcgggcgtcttgtggtctctgacgacgccgagctcgtgaagagtgcctgtgggaaatcctgtgccccgttccccaaaggcttcttcttcacgacgtccggagggctgaggagctacgagcaccccatgcacgaggtgaagccggtgccgagggtggacagcaagggcgaggtgtgcggcacgacgtacacggtcgacgcaaccgccaggaaggagaccagcatcccaagggtcggcagcgccgccgattggtcttcgcagtactaaaattcgttatctttctctgtgtgtgttgaacgggttcgagcgcaggtagcaggtgacacgggcgtgggccgtgtttgttcgtatggaaaccgtgtctggtgtttgttcgtatgatttccgttgctgctttgctgcacgcctgtactgtgacaagaattactgcctttgctatcaggaaataaatttgtagagtttagagttgttttaaaaaaaaaaaaaaaaaaaaaaaaaaaaaaaaaaaataaaaaaaaaaaaaaaaaagcggcc

SEQ ID NO: 2386 - DNA, 2069 bp, Zea mays
  Clone ID: TF_ZmC3537_2
ggtaccctcgggtcggcccagtatgtcggttcaccgaagcctataaattcctcgccgccccgcctctcgccgatttccctccgccgcctcctaatcctcaacacccgcgcccccaccgcgcccgtcgtatgccaccatgcaccgcgcccgccccaccgcgcacgctaatgaccccgatgctccctacgccgccgccgccgcgatgctgctggagcccaaactcgaggacgaggagttgccgctgcagcagctggcgtccccgggcaccttcgtgtccctggaccagctgatgccgccggtgaccgcgccagccgagccgcgcccgctggaggcgctgctgcacggcccgcagctgccgcccttcctgtccaagacgtacgacctggtgaacgagccgtcgctggacggggtcatctcctggggcgctgccgggaacagcttcgtcgtgtgggacccctccaccttcgcgcgggacgtgctgccccacaacttcaagcacaacaatttctccagcttcgtcaggcagctcaacacctatggtttccgcaaggttcatgctgacagatgggagtttgctcacgaagatttcctgcgagatagcaagcatctattgaagaggattgtcaggcgcaggtcctccccaacaaaacaatgcagcgttcagcctggctcttcttctggagagtccagcttggaccctgagctccacacgctgaggagagagaagaacgcgctgcttgaagaagtagcaaggttgaaacaggaacaccgccagacaattgagcaaatgagcacgctgaatcacaggctggaatctgcagaggaccggcagaggcagatggtctctttcctggccaagctccttcagaacccgagtttcgtgaggaagctgaagctgcacagggagaagaaggagatcgactccaccagggtgaaaagaaagtttctcaaacatgttcctcatggcagcgtagagtcaggtgaatccagctcacagcacgccggagagagtggttcgtatttcgctgtgagttcccccatggctacaactacaagcgtgcatgacgacatcacggagcttcagaactttcttttggaagatgatgacctcaacttcggcatggattcagaaaacaccgggcttgaaggcaccgaggcaccagatgatattggagaactgattcaggggttcgacacacaagaggaacttgacctcggcagtggagctgagctacaggagatgcctccagcttctggttctcttgctcaagatcccacaatcggcaggttcaagggaaagaatgtgctgtgtccaggactggacgctacctcctccgaaggcgactgcctcagtccattgcctgacaacatggggctgctttcaggcaccatgctagggacggcaggcagcatgatggccgctgacgatgagcaaatatggggcgttgatgcttcggcagccctgcaaagctcttgcagtggcactagccaacaagctttcggtagccatgttagtgatccctatctgatggacatcgccaacaggcctgagagattttgggagcttgatttccaggcactggatgaggctgatctgcagctggacaagtgtgctatcgatgaccctgctcttcagcagcagccaagcatgaagaagccgtagacgaatttccgttgtgagacagacagacaatgtatatggtggtgctttatccactgaagtgctacgattaacttatggagattgctatagttacttcggtatttgggagcgaggctgatgaactcgcctactatggcacttagtagtagcagcagcacagcagtagtatgtttttgtttcccatttattcacccccggtgtttttgaatggaaacttgtatcctagtgatttcttcagagcagctgttaactgctctggccgattcttttttgttgtttccaaaaaaaaaaaaaaaaaagcggccttccatttatgtttttgttctgatttttttttttacttgctagttgctacttgcgaatgtcttgcaatgagtaatgggattaaaaaaatccgttctcagag

SEQ ID NO: 2387 - DNA, 2047 bp, Zea mays
  Clone ID: TF_ZmC2340_1
taccggccgggaaaaaaggaaatcgaaggagattgaacgaagcagcccaaccaaattcccctcgccgcctcgtcccttcgcgacatttctagtcccgtcgtcgcctcaatctcgaagcctctccggcgcagccgcctcatcatcgatccgaaggcctccaaccaaacatcctctagggtttccgcatcgtccgtcgcgatgggcttcacgaagcggtcgccccagcatcccgcctccccagccggcggcgaggtcggcgcccagacggcagggaaggtcacaccagtgccggcggcgccggagtcggcgcccgtggcggtggtgccgaggcctccagacgtggcgcccttcctgaccaaggtctacgacatggtctccgacccggccaccgacgcggtcatctcctggagcgccggcggcggcagtttcgtgatctgggactcgcacgctttcgagcgcgacctgctgccgcggcacttcaagcacaatcacttcaccagcttcatacgccagctcaacacctacggatttcataaagttgatccagatagatgggaatgggccaatgaaggctttgttaagggccaaaaacatcttttgaagaccatcaagagaaagaagaaatcctctcaggatgtacctagtgatctgcagtcggtgcctgtcaaaactgcacctggcactgagaatatcgagataggaaaatatggaggccttgaaaaggaggttgagacacttaagagggacaaggcccttctaatgcagcagcttgtagatctacggcagtaccagcaatcatctagcgctgaagtgcagaatttaattcaacgcctccgtgtgatggagcagaaccagcagcagatgatggcacttttggcaattgttgtccagaatccagacttcctgaaccagctcgtgcagcagcagcgcaggagtaactggtggaatgatgatggtaacaggaaaagaaggttccaagctctggaacatggtcctgtagatgaccaagagacttctggtggaggcgcacaaattattcaatatcgtcctcctgttcctgaaacttccaatcagccaataccagcaaatgaagctttctattcaacccctgcacaaccagcttcaagccctgcacttgagatgcccatggatgtagagatgacttcaaacaatgttgatacctttgattcaactggcaatgattttactgacacctctgctctatgtgaatgggatgacatggatatatttggtgacgaacttgagcacattcttcaacagccagagcaggactttcaagtggaccctcctttaacagttgaggattatggttatgatcatccacggttagagcaggactgtcagatggaagcacaacagaattgcaaaaatcctcaatatgttgcctgtgtcttgaagcaaagggaaagccatgcatctgatgtccattagtactgatcagtttgagctgatgtcataactgaagcatgagccgtggtcccccagaatgttgtccagtaacattagtggatagagatttgtgatgaacagaatcttgagactggcaggttagccaccattgggaacctgaagaccgtcgggattgctcagaattcagtatactaatactaaaaaaaaaatatacagtaacacatgttgactatacatgatttcgttttccttactcgctcgaccaaaggcagccgtacaatatttttacttttgtccaggtgggagcatctaggtctttaaatggtttcggtgattaatggtgatcctagattattatgatttgcagagactataacttaggttatgatagcagtgattgattatgcgtgggttttgtttttgtctcacgtctcattgtcctagctacgcccataacacaaggtatcattcctcatgttgtatataatatcatcgtggatgaatgaaacacttttggacttttttttttgcgtacgagattcttaggcaccgtttgtttttggtcagaatgacttcactgagccttccatagaagacaatattcataactggggaa

SEQ ID NO: 2388 - DNA, 2390 bp, Zea mays
  Clone ID: TF_ZmC10545_1
gcccacgcagcaatctggtcttctggaaatctccatcaatccgattccgaacggcagaaaattttcccttcccccggccaccaaccaaccaaacccgagcaaccagcctgagccacctcccatgcgccgcgccgcagcctgaggaggaggaggaggacgcggtggtctggagagggatggagggcgcgtcctcgctgccgcccttcctgagcaagacgtacgagatggtggacgacccggccacggacgccgtggtggcgtggacgccgctggggaccagcttcgtcgtcgcgaaccaggccgagttctggagggatctgctccccaagtacttcaagcacaacaacttctccagcttcgtgcggcaactgaacacctacgtaagcccccaccgcacagcacgatcattcattttcttcgccccatctccctctctgtccacctgtggttttgatcaatcggggtgcgtggcggcgtgctactgtcagctatgctgttgcccctttgcaaaactccacaagttggcatttatggggcgaatcttgttagccttgtagtagaacaattgtttagggtatcgtcttcggtcgaatgaactgtttccttgttatagcatagcgtgttgacaacttggcgataactttaaattacatgtgtccactatatatctagtatatatgctcaattatcttgttgagatgtttttccttttctaaatccaactagagttagtgtaccttttgacaaatgaagtgctgctaacggtaaacactgttgaattggcatctttgttgacacccaaattaaatccaatagaaaccataatgatttcggatggttacttttgatttatgagccttgatgggtcaaatttctgtgatgttgtgttaatcgttttcctgcttcttcttatgtagggctttaagaaaattgatcctgaacaatgggagtttgcaaatgatgatttcattaggggacaacagcaccgactgaaaaatatacacaggcgtaagcctatattcagccattcatcgcatactcagggttctggaccattaccagataccgaaaggagggattatgaggaggaaatcgaaaggcttaagtgtgacaatgcagctctgacctcagagcttgaaaagaatgcacagaagaaacttgttacagagaaacgaatgcaggatctagaagataagttgatctttttggaggatcggcagaagaatctgatggcgtatgtcagggatattgtacaggcaccaggatctttctctagctttgtgcagcaacctgatcatcacggaaagaaaaggagactaccagtacctatctctctctaccaagattctaatgctaaggggaaccaggttgtgcatgggggcttcatcaccaacccaccagcttgcagggaatcatttgacaagacggaatcttcattgaactcgttggagaatttccttcgggaagcgagtgaagcgttcaatatttcatatgatgatggcctccctggccttcatctgctgtcgttatcacagagctccattcgtccggagaaagtgatccccatgtgccatcacctgtctcaagaatgcatacatcttcggctggtgcgggagattcgctctcttcccgcgatttaacagagtcaactagctgcgctgagagccctcgcctccctcagatccaaccctgtacagattcacgaactaaggtgtctgagatcgatgtcaatcgggagcctgctgtcacagaaactggtccgacaagggaccaacctgccgaggagcctccccacgtagcagctggggtgaacgatggcttctggcagcagttcctcaccgagcagcccggtcctgatgtacaccaggaggcccaatcagaaaggagagatggcgatgatgataagggcgatcagacgaggataggggaccgagaaaatttttggtgggggaagaagaatgttgagcagatgagagagaagctggggcgtctcacctcggtggagaaaacctgactgtatttcttgtagctggaaaaaaaaagttagcacagaaacacatataggacgctggtgcctctgactgacatgtactttgcagtgtatcatatatcttcgccaccagatatgctgactgacatcgacctcgtagtcgtacttcttccacctgtacttttgccgagtttacagtgagatttagttgttgctatactttttttttcttttttcttttgagatggactagtcgctatacttctgttaggagttctgcattcgtacttggttagtagacacttcctggtactgttgtccaacgacgtggttatatatgtagatgatgataatattcacttcgttgttggatagtacaaaaaaaaaaaaaaaaaaaaaa

SEQ ID NO: 2389 - DNA, 568 bp, Zea mays
  Clone ID: TF_LIB5117-035-A1-PF1-F1
ctactcctccgttccttcgtctcgtcgcgtttccgtctctaaattccttgcttctctccacgctacgctatccggaaccttccggaaggttgctttgccaccctcccttccgttccgtccaacggtgtcgtcgggacagatctgcgctgtcggcggcggcgacggcgccatgggcgagcaggccgcggccgtttcctcctgcgagacgcctgctccggcggaggtggggacaggggtcgggcagaggtcgctgcccacgccgttcttgaacaagacgtaccagctggtggatgacccggcggtcgacgatgtcatctcgtggagcgaggacgggtcggcgttcatcgtgtggcgccccgccgagttcgcgcgcgaccttctccccaagtacttcaagcacaataacttctccagcttcgtgcgccagctcaacacctacggatttaggaagattgtgccggacaggtgggagttcgccaacgactgcttccgtcgaggagaaaagcggctgctttgtgacatacatcggcgaaaggtgacgccgacggtgagcccccttcaccccctt

SEQ ID NO: 2390 - DNA, 978 bp, Zea mays
  Clone ID: TF_ZmC476_1
gaacgaacaggacagcgagagaaagcaaagcgagctgctgcttccttatccggttcttcgccgtgagcgctccacagggaacggaacgggaactgggggatcgggatccttacgttgttgtgtgtattatcgagcaagctaagagccatgggcagcgagtgcaagggctacggcgtcggcgtcgccaccagcccgcagcaggagcaggagcaggctggcgccgccgtcgcaccgttcgtggccaagacgttccacatggtgagcgacccggccacggacgccgtcgtgcgctggggtggcgccagcaacaccttccacgtcctcgacccggccaccttctccgactacctgctgccctcctactcacgcgtccgcaacttcgccagcttcgtccggcagctcaacacctacgggttcaggaaggtggacacggaccggtgggagttcgcgcacgagtcgttcctgcggggccaggcgcgcctgctgccgctggtcgtgcgcaagaggaagaaggcgggcgccggcgccggcgccggcggccgggagctgtgcgaggccggggaggaggtgcgcgggaccatccgggccgtgcagcgcctgcgggagcagcagcgcggggtggaggacgagctgcgggccatggaccgccgcctgcgcgccgccgagagccggccggcccagatgatggcgttcctcgccaagctcgccgacgacccgggcctcgtgctgcgcgccatgctcgccaaggaggaggagctggccctgatcgacaaggggtcggaggcgcagccggccaagaggcggcggatcggggctgaagccgtggacctggcgcacagcaggggcgggggcgccgtgccgtttccgttctctgttctcggccaagtgttctactagggtagatacggactggtgtatatatgacttgcactgtattatagctttgcctcggtttcaaaagttactgccttccgtttt

SEQ ID NO: 2391 - DNA, 2346 bp, Zea mays
  Clone ID: TF_ZmC38206_1
tttttctgttttctgttctcgatgttcccgtcgtctttattgaggtgaataaaaaaatcccagatcttcgaacagaaatccagtatagtacttaattcgaactgaaatccagtagtacttcagaaccgcaacactacaaagcttccaccgcatgaaattagacaaacagtttgcacacaaccactgacagaaacatgtataaccatcagtactacttgctgagtcgctgtcactgtacataactacagactgaattcctgacgggcagggtcgtaaaacaaccaacagatcgctggcgtcgcctaaaacagccactccagtggcaagcagcaatcactagtcagatcacatcagatgcacctagcagttctcccttgacaccatggcgaatgccagccaattctcatggaagcaagccctaccattggcgaggaattcagaagggcatggaaaccgagcaacggaagcagaattgcctagtcttgctgacacagtgaacacaattcaggagctgcgggttctggtaagatggaaataacaaaacagcaacgaagccaagactaattgctagatgttgggccatctgagttgagataacccatcttctcagacagcacattcatatcatcctcgattacagggctatcgttctcctcgccaagtccttcgttcagcaactgctcccagaagttgtcattcagatcctcctggggcatgtcttgctgctgctcataggtactgccaatatcaatatcaatatcaatatcatgtggcccaatcaggccgtggccatcgaaagctgggctctcgaggtcagctgggattccgtcgacaaggaattcaactgggtcctgggcattaaacaggaccggtgaaccttgctccaagctgctactagcccccaagtcatcagcttcaggcccttggtcgatgcgccgtcttcttttctttgaaatagcatcttgaagctccttcctcatctcattctgggaaaccaggtgcttcaagaattcaggattccgcatgacacgtgccaagaacgccatcatctgctgctgcttctgttcagtcccttgtagcctatcctccatcgctttgagatttgcctttgtgttctgctgctcctgccttagcttcaccacttctgccatcagtaactgcttgtctctcttcaacatgtcaatctctgcatcatatccaaaatgtcccacctcaaggtaaggcccaatggactgctggtttgtggcattctgagcaggaggttttcgacgcctgatgttcttcaggaggtgtctctgtccccgtaaaaagccctcattcgcgaattcccaccgatcaggatccaccttcctgaaaccataggtgttgagctgccggacgaagctggagaagttgttgtgcttgaagtgcctgggcagcagcaccgtggcgaaggcgtgcggatcccacaccacgaagctgttgttggtggcgctccacgacacaatcaggtcggtgtccgagtcgtcgaccatgtcatatgtcttggtgaggaacggcggcggcccagggtcatgcagaccctccatcggctttggtgccgcggcgacggccgcggacggcccatccgcggcctccaccgtgcctgccatcaaatctcctccctccccatggctctcctccttcacctggttcagcgttgagtccatagccggatcctaccctcctaatccgagtaacgatgctaaaatctctgctctgacaccggaatggaatagtctgttggacaatgtcagtaaaactccgttgtaaaagagcagcaacgagcagctgcccctagcacacggccacacaggagtacaaggcacgcatcgacgttaaggcatacacacacacggcggccggcgcgcatctagcacggggatagggaacatgataaggtgtcatcctggcaagaccacctcaccatgtttacccccacctacagctctgcaagtacaggtagaaagcagccgacaaactgggggccagagcaccacgccagacgccaggggcggagaggaaatcaaagccgccgggtgcctcgtggtggcaccagggcgggatcttcttccctgttgcccggaaccacggcgggggtgggtgagccgtcacgagcgcggggagggtgggtagctcagcagcctactagatgcagtggctctggaatggtgggtagggggatagggtatggatttggctatttcgggaaaggaaggttctggaaggcgaggggacgggggatggggataaagcgtcggggggcggggaccggaactggcgcggcgggagagagacggaggaggaaagggtcgcgatcgcggccgg

SEQ ID NO: 2392 - DNA, 755 bp, Zea mays
  unsure (1)..(755): unsure at all n locations
  Clone ID: TF_LIB5117-051-A1-PF1-F7
ttcctcaatggccgtctctctcctccccgctccccaccgctcctcgctccctcgccgccgctccagccgccgagaggagagatcgatcccttcacggcaggcgctccaccgcaatcttctccattagggccggcgacggaggtacggggaggagggttttggtgtgttcccttggttgggagggttcttggggtttgggtgtatggacccaatgccgactctggtcaaggaggaggaggatggccatgggacaggagaatcgccgggggccacggcggcatcgaggccggtgaaggggctgcgcgatgccaggccgtcgctgttcctgacaaagacgtacgacatggtcgatgaccggagcaccgacgacgtcgtgtcgtggagcgctggcaataacagcctcgtcgtgtgggatctgcaccacttctccacagtgctgctgccgaggcacttcaagcacagcaacttctccagctttgtcaagcagctcaacacctatggtttcagaaaggtggatcctgatcgatgggagtttgccaatgagggttttctacggngacagaggcaccttctgaagaacatcagacgtcgaagacctcccgctaatactgcttcaaatcagcaatctcttggatcataccttgaggtgggacactttgggaaatcatacagataccgaccagctgaaaagggacaagcaactattgatggcagaagtggtgaaagctaaggcagaacagcagagcatgaaaacg

SEQ ID NO: 2393 - DNA, 877 bp, Zea mays
  Clone ID: TF_ZmC12124_3
aattcggcacgaggcctctttcctgcaacaactcctacccacccgacagaaatatcctaagcgctgacccgaatacccgattcgctcctcgtccggtcgattcctgctcctaatcgctcgaatcgagtccttgccccgtgttccgtgccacaatctgggcgcttggctcccgcgagccggggttcttgggcctgggcggaggccatggacaagccggtggcgccgggcattatcaaggaggagctcatggagcagcagccgccgatgcaggacggtgtgggtggcggcggggatgcgccgcgcccgatggaggggctgcacgaggtgggtcccccgcctttcctcaccaagacgttcgacctggtggaggacccggccaccgacgccgtcctctcctggaattcggcacgcaacagcttcatcgtctgggacccgcacgtcttcgccgacgggctgctcccgcgcctcttcaagcacagtaacttctccagcttcgtgcgccagctcaacacctatgtgagtcggcaaaacccaaacccccttctttctttcctttgaaataatccttctcttggtcagggcttgctaatattgatgcgctacgctgctagtagtttggtaatttgcgtttggttgcaattgcaagctgctttattcggcggagagcatccgaatcctctgcaatattacttgtatattaaactagtttgccatgttaggacatgaaaatctgttgtgcacttgttcttcactaaagttttaggtgatgtaacactgttgtgaggcattgttgtgatttggtgcatttttttattgttgattttaggcagcttgttccccaatgagatcgaggatgctgcaactggctaggatatga

SEQ ID NO: 2394 - DNA, 714 bp, Zea mays
  unsure (1)..(714): unsure at all n locations
  Clone ID: TF_LIB4766-021-Q1-K1-C7
ccggccgggaattccttttccaattcccctttcctctcaatcgcatacaccagcggcggcgccgggaccccgaaaaccctctccccgcacaccacggccaacaggaaccactccgctcctccgagccctagccgtcccgggccgggtcgggctcccctacatgacgccggcggcgggcaacggcagcgccaccgccgcgccgccgccaccgttcctcatgaagacctacgaggtggtggacgacccggccacggacgacgtcatatcctggggccccgggaacaacagcttcatcgtctggaacacgcccgagttcgcccgggacctcctgcccaagtacttcaagcacagcaacttctcctccttcgtcaggcagctcaacacctacgggtttagaaaggttgatccagacagatgggaatttgcaaatgagggttttctgagaggacagaagcatctgctgaagactatcaacagaaggaaaccatccttgcaggggaacagccaaccacagcaacctcagtcgcagaacgctcctgtgccttcctgtgtagaggttggtaagtttgggttggaggaagagattgaacggctgaagagggataagaatgttctcatgcaagagcttgtcaggctgagnacagcacagcaaacaactgaccatcagctgcagactttgggcaagcgtcttcaagggatgggagtcacggcagc

SEQ ID NO: 2395 - DNA, 1295 bp, Zea mays
  Clone ID: TF_ZmC2162_4
tccattcccaatttgcgttcccactcccaccaccgcttcttcccgtatcccttgtcctccctaatttcctctcacaaaaagcgggtgcggcttcctgccactcacctcggtctcggggggcgcccgtgctgctggtttcgctccaggggagaaggggcagagggagtagagcaggttaggtccgtttgcgttttcctttgcgggtttgtaggtcaaaagctccgcgagcactttccgctccacctcctcacgctcggaatcaaatcgatgcccccctgatttggttcctggtatcggtgcatgagcttgctccaagagatctcccttttggttcggcgtcaggggttctgtgaggtcacgcggcttcttcctcttggcgctcctcacatgtccgggcgcttcgatctctgcccactgcgcgagtgattctgctgctgcagcagctgttaggtgcgcgcgggccgttatggggtgaaccgaagcgttcctcgcagggctgtgggtttattacgccgcctgtttgcttccccgcaccttgtccttgtgcccatacttctttgcttttgtcacgcctgaaccgtgtcttcttgtagtatctgaggcttggcagttggcaagtacaaactagcaacttgcttaggtataaagtataaaccagtgtctggtgcagagcccaaaggggtcacgaatcgttgatgcatagatctgcttctggctgagataaggctctaagttcgctctgttgatggggcgaccatgaaccacgggaacgggatgttgaattctgtcaaggtggagaggtggccagcagcggtcgctgcaaatggccagcctaggccgatggatgtgctccatgacggcagctcgccgccgttccttaccaagacgtatgacatggttgatgacccaaccacgaacgccgttgtgtcatggagtgccgccaacaatagctttgtagtttgggatcctcatatctttgggacggtgctgctgccaaggtacttcaagcacaacaacttctccagctttgttcggcagctcaatacttatgtaagttgttaactctatagatgctttggtttcatgttctatgatgcggttgaggtgtgctggaatcctactgccttatttgtggagtgaattaccgttaggtactgtttgttttcgtgtttttaaccctgtaagcgattgcaccactataggttgccgttcttttgtgtttgtttctgcggctgcggaaccattcacggagggatgatgcggccgtgtgaaaggtcgttactttccattcaaaa

SEQ ID NO: 2396 - DNA, 819 bp, Zea mays
  Clone ID: TF_LIB4738-034-R1-K1-C9
acgtatgactatggttgatgacccaaccacgaacgccgttgtgtcatggagtgccgccaacaatagctttgtagtttgggatcctcatatctttgggacggtgctgctgccaaggtacttcaagcacaacaacttctccagctttgttcggcagctcaatacttatgttgccgttcttccgtgtttgtttctgcggctgtggaaccatgcacggagggatgatgcggccgtgtgaaagggcttcagaaaggtggatcctgacagatgggaatttgctaatgaggagtttctgagaggtcagaggcacctcctcaaaaacattaggcgtcggaaacctccacactcatctccaaatcaacaatctcttggctcttacctcgaggtaggacactttggatatgaagaagagattgatcagctgaagagggataaacagctcttgatggctgaggtagtgaagctgaggcaggagcaccaaaatactagatcagatctacaggccatggaagagaaattacaagataccgagcagaagcagcagcagatgatggcattcatggcacgcgtcatgcagaaccctgatttcatgcgtcagctgatctcccagcggaagatgaggaaggagctcgaggatgccatctcgaagaagagaaggcgccgcattgaccagggacatgaagctggtagcatgggcactggttctagcctggagcaagggccacagggagtgtttgaaccgcaggagccggtggaatcactcgccaacggtgtgccatctgatctggagagttcgtctgttgaggcgaagggattggaggt

SEQ ID NO: 2397 - DNA, 2135 bp, Zea mays
  Clone ID: TF_ZmC5551_1
tacgcctgcaggtacttctccattcccggcgggccgatacactcctctacgacgcggtatcgccgtatacccgcctcaagtacaaagggaaagctgcgactcgctcggaagtggggtactgtacttcccgctcgctcgctctctgctctggtccttcacgctctaaccttcagttgaggttctctaatcgggcccgctaaagtcgagagacaggttttcgcgaacatttgcatctagccatctctactcaactgaattcttgtgctcttgtggcattcacaaagtccattttcagactgagctagttcagctgtcattttttttttcagccaaaggtcgcgttcttttggacctgctcttgattcgttcgttcgttcgtttggattgattgattgattgattcctttcgacttcccttcaccacccccctgctccgtcaagcgtgcctctgttcttctgccattgctggatcgcgtttgtctgtttgttgggttgctggcgctgcggccatggatcccttccacggcattgtgaaggaggagttcgacttggacttcgacttcacctgcgcgtctgcggcggcggcggcggcggcctcgtgggccgtcgccttgccggagatgccccggccgatggaaggactcggcgaggtgggacccactccgttcctgaccaagacatacgacgtcgtggacgaccccaacaccgacaccatcgtctcttgggggttcgccggaaccagcttcgtcgtctgggacgccaacgccttcgccttggtgatcctcccacgctacttcaagcacagcaacttctccagcttcgtccgccagctcaacacctacgggttcaggaaggttgacccggacaggtgggagttcgcgaacgaggggttccagcgtggccagagggagctcctcaggacgatcaagcgccggcgcccgccgtcgagcccgtcggcgcagcaggggcaggcgccgtcggcctgcctggaggtggggcagttcgggctcgacggcgaggtgcaccggctgcagcgcgacagggggatcctgctcgcggaggtggtgaagctgcggcaggagcagcaggcgacgcgcgcgcagatgcaggccatggagaagcgcatcaccacggcggagcagaagcagcagcagatgacggtgttcctcgcgcgtgccatgaagaacccgagcttcatccggatgctggtcgaccgggagggccttggcggctgccgcagggagctcgaggacgcgctctccagaaagcgccgccgccccatcgagtacctcccgcgcgacggcgagagaagcggcactgccacggagtcggcggtgagcgactacatttccggacttccggtcggcgtcaacggcgtggcggaggcggacgacgacgagagacggtgggagagaaggggcggcggcggcggcggcgaggacacggagagcttctgggcgaagttgctcaacctcggcctggaggagaagcacagggagggcagatgcgatggcgaggaggggaacggagctgacgtggacaacgacgtggacgacgacgtggatgtgctggtgcagagcatctaccacttgaacccgaacccgggtagccccggtggcaagtgaaagttccagaacgttccacattccagaacccactatggtctatggaagtggaagctcccagtgggcatcgcaattagtcgtaggcgatagttttttatccggcgcctgacttcttgtcgcggggctatgcaagttgcaaaagtgcttgcgtttggccggttgccaaggaatgttcgggatgctcgtcgaactacgaagcttctagaagatggagcagcgaggctgcagcctactcgtatattactatcagggagcaggcgagcagcaaggctgcagcctactcgtatatttactatcaatggcgcgggcttcttcgctgcggtttagtccgactacggggtttacagctacggctacaatcaggatgaaacaaaggcacttctcaaatgtgtacctgacgtgtcattcttattcttctgggcggagcaggtagactaaaaaaaacagttgtagctttgtcttttcctgaaaaccaacttttttggtaaagctaaaatcatttcaagtttg

SEQ ID NO: 2398 - DNA, 635 bp, Zea mays
  Clone ID: TF_LIB5074-012-R1-XP1-F10
gccggccgggtcgggataatttccatttaaatattttcgaaaacagccagaaccaaaaccggaataaaaagaaaaatgatgaccgagctagcacccaatactatacaaactgatgaaaacataccctgcttcataagaaaaacttacaagattttagaagatggtaactactcaaatatcatctgttggaacaatgaagggacggctgtagtgatcaggaacccagctgattttgcccaaaatgtgctgcctatctatttcaagcacaataacttaaattcgtttattagacagctcaacatgtacgatttccacaagaagaaaaccccagatggagagcatgtatacttccatgagctattccaaagagacaaaaaacatctattaagaaacatcaaaaggaaaagcacagaatattctggaggaaacacagagaaaaacaaattaggtcaagaactaagccgcacaaaacaagatattgctaccataatcaatgaaaactttcttctaaagcaaataaatcgcgagcatctagcaacaatcaccaacttagaagctcaagctaacgagatcagtctaaagaaccaagctatattaagccaattaatgaaaaaaaaaaaaaaaaaaggccccta

SEQ ID NO: 2399 - DNA, 748 bp, Zea mays
  Clone ID: TF_ZmC142676_2
cgccggcggggaataaactgtgacaaatccaagcccacgcggccgaggagactcccccctccacttgggagttgggatccaccaaccttcacccactcgcagcaccagtcatggaggtcgccggcgcccgcgagcccggtagcggaggaggaggaggtggcggcggtggcggaccagccccgttcctgctgaagacgtacgagatggtggacgacccgtcgggcgacgcggtggtgtcatggagcgacgcatccgacgggagcttcgtcgtctggaaccagcccgagttcgccgcgcggatgctgcctacctacttcaagcacaacaacttctccagcttcatccgccagctcaacacatacggttttcgcaaaatagacccagagcgctgggaatttgctaatgagtactttgtcaagggacagaagcacctgctgaagaatatccacaggaggaaacccatccacagccatagccatcagccaggtgccctgcctgacaatgagcgtgcgttatttgaggatgagattgacaggctttcacgagagaaagctgccctccaggctgacctctggaagttcaatcagcagcagtcaggtgctgtgaaccagttagaagatcttgagcggcgagtgcttgacatggagcagcgacagacgaagatgctcagcttcttgcagcaggctaggaagaatcctcagtttggcaggaagctcgttaagatggcagaggaatccccaatctttgc

SEQ ID NO: 2400 - DNA, 868 bp, Zea mays
  Clone ID: TF_ZmC8681_1
gctcgtaatcctaaccgccctggtttctctacacgctacgggaccggtaacttctagaacccaccaccttccatccttccttcctttcctctctctctctctctcctcgcgcccacggtgcccgccagccagatccgcgcgttcaccggcgccatggccgccgagcatgccaccgccgcggtgggtgagccgcctcccgccacgtcgcagccggcggagggcgtgacggcggcggcgggccagaggtccgtgcccacgccgttcctcagcaagacgtaccagctggtggacgacccggcggtggacgacatcatctcgtggaacgacgacgggtctgccttcatcgtgtggcgcccggcggagttcgcgcgcgatctgttgcccaagtacttcaagcacaacaacttctccagcttcgtgcgccagctcaacacctacgggttcaggaagatcgtgccggacaggtgggagttcgcgaacgactgcttccgccgaggggagaagcggctgctctgcgacatacaccgccggaaggtgtcgccggccacgggggcggtcacggtggccgccgccgccgctgcggccatcccgatggcgctgcccgtgggctctccggtgtactccggcgaggagcaggtgctgtcaagctcgtccccggagcccccgtcgctgcagcagcacccgccggcgccgtccgggtcgggctccggcggggtggtctcgggcgacgtgggcgaggagaacgagcggttgcggcgggagaacgcgcggctggcgcgcgagctcggacagatgaagaagctctgcaacaacatcctcctcctcatgtccaagtacgccgccactcagcagccggacgccgccaagg

SEQ ID NO: 2401 - DNA, 1015 bp, Zea mays
  unsure (1)..(1015): unsure at all n locations
  Clone ID: TF_ZmC142676_1
ttaggtgacaaatccaagcccggccgaggaggagactcccccctccacttgggagttgggatccaccaaccttcacccactcgcagcaggcagcaggcggcagcagcagcacgcgctgccgcagcaccagtcatggaggtcgccggcgcccgcgagcccggtagcggaggaggaggaggtggcggcggtggcggaccagccccgttcctgctgaagacgtacgagatggtggacgacccgtcgagcgacgcggtggtgtcatggagcgacgcatccgacgggagcttcgtcgtctggaaccagcccgagttcgccgcgcggatgctgcctacctacttcaagcacaacaacttctccagcttcatccgccagctcaacacatacggttttcgcaaaatagacccagagcgctgggaatttgctaatgagtactttgtcaagggacagaagcacctgctgaagaatatccacaggaggaaacccatccacagccatagccatcagccaggtgccctgcctgacaatgagcgtgcgttatttgaggatgagattgacaggctttcacgagagaaagctgccctccaggctgacctctggaaattcaatcagcagcagtcaggtgctgtgaaccagttagaagatcttgagcggcgagtgcttgacatggagcagcgacagacgaagatgctcagcttcttgcagcaggctaggaagaatcctcagtttgtcaggaagctcgttaagatggcagaggaatccccaatctttgcggacgcgtttcacaagaagcgaaggctacctgggcttgaatgcatcacggatgctaccggaactgccactagctttttcgatgaccatagcagtagttccaggcaagaaatgggtaaccttctgaatcagcacttctctgacaagctgaagcttggactctgtcctgcaantggcggaaacaacctcatcaccctgagcacccaaagctcacatgaagataacgggagccctcttgggaagcatc

SEQ ID NO: 2402 - DNA, 531 bp, Zea mays
  Clone ID: TF_ZmC2234_2
atcgtccacctcatcaaaccttcgtccacgcttcgactcctgcagggagtgagggagagtgatggagaggtgcgggagctgggactgcgacgcggcggcagcgcagaaggcggtaccggcgccgttcctgaccaagacgtaccagctggtggacgacccggccacggaccacatcgtctcctggggggacgaccgggtctccaccttcgtggtctggcgcccgccggagttcgcgcgcgacatcctccccaactacttcaagcacaacaacttctcctccttcgttcgacagctaaacacctacgggttccggaaggtcgtcccggagcggtgggagttcgggaacgagttcttccggaagggggagaagcagctgctgtgcgagatccaccggcggaagacgtcgacgtccgcggctccgccgtcgcccccgccattcttcgcggcgcctcacttcccgctcttccacccggacgccccgcaccaccaccaccaccaccagttcgtggggggaggagacgacggggctgt

SEQ ID NO: 2403 - DNA, 617 bp, Zea mays
  Clone ID: TF_LIB4743-074-R1-K1-C12
ccggccgggccgcgtggctggcgcctcctggttgccgagcaggccaccaccgctgtggctgtgggcgagccgccggcggcggcagcggctacggggcagaggtccgtgcccacgccgttcctcaccaagacgtaccagctggtggacgacccggcggtggacgacgtcatctcgtggaacgacgacgggtcggccttcatcgtgtggcggccggcggagttcgcgcgcgacctcctgcccaagtacttcaagcacaacaacttctctagcttcgtgcgccagctcaacacctacgggttcaggaagatcgtgccggacaggtgggagttcgcgaacgactgcttccgccgaggggagaagcggctgctctgcgacatacaccgacggaaggtgacgccgccagccgcggcggccacggtggtggcgaccatcccgatggcgctgcccgtggactcgccggtgtactccggcgaggagcaggtgctgtcgtcaagctcgtcccccgagcccccgtcgctgctgcagcagcagccgacgccgtccgcgttggtctccggtgacctgggcgaggagaacgaacggttgtggtgggagaacgcgtggttcgcgcgcgagct

SEQ ID NO: 2404 - DNA, 432 bp, Zea mays
  Clone ID: TF_LIB3356-009-P1-K1-H1
ccagaatctaccagtaccaccttcctctctctctctcactcttcctgcgcgacggtgcaccctagcccgatccgcggcgccgccatggtcgccgagcaggccaccaccactgtggctgtgggcgagccgccaactgccaccccgcagccggcggcggcagcggctgcggggcagaggtccgtgcccacgccgttcctcaccaagacgtaccagctggtggacgacccggcggtggacgacgtcatctcgtggaacgacgacgggtcggccttcatcgtgtggcggccggcggagttcgcgcgcgacctcctgcccaagtacttcaagcacaacaacttctctagtttcgtgcgccagctcaacacctacgggttcaagaagatcgtgccggacaggtgggagttcgcgaacgactgctttcgccgaggggag

SEQ ID NO: 2405 - DNA, 652 bp, Zea mays
  Clone ID: TF_ZmC2234_1
cggcgtccacctcaacaaaccttcgtccacgcttcgactcctgcagggagtgagggagagtgatggagaggtgcgggagctgggactgcgacgcggcggcagcgcagaaggcggtaccggcgccgttcctgaccaagacgtaccagctggtggacgacccggccacggaccacatcgtctcctggggggacgaccgggtctccaccttcgtggtctggcgcccgccggagttcgcgcgcgacatcctccccaactacttcaagcacaacaacttctcctccttcgttcgacagctaaacacctacgtgagtcgccttcgcacttggccttggtttagctaagccttggaggccgcgcggagcgcggacggatggtgaccgccggtgacggcaatgctgcaacgggcaataatgcaggggttccggaaggtcgtcccggagcggtgggagttcgggaacgagttcttccggaagggggagaagcagctgctgtgcgagatccaccggcggaagacgtcgacgtccgcggctccgccgtcgcctccgccattcttcgcggcgcctcacttcccgctcttccacccggacgccccgcaccaccaccaccaccaccagttcgtggggggaggagacgacggggctgtggcggccgc

SEQ ID NO: 2406 - DNA, 857 bp, Zea mays
  unsure (1)..(857): unsure at all n locations
  Clone ID: TF_ZmC3537_1
catctctgagccggtctcccggcagcagcagtccctcgggttgtccacgcggagcgccagccgatgcctcgaggccggccacagtatgtcggttcacccgaagcctataaattcctcgccgccccgcctctcgccgcccatttccttccgccgcctcctaatcctcaacacccgcgcccccaccgcgcccgtcgtatgccaccatgcaccgcgcccgccccaccgcgcacgctaatgaccccgatgctccgtacgccgccgccgcgatgctgctggagcccaaactcgaggacgaggagttgccgctgcagcagctggcgtccccgggcaccttcgtgtccctggaccagctgatgccgccggtgaccgcgccagccgagccgcgcccgctggaggcgctgctgcacggcccgcagctgccgcccttcctgtccaagacgtacgacctggtgaacgagccggcgctggacggggtcatctcctggggcgctgccgggaacagcttcgtcgtgtgggacccctccaccttcgcgcgggacgtgctgccgcacaacttcaagcacaacaatttctccagcttcgtcaggcagctcaacacctatgtgcgtacacacaactcttccgttcctctgtttcttccccctcacaaatccacaatccgtcgctctgttgttggaatgctctgcttcggctcatgccccccctgacccctgttatgctattgatcatcttgggtaccgtacgcctaagtaaaattcccgctgacgtgtagagtgcctacggagatattgctgcggatttgtttttcttttggntggtaattggggttggatcgtgtgagtcatgtataaaactgg

SEQ ID NO: 2407 - DNA, 838 bp, Zea mays
  Clone ID: TF_ZmC10545_2
ttgggtacctcgaggccggccggggcgtcactgcttacctaacccgacccgaccagaaaccaccgcgcactgacgccgcccggctccgtctccggctcccgctcccgctcgaggtcgaggcccacgcagcaatctggtcttctggaaatctccatcaatccgattccgaacggcagaaaattttcccttcccccggccaccaaccaaccaaacccgagcaaccagcctgagccacctcccatgcgccgcgccgcagcctgaggaggaggaggacgcggtggtctggagagggatggagggcgggtcatcgctgccgcccttcctgagcaagacgtacgagatggtggacgacccggccacggacgccgtggtggcgtggacgccgctggggaccagcttcgtcgtcgccaaccaggccgagttctgcagggatctgctccccaagtacttcaagcacaacaacttctccagcttcgtgcggcaactgaacacctacggctttaagaaaattgatcctgaacaatgggagtttgcaaatgatgatttcattaggggacaacagcaccgactgaaaaatatacacaggcgtaagcctatattcagccattcatcgcatactcagggttctggaccattaccagataccgaaaggagggattatgaggaggaaatcgaaaggcttaagtgtgacaatgcagctctgacctcagagcttgaaaagaatgcacagaagaaacttgttacagagaaacgaatgcaggagctagaagataagttgatctttttggaggatcggcagaaaaatctgatggcgtatgtcagggatattggacaggca

SEQ ID NO: 2408 - DNA, 2441 bp, Zea mays
  unsure (1)..(2441): unsure at all n locations
  Clone ID: TF_ZmC12537_1
gtccagaaccttccgagctccgcccggccacgaacgcgncgcgcggcctagaacgttccattcncctctgggcaggcctggagaagggtcaagccggtaggagtatttatcgccgccggcagccactttcccgcgcagcaggagaagagagacgacacagcagcttttttggtttccccttccctttccccgcgcggtgatcgctgggttctccgcgagcgaggcagggcactgcgcgtcctccgcgaccgcctggtgatcgctgggggttctggacgttggcgtttcatttggttggttggtgggtggcagcagccgtggcgagatggagctgatgctgccggtgacggtgaaggaggagtggccgccggaggaggaggaggaggaggaggaggaggaggaggaggacgtggacgcggacgcggacgcggacgcggacgctccgcggccgatggaggggctgcacgaggtcgggccaccgccgttcctgaccaagacgttcgacctggtggccgacccggccaccgacgaggtcatctcctggggccgcgccggcaacagcttcgtggtctgggatccccacgtgttcgccgccgtgctgctccccaggttctttaagcacaacaacttctccagctttgtccgccagctgaacacctatgtgagtgccccaagtactctgcttgctcagttgctgtcgtgtgaatttttgtttctggttggctttgtgctcgcgcgctgctctggttctgcagttcatctcgcctcttgcattggggagtacagtagcatgagcgatcagtcgacaagtctgtctctattattacttaccgaaagaacaagtctgtatatatataagcattttgtgtgattcacaatgacttggagctgatacaatcgttgaacgcgtattgctttttctttggcggcctagcaaatacaatggcaaaaatggccaaatgttttgaatggttcagaagcagaacgacaatgggggagattgcagaaccagcatctccatgacaagatgttaaattcctctgacatgctctttgttcgccttgttactgtgtagctagatggaccaggacaagggatgaacgaagctactacagcctacgagaaagaaacaaactgcttgtttgtcctaaagataaagaagactcactcctttgatcaccactcaccaccaagcaatatactgctagtgtataccactgcccgtgcctgtaaattcggtcgcaaaacttatgtgaaacctcaagttttacataaatttgccatcttgtcttgttaattggctcagcgcctcagcgtcggcatttgtcgattcttagtgtgtgatggcttctggaaatgcagcttactgaacgctgcgcgtgttcatcgctttgcgacgtgcagggcttcagaaagatcgacccggacagctgggagttcgcgaacgaaggattcctgaggggccagaggcatcttctccggctgatcaagcgtcggaggccggcgccgccgccgccgtacctccaggcgtcgcagtcgcaggggtcgtgcctggaggtgggccggttcggggggctggacggagagatggagcggctgaggcgcgacaaaagcatcctgctggcggaggtggtgaagctgcggcaggagcagcagagcacgcgggcggacatgcgggccatggaggagcggctgcggcacgcggagcacaagcaggtgcagatgatggggttcctggcgcgggcggtgcagagcccggacttgttccagctgctggcccagcagcagggcaggcggagggagctggagggcgcggcgctgctctccgccgcctcccggaagcggaggcggcccatcggcgccgcgccggccaacggcggcttgcagcagcaggaggaggagcagcagcagggcgacgacgacgaccccaccgccacgcgggcgctgttcgcggagctggacgagcgagggaccacgtcggagctggagaacctggcgctcaacatccaggggctcggcaagcgcaggcaggacgggagcgagaagcagggtggccgcgcgcggagccagcagcagggcgggttcgagacggcggagctcaccgacgacttttgggaggagctgctgaacgaagggatgaagggcggtgccgaggctgagacgctgccgccggagaggagacgaccggcttggtacgtcgacgcgctggcgcagaagttgagctccatgagcaataacaccacggcgaagtagagatgatctcgttaattaatcctatacgactagtaacagtagcttaattgtccctccgacaggggtcagtgaattctcttagcgatagctccattgttgtagattgtagtatataggagtgggatcgtgatggttacactgtgtcattttgtgcagagtgcagacgtgtagtgtatagtattcttggt

SEQ ID NO: 2409 - DNA, 581 bp, Zea mays
  Clone ID: TF_ZmC11401_1
ggccggaaaaattttctaatccgcaaacgaagcttccagaaggcttcttcttgcgtaccttccacttccacccaacgcgactcgctctttccgcgtgggggaagtcgccggctcagatccagccgggctgcggcgctggccggatggccgagcagggcggcgcagccggggaggccgctggcagcgacccccctgcgcctgcgcctgcgactgccccggcgccagccccagcgcttgctgcggacgcggccgggcagaggtccctgccgacgccgttcctgaccaagacgtaccagctggtggacgacccggcggtggacgacgtgatctcgtggaacgaggacggctcgacgttcgtggtgtggcggccggcggagtttgcgcgcgacctcctccccaagtatttcaagcacaataacttctccagctttgtgcggcagctcaacacctacggatttaggaagatggtgcccgaccggtgggagttcgccaacgacttcttccgccgtggggagaagcgcctgctttgcgacatacaccgacggaaggtagcaccggctccggcggcggggctggccact

SEQ ID NO: 2410 - DNA, 1541 bp, Zea mays
  Clone ID: TF_ZmC1964_1
gttactagctagcttatattgcatatctcctccccagctcctccgtcctcgctagctcgtcttcttcttcttcctctcatcttttgcttgtcctccattattccatcgatctcctattcctgtgccgaccgaggccgccatcgtcaaagagaaacacagagcgggtcggggactccctcgggggaggctgctagtgctagctagctcgaccatatacagtttgtgggcgcggccggccgggcaagctgctaaggtaccagcataccacccatccatggctttcctggtggagcggtgcggcgagatggtggtgtcgatggagagcccgcacgcgaagccggtgccggcgccgtttctgaccaagaagtaccagctggtggacgacccctgcaccgaccacatcgtgtcgtggggcgacgacgacaccaccttcgtcgtgtggcgcccgcccgagttcgcccgcgacctcctcccaaactacttcaagcacaacaacttctccagcttcgtcaggcagctcaacacctatggcttcaggaagctagtgggcggacaggtgggagttcgccaacgagttcttcaggaagggcgccaagcacctcctcgcagagatccaccggaggaagtcgtcgcagccgctgccgacgccgctgccgccgcaccagccctaccaccaccaccaccaccacctccaccaccacctcagcccgttctccccgccgccgctggcacagccggtgccgtcgtaccaccaccacttccaagaagagcccatcgccaccgccaccgcgccgcacggcggtgctcaagccgccgccggcggcggcaacaatgaaggcagcggcgccggcgccggcgccggcggggactttctggccgcgctgtcggaggacaaccggcagctgcggcggcgcaactcgctgctgctgtcggagctggcgcacatgaagaagctctacaacgacatcatctacttcctgcagaaccacgtggccccggtgacgagcccctcgtcggcggcgcacgcgtccctgcccagcgccggcggcggcggcgccgcggcgtcctcctgcaggctaatggagctggacccggcggactccccatccccgccgcggcggccggaggcggacgacggcacggacacggacacggtgaagctgttcggcgtggccctgcagggcaagaagaagaagcgggcgcaccaggaggatggggacgacggcaaccatgagcagggaagcagcgacgtctagccgccggccggcttgcattgctagctctctcgttcgtgtacatacagagatcagatcagagagtagtagtttgcctcgctagctagctaggctaggctttggtaattttcttctgagtgcgtactgaaattaatgtgcaagagcgaagtgtttgtctgagtaaaactaacaacaatctacggatgcgtgcatggaagctaagctatagatgcagaggcttgcaccaccttctcaattcgcaatcgcaacaagttcttcctcgccgcggatgggaatacggaatgg

SEQ ID NO: 2411 - DNA, 1913 bp, Zea mays
  unsure (1)..(1913): unsure at all n locations
  Clone ID: TF_ZmC12124_1
ccggccgggccgggcccttcccccgatttcaccgaccattttccccattttacagcggcgaatatctctcatctcccccgtcctctttgctgcaacacctcctacccacccgacagaaatatcctaagcgccgacccgaatacccgattcgctcctcgtccggtcgattcctgctcctaatcgctcgaatcgagtccttgccccgtgttccgtgccacaatctgggcgcttggctcccgcgagccggggttcttgggcctgggcggaggccatggacaagccggtggcgccgggcattatcaaggaggagctcctggagcagcagccgccgacgcaggacggtgtgggtggcggcggggatgcgccgcgcccgatggaggggctgcacgaggtgggtcccccgcctttcctcaccaagacgttcgaccttgtggaggacccggccaccgacgccgtcctctcctggagccgcgccggcaacagcttcatcgtctgggacccgcacgtcttcgccgacgggctgctcccgcgcctcttcaagcacagtaacttctccagcttcgtgcgccagctcaacacctatggcttcagaaaggttgatcctgacaggtgggagtttgcaaatgaaggtttcctcagaggtcaaaggcacctgctgaagatgataaagagaaggaagccaccatcagctgtggcaccattgcgacagcaacgtgcccctgcttcttgcctggaggttggtgagtttggatttgaggaggagattgataggctgaagcgtgacaagaacattttaatcacagaagtagtaaaactaaggcaggagcagcaaagtactaaagatcatgtgagagccatggaggaaaggctacgagtggctgaacagaagcaggtacagatgatggggttcttggcaagagcaatgcggaacccagagttcttccagcagttggcccagcagcaagacaagaggaaggagctcgaggataccatctcaaagaaaagaaggcggcccattgacaacacaccattctacagtgatggggaaagcgaacagcttgattcacagttgaaaatgttcgagtcaggtgttctcaatgggctcaatgaacctgagctggagaatttagcagtgaacattcaggagcttgggaagggaagcatagatgatgggaacttgactcaagttagtgaccagtcagagctgaacgacgacttctgggcagagcttttggtcgaagattttggagacaaggcaggacagccagagttggagggaagaactgaagacgtgaatgaccttgctcaacaactggggtatctgagttcttctagcccaaaatagagccagttcctaatggttgcccccacaatcactggtgctttccctaccctactgttgcagaccatcctgatcaaaccggaatgatgatggatctggcagacaagttgactggtggtggagaggtgttcatactgaaggcgtgctgtggagaggtcactgccttgacgttgaaggcttagcgctgtactctgctgtgggagttacgtgtggggtgttggctaaatgtctcttccggcgtcttctggcaaaatgatctcgtggacggtgactggcaaagatgcctaggggccaacgtatacgtacacagctgttatcagatcttgttcaaagtcattgcgcggttttgacggtgctatgtatcgatcagggttctggccttctggggttgggttgtagaattgactggctgatctagtgttctccatgtatgactggtgtaaccttaaaacaccctcagcttgttgttgaactgtgacaagcatcttttttttttgttgtactccattttcatcatcattgtacatcaaattgctgaattatgaacagattnnggataatttggccgact

SEQ ID NO: 2412 - DNA, 553 bp, Zea mays
  unsure (1)..(553): unsure at all n locations
  Clone ID: TF_ZmC363424_1
cganagagggagttcgccaagacgacttcatcaggggacacaagcaccttctgaaacgcatccaccggcgcaaaccggtgcacagccactcgctgcgcacccaagcgagcgggccgctagcggagtcccagaggcgcgagctcgaggacgagatcagcaggctcaggtacgagaagagcctgctcctggcggacctccagaggcagaaccagcagcagcgcgggatcagctggcagatgcagtcgctggagagcaggctggcgcagatggaggagcgccagaggagcgtcgtggcctccctgtgcgacatcctgcggaggcgcggggtcgttcgtgttccggcctccgcgatggagacgacggaccactccagcaagaagaggagggttccgattccgaagaccgatctcttcgtcgccggcgaacagcccaaggtcgaagagcagcaggtgctgccgttcctgcaggcggtgggcgcagaagcgccaggcgtgtcgacgatccgcgttttggatgccgagccgtttgagaagatggagctggccttggtgta

SEQ ID NO: 2413 - DNA, 2212 bp, Zea mays
  Clone ID: TF_ZmC3627_1
cacaggtggcgggcgggcggggcgcgaagtttccattcccctttcctctcgatcgcatacaccagcggcggcgccgggaccccgaaaaccctctccccgcacaccacggccaacaggaaccactccgctcctccgagccctagccgtcccgggccgggtcgggctcccctacatgacgccggcgtgaggcaagtgcttagtggatcgcgctggtgggaggatgcagggcggtgtcatggcccatgccgccgccgccgcggcggccgcgtcgacggtgaccacggcggtggcgcccccagtcacggcgcacgcggtggcggtggcgcccccggtcacggcgcacgctgcggcggcggcgggcaacggcagcgccaccgccgcgccgccgccaccgttcctcatgaagacctacgaggtggtggacgacccggccacggacgacgtcatatcctggggccccgggaacaacagcttcatcgtctggaacacgcccgagttcgcccgggacctcctgcccaagtacttcaagcacagcaacttctcctccttcgtcaggcagctcaacacctacgggtttagaaaggttgatccagacagatgggaatttgcaaatgagggttttctgagaggacagaagcatctgctgaagactatcaacagaaggaaaccatccttgcaggggaacagccaaccacagcaacctcagtcgcagaacgctcctgtgccttcctgtgtagaggttggtaagtttgggttggaggaagagattgaacggctgaagagggataagaatgttcttatgcaagagcttgtcaggctgagacagcaacagcaaacaactgaccatcagctgcagactttgggcaagcgtcttcaagggatggagtcacggcagcaacagatgatgtctttcctggctaaagcaatgcaaagtcctggtttcctagcgcagtttgtacagcaaaatgagaagagcagaagaagaatagtagcggcgaacaagaaaaggcggctgcccaggcaagatggtggcctagactccgaaagtgctgctgcttcgttggacggtcaaatcatcaagtatcagcctctgatcaacgaagcagccaaagcaatgctaaggaagatactaaagctagattcttcgcataggttggaatctatgggcaattcagagaatggcaattttctgctggagaattatatgccaggcgctcaagcctttgagagctcttcgtcaacaagaaactctggggtcaccctttcagaggtttcagctaacccaggtttgccgtatggcggcggcggcggcacgagctctgggctgtcagccatctgccctcctgaaatccagtgcccagttgtgatggacaacatgtcgtctaaccaagtgcccagcatgagtgctgtgcctcctgtttcgaaggctacaattgacatgggtattcctgaattctcagctctggcagacttggtgaatgaaggctccgtcgatatccctggaggggcctttgagatgcctggtcctgagtttcctctgccagaaggcgatgacagtgtccccatcgagaccgatgagaccatgtacaacaacaacgacgagactcagagccttccaggcatcatcgactccttctgggagcagttcctggtaggcagccctctctctgccgataacgatgaagttgattcggggtcgccacaggagaacggatggagcaaagtggggaacatcggtgatcttacagaacagatgggccttctgtcatcaacaaatcaccgcgactcagggaatgggctgtagtgtatcttaattaatatacggtagactgggattatcggtaataagcgtcgcctgcagtttttgttatttttccttttggccaaaaaatgatatgccggtatatcaaccactcgctcgacctatatgcgcgggaggggcagtcttccagctgagctctgaatgccacagccacctgcttgtatcaatctatgatgttggcagtcttgagaacaccactgtgacttgttaaatctgtatgcttattcccactctagttgctgatattgtttagtttgttatattggtgcggaaacacgggggttgtttagcaacaaagtacaacacgttgcttcattacaattcgattctgtacaattccatactccaaccaatatttttccagcaaggggatcaaaaaaaaaaaaaaaa

SEQ ID NO: 2414 - DNA, 1756 bp, Zea mays
  unsure (1)..(1756): unsure at all n locations
  Clone ID: TF_ZmC3627_2
cctctccccgcgcaccacggccaacagnaaccactccgctcctcgccgtaccgggccgggccgggctcccctacatgacgccaccgttcctcatgaagacctacgaggtggtggacgacccggccacggacgacgtcatatcctggggccccgggaacaacagcttcatcgtctggaacacgcccgagttcgcccgggacctcctgcccaagtacttcaagcacagcaacttctcctccttcgtcaggcagctcaacacctacgggtttagaaaggttgatccagacagatgggaatttgcgaatgagggttttctgagaggacagaagcatctgctgaagactatcaacagaaggaaaccatctttgcaggggaacagccaaccacagcaacctcagtcgcagaacgctcctgtgccttcctgtgtagaggttggtaagtttgggttggaggaagagattgaacggctgaaaagggacaagaatgttcttatgcaagagcttgtaaggctgagacagcaacagcaaacaactgaccatcagctccagactttgggcaagcgtcttcaagggatggagtcacggcagcaacagatgatgtctttcctggccaaagcaatgcaaagtcctggtttcctagcacagtttgtacagcgaaatgagaacagcaggaggagaatagtagctgcgaacaagaaaaggcggctgcccaagcaagatggtggactcgagtccgaaagttctgctgcttcgttagacggtcaaattatcaagtatcagccttcgatcaacgaagcagccaaagcaatgctaaggaagatcctaaacgtagattcttcgcatatgtttgaatctatgggcaattcagataatagtaataataataataataatctgctggaggattatatgccggccggccaagcttttgagagctcttcgtcgacaagaaattctggggtcacccttgcagaggttccagcaaactcaggcttggcgtatgtcggcacgagctcggctatctgttctcctccagcggcccctgaaatgcagtgcccagtggtgctggataacaaggcgtacaagcaagtggccagcatgagtgctgtgcctcctgtttcaagtgacatgggtattattccggaattctcagatctggcagacttggtctctgtggatattcttggaggggcctttgagatgatgcctggtcctgagttccccctgccagaagaaggtgatgatgggaccaccatgtacaacaacaacgacgaggaggctcagagccttccaggcatcatcaactccatctgggagcagttcctggtaggcagccctctatctaccgataatgaggaagttgattcagcaggcggactatatgcgcaggaggatggatggagcaaagtggggaacatcgctaatcttacagaacagatgggacttgtatcatcaacaaatcaccgggactcagggaatgggctgtactagtatcttaattaatacagtagactgaggattctggtaataagtgttgcatgctcttttcttatttaattattttcccccttttcgccaactcaatatgggaggtggggggtgaggagattcaaaggcatgtttggctcgttacctaagttgacacactttgccaaacttacttttatgactaaggttagttatttaatttggacgactaactttagacaagtgtgacacatttagccacaacccaacagaccctctgtctttcagac

SEQ ID NO: 2415 - DNA, 627 bp, Zea mays
  unsure (1)..(627): unsure at all n locations
  Clone ID: TF_LIB4185-044-R1-K1-H6
aagaaagctaacatatttcctttttttttttccaacaaaaaccaatttacaaatttggggggggacagcacaaaaagagcattgggtcccccccccaaagtttttacagatcccgggctttcccaaaagcagggttcaactcggaggaagagggacgggaatcaatttacctagcgggggggggggattaaactgacaaaggggttgagctggcggacaaaactggaaaaattgttgggcttaaagggcccggggagcaccgtttggaaaaaaacaaaggggtcggcaaaaacaaaactgttgttgccgttgccccagccgatcaccccgtggcgggccccgggggtgccccccccccccccggggggggggggggtttttcccaaaaaaaaaggggggggggggaaggattttcttcccgccgggttaacaaaaagggggggggggggtgggggcgccccccccccccgngagggcgggggggggaggggggtttattaaacccccccccccccccccggcgcgttttatcccccgggggggggggggctttttttttttttaatcccccccccccccccggggggggaccctcatcttcttttttttttttataaatctgggggg

SEQ ID NO: 2416 - DNA, 633 bp, Zea mays
  Clone ID: TF_LIB5116-017-A1-PF1-D3
ggttatttgtttagccatgtcctcctgtcacgcacgctgcccataattagtaaccatagcctaattgggcggcgcccggcccctctctgcaagcaaccacacctgcctgcctgcctgccttttgagggactttgacgtgtgcgggtgagttagagtagagggagcgaactcccagtgcctgaggcaagtacgcaggaggtacatagataggagcaggatggacggcctccacacggagctggcgctggggctgatcgggtgcggccatggcgacctccagacggcgccgttcgtggccaagacgtaccagatggtgtgcgaccctaggacggacgcgctcgtcaggtgggggaagggcaacaacagcttcctcgtcaccgacgtcgccggcttctcgcagctcctcctcccctgcttcttcaagcacggcaacttctccagcttcgtccgccagctcaacacatatggcttccggaaggtgcacccggaccgatgggagttcgcgcacgagtcgttcctgcgcggccagacgcacctgctgccgcgcatcgtgcgccgcaagaagcgcggcgagggccggtgctggcgcctcgtgctcgtctgcagtcggcggcggcgagcagcaccagcacg

SEQ ID NO: 2417 - DNA, 573 bp, Zea mays
  Clone ID: TF_LIB4315-023-R1-N1-F11
gaaaacttatgtacattgggattaatataaacaataaaaagacttcaagagatctttggaagaaggaaaaaaatacatccataaaaagaaccgataccagcctccgactacaactccacaccatcatattctacttataaaagagcttttcatattctactatataatacctgaaacctttttatgttttactttataatatctattaattattattagatagataataagggtgatggaagatgctaattatctaagtggccaacaaaatacttcaaaaattgcatttttaatatcttatcttaaacccatcatcccattttgctctccagtctccaccaatcgacccccatcctgctcggcttgcagcaaaagggttgttggttattttgtttgtttaagagttcccagcgctggacaatgaaggatttgatgcagacttggcgtcctttgcatctgatccttccccaacaactgctttttcctcgctcctacagcttaaaggccccgggttcatcttcctcacttcctctttcgggtatatgaagattttgcgaaccatgcaacaaaact

SEQ ID NO: 2418 - DNA, 518 bp, Zea mays
  Clone ID: TF_UC-ZMROMO17026D01_FLI
cgaaaccgcctgtaaaaatatatcgtccccgcaggctttgagcctttttgtactagtgattgtattgtatgattagttgctgatgctatggagtaccaccaacgagttcctcacgagaagcctgcacatgttctcacctatgaagaccgggatggagactggatgatggttggggatgtaccgtgggagctcttccttggaagtgtgaagaaacttaggatttgcaagaacagataaatgctagttagcaaagcttattattcgtgcgctgcatggactctatttctttcttctttttatttatatcggttcatacagaaagattttgctggccacagagtggacatgcatgtgataccgaggctatatatactgaccgtgtacagtatacggaagaaaagtcaatcttgataccatccctagaaaattaaattttggtatttttatatgtttcccttttctgttttctctgagtgcctagcttgtaaataccatatatgcatggctatttgttaaag

SEQ ID NO: 2419 - DNA, 662 bp, Zea mays
  unsure (1)..(662): unsure at all n locations
  Clone ID: TF_ZmC12865_5
tttattctccttaaacactcgtntgtgatccctgagatgaattattcacattttttctttcttttttattgcttaactatctattgatgcatcaggcatttactagttttttccgcgtccgtgctcgttggtgatctcttgttcaccacattttgccggaaacttaggatcatgagaggctctgatgctgctggcatggctcctccaagaccaccggaacagacagttcggaacaaatgagggcggacagcttacttacctggcgctgaactgaagggagagcgacgctgccttggtcaggccttctttcacttgtgcagtgggatctgcgtcctgctgtctcggacgcccattttgcccacgagctggtcgtcacgtgctgtcgctttttgtctgggaaagatagcgtactgcttgctgtatgatactttcatctgtgttcggaagtttgtagcgcttcatatcctggaagggagtaaagaaaatgtccatgctgtccggtgagaatttctttccccgtgctgtgtctgcgagtcaaactaactattgagcgatatgagcatgcattggcatcagtttacctgccataaacctgaaaaaatactaaaaatgaagaaaagaaaagcaaaaaaataaaggggcggccgccgactagggagctc

SEQ ID NO: 2420 - DNA, 506 bp, Zea mays
  unsure (1)..(506): unsure at all n locations
  Clone ID: TF_LIB4303-018-R1-M1-C3
gcccgacgggcactctcaagcaacggcgagacgcggtccctgactacgaacgattgaggaatctcagcaagagctatatcatttttgatcgcaccagcgtcaggcgatgatgatatcgggttcaacgtacataaattcgtagatcagtgatatccaattcttagacagaaatcttcggggctccagctcactgttcaacatcggacgcgaacatacaccaaggtgcacaagcgccgcgctgcgcgaagagctaacgacacagacagacaaaacgcttacnatgaattgaancatgatnttgaccgtntgtttggaattgaggggcatctcatcaaccaaaacagacctggctggaaactggtttacgatgatcactatgtggatgtcccattagttgttgattacccatgcgaggacttcttgaactgcgcgcggtgcatcaggattctttctccgcacgacgagaggcatcatgatgctgnccatcgactacggagacagctttc

SEQ ID NO: 2421 - DNA, 567 bp, Zea mays
  unsure (1)..(567): unsure at all n locations
  Clone ID: TF_LIB3632-008-Q1-K6-C5
cggncgcgtgggccgtgtcctcttcctcccccgcggcaggtgcaggtaccgcggcgccaagcaagagggccaaggcggatgcggcgcccaactcgccagggacggtcgcgtctggccacccacagagcagctttggagtggtgggatggccacccataagaactttcaggatgaacagcctatttaaccaggccaaagagaatgcatcggaggctggcgccaagaagcccatcgtcgaacctgacatgcaggaagacaaggaggagagcaagaaaggccggaccgtcggttgggtgaaggtgaacatggaaggagatatcattggaaggaaggtcgatctcaatgcccatcgctcttacaagacccttgcctcagcacttgagctcatgttcatgaagccgtccattggtctttgcacttctagtaagtcatatagtctgatcttttactttcactatatatatagatataacccagttgcatacttggctatacacttaggacacgacactgtactagatatagtttcataagtctgcgaggatgttttttctgctctcatttctg

SEQ ID NO: 2422 - DNA, 418 bp, Zea mays
  Clone ID: TF_LIB5116-066-A1-PF1-A4
gttcaccgaggcttgccggaggatcagggtcatgaaaagttcagatgtagttgggcttggagttacaagggcaggggttaagtccaagaataagaactaaaacggtcgctgcccacggtttgaagacgaggtcgcacatgccgtctgtactactgcatggttttcctatcccacaagtaaaatcacccgttactctaccgtttaagatttgcgacatctcctagagacttatgctctatattttgttgtgcccacgttgttgtacgcgtgttatttccatccgtgtaaatggttggtaagcagtgcgagagctactgctgtgtttgatgactcctatgtattttgccactcttgtcctgaaccggtcgttcgtcgtaaatgtgaaggttgcaagactattatttaaaaaaaaaaaaga

SEQ ID NO: 2423 - DNA, 506 bp, Zea mays
  Clone ID: TF_ZmC784_7
cggggttactctctctctctctctctttcggatggcgcgccgtacctcaggaagatcgacctcaagacttacaagaactacaaggacctgtcgaccgcgcttgagaagatgttcagtggcttcagtactggtgagatgtctcggggttactctctctctctctctctttcggatggcgcgtcagtgagtaattatgtttcgttttgatgtggatggtgttagaagtacatcaagaagcctttaaaaagcagcatactcctacttgattcctaggataagcaatagcttgaacttaccccgttatattttgagtaattgtaagattacaaacaatctggcaccccttgttttgttaatttttgggtgaactttttattcctcccaaaacaaataccctggtgattgttcagttattgcatccgtatcaagtctctcttagaaagatgttgtttcctgtaaggcaaaaaaaaaaaaagaagaaaaaaaaataaaaactcggggggccc

SEQ ID NO: 2424 - DNA, 449 bp, Zea mays
  Clone ID: TF_ZmC435820_1
atgtgttgttttgtttcttttttttctttttttttttttgtttcatagctcgcaaagctaaggcttgtttctgccctgaacttctatccatcgaatggaggcgaacgaagcgcccaacgaggatctcgggggtcatcagggggaaaacaaacccttcagccccgtacctaccctggggctgaagacccctaacctgctgctgctgctggtgcgggggccctatcttgctggtaatcccccccccaccgaaccgacggccccgaccccggggctaaggcttctcaactcctgcctgctgacggagacggcacagttgctaccaaacctccgcgcgggggccgagctcaggagctccagggggtgtttccccatctgttttactttgtgccccgagaggatttttatgcaggacaccgagctccctttttcttgccaggggtcgtcacccc

SEQ ID NO: 2425 - DNA, 686 bp, Zea mays
  Clone ID: TF_LIB5025-034-A1-XP1-E4
gcaggttgcaccctaacaaactcggctagccatcgggagaggaaagcgctctcacttccccatccttcctccgtccacaccgcagccactacagatagatacgccatcccacgaggtcaactcaagtcccctttccttctccaccacgatgagcggcggcgctgccagcggcagcggcagcggcggcgcgagcttccagcagcacgcgaagcggcggcggccgcccgctgggccgcagcggctgacgctgtcggtgcaggacgccgacgccgacgacgcggccgcggccgtggtcccgcccgtcaccgtggtcctggacgggcgctgcatctgccaccgcgtccacctcaaccgccacacggggtaccgcagcctggcaggcacgctccgccgcatgttcgtcgactccgacgacgactccgaccagcagcagcagcagcagcggcggcgcgccgaggacgacctcgacctcgccaatgccgtcccgggccacgtcgtcgcgtacgaggacatggaggacgacctcctcctcgccggcgatctcaagtggaactcgatcgatttactctctcgatggtgtgcatgattgcatcgcagcgattttgttcgcgtcgccaaaaggatccgtatcatccctgccaagaagacgacgtcgtcgtcaagccgcggcaacaaatgcggaggag

SEQ ID NO: 2426 - DNA, 677 bp, Zea mays
  Clone ID: TF_LIB4171-041-R1-K1-C3
cccccctcgagtttttttattacctttttttttttttttttttttttttttttttttttttttttttttttttttttttttttttttaaacacccttctttggacctttatttagagggacaacaaacagcccctgggaccctgttttttgcaaactagggaaaggggggctcaatcgtagccccaaccctttttggcccaaaccatttacccctcgaacaaagggttaacaacaaaaaaaaagggggggttttttttttgccccaaaacaatgttgaaaaactaacattgacaaacggggggttttttacttgcgaaacaaaaaaaacatgggggccaaaccataagggaaaattttttttaaaactggaaaacgttttccggcttccacaaaaacccctacaggcccgggatatcccccttttgctctggacgggaaaaaacaccccttctagtggcaatttttggacttaaaacccgcccttggagcaagcccaatggcattggaccctttcaagaacccgaccctggggaaaaagtcaacaaacatctcccaggggacatcgccaacaagcatccaatctccatccttggcctcggaaggaaaaacattttccccctccttgggggactcaaaaaacccatccttgccagtactgaacccactgaacattttt

SEQ ID NO: 2427 - DNA, 417 bp, Zea mays
  Clone ID: TF_jC-zmX700440508a1
gtaagctcggaattcggctcgagatcggcaccggtgtatttattgcaacctgtgcaaatcgagtgcgggggggatgcatgaatcagcaggggtggaactggaacggtgaacattcaccacgccccgtacagtgcaaaagatatccaaagcacggcccagggtgctttaacacggagctggacaacggctcataagcatggagtcctacttggcatgggagaggacctttgtaaatctaccgactacggtgaacttcaatcagagctggacaagatgcttgacttctagggtgaattggtatctcgctatcaaaactgggagatggtctataccgaccaccagggcgatatgatgctcgagggagacgacccgcgggaagatgactgcaacataactcgcaagagctacatctacacg

SEQ ID NO: 2428 - DNA, 506 bp, Zea mays
  unsure (1)..(506): unsure at all n locations
  Clone ID: TF_LIB3912-054-Q6-N6-B5
agcaccaggagaagcaccatctacaaactgggtaccggggggcttttacccggaggcatacacacaaaattacctacctactacacaccactgaaacacacccctttctcgttcttccggtcactctgacacgtggccttttgtctgcttcaccactttcaaaagggctgcaagaagtgaaacacacacaagattagcttagggtcagtagttcttccgtgcagccaaggctagacattgctgctgaagctgcctcactgactggacaagttagcgcggttctcaaaatcgacagccgaagtcgaggggccgctccggggctctttggaagccagccctcttcccagcgagtcagacaggcagtcttcgagcctcgcgtttagggcgcctgggttcatcctctccacttcctcccttgtgtagatgaagatcttgtggaccatgtcacagaactcattccnaggggtcgtcgccgaccagcatcatgtcgccttcgttgtcagtgt

SEQ ID NO: 2429 - DNA, 1891 bp, Zea mays
  Clone ID: TF_ZmC9734_1
ggacaggtcgcctgggatgagccggacctgttacagaacgtgaagagggaagaagctgtgcgtcccactgtacccggagcttccgctggagggccagttcccggcgccgatgttccacggaagccccctcctcggccgtggcggcgccggtggcccgatgtgctacttcccggacggcactcctgcaggcatacagggagccaggcatgctcaattcggcatatccttatcagatctccacctgaacaagctgcagccgggcctgtcaccgcacgggctccaccgccagctcgaccacggcgtgcaggtgcaggtgcagcagccgaggatcgccgccgggctcatcgtcggcggccacccggcggcccgagacgacgtctcgtgtctgctcaccatcggcaccccaaagagcaagaagccaccgtcagacgtcaagaaggcgtccacggcggcggcaccgcagctgatgctcttcgggaaagcgatcctcaccgagcagcagatatcgctaggcggcggcaatgtcgtgccggcgctgctggcgaagaagagcccctccgacgacgacgacgacgtggccgagaggacggtgagcaactcggacgtgtcgagccctgggaggagcaaccaggacggcacgtccagtggcggaggcccggcggcgcgggcgtgctggcaggaggaggagtgcaacaacagggcggcaggttctgaggacgacctcctcgggcactgcaaggtgttcatgcagtcggaggacgtcgggcgcacgctggacctctccgccgtcgcgtcgtacgaggagctctaccagaggctcgccgacatgttcggcgtcgacaaggccgagctgaccagccacgtgttctaccgcgacgacgcttccggagcgctcaagcaccctggcgacgagcctttcagtgagttcaccaagaccgcccggaggctgaccatactgacggacgagagcagcgacagcttagcgaggtagagtccagtctcaaggagacggcggttcggcagtttcggttgggagtgggaggcgccccggaacgggagcgcgtgcgtgcgtctgatccaggaccaaagatttgtcggactagtagctctacagtagtggagtacgtacgtacaccttgatgctgctgcttctgctgtcagttcaagtggccataaccataatgcagctgcctttggtcacagtgactgatcggatgtgttgtgtacatcggaccgttgatttgcgaacgcgattactgaaagattattattatttttttgtatttttgatataactaaggtgctttggttcaatgaagctctcgtcgcctgtacaaccggggggagctagcgaaccgcggcggcgatctcgaaggacgatccccccttgcaaagtgctggtgcagactgcaaaaagggcggtgctgctgtcgtgtcggtcgtttcttatcagctcttttgttgcctgcaaaatgaatttaaagaatgtgctctgtccccctgcccagaatgtgctctgtcacgctgccacgtcagtcagtcagcacgcagttgctaccgcaccaccggtactgttctactgcttgtggcgatccatgccctgtcgttgttcctgttgcgggggagccctggcaggcgtgcgtagtgcgagcgccccggatgccgtgccatttcaccagccaggccgcgccgtgctgcttctagcggtccttgtgtgcacggcgtacgttgttcagtgatctttcctggagtgtccaagtactctcgtgcctactgtcccacggtctgcttttcatcctctctaatatatgttcatctctgtacacgagcgaaaagcgtgaacagtagaggaggaagatcactaaacagaaaaaaatataaaattttgtgt

SEQ ID NO: 2430 - DNA, 553 bp, Zea mays
  Clone ID: TF_LIB3608-010-Q1-N6-C6
tcgcgatctagacttagtcccacgcgtccgcggacgcgtgggttttttttttttttttttttttttttttcttaaattcattttgcaggcaacaaaagctgatatgaaacgaccgacacgacagcagcaccgccctctatgcagtctgcaccagcactgtgcaagtggcgatcgtccttcgagatcgccaccgcggctcgctagctccccccggttgtacaggcgacgagagcttcattgtctgccgccttcttctacctcgcgtccgttagtatggtcagcctccgagcggtcttggtgaactcactgaaaggctcgtcgccggcgtgcttgagcgctccagaagcgccgtcgcggtagaagacatggctcgtcagctcggccctgtcgacgccgaacatgtcggccagcctctggtagagctcctcgtacgacgcgacagccgaaaggtcgagcgtgcgcccgacgtcctccgactgcatgaacaccttgcagtgcccgaggagatcgtcgtcatcagtcgccgtcgccgccgccttgttgtcctggcacg

SEQ ID NO: 2431 - DNA, 647 bp, Zea mays
  unsure (1)..(647): unsure at all n locations
  Clone ID: TF_LIB4979-126-Q1-K1-G8
aatacaaccattcgttcgcttcgactcccactctcgctcgttctttcactctctagctccccctcgcccccctaacgggtaccctactcgtcaccacaataacagacactccacacctcacccgtcctacgcgtcaggtgctagctggtccacatgatcatcccgcatcacgacctctagtactaggcctctcgccggcggtagctgccgccgatgaccaccatgacctgaaggctatgcatctccgccttggtgtgccgggttgcgaatcgccggatctatcgagacgagtctgacatcacaggccccctgcacctgctccccagtatagtcggatacagagcgcccgctgaccaggtgccgacgccatccaccgaagccgattccgaccaacaaaagaaggctgctcaatactccgaccaatggaacgtagaagagactaccgcaagcgacgcanaagactatcgccgaccggcatcgccaccaatcccaacgtaccgcgagaacaccatgtctaccacccatatgaagggcatccaggaggactgctgaggccaagcatgatcagctcttcctgcacatccaggtcagtatggatggcgcaccgcacctcaagaagattgacctcatgacttactagaactaca

SEQ ID NO: 2432 - DNA, 651 bp, Zea mays
  Clone ID: TF_LIB3354-016-P1-K1-B5
agctcatcacatccatctcattctactactgcctcagagaccaagctgctgcaaccggagaaggagatctattctacaaagtgaagtacttagcttgggacatggaaaccgtcgtgggagacctcatggcgaccgagctgaggcttggcctgccgggcaccgtggacgactgcagccagcaccagcagcagacccagctgaaggtggccgcgccgccgtccaaccctactaggggcaagaagcgccccgccgccgaggaggaggaggcaaacaagcgcgacgcggaggcagcacccccggcggccaactacttgtcaccaactcttgcagggcgcccgtggtcggatggccaccggtgaggtcgtaccggaagagctgcttccagcaggcaaagcagcaggccgtcagcagcagcagcaaggcggccgacaaagaggatgctgcggcgccggcgcccagctgcacggcgtccgcagccgcctcaaacgccaccgccagcgccggggccggctcattcgtcaaggtgagcatggacggcgccccgtacctgcggaagctcgacctgaggatgtacaaggggtaccgggagctccgggaggccctggaggccatgttcgtctccttcggcagcgccaacaacaacaacaacct

SEQ ID NO: 2433 - DNA, 421 bp, Zea mays
  Clone ID: TF_LIB4977-002-R1-K1-H7
cctcgaggccggccgggccgggcctctttttgccggaaacttaggatcatgagaggctctgatgctgctggcatggctcctccaagaccaccggaacagacagttcggaacaaatgagggcgggcagcttacttacctggcgctgaactgaagggagagcgacgctgccttggtcaggccttctttcacttgtgcagtgggatctgcgtcctgctgtctcggacgcccattttgcccacgagctggtcgtcacgtgctgtcgctttttgtctgggaaagatagcgtactgcttgctgtatgatactttcatctgtgttcggaagtttgtagcgcttcatatcctggaagggagtaaagaaaatgtccatgtgtccggtgagaatttctacaaaaaaaaaaaaaaaaaaggcccctagggcc

SEQ ID NO: 2434 - DNA, 911 bp, Zea mays
  Clone ID: TF_ZmC148771_1
caatttccttcaccgcaatttgttctcgctttatcagatctccaccttatccacctgcagtcgagcctgctgtaccctggatgcgcaagttgtgaccatgttggtccgacgatccctatcccgtcaggaatcaagcctgctgtaccctgggctccgccgtcccggcgcggtcggtcagactgtccctactccgtcggtgccaggcaccgacctgaccatcggaggcgcaccggcgcgcgacggcgtcccgtgtgccctgtccgtcggtgccagcaagcagaaccccgacgccgtcaagccggcggggctggtgctcttcggacggaccatactaaccgagcatcagatgagcctcagcagctccggcggcgccacctccccagcggcgactggtaacagctctctgtgctggaccgccgagaagggccccaatgtctcggagggctcgggctcgggctcgggctccggcgtcatccagaacagcccgaccggcaagaacacgtcgtcggagaggctgccgtggttcggggacggcagcagccagcaggcctccgagcccggtcttgagcccggacaatgcaaggtgttcgtcgagtccgacacggtcggccgcaacctcgacctgtcggcgctgggctcgttcgacgagctgtacggccgcctgtccgagatgttcggcgtcgagggcgcggagatgcggagccgcgtgctgtaccgcggcgccaccggtgaagtgaggcacgccggcgacgagcccttcagcgatttcgtcaagtcggcacggaggatcacgatattaaccgatgctgggagcgacaacctaggtagctaagtgaggagcagtgaaccaattccagccgcgagtactgactagccaagtagctagtgtgtggttacaggaacagcatagg

SEQ ID NO: 2435 - DNA, 274 bp, Zea mays
  Clone ID: TF_jC-zmX700344041a1
attcggctcgaggttctacacgcatttttcgatagggaaggacgccaagcccacatggaagcttgtggaccccgtgaacgggactgcacacttacccacgtacaaggacagagtacgggactggatgctcgtaggctagcttgccctgaaggatgtcgtggacaactagcagctcctttgtacagggaaggggctcagacgacacaacttggtactgagagccacccaatgaggagcactcaggctggcattaccactcacgaacccactgttg

SEQ ID NO: 2436 - DNA, 503 bp, Zea mays
  Clone ID: TF_LIB4172-001-Q1-K1-C12
accacttgtttttttttctgtctcgagtttttcccataacacatcatcacacggggagcaacacagacccccattagctccacgctctttgtcccaagccacagagctagcggggggcgcaaaaacaaacaggggggagagtaatcctcgagccgagggccatgggctcccctgcgcctttttaaaaactagaccgaacccaccggcgcccccccagcccacaggcctctcggcttctgtatgctcgcggagcgtgccgacccattgcccaccctttttgagggagccgctctcaagagcgggaggcccggtttgcccatccgctggacctcctacggagaaagtatctttatacaagacacactgtacaaaaatccctgccgtgggacatcccccaccaaaaggacattcccccctctggaaacaaaaacaaggtgccaccctgatctaaaggggtcttccatctggcccctggggccaaacagacgccaaaccttttttcc

SEQ ID NO: 2437 - DNA, 506 bp, Zea mays
  unsure (1)..(506): unsure at all n locations
  Clone ID: TF_ZmC2665_2
cggacgcgtgggcggacgcgtgggcggacgcgtgggcggacgcgtggggaagatcacgagaaggatgtcctattagttggtgatgacccatgggaggacttcgtgaactgcgtgcggtgcatcaggattctttcgccgcaggaagagaggcaaatgaggctggccagcgactacggagacagctttgttggcaaccaagcgtgcagcagctcggacggaggtcgcccgtggagggtcaccggcgactagaaatagcaggcgatgtctgagcacaaatgtttggtataatccgtccaacgatagcaagaaaatgatacgcgatttctgagcacaaacttttgcactcagatgatcgtgcaaacaattagcattttaagaaaaatgttgcagttcaatgtaactgcaggaatgtctctgatgtagcctcttcgatgtggcagccttaacaatcgatgtgctacagttactctgccttttaaaaaaannaaaaaaaaaaaaaannnnng

SEQ ID NO: 2438 - DNA, 575 bp, Zea mays
  Clone ID: TF_701186148_FLI
gtcggtgatcttccctgggaagtagattaccttcggggttggaggagctcaccattagggcggttctttgcctaccgacagcgaggaacggcggtggcctcacagtctcacacaggggcagtgagttattttacctctatctgccggaagctcaaaatcatgaggggctctgatgctgttggaatagctccacgaaccgtcgagcagacaggtcagaacaaataagctttggcctttgcctgcatccaaggaagacatctgagctagctgggagactatgttgaaggctgaagcctgaaatagttgccgggaatcgtcaaaacccgtcaagtgtttagtgtagttttcacgtgtccttgagacatgtgcatttgtatgtctgtgacgtgatccgttagatcgtgcaatcgtaggttgctgttcttgtgccctttgaaggccagacagatcagggagctctctgcttccttagtgcacttgctttgcagcattccttgttattctactctgaaatcatacatcatgccacaagaaccgatggttcgtgatgtcaagagagctgccctaattgttcc

SEQ ID NO: 2439 - DNA, 769 bp, Zea mays
  Clone ID: TF_ZmC1098_3
agatatgaaagaatcatatgcttattttcccctttgcgaagcattacctcattaccttagctcactatctcatagtgttggatttttgtcaccagctatggtgacatgcaaataacagaagatgaaaagaaaaaaatgtacttgtggcgcaggtattaaacatatttgttatattgttatataattcggtaaactgattaccccgtaagaaaaaaaatgtaaaatgtacttgtggtgcaggtactaaacgcatttgttatataattcggtaaactgattaccccgtataagtttcatatacaatttggtaaactgattaccccgtatcagttttatatctgtacaagttaccactcaagatgcaagtgctgatcttatttgttccttttcagttattttacctctatctgccggaagctcaaaatcatgaggggctctgatgctgttggaatagctccaagaaccatagagcagacaggtcagaacaaataagcttggtctttgcctgcacccacgcaagaaatctgagctagctggaaggccatgttgaaggcttaaatagttgctcggaattatcaaaagtcgtcaaatgttagtgtagtttccacgtgttcttgagacgtgtgtatttgtatgtctgtgatgtgatccgtcagatctgttcttgtgcccttcaaaggccaaatcagggagctctctgcttcctgtgtatgcttgctttttccagtattcccctgttattctactatgaaatcatccatcgtgccac

SEQ ID NO: 2440 - DNA, 602 bp, Zea mays
  Clone ID: TF_ZmC2833_20
ggccgcttttttttttttttttttccgaagcaacgaccaggctgctgatcgatagatagacaatagactgatagacaagaaagaagagtgatctttggctttgtacaaccacgcatcatggagattcaactcgactctccactccttttgcatgtcttgctaaacacacacacacacacacacacacacccctactaggggcacaaaagaaaaagaacaaagcgaccacacatcattccacgcatgcacaaagctttcctctctctctccccctcgttccaagcaagcagcttcatctttctcctcgccatgtctctggtttgctgctagctgctgctccattgttggcagacaatgctaggggagaaggtacataatactcaacaccacacgcccacacccatgcagggacgccttggagaagaaataagaccccaaaagaacaaaagaatttgctggcgcatgcacgcacgcacagcacaaggctgcgatagacgtctcatcatcagtcgttcttggccgagccgagccctctcgcttctgaccccttcatgatcctcagcctcgtacgtctttcccggccggcctcgaggtacccaatg

SEQ ID NO: 2441 - DNA, 769 bp, Zea mays
  unsure (1)..(769): unsure at all n locations
  Clone ID: TF_LIB4828-045-R1-N1-D2
ggcgattgggttcctcgaggccggccgggcccttccccccttccgttccgttccgatttgacgagttggtggctgctatagattcactccacccctctccatttctgataagtatccagctagctaccagtgtatgcaccaggcagcagcagcatggcggagtgcaaggacgacgacagcggccggcggtctccgtcgtcgtccatggacagcagcacccaccccccggcgctctccaccgcgtcctcggcctcccgccgcccgccggagaggagggaccagctcagccccgacctgcagctagggctcagcctgtcgccggcgtcctccgccctcctggtagcggagacaaacaacagcatcgtcccttctacgccaaggaaccaagcactcccggattggcccccgatcaaaccgttccttagaagcgccctgactgcctcggcacgccgacggcgaacgctgttcgtcaaggtgtacatggaaggcgtcccgatcggccggaagctggacatgctcttgctggacgggtacagcagcctcctagcgaaactttgccacatgttcaaggcatctatcacttcgggttcctcacgagaaggccgcgcatgttctcacctatgaagaccatgatggagactggatgatggttgnngatgtaccgtgngagctctttctcgnaagcgtaaagagctgnagatgcgagaaccgacaggtgctagatagcaaacttttcatgcgggggancgactctgntcccctctctttt

SEQ ID NO: 2442 - DNA, 769 bp, Zea mays
  unsure (1)..(769): unsure at all n locations
  Clone ID: TF_ZmC258_2
cactcccttcaacctccattaaaaactaagcgttcacgacccccagcttcaccatgtatggtttcaggactgccttcaagttttgtgatctttgccagaagttggaggagatgtttgacatccagggggggagctcggttccacgctcaagaagtggcgggtcgttttcactgacgatgaggatgacatgatgcttgttggagatgatccttggggcgagttttgcggaacggtgcacatatgaggaggcaaagaagctgacatccgagtacaagttaccggttagcagtgacagcaggaagctgagcgccgtaaactcactgtctgaatgacttgactaatcttgttgtttccaccattgactatgggggtaaattgcccatgcaccattgctccgtgggctgaactcgtggttggcgttcggttgccttgggttttggaggcttttggactgccatgccagcatgagcctcctggaaggaggaactctggcatctgcgtgccattatttcccatttgtccgtgcagtttggtcaggtgggagatgtatgcttctttcagcaacaatatttgcggaagcgatctgtatatatattagtctactgtttaatacgtaagcaattgtgctcctagcctgcccttgcgccgtaccatgccgtggcgcttctcttgtgctggctcgatctttttgatataaattactaacataccaacactctggtctttattggtgacctcnnggcagacnngaanaagacaaggctgcggg

SEQ ID NO: 2443 - DNA, 412 bp, Zea mays
  Clone ID: TF_LIB3597-060-Q1-K6-A9
accgagtcctctcggggctggcgggctcgactgcgaggacaccgggctcacgctcaccctacgtcctggcgggctccgagccttgcgccgccgccgacggcgagggttccctgtacctctacttctggaagggctgcggcttacgagacccagaccgcaagcgcgcctgctacgacgctggaccccggatcgatcctccccaggtaggcgcgttctacgacgctgaaccggcacccaaggatggcgtggcgggctggccgccggtgaggtcgtaccgtaagaagcgctcgacgacgccgtggacttcaaaaggccgtcaaggtcgccaaggaggccagcgacggcgcgccctacctgcggaaggaggacctgcaagcgtacgccggctacgaccagatgcatagagcgctcc

SEQ ID NO: 2444 - DNA, 688 bp, Zea mays
  unsure (1)..(688): unsure at all n locations
  Clone ID: TF_LIB4759-002-R1-N1-D4
ccggccgggaggaaatcgatatgattttgatgcagcagtctagactaggtgcaattaattataaaacacttgcgtttaagatgtgggcgctgaaaaattaggaaatctgtccagtgaagacactataatttgagtaaatgattagatccactcttgtgtgaaatttgctattctatttgattcttttcgatcagaggatacattgatttctatgtatctcatttcacctttttaacagaaaaattttgccctatactccctccattgcatatagtttactttggctttgtcctaactcaaatttctaggactaccattgttttcaaaattaatgttaacacttacaagctcgcttaaatgccttgtaaaaatatatttaatgaaaaatctgatgagactaatttgatgttctagatgattgtgcttttttattctccttaaacactcgtttgtgatccctgagatgaattattcacatttttttctttcttttttattgattaactatctatgatgtatcaggcatttactagttatttccaatgtcctttttgcagcttgttcaccacattttgccggaaacttangatcatgagaggctctgatgctgctggcatgggtacgtgtacgagcactagaatgtctatcttcgattgttgaaagactttgttcgatattaaaaattatg

SEQ ID NO: 2445 - DNA, 658 bp, Zea mays
  Clone ID: TF_ZmC615_1
agtcggaggatgtcggtcgcaccatcgacctgtccgtctttggctcgtacgaagagctgtacggtcagttggccgacatgtttggcagcgagaaggcagaggtaatgagccacctttgttaccgtgatgctgctggcgctgtcaagcgtactggcgacgagccgttctgtgacttcatgaaagtggcacggaggctcaccatagtagagagcaccgaggggaggctgcagaaacctctcgtcgagtacatggcttgattgcatgactgttcgataaggcactctgaagcttgaggaagactgaagcttggagcgaatatgttttcgtttgcgtttgtctgccgtgaagcggaatcgcgatgtctgtctcgtcgtgtgaaagaaactcgtgtatcggattttcgtctgtcgtgacttggtcgttagaactctgtcgtggtcagttgtgttgcgcttgcgcttgggtcgaagttgatagatggcctctttgatgaactagcttggaataaagttcgagttgtggttagggaatgccagtgccatggcaattcagttgtcgttgtcgatttagttaaaatgcgtgtatttgttgctgcagtttgatagcacttgccaagatatgttgaacttatcgtggttatgttcatttcctcagcgtg

SEQ ID NO: 2446 - DNA, 762 bp, Zea mays
  unsure (1)..(762): unsure at all n locations
  Clone ID: TF_LIB5116-030-A1-PF1-G6
aatcactgcagtcgagtctgtcaccgcacgggcttcaccaggtcgatcacggcgggcagccgccgaggatcgccgctgggctcatcattggtcacccggctgcgcgagacgacatctcgtgcatgctcaccattggcagtcaccagaacaacaacaacaacaagtcagatgtcaagaaggcttcaccccagctgatgctctttgggaaacccatactcactgagcagcagatcactttaggtaactctgggggtttctctccatctgctgctaggaagagctcctctgaaatgagcgccgagaagtcggcgaataactctgatcttccaagcccgcaaagcaaccagaacggcactacgaagaacttgtcctgcggaggagttccattgtgccaggacaacaaggtactcgatctcgggctggatatcgggcactgcaagatattcatgcaatcagaggacgtcgggcgcacgcttgatctcaccgctgttggttcttatgaagagttatatcgccggctttctgacatgttcggcatggaaaaagccgagctgatgagccatgttttctaccgtgatgcagccggggcgctcaaacacactggagatgaacctttcagcgacttcacgaagacggcgcgtaggctgacgatacttacggacacgagcggcgacagcagcgtagcgagctaaggngggatgaggaagngaggaagctctctcgccacttgtacgtacagccgggtcgatggcggcgcggcgc

SEQ ID NO: 2447 - DNA, 352 bp, Zea mays
  Clone ID: TF_jC-zmX700553368a1
attcggctcgaggggtgggcaagcacttcctttgcccccatggaactcgatgactactgacgggcagcacccagaggagcgagagggaatacgatacctgacacagactttccggcccgatgaaggcaacgcctctcgacaaggtgaacatggacggcgcgccttacctgagcaaggtggacctgatggcgtacagcacatacaaggacctctcacttgcactcaagagaatcagcggcacctgcaccctatgtgggaacaaccacaaccaggggagattgttggacccagcctccgacactgttgatatagacactactcacgatgacgttgatcgtgacgggacgctgaa

SEQ ID NO: 2448 - DNA, 763 bp, Zea mays
  Clone ID: TF_LIB4738-131-A1-K1-C12
ccttctcccttccgctccatttgacgagtcgtcggcgctagcaagatcattcgctccgccgctctccgacccatttctaacaagcaccagctgctgcgtaacatatatcacacagtgtatgcacacctgcgggcagcatatggccgggtgcaagcaggacgacgacgccgtcggccgttctccttcgtcgtcgtccatggacagcagcagcagcacccacccgccggcgctatccgccgcgtcgtcgtcgggcttccggccgacgacgacggagaggagggacgacctcagcaccgaccttcagctagggctctgcaggctgtcgccggcggcgccctccgccctcctggtcgtaccggagaccaagagcatcccttccacgccaaggaccacccaagactggcccccgatcaaaccattcctcagaagcgccttgacagcctcggcacgccgacgacggcggacactgttggtgaaggtgtacatggaaggcgttgcgatcggccggaagctggacttgctcttgctggatgggtacgacagcctcctagcgaagctccgccacatgttcaaggcctccatcacctccagtatggccgggtgcaagcaggacgacgacgccggcggccgttctccttcgtcgtcgtccatggacagcaggagcaccacccacccgccggggctatccgccgcgtcgtcgttcgtcttccggcccacgaaggagaggagggacgacttcagcaccgacctttcactagggctc

SEQ ID NO: 2449 - DNA, 384 bp, Zea mays
  Clone ID: TF_LIB3156-001-Q1-K1-D9
tattgaatgatttcatgaagaatgataatctaatgcatctgcttaatctctaagattatgttccaacctattaacacaaagatccagattgcattcttgattgtgatcacccttgcgagatgcttattgaatcatgtaaaaagctgcacatcatgaaatgtaccgaagccattgaactatcaccaagagctatggacaaatgcaacattagaatctccagttgatatcttttaataaggtccacaatattactatgttgatagcatagccagcatccgatggttatttagcacgtttactttgttactactttattatcactggtatttaaaatcatatattgtcctttttttattcattttaggaacaaaaaaataaactttt

SEQ ID NO: 2450 - DNA, 533 bp, Zea mays
  unsure (1)..(533): unsure at all n locations
  Clone ID: TF_14203817
gggatggcttttgactcaattgkttctgcaatcgacgrtggtgtcatgttgratgggrgttcttgcccccctgcccctccgcggggaatgcggvcattcacwarggtctacaggcgtggggctgtgggccgntccattgacatgggcgggttctccggatatgrrghwttgaygcatgctgtggcccgcatgtttggtatggagggcccmcttggggmccgmcggggmatgggatggargttggtctacccggbtcatggggatgacgatcctacttcttggtgmcgccccatggggggsgtttgtgaattgtgtgragtgcattrggktcctstccccccragargtgccgcagatgygcttsgatggtgytttggggsccratgtcctctccgaccgggcttgckgcbgctckgttggtggggrtgcctggtbgcctcgccgcgcccggssccctggtngcccttccatcgggttctgcggccsgtttgggtgscctggtcccgggggttcggggtgggggttttggctgc

SEQ ID NO: 2451 - DNA, 613 bp, Zea mays
  Clone ID: TF_ZmC427602_1
ggacgaaaaaccaaatgattttttaaagttgaggcaggggggggcatttttttccagcccttagggggactttttttgctaaacaaacattaggggggggccaccagttaaaacttgccccattaaaaggaaaaaccaaaactgggggaaggcccaaccaactcaaaaccccatttttaaatactactacggggccctacgggctcatccaatgcattttaaaaaggggaaaaaaaggctttaaccccccttccaaggaaatctatggaaacatttgccttgttctttactacttgggacaaccagttagttgccaaggcataaacagttgtcggatttaaacaaaaaggcggactggtacccgggtgcctttttaacaaaaaaaataaatgcggaccccctttccgtcaaattgggaaggccgttttcctccggcctcaagttcagggcccccgggttcatgccctggacccccccccttgggtacacaaaaattttgggccccatgctgaaaaacttattccaggggtcgcccccaaccagaataatgtccccttcgtagtcggggaacacaaccatccactccttgttaaagcctttcaactccccgttg

SEQ ID NO: 2452 - DNA, 601 bp, Zea mays
  Clone ID: TF_ZmC1117_6
gacgcgctgttcaccaactccttctccgcggcggcagagggcggcggcgaccaccaccagcacgccatcgcctacgaggacaaggacggcgacctcatgctcgccggagacgtgccctgggagtaagtacaccgtcgggttcggatcagcaagcatgctgctccgttctgtggatctgaggatacgtttggtgaacagaagcctgattaattgtgattcttaatttcaccccctttgcagtatgttcatctcttcgtgcaagaagctcaggataatgaagggctctgcctctgaggccaggtgatcgctgatccatacataaacagaggctacagacacgccacctgggaacgcggatccaagagcacacacggatcgtacttgacgaggaaggagggaggagcagtgtggcttgagctctccagtgttgtacaaagacatgtttctttctgaacccaaaagggagaaagatgtatgaagcgtgtatataagatcttagctagcagtttgttttcatttgtatgagcgatcgaaggctgtaaaaaatgaaaaagaaaaaagaaaagggaatgagaaattgaccaaaaaaaaaaaaaaaaaa

SEQ ID NO: 2453 - DNA, 887 bp, Zea mays
  unsure (1)..(887): unsure at all n locations
  Clone ID: TF_ZmC965_4
ctgcggtggnagctaggcgcatccccccatcattgacctcatttctaatagctttgntannnnnncttntncaaaagctacccttaatatccagaacatagggcaaagtattcccaccagaagctgcaagaagggtcataagctttgtagagccctttttagggcatgtttgnaaccaannncaccanctaanattatatttttccccaacnggggggggggggggacnccaatggtgagcggcccccccctgcaccaccccctagnggggacaaaaaaatgaaggcgaataatgctggctggcgatgacccctggaatgaattctgccatatggtccacaagatcctcatctacacaagggaggaagtcgaaaggatgaacccaggtgccctaaactcgaggctcgaagactgcctgtctgactcgctgggaagaggggtagcttccaaagagccccggagcggcccctcgacttcggctgtcgattctgagaaccgcgctaacttgtccagtcagtgagcccttttgaaagtggtgaagaagacaaaaggccacgtgtcagagtgaccggaagaacgagaaaggggtgtgtttcagtggtgtgtagtaggtaggtaattttgtgtgtatgcctccgggtaaaagccccgcggtacccagtttgtagatggtgcttctcctggtgctagtttcccgtcgtaagctggatttttttggggggtgtgtgccctgctctgtgtgctgacccgcctgggggtaagttgtagcagagcaggagaaagcaggcaagaaaccgctggtgcgcctgcttggccaatccttttccttgcggagcgctgtaaatagccttggatctgaagcgtagtaatgtattgtcatggtactc

SEQ ID NO: 2454 - DNA, 642 bp, Zea mays
  Clone ID: TF_18178970
gtggacttttttttttttttttttaggtgcaacgactcgatcttgattcatgtacatgtgacatatactacaacagaaaaagagcaataatgtgacatgagctgggtgatggtagtggtaggtgcgcgtggccaaaatcaaaatcccgcagggatgagatggaactgaaatgtttggatgttagggaagtcaactgcatccccgcagcgcaggcgcagctcatgtagtacgtgaggagatcgtacgttgttgttggaatcgtgtgctggaatcgtgtccagaattgcgtcgtcgtcacattcgccagcttccctctcgccacttgagctatatatgtgcagcagtgcaagtcttgtccggatgacgcctctgctgcacgtacgttcaaatctgcctccgtcattctgttcccagtgcggcgccggcatgcatgcctgtcaggcgttggagctcagccctctcgcctcgcacgatcgcatcacccgcatccgcttgcacgaggacacgaacatctcccacggcacgtcgccgacgagcatccagtcgccggtcgccgtcctcgtaccaccacggcgtgctcccacttcgccgtagccgtccatcagcccgatggagcagcagcagaacaactcgttgagcgcc

SEQ ID NO: 2455 - DNA, 639 bp, Zea mays
  unsure (1)..(639): unsure at all n locations
  Clone ID: TF_LIB3689-252-Q1-K6-C5
gnagcggnaagccgccgtactcggagcccagcacgccgccgccagccatgtcggtggatacggagcggagctccaccgagtcgtccgcggcctccgggctcggctacgaggacaccgcgctcgccctcaccctccgcctcccgggctccgaccccggccgttcctccccgctcgccgcgccctccgacgctgcgccgtctcccaaggcgcgggtggtggggtggccgccggtgaggtcgtaccgcaagaacgcgctcgccgactccagcaaggccagccgggcagccaatttcgtgaaggtggccgtcgacggcgcgccctacctgcggaaggtggacctccaggcgtacggcggctacgaccagctcctccgcgcgctccaggacaagttcttctcccacttcaccatcaggaagttcgccgacgacgagaggaagctggtggacgcggtgaacgggacggagtacgtgcccacgtacgaggacaaggatggcgactggatgctcgtcggcgacgtcccctggaagtgagctccttcgctctgtctgttttactttccctgatctaattagctggttatctacgcagtttggctgtgctgagtagatttgaaaaaaaaggacatggctgtagtttaca

SEQ ID NO: 2456 - DNA, 1243 bp, Zea mays
  Clone ID: TF_ZmC784_2
cacccctccaacagatcactcttcgctccggctccgactcgcactctttccccttcccttcccttcccactcccaggctcccactctcaccccttccgcctacccacgcaaacggcacacgaactaacagccacctctcacgtcccccaccctctggttcatgtcctgctgctccccatgtcgcctccactcgagctcgactacataggcctctcgccgccggcggcagccgccgccgctgaaaacgacgaactgaagggtactgagctccgcctcgggctgccagggtccgggtcgccggaccgccgtgtcgtggctgccaccgcgaccaccctggacctgctcccggccaagggcgccaagcgcgggttttctgacgaggcgcccccgccatcgcctgttgccactgccggaaagggaaagaaggtggcagaagaggagtacgacgagaagaaggtggcagcgaccccgcagccggccgccaaagcacaggtggtgggatggccaccagtctgcaactaccgcaagaacacgatgactaccacccagctggagggcagcaaggaggatggtgatgccaagcagggtcaggggttcctgtacgtcaaggtcagcatggatggcgcgccgtacctcaggaagatcgacctcaagacttacaagaactacaaggacctgtcgaccgcgcttgagaagatgttcagtggcttcagtactggcaaggacggctcatctgagtaccgcaaggatggtgaatatgttctgacttacgaggacaaggatggagattggatgcttgtcggcgacgtaccatgggagatgttcgccggctcctgccgcaggctcaggatcatgaaaggctcagatgcgattggactcgctccaagggcagccgataagtccaagaaccgcaactagaacggtggcttcctatccttacacagtccggtacgagggaggagatgcagtgacttgtagggatctgtacgaaaaccgaaaaagtctactaacagctatgacttgtgagaagaattctggcttatggtctgcactagaatggcttggtacatcgtctatggacaaaacacgctattcgattaattgttgttaattaagccttggggggggtacgagtgctattcatgtaaatggtttggtgcatcgtgtgctgctgctgcctgctgctgttactacgattgagctcccctataatactatgatttgaagagagatggcgatgtcc

SEQ ID NO: 2457 - DNA, 418 bp, Zea mays
  unsure (1)..(418): unsure at all n locations
  Clone ID: TF_LIB3332-001-P1-K1-G7
cccacgcgtccgggacgcgggtggtggggtggccgccggtgaggtcntaccggaagaacgcgctctccgactccggcgagggcaaccggtcatccagtttcgtgaaggtggccgtcgacggcgcggcctacctgcggaaggtggacctccaggcgtacggcggctacgaccagctcctccgcgcgctccaggacaagttcttctcccacttcaccatcagtcagtgcttcgtgcaccgtcctgccctgggtttagttttccgcagcgccttgctctgtttgatcgagcggcgccttcgcctgatgaaaggttcagaggccgttaacttgggtacgtacgtgttctcctctaaggccttgcctagcttcatgtgctacaaaatccgtagcgattgcaaaccatctggctcatttttttt

SEQ ID NO: 2458 - DNA, 1102 bp, Zea mays
  Clone ID: TF_ZmC1407_1
cattgggtacctcgaggccggccgggcttctccctttccgctccaatttgacgagtcgtcggcgctagcaagatcattcgctccgccgctctccgccgacccatttctaacaagcaacagctgctgcgtaacatatatacacagtgtatgcacacctgcaggcagcatggccgggtgcaagcaggacgacgacgccgtcggccgttctccttcgtcgtcgtccatggacagcagcagcagcacccacccgccggcgctatccgccgcgtcgtcgtcgggcttccggccgacgacgacggagaggagggacgaccttagcaccgaccttcagctagggctctgcagcctgtcgccggcggcgtcctccgccctcctggtggtagcggagagcaagagcgtcctttccacgccaaggggcagcaggaccacccaagactggcccccgatcaaaccattcctcagaagcgccttgacagcctcggcacgccgacgacggcggacactgttcgtgaaggtgtacatggaaggcgttgcgatcggccggaagctggacttgctcttgctggatgggtacgacagcctcctagcgaagctccgccacatgttcaaggcctccatcacctttgctgatgctatggagtaccaccaacgagttcctcacgagaagcctgcacatgttctcacctatgaagaccgggatggagactggatgatggttggggatgtaccgtgggagctcttccttggaagtgtgaagaaacttaggatttgcaagaacagataaatgctagttagcaaagcttattattcgtgcgctgcatggactctatttctttcttctttttatttatatcggttcatacagaaagattttgctggccacagagtggacatgcatgtgataccgaggctatatatactgaccgtgtacagtatactgaagaaaagtcaatcttgataccttccctagaaaattaatttttggtattttttatgtttccttttctgttttctctgagtgccttgtaaataccatggctgtttgttaaagaagaggcgatttgcgtgaagaaaaaaaaaaaaaaaaaaggcccctagggcc

SEQ ID NO: 2459 - DNA, 1285 bp, Zea mays
  Clone ID: TF_ZmC2230_2
cccacgcgtccgcccacgcgtccggccacgcgttctcacgttttcgtcgtccggccggccggcgagcattttgcttctgcgatcgatcggcgcgacgtgcacggccatggagatgatcgacgcagagctgcgtctgggtccgcccggcagcaacaacagagacgtcatcaacgtcgtgcagccggcgttggcggcggcgaaacggccgtcgtcgtcggtgctggagagcgaggcgtccgggacggacgaccatgaccatgacgacgccgcaccgacctccaaggtgcaggtggtggggtggccgccggtgagagtgtacgccgccggtgagagtgtaccggaagaacgcgttccacgcggcggcggaggcgaggaggaccaggcggggcgagcagcagggaggaggaggcctgtacgtgaaggtgagcatggacggggcgccatacctccggaaggtggacctgcggacctacggcggctaccgtgagctgagggacgcgctggacgcgctcttcggctgcttctcctcctcggccgacggcggatgccagttcgccgtcgcctacgaggacaaggacggcgacctcatgctcgccggcgacgtgccatgggagtaagtagtaccgccgggcagcagcagcatctatatctatccatggataaaggaggaacaacaacacctgacctcacttgcgcactgctgtggaatctgcaggatgttcatctgttcttgcaagaagctcaggatcatgagggggtccgaagcaagataaccaagcaacgaggatgcaaggacctgttgtatgcatatgcatggaggccggccggactcatgctgtcatgcatgagagtttgagagaggagaagaagacgacctactggaactgaaggcggttgggtatacctgcatggggagggagcccacgcatgcacgcgcgcgtcgtcgtgttctacggccagctagccaccagaccggctgccggcccatatgcacaccacggagatggaggtgatggttcaaggatcacggcggcgtacgcgcgcgtcatcagtcacgccgtcctgtcatcagatgagatggaggggtgatgcatgagggcagtgctagctgtggacggctggctggacgtgcagatcggagcgagattgtactgtgcacgcacataagctttgtacagtggcatgtgctggtcatctgtaattttgatttttttccccctccttttgtaagtgagcaagtttgaggaaaaaatgtatgaatgaagaaaaggagaggggggatttc

SEQ ID NO: 2460 - DNA, 1229 bp, Zea mays
  Clone ID: TF_ZmC13155_2
gagctgagcgcgctccgtttcagtttcagagagcggttgctgtgcatgtgctggtgctgcgacttgactgttcgagcacagctgcgtctgcgtccccatggtgtagataggaggggaggaagcaggaagagggggaggcagcctgtgtgtgtgagagagaggcagaaagtagtgaggaaggaagcaggaagatggcttggaatgcccgcttcggcgatgacgaggaaggcagcggccttgagctcagcctgggccttccgggctacttctccgggtcgccagaccaagccgcaggtttcgaggagaaagcgagccggggttctgctgctgctcctcctcctcctcctcccgctgctgctcgagcgaaaggaagcgacggcttcaaggcgaggccggcggcagctgctccggtcgtgggatggccgccggtgcgcgcgttccggcggaacctcgccacgtcgtcctccaagccgtcgagccacggaggcaaggagcccgccgcgagcgccgacggcggcaacaagggcctgttcgtcaaggtcaacatggacggcgtccccatcggccgtaagctcgacctggcggcgcacgccggctacgacacgctctccgccgccgttgacagcctcttccgcggcctcttcgctgctcaagcggcggggccaggcggggagcagcaggctgtcgcgggtatcctgagcggcggcggcggcggcgagcacacgctggtgtacgaggacgacgagggcgaccagatgctggtcggggacgtgccgtggccgatgttcgtcgccaccgctaggcgtctgcgcgtgctgaagagctccgacctgagcccgtcgtcgctgagggcagcgagagccgcagctgagtgctgaacgcaccctggacctggagcctgaacgttttgcggcctctccggagggcccatccgtgtaaaatcgaagcagttttcgtcgattttgcttttagcaagggattatatgtcctagtgatcaagtagggaagcaagaatctatctagaggtgatgaggggtgtcgtagaaccatgcaatcctagtgctagattttttttctgaaagtttaacaaggtttcttggcgctggataggacagcggatacgttatcgagctcgccacggcccatgggctactacatgttttgtgagttgtgtgacctggggcgacctagttcttttgtattattttttctggaaaaaatttatagct

SEQ ID NO: 2461 - DNA, 1096 bp, Zea mays
  Clone ID: TF_ZmC31703_1
aaaccgaaggcttgttggtaagtgcaattaatcctgtgaagtgtcagtctaatttgtcaactgacgttgagatcaattaccgaatacaaaaggatgcccaacaagagatctcaacctccatggtttcacagtcattcggtcagtctgatatagcttttaactcaattgattctgcaatcaacgatggtgtcatgttgaatagaaattcttgcccccctgcacctccgcagagaatgcggacattcacaaaggtctacaagcgtggagctgtaggccgatccattgacataggcaggttctccggatatgaagaattgaagcatgctgtggcccgcatgtttggtatagagggccaacttgaggaccgacagagaataggatggaagttagtctacacggatcatgaggatgacgtcctacttcttggtgacgacccatgggaggagtttgtgaattgtgtgaagtgcattaggatcctatccccccaagaagtgcagcagatgagcttagatggtgatttggggaacaatgtcctctccaaccaggcttgcagcagctcagatggtgggaatgcctggaagcctcgccgcgaccagaaccctggtaacccttccatcgggttctacgaccaatttgagtgacctgatcacggaaattcgagatgagaattatagctgcaaaaagcaaccagtgtccagccatctacagaattatcgccacggaaagggtaagcagatgcaggatgctgtagacgtcttggcttttatagttgggagaggaaatgctcctcagattagggtatgttctagatatatgtgtagttttctttgttttgaaacaatttaggcaagaagaatgaaacttacctagagctgttgctgagtcgaaacatcagacaagatggttaggcaaaacctgaacttcagacagagtaggcagatctgaagataaagtattttgattgagagtattttgtaattctgtattgaactgccgctggggtttgcttgagacccatgcggcactatatgagtctctcagttcagaaaatactgaagcagatctaagaggtcctactgattattactatttgttt

SEQ ID NO: 2462 - DNA, 681 bp, Zea mays
  unsure (1)..(681): unsure at all n locations
  Clone ID: TF_LIB4742-105-Q1-K1-G3
attgggtacctccgagccggccgggaccacaatcccagtcaccagctcatcacatccatctcattctactactgcctcagagaccaagctgctgcaaccggagaaggagatctactctactcttcagagcactgtgcattgggacatggaaaccgtcgtgggagacctcatggcgaccgagctgaggcttggcctgccgggcaccgtggacgactgcagccagcaccagcagcagacccagctgaaggtggccgcgccgccgtccaaccctactaggggcaagaagcgccccgccgccgaggaggaggaggcaaacaagcgcgacgcggaggcagcacccccggcggccaaggcgcccgtggtcggatggccaccggtgaggtcgtaccggaagagctgcttccagcaggcaaagcagcaggccgtcagcagcagcagcagcaaggcggccgacaaagagggatggctgcggcgccnggcgccngagctgcacgngcgtccgcagccgcctcaaacgccaccgccggcgccggggccggctcattcgncaaggnnagcatggacggcgccccgaacctgcggaagctcgacctgaggatggacaagggcttccgggagctccgggaggccctggaggccatgttcgtctcctccggnagcgccaacaaaacaacctgtccg

SEQ ID NO: 2463 - DNA, 833 bp, Zea mays
  Clone ID: TF_ZmC1167_6
aagaaattagagaggattttgacttaaaggagatttaatcctcctcaatctttatagattagtacaaaacgaacatgacctaacaggaaaagaaggagaagcattttattatccacgcctctttgccttttgttttctctttttgaccttggataagattccatccagaaacgccctccacgcggaccaatcacggtactttcccgtttgatacttcgctgctgctgctgctgctagttttttagcgtatccatgtacagaatcccttggtttgaaaagaattggctttggataagggctgtcttcctagctctgttcgactgttccccacttctagataggttgatccttctagaaaaatattctgtttcgatcaatgagacgagccgggcctgtccgagttaattttaatttataattttcttccttggtcaaactgtgtttttttttttttttttttgcaggatgttcgtggagacctgccggcgccttcgcctgatgaaagattcagaggccgttaacttggcaccaagagccgcccgatgaggcgcaagcgcaactccaccgtcaccagtatgcactggcttttagtggcttggcttgttggaggaacgagggaacgtacttcgtcgctgttttgaggatcttcccttgacatatatatagcaatgtgtacagctgtcacctgctgcttttgcctgaggaaagtttgtagttccattactttacttatctgtagtgtctatctatctatctatagatccgaagctttgatatacacatggcggctacaatgtatttttgatgaataagaccagaccagagtaccagac

SEQ ID NO: 2464 - DNA, 1077 bp, Zea mays
  Clone ID: TF_ZmC1428_1
ctccacacacaccacacacacagacacactgacacacccacacactagttgtatgtgctagagctgcagttggcttggcatcagaggccatgaaactgaaacaggagcaagcagacgacgactgcagcaagatgcagggaggtcgtggcctgatgagcagccttgagctcaggctgggcatgtcttcagacaatggcgacgccagctgcggcggtgatccgtggcttggcgttggagtgcacccctggagccttgccggcaggcaagcagagaaggtagccctggagcaagaccaccagcggcctccacctccgcagccggtgggatggcccccggtgggtgcgttccgcaggagccacctgcaggtgggcgcgaaggccgttgaggaaccgacgagcaaggtgaagctcggcgagcaggggccggcgccggctcggtccaccatgttcgtgaaggtgaacatggagggctgcgccgttgggaggaaggtggacctgcaggcgcactgtgggtatgcgtcgctgtcgcgcgcgctgcaggccatgttccatggcttcctgtcagatggtcagtggaggatcgctggcagagaagaagatgacgacgacgacaatgagcagcagccggagccgacgaagaagggggagagtaagagcaacaagaaggcgtacattcttctgtacgaggacaacgagggcgaccggatgctcgtcggcgacgtgccgtgggagctgttcatggcttcggtgaagaggctctacatcgcacaggacccaaggaagacgaagaattagctaattaagctagttagggcctggctaggagaaacgttgctggctgccttattatttctacaaatagctccaagtcgaagcagatagctaagctagcactcccttcttcgatcctgtaatcctgtcgagcatcagttcatatacagcgcgtgtagtcggcatctctagtccaatattaatatataggaaattttgccttggacttctatatgtcctgtagaccttgaacaatacttctaatgtctgacttaagttattgatcatctgaactccgttcacaaat

SEQ ID NO: 2465 - DNA, 1246 bp, Zea mays
  Clone ID: TF_ZmC965_3
agtggtttttcgagcaggccgggaattatctagtgatgcctgaaggtgcaaattttacggggaaatcagctttcacttcacttcaggaccatggcactgataaatgctccacaggctgctttggtcatattgagtcaagttcccacacagaccatgcatcctcaagtttgatcaggccccagcctttggtccttggaaatggtgttcagaaaagcaaaggcacttcatttaaattatttgggattccccttggcagcccagaaaaatctgaacctctggtatccccaccaagtgtcgcatatgacgggaaacttcaaacttctccatcagaaaaagggaatcagctagacgtagttgaagtggataattgttctcatccttctaagactgtgaagccacttgatggtcctcagtcagattctattacagagaataatcagccttctccagaagctacccttaatatccagaacaaagtgcaaagtagttccaccagaagctgcaagaaggttcataagcaaggtagtgccctcggcaggtcgattgatctaacaaagttcgcttgctatgatgagctgattgctgaactggatcagatgtttgacttcgatggtgagctgaagagtccatgcaaaagttggttagttgtctacactgacaatgaaggcgatataatgctggttggtgatgacccctggaatgaattctgcgatatggtccacaagatcttcatctacacgagagaggaagtcgaaaggatgaacccaggtgccctgaactcaaggtctgaagatagtctatctgactcgctgggaagaggggtagcttccagagatccccgaggaggcgggtctacttcggctctcgattccgagaactgctagtttgttcagtcagtgaggcctttggaagtgaagcagacaaaaggcgtgaatcttgcggtgtagagtgtagttggtacattgtgtgtatgcctccgggtaagccctgcggtacccagtttgtgtcctggcgccagtttaccatttaagctaagtttttgggtgtgccctgtgctggggtctgggctctagttattgtagcagagcaggcaatgcatgcaagaaactgatgatgcgcctgtttggccctctttcccttcccaagccatgtaaatagccttggctctgaagcgtagtattgtattgtcgacagccgtacttgagatagtactccaagaggcgcgcttgctcctgtcagttgggtg

SEQ ID NO: 2466 - DNA, 4575 bp, Zea mays
  Clone ID: TF_ZmC1433_1
ccggccgggacgtccgcccctgccagtttgcgttcgccacccgtccaaaaccccccaaccaaagcccgctccggcagcccccaccccaccatcgcgtcaatggcggcgccgcctgtccagcctgtgccaaccgcggcggcggcggcggcggctgtgaacggggacgcgttccgtctgggcttcgtcggcgcgggcaacctggccgagagcatcgcccgcggcgtggcggcgtcgggcgtcctcccggcctccgccatccgcaccgcgccccaccgccgccccgagcgcggcgaggccttcgcgtccttcggcgcgtgcttgctccaaaccaatgcccatgttgtggacgacagcgatgtgatcgtcatctccgtgaagcctcagatcgtgaagcaagttctacttcagctgaggccacggctgtcagaaaaaaagcttctcgtgtccattgctgccggcatcaagatgcaagatttgcaggattggtctggtcaacgacgtattattagagtaatgcccaacaccccttcagctgttggacaagctgcatcagtcatgtgtttgggagagatggctactcaggatgatgaaaaccgtgtaagaaaactgttcagtgccattggaaaagtctggacagctgaagagaaatattttgatgctgtaactggtctgagtggtagtggcccggcctatatcttcctagcaatagaggccatggctgatggtggagttgctgctgggcttcctcgggaccttgcccttggtcttgcatctcaaacagttcttggtgctgcaactatggtgagccagacaggcaaacatccagggcaactgaaagatcaggttacttctccagcaggtactaccattgccgggattcaggagctcgagaagggcgcattccgtggaacgctgattagtgctgttgttgctgccgcaaagcgctggcgaactgtcatttcgaaaactcgagggccgggaggatcgatcaatcagcaccgaccactcgcgacccgattcgaatcgagccagagtcccaggcagcggcggcggcggcgcccgcctccaagaccacctccacccggaccccagccccaaccccaagttaacagatgggggacgttgcgaaggacttgacggctgggaccgtgggaggggctgccaacctcatcgtcgggcacccgttcgacaccatcaaggtcaagctccagagccagcccacccctgctcccggacagctccccaagtacgccggcgccatcgatgctgtgaagcagacggtcgcggctgaaggcccgaggggcctatacaaggggatgggggcacctctggccaccgtagcggccttcaacgctgtcttgttcagtgtcagggggcagatggaggcgtttctcaggtcagagcctggtgtgccgctgacagtgaagcagcaggttgttgcgggcgccggtgctggaatcgcagtctccttcttggcttgtccaacagaactgatcaagtgcaggttgcaagcccagagttccttagccgaggcagccaccgcttctggtgtggctcttcccaaaggtccgatcgacgtggcgaagcatgttgtccgggacgccggcgccaaaggtctcttcaagggcctggtcccgacgatgggacgcgaggtccctggcaacgcactgatgttcggcgtgtacgaagccacgaagcagtacctggccggcggcccggacacgtcgggcctcggcaggggctcccaggtcctggcgggcggcctcgccggcgccgccttctggctgtccgtgtacccgacggacgtggtgaagagcgtgatccaggtggacgattacaagaagcccaagtactccgggtccctcgacgcgctgaggaagatcgtggcggctgatggggtgaagggcctgtacaaggggttcggaccccacccccccgctccaggcgctgtcctgtgcccacggggacgccgggcttcgtcggcgcaacccttgtgacattttgccccctcttcccttcccaacccaacccattgcatttgcaagcccttttacattgcagagcgccagagcctcgctcgctctcggaacagagctaggcagctaacagacgaagaagaagcaagccaagcagaattgagagagaggcgaggacgtggcgacgacggcagccgcgatggcgacgacgacggacctggggttcgaggcgacggagctccgcctgggcctgcccggcgggggaggtggaggggagccggcgctgggcggcgaggggaggagctcttcctccgcctccggcaagaggggcttcgccgagaccatcgacctgaagctgaagctggagccagcggccgtcgtggaggcggaggaggaggaggaggaccacggcgttgctgttgcccttgagaaggaggaggaggccgggaagatgaagcggtccccgagccagagcagcgtcgccgccgccgccgccgccgtgctggctgaccccgccgagaagccgcgcgccgccaaggctcaggtggtgggatggccaccggtccggtcgttccggaagaacatcatgtccgtgcagtccgacaagggcgccgccgccgccaacggcgacaagtcctcgccggcggcaggcggcggtgccgcgttcgtgaaggtgagcttggacggcgcgccctacctgcgcaaagtggacctcaagatgtacaggagctaccagcagctgtccaaggcgctcgagaacatgttcagctccttcaccatcggaagctgtgggtctcaagggatgaacggcatgaacgagagcaagctggtggatctgctcaacggctccgagtacgtgccgacctacgaggacaaggacggggactggatgctcgtcggcgatgtgccgtgggagatgttcgtcgaatcatgcaagcgccttcggatcatgaaaggatcagaagccattggcctggcgccaagggccatggagaaatgcaagaacagaagctgaggagaagacggacggacggaagcttgcatctcagcaccaccaggggtggatggatgcaagaagaacaaatctccatggcttttgcagctctgctcgtctctgtatcatactcgtcgtccctgcccttcaggcctctgtatctccctgatcaatgaagtcgttttggtgtgtcaactgttctctccgtgcccagcttgtcagtgaaagagtcagtcagtgtccatcaagtctcatcttgtcctatacagaagagagaagccatgcatgaacatgtacctgtcctataacaatgtctttttttgctacctgtttttttttctctctctctctttttttggcacaagatgcaaaggcaccctgctcctgatcaaagggccttttgcatcataagctgtttgattataattaccatggtgtgtcagtggaacaaataactgttgcaaggtgttaaaaaaaagttgtattgtaatatgatcacctctcttccttgttgttttcaaaaaaaaaaaaaaaaaaaaaaaaagctagcaccagggcaactgcaagatcaggttgatgcaccaagagcaaatctccatggcttttgcagctctgctcgtctctgtatcatactcgtcgtccctgcccttcaggcctctgtatctccctgatcaatgaagtcgttttggtgtgtcaactgttctctccgtgcccagcttgtcagtgaaagagtcagtcagtgtccatcaagtctcatcttgtcctatacagaagagagaagccatgcatgaacatgtacctgtcctataacaatgtctttttttgctacctgtttttttttctctctctctctttttttggcacaagatgcaaaggcaccctgctcctgatcaaagggccttttgcatcataagctgtttgattataattaccatggtgtgtcagtggaacaaataactgttgcaaggtgttaaaaaaaagttgtattgtaatatgatcacctctcttccttgttgttttcgacccgccatggcacgcacgttccagccaatgccgcgacatgcggggcctacgagatcacgagatcggtgctaggttgatttgattggtgctggcctttgctatggccctttgcagtttattcattctccttgcgcggctggagcaacgcgaacaatgccagacaatttttagggaggaaagagagagagaaacttttcacttcaatgatgagattctttaatgaagcaaagcttacttaaaagtttgttcatgtggagccacagagtgagtggttggtgacagataagtaatactggccttgtcgtaatggttggttggcctggcctagagtgggcatccgacggtgatccgatggcgcgcgagtccgactggtggtgcttgtgatggtgagctgtgtggcccatggttttgttggcgtttgggggtgggtggccctcgtcagttcgcattcgggattcccttttgcccccacaattccacgttcgccttggcttctttttcttgttggcctaaattatattctttttctctttcacacacacaaatatattcagtttcccgttcttcctttattagtgccag

SEQ ID NO: 2467 - DNA, 457 bp, Zea mays
  unsure (1)..(457): unsure at all n locations
  Clone ID: TF_LIB3357-037-P1-K1-E7
gcaagccaagcattctcacgttttcgtcgtccggccggccggcgagcattttgcttctgcgatcgatcggcgcgacgtgcacggccatggagatgatcgacgcagagctgcgtctgggtccgcccggcagcaacaacagagacgtcatcaacgtcgtgcagccggcgttggcggcggcgaaacggccgtcgtcgtcggtgctggagagcgaggcgtccgggacggacgaccatgaccatgacgacgccgcaccgaccttcaaggtgcatgtggtggggtggccgccggtgagagtgtaccggaagaacgcgttccacgcggcggcggaggcgaagaggaccaggcggtgcgagcagcaaggaggaggaggcctgtacgtgaaagtgagcatggacggngcgccatacctccggaaggtggacctgcggacctacngcggctaccgtgagctgaggga

SEQ ID NO: 2468 - DNA, 518 bp, Zea mays
  Clone ID: TF_ZmC1428_2
aggtggacctgcaggcgcactgtgggtatgcgtcgctgtcgcgcgcgctgcaggccatgttccatggcttcctgtcagatggtcagtggaggatcgctggccgagaagaagatgacgacgacgacgatgagcagccggagccgacgaagaagggggagaataagagcaacaagaaggcgtacatccttctatacgaggacaacgagggcgaccggatgctcgtcggcgacgtgccgtgggagctgttcatggcttcggtgaagaggctgtacatcgcacaggacccgaggaagacgaagaactagctaagctagctagggcctaggaaagacgttgctagctgcctttattttatttctactctctatatagctcgaagcagatagcaacagtgtatgctgctagtgtttaactacctcccttctccgattatgtaatcctgtccagcatcagttcatatacagcgtagtaggcatctctaatctaatattaatatataggaaattttgcttaatgtc

SEQ ID NO: 2469 - DNA, 1628 bp, Zea mays
  Clone ID: TF_ZmC784_3
cgggaaaacaaccactcttcgcttcgactcccactcccactctccctttccactctcaggctcccactccccccctaccggctaccctacccatcacacacaaacggccactcctcacctcccccgtcctccggttcatgtcctgctgctccccatgtcgcccccactcgacctcgactacataggcctctcgccggcggcggctgccgccgctgcccacgacgacctgaagggtaccgagctccgccttggtctgccggggtccggttcgccggaccgccgtgttgtggctgccaccgcaaccaccctggacctgctcccggctaagggcgccaagcgcgggttttctgacgaggcgccgacgccatcgcccggtgcagcttccgggaagggaaagaaggtagcggaagaggaggacgacaagaaggttgcagcgacgccgcagccggtcgcaaaagctcaggtggtgggatggccaccaatccgaagctaccgcaagaacacgatgtctaccacccagctgaagggcagcaaggaggatgctgaggccaagcaggaccaggggttcctgtacgtcaaggtcagcatggatggcgcgccgtacctcaggaagattgacctcaagacttacaagaactacaaggacctgtcgactgcgcttgagaagatgttcagtggcttcagtactggtgagatgtctcgggttactctcctctcccggatggcacgtcagtatgtaattgtgtttcattttgatgtggatggtgtaagaagtacatcaagaagccttttaaaagcatcataattgattccttggataagcaatagctttgacttaccgttagttttgagtaattgtgagattacaaacaattgattccttggataggcaatagcttcgacttaccgttagttttgagtaattgtgaagatacaaacaatctggcacatcttctttttttatctttagtgaactttttattccttgctaaacaaataccctgctgcttgttctgttattgcatttgcatcaagtctttcttagaaaagattttatttcctgtaaggcaaaataatttttgtctccatgttatgattattcgaggatatcttcgggtcctgagtattattccagaaagctactatcactatgagagcaacatccactatatatttctgaaatttggagatctatggtctgtcctgtatttgtatatctaatatctcattagttgtcaccactttcttagaatcatggacatgaaaatgcggtccgagtcttttcagtagaaattttagtacaagaagaggttctcttctgctttccttttattggtcttacaggttagtatgggtgtaatgccatatcaggcaaggatggcttatctgagtaccgcaaggatggtgaatatgttctgacttacgaggacaaggatggagattggatgcttgttggcgatgtaccatgggagatgttcgctgactcttgccgcaggctcaggatcatgaaaggatcagatgcaattggacttgctccaagggcagctggtaagtccaagagtcgcgactagagttggggcttcttacagtcctgagcaggaggggaatatccagtggctgtgggggat

SEQ ID NO: 2470 - DNA, 924 bp, Zea mays
  Clone ID: TF_ZmC1407_2
attgggtacctcgaggccggccggcgggaggcagcagcagcatggcggagtgcaaggacgacgacagcggccggcggtctccgtcgtcgtccatggacagcagcacccaccccccggctctctccaccgcgtcctcggcctcccgccacccggcggagaggagggaccagctcagcgccgacctgcagctagggctcagcctgtcgccggcgtcctccgccctcctggtcgcggagaccaacaacagcatcgtcccttctacgccaaggaaccaagcactcccggattggcccccgatcaaaccgttccttagaagcgccctgacagcctcggcacgccgacggcgaacgttgttcgtcaaggtgtacatggaaggcgtcccaatcggccggaagctggacatgctcttgctggatgggtacagcagcctcctagcgaaactttgccacatgttcaaggcatctatcacttatgctgacgctgtggagtaccatcagcgggttcctcacgagaaggccgcgcatgttctcacctatgaagaccatgatggagactggatgatggttggggatgtaccgtgggagctctttctcggaagcgtaaagaagctgaggattgcgaaaacagacagatgctagatagcaaactttttcatgcggtggatcgactctgtttcttcttcttttaatatatattaggttcattaggaaagattttgctgaactaaagagtggagtcgtgatgctgaggctatactaaccgtgtacagtgtactgaagaaacgccagccttgctaccacccctgcaaaattaaattttggtattttatgtttcctttccctgtttctttgactgccttgtaaataccatggttatttgtttatcaacaaggagtttgcatggaaaattttattgttccaagcg

SEQ ID NO: 2471 - DNA, 1032 bp, Zea mays
  Clone ID: TF_ZmC2833_10
agcaaagggcttttttttttttttttttttttgaagcaacgaccaggctgctgatcgatagatagacaatagactgatagacaagaaagaagagtgatctttggctttgtacaaccacgcatcatggagattcaactcgactctccactccttttgcatgtcttgctaaacacacacacacacacccctacaaggggcacaaaagaaaaagaacaaagcgaccacacatcattccacgcatgcacaaagcttccctctctctctctctctctctctctctctctctctctctctctccttccaagcaagcagcttcatctttcgcctcgccatgtctctggtttgctgctagctgctgctccattgttggcacagacaatgctaggggagaaggtacataatactcaacaccacacgcccacacccatgcagggacgccttggagaagaaataagaccccaaaagaacaaaagaatttgctggcgcatgcacgcacgcacagcacaagcatgcgatagacgcctcatcatcagttgttcttggccgagccgagccctctcgcttcagaccctttcatgatcctcagcctcttgcaggtgctgatgaacatgccgaagggcacgtcgccgacgagcatgaggtcgccgtccttgtcctcgtaggtgacggcgaagtcggaggggttgacggcgggcgcgtcggcggcgccggagaagcagaggaacatggcctccagcgcctcccgcagctcgcggtagcccttgtacatcttgaggtccaccttcctgaggtagggggcgccgtccatgctcaccttcacgaacaacccgccggcggccggggcctcctccgccagggctgccgccggcttgttcttggccgccgcctgctgctggaagcagctcttcctgtacgacctcaccggcggccatcccaccagctgagccttggcggccggcggcggcgcggcgtcggcgtcggcgtcggtctcgcagtcgcgcttcttgggcgcgtcctcgggcccgctgctgg

SEQ ID NO: 2472 - DNA, 1400 bp, Zea mays
  Clone ID: TF_ZmC1405_3
ccccgcgtccgactgggctcactcatgctccaactaactgctaagttgcaaccccactcccatttctatctctctcctcctgccatcaccctagaataggagcatttaccactgctttctctctctctctctcttccatcctcatgctccctctatatatacacatctccaccctgttcctgggtcctctcttccacccactgcaaccccaaatctctccttcctcacacacgcgaagctgagagaccaaagaagaagaagaaggagcgagcaagcagaaagttagctagctgctagcgtggaagtgcccaaggcgagagagagagacaagcctaggacggccgcgccaggctagccagccagctgctagctcctgcggacgagccgatggctggcgccgacgtcgacgtcgggacggagctccggctcggcctgccgggaggaggcgccgcggcggccaagaaggacaccatcgacctcaagctgaagctgcccaccgccggcatggaggaagctgctgccgccgccaggccggagccggcagccgagaaggccaagaggcccgccgaggcgccggccgccgatgccgagaagccacctgcacccaaggcacaggccgtgggctggccaccagtccggtcgtaccgcaggaacgccatgaccgtcgtccaggccgtgaggagcaagaaggaagaggaacctgagaagcagcaacagcccgctgccgccaacgccttcgtgaaggtcagcatggacggcgcgccctacctgcgcaaggtggacctgaagacgtacggcagctacaaggacctctccgctgcactcaagaagatgttcggcaccttcgtcaccgcaactgggaacagcatgaacgaggggagattggttgatccggccggcgatgctgatgatgtggtcactacttacgaagacaaggatggtgactggatgctggtcggcgacgtcccgtgggagatgtttgtcgactcatgcaagcgtctgaggatcatgaagagttctgaagccataggtcttgcaccaagaacgaaggataagtgcaagaacaagagctgaagaagatgcagtgttaaagatgttgcccattgtatcagaagaatggtccccttgcagtgcgctgccgttttttttttcctactagaaatataacgcgttttaattactagttggagggagacctgtcttgttcaactcgttcatggaccagaagcaataatatatccgtgtgtagctggattggtgttatgtcatgtcccctaccgtgtctcccagaatctacttggtgattttattccagtgttgttaatcaagtttatgtgattgttaagtaaagggcatcaatgggactattattattcgtgggctggccaccagtccggtcg

SEQ ID NO: 2473 - DNA, 664 bp, Zea mays
  unsure (1)..(664): unsure at all n locations
  Clone ID: TF_LIB3689-238-Q1-K6-B1
acagaattggcttgttatttttaatggaatgaaataaatattcacgctttctgacatagaatcccctagaagggttaggtacatagaataagtatggatagtcttttccaatgcgataaaataaagcgacatcgtgtctatttttctttgctaaaggggtatttccatgggtttgccttggtatcgtgttcatactgtcgtattgaatgatccgggtcgattgctttcggtgtttaggggggtgaatgtaaaaaaactcaagatatgtatcttgacgaagacacagtgtcttagctctatgttcgagacatgagactagctgattggtcactttaatttattgaatgctctgattggtacaattaatatggtaagacacatgttttagacacgtccactgtattatgttgtgttttaggtgtgtcttatacttggagtaccgtgcaacagtgtctaggttgtacatgcccttaggtttcgtggctcattttttttctcaactaaatacatgtttagctgccacatcgtctttcgctccaattgtaggatgttcgccggctcctgccgcnagctcaggatcatgaaaggctcagatgcgattggactcggtatngttgtgctcctgttatgtctagtgtatcgncgcgctaatcatgttgtcttg

SEQ ID NO: 2474 - DNA, 670 bp, Zea mays
  Clone ID: TF_ZmC1206_12
gcgctccctcccgagctcctccggctcacggtcacgcctcgtgtccccccaccccctgctgctcctcctcctcaagaaatggaaggtgatctacacagatgacgaggacgatatgatgctggtcggggacgatccatggagtgaattctgcaggatggtaaaaaggatatacatttattcctacgaggaggccaagtctttgactcccaaggcgaagctgccggccatcggtggtgacaccggcgtcaagccggacccaagcaaactgccagcagaatccgacgtgccacagagcgactccgacaacagtgctcccgttgctgctgataaggactgatggacgctagctcggccgtaccttctctttggatttgcgcttcgccggcccaaaggacgtacggtgccctgcaccatctgcctcggcttggaccagcgaggatggccgggagggagtgcatgcccgttccgtgcgtgtttcgtttgccgtgtttggtaggagccatggcttgttgccgccggcgctacatgggttctgtagactgttacactgactgctgccgtctcacctggccgccccctctcacctctctagtaatatactagggcttatgtacacagctgttttggtagtggcatatgtatatcgtcggtcatgttgcttgcgacattt

SEQ ID NO: 2475 - DNA, 397 bp, Zea mays
  Clone ID: TF_LIB3116-025-P1-K1-C6
gcccgccgttgagggcttccagaaggaacactttccaggcggaagcggcggaaacggccaaaagggccgaccaaaaccagaaccagggaggcctgtccttaaaggtaagcatggccggccccccttacttaaggaggggggacctccggttgtccaagggttccagggagttaaggggggttttggacccccttttaacaaactctttttccgggggggaaaagggcggggggaacaacaaccagaacgccttggtttacaaggccaaggacgggaacttaatgctcgccgaaaacgtgccctgggatatgttaattttttcgtgcagaaagttaaggataatgaagggttttgcctttgaggccaggggatcgttgatccatacataaacagaggt

SEQ ID NO: 2476 - DNA, 1170 bp, Zea mays
  Clone ID: TF_ZmC784_12
ctgtgcggcgctcgaggcggccggtcgggaccatcacacacaaacagccactcctcacctcccccgtcctccggttcatgtcctgctgctccccatgtcgcccccactcgacctcgactacataggcctctcgccggcggcggctgccgccgctgcccacgacgacctgaagggtaccgagctccgccttggtctgccggggtccggttcgccggaccgccgtgttgtggctgccaccgcaaccaccctggacctgctcccggctaagggcgccaagcgctggttttctgacgaggcgccgacgccatcgcccggtgcagcttccgggaagggaaagaaggtagcggaagaggaggacgacaagaaggttgcagcgacgccgcagccggtcgcaaaagctcaggtggtgggatggccaccaatccgaagctaccgcaagaacacgatgtctaccacccagctgaagggcagcaaggaggatgctgaggccaagcaggaccaggggttcctgtacgtcaaggtcagcatggatggcttatctgagtaccgcaaggatggtgaatatgttctgacttacgaggacaaggatggagattggatgcttgttggcgatgtaccatgggagatgttcgctgactcttgccgcaggctcaggatcatgaaaggatcagatgcaattggacttgctccaagggcagctgataagtccaagaatcgcaactagaatggttgcttcttacagtccagagcaagagggagatatccagtgactgtagggatctttgtggaagccggaaaacgtctaacagtttcaagaagaatttctgccttatggtctgtaccacatgtttttgctgctacgcaagtaaagaactccacgtctgtcaatgttagttttacaacatcgtctacggacaaaaaaaaaaaaaccccccgctatttgattgttgctaagccttcgtacgacgtgtaaatggtttggtacaatgagtgctgcgactacgattgagcacccctctacctagtttgcaaaaaaacagtgtcccatggactgtctgttgtccctctatataaatgtccaatgaagcttgctaatgtgtggtcatcgtgttcatgttctggtccattcatatccccagtgtttaaaccctgacccagcaacttgtttcg

SEQ ID NO: 2477 - DNA, 1646 bp, Zea mays
  Clone ID: TF_ZmC1405_6
ccggccgggccggggaccgactctcggcaacggatatctcggctctcgcatcgatgaagaacgtagcaaaatgcgatacctggtgtgaattgcagaatcccgcgaaccatcgagtttttgaacgcaagttgcgcccgaagccttctggcggagggcacgtctgcctgggcgtcacgcgtcctctcttcttccaccaccacctcctactccgctgcaaccccaaatctctccttcctcgcatacgcgcgcagcagaggagctgagaccaacgaagaagaagaacaaccgagcaagcacaagcttagctagcgtggaggtgcccaaggcgacgacggccgccgcgccaggctagccaaccagctgctcatcgctcctagctgcggagccgatggctggagccgacgtcgacgtcgggacggagctccgcctcggcctgccaggaggaggcgccgatgcggccaaggctgccaagaggggcttcgaggacaccatcgacctcaagctgaagctgcccaccgccggcatggaggaagctgccgctgccgccgccgccaagccggagccggccgccgagaaggccaagaggcccgccgaggcgccggccgctgatgccgagaagccacccgcacccaaaaacgctgagccggtcgcaaacaagaatataaacatgcatgatctggctaccatagtaaagaaatatcagtttgaagctctgacgaggataattgttaccagggcacaagctgtgggttggccaccagtccggtcataccgcaggaacgtcatgaccgtccagtctgtgaagagcaagaaggaagaggagcctgagaagcagcagtccgctgccaacgccggcggcaacggctccgccttcgtgaaggtcagcatggacggcgcgccctacctgcgcaaggtggacctgaagatgtacaacagctacacggagctctccgttgctctgaagaagatgttcagcaccttcaccacatccgggaacaacatgaatgagggaaaactagttgatccggtcagcggtgctgatgtggtcactacttacgaagacaaggatggcgactggatgctcgttggcgacgtcccgtgggagatgtttgtcgagtcatgcaggcgtctgaggatcatgaagagctctgaagccataggtcttggttagtgtctccagataaaattatcttccatagttccattataagatttacatgtcaactctaaccgcctatgttttcttcatttaaaaaaaaatacagcaccaagaacgaaggacaagtgcaagaacaggagctgaagaagatacagcgttaaagacgctgcccgttgtgtcaaaagaatggtgcccttgcagtgtgctgcggtttttctagaaatataatgcgttttaattactagttggagggagacctgtcttgttcaatttgttcatggaccagaagcaataatctatctgtgtgtagctggattggtgttatgcgatgtcccctaccgtgtgtcccagaatctacttggtgattttatcccagtgttgttaatcaagcttgtgtgattgttaagtaaagggcatcaatgagactattattattatggtaccttgtaagttaacctgtttgttaattgtcattataatatttggc

SEQ ID NO: 2478 - DNA, 1467 bp, Zea mays
  Clone ID: TF_ZmC790_1
cgtcgactggctctgccgggacggcggaacgatgctttttgactgtctctctctcctcacctcaagtccccgaaccagtagtgcaccaagaaccactccatccatctccatgggagactccggaggaagaagaggaccacctcttcctcggctgctagatctcatcccggacgggaaagaacggaaggggagggaagcgcaagacgcgggaaggtcgaagaacagcggcggcttcgggggcgaggaggacgcgaagctggagctcaagctcgggcctccgggtctcactctcgtagaagaaggaacgacagctaccgtgccaagagatggaggcgtactacagcgagagacgacgaccaccccgaccctctcgctcgggtgcttcccacgtaacccctccaagcctgcggtagacgcagctacagctgggacgaagagggggttcttcgacaccgccgtcgaggccaagacagaaggccgcgacgagcggatggagcagcaggccggagctggatgtgggaacgagctagcactggacgagaagacggcagccgcggccgcgagtgagagacagaaagggtcctgctgcccgccgacgccacagcacgcccctcctgctgcgaccgtgcacagcggagcacacgtcctgcagctgggaagaaggcctcccacgcgtccgcccacgcgtccgcccacgcgtccgcggacgcgtgggcttgctcatcatcatcatggaagctcctccaaacaacccaccgagccacagaacagcgaagctagcaggaaggagaagcctgcctgcaagaagaaccctctcgtaaaaatcaacatggacgggatccccatcggaaggaaagtagaccttgcagcctacgacagctacgagaggctatcactgggcgtcaaagagcttttccacggttttcttcaagctcaaaaggatatgtctccaactgctggaaagatattctctcaattgttggatggatctggcgaatataccctggtctacgaagacaacgaaggagacaggatgctggtaggggacgtgccgtggaatgtgtttgtgtcaactgctaaaaggctgagggttttgaggagctcggagcttgccaaaggtttggtaggcacaaggccacctcagattgcggtagctccgagaagaggaccaccagattgctgaaagcctgaaacagcgacaaaattctgatcatttggaatgtgagcaagcaaactgaacccggaccttttgtgatgtgacggtaccttttttttgcctgtagaaactaatctagtgagatgaactgccatttcagtctttcagatgtatgcggaggtcctggatattttgtaaattaggctaccatgtgactcgttgctgtagggtaataatgtcctaatgtaattcaacatgggcattaattggacttataagagaaatttcgcagatgcaagatctaccaatgt

SEQ ID NO: 2479 - DNA, 625 bp, Zea mays
  Clone ID: TF_ZmC790_2
ctcgtaaaaatcaacatggacgggatccccatcggaaggaaagtagaccttgcagcctacgacagctacgagaggctatcactgggcgtcaaagagcttttccacggttttcttcaagctcaaaaggatatgtctccaactgctggaaagatattctctcaattgttggatggatctggcgaatataccctggtctacgaagacaacgaaggagacaggatgctggtaggggacgtgccgtggaatgtgtttgtgtcaactgctaaaaggctgagggttttgaggagctcggagcttgccaaaggtttggtaggcacaaggccacctcagattgcggtagctccgagaagaggaccaccagattgctgaaagcctgaaacagcgacaaaattctgatcatttggaatatgcatgccgaggtcctggatattttgtaaattaggctaccaataccatgcgactcgttgctgtagagtaataatgtcctgatgtaattcaacatgggcattaattggacttataagagaaatttcgcagatgcaagatctaccaatgtaaaattacccgttctgtgcgacagataaaaaaaaaaaaaaaaaaaaaaaaaaaaaaaaactcgaggggg

SEQ ID NO: 2480 - DNA, 1566 bp, Zea mays
  Clone ID: TF_ZmC2833_4
ggccgctcttttttttttttttttggaacaattcctcccctgcaatttcaacactcgcaattacagaagcaacgaccaggctgctgatcgatagatagacaatagactgatagacaagaaagaagagtgatctttggctttgtacaaccacgcatcatggagattcaactcgactctccactccttttgcatgtcttgctaaacacacacacacacacccctacaaggggcacaaaagaaaaagaacaaagcgaccacacatcattccacgcatgcacaaagcttccctctctctctctctctctctctctctctctctctctccttccaagcaagcagcttcatctttcgcctcgccatgtctctggtttgctgctagctgctgctccattgttggcacagacaatgctaggggagaaggtacataatactcaacaccacacgcccacacccatgcagggacgccttggagaagaaataagaccccaaaagaacaaaagaatttgctggcgcatgcacgcacgcacagcacaagcatgcgatagacgcctcatcatcagttgttcttggccgagccgagccctctcgcttcagaccctttcatgatcctcagcctcttgcaggtgctgatgaacatgccgaagggcacgtcgccgacgagcatgaggtcgccgtccttgtcctcgtaggtgacggcgaagtcggaggggttgacggcgggcgcgtcggcggcgccggcgccggagaagcagaggaacatggcctccagcgcctcccgcagctcgcggtagcccttgtacatctttaggtccaccttcctgaggtagggggcgccgtccatgctcaccttcacgaacagcccgccggcggccggggcctcctccgccagcgctgccgccggcttgttcttggccgccgcctgctgctggaagcagctcttcctgtacgacctcaccggcggccatcccaccagctgagccttggcggccggcggcggcgcggcatcggtgtcggtctcgcagtcgcgcttcttgggcgcatcctcgggcccgctgctggcgacgacgtcgcgcttcttgcctctgggcgtcgacggcggcggcggcggcgccttgttctgggactcctcggcctcctcctcctccgtgcccggcaggccaagcctgagctccgtcgccctgaggctgtcaacgtcgtcgtcggccttgaatccgtagcccgctgccgatgctgcggcgacctccattggcgtgtcttcttgcttcttccgcacggcccgcgtgggcaataaaggcggtggttgcagcaaccggcgtcgagaggccgacgagctgcgctgtgctctgtcttggtccttgctggtgatgcccttggcgcggtcccggccggcagattcagattatggtcggaatgtatcttgtaccacagagaaattttatccgtgctcgtcggtgtagaataaaaacggcacccttgcacatattgtacattacatcgaaacacatagctttgttttctacaaaattgaaaactcaaaagtttcagaagtggatgccagtagttccc

SEQ ID NO: 2481 - DNA, 1674 bp, Zea mays
  unsure (1)..(1674): unsure at all n locations
  Clone ID: TF_ZmC1405_1
gctccaaaccgactttgtatcgtagtggttaaagacttagactgctcttggtgagatcttgaggtcgattcctcgaatcgcattgaatttactgcgtttttaaaaaaaaaaaaaaaaaaaaaaaaaaccattggcctcgagccggccgggccctctcttcttccccaccacctcctactccgctgcaaccccaaatctctccttcctcgcatacgcgcgcagcagaggagctgagaccaacgaagaagaagaagaacaaccgagcaagcacaagcttagctagcgtggaggtgtccaaggcgacgacggccgccgcgccaggctagccaaccagctgctcatcgctcctagctgcggagccgatggctggagccgacgtcgacgtcgggacggagctccgcctcggcctgccgggaggaggcgccgatgcggccaaggctgccaagaggggcttcgaggacaccatcgacctcaagctgaagctgcccaccgccggcatggaggaagctgccgctgccgccgccgccaagccggagccggccgccgagaaggccaagaggcccgccgaggcgccggccgctgatgccgagaagccacccgcacccaaggcacaagctgtgggttggccaccagtccggtcataccgcaggaacgtcatgaccgtccagtctgtgaagagcaagaaggaagaggagcctgagaagcagcagtccgctgccaacgccggcggcaacggctccgccttcgtgaaggtcagcatggacggcgcgccctacctgcgcaaggtggacctgaagatgtacaacagctacacggagctctccgttgctctgaagaagatgttcagcaccttcaccacatccgggaacaacatgaatgagggaaaactggttgatccggtcagcggtgctgatgtggtcactacttacgaagacaaggatggcgactggatgctcgttggcgacgtcccgtgggagatgtttgtcgagtcatgcaggcgtctgaggatcatgaagagttctgaagccataggtcttgcaccaagaacgaaggacaagtgcaagaacaggagctgaagaagatacagcgttaaagatgttgcccattgtgtcaaaagaatggtgcccttgcagtgtgctgcggtttttctagaaatataatgcgttttaattactagttggagggagacctgtcttgttcaatttgttcatggaccagaagcaataatctatctgtgtgtagctggattggtgttatgcgatgtcccctaccgtgtgtcccagaatctacttggtgattttatcccagtgttgttaatcaagcttgtgtgattgttaagtaaagggcatcaatgagactattattattatggtaccttgtaagttaacctgtttgttaattgtcattataatatttgacaaaaaaaaaaaaaaaaaaaggcccctgccaaaaaaaaaaaaaaaaaaaaatcgagggggtttcttgttcaatttgttcatggaccagaagcaataatctacctgtgtgaagctggattggtgttatncgatgtcccctcccgtgtgtcccagaatctacttggtgattttaccccagtgttgttaatcaagcttgtgtgattgttaagtaaagggcatcaatgagactattattattaaaaaaaaaaaaanaaaa

SEQ ID NO: 2482 - DNA, 975 bp, Zea mays
  Clone ID: TF_ZmC13155_1
cattgggaccctcgaggccggccgggagcaagagggcgaggctgtgtgtgagagagggggaggcagagaacattcggcagtgtgagaatcggaatcggagatggcttggaatggccgcttcggcgacgacgaggaggggagcggccttgagctcagccttagcctcccgggctacttctccggatcgccaacccaagctgcagcaggtttcgaggacaaagcagacggcggctctgctgctgctgctgctgctgggcgagcaaagggaagcaatggcttcaaggccaggccggcggcagctgctccggtcgtgggatggccgccagtgcgcgcgttccggcggaacctcgcctcggcgtcctccaagccgtcccgcgatccgccaccaagccacagaggaaacgagtccgcgcgccgccggcggcaaggccgtcgagggcggcaacaagggcctgttcgtcaaggtcaacatggacggcgtgcccatcggccggaagctcgacctggccgcgcacgccggctacgacacgctctccgccgccgtcgacagcctcttccgcggcctcttcgctgctcaagcggcggggccaggcggggagcggcaggctgtcgcgggtatcctgagcggcggcggcggcggcgagcacacgctggtgtacgaggacgacgagggcgaccagatgctggtcggggacgtgccgtggcagatgttcgccgccaccgccaggcgtctgcgcgtgctgcggagctccgatctcaacccctcgtcgctaagggcagcgaccaggaagagagctgcagcttagtgctgcgctggcgtaccctggagtctcaactctgaacattttgcggccttttcggagggccaccaatgtaaaattgaagcggtttttcgtggatttttgttaccattaccatcatgtatgtgatcaagtagggaagcaggaatctagaggagatgagtggtgttgttag

SEQ ID NO: 2483 - DNA, 771 bp, Zea mays
  Clone ID: TF_ZmC37343_1
agcagtggtaccgacgcagagtactttttttttttttttttttttccgttttttgaggtgaaaaaaatatgacaaaggtgacagggttcaatagtttaggcgccacatggaaccgtcagcttttagatatgagaagatatagagaactacagggctaggtcacctctacagtgagtgcctgcatccatactttcatagaccaattcttgcctgccatttagagcttaggctatggctacacgtagctacaacagctatcgtacaacatgtccattaccataatgatacaatggatctagctatattaacgactaggttatttctgaccaacacaacttgagagaagatagatcataggaaccgaaaagactcgtggacggcaatcctgcggtgctgaattgccggttttggttcagaacttcagtttctggtcttcatctcggtctcagtagtccagaggcaccacaggtgcgatgctgccggtgagattctgcatgtcgtggcctgcagaataatcatcgcagacactgccctgcagtgtcctcactccagttgtagacagaaggtcgcctccgccgcggaccatctgctgcacgtcttgcggcgagaggatctttatgcaccatacactattcacaaactcctgccacgggtcatcgccgacgagaagaatatcgttttcccggtcaacgaatacaagctgccagcctgatcttacagggtccctccagttggccttcaagaccaaataaccgctcgagctcgctacgt

SEQ ID NO: 2484 - DNA, 664 bp, Zea mays
  Clone ID: TF_ZmC792_1
gtccttcaggagaaacctcgcaaatggcagctcgtctaagcaatccctcgagcagcaacaacaaaacgatgatgaagcctcctgtgacaaggcgaagcagacctgcaagagaagcccgctcatcaaaataaacatggacggcatccccattgggaggaaaataaacctctcagcgtacgacagctaccagaagctttcgtctgccgtccaagatttgttctgtggcttccttgatgcagcccagaaggatgaatctagagggcgaggagcagaagagaaaatgttctcagggttgttggatggaactggtgagtacactttagtttgtgaagacagtgaaggaggcaggacactagttgggcacctaccatggaatgtatttgtttctaccgctaagaggctgagggtcatggaaagctctgaacttcctcatggcctgattaaaactgcctccaagagggctgatggctgatatgaggccaagtcgcgcccagccttcgaatcatgcaattgcaagctatgccaatcattggcttcttcggatggccctttttggcttgtagagagaaatctaataagataatgttagcatatcgcagatgccctgaatgcactgtgcaccttttgtaattttcgtcgctctgtttcagatgtggtgctgatc

SEQ ID NO: 2485 - DNA, 400 bp, Zea mays
  Clone ID: TF_LIB3245-012-P2-N1-D10
tatagaagagctatgacgtcgcatgcacgcgtacgtaagctcggaattcggctcgagtcgtgaaggtggccgtggacggcgcgccgtacctgcggaaggtggacctcgcggcgcacgacgggtacgcggccctgctccgcgcgctccacggcatgttcgcctcctgcctcgttgccggagccggagccgacggggcggggcggatcgacaccgccgccgagtacatgcccacctacgaggacaaggacggcgactggatgctcgtcggagacgtccccttcaagatgttcgtggactcgtgcaagaggatccgcctcatgaagagctccgaggccgtcaacctatctccgaggacatcatcccggcagtgattggtggtgctgtggacgccatatgccct

SEQ ID NO: 2486 - DNA, 1288 bp, Zea mays
  Clone ID: TF_ZmC6227_1
cgcacgcacgcactcgcctccgacagcgaccgcgcaacgtccttctcccgcgcctcccggccggccggtccctgttccctctcctcccctcggagcagcaggagcaggagcagccgcgttcgtcctctgcgctgcgcggcccgccggcctgaccaagcaaagcttatcggccggagccggacgaacgaacgatgcagcaggacctcagaaactcagagagaagaaacccggaacaggcgcatccagtgatgtcggcgagctcgaccaactccgcggcttccccggccgtgtccggcctcgactacgacgacacggcgctcaccctcgcgctcccgggctcctccgccgagcccgccgccgatcgcaagcgcgcccacgccgaccacgacaagccgccatccccaaaggcgcgggccgtgggctggccgccggtccgcgcgtaccggcgcaacgcgctgcgcgacgaggccaggctcgtgaaggtggccgtggacggcgcgccgtacctgcggaaggtggacctcgcggcgcacgacgggtacgcggccctgctccgcgcgctccacggcatgttcgcctcctgcctcgttgccggagccggagccgacggggcggggcggatcgacaccgccgccgagtacatgcccacctacgaggacaaggacggcgactggatgctcgtcggagacgtccccttcaagatgttcgtggactcgtgcaagaggatccgcctcatgaagagctccgaggccgtcaacctatctccgaggacatcatcccggcagtgattgttgttggtgtggacgccatatgccctacgcggcttatctctccgaattagttcacagagtgtgtgctggaagaggcttggctgctcaggtcctccatgcacacgtcatacaccgtacgtagggtgagggttcagtctgttgctgtgtgttctgtacaggccacaccacacacgcccccatggaaaactttttcagtttcgagtgcccctccctctcggccggacggtttggtttttggacgacgccggcgaggaggcggcgctagcacactagtagctccgtttccgtgtgttctttcatacttggctttggtttccgtttcagtcttcggccctcggtcgtcttgtctcgactctcgagggatccatgtatacacgaacatggtacatgctgtgtgctgtttccattgtataaggtcaaagaatacaagtacgatctgtttctgttctcgtaaaaaaaaaaaaaaaaaaaaaaaaaaggaaaaaaaaaaaaaaaaa

SEQ ID NO: 2487 - DNA, 610 bp, Zea mays
  Clone ID: TF_ZmC3003_2
aggagcccaatgcgctgctcgagggcgtcgccgtcgcgggcctcgtcgggattatgcgccagcgcggatcatgtgcggagcgaggcaggttcatatccaaacaagaagccacgatggaatctggatttcccctctatctgatggaatctggatttggtgccagtctgttttcctgtgattttgggataccagccccattccccttcatggagggtatgcgttgctgttggtcggcacactggaatggaacagatatagacagaaccttcaggttcataagcaaggagttgcgcttgaccgatctatggatctctctagatgcactgactaaggtgaattgaaagcggaactagacatgatgtttgaattcgagggtgaattagtatctgcaaaccaaaactggcagattgtttataccgacaacgagggtgatatgatgcttgtgggagatgacccgtgggagaatttgatgtggttgtgtatgatgtactttatattttggcatactatgcacaaaaacaaatgccttctatgaccatcgtgatttatacattttcaaacaaaattttatgataaaaaaaaaaaaagggcggccgccaccgcggtggag

SEQ ID NO: 2488 - DNA, 1172 bp, Zea mays
  unsure (1)..(1172): unsure at all n locations
  Clone ID: TF_ZmC13783_4
cgagcagcagcagcaacaggcatggaagcaaaagtttatgggctcacagtcgatgtcttttgggggctcggtttcacttaactcacccactaccaaagatggtcctgttgacaacaaaattggtcgtgatgtgcagaaccagaccctttttagccctcaagttgactcttcctccctactgtacaatatggtacctaatttgacctcaaatgttgcggataataatatatcaacgattccctctggatcaacatatctgcaaagtccaatgtatggttgtctggatgactcttctggtttattgcaaaatacaggagagaatgatccgacaactagaacattcgttaaggtttacaagtcaggatcggtggggagatccttggacatcacccggttctctaattatgctgaacttcgagaggaactgggtcagatgttcggcattaagggtcagttggatgaccctgatagatcaggctggcagcttgtatttgtcgacagggagaacgatgtgcttctccttggagacgacccatgggagtcatttgtgaatagtgtatggtacatcaaaatactttcacctgaggatgtgcataagatgggaaagccaggaaacgatccacgctacctatcttaaattgatacccagagctctttcgggctcccgtgacgattctgtggcacactgtagcactgtccatggcggtccggtgtgctgtgctcgcatgttcgcccgtgtcatctatagcatgtacaccgtgcgcgtcttcagaactcccccgttacttgtatccggtgcaggccaccgctctggactgatatcttgtaggttccacttaggaatcagtatcagcgactctatcctagttggtttgtagctcgcacggcactcgttcttgtgtcgcatcgaaatcttcaggctaaatgcttagttgaaactgttcccgtgattcttaagctatctatgtatttgaggattccccggcatgctttcgacgatgaactgcaataatttgaatgcaggaggattgtttgagggtagctacgctgccccgcgcgctagttcccgttccttgactcgggctccctttctttttcgcgccgggccgtggntccgcgtcccccncttggggcgcgttcctcggtctcctccccgctgggggcgggttctg

SEQ ID NO: 2489 - DNA, 747 bp, Zea mays
  unsure (1)..(747): unsure at all n locations
  Clone ID: TF_ZmC13783_6
aagtccaatgtatggttgtctggatgactcttctggtttattgcaaaatacaggagagaatgatctgncaactagaacattcgttaaggtttacaagtcaggatcggtggggagatccttggacatcacccggttctctaattatgctgaacttcgagaagaactgggtcagatgttcggcattaagggtcagttggatgaccctgatagatcaggctggcagcttgtatttgtcgacagggagaacgatgtgcttctccttggagacgacccctgggagtcatttgtgaatagtgtatggtacatcaaaatactttcacctgaggatgtgcataagatgggaaagccaggaaacgatccacgctacctatcttaaattgatacccagagctctttcgggctcccgtgacgattctgtggcacactgtagcactgtccatggcggtccggtgtgctgtgctcgcatgttcgcccgtgtcatctatagcatgtacaccgtgcgcgtcttcagaactcccccgttacttgtatccggtgcaggccaccgctctggactgatatcttgtaggttccacttaggaatcagtataagcgactctatcctagttggtttgttgaaactgttcccgtgattcttaagctatctatgtatttgaggattcctcggcatgctttcgacgatgaactgcaataatttgaatgcaggaggattgtttgaaaaaaaaaaaaaaaaaaaaaaaactcgag

SEQ ID NO: 2490 - DNA, 834 bp, Zea mays
  unsure (1)..(834): unsure at all n locations
  Clone ID: TF_ZmC1249_9
aagatgtttgacttcgaagggtgaattggtatctggtagccaaaactggcagatcgtctataccgacgacgagggcgatatgatgcttgtgggagacgacccgtgggaagagttttgcagcatagtgcgcaagatttacatctacccgaaggaggaggtccagaagatgaactcgaaatcagctgcgccaaggaaggaggaatctccggcaccgggcggcggaggttgccccccccccaacgagtagtatgtatggtggttctccgtttggttgcttccccccggtttgcttttggcggcaagttgaggccaaggttttactactgctattgttattgccgatttgctctccccccttccggtgtaaatatctgtgtgtacccagtcccagccttgtgctagtaagtagcaaccagttttcccttttggtattttaaccagcagctaaattcgcggcattttagtccctgtaagcggtaagcagctttgtagcgtgagatagatggccaagcgccggtacgtacgtgtagtgtctggtcttctccctgagtgtactataaagagttaatataggagctgaccctgtgaacccgcgtgatggatgcatatgcttagtgcaaacctgcattttgtctctatttgaccatctgtacacgcatgatcgccttgcttgcctggtgtctggtctgctgatggcagcgcaaagcgaaaggcaaatgcattgaagggaaggcaagtggaggttggagttgatgctgncgngtgcgggcgcgatttgctgtncctttncggtgtgcggtgttgactgacgcgcgcgagcacgaaactggggga

SEQ ID NO: 2491 - DNA, 765 bp, Zea mays
  Clone ID: TF_LIB4746-023-R1-K1-H9
ggtacaaaccggccttccggtccctgttccctctcctcccctcggagcagcaggagcaggagcagccgcgttcgtcctctgcgctgcgcggcccgccggcctgaccaagcaaagcttatcggccggagccggacgaacgatgcagcaggacctcagaaactcagagagaagacacccggaacaggcgcgtccagtgatgtcggcgagctcgaccaactccgcggcttccccggccgtgtccggcctcgactacgacgacacggcgctcaccctcgcgctcccgggctcctccgccgagcccgccgccgatcgcaagcgcgccgtacctgcggaaggtggacctcgcggcgcacgacgggtacgcggccctgttccgcgcgctccacggcatgttcgcctcctgcctcgttgccggagccggagccgacggggcgggacggatcgacaccgccgccgagtacgtgcccacctacgaggacaaggacggcgactggatgctcgtcggagacgtccccttcaagatgttcgtggactcgtgcaagaggatccgcctcatgaagagctccgaggccgtcaacctatctccgaggacatcatcccggcagtgattgttgttgctgtggacgccatatgccctaggcggctaatctgtccgaatttgttcacagagtgtgtgctctggaagaggcttggctgctcaggtcctccatgcacacgtcatacaccgtacgtagggtgagggttcagtctgctgctgtgtgttct

SEQ ID NO: 2492 - DNA, 818 bp, Zea mays
  unsure (1)..(818): unsure at all n locations
  Clone ID: TF_LIB4742-134-Q1-K1-A5
cctcgaggccggccgggacctcttcaatcccagtcccacacaaagtttctcctcgatcctcatcttctcctactcatctcctccccctccctccctccctctctcgagtcaagagcagagcagctaccaaacaagctatcccctttcgcttccgatccatggagctcgacgccgacaacctgagcgccaccgagctccgcctcggcctgcctgggaccagcagcagcagcagcagcgacgactggcagaagaagccgtcgccctccgtcggggccaagcgcgctctggacgacggcaccaagagcgaggcctcagggaccagcacggccgccggagacctcgacttcgaccacgaccacgacaccgccgcgcctcccaagtaagaactagaccccccatggcgcaagtggtcgggtggccgccggtgagggcgtacaggaagaacaccttccaggcggcggcggcggccaagaaggtcgagcagaagcagaagcagcagcagcagggaggcctgtacgtgaaggtgagcatggacggcgcgccgtacctcaggaaggtggacctccggatgtacaaggggtacagggagctcagggaggctctggacgcgctcttcaccaactctttctccgcggcggcagagggcggcggcgaccaccaccagcacgccatcgcctacgaagacaaggacggcgacctcatgctcgccggagacgtgccctgggatatgttcatctcttcgtgncagaagctcaggataatgaagggctctgcctctgagtctggaggccagtgatcgctgatccatacataaacag

SEQ ID NO: 2493 - DNA, 407 bp, Zea mays
  Clone ID: TF_cC-zmle189022c10d1
cacacaaaacaagcagagatggatttttaaaaaagccaagcctaacaacatgattgagagtcattatgtgcctgttcatgattagtacttaattagacatgcatctcattgttttgtttgaggaaattttataacaaaccataatgacccagattagctataattcaaccacttagcaatgcccatccggggctgctgcagcttaattatccttactttagtaactaagccaactgggcaccgcatttacaaaggatggggcaggtcatgaattgggcgactaggctagctcctgttcttggattttgccatggcttttggggcaagaccaagaccaagggcctcctttcctttcatgatgcgaaaacgcttgcatgattaaacaaacatttcccatgggacattac

SEQ ID NO: 2494 - DNA, 572 bp, Zea mays
  Clone ID: TF_ZmC342443_1
cagggtgacagcatgtttcttccttcctaggacgtctctccttacaaaacgatcaaaattatatgcacattgattaggaaacaccaatagtacaacatagaactcacataaatactagctacattacttaattagtacaagaagaaaactacttctcgaagttgtatatgccagatcaagagatgtccttctgatcacttgcttgaagagtgccttcagtcatcggtcggttgttcggttgtatattttctgtcatcttcaccctgacctttgtcacttgatgttgggtttcggacaatgtacaatcttttagcagacgctaggaataattcccatggaacgtcaccaacctgcattcggtcaccctcgaagtcttcatacagaaatatgaacttgtcattattggttggaagatctttttctcccgtgcctgttgcgcctgtagaacagtctgcgggcgagtagaagtttgttgtcatgttggtgagcaccctggagagggaggcatagccgccttgcgccctgaggttgatcttcctgccaatcgcgtagccgtccatgtgtaccttggc

SEQ ID NO: 2495 - DNA, 1449 bp, Zea mays
  Clone ID: TF_ZmC1167_2
cattgggtacctcgaggccggccgggttggccttctcctccccttcgcccttcctccctcctctctcagtctctctccggcctccctcgcccacagagtcagagcggaagccgccgagctcggagcccagcacgctgcacgccgccgccggccatgtcggtggatacggagcggagctccaccgagtcgtccgcggcctccgggctcggctacgaggacaccgcgctcgccctcaccctccgcctcccgggctccgaccccggccgttcctccccgctcgccgcgccctccgacgctgcgccgtctcccaaggcgcgggtggtggggtggccgccggtgaggtcgtaccgcaagaacgcgctcgccgactccagcaaggccagccgggcagccaatttcgtgaaggtggccgtcgacggcgcggcctacctgcggaaggtggacctccaggcgtacggcggctacgaccagctcctccgcgcgctccaggacaagttcttctcccacttcaccatcaggaagttcgccgacgacgagaggaagctggtggacgcggtgaacgggacggagtacgtgcccacgtacgaggacaaggatggcgactggatgctcgtcggcgacgtcccctggaagatgttcgtggagacctgccggcgccttcgcctgatgaaagattcagaggccgttaacttggcaccaagagccgcccgatgaggcgcaagcgcaactccaccgtcaccagtatgcactggcttttagtggcttggcttgttggaggaacgagggaacgtacttcgtcgctgttttgaggatcttcacttgacatatatatagcaatgtgtacagctgtcacctgctgcttttgcctgaggaaagtttgtagttccattactttacttatctgtagtgtctatctatctatctatagatccgaagctttgatatacacatggcggctacaatgtatttttgatgaataagaccaggccagagtaccaggcacaccgaaccgaacccgttcttccgcagctccacgcgcggttggcattttgagggttatgtggtggtgttgtgcttgcagtaggcgtgaaggctgatggcgtagctgccaattatttatacatctttattcgcgttgtgttgagctttattatatggttttgtttgagagttcatggctttgcatcctgttcctacgggatgctggtcagcttttcccttatcaagtacattctggtttaaaaaaataataatataattatttaataacaacaatttcttttaaatattattttttaaataataatatttttaaaaaattttcaataatttttaaaataaataaatatattttatttatttagggggggtcgccctttttatataccaatttttatttttcctctttcgccaaaattatttttttttttttttctctcaaattaaata

SEQ ID NO: 2496 - DNA, 1235 bp, Zea mays
  Clone ID: TF_ZmC1426_2
tcgagcgtagcatgcaggaacttatttgccgtgcgctcccaggtctccgctcgcgtgccttccagtctgtctcacactagctgctgtgggacgatcgaagtgggtgtgtcagctagctagctgcgccgtgaccacgcacatgaccgcagtgcgcgcggggctgatcaagggaaagtgatcggatggagctggagctcgggctcgcgccgccgaacccgcatcagccgctggctgccgccgccgagttcgtcggtctcctcagcagctcggctggctcgtgcgggaacaagagggttctcggcgacgcgttcggggccgccaaggcggccacgcttccgctcttcgtctgcgaggatggcgacggaggcggcggcgaccgcgaccgcgacggcgtcgtcgaccatgaacagcaaagcaacaatgtacccaggaagaagaggctggtggggtggccgccggtgaagtgcgcgcgtaggcgtagctgcggcggcgggtacgtgaaggtgaagctggaaggggtgcccatcgggcggaaggtggacgtgtccatccacggctcgtaccaggagctgctccgcacgctcgagagcatgttcccttcgggtaaccaacaagatcatgcagaagacgaggtggtggtctcgcacgagcgccgccgtcgccatccttatgtagtcacctacgaggacggcgaaggggactggttgctcgtcggagatgatgtgccgtgggaggtctttgtcaagtcagtgaagcggctcaagatacttgcgtagccgacggtcggcgcctcagagacgtcgtgtggtccgtctcaccaggatcggagcagtgtagtactcctgggcgtcatctgcgtaataacgttgtttctgtcctgtgtgcccgtagcagtacgtactgtcctatagtaagctagctttatggggtgcttcagctttcagagcatgacgaaagcactgattagctgctgtcatcacatttggttcgtctttgtgtcgtacggtatcgctggcgtcagtgtcgcggcagcctaggtgatctaagcatacttactatctcaagttacttttggttcccttagcttgcatggtaattcatataccgtatacgtgtgtgactcaggggcgaagctgccttaaggcacaggggtcaccggacccgatggaatttatcaaatccagtgtaaaatactatttaacactgttcatcaatatatttgatttcaataattc

SEQ ID NO: 2497 - DNA, 605 bp, Zea mays
  Clone ID: TF_ZmC1328_2
gtaaaaggcaacagacaggataggctgcataaacatagagctggttcgtctgaacatttacatacaacccaaaaggtcacatcgcttcccggaaagagaaacaaaataaacaagagcaggaaaacccaaaaggtcggttcggttctttgatgatcccttccaagagaaagtagggaaaagaagaggaagaaaccacgaagaaagatgatacaagctcagaagacgttttcttcttcacagcacaccaacatcactgcaaggaagtgtctaagaggtaaacactggacactcagttaccgtcctcttctggccaggaggtgctgttagagatgaagagaggtcagatgtcttcagaacgcgcagcctcttcaccgaagaaacaaacatcccccaggggacatcgccaaccagcaccctatcgccttcataatcctcataaaccagagtgtactccccagttccatctagtaaacccgatatcgccacctcttcctgtgaacactcctttgcgccggcagccagagggtcttgttgggctgcaagaagcccccggaatagcttgtcgacagacagagacagctcatcgtaactaccggaggcactca

SEQ ID NO: 2498 - DNA, 743 bp, Zea mays
  Clone ID: TF_ZmC12865_4
gccggccgggctggggtacctcgaggccggccgggccgggcctcgctcagctcgaacgatcgaaaagaaaaaggactcacctcggccctctcctcttgtgcttctgcttccccaccgagtctcctcaaccccaggcactcgccctctgtcccctcccttcctcgcctccgatgccgccgccgccgccgctcctcgagccgcgcgactacctcggcgccggcgccacctcgtcgtgctgctcgtcgtcctgctcctccggccgcgagggcgcggggccccacctcgcgctgcggctcgggcttccggggtccgacgactcccccggccgcggcgcggacgcggagcacgcccgcgcccacgtcgacgccgcgctcaccctcggccccgcccccgcccccgcgcctcccaggggcagcgccaagcgcgggttcgccgactccctcgaccggtccgcgaagctggacggcgttgccgcggatgacgctgctgggggcgtcacgcgggtagctggagctgctgccggagctccgcccgctgccaatgccatggacagggcacaagttgttggatggccgcctgttaggagctaccggaagaataccctagctgccagtgccacaaagacaaatgggggagatgaaggtacgagtgaggcgggatgctgttatgtcaaggcagcatggatggagccccatacctaaggaaggtggacctccagacctattccagctatgaggatctct

SEQ ID NO: 2499 - DNA, 674 bp, Zea mays
  Clone ID: TF_LIB4766-015-R1-K1-F6
cctcgagggccggtccgggaaaaaaaaaaaaaaaaaacccttccacccactgcaaccccaaatctctccttcctcacacacgcgaagctgagagaccaaagaagaagaagaaggagcgagcaagcagaaagttagctagctgctagcgtggaagtgcccaaggcgagagagagacaagcctaggacggccgcgccaggctagccagccagctgctagctcctgcggacgagccgatggctggcgccgacgtcgacttctggacggagctccggctcggcctgccgggaggaggcgccgcggcggccaagaaggacaccatcgacctcaagctgaagctgcccaccgccggcatggagggagggcggctgccgccgccaggccggagccggcagccgagaaggccaagaggcccgccgaggcgccggccgccgatgccgagaagccacctgcacccaaggcacaggccgtgggctggccaccagtccggtcgtaccgcaggaacgccatgaccgtcgtccaggccgtgaggagcaagaaggaagaggaacctgagaagcagcaacagcccgctgccgccaacgccttcgtgaaggtcagcatggacggcgcgccctacctgcgcaaggtggacctgaagacgtacggcagctacaaggacctctccgctgcactc

SEQ ID NO: 2500 - DNA, 1169 bp, Zea mays
  Clone ID: TF_ZmC1117_1
ggtaccctcggatgcgccccgcgaggccggtcgtcgcaaccagtcaaccaccctataaagcgcggggtctgaggctggccggcacctcttcaatcccagtcccacacaaagtttctcctcgatcctcatctcctccctctctcgagtcaagagcagagcagctaccaaacaagctctcctttcgcttccgatccatggagctcgacgccgacaacctgagcgccaccgagctccgcctcggcctgcctgggaccagcagcagcagcagcgacgactggcagaagaagccgtcgccctccgtcggggccaagcgcgctctggacgacggcaccaagagcgaggcctcggggaccagcccggccgccagagacctcgacttcgaccacgaccacgacaccgccgcgcctcccaaggcgcaagtggtcgggtggccgccggtgagggcgtacaggaagaacaccttccaggcggcggcggcggccaagaaggtcgagcagaagcagaagcagcagcagcagggaggcctgtacgtgaaggtgagcatggacggcgcgccgtacctcaggaaggtggacctccggatgtacaaggggtacagggagctcagggaggctctggacgcgctcttcaccaactccttctccgcggcggcagagggcggcggcgaccaccaccagcacgccatcgcctacgaagacaaggacggcgacctcatgctcgccggagacgtgccctgggatatgttcatctcttcgtgcaagaagctcaggataatgaagggctctgcctctgaggccaggtgatcgctgatccatacataaacagaggctacagacacgccacctgggaacgcggatccaagagcacacacggatcgtacttgacgaggaaggagggaggagctgtgtggcttgagctctccagtgttgtacaaaggcatgtttctttctgaacccaaaagggagaaagatgtatgaagcgtgtatataaaatcttagctagcagtttgttttcatttgtatgagcgatcgaaggctgtaaaaaaagaagaaaaaaagaaaagggaatgagaaattgactaaagctggtcattttcctctcaaaaaaaaaaaagaaaagggaatgagaaattgactaaagctggtcatgtttccaaaaaaaaaaaaaaa

SEQ ID NO: 2501 - DNA, 640 bp, Zea mays
  unsure (1)..(640): unsure at all n locations
  Clone ID: TF_LIB4744-117-Q1-K1-E4
cgaggccggccgggggaaatggaactaaattagttacctatctgatttgtgcctcattttctccggacacattttctttcactccaattgtaggatgttcgctgactcttgccgcaggctcaggatcatgaaaggatcagatgcaattggacttggtaacttgtactcctattcagtttagtttattgccgtgctaattatagtcttagttggttggtggacatggtaggatggtacatgatatgatgatccaagtagcttgtgttgttagttgtacatgatacaacttttattaggacttcctcagaaaggagacataattcatggtccctgcatctgtggtggtagctctcttgggtaatatatttgccatcttcttgtacatagcactcaaaattaggtccaaaatcagaagcgcggggtgaactagacattatcagttgcattttgcatttagtactgttaccaacactagaaccaagtacgttatcgtcagtttggagtgcacataataatagggaaaagtcatgtatcaattatatcctggagatgccaagttaatagttaaatattgaaaattggaagatttgaatcgtagntgtcacttgctaancaggtattctaattcaactccagagtc

SEQ ID NO: 2502 - DNA, 796 bp, Zea mays
  Clone ID: TF_ZmC2833_15
attgctaacttaataagtaatagagatatgtaacttaagacagggaaagaagagtgatctttagcttttgtacagacacgcgtgcatggagattcaactccactccttttgtgttgctaacaccccctactagtaccacaaaataaaaaaaaaacaaaagaacaaagcgaccacacatcattccactccactccacttggttggatgcacaaattaaagcttttctatctctctccatctccgtcccctcgttccaatccaagcaagcagcttcatcttctcattgatggcagacgaggaggggatggtacaacacaagcccatactaccccatgcctcggacgcacaacaatcccccgctcacgcgtgcacaagccgccgtgtgcgtggatctcggtcgggtctgcacaatggtcgtcgtctccctctccctcagtcgttgttcttggctgacccgaggcctagtctggcctcagaccccttcatgatcctcagccgcttgcaggtgccgatgaacatgctgctggctgatgctccattgttggcagacaatgctaggggagaaggtacataatactcaacaccacacgcccacacccatgcaggtacgccttggagaagaaataagaccccaaaagaacaaaagaatttgctggcgcatgcacgcacgcgcagcacaagcatgcgatagacgcctcatcatcagttgttcttggccgagccgagccctctcgcttcacacccattcatgatcctcaccctcttgcaggtgatgatgaacatgccgaagggcacg

SEQ ID NO: 2503 - DNA, 807 bp, Zea mays
  Clone ID: TF_ZmC1407_3
actcctaagggcgattgggtacctcgaggccggccgggcccttccccccttccgttccgttccgatttgacgagttggtggctgctatagattcactcacccctctccatttctgataagtatccagctagctaccagtgtatgcaccaggcagcagcagcatggcggagtgcaaggacgacgacagcggccggcggtctccgtcgtcgtccatggacagcagcacccaccccccggcgctctccaccgcgtcctcggcctcccgccgcccgccggagaggagggaccagctcagccccgacctgcagctagggctcagcctgtcgccggcgtcctccgccctcctggtagcggagacaaacaacagcatcgtcccttctacgccaaggaaccaagcactcccggattggcccccgatcaaaccgttccttagaagcgccctgacagcctcggcacgccgacggcgaacgctgttcgtcaaggtgtacatggaaggcgtcccgatcggccggaagctggacatgctcttgctggatgggtacagcagcctcctagcgaaactccgccacatgttcaagacatctatcacttatgctgacgctgtggagtaccatcagcgggttcctcacgagaaggccgcgcatgttctcacctatgaagaccatgatggagactggatgatggttggggatgtaccgtgggagctctttctcggaagcgtaaagaagctgaggattgcgagaacagacagatgctagatagcaaacttttttcatgcggtggatcgcgactctggttcttcttttt

SEQ ID NO: 2504 - DNA, 1238 bp, Zea mays
  Clone ID: TF_ZmC2230_1
cgcaagccaagcattctcacgctagctgttctcttcttgcctcatccatcgtgcatctatattctcggcgcgagttacgtctttttcgtcgtccggccggcgagcattttgcttctgtgatcgatcggcgcgcgcgacgtacggccatggagatgatcgacgcagagctgcgtctgggtccgcccggcagcagcaacagagacgtcatcaacgtcgtgcagccttcgttggcggcggcgaaacggccgtcgtcgtcggtggtggagagcgaggcgtccgggacggacgaccatgaccatgacgacgccgcaccgacctccaaggtgcaggtggtggggtggccgccggtgagagtgtaccggaagaacgcgttccacgcggcggcggaggcgaggaggaccaggcggggcgagcagcagggaggaggaggcctgtacgtgaaggtgagcatggacggggcgccatacctccggaaggtggacctgcggacctacgcggcggctaccgggatgagggacgcgctggacgcgctcttcggctgcttctcctcctcggccgacggcggatgccagttcgccgtcgcctacgaggacaaggacggcgacctcatgctcgccggcgacgtgccatgggagatgttcatctgttcttgcaagaagctcaggatcatgagggggtccgaagcaagataaccaagcaacgaggatgcaaggacctgttgtatgcatatgcatggaggccggccggactcatgctgtcatgcatgagagtttgagagaggagaagaagacgacctactggaactgaaggcggttgggtatacctgcatggggagggagcccacgcatgcacgcgcgcgtcgtcgtgttctacggccagctagccaccagaccggctgccggcccatatgcacaccacggagatggaggtgatggttcaaggatcacggcggcgtacgcgcgcgtcatcagtcacgccgtcctgtcatcagatgagatggaggggtgatgcatgagggcagtgctagctgtggacggctggctggacgtgcagatcggagcgagattgtactgtgcacgcacataagctttgtacagtggcatgtgctggtcatctgtaattttgatttttttccccctccttttgtaagtgagcaagtttgaggaaaaaatgtatgaatgaagaaaaggagaggggggatttcaaatttgagttagttgccgttaagcaaccaaagg

SEQ ID NO: 2505 - DNA, 800 bp, Zea mays
  Clone ID: TF_LIB4172-012-Q1-K1-H10
tcgagttttttttttttttttttttttacaaggccaggtagtatagtaaatacataggcagagtaactgtagcacatcgattgttaaggctgccacatcgaagaggctacatcagagacattcctgcagttacattgaactgcaacatttttcttaaaatgctaactgtttgcacgatcatctgagtgcaaaagtttgtgctcagaaatcgcgtatcattttcttgctatcgtgggacggattatatcaaacatttgtgctcaggcatagcctgctatttctagtcgccggtgaccctccacggacgacccccgtccgagctgctacacgcttggttgccaagaaagctgtctccgtagtcgctggccagcctcatttgcctctcttcctgcggcgaaagaatcctgatgcaccgcacgcagttcacgaagtcctcccatgggtcatcaccaactaataggacatccttctcgtgatcttcgtaaaccagtttccagccaactctgttttggtcgctgagctgcccctcaattccaaacatacgggcaacgtcatgcttcagttcatcgtaaccagaatatctgttgatgtcgatagatcttccaacagcgccacgcttgtgcaccttggtgtatgttcgcatacgttgttgaacaggacctggagcccgggaatttctgtttaagaattggatatcattgatcgacgaatctatggaattgaacgcgatatcagcaacgccaaatggatggtgagatcattgaagatgataactcttgctgagaatcctttgatgaaat

SEQ ID NO: 2506 - DNA, 1357 bp, Zea mays
  Clone ID: TF_ZmC2833_8
gcacaacttaagaggctgtttggtttgagaaatgaagtgatacatcttcttctcactcctcacttttttatttggtttttgaaatagaatgggttgatccatcaccaccccattcctcataagctaataattagtatatacatgaggagtgagttgattacaccaaaattaataaaatgaacatatgatgcaccacttcatgaagcatagagtgactccacaaaccaaacacactataaagtttttctgtctctctccatctccgccccctcgttccaatccaagcaagtagcttcatcttctcgttccaagcaagcacaaaagcttttctatcttgctgctccattgatggcagacgaggtggggatggtacaacacatgcccatactaccccatgcctctcggacggacaacaacaatcccagagcaaaaagcacaagccgcgccgccgtgtgcgtggatctcggtcgggtctgcacaatggtcgtctccctctccctcagtcgttgttcttggctgacccgaggcctagtctggcctcagaccccttcatgatcctcagccgcttgcaggtgccgatgaacatgctgaagggcacgtcgccgacgagcatgaggtcgccgtccttgtcctcgtaggtgacggcgaagtcggaggggctgccgccgccgccgccggacgcgtcgcccgagcccgagcccggcccggagaagcagaggaacatggcctccagcgcctcccgcagctggcggtagcccccgcacgtgccgaggtccaccttcctcaggtagggcgcgccgtccatgctcaccttcacgaacaccccgccgcccgccggacccggagcaccctcatccgccgccgctggcttgcccttggcgctcgccgccgccgcctgctgctgctgctggaagcagctcttcctgtacgacctcaccggcggccaccccaccacctgagccttggcggccggcggcgcggcgctgacgccgtcgcgcttcttgcccctgggcgtggacggcggcggcgccaccttctgggcctgccggggctcctcctcctccgccgccgccgcctccgtgcccggcaggccgagcctgagctccgtggccctgaggttgtcgacgtcgtcgtcggccgcctccaagccgtagtagctgtagctcgctgctgcggccacctccattgcttgtccttagctagctaggttaggtagccgccgatgctgcggcgacctccattggcgtgtcttcttgcttcttccgcacggaccgcgtgggcaataaagacggtgcctgccccaaccggcgtcgagaggccgacgagatgcgctgtgctctgtattggtccttgctgg

SEQ ID NO: 2507 - DNA, 1374 bp, Zea mays
  Clone ID: TF_ZmC2833_9
aacttaagacagacagggaaagaagagtgatctttagcttttgtacagacacgcgtgcatggagattcaactccactccactccttttgtattgctaacacccctcctactcgtagtaccacaaaataattaaaaaaacaaaagaacaaagcgaccacacatcattccactccactccacttggttggatgcacaaattaaagctttttctatctctctccatctccgccccctcgttccaatccaagcaagcagcttcatcttctcctgttccaagcaagcacaaaagcttttctatcttgctgctccattgatggcagacgaggtggggatggtacaacacatgcccatactaccccatgcctctcggacggacaacaacaatcccagagcaaaaaaagggcccgctcacgcgtgcacaagccgcgccgccgtgtgcgtggatctcggtcgggtctgcacaatggtcgtcgtctccctctccctcagtcgttgttcttggctgacccgaggcctagtctggcctcagtccccttcatgatcctcagccgcttgcaggtgccgatgaacatgccgaagggcacgtcgccgacgagcatgaggtcgccgtccttgtcctcgtaggtgacggcgaagtcggaggggctgccgccgccggacgcatcgcccgagcccgagcccggtccggagaagcagaggaacatggcctccagcgcctcccgcagctggcggtagcccccgcacgtgccgaggtccaccttcctcaggtagggcgcgccgtccatgctcaccttcacgaacaccccgccgcccgccggacccggagcaccctcatccgccgccgctggcttgcccttggcgcccgccgccgcctgctgctgctggaagcagctcttcctgtacgacctcaccggcggccaccccaccacctgagccttggcggccggcggcgcggggtcggtcacgccgctgacgccgtcgcgcttcttgcccctgggcgtggacggcggcgccgccaccttctgggcctgccggggctcctcctcctccgcctccgccgccgccgccgccgcctcctcgcgcttcatgcctctgggcgtcgacggtggcggcggcggcgccttgttgtggccctcatcggcctcctcctcctccgtgcccggcaggccaagcctgagctccgtcgccctgaggctgtcaacgtcgtcgtcggctttgaatccgtagcccgctgcagatgttgcggcgacctccattggcgtgtcttcttgcttcttccgcacggcccgcgtgggcaataaaggcggtggttgcagcaaccggcgtcgagaggccgacgagctgcgctgtgctctgtcttggtccttgctggtg

SEQ ID NO: 2508 - DNA, 829 bp, Zea mays
  Clone ID: TF_ZmC2734_3
gacaaagtgaaccgaccaccagcgaccttcgtgaaggtttacaaatctggaacctacgggaggtcgcttgatatcactaggtttagcagctatcacgagctccgtagggaactggggcgcctatttggccttgagggccagttggaagacccattgagatcaggctggcagcttgtattcgtcgaccgtgaggaggacgtccttctcgtgggcgacgacccttggcagtaagcactgcatgcgacgttgtttcttttttttttctgcattcttcctcacattgcgttggcaacccaaccccacagggaattcgtgagcacggtgtcctgcataaagatcctctccccgcaggaggtgcagcagatggggaagcagggcctggagctcctgagctcggcccccgcgcggaggctcggtagcagctgtgacgactacgtcagcaggcaggagtcgagaagcctgagcaccgggatcgcgtccgtcggttcggtcgagttgggatgagtagcaagatagcgcgcacgcagcagcagcagcaggttacgcatcctcagcctcagggtaggtaggggactgaagggttggtctgcgacttgatgacccacgagctcctcgttgcgcgcttcgttcgcctccatgcgatggatagaagttcagcgcagatcaagccttagctctgcgagctatgtatcatctaataattctgtccgtgtcgtaccatgtcaactcctaagtagaagaattgaagaaactaccagcagccgctgtctggtatacacgctgaaacattttttcttgtatggagaaatactaatcatctggatgtagc

SEQ ID NO: 2509 - DNA, 661 bp, Zea mays
  Clone ID: TF_ZmC1249_5
aagcagagctggacaagatgtttgactcgagggtgaattggtatctggtagccaaaactggcagatcgtctataccgacgacgagggcgatatgatgcttgtgggagacgacccgtgggaagagttctgcagcatagtgcgcaagatctacatctacacgaaggaggaggtccagaagatgaactcgaaatcagctgcgccaaggaaggaggaatctccggcagcgggcggcggaggttgcgccgccacaaacgagtagtatgtatggtggttctccgtttggttgcttccccgcggtttgctcttggcggcaagttgaggccaaggttttactactgctattgttattgccgatttgctctcccgccttccggtgtaaatatctgtgtgtacccagtcccagccttgtgctagtaagtagcaagcagttttaccttttggtattttaaccagcagctaaattcgcggcattgtagtccctgtaagcgtagcagctctgtagcgtgagatagatggccaagcgccggtacgtacgtgtagtgttgtctggtcttctcactgagtgtactataaagagttaatataggagctgaccctgtgaacccgcgtgatggatgcaaaaaaaaaaaaaaaaaaggcccctagtctctatttgaccgtc

SEQ ID NO: 2510 - DNA, 1811 bp, Zea mays
  Clone ID: TF_ZmC784_1
cagccttccacgctttcactctcccttcccgcttccactcccactctcactctccctttccactctcaggctcccactccccccctaccggctaccctacccatcacacacaaacggccaccgggaactcaccactcttcgcttcgactcccactcccactctccctttccactctcaggctcccactccccccctaccggctaccctacccatcacacacaaacagccactcctcacctcccccgtcctccggttcatgtcctgctgctccccatgtcgcccccactcgacctcgactacataggcctctcgccggcggcggctgccgccgctgcccacgacgacctgaagggtaccgagctccgccttggtctgccggggtccggttcgccggaccgccgtgttgtggctgccaccgcaaccaccctggacctgctcccggctaagggcgccaagcgcgggttttctgacgaggcgccgacgccatcgcccggtgcagcttccgggaagggaaagaaggtagcggaagaggaggacgacaagaaggttgcagcgacgccgcagccggtcgcaaaagctcaggtggtgggatggccaccaatccgaagctaccgcaagaacacgatgtctaccacccagctgaagggcagcaaggaggatgctgaggccaagcaggaccaggggttcctgtacgtcaaggtcagcatggatggcgcgccgtacctcaggaagattgacctcaagacttacaagaactacaaggacctgtcgactgcgcttgagaagatgttcagtggcttcagtactggcaaggatggcttatctgagtaccgcaaggatggtgaatatgttctgacttacgaggacaaggatggagattggatgcttgttggcgatgtaccatgggagatgttcgctgactcttgccgcaggctcaggatcatgaaaggatcagatgcaattggacttgctccaagggcagctgataagtccaagaatcgcaactagaatggttgcttcttacagtccagagcaagagggagatatccagtgactgtagggatctttgtggaagccggaaaacgtctaacagtttcaagaagaattctgccttatggtctgtaccacatgtttttgctgctacgcaagtaaagaactccacgtctgtcaatgttagttttacaacatcgtctacggacaaaaaaaaaaccccccgctatttgattgttgctaagccttcgtacgacgtgtaaatggtttggtacaatgagtgctgcgactacgattgagcacccctctacctagtttgcaaaaaaacagtgtcccatggactgtctgttgtccctctatataaatgtccaatgaagcttgctaaaaaaaaaaaaaaaaaaatcatcagcagaatcgcacgctatttgattgttgctaagccttcgtacgacgtgtaaatggtttggtacaatgagtgctgcgactacgattgagcacccctctacctagtttgcaaaaaaacagtgtcccatggactgtctgttgtccctctatataaatgtccaatgaagcttgctaatgtgtgaaaaaaaaaaaaaaaaaaaaaaaaaaaaaaaaaaaatcgaaggaggtcgaatttggaagtggatcttggggttttcccccccccaaccaaaaaaggggaaggcttggggctttgccctgccagcgcgttcatctcccgtttttggggctgcggcccctagtggtttgcaaattgtttgtgattgttgcccctcttgttggggggtctttgggggcaagttttctgctatttggg

SEQ ID NO: 2511 - DNA, 1449 bp, Zea mays
  Clone ID: TF_ZmC1324_1
cattgggtacctcgaggccggccgggccgcagagctcctccctctctctctgtctgctgtgctcagataatagcgacacctcctttcctctccctcgaggtgtctctcccagaacgcacagcacagtcgcagaacaggaaggcagagagcagcgccgcgatgagaggaggaggagcggggcccactgcggcgttcatgtccgacgagccgcctccagccgacgcggaagaggtggaggagaactccggcgccgaggaggaggacgaggagacggtggtggagcaggacgacgacgagctggagctggggctctgcctcggctccaagcaacagcagcagcagcatccgccgccgtgccggatcctcacggcccgggacctgcagccgaggtccctgtcaccggattcctccgtgtcctcttcctcccccgcggcaggtgcaggtaccgcggcgccaagcaagagggccaaggcggatgcggcgcccaactcgccagggacggtcgcgtctggccacccacagagctttggagtggtgggatggccacccataagaactttcaggatgaacagcctatttaaccaggccaaagagaatgcatcggaggctggcgccaagaagcccatcgtcgaacctgacatgcaggaagacaaggaggagagcaagaaaggccggaccgtcggttgggtgaaggtgaacatggaaggagatatcattggaaggaaggtcgatctcaatgcccatcgctcttacaagacccttgcctcagcacttgagctcatgttcatgaagccgtccattggtctttgcacttctagcagttcaaagactctaaagctattagacagctcatcggagtatcagctcacctatgaggacagggacggggactggatgcttgttggagatgttccctgggagatgtttgtaggttcagtgaagaggctcaagatcatgagaacctcagacgccaaaggtctcggtccacgattccaagggtctcacagacccacagcagcttgcacgagaggcaggacgtgaaaccaccgatgtgcgtttggtgctaacaccgctggtgaagcttgaactgtatttgatatcacgtaacagtaacagcagcccatatcgctggcatagttgtgagattacggggctgtttggtttactgtctaaggcgccacaacatggctaacttttatgtctaagtttagttcttcaattcgaacgactaaacttaggcaacttcattgtgtctagtggaaatagtagaagtttttttttttgcttcttccctgtggtgccctcgttgagcttttcttatgggctatacgagcatcatcgcccccagctcttctgtccacgctgtttacctgtgaggaatggtcgcccaaagtgttggtttttatccttgtgtttgatatggcagaagtatctgctctgctgtttcat

SEQ ID NO: 2512 - DNA, 1053 bp, Zea mays
  Clone ID: TF_ZmC347_3
atcacatccatctcattctactactgcctcagagaccaagctgctgcaaccggagaaggagatctattctacaaagtgaagtacttagcttgggacatggaaaccgtcgtgggagacctcatggcgaccgagctgaggcttggcctgccgggcaccgtggacgactgcagccagcaccagcagcagacccagctgaaggtggccgcgccgccgtccaaccctactaggggcaagaagcgccccgccgccgaggaggaggaggcaaacaagcgcgacgcggaggcagcacccccggcggccaagtgagtagctaatagatctgagcaccgaaacgttcagagtgaaccgaacgtgtgtctctcgtacgtacgttacgtggcgcccgtggtcggatggccaccggtgaggtcgtaccggaagctcgacctgaggatgtacaaggggtaccgggagctccgggaggccctggaggccatgttcgtctcctccggcagcgccaacaacaacaacaacctgtcggagttcgccgtcacctaccaggacaaggacggcgacctcatgctcgtcggagacgtgccgttcgagatgttcgctagcacctgcaggaagctgaggatcatgaagagatctgaagccacaggcctgggatcggcgagacaatgaagaaggtctgacgacgaccgagggcccgacaacgttcatgtcgatctcttctttttttttctttttgccccattattttattttgttcttcttgtccgagagaccccaagccaaaaggatgagcttggtgggtggcgcatcaatctacaaagcgcatgcatatacgcggatgtgtgtgcggctttggttctgtaagacgacgactagtagctaggtcttttttagcagcagcacagaagctaaggagatgcatgctgatgacgagcggttgtttcggcttagctctccgtatgctgtgcttgtacaaaccaaacaatacagttatcttcaccgtcgttgatcccttaaaaaaaaaaaaaaaaaaaaaaaaaaaaaaaaaaaaaaaaaaaa

SEQ ID NO: 2513 - DNA, 1384 bp, Zea mays
  unsure (1)..(1384): unsure at all n locations
  Clone ID: TF_ZmC2833_7
ctagttcctggatcgtgttattcggatagataactcaactcaccagggaggaaaacaattcctcccctgcaatttcancactcgcaattacagaagcaacgaccaggctgctgatcgatagatagacaatagactgatagacaagaaagaagagtgatctttggctttgtacaaccacgcatcatggagattcaactcgactctccactccttttgcatgtcttgctaaacacacacacacacacgacccctactaggggcacaagaaaaagaacaaagcgaccacacatcattccacgcatgcacaaagctttcctctctctctctctctctccctccctccttccaagcaagcagcttcatctttctcctcgccatgtctctggtttgctgctagctgctgctccattgttggcacagacaatgctaggggagaaggtacataatactcaacaccacacgcccacacccatgcagggacgccttggagaagaaataagaccccaaaagaacaaaagaatttgctggcgcatgcacgcacgcacagcacaagcatgcgatagacgtttcatcatcagttgttcttgaccgagccgagccctctcgcctcgggccccttcatgatcctcagcctcttgcaggtgctgatgaacatgccgaagggcacgtcgccgacgagcatgaggtcgccgtccttgtcctcgtaggtgacggcgaagtcggaggggttgacggcgggcgcgtcggcggcgccggcgccggagaagcagaggaacatggcctccagcgcctcccgcagctcgcggtagcccttgtacatctttaggtccaccttcctgaggtagggggcgccgtccatgctcaccttcacgaacagcccgccggcggccggggcctcctccgccagcgctgccgccggcttgttcttggccgccgcctgctgctggaagcagctcttcctgtacgacctcaccggcggccatcccaccagctgagccttggcggccggcggcggcgcggcatcggtgtcggtctcgcagtcgcgcttcttgggcgcatcctcgggcccgctgctggcgacgacgtcgcgcttcttgcctctgggcgtcgacggcggcggcggcggcgccttgttctgggactcctcggcctcctcctcctccgtgcccggcaggccaagcctgagctccgtcgccctgaggctgtcaacgtcgtcgtcggccttgaatccgtagcccgctgccgatgctgcggcgacctccattggcgtgtcttcttgcttcttccgcacggcccgcgtgggcaataaaggcggtggttgcagcaaccggcgtcgagaggccgacgagctgcgctgtgctctgtcttggtccttgctgggaag

SEQ ID NO: 2514 - DNA, 1051 bp, Zea mays
  Clone ID: TF_ZmC1117_4
acctcttttccccagtccccacaaagtttctcctcgatcctcatctccctctctcgagtcaagagcagagcagctaccaaacaagctctcctttcgcttccgatccatggagctcgacgccgacaacctgagcgccaccgagctccgcctcggcctgcctgggaccagcagcagcagcagcgacgactggcagaagaagccgtcgccctccgtcggggccaagcgcgctctggacgacggcaccaagagcgaggcctcggggaccagcccggccgccggagacctcgacttcgaccacgaccacgacaccgccgcgcctcccaaggcgcaagtggtcgggtggccgccggtgagggcgtacaggaagaacaccttccaggcggcggcggcggccaagaaggtcgagcagaagcagaagcagcagcagcagggaggcctgtacgtgaaggtgagcatggacggcgcgccgtacctcaggaaggtggacctccggatgtacaaggggtacagggagctcagggaggctctggacgcgctcttcaccaactccctctccgcggcggcagagggcggcggcgaccaccaccagcacgccatcgcctacgaaggcaaggacggcgacctcatgctcgccggagacgccccctttgtgcccttatgttcatctcttcgtgcaagaagctgaggataatgaagggctctgcctctgaggccaggtgatcgctgatccatacataaacagaggctacagacacgccacctgggaacgcggatccaagagcacacacggatcgtacgtgacgaggaaggagggaggagctgtgtggcttgagctctccagtgttgtacaaaggcatgtttctttctgaacccaaaagggagaaagatgtatgaagcgtgtatataaaatcttagctagcagtttgttttcaaactgtgttttgtaaaaaaaaaaaaaaaaaaaaaaaaaaaaaaaaaaaaaaaaaaaaaaaaaaaaaaaaaaaaaaaaaaaaaaaaaaaaaaagaaaaaaaaaaaaaaaaagggccccta

SEQ ID NO: 2515 - DNA, 729 bp, Zea mays
  Clone ID: TF_ZmC37228_1
tttttttttttttttttttttttggttctaatcccacattgtttcttatttttttacgtgggtgcggctgcacccctagaatgaactaatatacatgggcccaggtcacttacaaaagaggagctcaaagttacagataggctagcaagcataagctacagcatatgagctagcgtgcacagtaccaaaaaaattcctaggtagtagcttttcaccgatgctacttggctgaataatctccgatctgacatgcatgcacgtccagtcagccgtccacagcacgtccgcctgactggtggcgggagacacggcgtgacgtgtactacgccgccgtgatccttgaaccatcacctccatgctgccatgctccatctgatcatgtccatggtgtgtatggtcgtatgagccggccgggctggccgtagaacacgacgacgcgcgcatgcatgcattgggcctccgacccctgtgcaggtatataccctacgccgcgcctccaattccagtgaatgacagatataaagacctccctttttctctctgtctctctctccccctctgtcccatgctcgcgtcatgagttggacggaccatagctagctggactggacctccatctccatgcatgcatccaacatgttctttgcatcctcgatgcgtggttatcttgcttcggaccccctcatgatcctcagcttcttgcaggaacagatgaacattcccagggca

SEQ ID NO: 2516 - DNA, 668 bp, Zea mays
  Clone ID: TF_ZmC1167_3
aattcggcacgaggtgcaaagagggggggggggggggggctatagaggagctcttgatacccagctgccaaggatgtagtagcatgctcccattagacttggtccggcaagtttctaactggtggttttgcaggatgttcgtggaaacctgccagcgccttcgtctgatgaaaggttcagaggccgtgaacttgggtacgtacatgtttttcccctaaagcctacctccatgtgtttaaaaacgtctgctttttttcacagccatcgctcttgttcattttcacagcaccaagagccgcccgatgaggcacactccgttgggcgttggcacgcacgcacgcactggcgtcttgaaggaaagggggaactctgctggtcttgatgaggatcttcacgtgagataggaacgtgtgtacagttgtcgccttatggtattgagttgaggaaacttggaagttccattacttgtctgtagtctctactttatatagatgcgaagaagcttgagatacacattgcctacaatgtcttttgatgaataagaccagacagcaccgaaccgaactcgtcctccacacggttgctttgccatctcggtggttttgtggtggtggtggtggtcgtgcttcctataggtgtgaggctgatggcgtggctgccatttatcc

SEQ ID NO: 2517 - DNA, 753 bp, Zea mays
  Clone ID: TF_ZmC1249_4
ctggcagatcgtttataccgacaacgagggtgatatgatgcttgtcggagatgacccgtgggaggagttctgcaacatagtgcgcaagatctacatctacacgaaggaggaggtccagaagatgaactcgaaatcatccgcgccgaggaaggaggaacccccagcagctggcgaaggttgcgccgccgccgccgcaaacgagtaggatgtctgcctgcactgcagcaaagcagttttagatgactaggtcgtgtggaggaagccgacgatgatgcatgcgtgatgaacccgttccttgtgcaggaggtggtgccagcccgggtcccagggaagtaaaaactcctgagatcttttgcttgtccgttgcagccccatccccgtccgtttgggttttagttgggaacgtagaaactactgtctccgtctgccactccgaagctcgctgttggtagcaagttttattgctagtattattgttattgctgatttgctcccctctgcctttgcgatgtaaatatttatgtacccagccccatccccagctccagcctgtagtgagtagtaacaagcagtagcggtaccttcggtattaaaccggcagctagctatttcgcggcattttaatccctgtaagcgtagctctgtggcgtgagatagatgacaaacactgggtatatgtatgtctgatctttctcactgaatgtaccataagagaggtttgtagagtaaaaaaaaaaaaaaaaaaggccccta

SEQ ID NO: 2518 - DNA, 539 bp, Zea mays
  Clone ID: TF_ZmC2833_22
tagacaatagactgatagacaagaaagaagagtgatctttggctttgtacaaccacgcatcatggagattcaactcgactctccactccttttgcatgtcttgctaaacacacacacacacgcacacccctactaggggcacaaaagaaaaagaacaaagcgaccacacatcattccacgcatgcacaaagctttcctctctctctctctccccctccttccaagcaagcagcttcatctttctcctcgccatgtctctggtttgctgctagctgctgctccattgttggcacagacaatgctcggacgcgtggggcataatacttaacaccacacgcccacacccatgcagggaccccttggagaagaaataagaccccaaaagaacaaaagaatttgctggcgcatgcacccacgcacaggacaagcatgcgatagacgcctcatcaatcatcatcagttgttcttggccgagccgagccctctcgcttctgaccccttcatgatcctcagcctcttgcaggtgctgatgaacatgc

SEQ ID NO: 2519 - DNA, 810 bp, Zea mays
  Clone ID: TF_ZmC1237_1
cccacgcgtccgcccacgcgtccgcccacgcgtccgcccacgcgtccgcgaagatcttcggcatgatcttgcgtgcatgttcggtattcaagggcagcttgaagatccctacaggacggactggaagctggtctatgttgaccacgaaaatgacatcctccttgttggcgacgacccatgggaggagtttgtaagctgtgtcaagagcattaaaatattgtcatctgttgaagtacagcaaatgagcttggatggtgacctcggctgcatccctcctcaaactcaagcctgcagtgcttctgatgacgcaaatgcatggagggcatgacgtaaatactaatatgttccttaccatttttaaacaatactgagagtcaggggtcaaagaagtgaaacacacgtctaacataatcacgaggtactgttacttagagccgactcactgacagagtcgatgagaagctcgtggcggaagttgttcagcaagctgccatattttggaggccttgacggctgacgctttgttccactgaaatcgggtaattactcaacacaatcatattagtttccttcttgtgtgtgtaagttgggtgggggtggggggtataatgaatttgagaagctactctgcttattagaacctacattcactgtaatcctcctacaaagttgttcgattatctcagtgtatatatgtgcgctgtagaaccgtgactgtcagttttgcaactcgcaatccccaatgtaattgttcctgtgtgctgctttaacagctgaagtactattataaattgtattatctgtaacaga

SEQ ID NO: 2520 - DNA, 628 bp, Zea mays
  unsure (1)..(628): unsure at all n locations
  Clone ID: TF_21213622
gaaccttcctctgtcctgccctgcccttaccagggatctgaaccttctatcgatgattgatcatcacgtgagctaaagcatatctagcnnnnnttacttgaaaatccaagcccgatgaacttgaannnnnnnnnnnnacagaacgggtaattttacattggtagatccatttgcgaaatttctcttataagtccaattaatgcccatgttgaattacatcaggacattattactctacagcattggtattggtagcctaatttacaaaatatccaggacctcggcatgcatattccaaatgatcagaattttggcgctgtttcaggctttcagcaatctggcggccctcttctcggagctaccgcaatctgaggtggccttgggcctaccaaacctttggcaagctccgagctcctcaaaaccctcagccttttagcagttgacacaaacacattccacggcacgtcccctaccagcatcgtgtctccttcgttgtgttcgtagaccagggtttattcgtcagatccatccaacacttgagagaagtctttccagtagttggagacatatccttttgagcttgaagaaaaccgtggaaaagcttttgacgcccaggatagcctctcgc

SEQ ID NO: 2521 - DNA, 1476 bp, Zea mays
  Clone ID: TF_ZmC1117_3
cattgggaccctcgaggccggccgggacctcttcaatcccagtcccacacaaagtttctcctcgatcctcatcttctcctactcatctcctccccctccctccctccctctctcgagtcaagagcagagcagctaccaaacaagctatcccctttcgcttccgatccatggagctcgacgccgacaacctgagcgccaccgagctccgcctcggcctgcctgggaccagcagcagcagcagcagcgacgactggcagaagaagccgtcgccctccgtcggggccaagcgcgctctggacgacggcaccaagagcgaggcctcagggaccagcacggccgccggagacctcgacttcgaccacgaccacgacaccgccgcgcctcccaaggcgcaagtggtcgggtggccgccggtgagggcgtacaggaagaacaccttccaggcggcggcggcggccaagaaggtcgagcagaagcagaagcagcagcagcagggaggcctgtacgtgaaggtgagcatggacggcgcgccgtacctcaggaaggtggacctccggatgtacaaggggtacagggagctcagggaggctctggacgcgctcttcaccaactccttctccgcggcggcagagggcggcggcgaccaccaccagcacgccatcgcctacgaagacaaggacggcgacctcatgctcgccggagacgtgccctgggatatgttcatctcttcgtgcaagaagctcaggataatgaagggctctgcctctgagtctgaggccaggtgatcgctgatccatacataaacagaggctacagacacgccacctgggaacgcggatccaagagcacacacggatcgtacttgacgaggaaggagggaggagcagtgtggcttgagctctccagtgttgtacaaagacatgtttctttctgaacccaaaagggagaaagatgtatgaagcgtgtatataagatcttagctagcagtttgttttcatttgtatgagctgccgaaggctgtaaaaaatgaaaaagaaaaaagaaaagggaatgagaaattgactagaaaaaaaaaaaagggcggccgccaccgcggtggctgattgtgatttttaatttcaccccctttgcagtatgttcatcttttcgtgcaaaaagctgaggataatgaagggctctgcctttgaggccaggtgatcgctgatccatacataaacaaaggctacagacacgccccctgggaacgcggatccaaaagcacacccggatcgtacgttacaagaaagaagggaggaactgtgtggcttgagctctccagtgttgtacaaaggcatgtttctttttgaacccaaaagggaaaaaaatgtatgaagcgtgtatataaaattttagctagcagtttgttttcaaactgtgttttgtatgagcgatcgaaggctgcaaaaattttaagaaaaaaaatgaagagggattgag

SEQ ID NO: 2522 - DNA, 630 bp, Zea mays
  Clone ID: TF_LIB3637-253-Q6-K6-C11
ggtctctaaaaacaatttaagcccttcctcatgtaatcattttttaaaattcaggtttacaagtcaggatcagtggggagatccttggacatcacccggttctctaattatgctgaacttcgagaggaactgggtcagatgttcggcattaagggtcagttggacgaccctgatagatcaggctggcagcttgtatttgtcgacagggagaacgatgtgcttctccttggagacgacccgtgggagtcatttgtgaatagtgtatggtacatcaagatactttcacctgaggatgtgcataagatgggaaagccaggaaacgatccacgctacctatcttagctacctatcttaaatcgatacatggagctctttctggctcccatgacgattctgcggcacactgtagcactgttcacgacggcctgctctactgtgctcgcatgttcgcccgtgtcatctgtagcatgcaccaccgtgctcgtcttcagaagacgaactccccgtcgcttgtatccggtgcaggtcaccgctcctggactgatattttgtaggttccacgtaggaatcagtatcagcaactctatcctagtttgtggtaggctcgcgcggcgctcgttcctgtgtcgc

SEQ ID NO: 2523 - DNA, 659 bp, Zea mays
  Clone ID: TF_LIB4666-004-Q1-K1-E11
ttaccaagcctttgcgtgaaaaatttggcttctctgatcctaatgtgaactcttccagcttcatcagctctagcagcaacgaaaacatgctggaatcaaacttccttcaggtttacaagtcaggatcagtggggagatccttggacatcacccggttctctaattatgctgaacttcgagaggaactgggtcagatgttcggcattaagggtcagttggacgaccctgatagatcaggctggcagcttgtatttgtcgacagggagaacgatgtgcttctccttggagacgacccgtgggagtcatttgtgaatagtgtatggtacatcaagatactttcacctgaggatgtgcataagatgggaaagccaggaaacgatccacgctacctatcttagctacctatcttaaatcgatacatggagctctttctggctcccatgacgattctgcggcacactgcagcactgttcacgacggcctgctctactgtgctcgcatgttcgcccgtgtcatctctactctctagcatgcacaccgtgctcgtcttcagaagacgaactccccgtcgcttgtatccggtgcaggtcaccgctcctggactgatattttgtaggttccacgtaggaatcagtttcagcaactctatcctagtttgt

SEQ ID NO: 2524 - DNA, 2114 bp, Zea mays
  Clone ID: TF_ZmC784_9
aagaactacaaggacctgtcgactgcgcttgagaagatgttcagtggcttcagtactggcaaggatggcttatctgagtaccgcaaggatggtgaatatgttctgacttacgaggacaaggatggagattggatgcttgttggcgatgtaccatgggagatgttcgctgactcttgccgcaggctcaggatcatgaaaggatcagatgcaattggacttgaaaggagacataattcatggtccctgcatctgtggtggtagctctcttggctccaagggcagctgataagtccaagaatcgcaactagaatggttgcttcttacagtccagagcaagagggagatatccagtgactgtagggatctttgtggaagccggaaaacgtctaacagtttcaagaagaattctgccttatggtctgtaccacatgtttttgctgctacgcaagtaaagaactccacgtctgtcaatgttagttttacaacatcgtctacggacaaaaaaaaaaccccccgctatttgattgttgctaagccttcgtacgacgtgtaaatggtttggtacaatgagtgctgcgactacgattgagcacccctctacctagtttgcaaaaaaacagtgtcccatggactgtctgttgtccctctatataaatgtccaatgaagcttgctaatgtgtggtcaaaaaaaaaaaaaaaaaaaaaaaaaaaaaaaaaaaaaaaaaaaaaaaaaaaaaacaactcataacaggtctatttccatttacttaatgatgatggagagatgaaaacagcaacaacaacaacaacaaagcttttcagtcccaagcaagttgggtaggctagagttgaaacccaacatgaggggagtcacggtttagaaacatcaatagctgctttccaagcactctattcaaacacatagtagtgctacatgacttggactatttagttgcatgtgcatcgctacggtttctatatatcatatatggtttctttgtataacataaatcaacacaagttacaggggttagaggcgatgtctctcttcctagagacccatggttcaaatcccagcaagcacacttttttatattttgctgagcgcgtgggggaaatctagcgacgctcgctacgcgcatggggaggccgacgatgcacgacgaaactcccactttaaaggtgtagtgatttgcatgatagaagaaatggtccaggacatggacattcaagaatcaactggttgccaaccagagcaccatggagacttggcatcctaaaccttgaaagccttgacagcccttgtgcagcggatagccatgtccttgacatgctggatactcattatctttgagttgattgggaccatatcttttgaaagtcaagataaaaggcactaagcagggttagcaatggctccgtccccgtgtcccccacccaccctcaactccacagcgttgctgcgcgaggcgagaggtgcatccaaccaaaaatgctaggctttgttgatagccaggtccagctgctgctccctttcttgagtacaggagtggctagccgcaggtgctggagccaaaagttgaagatcgccgccatagccatcagatgacaaggcccaactctcccgctgggattgaattggcaggatagccatttccgtaccccgactccccttagggcatgtacaatatgtgtcttaagttgtgtcttaaagtgtgtctaaggggtgaatgtaaaaaaactcaagacatgtatcttgacgaagacacaatgtcttagctctatgttggagacaggagactagctgataggtcactttaatttattgaatgctctgattggtagaatgaatatggtaagacacatgttttagacatgaccactgtattatgttgtgttttagttgtgtcttatacttatagtaccgtgcagcagtgtctagattgtacatgcccttatatttcccattcctccacaacaattcccgttcccacccacatatcctaatatgcaaacgccaccaaaagctaatttggtggggtactaggagtaacagctaagcaagacctgggcatttaattaaaaatctaataaaataaaaaatccttaaaagg

SEQ ID NO: 2525 - DNA, 1184 bp, Zea mays
  Clone ID: TF_ZmC347_2
aactcggcccgagcaccagctcatcacatccatctcattctactactgcctcagagaccaagctgctgcaaccggagaaggagatctattctacaaagtgaagtacttagcttgggacatggaaaccgtcgtgggagacctcatggcgaccgagctgaggcttggcctgccgggcaccgtggacgactgcagccagcaccagcagcagacccagctgaaggtggccgcgccgccgtccaaccctactaggggcaagaagcgccccgccgccgaggaggaggaggcaaacaagcgcgacgcggaggcagcacccccggcggccaaggcgcccgtggtcggatggccaccggtgaggtcgtaccggaagagctgcttccagcaggcaaagcagcaggccgtcagcagcagcagcaaggcggccgacaaagaggatgctgcggcgccggcgcccagctgcacggcgtccgcagccgcctcaaacgccaccgccagcgccggggccggctcattcgtcaaggtgagcatggacggcgccccgtacctgcggaagctcgacctgaggatgtacaaggggtaccgggagctccgggaggccctggaggccatgttcgtctcctccggcagcgccaacaacaacaacaacctgtcggagttcgccgtcacctaccaggacaaggacggcgacctcatgctcgtcggagacgtgccgttcgagatgttcgctagcacctgcaggaagctgaggatcatgaagagatctgaagccacaggcctgggatcggcgagacaatgaagaaggtctgacgacgaccgagggcccgacaacgttcatgtcgatctcttctttttttttctttttgccccattattttattttgttcttcttgtccgagagaccccaagccaaaaggatgagcttggtgggtggcgcatcaatctacaaagcgcatgcatatacgcggatgtgtgtgcggctttggttctgtaagacgacgactagtagctaggtcttttttagcagcagcacagaagctaaggagatgcatgctgatgacgagcggttgtttcggcttagctctccgtatgctgtgtttgtacaaaccaaacaatacagttatcttcaccgtcgttgatcccttactaattgcttgtggagatcgaggcgatggtcctcttgagctttc

SEQ ID NO: 2526 - DNA, 1665 bp, Zea mays
  Clone ID: TF_ZmC1405_2
aaattattagccccactgtgctagcaagctggcctctctgcccatgaatacagaatccaaacgaagaaaacatggaacaaaaataattggctccaacctccaactgggctcactcatgctggaactaactgctaagttgcaaccccactcccatttctatctctctcctcctgccatcaccctagaataggagcatttacctccgctttctctctctccctctcttccatcctcatgctccctctatatatacacatctccaccctgttcctgggtccgcctcgaggccggccgggaactgctaagttgcaaccccactcccatttctatctctctcctcctgccatcaccctagaataggagcatttacctccgctttctctctctccctctcttccatcctcatgctccctctatatatacacatctccaccctgttcctgggtcctctcttccacccactgcaaccccaaatctctccttcctcacacacgcgaaggtgagagaccaaagaagaagaagaaggaggagctgctagcgtggaagtgcccaaggcgagagagagacaagctagctaggacggccgcgacaggctagccagccagctgctagctcctgcggacgagccgatggctggcgccgacgtcgacgtcgggacggaactccggctcggcctgccgggaggaggcgccgcggcggccaagaaggacaccatcgacctcaagctgaagctgcctaccgctggcatggaggaggctgctgccgccgccaggccggagccggcagccgagaaggccaagaggcccgccgaggcgccggccgccgatgccgagaagccacctgcacccaaggcacaggccgtgggctggccaccagtccgatcgtaccgcaggaacgccatgaccgtcgtccaggccgtgaggagcaagaaggaagaggaacctgagaagcagcaacagcccgctgctgccaacgccttcgtgaaggtcagcatggacggcgcgccctacctgcgcaaggtggacctgaagacgtacagcagctacaaggacctctccgctgcactcaagaagatgttcggcaccttcaccgcatctgggaacagcatgaacgaggggagattggttgatccggccggcgatgctgatgatgtggtcactacttacgaagacaaggatggtgactggatgctggtcggcgacgtcccgtgggagatgtttgtcgagtcatgcaagcgtctgaggatcatgaagagttctgaagccataggtcttgcaccaagaacgaaggacaagtgcaagaacaagagctgaagaagatgcagtgttaaagatgttgcacattgtatcaaaagaatggtccccttgcagtgcgctgccgttttttttcctactagaaatataacgcgttttaattactactagttggagggagacctgtcttgttcaactcgttcatggaccagaagcaataatctatccgtgtgtagctggattggtgttatgtcatgtcccctaccgtgtctcccagaatctacttggtgattttattccagtgttgttaatcaagtttatgtgattgttaagtaaagggcatcaatgagactattattatttattattaaaaaaaaaaaaaaaaaaaaaaaaaaaaaaaatgtatgtggtc

SEQ ID NO: 2527 - DNA, 1439 bp, Zea mays
  Clone ID: TF_ZmC1098_1
ccgggtcatctcacctccactccaaacaaacaagggacggtgagcgaggaaccccaccccacgtcgccctccccccacctttctctctagtctctagtttctagtctctacccccaggccccagactcctgcctcttctctctctcgcccacccgccccggccccaatgtcgccgcccctcgagccccacgactacatcggcctctccgccgccgccgccgcggcgccgccgacaccgacctcctcctcgtcgtcctcgtcctcgccggcgccccgcctcaccctccgcctcggcctgccgggctccgagtcccccgaccgcgaccgcgaccgggaccgctgcgaggacgtcgccgccgcgctctccctcggcccgctgcctgctacccccaaggcgcccgctgccgtctccgccaagcgcgccttcccggaccccgcccagcgccccggcgctgccaaggctagcgacgacaagcaggcgtcccccgccgccccgccggccgccaaggcgcaggtggtgggatggccgcccgtgcggaactaccggaagaacaccctcgccgcgagcgcctccaggagcaaggcgccggcggcggaggacgccgcgtctgcggcccggcccatgtacgtgaaggtgagcatggatggcgcgccctacctcaggaaggtggacatcaagatgtactccagctacgaggacctctccgtggcgctccagaagatgttcagctgcttcatcgctggtcaaagtggcctgcataaatcatcgagcaaagacaggctgactaatggctcgaaggtggatgccctcaaagaccaggagtatgtacttacatatgaggataaggatgcagactggatgcttgtcggtgatcttccctgggattattttacctctatctgccggaagctcaaaatcatgaggggctctgatgctgttggaatagctccaagaaccatagagcagacaggtcagaacaaataagcttggtctttgcctgcacccacgcaagaaatctgagctagctggaaggccatgttgaaggcttaaatagttgctcggaattatcaaaagtcgtcaaatgttagtgtagtttccacgtgttcttgagacgtgtgtatttgtatgtctgtgatgtgatccgtcagatctgttcttgtgcccttcaaaggccaaatcagggagctctctgcttcctgtgtatgcttgctttttccagtattccctgttattctactatgaaatcatccatcgtgccacaaagaactgatggttcctgatgtcaaaaaagctgtccgaattgtcttctttttacaggagaaattggttctgcccaaaacaccaataatgtggagcaaaaaacccgtcaaatgtttaatgatattttaacgtgtcacttgagacatgtgcattttgtttgtctgtgacgtgatccgtt

SEQ ID NO: 2528 - DNA, 634 bp, Zea mays
  Clone ID: TF_LIB3606-053-Q1-K6-C8
cggacgcgtgggcggacgcgtgggcggacgcgtgggaggaagaggaacctgagaagcagcaacagcccgctgctgccaacgccttcgtgaaggtcagcatggacggcgcgccctacctgcgcaaggtggacctgaagacgtacggcagctacaaggacctctccgctgcactcaagaatatgttcggcaccttcaccgcatctgggaacagcatgaacgaggggagattggttgatccggccggcgatgctgatgatgtggtcactacttacgaagacaaggatggtgactggatgctggtcggcgacgtcccgtgggagatgtttgtcgactcatgcaagcgtctgaggatcatgaagagttctgaagccataggtcttgcaccaagaacgaaggacaagtgcaagaacaagagctgaagaagatgcagtgttaaagatgttgcccattgtatcaaaagaatggtccccttgcagtgcgctgccgttttttttcctactagaaatataacgcgttttaattactactagttggagggagacctgtcttgttcaactcgttcatggaccagaagcaataatctatccgtgtgtagctggattggtgttatgtcatgtcccctaccgtgtctccc

SEQ ID NO: 2529 - DNA, 534 bp, Zea mays
  Clone ID: TF_LIB3597-014-Q1-N6-H10
aacaccaatccagctacacacggatatattattgcttctggtccatgaacgagttgaacaagacaggtctccctccaactagtaattaaaacgcgttatatttctagtaggaaaaaaaaaaacggcagcgcactgcaaggggaccattcttctgatacaatgggcaacatctttaacactgcatcttcttcagctcttgttcttgcacttatccttcgttcttggtgcaagacctatggcttcagaactcttcatgatcctcagacgcttgcatgagtcgacaaacatctcccacgggacgtcgccgaccagcatccagtcaccatccttgtcttcgtaagtagtgaccacatcatcagcatcgccggccggatcaaccaatctcccctcgttcatgctgttccctggtaagacggatcatggacgcacagcttctgtgggttcagctcaactcaatgcattcgccgaatttgtaaaggcgtggcgatcggtatcagttcggttcacaagcttgtatgctgcagattcctatgc

SEQ ID NO: 2530 - DNA, 838 bp, Zea mays
  Clone ID: TF_ZmC1336_1
caagcagaccgctggcgcctccagcgccgtcgccggaaacggcggcacaccacccggaagcacgacgacagccacgcacaccggcggcggcgagacgaacggggcggcggcggcggcgctggcggcacggccagcgctggcggccagcagcatgttcgccaaggtgcacatggagggctacgcgatcggcaggaaggtcaacctcagggcccaggacggctacgactccctctcaaggacgctcaccaatatggcaaccaacttcttctgccccgcagactgttcaggcgcggcagaaaaagacgctccaaagagtgacaagttcatattcctgtacgaagacttcgagggcgaccgaatgttggttggtgacgtcccatgggaattgttccttgcgtctgctaaaggattgtacatcgtccgaaaacccagcatcaggcgacaaaggtcggggtgaaggtgacagaaactataaagccgaagaaccaacgaccaacggctgatgatgcaggcactctcttcaagcaagtgtggtcgcaaggacaggagcatataaatatatatgcactacatgctaggacatcttcttggttttggcatatatatagctccgaattacattttcttctgctggtactatatatttaatagtaaggtagttagtagagctatgtgagttatgttgtactgttggtgtttcctgatatcaatgtgcatatagttttgatcgctttgtaatggggggaaaaatctacaaaaggccggaagaaacatgctcacattggtctcaacaagtcaacggtgataaataaggcagatatattatgacttgttaacc

SEQ ID NO: 2531 - DNA, 1079 bp, Zea mays
  Clone ID: TF_ZmC8950_1
cccatgtctaactttaatcagcagcagcagatgttcaaagctgcggctcctgagactgatattcagggtgcagatcccagtaataacacactctttggaataaacggtgatggtcagctgggctttcccatgggagcagatgatttcttatcaaatggaattgatgcttccaagtatcagggtcatatttcaacagatattgatggtaactacaggatcccaaaggatggccagcaagaaatatcgtcatccatggtttcacagtcgtttggtgcatcagatatggcattcaattcaattgactctggtatgaatgatggtggtttcgtgaacagaacctcttggcctcctgctcctcccttaaagaggatgaggacatttaccaaggtgtacaaacgtggagctgtaggtcggtccattgacattagtcagttcagtggatacgatgagttgaagcatgctctggctcgcatgtttagtatggaggggcaacttgaggaacggcagagaataggctggaaacttgtctacaaggatcatgaggatgacatcctacttcttggtgatgacccttgggaggaatttgtcaactgtgtgaagtgcattaggatcctgtcgcctcaggaagtgcagcagattagcttggatggggatctggggaacaacattctccccaaccaggcctgcagcagctccgacggcggcaatgcctggagagctcgctgcgatcagaactccggtaacccatctactggttcatatgaccagtttgaatgacctaacttgccggtccatacatgccggatcacaagtaggcgtctcgtgaggggatggcaggtgcagaatgtttgtagatgtgtcgccagatttacgtccgggagagcgaatcgctcgatggattggtagtgtttttgttcatatgtgtaggttttctcacatggaaggaatgtagtatagaggatgggagatgaagattaccgtaggtgaaagatgatgttgtaccatgaggggggaaaacatgcttgtagtagtaaagactgctgcttcagtccacgtatctaaaaagttcttctctgacc

SEQ ID NO: 2532 - DNA, 1523 bp, Zea mays
  Clone ID: TF_UC-ZMFLMO17210E05_FLI
tacagctagcatagcaaggaccacgacgtgccgacggcagagaagcgcaactcaactcgtcgggcttcctttgtcccgttctttgaggcgcaaaggaaaaccaagcaagagggagaaggctacctaacctagctagctaaggacgagcaatggaggtggccgcagcagcgagctacagctactacggcttggaggcggccgacgacgacgtcgacaacctcagggccacggagctcaggctcggccttccgggcacggaggaggcggcggcggcggcggcggaggcggaggaggaggagccccggcaggcccagaaggtggcggcgccgccgtccacgcccaggggcaagaagcgcgacggcgtcagcggcgtgaccgaccccgcgccgccggccgccaaggctcaggtggtggggtggccgccggtgaggtcgtacaggaagagctgcttcctgcagcaggcggcggcggcggcgggtgccaagggcaagccagcggcggcggcgccggcgctggcgaagggtgctccgggtccggcgggcggcggggtgttcgtgaaggtgagcatggacggcgcgccctacctgaggaaggtggacctcggcacgtgcgggggctaccgccagctgcgggaggcgctggaggccatgttcctctgcttctccgggccgggctcgggcgacgcgtccggcggcggcggcggcggcagcccctccgacttcgccgtcacctacgaggacaaggacggcgacctcatgctcgtcggcgacgtgcccttcggcatgttcatcggcacctgcaagcggctgagaatcatgaaggggtctgaggccagactaggcctcgggtcagccaagaacaacgactgagggagagggagacgacgaccattgtgcaggcccgaccgagatccacgcacacggcggcgcggcgcggcgcggcttgtgcacgcgtaagcgggggattgttgtgcgtccactccgaggcatggggtagtatgggcttgtgttgtaccatccccacctcgtctgccatcaatggagcagcaagatagaaaagctgcttggaacaggagaagatgaagctgcttgcttggattggaacgagggggcggagatggagagagatagaaaagctttagagggtgtttggtttctacatactaatttttagtccctacattttattccactttagttacaaaattatcaaatatagaaactaaaactctattttagtttctatatttatcaatttatatactaaaatggaacaaaatgaaggaactaaacattagtccctagaaaccaaacacctccttaatttgtgcatccaaccaagtggagtggagtggaatgatgtgtggtcgctttgttcttttgtttttttaattattttgtggtactactagtaggaggggtgttagcaacacaaaaggagtggagtggagttgagagtggaattgaatctccatgcacgcgtgtctgtacaaaagctaaagatcactcttctttccctgtctt

SEQ ID NO: 2533 - DNA, 1631 bp, Zea mays
  unsure (1)..(1631): unsure at all n locations
  Clone ID: TF_ZmC2734_2
ctgtgagcacaatccaagcacagggtcatgtctgagttcctcaagcaggagatccaacgcagccagtcattcaatgagcagaagccccagatgcaacaccagncaagaatcacagncagcagcagcaaccacagtgtctgccagtcccccaacatcagcaaatgcaacaacagaatatgaccaactaccagtctatatctaatgcattatcaccgttttctcagctgtcgccagtttctcagtcttcacctatggcgctgcagactatattaccgttctcgcaggcacagagcttcacagacacgaatgtaggttcattgtctccatccaatggtaacaccatgcaaaacacactgaggccgttctcatcagaagcagtttctcacctcagtatgccgaggcccactgcgatacctgtcgcagacccatggtcgtcgaagcgtgtcgcggtggagtctctgcttccttctcggcctcaggtttcatcccagatggaacaattggaccctgcaccagctagtatacctcatagctctgcgttggcaccacttcccggaagagggtgcttggttgaccaagatgtgaactctgatcctcaaaatcatctcttgttcggtgttagtatagactcgcagtcactgctaatgcaagggggcattcctggtctccaaaacgggaatgattcagctgctataccttattccacttccaatttcctcagcccttctcagaatgactttcctctggaccatacactaaattcttcaggctgcttagatgattctgggtacgtcccgccatgttcagataattctgacaaagtgaaccgaccaccagcgaccttcgtgaaggtttacaaatctggaacctacgggaggtcgcttgatatcactaggtttagcagctatcacgagctccgtagggaactggggcgcctatttggccttgagggccagttggaagacccattgagatcaggctggcagcttgtattcgtcgaccgtgaggaggacgtccttctcgtgggcgacgacccttggcaggaattcgtgagcacggtgtcctgcataaagatcctctccccgcaggaggtgcagcagatggggaagcagggcctggagctcctgagctcggcccccgcgcggaggctcggtagcagctgtgacgactacgtcagcaggcaggagtcgagaagcctgagcaccgggatcgcgtccgtcggttcggtcgagttgggatgagcagcaagatagcgcgcacgcagcagcagcagcagcaggttacgcatcctcagcctcagggtaggtaggggactgaagggttggtctgcgacttgatgacccacgagctcctcgttgcgcgcttcgttcgcctccatgcgatggatagaagttcagcgcagaccaagccttagctctgcgagctatgtaccatctaataattctgtccgtgtcgtaccatgtcaactcctaagtagaagaattgaagaaactaccagcagccgctgtctggtatacacgctgaaacattttttttcttgtttggagaaatactaatcatctggatgtcaacaaaaaaaaaaaaaaaaaaaaaaaaaaaaaaaaaaaaaaaaaaaaaaaaaaaaaaaaaaa

SEQ ID NO: 2534 - DNA, 622 bp, Zea mays
  Clone ID: TF_ZmC3003_4
gtgccgcgcctgcaagtaccggttcggcctacgcgtgccgacctatgcgatcagagcgccaaccatttcatatattgttgaaagctcgcgtgttagctcctatcgtgtgtttattaggagatcactattatcatttcttacagctaaagagcttccctgttaggacaggtttggtcgccaatgaaagcactactccacctcttttacactttccaactattctggtcaatatcatgccaattaaagcccagcaaaataaaggagcaaggcatagattcatcgcataataatattgcataattgctttgcggccggacctatataatatcttgtgtagtcctatgatcctatcctcttcagtttatacacttctgctttgaatgggcttcaggttcataagcaaggagttgcgcttggtcgatctgtggatctctctagattcactgactatggtgaatcttagcatagaactcgaccttctattattttggatgtttggtttgcatgggataatctggtatgggatatatttatgaacattgatatcggttttatgcttactaacagaatgcatatggtctgaaaatggataaaatacccgctcttagatggcatatgcttt

SEQ ID NO: 2535 - DNA, 1379 bp, Zea mays
  Clone ID: TF_ZmC1405_5
tcgaggctcgtccgggcggaaccaagtggtttctgaataatagtgatggtaatgatacacgcggcctttatttaccaaatcacaatgccattatacacattactagcagaacgctgagctagctggccgcaaacaagaatatatataaaaacgcatgatctggctggctatcgatctcgaactctcgatggatcctattttcacatgatcgtaactaaaaactccgagttgcatgcatgtcagggcacaggccgtgggctggccaccagtccggtcgtaccgcaggaacgccatgaccgtcgtccaggccgtgaggagcaagaaggaagaggaacctgagaagcagcaacagcccgctgccgccaacgccttcgtgaaggtcagcatggacggcgcgccctacctgcgcaaggtggacctgaagacgtacggcagctacaaggacctctccgctgcactcaagaatatgttcggcaccttcgtcaccgcaactggtaaatctcaccccggcccgttggcataggaatctgcagcatacaatttttgtgaaccgaactgataccgatcgccacgcctttacaaattcggcgaatgcattgagttgagctgaacccacagaagctgtgcgtccatgatccgtcttaccagggaacagcatgaacgaggggagattggttgatccggccggcgatgctgatgatgtggtcactacttacgaagacaaggatggtgactggatgctggtcggcgacgtcccgtgggagtatgttctccgttctagcgtgccatcgtctgctttcgtatttactgacccatgattaggactccagtgtcttgtatgtcgccttgctgattttctggtccctgcaggatgtttgtcgactcatgcaagcgtctgaggatcatgaagagttctgaagccataggtcttggttagtgtctccagataaaattaccttccagagttccattgtaagatttttaatgcgtcaactctaaccgcctaagtttttcttcattgcaaaaaaaaaaaaatacagcaccaagaacgaaggataagtgcaagaacaagagctgaagaagatgcagtgttaaagatgttgcccattgtatcagaagaatggtccccttgcagtgcgctgccgttttttttttcctactagaaatataacgcgttttaattactagttggagggagacctgtcttgttcaactcgttcatggaccagaagcaataatatatccgtgtgtagctggattggtgttatgtcatgtcccctaccgtgtctcccagaatctacttggtgattttattccagtgttgttaatcaagtttatgtgattgttaagtaaagggcatcaatgggactattattatt

SEQ ID NO: 2536 - DNA, 1270 bp, Zea mays
  Clone ID: TF_ZmC1426_1
cggccgcgtgggctcacgggtagctcatggtcgagcgtagcatgcaggaacttatttgccgtgcgctcccaggtctccgctcgcgtgccttccagtctgtctcacactagctgctgtgggacgatcgaagtgggtgtgtcagctagctagctgcgccgtgaccacgcacatgaccgcagtgcgcgcggggctgatcaagggaaagtgatcggatggagctggagctcgggctcgcgccgccgaacccgcatcagccgctggctgccgccgccgagttcgtcggtctcctcagcagctcggctggctcgtgcgggaacaagagggttctcggcgacgcgttcggggccgccaaggcggccacgcttccgctcttcgtctgcgaggatggcgacggaggcggcggcgaccgcgaccgcgacggcgtcgtcgaccatgaacagcaaagcaacaaggaagaagaggctggtggggtggccgccggtgaagtgcgcgcgtaggcgtagctgcggcggcgggtacgtgaaggtgaagctggaaggggtgcccatcgggcggaaggtggacgtgtccatccacggctcgtaccaggagctgctccgcacgctcgagcgcatgttcccttcgggtaaccaacaagatcatgcagaagacgaggtggtggtctcgcacgagcgccgccgtcgccatccttatgtagtcacctacgaggacggcgaaggggactggttgctcgtcggagatgatgtgccgtgggaggtctttgtcaagtcagtgaagcggctcaagatacttgcgtagccgacggtcggcgcctcagagacgtcgtgtggtccgtctcaccaggatcggagcagtgtagtactcctgggcgtcatctgcgtaataacgttgtttctgtcctgtgtgcccgtagcagtacgtactgtcctatagtaagctagctttatggggtgcttcagctttcagagcatgacgaaagcactggttagctgctgtgatcacatttggttcgtctttgtgtcgtacggtatcgctggcgtcagtgtcgcggcagcctaggtgatctaagcatacttactatctcaagttacttttggttcccttagcttgcatggtaattcatataccgtatacgtgtgtgactagtatttgggtttgacttttcactctgtataagatatatattatacgagcgagtttatcgactgctaaaaaaaaaaaaaaaaaaaaaaaaaaactcgggactagttctctctctctctcctcgtgc

SEQ ID NO: 2537 - DNA, 858 bp, Zea mays
  Clone ID: TF_ZmC37547_2
cgtgctactttcatgaagtcacagaacggctcgtcgccagtacgcttgacagcgccagcagcatcacggtaacaaaggtggctcattacctctgccctctcgattccaaacatgtcggccaactgaccgtacagctcttcgtacgagccaaagacggacaggtcgatggtgcgaccgacatcctccgactccacaaataccttgcagtgcccggcttcaaattcgaacccgagcctagaagcctcgcggcctcgggacgaggaaccgatgcagatcgacgagccggagccatcggatacgtttcccgttttctgaacactgccatcggaactgttcccagtggcctcaggggagagtgtttcccttgaccctctagagctcatctgctgctcggtaaggataggctttccgaacagcattagatgtggtttcttcctgtcgtcagatctctctgcggcccgtggcgtgccgatcgtcagcacgcaagagacgctctcgtcgaccggtgcactgccgatcacaaagcccctggatatagggcatggtggagtgatagcgtcaagccgccgcttaaaaccgccgccttggaacagaccgaggtgcagcttgttaagctggcggtctgttagtggtagaccgaactgagcatgcctggctccctgtatgcctgcaggagcgatgtccgagaaacagcgaagagcaccgccgccgttgctcggaccgagtgggttgccgtggaaaatcggattcaacagctggccgtcgaacgggaagtccggatggtggggcacccgcagcttcttcctaggtgagaaaaggtcccaggggatcggtgaatcccggaaaacccgagggtac

SEQ ID NO: 2538 - DNA, 571 bp, Zea mays
  Clone ID: TF_LIB4185-022-R1-L1-G9
tgaattcggcacgagggtgacgcctatacggcgcccccgtgaggcaacgatcccggcttctgttgtgagctgatgatgcccaaccgcaagaactgttttcactagggctgcagcctgaaagtgagggcggccatgcaggatgcagctgccgatgaggcgccctgctgttcggcatctgtgagagacgtcacaaatacttccatgaacattatcaccggcgtcgtcacacgtttctttgtgaaattgagtctggactgtgccacgtacttgaggaaagcagacctgatgatgtaccactgctacaattagctcaattaggcccttgatgtgatggtgaactccgttatcacctcctacatgctgacaaaattcgccgccttctacgaagatccgaacggagatctcatgctcgtcggatacgatcaggtcgacatgttcgctagcacctatgcgaaggttgagatcatgatgagatctgagagcacacgtgtggtgtcgtacaccgcgaggtatcaatgactatcccatgtgatcgttatgacctccatgcgtggtaacgtagatcaacatg

SEQ ID NO: 2539 - DNA, 1087 bp, Zea mays
  Clone ID: TF_ZmC12865_2
ccggccggctctccaaacgaacgaacaaaaagaaagaactcccctcggccctctgcccctctcctccttgtgcttctgcttccccaccgagtctcctcaaccccaggcactcgccctctgtcccctcgcctcggcccgcgactccgatgccgccgccgccgctcctcgagccgcgcgactacctcggcgccggtgccacctcgtcgtgctgctcgtcgtcctgctcctccggccgcgagggcgcggggccccacctcgcgctgcggctcgggcttccggggtccgacgactcccccggccgcggcgcggacacggagcacgcccgcgcccacgtcgacgccgcgctcaccctcggccccggccccggccccgcgcctcccaggggcagcgccaagcgcgggttcgccgactccctcgaccggtccgcgaagctggacggcgttgccgcggatgacgctgctgggggcgtcacgcgggtagctggagctgctgccggagctccgcccgctgccaaggcacaagttgttggatggccgcctgttaggagctaccggaagaataccctagctgccagtgccacaaagacaaatgggggagatgaaggtaggagtgaggcgggatgctgttatgtcaaggtcagcatggatggagccccatacctaaggaaggtggacctcaagacctattcaagctatgaggatctctcgcttggtctggagaaaatgttcagttgcttcatcactggtcaaaacagttcatgcaagacttcaagaagggataggcttactgatggttctagggttgatgcccttcaggaccaagaatatgtccttacttacgaagataaagatgctgactggatgctcgttggtgatctgccctgggagtgagtcctaacttagtgtggtttgcaatatctatccaaatgataatgttccttctcggtttgtcccttccctagaccactcgtgttggagcatccggcaccgggtctgacctatagtgttccttttctgtttatatgcaaatgatagtgttctttttctcgaaaccaatggaaatcgatatgattttgatgcagcagtct

SEQ ID NO: 2540 - DNA, 1334 bp, Zea mays
  Clone ID: TF_ZmC11045_1
tgggaacaatgaggattcatctgttgcactcacacgtggtgattttgctggagagctacaagttcagcaggttgaacaagatgaactacttccaccaccgaagttagagtcatcaaagtcacctgatggagggaagtccgtcagttcgttcccaaaccaagggtgtttcccacagttctttgagggtctggattggatgatcccgccttcctgctaccaagactccaatggcatccattcagttaccgcatcggatagcatctttaatccgtctgaaggtatacctccttccacaatgaacgcggacggcatggacgcgttccaaacatcttgcctttccgagtgctttcctaattccatccaagaattcatcagcagtccagatataaacacactgacatttatgtcgcctgagatgcaacatctggatgcccaacacgacggcagcaacttgcagagcacgtccaactcctatgtgcagatgagcttctcggaggagagccagagtgcatccttaagtggcctacacatggaagctgtccatatcaacagctcctgccttcaaccactggcgacagggagctttgatgcagggacgttctcaaaactatcaaacataaaagaatgccaggccttgcctctgcaggagattcacagcagctccatgggaacaccttcgtgcagtatggatgcggcggcggtcgagtactgtatggatcgaagtgtgaagccactgaaaccaccggtccggacatatacaaaggttcaaaagttaggatcagttggaagatctatcgacgttacacgatttagagactaccatgagttgaggtcagccattgcctgcatgtttggactacaggggaaactggaacaccctggcagttcagactggaagcttgtttatgtcgactacgagaacgatgttctcctcgttggagacgacccatgggaggagttcatcaactgtgtgagatgcattcggatcctggcgccttcggaagtacagcagatgagcgagaatggtgtgcatgtcttgaacgactgcatgcaaatggcttagaaaatcagggttatattgccctgcgcagcctgcacagtgtaacgtcgcaaatacgagaaatgagtgttcttcgtagccacgcagcggctcttcttgtaaataaaagatacatcacgtgcatcccattctctgaatgctttgattcttttctagcacgagaagagaccattattatatggcggtgcattacaggtttattttctatttttttcatgcaatgacttgaattatgagcttacgaggaagagggtgataatgtatcaaattatcc

SEQ ID NO: 2541 - DNA, 1390 bp, Zea mays
  Clone ID: TF_ZmC9890_1
tgtccggggagatcggcgagattgagcccacaagtcgcgctccccgctcccccagccgcgtcccgctccccccgcagcgtcggctcccatccatggctgcgcgacgcgagatcggctcccctttccttgtgcgaagcgagatcgagcccacaaatcacgggacggcatggcagccttgccccgctcccccaacagcgcccgcctgcccctttccttgcgtgacttgagatggattggcgaatccatggatccgcgaatcgccggtctgccaaatccgccgcgaatcccgcccgcggaggcttccttctatggcgacgaatcccgcgctccatcctcgaatcaccggcccttcatcacggtgactcctgctaaagggagtggatctgcgcggagcatcttcttatccccgcccacgaccgccatccattgcatccgaatcccaagctttctcctctccgtgcaggtgcagcagccagcgcgcgcgtctctacaggaaacagagagcatccgagtcccaaagctcgcagctttgccagcaaagcaagaagacagttgcggcatggagctggagcttgggctggcgccgccgagcgcgcgccgtcccacccccatgacgatcgaccagcagcagcagcagcagcaacgccacctcgccgaggacgagctgagcagcacctcgtcggaccatcacccttgcgctgcgcgctccgggaagagaggattcgcggaagcgttccaggaggcggcggcgacgacgacgacgctgccgctcttcgacgacggctcgtcgtgcggcgggagaagcggcggcggaaagaggccgctggtcgggtggccgcccttgagctccgcgcgcagcagggcgtgcggcggcggcgccgccaagtacgtgaaggtgaagaaggaaggcgacgccatcggcaggaaagtggacctgtcgctccacgcctcctacgacgagctcctcgccacgctcgcccgcatgttcccgaccaacaacggcagccaagacgacaaggaaatcagcagcaagtccaccgccgccgccaccaccaccaccagccatagggacgtggtggtcacctacgaggacggagagggggactggatgctgctcggagatgtgccgtgggatgattttgcaaggtccgtcaaacggctcaagctactgggatgattggagtactgatactacatgttcttaattggagtataagcttcttttttgctgatgttttttaagagcacttggtgttaagaatcaaggcaatagtttggtggtgtacctgggccgggttacctcttgtgacaatacttatacgaacaggttttctggtctatacttggagatttccaaacaaaaaaataaaaaaaaaaaaaataacaaggc

SEQ ID NO: 2542 - DNA, 632 bp, Zea mays
  Clone ID: TF_ZmC2833_18
aactcaactcaccagggaggaaaacaattcctcccctgcaatttcaacaatcgcaattacagaagcaacgaccaggctgctgatcgatagatagacaatagactgatagacaagaaagaagagtgatctttggctttgtacaaccacgcatcatggagattcaactcgactctccactccttttgcatgtcttgctaaacacacacgcacacacacccctactaggggcacaaaagaaaaagaacaaagcgaccacacatcattccacgcatgcacaaagctttcctctctctctctctctctccctccttccaagcaagcagcttcatatttcgcctcgccatgtctctggtttgctgctagctgctgctccattgttggcagacaatgctaggggagaaggtacataatactcaacaccacacgcccacacccatgcagggacgccttggagaagaaataagaccccaaaagaacaaaagaatttgctggcgcatgcacgcacgcacagcacaagcatgcgatagacgcctcatcatcagttgttcttggccgagccgagccctctcgcttcagaccctttcatgatcctcagcctcttgcaggtgctgatgaacatgccgaagggcacg

SEQ ID NO: 2543 - DNA, 943 bp, Zea mays
  Clone ID: TF_ZmC1098_2
gcgctccactccaaacaaggggaaggcgagcgacagacaaacccaccccatcgcccctcctctgtctcctctcttgcccacccgccccaatgtcgccgcccctcgagccccacgactacatcggcctctccgcctccaggagcaaggcgccggcggaggaggccgcgtccggagctgggcccatgtacgtgaaggtgagcatggatggcgcgccctacctcaggaaggtggacatcaagatgtactccagctacgaggacctctccctggcgctcgagaagatgttcagctgcttcatcgctggtcaaagtggtctgcataaatcatcgagcaaagacaggctgactaatggctcaaaggtggatgccctcaaagaccaggagtatgtccttacatatgaggataaggatgcagactggatgcttgtcggtgatcttccctgggattattttacctctatctgccggaagctcaaaatcatgaggggctctgatgctgttggaatagctccacgaaccgtcgagcagacaggtcagaacaaataagctttggcctttgcctgcatccaaggaagacatctgagctagctgggagagtatgttgaaggctgaagcctgaaatagttgccgggaatcgtcaaaacccgtcaagtgtttagtgtagttttcacgtgtccttgagacatgtgcatttgtatgtttgtgacgtgatccgttagatcgtgcaatcgtaggttgctgttcttgtgccctttaaaggccagacagatcagggagctctctgcttccttagtgcacttgctttgcagcattccttgttattctactctgaaatcatacatcatgccacaagaaccgatggttcgtgatgtcaagagagctgccctaattgttccattgtaacctcgtaattgtgttcttccgcaggagaaattggttctgca

SEQ ID NO: 2544 - DNA, 1215 bp, Zea mays
  Clone ID: TF_ZmC1098_4
tcgaggggccggccggaaaaaaaaataaaaaaaaaaaaaaaaaaatcgtcgctccccacctcaccatctccactccaaacaaggggaaggcgagcgacagacaaacccaccccatcgtccctcctcttcctcctcctcgccggccccccgcctcactcttcgcctcggcctgccgggctccgagtcccccgaccgcgaccgggactgctgcgaggacgtcgccgccacgctctccctcggcccgctgccggcggcagccgccgtctccgccaagcgcgccttcccggaccccgcccagcgccccggcgcttccaaggctagcgacgccaagcagcaggcttcccccgccgcgccgccggccgccaaagcgcaggtggttggatggccgcccgtgcgcaactaccggaagaataccctcgccgccgcgaccgcctccaggagcaaggcgccggcggaggaggccgcgtccggagctgggcccatgtacgtgaaggtgagcatggatggcgcgccctacctcaggaaggtggacatcaagatgtactccagctacgaggacctctccctggcgctcgagaagatgttcagctgcttcatcgctggtcaaagtggtctgcataaatcatcgagcaaagacaggctgactaatggctcaaaggtggatgccctcaaagatcaggagtatgtccttacatatgaggataaggatgcagactggatgcttgtcggtgatcttccctgggattattttacctctatctgccggaagctcaaaatcatgaggggctctgatgctgttggaatagctccacgaaccgtcgagcagccaggtcagaacaaataagctttggcctttgcctgcatccaaggaagacatttgagctagctgggagactatgttgaaggctgaagcctgaaatagttgccgggaatcgtcaaaacccgtcaagtgtttagtgtagttttcacgtgtccttgagacatgtgcatttgtatgtctgtgacgtgatccgttagatcgtgcaatcgtaggttgctgttcttgtgccctttgaaggccagccccccccccccgctctttgcttccttagtgcacttgctttgcagcattccttgttattttactctgaaatcatacatcatgccccaagaaccgatggttcgtgatgtcaaaaaaaaaaaaaaaaaaaaaaaaaaaaaaaaaaaaaaaaacac

SEQ ID NO: 2545 - DNA, 385 bp, Zea mays
  Clone ID: TF_LIB3236-105-P1-N1-E7
ggactgcgtatactcctgacttgattaccaaatatccatggtatttacaaggcattcaaagaaacatggaatggaaacataaaataccaaaatttaattttgcaggggtggtaacaaggctggcgtttcttcagtacactgcacacggctagtatagcctcagcatcacgactccactctttagttcagcataatctttcctaatgaacctaatatatattaaaagaagaagaaacagagtttatccaccgcatgaaaaagattgctatctagcatctgtctgtttttcgaatcctcagctttttttacactttcgagaaaaagcttccacggtacatccccaaccatgattcagtctccatcatgggcttcataggtgagaaca

SEQ ID NO: 2546 - DNA, 292 bp, Zea mays
  Clone ID: TF_LIB3159-016-Q1-K1-H5
taccaggacacggacggtggcctcatactcatctgagacttaccgattgagatgttctttagcacctgcaggaagctgacgatcatgaagagatctgaaaccacaagcctgcgatcggcgagacaattaacaatgtgtgacgacgaccgagggcccgacaacgttcatgtcgagctcttctttttttttatttgagccccagtattttatttggttcttcttgtgcgaaagaccaccagccaaaagggtgagctttgggggtggtgcataatctacaaagcgcatgcatata

SEQ ID NO: 2547 - DNA, 1796 bp, Zea mays
  Clone ID: TF_ZmC12865_1
ccccaaaaaatagagggaaaggaggaaggagggggagatttttttttacaagcccacagtgagaccccccccaaaaggagggccccccacccctcccaaactaggggacccccccttggttgaaaaaaatgtcaggttttttaccggggcaaaaaagttttgaaaattttcaaaagaaaagggcctacaaggtttaaagggtatacccccccagggcccaaaaaatttgcccctcttacaaaaaaaaaaaccccacggaaaacccttttgggaaatcccccgggaacttgttaggccggccgggattgccatccacggaccatggtgtgccctctacttatcctcctctcggctacctccaccacgcctccgcccgctcgaacggaaaactcccctcggccctctcctcttgtgcttctgcttccccaccgagtctcctcaaccccaggcactcgccctctgtcggtctgtcccctcccttcctcgcctccgatgccgccgccgccgccgctcctcgagccgcgcgactacctcggcgccggcgccacctcgtcgtgctgctcgtcgtcctgctcctccggccgcgagggcgcggggccccacctcgcgctgcggctcgggcttccggggtccgacgactcccccggccgcagcgcggacgcggagcacgccggcgcccacgtcgacgccgcgctcaccctcggccccggccccgcccccgcgcctcccaggggcagcgccaagcgcgggttcgccgactccctcgaccggtccgcgaagcgggacggcgttgccgcggatgacgctgctgggggcgtcacgcgggtagctggagctgctgccggagctccgcccgctgccaaagaccttttcatgatagcttttagtgccatggacagggcacaagttgttggatggccgcctgttaggagctaccggaagaataccctagctgccagtgccacaaagacaaatgggggagatgaaggtaggagtgaggcgggatgctgttatgtcaaggtcagcatggatggagccccatacctaaggaaggtggacctcaagacctattcgagctatgaggacctctcgcttgctctggagaaaatgttcacctgcttcatcactggtcaaagcggttcgtgcaagacttcaagaagggagaggctcactgatggttctagggctgatgcccttcaggaccaagaatatgtccttacttacgaagataaagatgctgactggatgctcgttggtgatctcccctgggacttgttcaccacaatttgtgggaaacttagaatcatgagaggctctgatgctgctggcatggctccaagatcaccggagcagatagttgggaccagaataaggaacgttgcccggcatgcagagtcgtgaactgaaaggaaaggacagagtttacatggcgctgaagggagcggtgtttttacgtgaagtgctccggttaagtctctctcttcttttttttttgtaacccccacatgtgcaatgagatgtgtgtgcctactgtaagacaccccattttgcccacgaggttgtcacgtgttattgtagatggtcgcctttgtgttatgaacgatcaaactcggcagtagcctgcttgctgcttcctctatgatactttcctccgtatttggaagctcgtacttcatatggtagaagtaagaaaaaaaatgcccatgttgcccattaaaaaaaaaaaaaaggtttctttccccgtgctgtgtctgcgagtcaaactaacttttgagcgatatgagcatgcattggcc

SEQ ID NO: 2548 - DNA, 1959 bp, Zea mays
  unsure (1)..(1959): unsure at all n locations
  Clone ID: TF_ZmC784_8
gtaatcttttttttcttctctccctcgcagaagtcgagaaaaccaacccggtttagcatggcatcggtacggtagctcgctgcgttgattctgctgtttacgtgtgcctgagacaccagtacacggggggaatcatttttcttctgttgtgtttggggagggcggcctcgctggtgtgggggcgatccggctcctgggcggnggcgcggggccccccggcttgctgtccctcctggggacgcgaaggggtgagctgtgagcagcactgcgtgctctggaccttcgcaaattctctactttcgaaaatgcgctctttcaatttatctttcagaatccttgctttgtttttcactttttcttgcttgctcaagctcttctcatcttcttctctgctctccctgctttgtttttgttgtattttgtacaaaacattttgatccgtcattatcttgctcaaattctgtaactttcatcccaaagttcgccagaattcgtttcttttttattttgttaccagtagagcatctcctgatctacctcttcgtcgtgtttggtaaagactattgagctcaggtgtgttgcgttgtgcagagcacaggtggtgggatggccaccagtctgcaactaccgcaagaacacgatgactaccacccagctggagggcagcaaggaggatggtgatgccaagcagggtcaggggttcctgtacgtcaaggtcagcatggatggcgcgccgtacctcaggaagatcgacctcaagacttacaagaactacaaggacctgtcgaccgcgcttgagaagatgttcagtggcttcagtactggcaaggacggctcatctgagtaccgcaaggatggtgaatatgttctgacttacgaggacaaggatggagattggatgcttgtcggcgacgtaccatgggagtgagttacacccatctgtcttaattaaaacaatggaattggaactaaattaatcaccgattagggcatgtacagtgggtgtcttgagttatgtcttcgagtgtgtttaggggggtgaatgtaaaaaaactcaagatatgtatcttgacgaagacacagtgtcttagctctatgttcgagacatgagactagctgattggtcactttaatttattgaatgctctgattggtacaattaatatggtaagacacatgttttagacacgtccactgtattatgttgtgttttaagtgtgtcttatacttggagtaccgtgcaacagtgtctaggttgtacatgcccttaggtttcgtggctcattttttttctcaactaaatacatgtttagcttgccacatcgtctttcgctccaattgtaggatgttcgccggctcctgccgcaggctcaggatcatgaaaggctcagatgcgattggactcggtatgtttgtgctcctgttatgtctagtgtatcgtcgcgctaatcatgttgtcttggttgtttggtggaaacggtgggatcgaagtacgttctattgtcggttgtacatgatacaatttttgttaaggagttcctgtcccatggtcctggtccctgcatggctgcatcactggtggtagttctcttggctccaagggcagccgataagtccaagaaccgcaactagaacggtggcttcctatccttacacagtccggtacgagggaggagatgcagtgacttgtagggatctgtacgaaaaccgaaaaagtctactaacagctatgacttgtgagaagaattctggcttatggtctgcactagaatggcttggtacatcgtctatggacaaaacacgctattcgattaattgttgttaattaagccttggggggggtacgagtgctattcatgtaaatggtttggtgcatcgtgtgctgctgctgcctgctgctgttactacgattgagctcccctataatactatgatttgaagagagatggcgatgtcata

SEQ ID NO: 2549 - DNA, 1245 bp, Zea mays
  Clone ID: TF_ZmC1117_2
tgggtacctcgctaccggccgggtttccccaggcgggccggcagctcttcaatcccagtcccacacaaagtttctcctcgatcctcatctcctccctctctcgagtcaagagcagagcagctaccaaacaagctctcctttcgcttccgatccatggagctcgacgccgacaacctgagcgccaccgagctccgcctcggcctgcctgggaccagcagcagcagcagcgacgactggcagaagaagccgtcgccctccgtcggggccaagcgcgctctggacgacggcaccaagagcgaggcctcggggaccagcccggccgccagagacctcgacttcgaccacgaccacgacaccgccgcgcctcccaagtaagaactagaccccccatgtacacgctcccagctcccttcgtaggcaccgcctgcatcaagattcaattcaagagacaggggtgcatgggctaacctgcctttttcgcttcgtcagggcgcaagtggtcgggtggccgccggtgagggcgtacaggaagaacaccttccaggcggcggcggcggccaagaaggtcgagcagaagcagaagcagcagcagcagggaggcctgtacgtgaaggtgagcatggacggcgcgccgtacctcaggaaggtggacctccggatgtacaaggggtacagggagctcagggaggctctggacgcgctcttcaccaactccttctccgcggcggcagagggcggcggcgaccaccaccagcacgccatcgcctacgaggacaaggacggcgacctcatgctcgccggagacgtgccctgggaccgatatgttcatctcttcgtgcaagaagctgaggataatgaagggctcgggctctgaggccaggtgatcgctgatccatacataaacagaggctacagacacgccacctgggaacgcggatccaagagcacacacggatcgtacttgacgaggaaggagggaggagctgtgtggcttgagctctccagtgttgtacaaagacatgtttctttctgaacccaaaagggagaaagatgtatgaagcgtgtatataaaatcttagctagcagtttgttttcatttgtatgagcgatcgaaggctgcaaaaaatgaaaaagaaaaatgaaaagggaatgagaaattgactaaagctggtcattttcctctccgctggtcaaaaaaaaaacataagaaacaaatgaacaaaaaagaaaaaaacttgattgtgt

SEQ ID NO: 2550 - DNA, 1175 bp, Zea mays
  Clone ID: TF_ZmC1060_1
ccggccggggtagcagcagcacaactgcacgacccctcgccggccatggaggcctccgccaccggcgccgcggatccgcacttcccgatttacatctcctcggacgaggaagacgggcacgcctatttcatcgagtcctatagccccgaggaggtccagattcagcagaccattcttctctccctgtatacctctcgcgcccagacggccgccgcctgctccgcttcctcctcttaccctactggtgcctcctccacccctaaggccggtacctcctccacccctaaggaaactcctatcgatcacaaaagaaagcgcaagcttaaactagaagacgacacgaacgactccaaaatgaagcggtccacgcgcaaccgcttcaactgcgccatctgcttcgagatggttctggctgcggagaagtttgttgtgagtcactgccctcacgcgttctgcaacagttgcatcggaaggtatgtcgccggcaaggtagccgacaacgtagccgtgatcgggtgccctgaccccgcgtgtgagacggggtttattgagatggatctgtgtcgggatatcatcccgcctgaactatttgaccggtggagtgtcgtgctgtgcgaggagctactgggtgatgataagttctactgtccgttcaaggattgctcggcactgttactaaatgatgattcggcgaagatcagggaaacagagtgtccccactgtcacaggctgttctgtgctcgctgccatgtgccatggcacgatgggatcgagtgcaaggaatttaggaagcttggggatgacgagaagggggagaatgatttgatgcttaagaaacttgctgacaaggagaaatggcagaggtgccccaagtgcaggatgtatgtttcgcgaaaatctgggtgcttgttaataaattgcaggtgcaaacagtacttctgttaccattgtgctgcaccaatggatagggaaactcactattgtgagaattgcaagcactagagaagtagattaaggtctttttagataatgagtaggtaaagctcttagttaacaatgcaggctccgtgcgcagtcgtaggtgatacctaagtagaattttatccccttttagtggaagtaagttccacctttctgccatcgtgatattgttgagctatagagttgatgtgctg

SEQ ID NO: 2551 - DNA, 624 bp, Zea mays
  Clone ID: TF_ZmC1132424_1
agtccctgttcctcggagcgcgccgcacctactgccggttcccggtcggctctgggatgatggtcgccgacgacgacggcgaggagtgcgtgacccagtccgagtgccacgggtgccggcggctgttctgcgcgcggtgcgcggtgccgtggcacgccggcttgacctgcgaggagattgcgcggctcggtgagggggagcgcgagcgggaggacctgctgctcgtgaaggccgcccgggagggcagctggaagcgctgcccgcgctgcaggttctacgttgagaagtccagtggctgcctgcacataacctgcaggtgcggatatgagttttgctatggatgcggtcagcaatggcagctgatacatgacggctgtcctggagcatgaaacagggcttcgagctctcctgtggcttcgttaagcaatgggagctgatacgtgaatcacgtgatgagggtttcaaggatggagtaggtattgatgttgctatcagtatggtttctgtagtcccatggaacaatggtccatggatagtctgacaaccttctctacagaactttggaacattcttctctcatgtatgttgtctgtcttcagttaacatgccagacataatatcttt

SEQ ID NO: 2552 - DNA, 410 bp, Zea mays
  unsure (1)..(410): unsure at all n locations
  Clone ID: TF_700348060H1
cgattgttgcagcgtagtagnctcgaatctgctcgacactgtagtcttgctggaatgagtactgacaactcggatcgagcagaaccttgttgtgaattgcacctgccgcattgccgactgccgcgcccagcccaccggagccttcattcgtgccatcgtctcctcgccagaggtcatctcaaagtatgagaaggcgctcatggtggctatgtggagagcttctccaacctgacgtngtgcaccaacccccagggctgcgaccgcatcctgtgccgccatggcctgggctgtgggactacctgctgcaagtgtggctgngcctcttgcttcaactgtagcttctctgatgcacactacgctgctagctgtggccatatgtctcagtgggtcgacgacgggtgctactatga

SEQ ID NO: 2553 - DNA, 731 bp, Zea mays
  Clone ID: TF_ZmC108794_1
tcgttggaactctcccaggttgcccacaagagggatgcgccacgaagctcagtgtggagggttcgagggtatttctttcgccgcggccggtagagatcatggtgcagcgcatgagggaaggacagatccctccgagccaaaaggtctactgtccgtatcccaggtgctcggccttgatgtccttgggggaagtgattcatccgatgcaggagtcctcatcaaggcacacggctgctgatgctgccacgttgaggaagtgcgtgaaatgcagaggctccttctgcctgagctgtaaagtcccatggcatgatggcatgggttgctttgagtacaagatgtggtaccccctcgctcacccaggagatgccaagctgcagaacctggcaaggcagaggctgtggcgccaatgcgtgaaatgcaagcacatgatcgagcttgcggagggctgctaccacatgatctgcgtgtgcggctatgagttttgctacacctgtgggaaagaatggaagaataagaaagcaagctgctcctgcccgctgtgggatgaacgcaacatcatcagagatgaagacgacgatgacgacgaagatgatctttactagagaaggctgtttttgctgctttttttaatgatgatattcagcggctgcatggatacattgaaatgaccacctgatgttgaaattgaaactgctcatcctgtacatgttgggtactgcttaaaaaaaagg

SEQ ID NO: 2554 - DNA, 2198 bp, Zea mays
  Clone ID: TF_ZmC13270_1
attgagtttcatggttccttactgaaggttagtcctgtaagcatttacagccactcagggctaccatttcctgcagtaagagctaaagtttcttggccacgtaaggcaagcaggggagttgcacttgtaacatgtgctagtggtgaagctgaatttattgtgaaggactgctttgcccttggagttggtggaaggtatgtcaactgtgaggttagtaataagtgggcaaactgtgtctttgtcacagggattccattgcatgtaacagagccagaattgtatgatgcttttcatagtacaacaactaggagaatccttgacatccacttgcttagaggacagcccacagctagctcgtccgtttctgaatgtacagaagcactgatgagagcgatatcactattcatgccaaataggaactttccttgccaaaaattccgtgttcaagtgttccctccagaagagaaagactcaatgatgaaagctaccataacctttgatggaagttttcacagagaggctgcaagagcactggaccatcttcaaggaagtgttcttccttgttgcctaccttggcagataatccagtgcgaacatgtatttcatagtactgtctcctgtccgatgcgcatttacaatgttatcagccaagatgttggtgctctacttgagagcttccgtagccaaaaaggcgtggcatacaatttggagaagaatgagaatggaaatttccgtgttaagcttactgcaaatgccacaaaaacaatagcagatttgagaaggcctcttgagcttctgatgaagggaaaaataataaaccatcctgatctgatgttaagcacagttcaattgctatggtcccgtgatggtatggaacaattgagatcagttgaacgggagaccggcacttatattctgtatgacaggcaaagtctgaatattaaaatttttgggagcactgataatgtggctgcagcggaggaaaaattggttcacgcacttgtacagctccatgagaagaagcctcttgaggtttgtcttcgtggccggaacctcccaccaaacttgatgaaggaagtgattgtaaagtttggggctgatttagaaggactgaagaacgaggtccctgcagtagatcttcagttaaatacacgaaggcagacactttatgttcgaggcagcaaggaggataagcaaagggtggaagggatgatctctgaactgataacctctagtgaccatagtgctcaactgtcgtcagagaatgcatgtcctatttgcctgtgcgagctagaagatccctttaagcttgaatcatgtggccatatgttctgtttagcttgcttggtggatcagtgtgaatctgccatgaaatcacaggatggcttccctcttcgttgcctcgaaagtgggtgcaataagctgttcctcctagctgatctgaggtctctgctgcctgacaagctggacgagctgttcagggcttccttgaatgcatttgttgcatctagcgcagggttataccgtttctgccccacaccggactgcacatccatttaccaagtagctgctgcaggcgcacaaggcgacagaccctttgtctgtggggcttgctctgtggagacctgcaccaagtgccatatcgagtaccatcctttcatctcctgtgaggcatacaaagagtacaaggcagacccggacgcaactctgcttgaatggcgcaaagggaaggagaacgtgaagaactgcccttcatgtggatttacaattgagaagagtgaaggctgcaaccatgttgagtgcaggtgtggcagccacatttgttggaattgcctggagaacttcaagagcagtgaggagtgctatggccatctcagatccgtgcacttatcctatgcagatctgatgtaaatctgtacagattgtaatgaatcacgtggtctataatctggcaagctgaatttgccttccaacagtgattgtctgatcctaaccggttctcagcacaggtagagatgggaaccggttaggatcagacaatcactacctgtgctgagaatattgtaggcgctttatcatttgttactacagcggggaatgctctagtgtgcatcggggacggctcaaaaaaaaactcaacaaaaaaaaaaagggggcccccccagaggcgacctcaccgacccggaaatttttccggg

SEQ ID NO: 2555 - DNA, 1542 bp, Zea mays
  Clone ID: TF_ZmC3535_1
gattgtgggcctcgaggcagggcgggatcttcgcctttgaggaattcggagaagctctactttcagatagcagaagctgaaattcttgaagaccagcttttggtagctctaggacacaggattcttgaactggtggataagttggaagactttgatttgatattgcttcctagctttgaactagagaggcccttgcagttggctaaagaagctataggcatcagatatctgtctccctacgaggttggtacctgcccgatttgccgtgaggagaaactaggttctcagatgatcaaggcaggttgttctcacacatattgctataattgcctgactgggtatgttgaagagaagctgctgacctcgaagctgcctataaggtgtccacaattaaggtgtaaatacattatttccgctagtgagtgcaagtcgttccttccagttagcagctatgattccttggagagagcatttgcagaagctggcacctcaggaatggaaagattttattgtccctttccaaactgttcagtgctgttagaccttagtcagcacttctctagggcaagttcatcaagccagtcagatctcagttgtgtcgagtgcccagaatgccatagagatatatgtatcaactgtggagtgccgtggcacatcatgatgggctgtgatgagtaccagagcttgcccgctgaggaaagagatgctggagacctatctttgcatcggcttgcacagaacaataggtggaggcgttgccagagatgtcgacgtatgattgaactgacacagggctgcttccatatgacttgctggtgtgggcacgagttctgctactcctgcggtgctgactacgctagcggcgttcaaacatgccaatgcgtgttctgggacgacgaagccatggagccctcctccgccgcacggtccacccaagcagcgtccgagatctgggcgtgggacacatttgactgcatgccgaccgccgtggagggatactcggagcaggagagagcgcagctggcactcatccagaggttcctcgccggggggttcagcctgggtgagaacccctgccagtcgccgccccgctgcgccgactcctacatcgtcgacaccatgaaggacctccaccagctcccatggctcgagcggttcgtgtcggtgatcagcgacacgtacaacgatgactacatgcagtgaagagagggagggagggagagacagttatagatagcagtaaaagaaacggcacatactgagtcctccattcagaataatttgtttccatgcccccctgtaggcaattggcgcagggaaaaatgatatgctttcatcatgaatacactggtgttgtttcctccattgtatggtaaccttcggcttcggtgttagttgtgcatgggcacaagagttctccattttatatgattatgtccttatttctttaaagtgagtgtaatctctctctctatatgtatatcttcagagctttctgaaattactcgttttgaatcaaatcagcagcatgagcaactgcct

SEQ ID NO: 2556 - DNA, 2457 bp, Zea mays
  Clone ID: TF_ZmC1251_2
aattcggcacgaggagctctcgtttctagcttcaattcggcacgaggctcgttcctagcaaccaagctagcgaatccaacccaacccgtccatttctccacatccccaccctccctccgtctccgcctccgcctgcgccaccctccaatccgcgccggcgcgtcgccaccctacccgattgctacctcctcgtggtgggcgccgctccgatccgcccgatccgcgccggcgcctcgccaccctacccgattgctacctcctcgtggtgggcgcctgctcctggagttccggcgcgcggcgggggcggcgtagtaatggaatccgaggacgacatgcacgacgcgaacgactccgctgaagacgatttctacagcggcggggaggccggtctcgccgccagcgacgacggagacgccgactacgactttgcggaccacgactccgacgactccgcggagctcatctcccacagacagcagcaaaattatagtatattgagtgaagttgatatacagcggcgccaagaggatgatataaatagggtttcaaccgttctttcaatttccaaaccagaagcatgtgttcttctccgcaactataactggagtgttagtaaggtgcatgacgaatggtttgctgatgaagagcgtgtccggaaggttgtgggtttaccagagaagcataatgaaatgccaaatgacagagaagtaacatgtggaatatgtttcgaaagttgccctcgtgggtcgatgagtgctgctgcatgtggtcatcctttctgcagtacatgttggagaggttacattagcactgctataagtgatggtccaggatgtttgatgttgaggtgtcctgatccatcttgtgctgctgctgttggacaagatatgataaattcactggctgctgatgatgataaggaaaagtatgggcgatatcttcgcagatcttacattgaggataatagaaagacaaaatggtgtcctgcgcctggatgtgaatacgcagtggaattcgtcatgggcagtggcagctatgatgttaattgcaactgttcatatgggttttgttggaattgcaccgaggaagctcatcgtccagtagactgtgccactgtttcgaagtggatcctcaagaacagtgcagagtcagagaatatgaattggatactggctaattcaaagccttgtcccaaatgcaaacggcctattgaaaaaaatcagggatgcatgcacatcacatgcactccaccatgcaaatttgagttctgctggctatgtcttggtccatggtcagagcatggagagaggactggtggattttatgcttgtaaccgctatgagtcagcaaggcaagaaggagcgtatgatgaatctgaaaggagaagagaaatggcaaagaactcccttgagagatacacacattattatgaacgatgggcagccaatcagtcgtcgaggcaaaaggcactgggggaccttcaaagcctacagaatgacaagcttgaaaggttaagtgacatacaaagtcaacctgagtcacagctgaagttcattgtagaggcatggttacagattgttgaatgcagaagggtattgaagtggacttatgcctatggattttacctgccagagcatgagcatgccaaaagacagttctttgaatatctgcaaggtgaggcagaatctggtttggagcggctacatcaatgtgcagagaaagaacttcaaatataccttgacgcagaatctccctcgaaagacttcaatgatttccgtacaaagttggctggattaactagtgtgactcgcaattattttgaaaatctcgtccgggctctggaaactggattaaatgatgtaggcccttccactagccatggcacatgcagcaaaaagcgcaacttccaagagcctcggtggtaaaagtaagagtggcaagaacagggcatcaagcagcagttccaaatcgggtggctcaacccgaggtgtggatgatagtaacatatggacatgcgatcagtgcacatatgcaaaccccaaatctgccagagcctgccaggcttgtgatcgccagcatcgatagcgctgtcagtccttgctagagatttggaccccatttgtcgagaattttctggtgttgccccgtgcgatacacaacatacatgaaaattgaatattagctgatctctgggggtataggtaggttttcgtgtatcctggattgtttgtcgactgactgcgcatgtgaagcctcaactcagcatccactcccatttgtgtatataagtatatccatatctgtaacaatgttttgttcaatggaagtagcggagctaggaggcgtctgctgccaaaggaactcaactgttgtagtgctgttgtaatgtaagatgcattggtcaaatttaaagaaagttagtcaccctgttacagaaattccaagagaactcttgtt

SEQ ID NO: 2557 - DNA, 2662 bp, Zea mays
  Clone ID: TF_ZmC12013_1
gccggttcatcaaagtacgccgcaaagacatcagcccagccttccccaattccggccacacccgctacgcctgtggtgccgcctgccgcctccccttcctcttcgcttcccgtgcaagcttcaccgccgccatctcctcctcccgttgcgatgcttcccctttcgcgccacggttcctctatccccgccttccctgcccgctccggctcttgcacctgaccaagccaatccgccaatctgttccccttttccgtacgagaggtactatcgccggccatttcgattcggggctgatcggatcggcggctgatgggtcgcgatgctgagaatacttctcctccggtgtcctcgtcggaattggagcaggaagacgacgacgactgctacctaagcgatcagggggacgatgccctagaagagtctgttctccatgttctcgaggacgagcacctcgaggactgccattggtccgcctcatgcgtgatcaccaaggaatccctcttggcagcgcagagagaggatcttaggaaggtgatggagctgctagggttgagggagcaccatgcccggacgctcctcatccactaccgctgggacgtggagaggattttcgagcttcttgatcagaaggacagggatagcctcttctcggaggctggtattcctcttcagtacaccaataatgctggcccaacctcctcagcggaggtgacctgcaatgtttgttatgatgatgtgccaccctcgtgtgccttggagatggactgcggccacagctactgcaatgattgttggactgaatatttcattgtgaaaattaatgagggtcagagccggcgtgtcaggtgcatggctccaaagtgcaatgctatttgtgatgaagcaataattcgaaaactagtcattgcaagacacccagatatcgcagaacgctttgaaagatttttactggaatcatatattgaagataatgatacagtcaagtggtgcccaagcacaccacattgtggaaatgctatacgcgtcaagggcgatatttattgtgaggtggagtgcacatgtggatgccagttttgttttaattgctctttacgagcacactcaccgtgttcctgcatgatgtgggagctctggatcaagaaatgccgtgatgaatcagaaacagtgaattggataacagtaaatactaagccctgtcccaagtgtcacaaacctgtggagaagaatggtggctgcaacctggttgcatgtatatgtggacaagcattctgctggttatgtgggggtgctacaggtagagatcacacatggtcaactattagtggccacagttgtggcaggttcactgatgatcagactaagaagacagaacaagcaaggcgagacctctatagatatatgcactaccacaatagatacaaggctcacaccgactctcttaagcaggaagcaaagctaaagaatgagatccaggggaagatatccatttcagaaaataaggagtcaaagataaaagattattcttgggtcataaatgggttaaacaggctattcagatcaaggcgtgttctttcctattcgtatccgtttgcattctacatgtttggtgatgagattttcaaggatgagatgactcctgaggaaagagaactgaagcagaatttatttgaggaccagcaacaacagttagaatttaatgtcgaaagactgtctggtttccttgagaaagattttcaactttttaccgatgatgaggtcatggatacaatgaagcatgttataaatcttcccaatgtggttgataggctctgcaaacaaatgtatcaatgcattgagaatgatttgttatatcctctacgcacacctcacaacattgctccatacaaatctaagggcattgacagggcctcggagctcaatattagttgggatcctggtgaacaaagttcacagtcaacaaaacatagccaggatgaacacaggaacaaacaagcatcaaatattttgggtaaacgaactcatgaattgcatggttcgagttcttctaacaagcgagagagggtagatgttaacggtggtggtggtggcactttttgatctcaacgtgccagctgaagtggtggacaagatctgaaacttcattatctgatgggtgatggcacattcctttgaactgtacagctgacttaagcttcgtcaccaacataaaggaaaaaatactgttcttttttgctgccttaccaccatagagtacctgcatgtcaaatttttaccctggtgcttggatcccaaggtatagagtagcttttaagttatatgttgtatttcatggcatgatctgaagccaatgttcatagttctgatgaagttgtacccctcaagcaagatgaggatattttggaatagaaccatgcctgtgttgcaaattccagatataatgtatgcagcatggtgaaaagggaattgtttgttgagaagaatgtgagtgattatttcctggcaaatgggtggttctattgacaatgaagacaatgactgattcgtcgtattaaatgtgcactttgtttgttgcaactggcaaccatcttgtttctaggacagttttgtattcaacctgtgaaaatcccggttttctgggcacacattccagatttttatggct

SEQ ID NO: 2558 - DNA, 2566 bp, Zea mays
  unsure (1)..(2566): unsure at all n locations
  Clone ID: TF_ZmC1251_1
ngaaagggagtaatggagggagaaactagacaccactaaaaaggaaaaaaggtgaaagagagaggaaagctctcgttcctagcttccttctcttcaactaagcgagcgaatccaactcggcccgtccatttcttccttccctgttcacggattccaatccttcctccacacccccaccctcccttcgcctccacatccaccaccatccaatccgcgcgggtgcttcgccaccctatcccgattgctacctcctcgtggtgggcgccgctccgatccgcccgatccgcgctgctcctggggctccggcgcgcggcggcgagcggcggaggcggcgcaggaatggaatccgaggacgatatgcacgacgcaaacgactccgccgaagatgacttctacagcggcggggaggctggtctcgccgccagcgacgacggagacgcagactacgacttcgcggaccacgactccgacgactccgcggagctcctctcccacagacagcagcaaaattacagtatattgagtgaagttgatatcaagcggcgccaagaggatgacataaatagggtttcaactgttctttcaatttccaaaccagaggcatgtgttcttctccgcaactataactggagtgttagtaaggtgcatgacgaatggtttgctgatgaagagcgtgttcggaaggtggttggtttaccagagaagcatattgaaatgccaaatgacagagaagtaacatgtggaatatgtttcgaaagttgccctctcggatcgatgagtgctgctgcatgtggtcatcctttctgcggtacatgttggcgaggttacattagcactgctataagtgatggtccgggatgcttgatgctgaggtgtcctgatccgtcctgtgctgctgctgttggacaagatatgataaattcactggctgatgttgaggatacggaaaagtatgggcgatatcttcgcagatcttacattgaagataatagaaagacaaaatggtgtcctgcgcctggatgtgaatatgcagcggaattcgtcatgggcagtggcagctatgacgttaattgcaactgttcatatgggttttgttggaattgcaccgaggaagctcatcgtccagtagactgtgccactgtttcgaagtggatcctcaagaacagtgcggagtcggagaatatgaactggatactggctaattcaaagccttgtcccaaatgcaagcggcctattgaaaaaaatcagggatgcatgcacatcacatgcactccaccatgcaaatttgagttctgctggctatgtcttggtccatggtcagagcatggagagaggactggtggattttatgcttgtaaccgctatgagtcagcaaggcaagaaggagcgtatgatgaatctgaaaggagaagagaaatggcaaagaactcgcttgagagatatacacattattatgaacgatgggcagccaatcagtcgtcgaggcaaaaggcactgggggaccttcaaagcctacagaacgacaagcttgaaaggttaagtgacatacaaagtcaacctgagtcacagctgaagttcattatagaggcatggttacagattgtcgaatgcagaagggtattgaagtggacttatgcctatggattttacctgccagagcatgagcatgccaaaagacagttctttgaatatctgcaaggtgaggcagaatcaggattggagcggctacatcaatgtgcagagaaagaacttcaaatataccttgatgcagaatctccctcgaaagacttcaatgatttccgtacaaagttggctggattaactagtgtgactcgcaattattttgaaaacctcgtccgggctctggaaactggattaaatgatgtaggtccttccactagccatggtacatgcagcaaaagcgcaacttcgaagagcctcggtggtaaaagtaagagtggcaagaaccgagcatcaagcaccagttccaagtcgggtggctcaagccgaggtgtggatgatagtaacatatggacgtgcgatcagtgcacatatgcaaaccccaaatctgccagagcctgccaggcttgtgatcaccagcatcgatagcgctgtcagtccttgctagagatttgaaccccatttgttgagaatcttctggtgctcccccgtgtaatacacaaacatacatgaaattgaatgctagctgatctctgggggtaattgcactaggaatgctgtaggttttcgtgtatctcggattgtttgtcgactgacatcgcctgagaagcctcaactcatcatccagttcgatttgtgtatataagtgtatcatctgtaacaatgttctttagatgagctaggaggcgtctgctgccaaaggaactgaactgttgtactgctgttgtaatataataatgcatttgtcaaatttaaagaaagttagccatcctgctacggcgtatgctgccaaaggaaccaacttgtagtgctgttgtaatgtaagatgcattggtcaaatttaaaaaaagttagtcaccctgttacaaaaaaaaaaaaactcgag

SEQ ID NO: 2559 - DNA, 2910 bp, Zea mays
  Clone ID: TF_ZmC2198_1
cccctggttgaatataggtgttgtgactgttgtcaacttgaaaaattcctagtaatttaattattttaacataattttaagaagcatttttgtttactgcaagttgcttgggatcaataggcattgtcgttactgctgctatagattgacgatagctaccttttctctgaacatgtaggagagctgcatatcattatattaagaaggtgatgagtatagctagtttgactttatgtggcttgtaaatgtttgggattgatttaattttcatttatttgtcttgttgtttcttaaaaaaatcctttactaggcagtaggcacaagcaactaaggcactgttcaacttaaacttcgcattacctgcattatataaacatgttattgaggtaatgtgccaatgattgtttttattagctggtaatcatgattttttattctattgcttgtggcactccaaactgcatgaaaatgtttattatgttatgttcatctttggacccggccgggccgggttaactctaccgacctccgctcaccgccccctttcctcctatccctccccagagccccgacccggccggccggccggccggaaccctagccttatcgcccctccctttcccgcctcgcctccgcgcgatctcccgatcgccggattcgtgccgcggctggatggactccgacgtggagatgaacaccgccagcgatgaggaggtgatggacaacgatgactactacgactactgctacagcgacgtgggcgacgacggtgggagcaacagcgggagcgaggagctggtggccggggactacgacgagggcctcgaggccgaggggaccgacgaggtggtctctaggcgcgagcagacatttgtggttttaaacgaacaagttatatctgaacgtcaagccgaagatgtgagcaaggtatctgccgtcacactgattacaagggaggaggcgtgtgccctcctccatcactataaatggaacatcagcaagctgagtgacgaatggtttgcagatgaagaaaaagtccgccatactgttggcttacttttgaatggaaatcatgacccccgctctaggaagctagtctgtggaatatgttttgaggggtgttcttctgatatgatgagctctgctggttgtgctcatttttattgccatgaatgttgggaaggctacattagcgctgcaattggtgatggtccaggatgtttgtcattgcgatgccctgatccatcttgtagtgctatggttcttcaagggatgattaatgaattagctaaagatgaggatagaaaaaaatatgcacgatttctcttacgcgcatatgttgaaggtagcaagaagactaaatggtgtccagctcctgactgcacatgtgctgtggagttccttggtgatgaaaactatgatgtttcatgcaattgcatgttcagcttttgttggaattgcactgaggaagctcatcgaccagtgaactgtgagactgtttctaagtggatattaaaaaacagtgcagaatctgaaaacatgaactggatactggctaattctaagccctgtccaaagtgcaaacggccaatagagaaaaaccagggatgcatgcatatgacatgcacccctccttgtaaattcgaattttgctggttatgtctgggtgcatggtcagatcacggagagagaacaggtggcttttatgcttgcaatcgttatgaatcagcaaagaaagagggagtttacgacgagactgatgcaaggagggaaagagctaaaaactctcttgagagatatatgcattactatgagcgctgggcatccaatcagacatcgaggcagaaggcccaagcagatctgctaaaagcggaaaaggaccagattgcaaatttaactgacattttcgggataccagagacccagcttaagttcataatcgaagcttggtcacagattatagaatgcaggcgagtgttgaaatggacatatgcttatggctactatctggatgataagatcaagagtgaattttttgagtatctgcaaggtgaggctgagtctggtttggaacgcctgcatcagtgcgctgagaaagacttgcaaaattttttgccgtctgtgaaatctgacagcactgaaacaacgacacctacagtggctgaatttggtgaattccgcgtgaagcttgctggacttacaagcgtgactcggaattactttgagaaccttgttcaagctttggaagctgggttggaggatgtccgtgccacaggccaggctgctggtacatccagcactgccaccagctccaagaaaggaggaactaaatccaagaagaagcagcacactgcaccatcatctgaccacactgatgatgggtggccctgcgagcgctgcacatttcttaaccctcctacagtggatgcatgcagcgtctgcgaaaagagtaggtactagatgatggaatagctcaaagggagccagggaggcatcccaagaaaacctcaaagctcgtgagaagcatgcatgcatcggatgctgagaagaagagcttccagctgccgcaatgttgtacagagagttattttagggcctcggttggaaacggtgtggaggctcaagtggtcacatgtttgtgggggtcatttggttttctagttcttttctgttgttccttgtaaatatatttgttgtgatgtggtgacctgtgtttatgtgatgagtttttgtttctgacaaactgtgaaattaaactttaacaaaactgatgagaggtagctctgtttattccctcctaattgcgggcagggtctttgtctattcccagcagagaggaactaaatcagaacagcacactaagccatcggataggagaaaaacaggatgcatgcatatgacatgcacccc

SEQ ID NO: 2560 - DNA, 374 bp, Zea mays
  Clone ID: TF_LIB143-055-Q1-E1-D9
taaacagaatggagtttaaccaagctcacatgccctgatacaacttgctgcagcccacttccaccatcagttttgaaaagcctcctgggagatgattgctataagcgatgggaatcattcgcgttacagaagctcttagatacaatgcctgatctggtatattgtccgaggtgtaatgctgcctgcttggaggatgacaatgatgctcaatgcccagagtgttttttcaccttctgctctttgtgcaaagaacgcaggcatgtggggaaggattgcgttactccagaagaaaagattaggattctgagggaaaaacaccagaaatattccctcccagaaaaacaattgttgaaagaacagagggaaatagatga

SEQ ID NO: 2561 - DNA, 703 bp, Zea mays
  unsure (1)..(703): unsure at all n locations
  Clone ID: TF_LIB4603-008-R1-K1-G12
ccacgcgtccgatgaccattaattgcttcccgagatggttttgtttacataattcttcgagttctgatgtaagtaactatgagtttgtgatggctaggttgtttatttgtcaaactctgattgctgaattcttgtttcagagtgagctgctggctgccgagatcaattacatggccaaaagggagactgagcttcagaatgaccacatgaacctcaggaccaagattgaggagggagagcaacagctgcagcaggtgactgtggcccagtctgtcgcagcagcagctgccaccgacgtggagctgaatccgttcttggagatggataccaaatgcttcttccctggcggccccttcgcgacactggacatgaagtgcttcttccccggcagcttgcagatgctggaggcacagcagcgccagatgcttgccaccgagctgaacctcggctaccaactggcgccgcctgacactgacgttgccaacaataaccctcagcagttctaaactggatccatgagaaagccaactgtgaccgatggaagctggctgttgcctctagatgatattggcttccataacctagcttattatgggngtgtattggtgccttttgtgtgtgattctccttgctactgatggagaataacctaatcgattgggcataatgatcaaatgctacagcacccgtgaggctgtgatcg

SEQ ID NO: 2562 - DNA, 1254 bp, Zea mays
  Clone ID: TF_ZmC1392_3
ggccggccgggactttcgtcaaaagagactctctccctcctaccatttccgcctccggactgctccggacgcgcgcctcagatctactccaacacctgtatggattcctctggccgtgtggcctttccggcaactatagataggcaactatagctagggttctccttctcccctccctcctccgcttgcgcttgctcttggacggtgcttcctcttctttaccagctagtcaaagtaaccacgcgtgctgcttcatctctcccttccttcctgccgtgtggttgttggctgccgcagcggcggcgcccgcgggtggaggagcaggagcggcggcgccatggtcgggaccgggaagagggagcggatagcgatacggaggatcgacaacctggcggccaggcaggtgaccttctccaagaggcggcggggcctgttcaagaaggccgaggagctctccatcctctgcgacgccgaggtcggccttgtcgtcttctccgccaccggcaaactcttccacttcgccagctccaggcagatgagaggagaggagctccagaggctgagcgtcgaacagctgcaggagctcgagaagaccctcgaatccggcctcggctctgtactcaaaaccaagagccaaaaaatccttgacgagatcagcggtctggaaagaaagagaacgcagctgatcgaggagaactcaagactgaaggagcaagtgacacggatgtcgaggatggagacgcagcttggcgccgatccagagttcgtgtacgaggaagggcagtcgtctgaatccgtgacgaacacgtcctatccgcgcccgtccaccgacaccgacgactgctccgacacatcgctcaggctcgggctaccactcttcagctccaagtgacggagatttgacatgtccggtagcggagcggtgccgatcgcttgcccttctccactctagataggtctggattgggggagagcagcagtgctggatcgggaagacccaagtgaccaacgcgtcgcatcagaataaagcattttgagtgctgtatgatgtgtgtattctggctctgaaagtgagacctgcttttgttataatacatacatacaggcagcatggcaatacgtgacggggtatccgctgcctgcagtccgtgacctgtctgtcgtctctgtttctagtactcgctataatcaccctgcaattacctgcagctggtcattgttaggagaaattccagtccatgcaaatgaactccc

SEQ ID NO: 2563 - DNA, 1058 bp, Zea mays
  Clone ID: TF_ZmC2086_2
ccggccgggatagcaccggtaactccccacagtacgcgggggctccagacttccagcatctccgctccggctgcgctctgccttgctttcctgctacctgctctagcgcgagcgagagaggtacggcggccgatctggcggcgcaggcggagggctcggccggggccggcaagtcggcgccgaacatggggaggggccgggtcgagctcaagcggatcgagaacaagatcaaccgccaggtcaccttcgccaagcgccgcaacggcctgctcaagaaggcgtacgagctctcggtgctctgcgacgccgaggtcgcgctcatcatcttctccaaccgcggcaagctctacgagttctccagcacgcagagcatgccaaaaacacttgaaaagtaccaaaaaaaagaacaaatgttttgtgaagcaaataagtgtcttcgaagaagactggaggagagcaaccaggttatatggcagcatgcgtgggagcaaagcgagcggcattctgaagtgcagccgcagcagctcaatggcaataacttcttccatcccctcgatggtgctggtgaacccacccttcagatagggtatccttcagaggcactgactagctcatgcatgaccaccttcctgcccccgtggttgccatgagatcgaactactgcgcaattccgaattaataagcatggccgcatgcagctgcctgtgctatacgttgtgcttggagtgtactttaaggttcttgcatggcaagtatgtgtgtaacatttgtgatgaacatggaaactatccacttaattctcgaataatcaatgaactgggtaagattgtaacataaaaaaaaaaaaaagcggccaaaaaaaaaaaaataaaaaaaaaaaaaaaaaaaaaaaaaagtactctgcgttgttaccataaaaaaaaaaaaaatataataaaaaattaaaaataaataaaaaaaaaaaaagggggggcgcccttttaaaagaaccaagtttacttcccgggggtagcaaaattaaatttttttttatgggggaccaaaaattaattaaatgg

SEQ ID NO: 2564 - DNA, 756 bp, Zea mays
  Clone ID: TF_ZmC84_3
agcagtggtaacaacgcagagtacgcggggggttttcgtaagatgtggcactactaatattcctctgataaatatatatatggctagaggaaactttataagtaatatatggcagtcatgtttgccgaaatggagttatagggttgcacatattttcttttccctgaaattgatttcgatgaataaattacttggactacttttgctttttcttgcaattgagaaatgagtacaccatttaattcacattttgcagtcgcacctgtttgttatgaatgtcaatatggaacatccactaacaatttggatagaaaccaacagcagcatgaaatattactaaatgaacttttgcaaacttgcagcattacaagcaggaatctgctaggctgaggcagcagatcgttaacttgcagaactccaacaggttcagttcttatagaaaattatcatgtgcgcgagaatacagaaaggtcatttgatgaacttataagttttcagggccctgataggtgattctatcacaaccatgagccacaaggaacttaagcacttggagactaggttagacaaagctctcggaaagattagagcaaaaaagaacgatgtgctgtgttctgaagtcgagtacatgcagagaagggtagacagcaacaagaacacatttttcctctcgggaccttattgatttcgtggccattgcgcaaaaaaaaaaaaaaaaaaaaaaaaaaaaaagtactctgcgttgttaccactgct

SEQ ID NO: 2565 - DNA, 425 bp, Zea mays
  Clone ID: TF_LIB3067-030-Q1-K1-E9
cggacgcgtgggcggacgcgtgggcggacgcgtgggacagaacttcagaaaaaagaacgaatgttttgtgaagcaaataagtgtcttcgaagaagactggaggagagcaaccaggttatatggcagcatgcgtgggagcaaagcgagcggcattctgaagtgcagccgcagcagctcaatggcaataacttcttccatcccctcgatggtgctggtgaacccacccttcagatagggtatccttcagaggcactgactagctcatgcatgaccaccttcctgcccccgtggttgccatgagatcgaactactgcgcaattccgaattaataagcatggccgcatgcagctgcctgtgctatacgttgtgcttggagtgtactttaaggttcttgcatggccagtatgtgtgtaacatttgtgatg

SEQ ID NO: 2566 - DNA, 334 bp, Zea mays
  Clone ID: TF_LIB3088-002-Q1-K1-D4
gcgctgacgcatgggcaatgctcaagaggccaatggcgcactctgtgaaactcaaacctggtaccaggagatgctaaatctgagggcactattctaggtcttaacgcgcactcataggcactacgattggactggaactcggcccactgagtgctaaggagttgcaccagctagagaaacagctcgaatgtgctaagtcacacgcaagacacataaagacactacttatcatggaccaagtgaaatagctccgaataaaggagcgacacttgggagaaattaacacgcaacttacacacaatcttgaagctgcaggttgtagcaactacggaac

SEQ ID NO: 2567 - DNA, 1298 bp, Zea mays
  Clone ID: TF_ZmC1145_11
cctcgaggccggccgggaccttcttctttgagtcctctctctccgccgccgcagctagctgtgacgttatgctctcgccggcgccatagcgccagcgcctaccgtctacaactatccagccttaggcttacctatcccgtcaatcaagcctctcgtaaggaacaaggaaggtagctagctagttctatagctgctgtcgtcgtcgtcatcggcggcggcggcgcctgttcttagaggataaggttgtcctagcggagagggagctagccaggatttcggttgagatcaagagggggagcaggcggcggcggcggcgatggggcgcgggaaggtgcagctaaagcggatcgagaacaagatcaaccgccaggtgaccttctccaagcgccgctcggggctgctcaagaaggcgcacgagatctccgtgctctgcgacgccgaggtcgcgctcatcatcttctccaccaaagggaagctctacgagtattccaccgattcatgtatggacaaaattcttgaccggtacgagcgctactcctatgcagaaaaggttcttatttcagcagaatctgaaactcaggtttcatatgcatctgtatggtcatcaagtcggagggcagcgtttggtgcttggctggtgcatcagctctgcaggacctcctcctgcgccagctccctaggggaccctagcagtttgcctgctggtggtcgttttggtcgggttgttgctatgtgtgcgtggcgtgttgtgttaatgtcagggggtctgagccagcttatggtcgagtcaatttcagcgctccaacggaaggagaagtcactgcaggaggagaacaaggttctgcagaaggagaaagcgttactcctgcatgcagctcgcggagaagcagaaagaccagcggcagcaagtgcaacgggaccaaactcaacagcagaccagttcgtcttccacgtccttcatgttaagggaagctgccccaacaacaaatgtcagcatcttccctgtggcagcaggcgggagggtggtggaaggggcagcagcgcagccgcaggctcgcgttggactgccaccatggatgcttagccatctgagctgctgaaggtttgccctcaccgtcgcgatgtgatagcccaaaatccagcaagtcttccccggaccccggactgtccccgcttctccgcctggtgcagtatcgtcgtgatcgcgagaagcagcagcagcggtttgccgtattttttaccactgtgtataagtagcatatctgcaatgtgtatattttgttcaccgttcctgctgg

SEQ ID NO: 2568 - DNA, 788 bp, Zea mays
  unsure (1)..(788): unsure at all n locations
  Clone ID: TF_LIB4758-083-R1-K1-A9
ctcgnagccggccgggattttntggttgctgccccctttcccttccctagaccagatcctcgccccgttttccacttttgcctccaccgccggcccaattcggataacaagctccctccgcctcgccgcgtctcctcccagccgcaggagccgccgccatccgatccggaagagggaggaggggggagggaggaggatctgtgtcccgattcgattggagctctcgtccccggcggtccaggatggtgcggggcaagacgcagatgaagcggatagagaacccggccagtcgccaggtcaccttctccaagcgccgcaacggcctgctcaagaaggcgttcgagctctccgtcctctgcgacgccgaggtcgcgctcgtcgtcttctccccgcgcggcaagctctacgaattcgccagcggaagtgcccagaaaacaattgaacgttatagaacgtacacaaaggataatgtcagcaacaagacagcacatcaggacattgagcaagtaaaagctgatgctgagggcctggcaaagaaactggaagcacttgaagcttacaaaagaaaacttttgggtgagaggttggaagaatgctcctttgaagaactgcacagtttggaagtgaaactcgaaaagagccttcattgcatcaggggaagaaagtgcaagaagcagccgccgccgccgccgcctatgctgatgggtcctccgccgcctccagcgccggcagccatcgatcacacgggggccggaggatgtcgggatggacgtggagacggagctgta

SEQ ID NO: 2569 - DNA, 725 bp, Zea mays
  unsure (1)..(725): unsure at all n locations
  Clone ID: TF_ZmC1460_7
ccgggnacctggnagagctgatcgaaagtaccaaactgccagcgccgggaaaacgacgaccgacggctgcggcaggcacaacaggatggaccccaaacatgaaaccacggtgctgcaacaggaaatcaacctgcttcagaagggactgaggtacatctacgggaacagggcgaacgagcacatgaatgttgacgaactgaacgccctagagaggtacttggagatatggatgtacaacacccgctctgcaaagatgcagataatggctcaagagatccaagcactgaaaagcaaggcatgtcaaaaccctgtacatattaactctacgaagacccgaggctttcagcacccatttacctcactaaaagtgtctgcgtgtacgcaggaaggcatgttgaaagctgccaacgagattctccaggaaaagatagtagagcagagtagtttgcttgacgtaggcatggtggtagcggaccagcagaatgggcgttttagcacagtcccactggtagaagaggtgatcagtagtaacccactgactgtactgagtggctattctagctgtaggggttcagagatgggctactccttctgaccgtaataacaaacagcctggggggctccttctgttgattactactagtgtgtaatacatacagtcaataaagtctgtaatgggttggttgttctgctgctttggtgtatcatattcgattattcgtatc

SEQ ID NO: 2570 - DNA, 741 bp, Zea mays
  Clone ID: TF_ZmC1089_9
aagcaatcacgagacgggaggggttggcctttcgcctctagggttccgggtcgcccaccaccttaccggaaatggcaattgcgggacgcgcccccaatcactcaccacccctttcgtctcgccctttttaacccaatcccctctccacgattccacacccatctcctgagtcctgctgcctgcgctcgcctcagctcctttcttccccgccccttggcttttgcttggttgcatcgggccggtcgagccggagaggaaaagctagctagcagctaccagctctcggccggcggtggtagtctgcctgcagctggggttagaagctgcaagggttgggagccatggggaggggtcgggtggagctcaagcggatcgagaacaagatcaaccgccaggtcaccttcgccaagcgccgcaacggcctgctcaagaaggcgtacgagctctccgtgctctgcgacgccgaagtcgcgctcatcatcttctccaaccgcggcaagctctacgagttctgcagcggacagagcatcaccaaaacacttgagaggtatgaaaaaaacagttatggaggaccagatactgctgtacagaacaaggagaacgagttagtccagagcagtcgtaatgagtacctcaagctgaaagcgaaggtggataatttacagaggactcagaggaatttgcttggtgaagatctggggtcacttggtgtcaaagagcttgagcagcttgagaagcaac

SEQ ID NO: 2571 - DNA, 960 bp, Zea mays
  Clone ID: TF_ZmC3819_2
ctcgaggccggccgggaggcataggcatagcttggctcgcacggtgtcgctggctcccctccccttccctccccactgttacatccagcgagctgttcacggccgtgccgagctcagtgaggcagcgtttgcgagtccgggacgaggggagcggcgggcgacatggggaggggccgcagcgagataaagcggatcgagaaccccacgcagcggcagtccaccttctacaagcgcagggacggcctcttcaagaaggctagggagctctccgttctgtgcgacgtggacctgctgctgctcctcttctccacctccggcaagctctaccactacctctcgcccaccgtcccctccgtcaaggacctggtcgagaggtacgaggccacgacgcacaccaaggtctggaccgacatccgccaggagcggcgcgcggagctggagaaggcggagcagatgtgcgagctgatggagaaggagctgcgggtcatgacggtggacgacggggagcagtacacggtgccgtcgctggagctgctggagcacagcctggaggcggccgtgcgcaaggtgcgctccgagaaggaccgcaagatcggcggcgagatcaactacctcgagaacattatcagaggacgccacgaggagcgctacgggttgtgcgacaagcttgcgcactctcaggcctcgaacaacggcggggaaggtggagggtcgaccccaccaagcggcggcggcctggaactcaaactgggattcaactgacgctggctggcttggaagctggaggatggatcgaagactatgcgctgcttcattgtaccctatcactctgtcaggctacctccccccctgcaccctgttggttatggtttaaaatggttgttgaccaaagttgtcctggatcaaacaaggctcagcttgatgttaatgagctgagggatctaatgtattattagcctt

SEQ ID NO: 2572 - DNA, 763 bp, Zea mays
  unsure (1)..(763): unsure at all n locations
  Clone ID: TF_ZmC18079_3
gcacgagatgttcttgtaggttgaatagaagagtggaagcaccaagctgtaccaatggggcgtggaaaagtagagctgaagaagattgagaatccaacaaaccgccaagttaccttctccaagaggcggatggggttgttcaagaaggcaaatgagctagccattctttgtgatgcgcaaatcggagtcatcatattctctggcagtggcaggatgtacgagtactccagccctccatggagaatagcaagcgtctttgacaggtacctgaaagcccctagcacccgtttcgaggagatggacatccagcagaaaatcgtccaggagatgactaggatgaaggatgagaggaacagactgaggatgatcatggcgcagtacatggcggaggacctggcatcgttctccgcgcaggatctgagcaaccttgagcagcaaatcgagttctcgctgtacaaagttcgcctcaggaagcaagagctactcgaccagcagctgctcgagatccaccaaagggagatgcatatgccagcagagcagggcggctacctgtgcctcatgaacccggctgcggctattgctagcgggcagcaccagcaggctggcgagatggtgggaattaacccgaggccgttcccgtggtgggacgtgggagccagtggcagtggcagtggcagccagagccagcagcagctgctgcacggccgggacgccgcggagtcgtcgatgacggcgctcgggctgtcgncgcaactgcatgggt

SEQ ID NO: 2573 - DNA, 1488 bp, Zea mays
  unsure (1)..(1488): unsure at all n locations
  Clone ID: TF_21213723
gcacgannnnnnnnnnnnnnnnnnnnnnnnnnnnnnnnnnnnnnnnnnnnnngctacctgcctacccggcggttgcgcgccgcaatcgatcgaccggaagagannnnnnnnnnnnnnnnnnnnnnnatcggagcacggcaacaaggcgatggggcgcggcaaggtacagctgaagcggatagagaacaagataaaccggcaggtgaccttctccaagcgccggaacggcctgctcaagaaggcgcacgagatctccgtcctctgcgatgccgaggtcgccgtcatcgtcttctnnnnnaagggcaagctctacgagtacgccaccgactcccgcatggacaaaattcttgaacgctatgagcgatattcctatgctgaaaaggctcttatttcagctgaatctgaaagtgagggaaattggtgccacgaatacaggaaactgaaggccaaaattgagaccatacnnnnntgccacaagcacctgatgggagaggatctagagtctttgaatcccaaagnnnnnnnnnnnnnnnnnnnnnnnnnnnnnnnnnnnnnnnnnnnnnnnnnatcaaggaagagccaccttatggccgagtctatttctgnnnnnnnnnnnnnnnnnnnnnnnnnnnnnnnnnnnnnnnnnnnnnnnnnnnnnnnnnnnnnnnnnnnnnnnnnnnnnnnnnnnnnnnnnnnnnnnnnnnnnnnnnnnnnnnnnnnnnnnnnnnnnnnnacacatgcccaggcccagacaagctcatcatcgtcctccttcatgatgaggcaggatcagcagggactgccgcctccacacaacatctgcttcccgccgttgacaatgggagatagaggtgaagnnnnnnnntaaaactgctcgcgcgcgggcacgcagccactgccggggcaggcgcaaccgcagctccgcatcgcaggtctgccaccatggatgctgagccacctcaatgcataaggagagggtcgatgaacacatcgnnnnnnnnnnnnnnnnnnnnngcatgtggatcatgacgtacgcgtaccatatggttgctgtgcctgnnnnnatcgatcgcgagcaatggcacgctcatgcaagtgatcattgctccccgttggttaaaccctagcctatgttcatggcgtcagcaactaagctaaactattgttatgtttgcaagaaagggtaaacccgctagctgtgtaatcttgtccagctatcatgtatgcttgttactgcccagttacccttgaatctagcggcgcttttggtgagagggtgcagtttactttaaacatggttcgtgacttgctgtaaatagtagtattaatcgatttgggcatctagtaactnnnnnnnnnnnnnnnnnnnnnnnnnnnnnnnnnnntnnnnnnnnnnnnnnnnnnnnnnnagctggatccataaaatannnnnnnnnnnnnnnnnnnnnnnnnnnnnnnnnnnncttctagacagaccgcgggccctng

SEQ ID NO: 2574 - DNA, 1401 bp, Zea mays
  Clone ID: TF_ZmC18079_1
gttaattttatttcatggccttggtgatttgaacacatgttcttgtaggttgaatagaagagaagagtagaagcaccaagttgtaccaatggggcgtggaaaagtagagctgaagaagattgagaatccaacaaaccgccaagttaccttctccaagaggcggatggggttgttcaagaaggcaaacgagctagccattctttgtgatgcgcaaatcagagtcatcatattctctggcagtggcaggatgtacgagtactccagccctccatggaggtgcgtgaagcattatttatttatttatttatgtatttatttctgaagcttgtttagtacagtaacatataaggtttagctttattctgctataaggtttaatgagttcaaaagattcatgagagcttcagaactgatttgcaattattcctgccaactacaatcttacaactacaatcttatgtttagtacagtaacatcagaagagacgatgattaggtgtgtggtataagaccggtatcatatattcttattgccagcggttaatagtttcaatagttattatttatgactgagcacccatgaggggttttacgacgtttttatatcgtgctatatatcactgctgcttctggttgcagaatagcaagcgtctttgataggtacctgaaagccctagcacccgttttgaggagatggacatccagcagaaaatcgtccaggagatgactaggatgaaggatgagaggaacaggctgaggatgatcatggcgcagtaaatggcggaggacctggcctcattctccgcgcaggatctgagcaaccttgagcagcagatcgagttctcgttgtacaaagtttgcctcaggaagtaagagctactcgaccagcagctgctcgagatccgccaaagggtacacaacattccaacctccgatccgtcgcttggtagcctgtacacatctctctttcaaaaggcccgagttgttgtgacacacaagagttctgtttcgtcctaaactttcgaaggagatgcacatgccagcagagcagggcggctacctgtgcctcatgaacctggctgcggctactgctagcgggcaacaccagcaggctggcgagatggtgggaattaacccgaggccgttcctgtggtgggacgtgggagccagtggcagtggcagccagagccagcagctgctgcacggccgggacgccgcggagtcgtcgatgacggcgctggggctatcaccgcagatgcataggtacagactccatccgcgacagcccaacctgcggcaggacaccgacgtccacggctggctatggtaagctgccgccgcctgtgcctggacactcatttgatgttgactgttgtggcagaggagtgcgttctcaaatctc

SEQ ID NO: 2575 - DNA, 1201 bp, Zea mays
  Clone ID: TF_ZmC2134_5
ctcgaggccggccgggatttccggccctgcaatcctgcaccggcgcgaaagccccctcacggcctcacctccactccggtgatggccgcccctcctttacttctcagatctcagtgctcacgccgtccacggtccactagttgcatcggctcccgcataaagatccacaccacttgagcagcagctagctcaagggaaggagaaggctggaagtggaaagaagtgggttcttgcttgagctgagctcttgctgcccttgaatctgttagggagtggagaacggagtatggggcgcggcaagatcgagatcaagaggatcgagaactctaccaaccggcaggtgaccttctccaagcgccgggccggactggtcaagaaggcacgggagatcggcgtgctctgcgacgccgaggtcggcgtcgtcatcttctccagcggcggcaagctctacgactactgctcgcccaggacctcgctgtccaggatcttggagaagtaccagaccaactccgggaagattctgtggggtgagaagcacaagaacctgagtgcagagatcgacagagtcaagaaggagaacgacaacatgcagattcagctcaggcatctgaaaggcgaggacctgaactccctgcagcccagggagctgatcgctattgaagagggcctccagaatgggcagaccaacatgcgcgagaagcagatggactactggaggatgcacaagacgaatgggaagatgctggaggacgaacacaagatactgacttttaggatgcaccaacaggctgttgatctgagcggcggcatgagggagctggagaccggataccatcaggtccagcacgacagggatttcatttcccagatgccgttcaccttccgggtgcagcccaaccaccccaacctgcaggaagacgagtagctacagcctgctggatagtgttctgcatgccgctctgaactgaagctgcaggaagacgagtagctacagcctgctggatagtgttctgcatgccgctctgaactggagctcctcacctgcagcttctatctcgcgtttcatcattcagcgttagctgggtatctttcttttcatggcaccctggatgaagtctgtcagttgttactacgatgtggtcttgtcttgtgcgtctcttttgactttgctgggctgaggtcttgtcttgtgcgtctcttt

SEQ ID NO: 2576 - DNA, 1961 bp, Zea mays
  Clone ID: TF_ZmC1408_2
cattgggacctcgagccggccggggcctttaacctatcgtcagggccctgcggccggtggaaacgaaacctaggaggagcctagtggccacctagggtgaggaaaactgaggacgcgaggcgagagcgagatccaatctgcacccccccaccaaagaaagattcttccccgccggcctcgctctctcaacatccgtctcgctccttccaccctcgctgcgcctcaggcagcgagcgagcatatagcagcccaccacccacatgccgcagggccctcacccgtcgagccaattgagtggcagccagaaaaacccagagcgcgagcagcgagcgagcgcgggctcctgtgtgcagtgtgtctgcgctagagggcgaagggcacggaccgccttcgtcaataattgcggtacgaacggggcaaatccgtcgtttaaagaggtcgctgatagcgcctgctggtggcgagagagagaaagcagcagaatcgctgagggatcgtcgatccggagaggcaaaaaagccgagagatcaggcagggcaccatggggcgcgggaaggtggtgctgcagcggatcgagaacaagatcagccggcaggtgaccttcgccaagcgccggaacggcctgctcaagaaggcgtacgagctctccatcctctgcgacgccgaggtcgcgctcgtcctcttctcccacgccggccgcctctaccagttctcatcctcctccaatctgcttaagactctagagcggtaccagaggtacatctatgcttcagccgatgctgcagtgccatctagcgatcagatgcagaataactatcaagaatatgtgaagctgaaggcacgagttgaggttttacagcactcacaaaggaatcttcttggtgaagatctggccctacttagcccaagtgaacttgaccagcttgagaatcaagtagacaagaccttgaagcaaataagatcaagaaagactcaagtgttacttgatgaactttgtgacttaaagagaaaggaacaaatgctgcaagatgcaaacagggttctgaaaaggaagctgggcgagtttgaggcagaggcggcttctcccccgcagttagcgtggcaaggcgaaggcggcatgttgtcccatgaccctccacagccagaacacttcttccaggctctggagagcaacccatgtctgcaacctacataccatacgatggacatgaaccagcagccagtgccagcgccgggcggctgctatcctgcatggatgtcttagccagtgcttcattccattgccttgagaagtgtcctgaccttcacagatccctacgagctttattactgcttttgcctgcccctttgctgcttgcggtgcttactgaactgtccaaatgaccacatggtcatatataggttattgctgtctttatcttatgttgatcacggcctgctcagctgctttagcgccatgcaaaatggcttgggcgatgcacgcttgaatgggtcgaactgcttatgttttgggagtataaatcacttagcaataaaaaaaaaaaaaaaaaaatacatgaaccagcagccagagccagcgccgggcggctgctaccctcctgcgtggatggcttagccagcgctttggttccattgccttgacaagtgccgtgtccttcagagatcgctacgagtcctgctgctgcttttgcgaaccccccctttgctgcctgccatgcttaccgaactgttcaaataagaaataaccacatggtcctatataggttgctgttgtctttatcttctgttgatcacgtcctgctcagatgctttaaacgctatgcaaaatggcttagcgatgcatgctggaatgggctgaactgcttgtgttttgggagtataaatcgcttgggcgcttggcaataagtattattggcatgcctccctctgtttttataaatcattaatgaaaaggattgggt

SEQ ID NO: 2577 - DNA, 1437 bp, Zea mays
  Clone ID: TF_ZmC2121_1
ttgggtaccgccggccgggccgggatccacgccccccaaattgctggcaacgaggactctgctgcttagagctagagagaggacacggaggtagagagagacgaagctagagggacgcaaaacaagctagctaggaggaagatgggtcgcggcaaggtggagctgaagcggatcgagaacaagatcagccgccaggtgacgttcgccaagcgccgcaacgggctgctcaagaaggcgtacgagctgtcgctgttgtgcgacgcggaggtcgcgctcatcatcttctccggccgcggccgcctctttgagttctccagctcctcatgcatgtacaaaacactcgagagataccgcagctccaactactcacaagaagtaaaaactccactggacactgaaattaactaccaggattatctcaagttgaggacaagggtcgaattcctccaaactacacaaagaaatattcttggcgaggatctgggtccacttagcatgaaggagctcgagcagctggaggaccaaatagagatatctctgaagcatatcagctcaagaaagaatcaaatgctacttgatcagctctttgacctcaaaagcaaggaacaagaattgctggatctcaataaagacctaaggaagcagctgcaagaaacaaggccagagaacgcgctccgtgtctcctgggaggaaggtgggcacagtggcgcaagtgggaatgttcttgatccttatcaggggctccttcagcacctggacaacgatccttccctgcagttcgggtaccatcatcaagcctacatggatcagctgaacaacgaggacctggtggacccgaatgagcatggtcgatctggatggatatgaaatgctctgatgacccaaaataaagttgatgcacagcagggattcaccctgcaggacgcgagactatgtattgaagctaagacctcgtgtgtgttgtgttgtgtgcgaagcttggaactttataaatcgttgtcatgcccatggctttctatttctttctcggagctgcggaaaacttaagaactccagtgtattgtattgttgtgtgctgtgctgtgttgtcaaaagcttgcaactttgtatatgtacatgtatggtatttgttagtttcttggagctgcgcaaaaaaaaaaaaaaaaaaaaaaaaaaaaaaggtgccgctcggcgatctagaactagccatggatcttctatatatgttggacgtaatgcttttgataaatcctctatatataaccatatcggtcctagctttatgcatgctactgtatgtactaaactaaaaagccctacgacttttgttaagaaaaaatgttttgacgatcataactttttcttgctaaataaaaactactgtatctcattttgaattgatcgtctaataaaaaaccatgcttttgtgagtccttt

SEQ ID NO: 2578 - DNA, 2450 bp, Zea mays
  Clone ID: TF_ZmC2134_1
gaccgatccatcgccgcatcgcggaccttgaccccgcgctcactgagctaggagcagacgaggcttgagaacgagcgacggcgggatttccggccctgcaatcctgcaccggcgcgaaagccccctcacggcctcacctccactccggtgatggccgcctctcctttacttctcagtctcagtgctcacgccgtccacggtccactagttgcatcggcttcccgcataaagatccacaccacttgagcagcagctagctcaagggaaggagaaggctggaagtggaaagaagtgggttcttgcttgagctgagctcttgctgcccttggatctgtttgggagtggagaacgcagtatggggcgcggcaagatcaagatcaagaggatcgagaactctaccaaccggcaggtgaccttctccaagcgccgggccggactggtcaagaaggcacgggagatcggcgtgctctgcgacgccgaggtcggcgtcgtcatcttctccagcggcggcaagctctacgactactgctcgcccaggacctcgctgtccaggatcttggagaagtaccagaccaactccgggaagatactgtggggtgagaagcacaagaacctgagtgcagagatcgacagagtcaagaaggagaacgacaacatgcagattcagctcaggcatctgaaaggcgaggacctgaactccctacagcacagggagctgatcgctattgaagagggcctccagaatgggcagaccaacatgcgcgagaagcagatggactactggaggatgcacaagacgaatggaaagatgctggaggacgaacacaagatactgacttttaggatgcaccaacaggctgttgatctgagcggcggcatgagggagctggagaccggataccatcaggtccagcacgacagggatttcatttcccagatgccgttcaccttccgggtgcagcccaaccaccccaacctgcaggaagacgagtagctacagcctgctggatagtgttctgcatgccgctctgaactgaagctcctcacctgcagcttctatctcgcgtttcatcattcagcgttagctgggtatctttcttttcatggcaccctggaatctgcatgaagtctgtcagttgttactacgatgtggtcttgtcttgtgcgtctcttttgactttgctgggctgatttccgtgcacgtaacttgaccgacccatcgccgcatcgcggacctcgaccccgccctcactgagctaggagcagacgaggcttgagaacgagcgacggagacctagccgaagcaggagctccccatggcgaccggcaacctggcgagcgtggtggtggctgtagacggcagcgaggagagcatgaacgcgctgcagtgggcgctcgacaacctccgcctgcgccccgacggcgagctcgtcgtgctgcacgtccagccgccgcccaacatcgccgcgggactcaacccggcgcccatccccttcggcggccccagcgggttggaggtgccggcgttcacgcaggccatcgaggcgcaccagcggcgcataacgcaggcgatcctggagcacgccctgaagatttgttccgataagaatgtggaggtgaagacggaggtggtggtcggggaccccaaggagaaaatctgcgagattgcggccaaccgcaaggccgatctgctcgtcatgggctgccgtgccattgggccgctaaagagggtgttcttgggcagtgtgagcaactactgtatcaaccatgtgggctgccctgttgttgtgatcaaggggacatgatattccatcagcccagcattctttggtgtacttccattcaaggtttttgaggcttctgctgtgacatgtgtaatcctgtacgatatattactgcacattactatgcttttgttggtgctgctgagggatgaaagttgctatgtggtccctttcgttataaaggaggaagctttgtcggtcgtgtaatcgtggtaataagttggtcctgtggcggattcttgtgtatattcttgtaatcgttcaaagacatggttctgtctgaagtcccaacagcgcaaaattaccagagtctcggtttgtttgtttgaaaaaagcggccgcgaattcccgccgtttctgattcagatctgctcccgatctctagctgcgcgcgcacttcactagctcgctgttcgtgtgtgttcttgttgtgattgtgctagcgtgtccgtcacttgtgatggtgcaggcatctgaaaggcgaggacctgaactccctacagcacaggcagctgatcgctattgaagagggcctccagaatgggcagaccaacatgcgcgagaagcagatggactactggaggatgcacaagacgaatggaaagatgctggaggacgaacacaagatactgacttttaggatgcaccaacaggctgttgatctga

SEQ ID NO: 2579 - DNA, 824 bp, Zea mays
  Clone ID: TF_ZmC1442_5
cattgggtacctcgaggccggccggggaccctgccccttttcccggccgtctcgctctccaccgatattccgctcctcctgtccagtcctcctcccccgagccggctcattatatcgtccgtcgcgcagcacaacgcaagtttgctagcggccggatcagcagccacaaaacgaggagagcaaccacgctgcacacagagacgcccgtgtgtgagatatagagcaagctcgatcgaaggaaggagggaagctagagatcgtacgtcgccatggggaggggacgagttgagctcaagcggatcgagaacaagatcaaccgccaggtcaccttctccaagcgccgcaacggcctgctcaagaaggcctacgagctctccgtgctctgcgacgccgaggtcgcgctcatcatcttctccagccgcggcaagctctacgagttcggcagcgccggcataacaaaaactttagaaaggtaccaacattgctgctacaatgctcaagattccaatggcgcactctctgaaactcagagctggtaccaggaaatgtcaaaactgagggcaaaattcgaggccttgcagcgcactcagaggcacttgcttggggaggaacttggcccactgagtgtgaaggagttgcagcagctagagaaacagctcgaatgtgctttgtcacaggcaagacagagaaagacacaacttatgatggagcaagtggaagagctccgcagaaaggagcgacacctgggagaaatgacaggcaactcaaacacagcttgaagctgaaggttgtagcaactacagaaccctgcagcatgcagcctg

SEQ ID NO: 2580 - DNA, 1081 bp, Zea mays
  Clone ID: TF_ZmC7776_6
gcgcgagagagaaagagagcagcttctccatctagctagtagttagagagatgtagtactagctagctagctagtaccaccggcgacaaggtagttaggtttctcctctttctctctctagatctgtgctgctaggaaggatcggagatggggagagggaagatagagatcaagaggatcgacagcgcgacgagccggcaggtgaccttctccaagcgccgcagcgggctgttcaagaaggccaaggagctcgccatcctttgcgatgccgaggtcggcctcgccgtcttctccagcaccggccgcctgtatgacttcgctagcaccagcatgaaatgtgtgattgaaagatacagcgaggcaagagaggaacaccgtcagactatgagcgcaagtgctgaggccaaggcagttgttgggtcagcagctttctggcctgaacgtgggagatttgcagaatttagagaataagctggagacgagcctaagaaatattcgtctgaaaaaggaccaacttattttttatcagattcaagaattaaacaggaagggaagcctcatgcaccaggaaagcatagaactatacaacaaagttaaccttcttcatcaacataacactgaattacagagaaaggtgtatggacaaggagtaaataatgagcaaacaagtactactgttagacacagtacccgggatacagagaatcttccgatcaatcttgagctaagtgtgcaaagggacaaatcagaaacaccaagtgtaggcctgtagggtgagatttttgtccaaacttcaggataacacagagtcagtaaaccagatgatttaataaagaacactgaaagtgccataagactttaaatgcagtgaggatactaagccgagtgataagaaatggatatcgttggtggaattgtaagacctaacagctaaactttaagctgctagatgcgattgtttatgtatgaagaagaatgttgattttaatttagcttttcatataaagcttgccatcgcatgctattgtaaattgtactctgaattataagtcctcttggttttctaggtacatagtttttt

SEQ ID NO: 2581 - DNA, 1326 bp, Zea mays
  unsure (1)..(1326): unsure at all n locations
  Clone ID: TF_ZmC1145_13
ccggccgggggccggtccccttatccctcaccttctcctctgagtcctctctctccgccgccgcagctagctgtgacgttatgctctcgccggcgccatagcgccagcgcctaccgtctacaactatccagccttaggcttacctatcccgtcaatcaagcctctcgtaaggaacaaggaaggtagctagctagttcgtcatcggcggcggcggcgcctgttcttagaggataaggttgtcgtagcggagagggagctagccaggattttggttgagatcaggagggggagcaggcggcggcggcggcgatggggcgcggtaaggtgcagctgaagcggatcgagaacaagatcaaccgccaggtgaccttctccaagcgccgctcggggctgctcaagaaggcgcacgagatctccgtgctctgcgacgccgaggtcgcgctcatcatcttctccaccaaagggaagctctacgagtattccaccgattcatgtatggacaaaattcttgaccggtacgagcgctactcctatgcagaaaaggttcttatttcagtagaatctgaaactcagatgcgccatcaaaggataggcctgacgcagagtagaagcgttttcattgagccgaaggccctggattcgaatcagtctctctggaaatgttgagataagggcaattggtgccacgagtatagaaaactanaggcgaaggtcgagacaatacaaaaatgtcaaaagcacctcatgggagaggatcttgaaacgttgaatctcaaagagcttcagcaactagagcagcagctggagagttcactgaaacatatcagaaccaggaagaaccaacttatgctcgagtcaatttcggagctccaacggaaggagaagtcgctgcaggaggagaacaaggttctgcagaaggagaaagcgttgctcctgcctgcagctcgcggagaagcagaaagcccagcggaagcaagtgcaatggggccaaacccaacagcagaccagttcgtattcatcgtgcttcgtgataagggaagctgccccaccccnnaatatcagcattttttcctgtggcagcaggcgggaggttggtggaaggtgcagcagcgcagccacaggctcgcgttggactaccaccatggatgcttagccaaatgagcacccccccccctcagcaactcttcccgtttatccgcctggtgcagtatagtatcatcgtgatcgcgagagcagcagcagtgggtttgccgttctttttttaccaatgtatgtctatatatgtaagtatcaaatctgcaatgtgttcacccccccccccccctc

SEQ ID NO: 2582 - DNA, 3143 bp, Zea mays
  Clone ID: TF_ZmC7776_4
cagaaacagcaataagcaacgatctgcttcattattattctatttgattaagagtgtgtccttactccacacacaaaggaagttatgttattcgttgattaattcaactgtacacttgatggctacaaaaaatggtactttattttaatgttctctcttacatgtgaaattggtttgtacattgtacaataacatttgcattctcagaaatgcataagctaatgttctatgcaattttccactgcaggcagttgttgggtcagcagctttctggcctgaacgtgggagatttgcagaatttagagaataagctggagacgagcctaagaaatattcgtctgaaaaaggtttcattgcagattcttcagactccatcacatatttaacaacatatatagataccagttgctactttgtttaataactgccaatttgcaggaccaacttattttttatcagattcaagaattaaacaggaaggtttgtctacacgacttattcacaattaataacatattttacggtctcgcttcactacaaaaacttcttgtttgaattatagggaagcctcatgcaccaggaaagcatggaactatacaacaaagttaaccttcttcatcaacataacactgaattacggagaaaggtacatgcatctagaaatagttagacgaaataggatgcaattagtagaactcatctttaattttgttttgttttattccacatgtctagtgtatgtgaatcacaaaacatcgtttctttttcattttcaggtgtatggacaaggagtaaataatgagcaaacaagtactactgttagacacagtactcggaatacagagaatcttccgatcaatcttgagctaagtgtgcaaagggacaaatcagaaacacgatggttgaattgcaagacctaacagctaaactttatgctgctagatgcgattgttagatgatttaataaagaacactgaaagtgccataagactttaaatacagtgaggataactaaaccgagtgataagaaatggatatcgttggttgaattgcaagacctaacagctaaactttaagctgctagatgcgattgtttatgtattaagaagaatgttgattttaattttgcttttcatataagcttgccatgtatgctattgtaaattgtactctgaattataagtcctcttggttttctaggtacatagttttttctatacacctagatatactatgtctcttgagctaaaaccgcttataatttagaatggagtaacttcaaaagatagttataagttaaatattggatgaccttttaccattggaacttaacggaaaacaatgcactcatcagatatttacaagatatcagaaggagctattgagacataaataacgataaaacaacgagctacatgattttttttcttacaagaaatgctcttacaaaagtctataagacaagcagtacatgaacttgtcaatggcaaccagtacgtgaatttgtcaatggcaaccagtacgtgagtatagcctcactgagctttcttgaaaggtcatatcatgtccagcctcagtatgcaaatggccatgttacaggaatggtctgtagctgctgtgcggataaatgttgtttctttgataagaattgtcaagcttcacatctatggactaactcagcagcatcactcttcgttgttggccaatagaaaccaaatctgaaagccttcccgaccagagttctggacgctgcatgtgcttcgcactgcccgacatggatttcgtctaacagttgcttcccaatagccgagtgaatgcacttcatgaggactcctgtcgcacctcttctgtacagtatgccccctatgagggtgtagtgggctgattgccttgcgatgcgttccgctgccgccttgtcatccggttcttcttcattttctatgtacctgatgataggctctctccagtcattggggtccgactcaggttggctcaatgagaggatacttggttgtgatattttttgtacgaagatcccgggtggagcctgggcccgactggatcatagctttgacaacgcgtctgctgttgcgttgcggtctctttccacgtgatggaactccaatccttcgaacttgtactccgattttcggacggctgcacggtacttactcatggaatcagtcgagcaatcacaatctttgttaatctggcttatgaccactagcgaatctccatataccatcagcttcttgatgctgagtgatacggcgatgtttaatccgtggatcagtgcttcatattctgctgcattatttgatgccggaaacaatagttggagtgcatacttgagttgttcacctccaggagcaataaagagaatccttgcacctgctccttgcaacttcagcgagtcatcaaagtacattctccatacttcggtagtctccaggttgtctaggacctggtgttcagtacactcagatacgaagtcaaccagtgcctgagtcttgatagccgtgcggggccggaactctatgtcgtgagctcccagctcgcacgcccacttggctatccttccgatagcttctttgttgtgaagaatgtcccctattggaaatcctactatgactttgtggtcgtcaaagtagtgacggagcttgcgagcggttagaagtaccacgtatagcagtttctggacttggggatacttcattttttaagggcccgagaacttcgctgatgaagtagaccagatgctgcaccgggtatgtatgtccttcctccacccgctcgactactaacgcggtgctcaccacgtgagttgtgcaggagatgtataacaacagatcttctgctggctgattcggcgtggtggcttgagtactggtgtagtcaggaactttttcagtgcctctagagcttcatgtgcctctgtggtccactgaaacttgtccacctttttgagcaatttatagaatggcatgcatttctcccctagccttgatatcaacctgctcagggctgccatgcatccagtaagcctatgtacctttttctgtgatcgtggcgcttccattctcatgatggcctcgattttttctaggttagcttcaatttctcggtgactgacaatgaatccg

SEQ ID NO: 2583 - DNA, 672 bp, Zea mays
  Clone ID: TF_LIB4736-006-R1-K1-F10
agcagtggtaacaacgcagagtacttttttttttttttttttttttttttttaagaagagagaggccaacatactattttcaataatctatataaagcacacaaatcatatataagtatgcgcaaacccgcgtttctgatgatatggactggccggagggtacaatagtagtagatgcaacagctaaattcacacgtacaaatgcacgcacacagtggtggcactcacaaatatatatccctaacagttgcactaatcacaattattaataattaagcaaacgtacgtagagttacttgagatctcgatttggcacatgatataactgcatgcgtgatctatcgcgattgtgggccgggcgccgccaggtatatatagctgatttcatcatccgagctggagggttgtaggttgcagctgatgggagtagtgctgaggcatgctcacttgcagaaagtttctcgagtcgaaaggggccatgtggtcgtactcgctcgtcggcggcggcactcccatcatgtgcatcgccggctgccccgtttcattactctcagcgatcttgctcctcaggtacatgttatcagtctgcagagccatctcccttttttgcatatagtcaacttcagcatatagcagctcattcccgcgtactctggggttgtaccactgctt

SEQ ID NO: 2584 - DNA, 793 bp, Zea mays
  Clone ID: TF_LIB4764-099-A1-K1-G5
tcgaggccggccgggactagttgcatcggctagctcccgcataaagaccacgccacttgagcagcagctagctcaagggaaggagaaggctggaagtggaaagaagtgggttcttgcttgagctgagctcttgctgcccttggatctgtttgggagtggagaacgcagtatggggcgcggcaagatcaagatcaagaggatcgagaactctaccaaccggcaggtgaccttctccaagcgccgggccggactggtcaagaaggcacgggagatcggcgtgctctgcgacaccgaggtcggcgtcgtcatcttctccagcggcggcaagctctacgactactgctcgcccaggacctcgctgtccaggatcttggagaagtaccagaccaactccgggaagatactgtggggtgagaagcacaagaacctgagtgcagagatcgacagagtcaagaaggagaacgacaacatgcagattcagctcaggcatctgaaaggcgaggacctgaactccctacagcacagggagctgatcgctattgaagagggcctccagaatgggcagaccaacatgcgcgagaagcaggcagtaatccttactcttccagttgctcctgagcttatttagtcgcttgcagcacacaagcacggcatagttcattaggggaagggttttgtttctgatgttgctttatccactgttgctgtagatggactactggaggatgcacaagacgaatgtaaagatgctggaagacgacacaagatactgactttttaggatgccccaaca

SEQ ID NO: 2585 - DNA, 1272 bp, Zea mays
  Clone ID: TF_ZmC1442_2
ctcgtgcgctgatattccgctcctgtccctgtgtcctccccggatggagctagagccggctctgctcatcattatatcgtcgcgcacaaatgcagcacttgtgttgtcgtgggggtgtgtggcatattagctagcggataagcggccggccgggcagctagcagaagagagcaagctcggacctcggatcggaggaggtcggcatggggaggggacgcgtcgagctgaagcggatcgagaacaagatcaaccgccaggtcaccttctccaagcgccgcaacggcctgctcaagaaggcctacgagctctccgtgctctgcgacgccgaggtcgcgctcatcatcttctccggccgcggcaagctctacgagttcggcagcgccggcgtaactaaaactttagaaaggtatcaacattgctgctacaatgctcaagattccaacaatagtgcactctctgaatctcagagctggtaccaggaaatgtcaaaactgagggcaaaattcgaggccttgcagcgcactcagaggcacttgcttggcgaggaccttgggccactgagtgtgaaggaattgcagcagctagagaaacagctagaatgtgctttgtcacaggcaagacagagaaagacgcaagttatgatggagcaagtggaagagcttcgcagaacggagcgtcacctgggagaaatgaacaggcaactcaaacacaagctcgaagctgaaggctgtagcaactacacaaccttgcagcatgccgcctgctggccagctcccggcggcaccatcgtggagcatgacggcgccacctatcaagtgcatccgcctgcccactcagttgctatggactgtgaacccactctgcaaatcgggtaccctcatcaccagtttccgccccctgaggcagccaataatatcccaaggagcgctgccacaggcgagaacaacttcatgctgggatgggttctttgagttcttctgttaatccatccatcagatggatccatgttgaaaccaataaaaggcattcagtgctatatatatcatatgcatatccgtgctcaagtgcttgatttgccacgacgttggattgtatcgttctgtgtgtaatagctaatttagaacggcacatctattctatgtggttgtggtgtggcacttatactgtttattcatttggaccatgaatcggggtagtttgtaaaaacacatctatatatgctgccggtgcatagaattcaaagttatctgcaccgtaattattatatgctcc

SEQ ID NO: 2586 - DNA, 211 bp, Zea mays
  Clone ID: TF_LIB3117-033-P1-K1-D5
aggcccactcatcatgaatgagctcgagcagctatagaaccagatagaggtatggggggggcatatcaggggagggaggaatcatatgctactctatcagctcttttatctcaaaagcaaggaacaagagttgcatgatctcaacacagacctaagggtaatgctgcatgaaacaagcccgcatattgtgatccacgacgactcctgggag

SEQ ID NO: 2587 - DNA, 333 bp, Zea mays
  Clone ID: TF_LIB3068-025-Q1-K1-D7
tacgatccacagatgcactcacatacattccttggttaagatctgggttcacttgatgacatggaggttgatcagcttgagaagccaaccgattcattcttaaatcacatacgatccacaaggtcacagcatatgcttgaacagctcactgatcttcagacgtggtagcaaatgatgtgtgaagcatataacttcctaacaagaaagctggatgagaccagcatccaacttcatgtccaagtgtgcgttcacggcgccaactgattactctactaccagcggtactccttgccacagccagccccataacatgttgtcctttgattattcttt

SEQ ID NO: 2588 - DNA, 1255 bp, Zea mays
  Clone ID: TF_ZmC2121_2
gccggccgggccggagaagatcgataattacttgagtgtgtgagaccacgcgtccgggcgcgcgcgaggaagaagttaggttagaaggactctccaaaagcgccgcttgagtaaaaaagatctcgccccaaggggtacgacgactacgatcacacaatataagcatctctctgctgctcaaagcaacccaggccggactcccgagggagcttttttagagcaagagaggacggagaggtagagagagaagggggacggaacaagcagctagctagcagggaagatgggtcgcggcaaggtggagctgaagcggatcgagaacaagatcagccggcaggtgacgttcgccaagcgcaggaacgggctgctcaagaaggcgtacgagctgtcgctgctgtgcgacgccgaggtcgcgctcatcatattctccggccgcggccgcctcttcgagttctccagctcctcatgcatgtacaaaacactcgagagataccgcagctccaactacagcacacaggaagtaaaagctccactggagagtgaaattaactaccaggactacttgaagttgaggaccagagttgattttctccagactacacaaagaaacatccttggcgaagatctgggcccactcagcatgaaggagctcgagcagctggagaaccagatagaggtatccctgaagcatatcaggtcaagaaagaatcagatgctactcgatcagctctttgatctcaaaagcaaggaacaagagttgcaggatctcaacaaagacctaaggaaaaagctgcaagaaacaagtccgcagaatgtgatccacgacgtctcctgggaggaaggcgggcacagtgggagtagtgttcttggtccgttccagggactccttcagcaccatggcaatgatccttccctgcagacacggtaccatcagcaggcctacatggaccagctgaacgaggacatggcggaccctgacgagcacggtcggtctggatggatatgagatgctccggtccgatgccccccaaataatgtcgatgcatgcatatagtttcctgcggtatgcggaactatatatgtgttgaaactgcaccaacgattagctgcctgattgtaatggttaccttaagaactccagtgtattgtattgttgtgtgctgtgctgtgttgtcagaagcttgcaactttgtatatgtacatgtatggtattctgttagtttcttggagctgcgcaaaaaaaaaaaaaaaaaaa

SEQ ID NO: 2589 - DNA, 1174 bp, Zea mays
  Clone ID: TF_ZmC1442_3
cctagcagcacttgtgtccggcggccttgtgttcgtgggggatgtgtggcatattagctagctgataagcggccggccgaagagcaaccgcagtgagaagaagaagctcggatcggaggaggtcggcatggggaggggacgcgtcgagctgaagcggatcgagaacaagatcaaccgccaggtcactttctccaagcgccgcaacggcctgctcaagaaggcctacgagctctccgtgctctgcgacgccgaggtcgcgctcatcatcttctccggccgcggcaagctctacgagttcggcagcgccggcgtaactaaaactttagaaaggtatcaacatttctgctacaatgctcaagattccaacaatggtgcactctctgaatctcagagctggtaccaggaaatatcaaaactgagggcaaaattcgaggccttgcagcgcactcagagacacttgcttggggaggaccttggcccactgagtgtgaaggaattgcagcagctagagaaacagctagaatgtgctttgtcacaggcaagacagagaaagacacaacttatgatggagcaagtggaagagcttcgcagaacggagcgtcacctgggagaaatgaacaggcaactcaaacacaagctcgaagctgaaggctgtagcaactacacaaccttgcagcatgccgcctgctggccagctcccggcggcaccatcgtggagcatgacggcgccacctatcaagtgcatccgcctgcccactcagttgctatggactgtgaacccactctgcaaatcgggtaccctcatcaccagtttccgccccctgaggcagccaataatatcccaaggagcgctgccacaggcgagaacaacttcatgctgggatgggttctttgagttcttctgttaatccatccatcagatggatccatgttgaaaccaataaaaggcattcagtgccatatatatcatatgcatatccgtgctcaagtgcttgatttgccacgacgttggattgcatcgttctgtgtgtaatagctaatttagaacggcacatctattctattctatgtggttgtggtgtggcacttatactgtttattcatttggaccatgaatcggggtagtttgtaaaaacacatctatatatgctgccggtgcatagaattcaaagtt

SEQ ID NO: 2590 - DNA, 1352 bp, Zea mays
  Clone ID: TF_ZmC84_1
cccagagctaccacccctcttatccccacccctcctcctcctaccttttctccttcagacctcaaaatctgtgtgataggaacaagagcatgcacatccgagaagaggaggctacaccatccacagtaacaggcatcatgtcgaccctgacttcggcggggcagcagaagctgaaggagcccatatcccctggtggcggctccgcgtcggtcgctgggtccgctgcggagaggaacaacggcggcaggggcaagggcaagactgagatcaagcgcatcgagaacacgaccaacaggcaggtcaccttctgcaagcgccgcaacggcctcctcaagaaggcgtacgagctctccgtgctctgcgacgccgaggtcgcgctcatcgtcttctccagccgcggccgcctctacgagtacgccaacaacagcgtgaagggcaccattgagaggtacaagaaggcaaccagtgacaactccagcgcagctggtacgattgcagaggtcaccattcagcattacaagcaggaatctgctaggctgaggcagcagatcgttaacttgcagaactccaacagggccctgataggtgattctatcacaaccatgagccacaaggaacttaagcacttggagactaggttagacaaagctctcggaaagattagagcaaaaaagaacgatgtgctgtgttctgaagtcgagtacatgcagagaagggaaatggagttgcagaatgacaacttgtacttaaggagccgggttgatgagaatgaaagggcacaacagacagcgaacatgatgggggcaccatcgacaagtgagtatcagcagcacggttttactccttatgatccaataaggagcttcctgcagttcaacatcgtgcagcagcctcagttctattctcagcaggaggaccggaaagacttcaacgaccaaggtggaagataaatattggacctctcaagcttcagtacttatccgtgatgatgcatgactgccagtgagaaactgagctacattactgtggaattatatgtaaagactagtactactgcttcatatatgtgcatgtgcgcacacgcgcacgtagtatgcacaatttcatcccactattatggcttggcaccaactatgtctccttaattatcataggagaaaaataagtcacgcacaaaaaaattctaaagatgaggcgcagtgttggatgactgaaactgaaagataggattctcgtggatggcggtggtcatatacggcctgttttggttgatgtacccgagcgcacccgcggaatcttaaagcaagttgtgtttaattgactgcactttatatacgggttgaacagatgta

SEQ ID NO: 2591 - DNA, 1383 bp, Zea mays
  Clone ID: TF_ZmC84_2
taccctcgaggccggccgggcccaggagcaagaaacactcagaagctgcccagagctaccacccctcttatccccacccctcctcctcctaccttttctccttcagacctcaaaatctgtgtgtctcctgccgcggctagctgataggaacaagagcatgcacatccgagaagaggaggctacaccatccacagtaacaggcatcatgtcgaccctgacttcggcggggcagcagaagctgaaggagcccatatcccctggtggcggctccgcgtcggtcgctgggtccgctgcggagaggaacaacggcggcaggggcaagggcaagactgagatcaagcgcatcgagaacacgaccaacaggcaggtcaccttctgcaagcgccgcaacggcctcctcaagaaggcgtacgagctctccgtgctctgcgacgccgaggtcgcgctcatcgtcttctccagccgcggccgcctctacgagtacgccaacaacagcgtgaagggcaccattgagaggtacaagaaggcaaccagtgacaactccagcgcagctggtacgattgcagaggtcaccattcagcattacaagcaggaatctgctaggctgaggcagcagatcgttaacttgcagaactccaacagggccctgataggtgattctatcacaaccatgagccacaaggaacttaagcacttggagactaggttagacaaagctctcggaaagattagagcaaaaaagaacgatgtgctgtgttctgaagtcgagtacatgcagagaagggaaatggagttgcagaatgacaacttgtacttaaggagccgggttgatgagaatgaaagggcacaacagacagcgaacatgatgggggcaccatcgacaagtgagtatcagcagcacggttttactccttatgatccaataaggagcttcctgcagtccaacatcgtgcagcagcctcagttctattctcagcaggaggaccggaaagacttcaacgaccaaggtggaagataaatattggacctctcaagcttcagtacttatccgtgatgatgcatgactgccagtgagaaactgagctacattactgtggaattatatgtaaagactagtactactgcttcatatatgtgcatgtgcgcacacgcgcacgtagtatgcacaatttcatcccactattatggcttggcaccaactatgtctccttaattatcataggagaaaaataagtcacgcacaaaaaaattctaaagatgaggcgcagtgttggatgactgaaactgaaagataggattctcgtggatggcggtggtcatatatatgtcatgcacatctgatctctgttcagaaaaaaaaaaaaaaaaggcccctagggccct

SEQ ID NO: 2592 - DNA, 1417 bp, Zea mays
  Clone ID: TF_ZmC371_1
gccgcgcgcccggccaaaacccttacgcgcgacgcggccccctcctcttcttctctctcccaccaccgccctccccttgccatttttggtgagtgccccctttcccttccctagaccagatcctcgccccgttttccacttttgcctccaccgcccggcccaattcggataacaagctccctccgcctcgccgcgtctcctcccagccgcaggagccgccgccatccgatccggaagagggaggaggggggagggaggaggatctgtgtcccgattcgattggagctctcgtccccggcggtccaggatggtgcggggcaagacgcagatgaagcggatagagaacccggccagtcgccaggtcaccttctccaagcgccgcaacggcctgctcaagaaggcgttcgagctctccgtcctctgcgacgccgaggtcgcgctcgtcgtcttctccccgcgcggcaagctctacgaattcgccagcggaagtgcccagaaaacaattgaacgttatagaacatacacaaaggataatgtcagcaacaagacagcacatcaggacattgagcaagtaaaagctgatgctgagggcctggcaaagaaactggaagcacttgaagcttacaaaagaaaacttttgggtgagaggttggaagaatgctcctttgaagaactgcacagtttggaagtgaaactcgaaaagagccttcattgcatcaggggaagaaagactcagctgctggaggagcaactccataagctgaaggagaaggagatgaatctgcgcaagagcaacgaagatttacgtgaaaagtgcaagaagcagccgccgccgccgccgcctatgctgatggctcctccgccgcctccagcgccggcagccatcgatcacacggggccgaaggatgtcgggatggacgtggagacggagctgtacataggattgcccggcagagattaccgctcaaacaacaaagacatgactgcacagtagctgtcaggtcaggtcaggtcaggctagccagcagtgcagagaataatcttagatctgtggtgcggagaactggagatgcaagccaagcccaagccaatcaacatgataaggatcatgagtgtcgcgtcgtgttttacaaacctgtccaccgtccgtcaaaggcacatgcgccagaacgtccgtcagagaacacttaccccctcatctccctctattagctagctgctccggcctgctcatgtcgaaaccttctgttcaagtatgttctcctcctgatgaattccctgcccggcatgcattggtgagcttcttctcgagaagaagtgggtggggtggggacactgtcgttcatatttggcaacacaggtggctgctccggcctgctcatgtcgaaaccttctgttcaagtatgttctcctcctg

SEQ ID NO: 2593 - DNA, 839 bp, Zea mays
  unsure (1)..(839): unsure at all n locations
  Clone ID: TF_ZmC53_11
ctatatctatantgcagcacggacctcgcacccggccgggatgttttttccatctgcctcttgctttatgataattcaacttgcgctgattatattcttggctacctagctagaaatgtctaattaaactttgtttgctagctagattttgttgcttcttttcgcatctgatctttttatctcttctgagtgctccgcaaagccttccagtgttgaagaagctgctggaagaagagatgagctttctcttgaaggaaaaagagatgatcattgctgctggtatcgtcgccagcatgggtagaggaaggattgagatcaagaggatcgagaacaacacgagccggcaggtcaccttctgcaagcgccgcaatgggctcctcaagaaggcgtacgagctctccgtcctctgcgacgctgaggtggccctcatcgtcttctctagccgtggtcgcctctacgagtatgccaacaacagtgtcaaggctactgttgagaggtacaagaaggcacacaccgttggctcttcctctgggcccccgctcctagagcacaatgcccagcaattctaccagcaagaatcagcaaaactgcgcaaccagatccagatgctgcaaaacactaacaggcacttggttggtgactccgtgggaaacctgtcactcaaggagctgaagcagctggagagccgccttgagaaaggcatctctaagatcagggccaggaagagtgagctgctggctgcggagatcagttacatggccaaaagggagactgagcttcagaatgaccacatgacccctcagaccaagattgagggaggggagagcacagctgcagca

SEQ ID NO: 2594 - DNA, 551 bp, Zea mays
  unsure (1)..(551): unsure at all n locations
  Clone ID: TF_LIB4764-117-A1-K1-G12
gccggccgggnaaaaaaaattcaaaaaaaaaaaaaaaaaaaaaaaaaaaatctacaaggacacaacacatggttgatcaactgacagaacttcagaaaaaggaacaaatgttttgtgaagcaaataagtgtcttcgaagaagactggaggagagcaaccaggttatatggcagcatgcgtgggagcaaagcgagcggcattctgaagtgcagccgcagcagctcaatggcaataacttcttccatcccctcgatggtgctggtgaacccacccttcagatagggtatccttcagaggcactgactagctcatgcatgaccaccttcctgcccccgtggttgccatgagatcgaactactgcgcaattccgaattaataagcatggccgcatgcagctgcctgtgctatacgttgtgcttggagtgtacttcaaggttcttgcatgacaagtatgtgtgtaacatttgtgatgaacatggaaactatccacttaattctcgaataatcaatgaactgggtaagattataaaaaaaaaaaaaaaaaagcggcc

SEQ ID NO: 2595 - DNA, 1198 bp, Zea mays
  Clone ID: TF_ZmC1460_2
ggaacaagagagagaggacatagccgcacaaagggaaggagaccctcgccaacctcgaagctagtccaaactagtgggaggttgagtgcagggatcgatcgaggaagacgagacaagcttcttcttctgctgccgccgccgccagctctagctcaccacgagttactagccaatctgacaccgaccgtccatggcgcggggcaaggtgcaacttcggcgcgtcgagaacccggtgcaccggcaggtgacattctgcaagcgccgcgcggggctgctcaagaaggcccgggagctctccgtcctctgcgacgccagcgtcggcatcatcgtcttctccgcgcacggcaagctctacgacctcgccaccaccgggaccatggaggagctgatcgagaggtacaaggctgccagcgccggagaagcgacgaccgacggctgcggcaggcacaacaggatggaccccaaacatgaaaccacggtgctgcaacaggaaatcaacctgcttcagaagggactgaggtacatctacgggaacagggcgaacgagcacatgaatgttgacgaactgaacgccctagagaggtacttggagatatggatgtacaacacccgctctgcaaagatgcagataatggctcaagagatccaagcactgaaaagcaaggaaggcatgttgaaagctgccaacgagattctccaggaaaagatagtagagcagagtagtttgcttgacgtaggcatggtggtagcggaccagcagaatgggcgttttagcacagtcccactggtagaagaggtgatcagtagtaacccactgactatactgagtggctattctagctgtaggggttcagagatgggctactccttctgttgattactactagtgtgtaatacatacagtcaataatgtctgtgtaatgggttggttgttctgctgctttggtgtatcatattcgtatcatgtaggccttagataagcccttcaggagtgcccctggtattgtgtcgtcgtgccttttacttttccagaatgaagaaatattgtctattgaggagaaaaaaaaaagctgaaatggtgtatcatattagattattcgtatcatgtaggcttagataagcccttcaggagtgcccctggtattgtgtcgtcgtgcgtttacttctccagaatgaaaaaatattgtctattgaggag

SEQ ID NO: 2596 - DNA, 1138 bp, Zea mays
  Clone ID: TF_ZmC1460_3
ggggacatagccgcacaaagggaaggataccctcgccaacctcgaagctagtccaaactagtgggaggttgagtgcagggatcgatcggggaagacgagacaagcttcttctgctgctgctgccgcccccgccagctctagttcaccagagttactacttactagccaatctgacaccgatccaccgccggcaccgaccgtccatggcgcggggcaaggtgcagcttcggcgcgtcgagaacccggtgcaccggcaggtgacattctgcaagcgccgcgcggggctgctcaagaaggcccgggagctctccgtcctctgcgacgccagcgtcggcatcatcgtcttctctgcgcacggcaagctctacgacctcgccaccaccgggaccatggaggagctgatcgagaggtacaaagctgccagcgccggagaagcgacgaccgacggctgcggcaggcacaacaggatggaccccaaacatgaaaccacggtgctgcaacaggaaatcaacctgcttcagaagggactgaggtacatctacgggaacagggcgaacgagcacatgaatgttgacgaactgaacgccctagagaggtacttggagatatggatgtacaacacccgctctgcaaagatgcagataatggctcaagagatccaagcactgaaaagcaaggaaggcatgttgaaagctgccaacgagattctccaggaaaagatagtagagcagagtagtttgcttgacgtaggcatggtggtagcggaccagcagaatgggcgttttagcacagtcccactggtagaaaaggtgatcagtagtaaccccctgactgtactgagtggctattctagctgtaggggttcaaagatgggctactccttctgaccgtaataacaaacagcctgggggctccttctgttgattactactagtgtgtaatacatacagtcaataaagtctgtaatgggttggttgttctgctgctttggtgtatcatattcgattattcgtatcatgtaggccttagataagcccttcaggagtgcccctggtattgtgtcgtcgtgccttttacttttccagaatgaagaaatattgtctgttgaggagatctgatgatgtgctattaaatcaaa

SEQ ID NO: 2597 - DNA, 1241 bp, Zea mays
  Clone ID: TF_ZmC1808_2
cacaaaaggcagaagttcaggtcgataggagaaaaatgaccatgcacgccgccgctacttccttctgaatcttgaccgatctgagctgcgggccgtcgtccaaggcgaaaggagggcagccggcggcggcgccgggctccggcggcgacaggcaggggaggggcaagatcgagatcaagcgcatcgagaacacgacgaaccggcaggtcaccttctgcaagcgccgcaacggcctgctcaagaaggcgtacgagctctcggtgctctgcgacgccgaggtcgcgctcgtcgtcttctccagtaccctcgaggccggccgggacgccaacaacagtgtgaagtccaccattgagaggtacaagaaggccaacagtgacacctccaactctggcacagttgcagaagtcaatgctcagcactaccagcaggagtcctccaagctgcgccaggcgatcgatagcttgcaaaacgcaaacaggaccatagtgggagattcaatccacaccatgggcctcagggagcttaagcagatggagggcaagctggagaaggccataaacaagattagggctagaaagaatgagctcttgtatgctgaagttgaatatatgcaaagaaggatggatctgcagactgacaacatgtacctgaggagcaagatcgccgagaataataatgaaacggggcagccagcgatgaacatgattggagtgccgtcgacgagcgagtacgatcacatggcctcttttgttgactcgagaaactttcttcaggtgaacatgcagcagcagcagcctcagcattactcccatcagctgcaaccaacgaccctccaactcggatgatgaaattaagaatcttcggccaacaatccatgcacgcaagcacgcagtaaatcatgtgtgtccaactcagataaaaaaatctactctagcgtttgtataattattaataatcgtgactagtaaactgttatatatatatgtatagccatgtgtgtggtggcgcctacatatatgtcatgtggctgtacggcgagttttttttttcacaagcgtttgcagcagcatttggtgttgctcatcgatcaattaatcgcaagaaattaaacttgtcaccactgtgggtgtacgtgttaatgcagttgttgtatctgttaattgtaccctccatcagataaacgcgggtgcgcgtatgcatacttatttatgtgtatgattatttgtgtagtttatatcgcc

SEQ ID NO: 2598 - DNA, 678 bp, Zea mays
  unsure (1)..(678): unsure at all n locations
  Clone ID: TF_LIB4719-003-R1-K1-B4
aatagccttcatccccntcctgttccatacaaacacataggactaatcgccaaccactaaagccccgtacaatatgagccaatatatcataagaatgcttccagaaaatatagcgtcacaatgtgaaaaatcagctttgttgatttaatcagttttcttataaatgaaaaatgtaaaaaaaacatacttctccattatttcttgagattaatataattgttccttaaaattgttggcagacacaacttatgatggagcaagtggaagagctccgcagaaaggagcgacacctgggagaaatgaacaggcaactcaaacacaagcttgaagctgaaggttgtagcaactacagaaccctgcagcatgcagcctggccagctcccggcagcaccatggtggagcatgacggcgccacctatcatgtgcatccaacaactgctcaatcggttgcaatggactgtgaacccactctgcaaatcgggtaccctcctcatcaccagtttctgccttccgaggcagccaataatatcccaaggagcccccctggaggcgagaacaacttcatgctgggatgggttctttgagttgctctgttaatcatccatccatcagatggatgtccaaactaataaaggcactcagtgctaccatatgcatatccatgcctaagtgcttgat

SEQ ID NO: 2599 - DNA, 1785 bp, Zea mays
  Clone ID: TF_ZmC2134_2
acatgcgaacgtaacaaacacagcaacacgcccacgctagcggtttccatttccggccctgcaatcctgcaccggcgcgaaagccccctcacggcctcacctccactccggtgatggccgcctctcctttacttctcagatctcagtgctcacgccgtccacggtccactagttgcatcggctcccgcataaagatccacaccacttgagcagcagctacctcaagggaaggagaaggctggaagtggaaagaagtgggttcttgcttgagctgagctcttgctgcccttgaatctgtttgggagtggagaacggagtatggggcgcggcaagatcgagatcaagaggatcgagaactctaccaaccggcaggtgaccttctccaagcgccgggccggactggtcaagaaggcacgggagatcggcgtgctctgcgacgccgaggtcggcgtcgtcatcttctccagcggcggcaagctctatgactactgctcgcccaggacctcgtctgtccattgccctctcattctttttattcttttgcttgtttattatcgtccttcttcttttcttgtgtgcaagcaaaactgatcgcaaagacccaaacttggttggaaaggcaaaactgagtaaaaaacacggttaagcgtaaaattgaggacaccaataaaaatgagggcaccagcctaaaaaacccaaatttggtttggtggcaggctgtccaggatcttggagaagtaccagaccaactccgggaagattctgtggggtgagaagcacaagaacctgagtgcagagatcgacagagtcaagaaggagaacgacaacatgcagattcagctcaggcatctgaaaggcgaggacctgaactccctgcagcccagggagctgatcgctattgaagagggcctccagaatgggcagaccaacatgcgcgagaagcagatggactactggaggatgcacacaacgaatgggaagatgctggaggacgaacataagatactgacttttaggatgcaccaacaggctgttgatctgagcggcggcatgagggagctggagaccggataccatcaggtccagcacgacagggatttcatttcccagatgccgttcaccttccgggtgcagcccaaccaccccaacctgcaggaagacgagtagctacagcctgctggatagtgttctgcatgccgctctgaactgaagctgcaggaagacgagtagctacagcctgctggatagtgttctgcatgccgctctgaactggagctcctcacctgcagcttctttctcgcgtttcatcattcagcgttagctggtgatgataatgttggggcgaaggcgaagacgctatcattcgctcgatgccttcgtcgccttcgtcgtctcgcttcaccaacgacgccaaagacgccggtccaatgaggacttcgcgactggacttcgtgggcgtccttcgcccttctccattgcgagacgaaggcaagactccgacgatgtctgctagcctcacgtcctcatcgggtccggaagcccaagggagattcggcccactgtaacgggccccgcaaggataagcgtgttacgggcttcatctgtaatagtcttttctgtaatgacggtctgtaacctcccctggggaatattctaaggatactttgggttcccgagggcataaacgtccttgtttgagcgtggtaggcactcgggcacctataaatactcccgtacagtacccttgaggggacagattaacagagctattgtcgttccccgttg

SEQ ID NO: 2600 - DNA, 875 bp, Zea mays
  unsure (1)..(875): unsure at all n locations
  Clone ID: TF_ZmC1408_3
catgcataagtttgcttcatacctataaccataaaggagcatggtnagatatgttctcatgcatatgttcacatgaaaggattgttataaattaaagagagtagatgtggagacttttgggacctctccatccaatacctgttgcgagaagatgcagaataactatcaagaatatgtgaagctgaaagcacgagttgaggttttacaacactcgcaaaggaatcttcttggtgaagaactggctccacttagcccaagtgaacttgaccagcttgagagtcaagtagacaagaccttgaagcaaataagatcaagaaagactcaggtgttacttgatgaactttgcgacttaaagagaaaggaacaaatgctgcaagacgctaacagggttctgaaaaggaagctgcacgagtttgagacagaggctgcttctcccccacaattggcgtggcaaggcggaggcggcatgttgtcccatgaccctccacagccagaacactttttcgtggctctggagagcaacgcgcctctgcaacctacataccatactatggacatgaaccagcagccagagccagcgccgggcgactgctatcctcctgcgtggatggcttagccagcgctatggttccattgccttgagaagtgccgtgtccttcagagatcgctacgagtgctgctgcctgccatgcttactgaactgttcaaataagaaataaccacatggtcctatataggttgctgttgtctttatcttctgttgatcacgtccggctcagatgctttaacgctatgcaaaatggcttagcgatgcacgctggaatgggctgaactgcttgtgttttgggagtataaatcgcttgggcgcttggcac

SEQ ID NO: 2601 - DNA, 677 bp, Zea mays
  Clone ID: TF_LIB4764-090-A1-K1-F3
cgaggccggccggggcaatatacctgcgtgcgtgtgtgtatctgtgtgcgcgtaggtgcatggcggtgttcatataaaccggccgggtgtgggtggatccctaactggcacgagacatcctctcagcagatctacgagccctacgccttgcctctttcctccagcttctccggtagtcgtcgcccgcccccacgcccgccctttcctccatcttctccgggtgtctggagtggccatctttcgtgtgtgttgggtgggccggggcatgcgcgtgtcagagacacgcacggtcgattgctgctgaggtagctaggggatcgatcgtacgttgtcgctggatggaggaagcataacaaaaactttagaaaggtaccaacattgctgctacaatgctcaagattccaatggcgcactctctgaaactcagagctggtaccaggaaatgtcaaaactgagggcaaaattcgaggccttgcagcgcactcagaggcacttgcttggggaggaacttggcccactgagtgtgaaggagttgcagcagctagagaaacagctcgaatgtgctttgtcacaggcaagacagagaaagacacaacttatgatgggagcagtggaagagctccgcagaaaggagcgacacctgggagaaatgaccaggcaactcaaacaccagcttg

SEQ ID NO: 2602 - DNA, 1445 bp, Zea mays
  Clone ID: TF_ZmC1442_1
tggaccctcgaggccggccgggtacaggggcagccaggcacacacacacacagtgaccctgccccttttcccggccgtctcgctctccaccgatattccgctcctcctgtccagtcctcctcccccgagccggctcattatatcgtccgtcgcgcagcacaacgcaagtttgctagcggccggatcagcagccacaaaacgaggagagcaaccacgctgcacacagagacgcccgtgtgtgagatatagagcaagctcgatcgaaggaaggagggaagctagagatcgtacgtcgccatggggaggggacgagttgagctcaagcggatcgagaacaagatcaaccgccaggtcaccttctccaagcgccgcaacggcctgctcaagaaggcctacgagctctccgtgctctgcgacgccgaggtcgcgctcatcatcttctccagccgcggcaagctctacgagttcggcagcgccggcataacaaaaactttagaaaggtaccaacattgctgctacaatgctcaagattccaatggcgcactctctgaaactcagagctggtaccaggaaatgtcaaaactgagggcaaaattcgaggccttgcagcgcactcagaggcacttgcttggggaggaacttggcccactgagtgtgaaggagttgcagcagctagagaaacagctcgaatgtgctttgtcacaggcaagacagagaaagacacaacttatgatggagcaagtggaagagctccgcagaaaggagcgacacctgggagaaatgaacaggcaactcaaacacaagcttgaagctgaaggttgtagcaactacagaaccctgcagcatgcagcctggccagctcccggcagcaccatggtggagcatgacggcgccacctatcatgtgcatccaacaactgctcaatcggttgcaatggactgtgaacccactctgcaaatcgggtaccctcctcatcaccagtttctgccttccgaggcagccaataatatcccaaggagcccccctggaggcgagaacaacttcatgctgggatgggttctttgagttgctctgttaatcatccatccatcagatggatgtccaaactaataaaaggcactcagtgctaccatatgcatatccatgcttaagtgcttgatttgccacgacgtgggatatcttttaaatttatcgttctggtgtgtaataactaattaagaacggcaccttcattctatggttgtggtgtggcacttctatctatggtttttgtatttggaccacgaatgttgtaatttgtaaaaaaaatttaaagatttatctatgctgccggtgctgcggtgcatagcccggtgcatagaatccaaaaaaaaaaaaaaaaaaaaaaaaaaaaaaaaaaaaaaaaaaaaaaaaaaaaaaaaaaaaaaaaaaaaaaaaaaaagaaa

SEQ ID NO: 2603 - DNA, 831 bp, Zea mays
  Clone ID: TF_ZmC53_7
ggtaccctcggtgtcggcctgctattaaaccctttgcttgcaagtccaagaaactgctagagaggaacaagctgagatctccagcatggggaggggaaggattgagatcaagaggatcgagaacaacagtgtgaaggctacgatcgagaggtacaagaaggcacacgccgttggctcttcctctggccccccactcttagagcacaatgcccagcaattctaccagcaagaatccgcaaaactgcgcaaccagatccagatgctgcaaaacactaacaggcacttggttggtgactctgtgggaaacttgtcactcaaagagctgaagcagctggagagccgccttgagaaaggcatctctaagatcagggccaggaagagtgagctgctggctgccgagatcaattacatggccaaaagggagactgagcttcagaatgaccacatgaacctcaggaccaagattgaggagggagagcaacagctgcagcaggtgactgtggcccagtctgtcgcagcagcagctgccaccgacgtggagctgaatccgttcttggagatggataccaaatgcttcttccctggcggccccttcgcgacactggacatgaagtgcttcttccccggcagcttgcagatgctggaggcacagcagcgccagatgcttgccaccgagctgaacctcggctaccaactggcgccgcctgacactgacgttgccaacaataaccctcagcagttctaaactggatccatgagaaagccaactgtgaccgatggaagctggctgttgcctctagatgatattggcttccataacctagctattat

SEQ ID NO: 2604 - DNA, 1391 bp, Zea mays
  Clone ID: TF_ZmC53_2
tttgtttacataatcttcgagttctgatgtaagtaactatgagtttgtgatggctaggttgtttatttgtcaaactctgattgctgaattcttgtttcctcagcggcgggaaaaaaaaaaaagcatctcttttctatctaggttatctctttacatgctaaatttcagccgtatttctttctggatcagttctgtatacttctgtgatacacatcttgcgatgcggcttgtagtagtttctgctagctgagcgagatcgatctcgtttgtactttctccctttgaggaaacaactccccttttctgtgcttcaagttgttctgagatctccagcatggggaggggaaggattgagatcaagaggatcgagaacaacacgagccggcaggtcaccttctgcaaacgccgcaatgggctcctcaagaaggcctacgagctctccgtcctatgcgacgccgaggtggcgctcgtcgtcttctccagccgcggacgcctctacgagtacgccaacaacagtgtgaaggctacgatcgagaggtacaagaaggcacacgccgttggctcttcctctggccccccactcttagagcacaatgcccagcaattctaccagcaagaatccgcaaaactgcgcaaccagatccagatgctgcaaaacactaacaggcacttggttggtgactctgtgggaaacttgtcactcaaagagctgaagcagctggagagccgccttgagaaaggcatctctaagatcagggccaggaagagtgagctgctggctgccgagatcaattacatggccaaaagggagactgagcttcagaatgaccacatgaacctcaggaccaagattgaggagggagagcaacagctgcagcaggtgactgtggcccagtctgtcgcagcagcagcggccaccgacgtggagctgaatccgttcttggagatggataccaaatgcttcttccctggcggccccttcgcgacactggacatgaagtgcttcttccccggcagcttgcagatgctggaggcacagcagcgccagatgcttgccaccgagctgaacctcggctaccaactggcgccgcctgacactgacgttgccaacaataaccctcagcagttctaaactggatccatgagaaagccaactgtgaccgatggaagctggctgttgcctctagatgatattggcttccataacctagcttattatggtgtgtattgttgccttttgtgtgtgattctccttactactgatggagaataaacctaatcgattgggcataatgatcaaatgctacagcacccgtgaggctgtgatcaggacatcatgaaaaaaaaaaaaaaagcggccgttttgaatagcacttttatctattacgagg

SEQ ID NO: 2605 - DNA, 1230 bp, Zea mays
  Clone ID: TF_ZmC53_4
gccggccgggccgggagtagtggcattttgcccctgctgtgccatctctctctcgctctcgctcctctcctctttttctctcctgctcagccttgcttcccgtcccatcctttctttcccttgggcgcattcagcagcttcagcctggccggccggcctgctattaaaccactttgcttgcaagtccaagaaactgctagagaggaacaagctgagatctccagcatggggaggggaaggattgagatcaagaggatcgagaacaacacgagccggcaggtcaccttctgcaagcgccgcaatgggctcctcaagaaggcgtacgagctctccgtcctctgcgacgccgaggtggcgctcgtcgtcttctccagccgcggacgcctctacgagtacgccaacaacagtgtgaaggctacgatcgagaggtacaagaaggcacacgccgttggctcttcctctggccccccactcttagagcacaatgcccagcaattctaccagcaagaatccgcaaaactgcgcaaccagatccagatgctgcaaaacactaacaggcacttggttggtgactctgtgggaaacttgtcactcaaagagctgaagcagctggagagccgccttgagaaaggcatctctaagatcagggccaggaagagtgagctgctggctgccgagatcaattacatggccaaaagggagactgagcttcagaatgaccacatgaacctcaggaccaagattgaggagggagagcaacagctgcagcaggtgactgtggcccagtctgtcgcagcagcagctgccaccgacgtggagctgaatccgttcttggagatggataccaaatgcttcttccctggcggccccttcgcgacactggacatgaagtgcttcttccccggcagcttgcagatgctggaggcacagcagcgccagatgcttgccaccgagctgaacctcggctaccaactggcgccgcctgacactgacgttgccaacaataaccctcagcagttctaaactggatccatgagaaagccaactgtgaccgatggaagctggctgttgcctctagatgatattggcttccataacctagcttattatggtgtgtattgttgccttttgtgtgtgattctccttgctactgatggagaataaacctaatcgattgggcataatgatcaaatgctacagcacccgtgaggctgtgatcaggacatcatg

SEQ ID NO: 2606 - DNA, 1392 bp, Zea mays
  Clone ID: TF_ZmC53_5
tcccacgcgtccgcgaactcgtaaatcttgtgttcctgtgtggctgctttcgttagatctctcggctatgtctatatgatcgtcttggccagcatctctgggttcttttcgcggccgagaggaaacttactaactgatcgagtgtgccaggcatcaatctgtcgaatcgtgactcgtcgctttttcatgtcttcagattttgtccatctgtcaaatcatgtggaaaaattggcatatcttcttgtattctcttctgtcctttttaatgcctccagcggattaatttctagctagttccgttccattgatctgccttcagataatataacttaaattctcgctttcttatgcaagaactaaattacttgcatttcagctgagatctccagcatggggaggggaaggattgagatcaagaggatcgagaacaacacgagccggcaggtcaccttctgcaagcgccgcaatgggctcctcaagaaggcgtacgagctctccgtcctctgcgacgccgaggtggcgctcgtcgtcttctccagccgcggacgcctctacgagtacgccaacaacagtgtgaaggctacgatcgagaggtacaagaaggcacacgccgttggctcttcctctggccccccactcttagagcacaatgcccagcaattctaccagcaagaatccgcaaaactgcgcaaccagatccagatgctgcaaaacactaacaggcacttggttggtgactctgtgggaaacttgtcactcaaagagctgaagcagctggagagccgccttgagaaaggcatctctaagatcagggccaggaagagtgagctgctggctgccgagatcaattacatggccaaaagggagactgagcttcagaatgaccacatgaacctcaggaccaagattgaggagggagagcaacagctgcagcaggtgactgtggcccagtctgtcgcagcagcagcggccaccgacgtggagctgaatccgttcttggagatggataccaaatgcttcttccctggcggccccttcgcgacactggacatgaagtgcttcttccccggcagcttgcagatgctggaggcacagcagcgccagatgcttgccaccgagctgaacctcggctaccaactggcgccgcctgacactgacgttgccaacaataaccctcagcagttctaaactggatccatgagaaagccaactgtgaccgatggaagctggctgttgcctctagatgatattggcttccataacctagcttattatggtgtgtattgttgccttttgtgtgtgattctccttgctactgatggagaataaacctaatcgattgggcataatgatcaaatgctacagcacccgtgaggctgtgatcaggacatc

SEQ ID NO: 2607 - DNA, 2480 bp, Zea mays
  Clone ID: TF_ZmC1408_1
cccacgcgtccgcccacgcgtccgcccacgcgtccgcccacgcgtccgcgtcgtcgggggaattgagtgtgagagctcgaaaaaacccaggggatcggccggaccagcagcgagcgagcgcgagctctgcgtgcgtgtgtgtgtctgctctagattagatcacctccatcgtcaataattgcaggcagatccatagtctgctggtggcgagacaaagcaacggatcgtcgtcgatccggagagcggaaagcgcgcagatcgcgacggccatggggcgcggcaaggtggtgctgcagcggatcgagaacaagatcagccgccaggtcaccttcgccaagcgccggaacggccttagaaataaaaaaaatcgaggtgtatacaatttaggaggcatttaactggtatttaaaacttagattgtgctgcaatttaccattcttgtaatttagtattaaaaggctattcctgttttctcctgaaattcggaatgccgcaccatgtttctatccaagtaactcctttatgcatgtcttcatttgggtttggcaacctatatatcagcgccatgcgccccggccggtcgtaacctagctaggagtagctagctaggactagctagctaggagcctaagcgcccagcccagtgggtggtagcctaccaagggtgaggaagaggagctgagctaggaccgcggagcgagatccaatctgcaccccacgaacgaaaagattcttccccgccggcgtcgctctctcatccgtcgacgtctcgctccttccttcctctctctctctctctctctctctctctctctctttctctctctcagccagcagcaagcatatagcccagcaccaccccatgcccaagggccctccctctccctcgtcgtcgggccaattgagtgtgagagctcgaaaaaacccaggggatcggccggaccagcagcgagcgagcgcgagctctgcgtgcgtgtgtgtgtctgctctagattagatcacctccatcgtcaataattgcaggcagatccatagtctgctggtggcgagacaaagcaacggatcgtcgtcgatccggagagcggaaagcgcgcagatcgcgacggccatggggcgcggcaaggtggtgctgcagcggatcgagaacaagatcagccgccaggtcaccttcgccaagcgccggaacggcctgctcaagaaggcgtacgagctctccatcctctgcgacgccgaggtcgcgctcgtcctcttctcccacgccggccgcctctaccagttctcatcctcctccgatctgcttaagactctagagcggtaccagaggcacatctatgcttcagctgatgctgcagtgccatctagcgatgagatgcagaataactatcaagaatatgtgaagctgaaagcacgagttgaggttttacaacactcacaaaggaatcttcttggtgaagaactggctccacttagcccaagtgaacttgaccagcttgagagtcaagtagacaagaccttgaagcaaataagatcaagaaagactcaggtgttacttgatgaactttgcgacttaaagagaaaggaacaaatgctgcaagacgctaacagggttctgaaaaggaagctgcacgagtttgaggcagaggctgcttctcccccgcaattggcgtggcaaggcggaggcggcatgttgtcccatgaccctccacagccagaacacttcttcgtggctctggagagcaacgcgcctctgcaacctacataccatactatggacatgaaccagcagccagagccagcgccgggcggctgctaccctcctgcgtggatggcttagccagcgctttggttccattgccttgagaagtgccgtgtccttcagagatcgctacgagtgcttttgcctggccccctttgctgcctgccatgcttaccgaactgttcaaataagaaataaccacatggtcctatataggttattgctgtctttatcttatgttgatcacggcctgctcagctgctttagcgccatgcaaaatggcttggcgatgcacgcttgaatgggtcgaactgcttatgttttgggagtataaatcgcttggaatgcattggcaaaaaaaaaaggcatgcctcttgcctccctctgtttttcaacacaaatggattagcctgcgctttggttccattcccttgacaagtgccgtgtccttcagagatcgctacgagtcctgctgctgcttttgcgaaccccccctttgctgcctgccatgcttaccgaactgttcaaataagaaataaccacatggtcctatataggttgctgttgtctttatcttctgttgatcacgtcctgctcagatgctttaaacgctatgcaaaatggcttagcgatgcatgctggaatgggctgaactgcttgtgttttgggagtataaatcgcttgggcgcttggcaataagtattattggcaaaaaaaaaaaaaa

SEQ ID NO: 2608 - DNA, 1115 bp, Zea mays
  unsure (1)..(1115): unsure at all n locations
  Clone ID: TF_ZmC2121_7
cgggaaaagggantatctctgaagcatatcagctcaagaaagaatcaaatgctacttgatcagctctttgacctcaaaagcaaggaacaagaattgctggatctcaataaagacctaaggaagcagctgcaagaaacaaggccagagaacgcgctccgtgtctcctgggaggaaggtgggcacagtggcgcaagtgggaatgttcttgatccttatcaggggctccttcagcacctggacaacgatccttccctgcagttcgggtaccatcatcaagcctacatggatcagctgaacaacgaggacctggtggacccgaatgagcatggtcgatctggatggatatgaaatgctctgatgacccaaaataaagttgatgcacagcagggattcaccctgcaggacgcgagactatgtattgaagctaagacctcgtgtgtgttgtgttgtgtgcgaagcttggaactttataaatcgttgtcatgcccatggctttctatttctttctcggagctgcgcaaaaccgtctccatttctgggcttctcaggacagctggacgcgggaagccggaaccaaaaactctgttccgcactcatctcctctgctccaggcttcaacatccgcgcaggagcgaaaacgcgtcccaaatccttttttatttgccagaaatttctgagccctaacccgcgtgcgcgtggtgcctgggccgaattattaggagatccataggctgtctcactccctctggccagcagcctgactgtgaactccagactccgatcgtctggtcctctagctctcatgtcatggactcatggaggctactactcggcatgttcctggcccaggaaggagtgagcgagctcgccagcccaataccaaatgcgccggcctacaaatccaaaagccccaatttagcgctgagtcctccaggcttcgagtcatcgctgccacgtgtgtatccctacccatcgcacatgggtcacttgccacatgtttggttcagttttttctgattcttttaataagaatttggctgtaaaaagaatcttgctgtgtaaaaatccaaaagcctcaatttagcgctgagtccttcgggcttggcccttgcgtg

SEQ ID NO: 2609 - DNA, 1322 bp, Zea mays
  Clone ID: TF_ZmC8761_2
cattgggtacctcgaggccggccggccgtttggcggtgctctctgtgccgccatgcagttgccctatctttttcctcaccccggcccgttccatcaccctcacggcaagccctgatcacatcatcctgcttgtctctccccaacctagctccatctctctttcatctactcttccatcgatcgatccatcgtactgcgtgaggatggggaggggaaagattgagatcaagaggatcgagaacaccaccagccgccaggtgaccttctgcaagcgcaggaatgggctgctgaagaaggcctacgagctctccatcctctgcgacgctgagatcgctttgatcgtcttctctacccgaggccgcctatatgaatattccagtaacagcgtaaggtcgacgatcgagaggtacaagaaagcctctgccagcacttctggaacagctccagtgacagatgtcaactctcttcaatactttcagcaagaagcggcaaaactgcgccagcagatacaaaccttgcagaattcaaacaggcacctgatgggtgaatctactggcaatatgactgcaaaggagctaaagggccttgaaagcaggcttgaaagaggcattgggaggatccggtccaaaaagcatgagctgctgctcgcggagatcgaatatatgcagaagagggaagcagatctgcacaatgaaaacatgttcctgcgggccaaggttgcggaggctgagcgagctctggagcaggaggcggcagaagaccagacgatgatggtgccggcggcggtccgcggggctacgacggagctgaaagcgctgccggcgtcgttcgacgcgagtggctactaccagtaccagcagcatcagcatgtggtggccgccgcctccgctgcctcctcgtcgcagtacgcggagcagccccagggccagcaggagtaccaccaccagactgccctccacctcggctaccacgtcaagatcgactccgccgccgacaaaggcttcctctaggcgctcgcgcgcatgcatgcgtgaagcgtctcatctcataatctgacgtacggacgatgggtgccggacagctaacgtaaggcacgttgtcatcgcctgaccatggagtggagtggttgttgctatatgtgcttctatatagagagaaaataaggggtagatccgcgagtacctatgtacgcaagctgtatcaaacaatattgtcatgagatatatagattgactatataaaaaaaaaaaaaaaaaaaaaaaaaaaaaaaaaaaaaaagaaaaaaaaaaaaaaaaaaaaagggcggacgatataaaaagaac

SEQ ID NO: 2610 - DNA, 1333 bp, Zea mays
  Clone ID: TF_ZmC1408_4
ctctcagccagcagcaagcatatagcccacaccacactgcccaaggccctccctctccctcgtcctcttctcccacgccggccgcctctaccagttctcatcctcctccgatctgcttaagactctagagcggtaccagaggcacatctatgcttcagctgatgctgcagtgccatctagcgatgagatgcagaataactatcaagaatgtgaagctgaaagcacgagttgaggttttacaacactcgcaaaggaatcttcttggtgaagaactggctccacttagcccaagtgaacttgaccagcttgagagtcaagtagacaagaccttgaagcaaataagatcaagaaagactcaggtgttacttgatgaactttgcgacttaaagagaaaggaacaaatgctgcaagacgctaacagggttctgaaaaggaagctgcacgagtttgaggcagaggctgcttctccccacaattggcgtggcaaggcggaggcggcatgttgtcccatgaccctccacagccagaacacttcttcgtggctctggagagcaacgcgcgaggccggcctacattccatactatggcgagttgaggttttacaacactcgcaaaggaatcttcttggtgaagaactggctccacttagcccaagtgaacttgaccagcttgagagtcaagtagacaagaccttgaagcaaataagatcaagaaagactcaggtgttacttgatgaactttgcgacttaaagagaaaggaacaaatgctgcaagacgctaacagggttctgaaaaggaagctgcacgagtttgaggcagaggctgcttctcccccacaattggcgtggcaaggcggaggcggcatgttgtcccatgaccctccacagccagaacacttcttcgtggctctggagagcaacgcgcctctgcaacctacataccatactatggacatgaaccagcagccagagccagcgccgggcggctgctaccctcctgcgtggatggcttagccagcgctttggttccattgccttgacaagtgccgtgtccttcagagatcgctacgagtcctgctgctgcttttgcgaaccccccctttgctgcctgccatgcttaccgaactgttcaaataagaaataaccacatggtcctatataggttgctgttgtctttatcttctgttgatcacgtcctgctcagatgctttaaacgctatgcaaaatggcttagcgatgcatgctggaatgggctgaactgcttgtgttttgggagtataaatcgcttgggcgcttggcaataagtattattggcatgcctcctctgtttttat

SEQ ID NO: 2611 - DNA, 625 bp, Zea mays
  unsure (1)..(625): unsure at all n locations
  Clone ID: TF_LIB4185-037-R1-L1-D9
aattcggcacgaggctcattggctagggcggggaaggaaattgcgggaggatgcgaagccattggtgtattgcatatggtggcaccaagcatgaggcaggaactgcattacttgcaagaaagtcacaagtacactgcattacttgcaagaaagtcacaagctcattccaatctggttctctaaactttggaggtctcttacacctaggcctgaaagctcctctcccattagttgcctacaacattggaaaagagtttctcacattatcttagaatccattgcaagatcatacttgtggctttcttgcaagttgtgcagttgttgcctcaagcttgctgcctccctttgccagagctatcgttaaaacaggaagtccctggaaaggaaaatcgtgatttggaaaggaaatccatcaacaaacctgagtcggaaggatgcttangaagcgggattcaatcaattatttctggggtggtctacagccaatgcatagtctctatctgtgtgtgtgtttgtgtttcccgtacactctgttcctttcgagaggcactcgtgcctgaaatatggtttagcttcaggcaatgaagtggacgtcggatggagatccgagtgtccacgatgatag

SEQ ID NO: 2612 - DNA, 1146 bp, Zea mays
  Clone ID: TF_ZmC53_6
aggccggccgggatgtatagtttaccctcgaggccggccggggctctcgtttgtactttctccctttgaggaaagagtttccccttttctgtgcttcaagttcttctggtatcgccagcatgggtaggggaaggattgagatcaagaggatcgagaacaacacgagccggcaggtcaccttctgcaagcgccgcaatgggctcctcaagacgtatgagctctccgtcctctgcgacgctgaggtggccctcatcgtcttctctagccgtggtcgcctctacgagtatgccaacaacagtgtcaaggctactattgagaggtacaagaaggcacacaccgttggctcttcctctgggccaccgctcctagagcacaatgcccagcaattctaccagcaagaatcagcaaaactgcgcaaccagatccagatgctgcaaaacactaacaggcacttggttggtgattccgtgggaaacctgtcactcaaggagctgaagcagctggagagccgccttgagaaaggcatctctaagatcagggccaggaagagtgagctgctggctgcggagatcagttacatggccgaaagggagactgagcttcagaatgaccacatgaccctcaggaccgagattgaggagggagagcaacagctgcagcaggtgaccgtggcacggtcagttgcagcagcagcagcagctgccaccaacttggagctgaacccattcttagagatggataccaaatgcttcttcactggcggccccttcgcaacgctggacatgaagtgctttctccccggcagcttgcagcagatgctggaggcacagcagcgccagatgctcgccaccgagctgaacctcggctaccaactggcgccgcctggttctgacgctgccgacaataaccctcatcatcagttctaaactggatgcatgcacgagaagcttttcaagcgaactgtgaacgatggaagctggctgttgcctctagatgttcttggcttccatgacctagcttattatggtgtgtattgttgttgccttttgtgtgtgattctccttgctactctactgatggagaactaaacctaatcgattggacataatgatcaaatgctacagatcctgtgatgctgtgatcagg

SEQ ID NO: 2613 - DNA, 1642 bp, Zea mays
  Clone ID: TF_ZmC1089_4
ccggccggggcaagtgatgtgcaaatctttatcctacacacttaatggaattactgccatgtgtggactaatctccgcttacggccgggagctttctcctgagtcctgcctgcgctcgcctcagctcctttcttccccgccccttggcttttgcttggttgcatcgggccggtcgagccggagaggaaaagctagctagcagctaccagctctcggccggcggtggtagtctgcctgcagctggggttagctgcaagggttgggagctagccatggggaggggtcgggtggagctgaagcggatcgagaacaagatcaaccgccaggtcaccttcgccaagcgccgcaacggcctgctcaagaaggcgtacgagctctccgtgctctgcgacgccgaagtcgcgctcatcatcttctccaaccgcggcaagctctacgagttctgcagcggacagagcattaccaaaacacttgagaggtatgaaaaaaacagttatggaggaccagatactgctgtacagaacaaggagaacgagttagtccagagcagtcgtaatgagtacctcaagctgaaagcgagggtggataatttacagaggactcagaggcaagttgactctacgtttgagttgtatcttcgcaacaaaaggaatttgcttggtgaagatctggggtcacttggtgtcaaagagcttgagcagcttgagaagcaacttgattcatccttaaggcacataagatccacaaggacacaacatatgcttgatcagctcactgatcttcagaggagggagcaaatgctgtgtgaagcaataagtgcctttagagaaagctggaggagaccagcaaccaggtgcatggccaagtgtgggagcacggtgccaacttactcggctacgagaggcactctcctcaacagcaggccccatcacatgttggcaatggtttgttctttcatcccctggaagctgcagcagagccaaccctgcagatcgggttcgctcctgagcatatgaataacttcatgccaacatggctaccctgaagatggatcttgaggcaaaggaaataaataaagatgcggtggcagcatcatactctatgcaagctaagagtgacagctgtgtttcagtcacatatatgatctagtctgtgtgtcaatgtgtcgaaaaacatgtctgtgattttgttatatgaatgtaacgcgcaatgaaacatacaggactagctgcttgcttgacgatgcgtttgcgtgtatccgtataaattaaaggctataagccacatcgtatatgcgtactgcacatgcgtgcattatctaaagggcgtgattgaaagcctgcatagattctaggttaggttccacgggtgcaggtagcgtaatgtttggatgcctgtattggtctttggaccaagctggattcatggaactagaaaaaaaatataaaatattttgccttttttctgcaagctaagagtcacaccgcacgcgtccgcacatatatgatctagtctgtgtgtcaatgtgtcgaaaaacatgtctgtgattttgttatatgaatgtaacgcgcaatgtaacatacaggactagctgcttgcttgaaaaaaaaaaaaaaaatatccgtataaattacaggctaag

SEQ ID NO: 2614 - DNA, 1340 bp, Zea mays
  Clone ID: TF_ZmC29979_1
cattgggtacctcgaggccggccaggatggcaatgcgattagatagtttttctacttcggatcgtgtgcccttttattaggtttcctttatgtgactggtagtgctaggttcatttcgagctcatgcgcatatatgccccatgctaacaataattccaatcaagattcaagttgtccacccactagcgccgttaaccctttgtttgttttgtttgcttcactactcctcgatcatgtaggaaaagatctcctagcagctagccagctacagcctacagcaagagatcggcgcgttgattgcttggatcgaccgaccggccggggtggtcgccatgggacgcgggaagatcgagatcaagcggatcgagaactcgacgaaccggcaggtcaccttctccaagcgccggggcgggctgctcaagaaggccaacgagctcgccgtgctgtgcgacgcgcgcgtcggcgtcgtcatcttctccagcaccggcaagatgttcgagtactgcagccctgcctgcagcttgagggagcttattgagcagtatcagcatgctaccaacagccacttcgaggagataaaccatgatcagcaaatactgctggagatgacaaggatgaagaacgagatggagaagctggagacgggcatcaggaggtacaccggcgacgacctctcctccctcaccctcgacgacgtcagcgacctcgagcagcaactcgagtactccgtctccaaagtccgtgcaaggaagcatcagctcctgaaccaacagcttgacaacctacgtcgcaaggaacaaatcttggaagaccagaacaccttcctgtaccgcatgatcaacgagaaccagcaggccgcgttgaccggcgaggtgaagctgggggagatggcgccgctggcgatgctgcagccaccgccggcgttcgcgcactcggccaccgcctactacggcggggagtcgtcgtcgtcgggcacggcgctgcagctgatgtcggcggcgccgcagctgcacgccgacgacctcgggttccggctacagccgacgcagcccaacctgcaggacccggcggcgccgtgcggcggcctccatggccacggcctgcagctgtgattaactgcgatcaattgggaggactgtcacatgctgcatcgaagagggactattattggagcacgcagtttcaaggtcgcaaagctcgtcatgcataatttcgatcatatgttagtttgtcatctgaatagttttatatatgcatgcaatgcaatcaattctctggataataattcaactattgttatgtatctaattaagataggttcgtagactaaaaaaaaaaat

SEQ ID NO: 2615 - DNA, 1227 bp, Zea mays
  Clone ID: TF_ZmC29979_2
ttgggtacctcgaggccggccgggaagcgccctcgaggtatgcagacatagcttagccctctctctctctctctctctagctacctccatcatctccatctctactcctctgattatttcaagaaaaaaaggaaaagatctcctagcagctagccagctacagcctacagcaagagatcggcgcgttgattgcttggatcgaccgaccggccggggtggtcgccatgggacgcgggaagatcgagatcaagcggatcgagaactcgacgaaccggcaggtcaccttctccaagcgccggggcgggctgctcaagaaggccaacgagctcgccgtgctgtgcgacgcgcgcgtcggcgtcgtcatcttctccagcaccggcaagatgttcgagtactgcagccctgcctgcagcttgagggagcttattgagcagtatcagcatgctaccaacagccacttcgaggagataaaccatgatcagcaaatactgctggagatgacaaggatgaagaacgagatggagaagctggagacgggcatcaggaggtacaccggcgacgacctctcctccctcaccctcgacgacgtcagcgacctcgagcagcaactcgagtactccgtctccaaagtccgtgcaaggaagcatcagctcctgaaccaacagcttgacaacctacgtcgcaaggaacaaatcttggaagaccagaacaccttcctgtaccgcatgatcaacgagaaccagcaggccgcgttgaccggcgaggtgaagctgggggagatggcgccgctggcgatgctgcagccaccgccggcgttcgcgcactcggccaccgcctactacggcggggagtcgtcgtcgtcgggcacggcgctgcagctgatgtcggcggcgccgcagctgcacgccgacgacctcgggttccggctacagccgacgcagcccaacctgcaggacccggcggcgccgtgcggcggcctccatggccacggcctgcagctgtgattaactgcgatcaattgggaggactgtcacatgctctgcatcgaagagggactattggagcacacacgcagtttcatggtcgcaaagcccgtcatgcataatttcgatcatatgttagtttgtcatctgaatagttttatatatgcatgcaatgcaatcaattctctggataataattcaactattgttatgtatctaataaaaaaaaaaaaaaaaagcggcc

SEQ ID NO: 2616 - DNA, 936 bp, Zea mays
  Clone ID: TF_ZmC2121_4
aagatcagccggcaggtgacgttcgccaagcgccggaacgggctgctcaagaaggcgtacgagctgtcggtgctctgcgacgccgaggtcgcccttatcatcttctccagccgcggccgcctcttcgagttctccacctcctcatgcatctacaagacgctggagcgataccgcagctgcagctttgcatccgaagcatcagctccactagaggctgaattaaataattatcaggagtacttgaagttaaagacaagagttgagttcttacaaacaactcagagaaatctacttggtgaggacttgggtccacttagcgtgaaggagttagagcaacttgagaaccaaattgagatatctctcaagcaaatccgatcatcaaagaaccagcagatgctcgaccagctctttgatctcaagcgcaaggaacaacaactgcaagatgctaacaaagatttaagaatgaagatagaagaaactagtgaagaaaatgtgctgcgactgtctagccaggatattgggtgtagtggatctagtgggcatggtgatgaagccaaccaagaacaccttcaacttgctcttgatccttcgctgcatatagggtatcaagcttacatggaccacctgaacaatgattaagttgcttctttgtgcgctgtgtgctctagtggccatggatcttctatatatgttggacgtaatgcttttgataaatcctctatatataaccatatcggtcctagctttatgcatgctactgtatgtactaaactaagaagccctacgacttctgttgaggaagaatgttctgacgatcatgactttttcttgctaaataataactactgtatctcattttgaattgatcgtctaatgaagagccatgcttttgtgagtacttaaaaaaaaaaaaaaaaaaaaaaaaaaaccacccaa

SEQ ID NO: 2617 - DNA, 823 bp, Zea mays
  Clone ID: TF_ZmC2121_5
tctttgagttctccagctcctcatgcatgtacaaaacactcgagagataccgcagctccaactactcacaagaagtaaaaactccactggacactgaaattaaataccaggattatctcaagttgaggacaagggttgaattcctccaaactacacagagaaatattcttggggaggatctgggtccacttagcatgaaggagctcgagcagctggaggaccaaatagagatatctctgaagcatatcagctcaagaaagaatcaaatgctacttgatcagctctttgacctcaaaagcaaggaacaagaattgctggatctcaataaagacctaaggaagcaggtaatgcaatggcctccaaacatctctgtgtatacatacctgcaagaaacaaggccagagaacgcgctccgtgtctcctgggaggaaggtgggcacagtggcgcaagtgggaatgttcttgatccttatcaggggctccttcagcacctggacaacgatccttccctgcagttcgggtaccatcatcaagcctacatggatcagctgaacaacgaggacctggtggacccgaatgagcatggtcgatctggatggatatgaaatgctctgatgacccaaaataaagttgatgcacagcagggattcaccctgcaggacgcgagactatgtattgaagctaagacctcgtgtgtgttgtgttgtgtgcgaagcttggaactttataaatcgttgtcatgccccaaaaaaaaaaaaaaaaaaaaaaagaaaaaaaaaaaaaaaaaaaaaaaaaaaaagtactctgcgttgttaccactgct

SEQ ID NO: 2618 - DNA, 1346 bp, Zea mays
  Clone ID: TF_ZmC2086_1
agcagtggtaacaacgcagagtacttttttttttttttttttttttttttttttggtttttttttttttttttttttttttttttttgtttttgtgtgtgtgtggggcattgggtacctcgaggcgggccggggctttcctctcgttatttagccctccgttcccgaccctcatcctccgctccagacttccagcatctccgctccggctgcgctctgccttgctttcctgctacctgctctagcgcgagcgagagaggtacggcggccgatctggcggcgcaggcggagggctcggccggggccggcaagtcggcgccgaacatggggaggggccgggtcgagctcaagcggatcgagaacaagatcaaccgccaggtcaccttcgccaagcgccgcaacggcctgctcaagaaggcgtacgagctctcggtgctctgcgacgccgaggtcgcgctcatcatcttctccaaccgcggcaagctctacgagttctccagcacgcagagcatgccaaaaacacttgaaaagtaccaaaaatgcagttttgcagggcctgaaacagcactccagaatagagagaatgagcaactgaaaagtagccgcaatgagtacctcaaactgaaggcacgtgttgataatttacagcggactcaaaggaacttgcttggtgaagatcttgagtcattaggcataaaagagctggagcacctggagaagcagctcgattcgtccttgaagcacataagatctacaaggacacaacacatggttgatcaactgacagaacttcagaaaaaagaacaaatgttttgtgaagcaaataagtgtcttcgaagaagactggaggagagcaaccaggttatatggcagcatgcgtgggagcaaagcgagcggcattctgaagtgcagccgcagcagctcaatggcaataacttcttccatcccctcgatggtgctggtgaacccacccttcagatagggtatccttcagaggcactgactagctcatgcatgaccaccttcctgcccccgtggttgccatgagatcgaactactgcgcaattccgaattaataagcatggccgcatgcagctgcctgtgctatacgttgtgcttggagtgtactttaaggttcttgcatggcaagtatgtgtgtaacatttgtgatgaacatggaaactatccacttaattctcgaataatcaatgaactgggtaagattgtaacatagtgctttatgcctgaaacattaatttaggctgcgtgtgaatgatggaggttaaaaaccgcgtgttcggccaaaaaaaaaaaaaaaatggtaacagcagtttagggttggtgagg

SEQ ID NO: 2619 - DNA, 1129 bp, Zea mays
  Clone ID: TF_ZmC2086_3
gggtacctcgaggccggccggggggaaagcagtggtaacaacgcagagtacgcgggggctccagacttccagcatctccgctccggctgcgctctgccttgctttcctgctacctgctctagcgcgagcgagagaggtacggcggccgatctggcggcgcaggcggagggctcggccggggccggcaagtcggcgccgaacatggggaggggccgggtcgagctcaagcggatcgagaacaagatcaaccgccaggtcaccttcgccaagcgccgcaacggcctgctcaagaaggcgtacgagctctcggtgctctgcgacgccgaggtcgcgctcatcatcttctccaaccgcggcaagctctacgagttctccagcacgcagagcatgccaaaaacacttgaaaagtaccaaaaatgcagttttgcagggcctgaaacagcactccagaatagagagaatgagcaactgaaaagtagccgcaatgagtacctcaaactgaaggcacgtgttgataatttacagcggactcaaaggaacttgcttggtgaagatcttgagtcattaggcataaaagagctggagcacctggagaagcagctcgattcgtccttgaagcacataagatctacaaggacacaacacatggttgatcaactgacagaacttcagaaaaaagaacaaatgttttgtgaagcaaataagtgtcttcgaagaagactggaggagagcaaccaggttatatggcagcatgcgtgggagcaaagcgagcggcattctgaagtgcagccgcagcagctcaatggcaataacttcttccatcccctcgatggtgctggtgaacccacccttcagatagggtatccttcagaggcactgactagctcatgcatgaccaccttcctgcccccgtggttgccatgagatcgaactactgcgcaattccgaattaataagcatggccgcatgcagctgcctgtgctatacgttgtgcttggagtgtacttcaaggttcttgcatgacaaagtatgtgtgtaacatttgtgatgaacatggaaactatccacttaattctcgaataatcaatgaactgggtaagattggaaaaaaaaaaaaaaaaaagcggcc

SEQ ID NO: 2620 - DNA, 773 bp, Zea mays
  Clone ID: TF_LIB4742-134-Q1-K1-B1
cattgggtacctcgaggccggccggggctagagatgacaagctgagatctccagcatggggaggggaaggattgagatcaagaggatcgagaacaacacgagccggcaggtcaccttctgcaagcgccgcaatgggctcctcaagaaggcgtacgagctctccgtcctctgcgacgccgaggtggcgctcgtcgtcttctccagccgcggacgcctctacgagtacgccaacaacagtgtgaaggctacgatcgagaggtacaagaaggcacacgccgttggctcttcctctggccccccactcttagagcacaatgcccagcaattctaccagcaagaatccgtaaaactgcgcaaccagatccagatgctgcaaaacactaacaggcacttggttggtgactctgtgggaaacttgtcactcaaagagctgaagcagctggagagccgccttgagaaaggcatctctaagatcagggccaggaagagtgagctgctggctgccgagatcaattacatggccaaaagggagactgagcttcagaatgaccacatgaacctcaggaccaagattgaggagggagagcaacagctgcagcaggtgactgtggcccagtctgtcgcagcagcagctgccaccgacgtggagctgaatccgttcttggagatggataccaaatgcttctttcctggcggcccctcgcgacactggacatgaagtgcttcttccccgcagcttgcagatgctggaggcacagcagcgccagatgctt

SEQ ID NO: 2621 - DNA, 803 bp, Zea mays
  Clone ID: TF_LIB5026-042-Q1-XP2-F5
gccggccgggtcggaaaaaaaaaaacaagagagaaaggacatagccgcacaaattgaagagaccctcgccaacctcgaagctagtccaaactagtgggaggttgagtgcagggatcgatcgaggaagacgagacaagctgctgcttcttcttcttctgccgccgcagccgccgccagctcagctctagctcaccacgagttactagccaatctgacaccgatccaccgccggcaccgaccgtccatggcgcggggcaaggtgcagcttcggcgcgtcgagaacccggtgcaccggcaggtgacattctgcaagcgccgcgcggggctgctcaagaaggcccgggagctctccgtcctctgcgacgccagcgtcggcatcatcgtcttctccgcgcacggcaagctctacgacctcgccaccaccgggaccatggaggagctgatcgagaggtacaaggctgccagcgccggagaagcgacgaccgacggctgcggcaggcacaacaggatggaccccaaacatgaaaccacggtgctgcaacaggaaatcaacctgcttcagaagggactaagcattgttttgggtaggtacatccacgggaacagggcgaacgagcacatgaatgttgacgaactgaacgccctagagaggtacttggaagatatggatgtacaacacccgctctgcaaagatgcagataatggctcaagagatccaagcactgaaaagcaaggaaggcatggtgaaagctgccaacgagattctccaggaaaagatagtagagcagagtagtttgcttgac

SEQ ID NO: 2622 - DNA, 819 bp, Zea mays
  unsure (1)..(819): unsure at all n locations
  Clone ID: TF_LIB4742-069-R1-K1-D8
attgggtccctcgaggccggccggggctcgacgtagctcccttttccttgtttgcttattgcaagtctctgcaagaacctgctagagaggaacaagccttccagtgttgaagaagctgctggaagaacgaagagatgagctttctcttgaaggaaaaagagatgatcattgctgctggtatccccagcatgggtaggggaaggattgagatcaagaggatcgagaacaacacgagccggcaggtcaccttctgcaagcgccgcaatgggctcctcaagaaggcgtatgagctctccgtcctctgcgacgctgaggtggccctcatcgtcttctctagccgtggtcgcctctacgagtatgccaacaacagtgtcaaggctactattgagaggtacaagaaggcacacaccgttggctcttcctctgggccaccgctcctagagcacaatgcccagcaattctaccagcaagaatcagcaaaactgcgcaaccagatccagatgctgcaaaacactaacaggcacttggttggtgattccgtgggaaacctgtcactcaaggagctgaagcagctggagagccgccttgagaaaggcatctctaagatcagggccaggaagagtgagctgctggctgcggagatcagttacatggccaaaagggagactgagcttcagaatgaccacatgaccctcaggaccaagattgaggagggagacaacagctgcagcaggtgaccgtggcacggtcagttgcagcagcagcagcagctgccaccaacttggagctgaacccattcntagagatggataccaaatg

SEQ ID NO: 2623 - DNA, 1485 bp, Zea mays
  unsure (1)..(1485): unsure at all n locations
  Clone ID: TF_ZmC53_1
ggtccgnaaaaaaaaaaaaaaaaaaaaaaaaaaaaaaaaaaaaaaaaaaaaaaaaaaaaaaaaaaaaaaaaaaaaaaaaaaaaaaaaaaaaaaaaaaaaaaaaaacgaaaaaaaaaaaaaaaaaaaataagaaaaacaaagacaggaccggccggcctactgatcgctatcgctctcttgtgtactatatcccttcgaggaaatggatgcccttttatggacttcttcattgttaccctcgaggccggccggcctgctatattaaaccactttaccccccctctcgcggacgctcgacgcagctcccttttccttgcttgcttattgcaagtctctgcaagaacctgctagagaggaacaagctggtatcgtcgccagcatgggtagaggaaggattgagatcaagaggatcgagaacaacacgagccggcaggtcaccttctgcaagcgccgcaatgggctcctcaagaaggcgtacgagctctccgtcctctgcgacgctgaggtggccctcatcgtcttctctagccgtggtcgcctctacgagtatgccaacaacagtgtcaaggctactgttgagaggtacaagaaggcacacaccgttggctcttcctctgggcccccgctcctagagcacaatgcccagcaattctaccagcaagaatcagcaaaactgcgcaaccagatccagatgctgcaaaacactaacaggcacttggttggtgactccgtgggaaacctgtcactcaaggagctgaagcagctggagagccgccttgagaaaggcatctctaagatcagggccaggaagagtgagctgctggctgcggagatcagttacatggccaaaagggagactgagcttcagaatgaccacatgaccctcaggaccaagattgaggagggagagcaacagctgcagcaggtgaccgtggcacggtcagttgcagcagcagcagctgccaccaacttggagctgaacccattcttggagatggataccaaatgcttcttcactggcggccccttcgcgacgctggacatgaagtgctttctccccggcagcttgcagcagatgctggaggcacagcagcgccagatgctcgccaccgagctgaacctcggctaccaactggcgccgcctggttctgacgctgccaacaataaccctcatcatcagttctaaactggatgcatgtacgagaagcttttcaagcgaactgtgaacggtggaagctggctgttgcctctagatgttcttggcttccatgacctagcttattgcggtgtgtattgttgttgccttttgtgtgtgattctccttgtgctactctacctgatggagaactaaacctaatcgattggacataatgatcaaatgctacagatcctgtgaggctgtgatcaggttaaggcaaaacaagtatactgattgcttaaatgggtttacgagtgacgacaatgctatttgttgcttctattacc

SEQ ID NO: 2624 - DNA, 1253 bp, Zea mays
  Clone ID: TF_ZmC53_3
gctagattttgttgcttcctttcgcatctgatctttttatctcttctgagtgctccgcaaagccttccagtgttgaagaagctgctggaagaacgaagagatgagctttctcttgaaggaaaaagagatgatcattgctgctggtatcgccagcatgggtaggggaaggattgagatcaagaggatcgagaacaacacgagccggcaggtcaccttctgcaagcgccgcaatgggctcctcaagaaggcgtatgagctctccgtcctctgcgacgctgaggtggccctcatcgtcttctctagccgtggtcgcctctacgagtatgccaacaacagtgtcaaggctactattgagaggtacaagaaggcacacaccgttggctcttcctctgggccaccgctcctagagcacaatgcccagcaattctaccagcaagaatcagcaaaactgcgcaaccagatccagatgctgcaaaacactaacaggcacttggttggtgattccgtgggaaacctgtcactcaaggagctgaagcagctggagagccgccttgagaaaggcatctctaagatcagggccaggaagagtgagctgctggctgcggagatcagttacatggccaaaagggagactgagcttcagaatgaccacatgaccctcaggaccaagattgaggagggagagcaacagctgcagcaggtgaccgtggcacggtcagttgcagcagcagcagcagctaccaccaacttggagctgaacccattcttagagatggataccaaatgcttcttcactggcggccccttcgcaacgctggacatgaagtgctttctccccggcagcttgcagcagatgctggaggcacagcagcgccagatgctcgccaccgagctgaacctcggctaccaactggcgccgcctggttctgacgctgccgacaataaccctcatcatcagttctaaactggatgcatgcacgagaagcttttcaagcgaactgtgaacgatggaagctggctgttgcctctagatgttcttggcttccatgacctagcttattatggtgtgtattgttgttgccttttgtgtgtgattctccttgctactctactgatggagaactaaacctaatcgattggacataatgatcaaatgctacagatcctgtgatgctgtgatcaggttaaggcaaaacatgtatactgattgcttaaatgggtttacgagtgacgacaatgctatttgttgcttc

SEQ ID NO: 2625 - DNA, 833 bp, Zea mays
  Clone ID: TF_ZmC53_8
ccggccggcctgctattaaggcactttacccgcaccctctcggtgacgctcgacgcagctcccttttccttgtttgcttattgcaagtctctgcaagaacctgctagagaggaacaagctggtatcgccagcatgggtaggggaaggattgagatcaagaggatcgagaacaacacgagccggcaggtcaccttctgcaagcgccgcaatgggctcctcaagaaggcgtatgagctctccgtcctctgcgacgctgaggtggccctcatcgtcttctctagccgtggtcgcctctacgagtatgccaacaacagtgtcaaggctactattgagaggtacaagaaggcacacaccgttggctcttcctctgggccaccgctcctagagcacaatgcccagcaattctaccagcaagaatcagcaaaactgcgcaaccagatccagatgctgcaaaacactaacaggcacttggttggtgattccgtgggaaacctgtcactcaaggagctgaagcagctggagagccgccttgagaaaggcatctctaagatcagggccaggaagagtgagctgctggctgcggagatcagttacatggccaaaagggagactgagcttcagaatgaccacatgaccctcaggaccaagattgaggagggagagcaacagctgcagcaggtgaccgtggcacggtcagttgcagcagcagcagcagctgccaccaacttggagctgacccattcttagagatggataccaaatgcttcttcactggcggcccttcgcacgctggacatgaagtgctttctccccggcagcttgcagcagatgct

SEQ ID NO: 2626 - DNA, 870 bp, Zea mays
  Clone ID: TF_ZmC53_9
cggggccgggatagttcctgctaactgatcgagatcgctctcgtttgtactttctccctttgaggaaatagttccccttttatgtgcttcaagttcttctggtatcgtcgccagcatgggtagaggaaggattgagatcaagaggatcgagaacaacacgagccggcaggtcaccttctgcaagcgccgcaatgggctcctcaagaaggcgtacgagctctccgtcctctgcgacgctgaggtggccctcatcgtcttctctagccgtggtcgcctctacgagtatgccaacaacagtgtcaaggctactgttgagaggtacaagaaggcacacaccgttggctcttcctctgggcccccgctcctagagcacaatgcccagcaattctaccagcaagaatcagcaaaactgcgcaaccagatccagatgctgcaaaacactaacaggcacttggttggtgactccgtgggaaacctgtcactcaaggagctgaagcagctggagagccgccttgagaaaggcatctctaagatcagggccaggaagagtgagctgctggctgcggagatcagttacatggccaaaagggagactgagcttcagaatgaccacatgaccctcaggaccaagattgaggagggagagcaacagctgcagcaggtgaccgtggcacggtcagttgcagcagcagcagctgccaccaacttggagctgaacccattcttggagatggataccaaatgcttcttcactggcggccccttcgcgacgctggacatgaagtgctttctccccggcagcttgcagcagatgctgggagcacagcagcgccagatgctcgccaccgagctgaacctcggctaccaact

SEQ ID NO: 2627 - DNA, 1034 bp, Zea mays
  Clone ID: TF_13274179
taaagatccacaccacttgagcagcagctagctcaagggaaggagaaggctggaagtggaaagaagtgggttcttgcttgagctgagctcttgctgcccttggatctgtttgggagtggagaacgcagtatggggcgcggcaagatcaagatcaagaggatcgagaactctaccaaccggcaggtgaccttctccaagcgccgggccggactggtcaagaaggcacgggagatcggcgtgctctgcgacaccgaggtcggcgtcgtcatcttctccagcggcggcaagctctacgactactgctcgcccaggacctcgctgtccaggatcttggagaagtaccagaccaactccgggaagatactgtggggtgagaagcacaagaacctgagtgcagagatcgacagagtcaagaaggagaacgacaacatgcagattcagctcaggcatctgaaaggcgaggacctgaactccctacagcacagggagctgatcgctattgaagagggcctccagaatgggcagaccaacatgcgcgagaagcagatggactactggaggatgcacaagacgaatggaaagatgctggaggacgaacacaagatactgacttttaggatgcaccaacaggctgttgatctgagcggccgcatgagggagctggagatcggataccatcaggtccagcacgacagggatttcatttcccagatgccgttcaccttccgggtgcagcccaaccaccccaacctgcaggaagacgagtagctacagcctgctggatagtgatctgcatgccgctctgaactgaagctcctcacctgcagcttctatctcgcgtttcatcattcagcgttagctgggtatctttcttttcatggcaccctggatgaagtctgtcagtacgatgtggtctttgtcttgtgcgtctcttttgactttgctgggctgatttccgtgcatgtagtgatgatgacagcgttaattaagactgaaatgtgcaattaagttgtagcccgtgcttgcttggtctc

SEQ ID NO: 2628 - DNA, 1925 bp, Zea mays
  unsure (1)..(1925): unsure at all n locations
  Clone ID: TF_ZmC37457_1
aatccttactatattaggcataaaattaggtgtagtttatttatttactggtactacttctttagtcataattaggtgtactagcagctacgccctgacggagacaagcacacacaatagaaaagagcgccctcgtgctcagagtgctcgcctttagtttcgtggctactatatactagttgcgacgatttttattttctttctcttctgggctatcattagcacggccatttaggggtaatgagcancggccaataaacaaagccctgagatgcatggggtagccaatcgggtgtcgccgtgcgcgcgcgcgcgcgtctggcctcctccttccctttccttgctaaataaagcaagtagcagataggggaaagtctgctcgcaagttgcatccgccctgcgccaagaaaagccatcgttcttcccacaaacgcacacatagaagcatcattcccctctcggctagcttcctcctctctccctcctcttcgtcttcctctttccttctcccttgggaaacctgctgcctttgagctttcttcttcgagtgctcccaccagatctcctcctccttaccttctttggcacgttcggcggcgcgcgcggagaaagatagatcccgccatcgtcgtcgccgtccttgcttccgatcggagggccacaaccacaacctctcgctccttagcgtgcgcgcgcgagccagggtcaagaagagagctagctataggccggagatcgatggggaggggaaagatcgtgatccgcaggatcgataactccacgagccggcaggtgaccttctccaagcgccggaacgggatcttcaagaaggccaaggagctcgccatcctctgcgatgcggaggtcggcctcgtcatcttctccagcaccggccgcctctacgagtactctagcaccagcatgaaatcagttatagatcggtacggcaaggccaaggaagagcagcaagtcgtcgcaaatcccaactcggagcttaagttttggcaaagggaggcagcaagcttgagacaacaactgcacaacttgcaagaaaattatcggcagttgacgggagatgatctttctgggctgaatgtcaaagaactgcagtccctggagaatcaattggaaacaagcctgcgtggtgtccgcgcaaagaaggaccatctcttgatagatgagattcacgatttgaatcgaaaggcaagtttatttcaccaagaaaatacagacttgtacaataagatcaacctgattcgccaagaaaatgatgagttacataaaaagatctatgagactgaaggaccaagtggagttaatcgggagtcaccgactccattcaactttgcagtagtagaaaccagagatgttccagtgcaacttgaactcagcacactgccacaacaaaataacattgagccatctactgctcctaagctaggattgcaattaattccatgaagaagagtaaaactgccgtcttatgatgctgaaggaaactatttattgtgaagagatgatactcagagaaagacatatttgtggcagggagatttgagatatgaacttataaatgtaatgcaaataattttcagactggaatggggtcgtggaattcagaggatgattgctttctagttgcatttgatgtttgatgagacttttctcatgtgaaacgtttattaaaacttcaaaatggtgcagatgttgctactacccttgttaggcttgtataaatatttgactttgtgtactagcattacgaaaacagaaaagaagacagacagccgtgataggggacaatgatgcgatctaggagtacaaacagagtctagtttccactcagttgagttttatattgctctcaagcgttatcaagggtttagtaggatacagatataattaagatacagtggttaaatcgc

SEQ ID NO: 2629 - DNA, 1082 bp, Zea mays
  Clone ID: TF_ZmC1460_4
gggagggtagaatatagtgcaaggaggagcctcgccaacctcgaagctagtccaaactagtgggaggttgtgtgcagtgatcgatcgaggaagacgagaagcttttcgctgctagctaccgcccgcccggtgtctgtcgatctgtgacgaccgccaagccgaagccgaaggcagcagcagtcgtcaagttcatcgatctcggcatcgacgaccgcccggccgtccatggcgcgaggcaaggtgcagctgcggcgcatcgagaacccggtgcaccggcaggtgaccttctgcaagcgccgcgccgggctgctcaagaaggcccgggagctctccgtcctctgcgacgcccacgtcggcatcatcgtcttctccgcgcacggcaagctctacgacctcgccaccaccgggaccatggaagagctgatcgagaggtacaggactgccagcagcggagaagcagccgacggctgcggcgacaataacagaatggacgcaaagcaagaaaccatggtgctgcaacaggaaatcaacctgcttcagaaaggcctgaggtacatctatgggaacagaacaaatgaacacatgaatgttgaagaactgaatgctctagagaggtacttggagatatggatgtacaacatccgctctgcaaagatgcagataatgattcaagagatacaagcactgaaaagcaaggaaggcatgctgcaagctgctaacgaagttcttcaggagaagatagtagaacagagtagtttgcttgacgtaggcatggttgtagcggatcaacagaacgggcattttagtacagtcccactggtagaagagatgatcagtaacccgctgactatactgagtggctattctaactgtaggggctattccttctgacactgtcataacaccctggggggctaactctctgttgattactactactagtgtgtaatactaccagttaataaagcttgtgtaacttgccatatagccagccctccaggagtgccctggtattgtatctgtgtgctttttttttttacttcccataataaagaactgttgaggagctctcatgttgtgct

SEQ ID NO: 2630 - DNA, 1203 bp, Zea mays
  Clone ID: TF_ZmC17645_1
gctcggccctcggctccttaaggcttcatcttctcaagttccggccgtccatcgccgccgccggcctcggccggctcagttcctgcctgccagccaaaaattccacaccacccacccagagactgaggcgcgcggtggtgaagacgtgatcgaaagtcgaaaccaaaacgatatatagatggggcgcgggcgcggcaaggtggaggtgcgtcgcatcgagaacagcgtgagccggcaggtgaccttctcgaagcggcggcgcgggctggcgaagaaggcgcgggagctggccgtgctctgcgacgccgacgtcgcgctgctcgtcttctccgacaagggcaggctccacgacttcgccgcgcacggcagcatggagcgaatccttggccgatacgagaggtacttgctatgtgaagatagggacgatgtaacccaagactaccctgaagaatcgcaggggaacatgagctatgaccacatcaagttgaggtccaaactcgaagctataaagaagagccaaaggaatctcatgggggagcagctcgagtccctgacgttcagagaggtacagcagcttgagcaccggatagacagcgctctgaggaacgtcagatccaggaaggaccacatcttgctcaactcgatccaggagctccggaacaaggaaacttttctgatggaacaaaatggcattctagagaaggagaaggctgcagtgggggcatcatcatccctgcacaccaccaccagcaccgcagcagcttcttccacggcagcggcggcggcggcccttccaaacctgaacatctgtcccgacgactccgacgagccaggaatggcggcggcggcggggatcaggttgccgtggtggatgctccagccatctgccgtcagccaacggcaggaacagcactgaactgcttgtcttctcagatgatccacgctgcttgttccagctcgattctagtttctattagaactcgattcagctaaggcgggaatttgtgatctttctattgatctgccgttcttattggttgctagatcgattttatccttgtccttcttagtatctgaacctctgctgtgtcgtttgtcgtagttcttggtcgcaaaagctccggtttgcgtctctagtttggtttggttcctgtaaaatctgctgttgtccttcaatgagctgtgcaggccagttagatgatt

SEQ ID NO: 2631 - DNA, 1420 bp, Zea mays
  Clone ID: TF_ZmC1089_1
aagctatcgcgagacgcctgcggttggcctttcgcctctagggctccggctcgcccaccaccttaccccccaatccctttcgtctcgccctttttaaccaatcccctctccacgactccaccgccggccgggacccatctcctgagtcctgcctgcgctcgcctctcctttcttccccgccccttggcttttgcttggttgcatcgggccggtcgagccggagaggaaaagctagctagcagctaccagctctcggccggcggtggtagtctgcctgcagctggggttagctgcaagggttgggagccatggggaggggtcgggtggagctgaagcggatcgagaacaagatcaaccgccaggtcaccttcgccaagcgccgcaacggcctgctcaagaaggcgtacgagctctccgtgctctgcgacgccgaagtcgcgctcatcatcttctccaaccgcggcaagctctacgagttctgcagcggacagagcattaccaaaacacttgagaggtatgaaaaaaacagttatggaggaccagatactgctgtacagaacaaggagaacgagttagtccagagcagtcgtaatgagtacctcaagctgaaagcgagggtggataatttacagaggactcagaggaatttgcttggtgaagatctggggtcacttggtgtcaaagagcttgagcagcttgagaagcaacttgattcatccttaaggcacataagatccacaaggacacaacatatgcttgatcagctcactgatcttcagaggagggagcaaatgctgtgtgaagcaaataagtgccttagaagaaagctggaggagaccagcaaccaggtgcatggccaagtgtgggagcacggtgccaacttactcggctacgagaggcactctcctcaacagcaggccccatcacatgttggcaatggtttgttctttcatcccctggaagctgcagcagagccaaccctgcagatcgggttcgctcctgagcatatgaataacttcatgccaacatggctaccctgaagatggatcttgaggcaaaggaaataaataaagatgcggtggcagcatcatactctatgcaagctaagagtgacagctgtgtttcagtcacatatatgatctagtctgtgtgtcaatgtgtcgaaaaacatgtctgtgattttgttatatgaatgtaacgcgcaatgaaacatgcaggactagttgcttttgcttgtcgatgcgtttgcgtgtatccgtataaattaaaggctataagccacatcgtatatgcgtactgcacatgcgtgcatatctgttctgtgtaaaaaaaacaccccagaggattacgcgtgcaaggcctaaaaaaaaaaaaaaaaaaaaaaaaaaaaaaaaaaaaaatataaaaaaccccccccccc

SEQ ID NO: 2632 - DNA, 717 bp, Zea mays
  Clone ID: TF_ZmC2134_9
ggctggaagtggaaagaagtgggttcttgcttgagctgagctcttgctgcccttggatctgtttgggagtggagaacgcagtatggggcgcgggaagatcaagatcaagaggatcgagaactctaccaaccggcaggtgaccttctccaagcgccgggccggactggtcaagaaggcacgggagatcggcgtgctctgcgacgccgaggtcggcgtcgtcatcttctccagcggcggcaagctctacgactactgctcgcccaggacctcgctgtccaggatcttggagaagtaccagaccaactccgggaagatactgtggggtgagaaacacaagaacctgagtgcagagatcgacagagtcaagaaggagaacgacaacatgcagattcagctcaggccagtgtttctgattcagatctgctcccgatctctagctgcgcgcgcacttcactagctcgctgttcgtgtgtgttcttgttgtgattgtgctagcgtgtccgtcacttgtgatggtgcaggcatctgaaaggcgaggacctgaactccctacagcacagggagctgatcgctattgaagagggcctccagaatgggcagaccaacatgcgcgagaagcagatggactactggaggatgcacaagacgaatggaaagatgctggaggacgaacacaagatactgacttttaggatgcaccaacaggctgttgatctg

SEQ ID NO: 2633 - DNA, 1257 bp, Zea mays
  Clone ID: TF_ZmC1808_1
actaaagggaacaaaagctggagctccaccgcggtgcgccgctctagaactagtggatcccccgggctgcaggaattcggcacgagctcttccctgcagatcgagaggcactgcacaccaccaccaccaccaccaccaccaccacaccatgctcaacatgatgactgatctgagctgcgggccgtcgtccaaggtcaaggagcaggtggcggcggcgccgacgggctccggcgacaggcaggggcaggggagaggcaagatcgagatcaagcgcatcgagaacacgacgagccggcaggtgaccttctgcaagcgccgcaacggcctgctcaagaaggcgtacgagctctcggtgctctgcgacgccgaggtcgcgctcgtcgtcttctccagccgcggccgcctctacgagtacgccaacaacagtgtgaagtccaccattgagaggtacaagaaggccaacagtgactcctccaactctggcacagttgcagaagtcaatgcccagtactaccagcaggagtcctccaagctgcgacagatgatccacagcttgcaaaacgcaaacactaggaacatagtgggagattccatccacaccatgggcctcagggatcttaaacaaatggagggcaagctggagaaagccataatcaagattagagctagaaagaatgagctgctatacgctgaagttgactatatgcaaaaaagggagatggatctgcagactgacaacatgtacctgaggagcaagatcgctgagagtaatgaaacggggcagccggcgatgcacatgacgatgggagcgccgccgacgagcgagtacgaccacatggcccctttcgactcgagaaactttctgcaagtgagcatgcctcagcactactcccatcagctgcaacctacaaccctccagctcggatgatgaaatcagcgctatacctggcggcgcccggcccccaatcgagatagatcacgcatgcagttatatcatgtgccaaatcgagatctcaagtaactctacgtacgtttgcttaattattaataattgtgattagtgcaactgttagggtatatatatttgtgagtgccaccactgtgtgcgtgcatttgtacgtgtgaatttagctgttgcatctactactattgtaccctccggccaggccatatcatcagaaacgcgggtttatttacgcatacttatatatatatataatttgtgtgctttaatagattgaaaatagtatgttgggc

SEQ ID NO: 2634 - DNA, 897 bp, Zea mays
  Clone ID: TF_ZmC2121_3
cccacgcgtccggatttctaaagtaggtcagtggtactggattcttttttttaaaaaaaagtatatgctattttctattttctttagaactaggtttgtcggtttgtttggcaaacacgatctatgtactgacctgaactttgtgtattccctttttccaagcaggatctcacgttgacttactctgtttcgttgcgctctttcttttcaaaactagattaactaccaggattatctcaagttgaggacaagggtcgaattcctccaaactacacaaagaaatattcttggcgaggatctgggtccgcttagcatgaaggagctagagcagctggaggaccaaatagagatatctctgaagcatatcagctcaagaaagaatcaaatgctacttgaccagctatttgatctcaaaagcaaggaacaagaattgctggatctcaataaagacctaaggaagcagctgcaagaaacaaggccagagaacgcgctccgtgtctcctgggaggaaggtgggcacagtggcgcaagtgggaatgttcttgatccttatcaggggctccttcagcacctggacaacgatccttccctgcagttcgggtaccatcatcaagcctacatggatcagctgaacaacgaggacctggtggacccgaatgagcatggtcgatctggatggatatgaaatgctctgatgaccccaaataaagttgatgcacagcagggattcaccctgcaggacgcgagactatgtattgaggctaagacctcgtgtgtgttgtgttgtgtgcgaagcttggaactttataaatcgttgtcatgcccatggctttctaaaaaaaaaaaaaaaaaaaaaaaaaaaaaaaaaaaaaaaaaaagggcggccgtcgcgttcta

SEQ ID NO: 2635 - DNA, 1488 bp, Zea mays
  unsure (1)..(1488): unsure at all n locations
  Clone ID: TF_ZmC371_4
atacccttctcgtctccgcccagcagcaacggcacccaccgaatccgcccctccctctttccgttccgcctcgttgcgctcgctctcgctgcgccgcccgccccacctcacggagctcacggcaacaccggcagggaaggaaaaggaaagccgaggaggcgaggagagagagatacaaggcaggcagccaggcacaggcagcccgcggctggctacggggccaaaacccttacgcgcgacgcggccccctcctcttcttctctctcccaccaccgccctccccttgccatttttgccgcaggagccgccgccatccgatccggaagagggaggaggggggagggaggaggatctgtgtcccgattcgattggagctctcgtccccggcggtccaggatggtgcggggcaagacgcagatgaagcggatagagaacccggccagtcgccaggtcaccttctccaagcgccgcaacggcctgctcaagaaggcgttcgagctctccgtcctctgcgacgccgaggtcgcgctcgtcgtcttctccccgcgcggcaagctctacgaattcgccagcggaagtgcccagaaaacaattgaacgttatagaacgtacacaaaggataatgtcagcaacaagacagcacatcaggacattgagcaagtaaaagctgatgctgagggcctggcaaagaaactggaagcacttgaagcttacaaaagaaaacttttgggtgagaggttggaagaatgctcctttgaagaactgcacagtttggaagtgaaactcgaaaagagccttcattgcatcaggggaagaaagactcagctgctggaggagcaactccataagctgaaggagaaggagatgaatctgcgcaagagcaacgaagatttacgtgaaaaggtaatgggggcgaaaacattttgcagacgctgcactgcggcaagcggcatgccaacaacccaagaaaacagtgcaagaagcagccgccgccgccgccgcctatgctgatggctcctccgccgcctccagcgccggcagccatcgatcacacggggccgaaagatgtcgggatggacgtggagacggagctgtacataggattgcccggcagagattaccgctcaaacaacaaagacatgactgcacagtagctgtcaggtcaggtcaggtcaggccagccagcagtgcagagaataatcttagatctgtggtgcggagaactggagatgcaagccaagcccaagccaatcaacatgataaggatcatgagtgtcgcgtcgtgttttacaaacctgtccaccgtccgtcaaaggcacatgcgccagaacgtccgtcagagaacacttaccccctcatctccctctattagctagctgctccggcctgctcatgtcgaaaccttctgttcaagtatgttctcctcctgatgaaaaaaaaaaaaaaaaaaaaaaaaaaaagtcnaacaaaaactaaaaaaactcaaaa

SEQ ID NO: 2636 - DNA, 753 bp, Zea mays
  unsure (1)..(753): unsure at all n locations
  Clone ID: TF_LIB4172-011-Q1-L1-C9
gacgcctgcaggttccggtccggaattcccgggtcgacccacgcgtccgcccacgcgtccggttagaagccgtctgcatgcctgcttgctggctgggagcgcacgaagctgtggaggaggacaactgaggagcgtggagcgttcccgaaccccaaagagaatcccaatgtgagacctgagtgtttgagaccaaaccatccctgggcagtctgatgagaggaagccgcctgcctagtcccctttctcgggctctacttggttgatcgcggaacccagaagagaactagtcaactcaagttttaagccatggcccaaagactgatgacattcagagacgtggccgtagacttctctccagaggagtgggagtgtctgagcctggaccagaggagtttatacagagatgtgatgctggagagctacagccacctcgtctcagtgggactttttgtttatcggccacatctgttctccttgttggaaaaaggacaagacccctggatgattttgagggatgagacaaggggaccttatccagacatagatttcagttctcagaacaagaagttcctgggaaaacctagcacatatgaagaattatctcaaagggaaatgaaggaatattttagaaaacgcagtcttgaaagatttctgtttttggagatggnctgngatggcanaaatcagtttcaaacgcatcanaatcaggaatattctaagcanctggcagtcgcctatgaaaaagtgctcact

SEQ ID NO: 2637 - DNA, 605 bp, Zea mays
  Clone ID: TF_LIB3597-024-Q1-K6-D9
gttggccgcgccctgtgccgctgaggaccgcagcaggcgccactaccgtttcttattctgagagcccaaggaagcggacagcgcggctttgggagacggaggttgcgcagcagagcggcgcgacagagggcgcttcggcctcgaaggcggatcaggttgcagcgctgagaccactgctcaccaactgcagattccagctcacctgcacctgagcttcctggtctacagaagagccagtctgaggcctcggaagatctccgccctttgtccagggcagaccgagatggccacggcccaggaattgttgaccttcagggatgtgtgtgtggacttcaccctggaggagtggcagcaactggactcggctcagaagaacctctacagggatgtcatgctggagaactacagccacctggtgtccgtgggatacctaggtgccaaaccagatgtggtcctcagattgggacgaggagaggaggccggcatgacagagggagagacgccaacgtggaagtatccagatgtggcccctctggatgtgaacaggactgggctactttggaaagaagcttcctgccagcatccagatgcctatgatgagaaaa

SEQ ID NO: 2638 - DNA, 624 bp, Zea mays
  unsure (1)..(624): unsure at all n locations
  Clone ID: TF_LIB4073-009-Q6-K2-F5
ctcgcgtacgcgcaggttcctgccgacccggaagcggatctcgcggggctactggcgctctcggcccacacaatatgacctcggggaggatgcgaggaagatgaactgtgatgatccacttcttcttaatgaatgactgacttacctgagaaagaaactcagaggaagaggaaagaaagaagaggagggaatggctctttctcagggactgtttacattcaaggatgtggccatagaattctctcaagaggagtgggagtgcctggaccctgcccagagggccttgtacagggacgtgatgttggagaactacaggaacctgctttctctcgatgaggataacatccctccagaagatgatatttctgttggatttacaagcaagggattatcaccaaaggaaaataataaagaggaattataccatctggtgatattagaaagaaaggaaagccatggcatcaacaattttgacctcaaggaagtctgggaaaatatgcctaagtttgacagcctgtgggactatgatgtaaaaaattacanaggaaatgccttgacctgtaacaaanatctcactcacanganagatcaacnnacatataaatncctcatacatttctcttt

SEQ ID NO: 2639 - DNA, 366 bp, Zea mays
  Clone ID: TF_ZmC180138_1
ggcttcgcttgtgtcaactgtatttttagggctcctgcgccgaaacgaacacttaggcttttggtgttctggcgcgggaaggtccgatctttccggtcggaggaagaaatttcaggggaagaagcctgaagaagaatggccagctccagttctcaacacacggtctgtgggttagtgacatttagggatgtggctgttgacttctctcaggaggagtgggcctgcctggatgctactcagaaggtcctctacagggacacgatgttggagacctacagccacctcgtcacagtggtggggagttgcctttccaagccacacctgatcaccttactagagcaggagaaagagccctggatggctgtg

SEQ ID NO: 2640 - DNA, 549 bp, Zea mays
  unsure (1)..(549): unsure at all n locations
  Clone ID: TF_LIB3595-024-Q1-N6-E1
cagtgaagatttcactacttgatgcacaacagtttcattgaaaatgacagcaattccatggttcgctgatatgatccagctagcacagcagaggataccaaaatagagtagtagtctagtatcctcggggcatagatggaataacatacatcacgcggttttaagtagaaacaggaggcttcccaactctctcgcctccaaacccccactgtttaaatggcgtggtcaggaggaggaatcagaggccggttgttctggctgtgcttcagcagcgcgcttgacggacgcgcacttgatcaagtggttgtagcttcccttctccttgaaaagttgggagaaatggtgtttgcagtagaggatgccctccaaggctgcatagttggaaggtgtaatcgcgcagcccccgtgggagcatttgaagcatgacttatggtaggacttctcttcgactgttacctgcaatgtttttaacagccatgcattagaaccactgtccacanaaagagttttgataactcaaggcaatcaagaaaggataattagacgaat

SEQ ID NO: 2641 - DNA, 350 bp, Zea mays
  Clone ID: TF_LIB148-007-Q1-E1-H9
ggcgcgtgcgtgcgttcgtgcatccaccgccacgcttctgggcaccatgtctttcaccggcacgcacgccacgtgtccggcgtgcgactggaccgtccacgtcatcgccgtcttcatggccgtcggttgcatctaccatatcggatgcttcaagtgcagctaatgcatcggggtcctctcgatgtgcaggtcctcctccatggacggtgtgctgtactgcacgacctagttcgatcagctcttcaaagagactgggaccttctcctacaccttcacgccatctgccatgtcaatagatgacggtgaagtgacatggtgctcaaccaatctgtcgtctgcattttctggtt

SEQ ID NO: 2642 - DNA, 282 bp, Zea mays
  Clone ID: TF_LIB3066-032-Q1-K1-B12
tgcgacaagaccgtccacttgatcaacctcctcacagccgacggcgttacctaccatatgacatgcttcaagtgcagccactgcaaagggatcctctacatgagcagctactattgcatggacggcgcgctgaactgcacgacccacttcgagcagatcttcgtggacaccgacagcttctccaagatcttcacgccaagtggccagtcttcagacatgggtgtactggcctgaggccccagcatgctatcatctgcgtagtctggtactcacgagaagtgt

SEQ ID NO: 2643 - DNA, 2361 bp, Zea mays
  Clone ID: TF_ZmC1365_1
aaagttttcgttttgctataacgaaagatggccgggctcatcgttgcttttgcgcgtagcagggatgactgactgggaggaggagggagacgagaacgtgatgccgtgccgcccgcccgcccgcccgcccttgggctcgcttcaccttcaattcttttctttctgtcgcggccagcgccttcgcatcgcaccacgccgctttattctctaagaaccccgtcctctccattccatctcctcctccgtccatcgtgcagatcttgcttcttcgtcttctcctcttcctcctcctcctcctgaccaccctcctgctcagctcgtcgtacgtagacatcgcgatcgccgacgtcgatcggtctcgccaattaagctcttgcttcctccgttcttttctggttcggtttgttcggtgctctccctctacgtgggctgcgtctatatatatgctgtgttggcgccagctgcataaatggcgtactcctcgcggacttgtggtcggtgcaacaaccacgagaggagatccggtttcatgaagtggctctgcaatttcctcaaggggccgaagcccggcgagccgaaccgccggcggccccaggtgacggccggagaggaggaggacgcgctttggcaccaacgaccagttcgaccgaagaatgatccacctagaaatgacaacgaagaagtggaccgtgcaattgcagagtctctcacagaggacgtcagaacccccaaagagaaaacccgcaagggagacaaggacgacgaagatcttgcgagggccatacaggacagcctcaacatgaacccttacacgccttacaacccctatgctccctctcacgcccaacctagagggcacaggctgtgcgcaggctgcaagcatgagatagggcatggccattacttgagctgcatggggatttactggcaccctcagtgcttccgctgcaactcctgcggccaccctatccgtgagaccgagttcacattgctgagtacagatccataccacaagctgtgctacaaggagctgcaccatccgaaatgcgacgtctgccttcagtttattccaacgaacaggagtggcctgatagagtacagagcccacccgttctggggccagaagtattgcccttcgcatgagcacgacaggacgccacgttgctgcagctgtgagaaaatggagccaaggaacacaaagtacatgtcactgggagacggccgcagcctgtgcatggaatgcctggggtctgcggtcatggacaccggtgaatgccagcccctgtaccattctatcagagactactacgaggggatgaacatgaagctggaccagcagatacccatgctcttggttgagcggcaagcgcttaacgaagccatggaaggagagagtagaggcccacaccacatgcctgagacaaggggcctgtgtctgtcggaggagcagactgtgagcagtatacttaggaggcccagaattggtggaaaccggttactggacatgagaactcagccacaaaaactgactaggagatgtgaagttactgcaatacttgtcttgtatggcctccccaggctactaacaggatccatcctcgcccatgagctgatgcacgggtggttgcgcctcaaaggttaccgaaacctaaacgcggaggttgaagaaggaatatgccaggtcatgtcttacctgtggctggaatcagagattcttccgtcgtcctcaaggcacgcgcagccttcatcttcctacgcctcgtcctcctcttcgtcttactcttatccaccgacatcgtccaagaaaggtgggatatctcataccgaaaagaagctgggcgagttcttcatgcaccagattgcccatgacacgtcgacggcgtatggtgacggtttcagaactgcgtatgctgccgtcaacaagtatggccttcgccaaacactgaaccacatacgcctaacaggaggactccctgtataataagagagagagagagagagagagagagagagagagagagagagagagagagagagagagagagagaagacaaaatgtccatgccagacgcaacacaaagatcacatggatatcaaaggttatatacatattgagatgaagttgctggctatggaagcatggtgattcagtttcggtgaccttgagttttcaaagaggtcctgtcggagtaaatcaggaaaaagagctgtatttgctcggattaataggaactggcgatgccatgtgtaataagatcgccaaaaagcacacactaatgtaatgctctgttactcacactaatataatgaagtgtatacttatgtgtctgcagattttcaaccataaaaaaaaacccacaa

SEQ ID NO: 2644 - DNA, 679 bp, Zea mays
  Clone ID: TF_LIB4742-051-R1-K1-H8
cattgggtacctcgaggccggccgggattacactccttcgagggagtgctctactgcaggcctcacttcgaccagctcttcaagaggaccgggagcttggacaagagcttccaaggaaccccaaaggttgtcaagccagaaagaaacgttgggaatgagaatgctactaaagtctcgagcgccttcgctggcaccagggagaagtgtgttggatgcagcaagacagtctatccaattgagagggttactgtgaacaacactatgtaccacaagagctgcttcaagtgctgccatggaggatgcaccatcagcccttctaactacatcgcgcacgagggtaagctctactgcaagcaccaccacgtccagctgatcaaggagaagggcaacttcagccagctcgagaatgaccacgagaagacatcgcaggctgggtcgctggaggacgacgaagaagaagagtattaattaatcgctgagcaaaaatacataccaccagaagaataattaatcttccttcttgcactatatatttctgtgtcatttcagtcctaccaatggagatcatgtgcgttcagagaactacgatatcgttttcttgtatctgcatgtaaaccacgtctactaccttgatttcaccatttgcattgatcagatggtaatctagacttcttgttgg

SEQ ID NO: 2645 - DNA, 438 bp, Zea mays
  Clone ID: TF_LIB3061-021-Q1-K1-D2
cagaggcatcttctgaccaatgaaaatggtgaaaccaggtagagtatctgactcaaagataacaacgtttacatgcagatacaagacaacaatatcattgttctctgaacacacatgacctccattgtgacccagcctgtgatgtcttctcgtggtcattctcaagctggctgaagttccccttctccttgatcagctggatgtggtggtgcttgcagtacagcttcccctcgtgcgcaatgtagttagaagggctgatggtgcaccctccatggcagcacttgaagcagctcttgtggtacatagtgttgttaacagtgacctggatgcttaaccggttgtcaagtgaagaaggctcaaactaccggaagaatgattgagatggttgaacacagaatcttaccctctcagttggatagactgtcttgctgcatccaa

SEQ ID NO: 2646 - DNA, 1773 bp, Zea mays
  Clone ID: TF_ZmC7269_1
ccggccgggactcccgcccgatacatttctcgtacatcgctctcgctctcgctgtctctcatggtgcccaggcgattggtcgaggccggccgggacgccacagctacagagtcagaaagaaatgcctgtggctgtggacttgtggtggacgcggacggacctggtggtgtcatgtgttgtgtgcagcgactcgacagagagagaggcggcgctgtagaaagaaagggtcttgtgtgctgcgtcctccctctatttaggcgattggttgccccgagcccggccgggctcccgcccgatacatttctcgtacatcgctctcgctctcgctctctctcctgctgtccacgaccgaccaaaggcgccgggcacagactcttcgtcggatccaagagaagctcgcgccctccccgaccatggtctcggcggataccatccgtacggctatcggcgtcatcggcaatggcaccgcccttgtgctcttcctctccccggtgcccaccttcgtgggcatctggaagaagcgtgcggtggagcagtactcgccgatcccgtacgtggcgacgctgctgaactgcatgatgtgggtgctgtacgggctgccgctggtgcacccgcacagcatgctggtggtgaccatcaacggcaccggcatgctcatccagctcacctacgtggcgctcttcatcctctgctccgcgggggcggtgcgccgcagggtcgtgctcctgttcgccgccgaggtcgccttcgtcgtcgccttggccgcgctggtgctcaccctggcgcacacgcacgagcgcaggtccatgctcgtcggcatcgtctccgtcttcttcggcaccggcatgtacgctgcgccgctctcggtcatgaaattggtgatccagacaaagagcgtggaatacatgcccctgttcctgtccctggcctccctcgccaacagcatctgctggaccgcctacgcgctcatccgcttcgacctctacatcaccatccccaacgggctgggcgtgctgttcgcgctgggtcagctgggcctgtacgccatgttctacaagaacaccaagcagatcatggaggcacgcaggcgcaaggccgaccagcagtcaaccatgatggaggtggtcaccgacgcctccgccacgccgcccccgccacccaacaacaacaacggcggcggcggcggcaacggctactgatcgcatgcaacaggaaggacgacgacgatcgaccagcaagcaaaagccacatacatagcgtcgtcgtagcgccccgccgcccaccgaatgcttgttgttccgattccgatctccccaaggggacgatgctccgttgcattctctgcatatcctactaatataacgaaacgaaacaaaacaaaagacagcacaaaagggcttgctgggtttcacatttaccatatataatcgtctgctgctgtcttgttgctggtatcgctgctataaaaaaaaaaaaaaaaaagcggcctgatggacacaggcaacttctccaagaaattccaaggtggaggtggagcatcttcaaacaagaacgacccggcaaaggctccgagcaagctgtcatctgcattctctggaactcaagacaaatgcgcagcctgccagaagaccgtgtatccattggagaagatgacgctggaaggcgagtcgtaccacaagggctgctttcaatgctcgcacgggggctgcatcctgaacacctcctcctacgccgcgctcaacgggatcctctactgcaagatccatttcccgc

SEQ ID NO: 2647 - DNA, 1695 bp, Zea mays
  Clone ID: TF_ZmC383_1
gctggcttctcctccccctcttaaccagtcctcctcgggttagggttccttagggttttgtggaggggcgatggcggcggctgatgtggagtaccgttgcttcgtcggcgggcttgcctgggccaccagcaacgagtcgctgagagatgccttcgcctcctacggcgagatcctcgactccaaggtcatcaccgaccgggagacggggaggtcccgcggcttcagcttcgttaccttctcctccgagaactccatgctcgactctatcgacaacatgaacggcaaggtagctcgacagccgtaacatcaccgttaaccaggcccaggcccgtgacggcggctgtagcagtgcgtcacctacgattctcagtgctcagtgtacctgagctgcattgtagtattcagtgtgacacattgggtacctcgaggccggccggcgtgctgtgctgttcctgtgcctccatccttccgattcccatccccgtcgtcgcttgtttgctgctgccttttcctttccgccgcggcaaaagtgaggagcgcgcgggcgagttgggggagacgaacccgtcataactccctcgcttaatcgcgtctcgtgctcctgcctcctgcgtatataaacgcggcaatcgggacgcccggggaggcgttcgttctccttctccatcccacgcgcgcgcaggccaaggccggatcggcggcctctcagatctcgccggccgccgtgagacagagaccgaagggggggttgaccggtgctcgggaggaagatgtttagcgggacgcagcagaagtgcaaggtgtgcaccaagacggtgtacccgatggaccagctctccaccgacggcgtcgtcttccaccgctcctgcttcaagtgccagcactgcaagtctaccctctcactgagcaactattcctcgttcgaaggagtgccgtactgcaagacccatttcgagcagctgttcaaggagaccgggagttacaacaagagcttccaatcacagtcacctgcaaagattactccggaaaagttggcccctgagctgaccagatcaccaagcaaagctgcaaggatgttttcaggaacacaagacaagtgtgcgacttgtggtaaaactgcgtatcctcttgagaaggtaacagtcgaagagaagtcctaccataagtcatgcttcaaatgctcccacgggggctgcgcgattacaccttccaactatgcagccttggagggcatcctctactgcaaacaccatttctcccaacttttcaaggagaagggaagctacaaccacttgatcaagtgcgcgtccgtcaagcgcgctgctgaagcacagccagaacaaccggcctctgattcctcctcctgaccacgccatttaaacagtgggggtttggaggcgagagagttgggaagcctcctgtttctacttaaaaccgcgtgatgtatgttattccatctatgccccgaggatactagactactactctattttggtatcctctgctgtgctagctggatcatatcagcgaaccatggaattgctgtcattttcaatgaaactgttgtgcatcaagtagtgaaatcttcactgaaatcgggtatcttgcctttattgatcaatatattatctatgttgttttgttgtctttaaaaaaaaaaaaaaaaaaagccctcgcgactagttctcctcgtgc

SEQ ID NO: 2648 - DNA, 815 bp, Zea mays
  Clone ID: TF_LIB4744-028-R1-K1-C9
ccggcctgatcaatgataatgtggagctgccgttggttcatgaatggtaatgtaaatggtaacaataaaaaaaaaaaattcaacccacagttcccatataggcagccatcggctacacagcctcgcctccgtaagcagagtgtgtcgttggaagagagacgacggcggccatggcgacctccttccaggggacgaccaccaagtgcaccgcctgcgacaagacggtgtaccttgtggacaagctcaccgccgacaaccgcatctaccacaaggcctgcttccgctgccaccactgcaagggcaccctcaagctcgccaactacaactccttcgagggagtgctctactgcaggcctcacttcgaccagctgttcaagaggacagggagcttggacaagagcttcgaaggaactccgaaggttgtcaagccagaaagaaacgttgggaatgagaatgctactaaagtctcaagcgcctttgctggcaccagagagaaatgtgttggatgcagcaagacagtctatccaactgagagggtcactgttaataacactatgtaccacaagagctgcttcaagtgctgccatggagggtgcaccatcagcccttctaactacattgcgcacgaggggaagctgtactgcaagcaccaccacatccagctgatcaaggagaaagggaacttcagccagcttgagaatgaccacgagaagacatcacagggctgggtcactggaggaggatgaacaagagtattgatcactgagcacaccacagatgaataatgaatcctcttgcatttgcctagagcacta

SEQ ID NO: 2649 - DNA, 1562 bp, Zea mays
  Clone ID: TF_ZmC844_1
gattctgtgttcaaccatctcaatcattcttccggtagtttgagctttcttcacttgacaacctgtcacagaaatctctcactcaagaatcacataaatacaagattcccagattaaataaatcgttatatccatgaagacagcaactgctgcatttctaagctgaaagtttcaattattgatatttttgcctaaagataaggaaaggtgacaggaatactgtacatgaatatcagtatgctgattgcaactcaccggttaagcatcggaccctcgagccggccgggatcatgtggtatggcggcattcgtgcaggaccgacccccacctccacgcctcgtatgctctctctctctccttcccatggctgatgcctgacacggtgacacccccaacattctccctcactagctagctgtgtcctgcctacctagcggtatcaatacccggctgcagctcaccaccaccaccaaccaaccaacccacagttcccatataggcagccatcggctacacagcctcgcctccgtaagcagagtgtgtcgttgcggaggcaggaagagagacgacggcggccatggcgacctccttccaggggacgaccaccaagtgcaccgcctgcgacaagacggtgtaccttgtggacaagctcaccgccgacaaccgcatctaccacaaggcctgcttccgctgccaccactgcaagggcaccctcaagctcgccaactacaactccttcgagggagtgctctactgcaggcctcacttcgaccagctgttcaagaggacagggagcttggacaagagcttcgaaggaactcccaaggttgtcaagccagaaagaaacgttgggaatgagaatgctactaaagtctcaagcgcctttgctggcaccagagagaaatgtgttggatgcagcaagacagtctatccaactgagagggtcactgttaataacactatgtaccacaagagctgcttcaagtgctgccatggagggtgcaccatcagcccttctaactacattgcgcacgaggggaagctgtactgcaagcaccaccacatccagctgatcaaggagaaggggaacttcagccagcttgagaatgaccacgagaagacatcacaggctgggtcactggaggaggatgaacaagagtattgatcactgagcacaaccacagatgaataatgaatcctcttgcatttgcctagagcactatgtatttctgtggcgtggttcgatttcagttttaccaatggaggtcatgtgtgttcagagaacaatgatattgttgtcttgtatctgcatgtaaacgttgttatctttgagtcagatactctacctggtttcaccaaataaaaaaaaaagaagatgcctctgcacctacaagacacttgactgtaaccaaaggaggtcatgtgtgttcggagaacaatgatattgttgtcttgtatctggatggaaacgttgttaatgataatgtagatttgtatctgggtgtaaacctggggctcttggtccatcttttgtttaagatgatgtttggcaaaaaaaaaaa

SEQ ID NO: 2650 - DNA, 1558 bp, Zea mays
  Clone ID: TF_ZmC844_3
aacagatcacaaaaaaaaacttgtttttcatgaggcatttgactagatccgggctgtttatggttttaaacatgtttcatatcacccatccagttgacaccattcatgttttgttctttatgaacaactggcactagatgatgctcatcatgattgcatattatttggcaaaatgctactaaagtctcaagcgcctttgctggcaccaaaaaaaaatgtgttggatgcagcaagacagtttatccaactgagagggtaaaattctgtgttcaaccatttaaatcatttttccggtagtttgagcctttttcacttgacaaccggttaagcatccaggtcactgttaacaacactttgtaccacaagagctgcttcaagtgctgccatggagggtcccccccccacctccccctcgtctgctccctcgcgcctgccctcggctgctggccgctccccgacccgctgtcccccccgacaggctccctcgccagctgcctcggtcctgccttccttgcccccccttcccccggctgcacctcaccgcccccgccgtcctcccgcccccccgcccccatatggcgggccgctcgcggcaggccgtcgacccagtagccacagttcgcatataggcagccatcagctgtacggcctcgcgtccgtaagcagatcctgtcgttggaagagagacgacggcggccatggcgacctccttccaggggacgaccaccaagtgcaccgcctgcgacaagacggtgtaccttgtggacaagctcaccgccgacaaccgcatctaccacaaggcctgcttccgctgccaccactgcaagggcaccctcaagctcgccaactacaactccttcgagggagtgctctactgcaggcctcacttcgaccagctgttcaagaggacagggagcttggacaagagcttcgaaggaactccgaaggttgtcaagccagaaagaaacgttgggaatgagaatgctactaaagtctcaagcgcctttgctggcaccagagagaaatgtgttggatgcagcaagacagtctatccaactgagagggtcactgttaacaacactatgtaccacaagagctgcttcaagtgctgccatggagggtgcaccatcagcccttctaactacattgcgcacgaggggaagctgtactgcaagcaccaccacatccagctgatcaaggagaaggggaacttcagccagcttgagaatgaccacgagaagacatcacaggctgggtcactggaggaggatgaacaagagtattgatcactgagcacaaccacagatgaataatgaatcctcttgcatttgcctagagcactatgtatttctgcggcgtggttcgatttcagttttaccaatggaggtcatgtgtgttcagagaacaatgatattgttgtcttgtatctgcatgtaaacgttgttatctttgagtcagatactctacctggtttcaccattttcattggtcagaagatgcctctgcacctacaagacacagaactgttaaaaacaaaaaaaaaaaaaaaaaagcggcc

SEQ ID NO: 2651 - DNA, 2322 bp, Zea mays
  Clone ID: TF_ZmC13606_1
cgattgggtacctcgaggccggccggggtgggcacctgacgccgcgaccccggccccgagctggctttgccggccaatcggctcgcccgcgccgaccaccgcgcctcttcccctcgccgagatcgcctgaaaaggcaagcgaggccagcccgatccccctccccgcccccctcaagaaccaaaaaagggtgtcatttcgtcctaggatcgcagctcgagctcggtcgctctcgctcacctcgctccctactcgcctgctttccacttcctccgcgctcccgatttcctctccgattccttcgccgactcgtttcttcttggcaattcgttgcgcgggccatcgccccgacggcacctgggtacatcagctacaggacgggacaggtccctcttctaggagaggcttcgccagccgcctcccgcccccgtcactacgggcgccgtggagcggagatccatccggacttggatcggtctcgtcgcgtgattacagctcttgttttattgccagtttgagcaatatgggttggctgaccaagttttttagaggctcaacccacaatatctcggaagagcagtatcacagcaggcctgcagaagacacagcatggaatgaaccctctagctctcctgttgtgactgacatcctttcagagtttaacaatgaggatattgaccgtgctatagcgctctctctatcggaagaggagcaaagaaaggaaaaggcaatagataaggatatgcatttggaggaggatgagcaacttgcaagagctatccaggaaagtttgaatgttgagtcaccccctcgcagaaatggcagtgccaatggtggtactatgtatcatccgcctcgcgaaactggcaatgcatatcagccacctcgtgaaaatggcagtgccaatggtggaaatgcatatcacccattaccatttatgttctcatctggattcagagcatgcgcaggatgtcacagagagattggtcacgggcgttttctcagttgcatgggagctgtttggcatccggaatgttttcgttgccatgcatgtagtcaacctatatatgactatgagttctccatgtccgggaatcatccataccataaaacttgctacaaggagcagtttcacccgaaatgtgatgtctgcaagcagttcattcctacaaatatgaatggccttattgaatatagggcacatcctttctgggtacaaaaatactgtccttcacatgaaatggatggtactccgaggtgctgtagttgtgaaagaatggagccaagggaatcaaaatatgtattactggatgatggtcgtaagctctgcctggagtgccttgattccgcagtgatggatacaaacgactgccagcctttgtatcttgaaattcaggaattttacgaaggactgaatatgaaagtggaacagcaggttcctctgcttctggtcgagcgacaagctttgaatgaagccatggaaggagagaaggctggtcaccaccatcttcctgaaacaagaggactatgcttatcagaagaacagactgttagcacgatactgagaccaagaatggctggaaacaaaattatgggaatgataacagagccatataggctgacacggcgatgtgaagtgactgcaattcttattctgtatggtctcccaagattgttgacaggttcaattttagctcatgagatgatgcatgcatggttgcggcttaaaggataccggacactgagcccagacgtagaagagggcatttgccaagttcttgctcacatgtggatcgagtcagagatcatggccggatcaggcagtagtgccgcatcgtcatcctcaggatcttcgtcatccacatcatcgaaaaagggcgggcggtcccagtttgagcacaggcttggggactttttcaagcatcagatcgagacggatacttccatggcctacggagatggtttcagaactgggaatcgagccgttcttcattacggcttgaagcgcacccttgagcatatccggctaactgggacctttccattttgaagtagcatggattcatattttgggaaagcttatattatatacatgattttcttccagagttccattacaaccaaagagataaattgtaaaaaaacattctttccagaatccagagatataatatctatgaaggccaaaatgaagtattaaatgattgagatcgatggtcagtctgcccaatcattttgtattctgatcaaactctggaatgaaacaatggcaatctttttttatatggtgtcagtttcaataaataccagtacgattttacagt

SEQ ID NO: 2652 - DNA, 1602 bp, Zea mays
  Clone ID: TF_ZmC844_2
ccggccgggaatgccggccgctggggagtttggagcatacctctagcagcctcgcctctgtagctaggcattgtagtagaggggggaaagaagaagactagaagaagagggccatggcgacctccttccagggaaccaccaccaagtgcaccgcctgcgacaagacggtgtacctcgtcgacaagctcaccgcgacaaccgcgtctaccacaaggcctgcttccgctgccaccactgcaagggcacactcaagctcgccaattacaactccttcgagggagtgctctactgcaggcctcacttcgaccagctcttcaagaggaccgggagcttggacaagagtttccaaggtgttatctgttatcatcgcgcgtttcttaattttccctttgcaacgcaacatatatacatagatccgggtgtggttcttgcatgcttgcgtgtcctcacctcacctggctgcaaaattaatgcttcaggaaccccaaaggttgtcaagccagaaagaaacgttgggaatgaggtacgcaaacagcttaggattcatgttgcattttttttcactttcagtccagagtagagcagaatatgtatatatactaaatctaggcccatgagaaggggtacgggccgggaggccggccgctggggagtctggagcatacctctagcagcctcgcctctgtagctaggcattgtagtagaggggggaaagaagaagactagaagaaaagggccatggcgacctccttccagggaaccaccaccaagtgcaccgcctgcgacaagacggtgtacctcgtcgacaagctcaccgccgacaaccgcgtctaccacaaggcctgcttccgctgccaccactgcaagggcacactcaagctcgccaactacaactccttcgacggagtgctctactgcaggcctcacttcgaccagctcttcaagaggaccgggagcttggacaagagcttccaaggaaccccaaaggttgtcaagccagaaagaaacgttgggaatgagaatgctactaaagtctcgagcgccttcgctggcaccagggagaagtgtgtcggatgcagcaagacagtctatccaattgagagggttactgtgaacaacaccatgtaccacaagtgctgcttcaagtgctgccatggaggatgcaccatcagcccttctaactacatcgcgcacgaggggaagctctactgcaagcaccaccacgtccagctgatcaaggagaaagggaacttcagccagctcgagaatgaccacgagaagacatcgcaggctgggtcgctggaggacgacgaagaagaagagtattaattaatcgctgagcaaaaatacataccaccagaagaataattaatcttccttcttgcactatatatttctgtgccatttcagtcttaccaatggagatcatatgtgcgttcagagaacaatgatatcgttttcttgtatctgcatgtaaaccacgtctactacctgatttcaccatttgcattgatcaggtggtaatctagaccctgtttggaacttttccgtgttgctgtattttcaatgaaaatatcagtaccaaacagagcatacaagaag

SEQ ID NO: 2653 - DNA, 735 bp, Zea mays
  Clone ID: TF_ZmC2245_1
cggctcgagatacaacaacacatccatcacttttttatttgttttttcttttcattttaaaaaacttcaaaacaaacaactcaaaatgtcagctggaaagtgtgctgcttgtggcaagactgcctacccattggaaagtgtcaccgctttggaacaaaccttccacaagatttgcttcaagtgtgatgtgtgcaagggaacactcaacttgaagaactacaagggtgttaacggaaaggtttactgctttacccacacccctgtggacagaagctcaactggttccgactccgtcaccacaaagactgctatgcaggcaccaaagaagcaagctgagggtctcggaaccgctcaaaagggaactggtgagaagccaaacgttggcctcgacaccgtcactgttcaaaccgccatcaaggcaccaaaggctgttgctgagggtcttggtaccgctcaaaagggaactggtgagaagccaaccgttggcactgaatccgttcacttgaagagtgctttgagcgcaccaaaggtcagagccgagaacatcggaactgtccacaagggtgactctatcactgctccacaacaagcctccttcgacgtcgaacacccagcaccagcttccgaagaagcccaccaccacgaagaggcagaaccagtctcttacgatgaacaaccagctgacgagtaaggagtgacctcgttgtatatttagcgaccatacgacataaacag

SEQ ID NO: 2654 - DNA, 1652 bp, Zea mays
  unsure (1)..(1652): unsure at all n locations
  Clone ID: TF_ZmC1143_1
gaattgcgagcgagcgttcctctccgtccgcttccgccgtttgcccgtcgatcagttgttggctgccggccgggtactaccgcctgcacgagcagcggctagccacagcccacagacagacgacgtcaggtcttggcaggtgtgcaagcagacagagctcgctcggtcgcgtccgcccacgcgtccgcccacgcgtccgcccacgcgccgcccactcctcagggcgattgggttcctcgaggccggccggggagaagcgatcgggattgtgggcgagtgcgtgcgttcgtgcagccacagacaggcgtccgggcaccatgtctttcaccggcacgcaggacaagtgcacggcgtgcgacaagaccgtccacttcatcgacctcctcacggccgacggcgccatctaccataagacatgcttcaagtgcagccactgcaaaggggtcctctcgatgtgcagctactcctccatggacggtgtgctgtactgcaagacccacttcgagcagctcttcaaggagaccgggagcttctccaagaacttcacgccaggtggcaagtcatcagacaagggtgaactgacaagggccccaagcaagctgtcgtctgcattttctggtacccaggataagtgcgcagcatgccagaaaacagtgtacccgctggagaagttaactctggaaggcgagtcctaccacaagagctgcttcaagtgctcgcacggcggctgcatcctgaccacctcctcttatgccgcgctcaacggcgtcttgtactgcaagatccacttcgcgcagctgttcatggagaaggggagctacaaccacatgaacaagaagagcccgtcccaggaggttctgccggacgtggctgacgaggagcaaccgccggaaccagcgccaccgcaagatgagaaagaagaggacaactaggatcggagcgaccaacaaccacccatgcatatatatcacgcagactgaagtctacacgtttgccatatttctttacgacgacgacgcttctttattccctcctcccttttttttcctcttaatctctctgtgaacccggtttatcatcacgctgcaatcaagtgtgccagatgccttcgttacgtctgaggctcacgacaatggaaaatctgacatggacctgtcttagcctcgcggaaaaaaattgtaactttgtaagcagagccacttctttgaatatatgatcctaacaacgctgcccttaatacttaaaaaaaaaaaaaaaaaaaaaacccgcggccnnncatggggatcttggccaatgctaggcgcatactaaaagccttgccttgacaaccttttatggnnnnnnngccagatccctannnnnacaagccgcaggcgcggcttaaccgaaaagacccgcgcaatcggcgtagaacgtacaaaaattacccgccccccaaaaaaaaaaaaagccgtacgtgtctatctcccctaaaaaaacgaaccctgccccagtaagtagtcgtcccaagaaaatgttctttttttgtaaccttggcagcttggttcagtctgggattgtaacaagggcatgttgaattccctgttatgtattaaaaggctttggattcattcccattaaataagtaaatgggtgtaaacatttggcttccc

SEQ ID NO: 2655 - DNA, 644 bp, Zea mays
  Clone ID: TF_LIB5116-029-A1-PF1-H8
atctcatctctctttccccccttcgcttccttcgtttgtgcgttgcctttttctttccgccgcggcaactgtgagccggcccgatcgagccgcccacctcgagaggccgccataattcattccatccattcatccgctgccgcgtatataagcgcggccattggggcgctcgtggggtgctcgtcacatcgtcgcatcaggcgcgcgcaggccgagatcagatcggcggcggcggcggcgacggcgacggcgaccatgttcagcgggacgcagcagaagtgcaaggtgtgcaccaagacggtgtaccccatggaccagctctccaccgacggcgccgtcttccaccgcgcctgcttcaagtgccaccactgcaagtccaccctctcctttagcagctactcctcctttgaaggagtgccctactgcaagccccatttcgcgcagctgttcaaggagaccgggagctacaacaagagcttccagtcacaatcccccgcgaaatctgcgacggagaagttgactcctgagctgaccagatcgccaagcaaagctgcgggcatgttttcgggaacgcaggacaagtgcgccacttgtggtaaaacagcataccctcttgagaaggtgacagttgaagagaagtccta

SEQ ID NO: 2656 - DNA, 711 bp, Zea mays
  unsure (1)..(711): unsure at all n locations
  Clone ID: TF_ZmC844_14
cccacgcgtccggcggcattcgtgcaggaccgatccccacctccacctcgtatgctctctctctctctctctctccttcccatggctgatggctgctgcctgatgcctgacacggtgacacccccaacattctccctcactagctagctgagtcctgcctacctagcgggatcaatacccggctgcagctgaccaccaccaccaaccaaccaacccacagttcccatataggcagccatcggctacacagcctcgcctccgtaacacagttcccatataggcagccatcggctgaacagcctcgcctccgtaagcagagtgtgtcgttgcggaggcaggaagagagacgacggcggccatggcgacctccttccaggggacgaccaccaagtgcaccgtctgcgacaagacggtgtaccttgtggacaagctcaccgncgacaaccgcatctaccacaaggcctgcttccgctgccaccactgcaagggcaccctcaagctcgccaactacaactccttcgagggagtgctctactgcaggcctcacttcgaccagctgttcaagaggacagggagcttggacaagagcttcgaaggaactcccaaggttgtcaagccagaaagaaacgttgggaatgagaatgctactaaagtctcaagcgcctttgctggcaccagagagaaatgtgttggatgcagcangacagtcta

SEQ ID NO: 2657 - DNA, 830 bp, Zea mays
  Clone ID: TF_ZmC1143_8
ccacgcgtccttcctcgcgtccgcccacgcgtccgcggacgcgtgggtcgggattgtgggcgagtgcgtgcgttcgtgcagccacagacaggcgtccgggcaccatgtctttcaccggcacgcaggacaagtgcacggcgtgcgacaagaccgtccacttcatcgacctcctcacggccgacggcgccatctaccataagacatgcttcaagtgcagccactgcaaaggggtcctctcgatgtgcagctcttcaaggagaccgggagcttctccaagaacttcacgccaggtgacaagtcatcagacaagggtgaactgacaagggccccaagcaagctgtcgtctgcattttctggtacccaggataagtgcgcagcatgccagaaaacagtgtacccgctggagaagttaactctggaaggcgagtcctaccacaagagctgcttcaagtgctcgcacggcggctgcatcctgaccacctcctcttatgccgcgctcaacggcgtcttgtactacaagatccacttcgcgcagctgttcatggagaaggggagctacaaccacatgaacaagaagagcccgtcccaggaggttctgccggacgtggctgacgaggagcaaccgccggaaccagcgccaccgcaagatgagaaagaagaggacaactaggatcggagcgaccaacaaccacccatgcatatatatcacgcagactgaagtctacacgtttgccatatttctttacgacgacgacgcttctttattccctcctccttttttttcctcttatctctctgtgaaacccggtttatcatcacgctgcaatcaa

SEQ ID NO: 2658 - DNA, 1121 bp, Zea mays
  Clone ID: TF_ZmC383_2
gtgagacagagaccgaaggggggggttgaccggtgctcgggaggaagatgtttagcgggacgcagcagaagtgcaaggtgtgcaccaagacggtgtacccgatggaccagctctccaccgacggcgtcgtcttccaccgctcctgcttcaagtgccagcactggtgatgcaatgtagcatcgggtagtagatctgcgaattgccgcagcgaacagatctggtgcgagtttcctagtaccaggaaaattctacgcccaggagaggtcatgactttgtccgtttcccattcgctaacttggtgaaagaggattgggcagggaatccatgcaaatggacactcttatctgatcttctacttaggacgacctgtcgatgtctaggcaaagataagcagctgtgcgaggtctgacaatctccgtcttcatcctttccgcctttgacagctgagcaactattcctcgttcgaaggagtgccgtactgcaagacccatttcgagcagctgttcaaggagaccgggagttacaacaagagcttccaatcacagtcacctgcaaagattactccggaaaagttggcccctgagctgaccagatcaccaagcaaagctgcaaggatgttttcaggaacacaagacaagtgtgcgacttgtggtaaaactgcgtatcctcttgagaaggtaacagtcgaagagaagtcctaccataagtcatgcttcaaatgctcccacgggggctgcgcgattacaccttccaactatgcagccttggagggcatcctctactgcaaacaccatttctcccaacttttcaaggagaagggaagctacaaccacttgatcaagtgcgcgtcggtcaagcgcgccgctgaagcacagccagaacaaccggcctctgattcctcctcctgaccacgccatttaaacagtgggggtttggaggcgagagagttgggaatcctcctgtttctacttaaaaccgcatgatgtatgttattattccatctatgccccgaggatactagactactctattttggtatcctctgctgtgctagctggatcatatcagcgaaccatggaattgctgtcattttcaatgaaactgttgtgcatcaagtagtg

SEQ ID NO: 2659 - DNA, 1748 bp, Zea mays
  Clone ID: TF_ZmC844_11
aatagatccagtggtgttcttgcgtgtctcctccctacaaatggcttcaggaactccgaaggttgtcaagccagaaagaaacgttgggaatgaggtatatgcaacgccttaatattcatgtgtttatgtgtttttctcagtgcctacaaagtttgcattttttttccttcactttttcagtccagagtagcacaggaaacaaatacattcaatcattgatgcacaaacaactccttaaacatgatgtgagatgcttggatcttgaatgcacagcaatcccaatggttagagagagaaagatccactcaaaacctaactgttatgcttggatcagaacagagtaaatcttgtccaataaaaagatcagaacaccagatatttaacagatcacaaaaaaaaaacttgatattcatgaggcatatgactagatcagtgctgtatatggttttaaacatgtttcatatcacccatccagttgacaccattcatgttttgttctttatgaacaactggcactagatgatgctcatcatgattgcatattatttggcagaatgctactaaagtctcaagcgcctttgctggcaccagagagaaatgtgttggatgcagcaagacagtctatccaactgagagggtaagattctgtgttcaaccatctcaatcattcttccggtagtttgagccttcttcacttgacaaccggttaagcatccaggtcactgttaacaacactatgtaccacaagagctgcttcaagtgctgccatggagggtgcaccatcagcccttctaactacattgcgcacgaggggaagctgtactgcaagcaccaccacatccagctgatcaaggagaaggggaacttcagccagcttgagaatgaccacgagaagacatcacaggctgggtcactggaggaggatgaacaagagtattgatcactgagcacaaccacagatgaataatgaatcctcttgcatttgcctagagcactatgtatttctgtggcgtggttcgatttcagttttaccaatggaggtcatgtgtgttcagagaacaatgatattgttgtcttgtatctgcatgtaaacgttgttatctttgagtcagatactctacctggtttcaccattttcattggtcagaagatgcctctgcaccttcaccaggaagttatggtctgttgaagctaccttcaccaggaagtcgtctagcccatgctcatctccttgatccatctcccattggcttccccctcatcccaaccgccccagcctgaaattctcggattggaacacatgttccatcgcggcaaagcagaacagcgtccccgacttatccttgttctacagatcacgcagacaggggagagtgctaatccacttgatcgatccgccgttgactcttctggatctcccgcattgggaagctgggatccccaccgtctctcgtgtgcatccaactcatgaagcggatcctctcggcctcccttgctcccacctcacgtaggcacacggctcaatctcggcatcccgtatgagctcgagctgcacgccccccgtctcgaacagcgggatcatagcgttctccggcgcgagcccaatgaccacctcgctcgcccgcctcacagtcgccgccaccaaatccgccctctgttgctttaagttttttgccaacctagcaaagcgttgaagctcaaaattgtcgttttatcactcctcagttacttttggaaccaccgaacgc

SEQ ID NO: 2660 - DNA, 1087 bp, Zea mays
  Clone ID: TF_ZmC844_7
aaaaaaacttgatattcatgaggcatatgactagatcagtgctgtatatggttttaaacatgttttatatcacccatccagttgacaccattcatgttttgttctttatgaacaactggcactagatgatgctcatcatgattgcatattatttggcagaatgctactaaagtctcaagcgcctttgctggcaccagagagaaatgtgttggatgcagcaagacagtctatccaactgagagggtaagattctgtgttcaaccatctcaatcattcttccggtagtttgagccttcttcacttgacaaccggttaagcatccaggtcactgttaacaacactatgtaccacaagagctgcttcaagtgctgccatggagggtgcaccatcagcccttctaactacattgcgcacgaggggaagctgtactgcaagcaccaccacatccagctgatcaaggagaaggggaacttcagccagcttgagaatgaccacgagaagacatcacaggctgggtcactggtttcaccattttcattggtcagaagatgcctcttcaccaggaagttatggtctgttgaagctaccttcaccaggaagtcgtctagcccatgctcatctccttgatccatctcccattggcttccccctcatcccaactgccccagcctgaaattctcggattggaacacatgttccatcgcggcaaagcagaacagcgtccccgacttatccttgttctacagatcacgcagacaggggagagtgctaatccacttgatcgatccgccgttgactcttctggatctcccgcattgggaagctgggatccccaccgtctctcgtgtgcatccaactcatgaagcggatcctctcggcctcccttgctcccacctcacgtaggcacacggctcaatctcggcatcccgtatgagctcgagctgcacgccccccgtctcgaacagcgggatcatagcgttctccggcgcgagcccaatgaccacctcgctcgcccgcctcacagtcgccaccaccaaatccgccctataccactgccggaaagatcggaagcgaacgcacgcgtggg

SEQ ID NO: 2661 - DNA, 521 bp, Zea mays
  Clone ID: TF_LIB3601-009-P1-N6-H8
agccaaatatcatcttaaacaaaagatggaccatgagcttacagttctgtgtcttgtaggtgcagaggcatcttctgaccaatgaaaatggtgaaaccaggtagagtatctgactcaaagataacaacgtttacatgcagatacaagacaacaatatcattgttctctgaacacacatgacctccattggtaaaactgaaatcgaaccacgccgcagaaatacatagtgctctaggcaaatgcaagaggattcattattcatctgtggttgtgctcagtgatcaatactcttgttcatcctcctccagtgacccagcctgtgatgtcttctcgtggtcattctcaagctggctgaagttccccttctccttgatcagctggatgtggtggtgcttgcagtacagcttcccctcgtgcgcaatgtagttagaagggctgatggtgcaccctccatggcagcacttgaagcagctcttgtggtacatagtgttgttaacagtgacccttttagttggatagac

SEQ ID NO: 2662 - DNA, 570 bp, Zea mays
  Clone ID: TF_LIB4172-053-R1-L1-A4
aattcggcacgaggcaggaagagagacgacggcggccatggcgacctccttcaggggacgaccaccaagtgcactgcctgcgacaagacggtgtaccttgtggacaagctcaccgccgacaaccgcatctaccacaaggcctgcttccgctgccaccactgcaagggcaccctcaagccaactacaactccttcgagggagtgctctactgcaggcctcacttcgaccagctgttcaagaggacagggagcttggacaagagcttcgaagaatgctactaaagtctcaagcgcctttgctggcaccagagagaaatgtgttggatgcagcaagacagtctatccaactgagagggtcactgttaacaacactatgtaccacaagagctgcttcaagtgctgccatggagggtgcaccatcagcccttctaactacattgcgcacgaggggaagctgtactgcaagcaccaccacatccagctgatcaaggagaaggggaacttcagccagcttgagaatgaccacgaaaagacatcacaggctgggtcactggaggaggatgaacaagag

SEQ ID NO: 2663 - DNA, 778 bp, Zea mays
  Clone ID: TF_LIB5116-045-A1-PF1-G4
catttaccaccatataatcatcactcgcccccaggcttgtcgggagcgaagccaagccagtcttgtgttggaagaacgcctcaccatccatcagagcagctcggcttgcagatcgagagtgagggagtgagaggcaatggcgacttcgttccaggggacgaccaccaagtgcaacgcctgcgacaagacggtgtacctcgtcgacaagctcaccgccgacaaccgggtctaccacaaggcctgcttcaggtgccaccactgcaagggcaccctcaagctcgcgaattacaactcgttcgaaggagtgctctactgcaggcctcactttgaccagctcttcaagaggaccgggagcctcgacaagagcttcgaaggcactccaaaggttgtcaagccggaaaggaatgttgggaatgagaatgctattaaagtctcgagcgcatttgctggcaccagagagaaatgttttggatgcaccaagacagtctatccaattgagagggttactgtgaacaacaccatgtaccacaagagctgcttcaaatgctgccatggagggtgcaccatcagcccttcgaattacatcgcgcatgagggcaagctcttctgcaagcaccaccacacccagctgatcaaagagaagggcaatttcagccagctcgagaacgatcacgacaagacgtcacagagtgccgggtcagtggatgatgaagactcggagtattagtcagtccttgaggatatccagagatgaataacgagcccttttgcatttgca

SEQ ID NO: 2664 - DNA, 787 bp, Zea mays
  Clone ID: TF_ZmC1143_5
actcctatgggcgattggggccctcgaggccggccggcaggggaagcgatcgggattgtgggcgagtgcgtgcgttcgtgcagccacagacaggcgtccgggcaccatgtctttcaccggcacgcaggacaagtgcacggcgtgcgacaagaccgtccacttcatcgacctcctcacggccgacggcgccatctaccataagacatgcttcaagtgctcgcacggcggctgcatcctgaccacctcctcttatgccgcgctcaacggcgtcttgtactgcaagatccacttcgcgcagctgttcatggagaaggggagctacaaccacatgaacaagaagagcccgtcccaggaggttctgccggacgtggctgacgaggagcaaccgccggaaccagcgccaccgcaagatgagaaagaagaggacaactaggatcggagcgaccaacaaccacccatgcatatatatcacgcagactgaagtctacacgtttgccatatttctttacgacgacgacgcttctttattccctcctcccttttttttcctcttaatctctctgtgaacccggtttatcatcacgctgcaatcaagtgtgccagatgccttcgttacgtctgaggctcacgacaatggaaaatctgacatggacctgtcttagcctcgcggaaaaaaattgtaactttgtaagcagagccacttctttgaatatatgatcctaacaacgctgcccttaataccaaaaaaaaaaaaaaaaaataaaaaaaaataaaaaaatttgcggcc

SEQ ID NO: 2665 - DNA, 1329 bp, Zea mays
  Clone ID: TF_ZmC844_4
aggggttaaaacctgtttaaaatcacccatccggttgcccccattcatgttttgttctttaagaacaactggccctagatgatgctcataaagattgcatattatttggcaaaaggctactaaagtttaaagcgcctttgctggcaccaaaaaaaaatgtgttggatgcagaaagacagtttatccaactgggaggggaagattttgggttaaaccatttaaataattcttccgggagttagagccttttttacttgacaaccggttaagcatccagggcactgttaacaacactttgtcccacaagagctgttttaagggctgccatggggggggcaccattagcccttttaactacattgcgcacgaggggaagctgttctgcaagcacccccacatccaggtgatcaaggagaaggggaacttcggccccctcggaatgacggccgggaggcggccgctggggagtttggagatacctctagcagcctcgcctctgtagctaggcattgtagagggggggaagaagaagactagaagaagagggccatggcgacctccttccagggaaccaccaccaagtgcaccgcctgcgacaagacggtgtacctcgtcgacaagctcaccgccgacaaccgcgtctaccacaaggcctgcttccgctgccaccactgcaagggcacactcaagctcgccaattacaactccttcgagggagtgctctactgcaggcctcacttcgaccagctcttcaagaggaccgggagcttggacaagagcttccaaggaaccccaaaggttgtcaagccagaaagaaacgttgggaatgagaatgctactaaagtctcgagcgccttcgctggcaccagggagaagtgtgttggatgcagcaagacagtctatccaattgagagggttactgtgaacaacaccatgtaccacaagagctgcttcaagtgctgccatggaggatgcaccatcagcccttctaactacatcgcgcacgagggtaagctctactgcaagcaccaccacgtccagctgatcaaggagaagggcaacttcagccagctcgagaatgaccacgagaagacatcgcaggctgggtcgctggaggacgacgaagaagaagagtattgattaatcgctgagcaaaaatacataccaccagaagaataattaatcttccttcttgcactatatatttctgtgccatttcagtcttaccaatggagatcatgtgcgttcagagaacacgatatcgttttcttgtatctgcatgtaaaccacgtctactaccctgattccacatttgcatttgaccaaaaa

SEQ ID NO: 2666 - DNA, 748 bp, Zea mays
  Clone ID: TF_LIB5116-033-A1-PF1-B12
tcaccctcatcccatctctctttcctttccttcccctcccctacgttggttcccttttcctttccgccgcggcaactgtgagccggcccgatcgagccccccacctcgagagaccgccataattcattccatccatccatccgctgccgcctatataagcgcggccattggggcgctcgtggcggtgttcgtcacatcaggcgcgcgcaggccgagatcagatcggcgacggcgaccatgttcagcgggacgcagcagaagtgcaaggtgtgcaccaagacggtgtaccccatggaccagctctccaccgacggcgccgtcttccaccgcgcctgcttcaagtgccaccactgcaggtccaccctctcctttagcagctactcctcgtttgaaggggtgccctactgcaagccccatttcgcgcagctgttcaaggagaccgggagctacaacaagagcttccagtcacaatcacccgcgaaatctgcgacggagaagctgactcctgagctggtctgtgccgtattggctgcctctttctatatgtgtgtcttgtctctttgctgccgtgcgattcggttagtcttatgtgaaatgtgctgtttcaggccagatcgccaagcaaagctgcgggcatgttttcgggaacacaggacaagtgcgccacttgtggtaaaacagcataccctcttgagaaggtgactgttgaagagaagtcctaccacaagtcctgcttcaatgctctcat

SEQ ID NO: 2667 - DNA, 544 bp, Zea mays
  unsure (1)..(544): unsure at all n locations
  Clone ID: TF_LIB3608-040-Q1-K6-E4
cgccgtgagacagagaccgaaggggggttgaccggtgctcgggaggaagatgtttagcgggacgcagcagaagtgcaaggtgtgcaccaagacggtgtacccgatggaccagctctccaccgacggcgtcgtgagcttccaatcacagtcacctgtcttccaccgctcctgcttcaagtgccagcactgcaagtctaccctctcactgagcaactattcctcgttcgaaggagtgccgtactgcaagacccatttcgagcagctgttcaaggagaccgggagttacaacaacaaagattactccggaaaagttggcccctgagctgaccagatcaccaagcaaagctgcaaggatgttttcaggaacacaagacaagtgtgcgacttgtggtaaaactgcgtatcctcttgagaaggtaacagtcgaagagaagtcctaccataagtcatgcttcaaatgctcccacgggnggctgcgcgattacaccttccaactatgcagccttggagggcatcctctactgcaaacaccatttctcccaac

SEQ ID NO: 2668 - DNA, 1085 bp, Zea mays
  Clone ID: TF_ZmC1143_3
ggcgattgggttcctcgcggccgggactcgctcgcccgagcggcgccggggagcgattgggatcgggaggcgagagtgcgtgcgtgcagccacaggcaggcgtcggcaccatgtcttctttcaccggcacgcaggacaagtgcgcggagtgcgacaagaccgtccacttcatcgacctcctcacggccgacggcgtcacctaccataagacatgcttcaagtgcagccactgcaaagggatcctctcgatgtgcagctactcttccatggacggtgtgctgtactgcaagacccacttcgagcagctcttcaaggagaccgggagcttctccaagaacttcacgccaggtggcaagtcttcagacaagggtgaactgacaagggcccccagcaagctatcatctgcgttttctggtactcaggataagtgtgcagcttgccagaaaacagtgtacccgctggagaagttaactctggaaggcgagtcctaccacaagagctgcttcaagtgctcgcacgggggctgcatcctcaccacctcctcctacgccgcgctcaacggcgttctgtactgcaagatccacttcgcgcagctgttcatggagaaggggagctacagccacatgatgaagaagagcccgtcccaggatacgctgccggacatggcagccgacgagcaaccgccggaaccggcgccaccgcaagacggggaaggagaggacaactaggaggaagggaccgccaccaatatatatcacacacacacacacacactcacacattctcacactcaagtctgcgtttgccatttttcttttctttttctctacgacttcgttattccctcctttcatctatctctccgtgaactcggtttgtcgtccagctggctgtaagtgtaccagatgccttcgttacgtctgatgaggctcatgacaatggcgattttggcatggagttgtgttagcctcgcggaaaaactgtaactgtgtaagcagaactgctatatattgttcctaacaatgttgtccttaaaaaaaaaaaaaaaaaaaaagcggcccaaaaaaaaaaaaaaaaaagcggcc

SEQ ID NO: 2669 - DNA, 1146 bp, Zea mays
  unsure (1)..(1146): unsure at all n locations
  Clone ID: TF_ZmC1143_7
ccggngaaaaaaaaaaaaaaaaaaaaaaaaaaagcaattggggaatcgggaggcgagagtgcgtgcngtgcagccacaggcaggcgtcggcaccatgtcttctttcaccggcacgcaggacaagtgcgcggagtgcgacaagaccgtccacttcatcgacctcctcacggccgacggcgtcacctaccataagacatgcttcaagtgcagccactgcaaagggatcctctcgatgtgcagctactcttccatggacggtgtgctgtactgcaagacccacttcgagcagctcttcaaggagaccgggagcttctccaagaacttcacgccaggtggcaagtcttcagacaagggtgaactgacaagggcccccagcaagctatcatctgcgttttctggtactcaggataagtgtgcagcttgccagaaaacagtgtacccgctggagaagttaactctggaaggcgagtcctaccacaagagctgcttcaagtgctcgcacgggggctgcatcctcaccacctcctcctacgccgcgctcaacggcgttctgtactgcaagatccacttcgcgcagctgttcatggagaaggggagctacagccacatgatgaagaagagcccgtcccaggatacgctgccggacatggcagccgacgagcaaccgccggaaccggcgccaccgcaagacggggaaggagaggacaactaggaggaagggaccgccaccaatatatatcacacacacacacactcacacattctcacactcaagtctgcgtttgccatttttcttttctttttctctacgacgcttcgttattccctcctttcatctatctctccgtgaactcggtttgtcgtccagctggctgtaagtgtaccagatgccttcgttacgtctgatgaggctcatgacaatggcgattttggcatggagctgtgttagcctcgcggaaaaactgtaactgtgtaagcagaactgctatatattgttccgaaaaaaaaaaaaaaaaaagcggccgcttttttttttttttttttaatttaatttaatttgaatttcttatatataatggggaaatacaatataataacaagcatcgatcgatctctcgatcgagtggacacgattacaaatccgtc

SEQ ID NO: 2670 - DNA, 274 bp, Zea mays
  Clone ID: TF_701158756H1
ttcgcctctgagcgcctgccgcagctgcgccgcctagccatctgctagaatgccgaatctggcgactcggcatgaaatgtgctgtgtgtcatacgacggcttactttgccgaagaggctcagtgcgaaggcatcagcttccataaatgctgcttgctgtgcatggtctgcaagaagaatctggacagtaccactgtggccgtgcatggagaggagatttactgcaagtcctgctacggcaagaagtatgggcccaaaggctatggctacgggca

SEQ ID NO: 2671 - DNA, 2165 bp, Zea mays
  Clone ID: TF_ZmC26552_1
cggacgcgtgggtttttctctgaattcaaaatcttccctattctcccaaagctttctgagtttcaaggccacatgggacataagggagaagcaagcaaagagctgatagtgaaggtgccatgtgtgtttggaacaggtgcaggaagaaggatagtgtccctctccaaaactataaacatgggttggttgagtaaaatatttaaaggtccagtaaatagagtttcaagaggacactacaacgggaactcccatgaaggctattcaactcagcacactaaatcatatggtgtgcatggcaatgaggacgaagacatggatcatgctattgcattatccttatcagaggaagatcaaaggaagggaaaggccattgataccgggcatcatttagatgaagatgaacagattgcacaggctctgcaagaaaatattggtcataacctagctgaagatgaacagcttgcacgggctctgcaagaaagtatgaatgatggacctcctcgtcagcacattccagttgaagatgttaactcagaaagtactccagcaagcatcttgccctcaaatattttccgcacaagtggcttgagggtttgtgctggatgcagaagtccaattggccgcggtcggtttctcagttgtatggactctgtttggcatcccgagtgcttcaggtgttatgcttgtgatagaccaatatcagagtatgagtttgctgttcatgaaaaccatgcctaccacaggccctgctacaaggagcgtttccatcctaaatgtgatgtttgcagtagctttattcccacagataaaaatggcctcattgaataccgggcccatcctttttggatgcagaagtattgtccttcccatgaaaatgatggtacacctaggtgctgcagttgtgaacgaatggagccaaaggacagtcaatacataacattagatgatggccggagactctgcttggagtgtctgcatactgctattatggagaccaatgaatgccagccactgtacattgatattcaagaattttatgagggtatgaacatgaaagtagagcaacaagttcccttgcttttggttgagcgacaagctttaaatgaagccatggaagcagagaaatctgtgcaccaccttcctgaaacaagaggcctctgcctatctgaggagcagattgtcagaactatattgaaaggaccaattggaccaggcaacagaatcatagatatggtcacaggaccatacaaactcattagacggtgtgaagtgactgcaattcttatactgtacgggctgccaaggctgctaactggctcgattctggctcatgagatgatgcatgcttacctccgacttaaaggataccgaaccctgagtccagaggttgaagaaggcatctgtcaggttctagctcatctttggcttgagtcagaaatcacatcaggttctggtagcatgtcaaccacctcagatgcgtcatcgtcatcttcaacatcttcatcatcgaaaaagggcgcaaagacggaatttgaaaaaagacttggggagttcttcaagtaccaaattgaaacagattcttctgtcgcttatggagatgggtttcgagcaggcatgcgagccattgagcggtacggcttgagaagcacccttgatcatatcaagatgacggggtcttttccatgctgaagctggttttttttacctcggtttggatatgggtatacatattttttttggagaacttttggttcaggttatacatacgaaaagccgaacttctgtgtcgagaagaggcataaggatttagctatactgtccattgcaggaaaaaactgtttcccttttcaattataaaatttcacagttcagacatgaaggtatgtggtctttagcttggccaaccttgtggaatgctgtcacagtgtcacttgatgcaaaagaaaattcgaatacatatgctttgctgtgcttgaaaagcaatggttggatgctatgctcttctttattgcgttctctcattatttaacaaactaattacaattgatgcagtttccctttgatgaaggttgattctagtgccaatcctgttgccgcttgtccacggcagtcagggcagagcgataggatttgtttgcaattaacctgatcgtggcctcgtccac

SEQ ID NO: 2672 - DNA, 1120 bp, Zea mays
  Clone ID: TF_ZmC383_3
gtcaccagtgcttgcttctcccgtacttcttgccggtccccccaccgcagctgagctgcggaactccttactcaccgacacttaggtcccacccgcttgtggccccgccaccagtgacccaaaccatcagagcatcctgtgcacggagcttcctcctcgaatgcgcactaatggtggtagtaataattgctcattagtttaatgagcagcaggtaggcactgtgctggctgtgctgtgctgttcctgtgcctccatcatccgattcccatcccccgtcgtcgcttgtttgctgctgcctttttctttccgccgcggcaactgtgagccggcccgatcgagcgagccgccccccacgcacctcaagaaaccgccataattccatccatccatccgctgccgcgtcctacgcggccatttggggcgctcgtggggtgttcgtcacatcaaccgcgaggccgagatcagatcggcggcgacgacggcgaccatgttcagcgggacgcagcagaagtgcaaggtgtgcaccaagacggtgtaccccatggaccagctctccaccgacggcgccgtcttccaccgcgcctgcttcaagtgccaccactgcaagtccaccctctcctttagcagctactccccgtttgaaggggtgccctactgcaagccccatttcgcgcagctgttcaaggagaccgggagctacaacaagagcttccagtcacaatcacccgcgaaatctgcgacggagaagctgactcctgagctgaccagatcgccaagcaaagctgcgggcatgttttcgggaacacaggacaagtgcgccacttgtggtaaaacagcataccctcttgagaaggtgactgttgaagagaagtcctaccacaagtcctgcttcaaatgctctcatggaggctgcgccctctcgccgtccaactacgcggctttggaaggcatcctctactgcaagcaccatttctcccagcttttcaaggagaaggggagctacaaccatctgatcaagtgcgcatcggtcaagcgcgcagcagaggcgcaaacagcacaggcggcagcacaggcagcgccggcggcagctgaatcctcctgattatggctgtcatcttt

SEQ ID NO: 2673 - DNA, 2500 bp, Zea mays
  Clone ID: TF_ZmC39_1
ctttccaccaggggtccacggcgcgccattagcgaaccgcgacctattcgccgtcgccaatcgccatctcctctccatctcgacatccgcagggcgttcgacgaaatgcgacgcaaacgccgcgcggcgcgcgcccatgtggccaggcgtctcccccccgcacgctcctcctcatccggcctcgcgagcgcgcgagggagacgtcgctgtgccagcgcgaggcggacgtcacctcacctccccgccccgcgtagcttttctgacccggatgctacgctgcgtctccactactccgcctcccgccctgccgtccatgtcacgcctcggctccttcctttcgcctcccgactcctgcctgctgccccttgtcctcttccccacctcctccggaatctggccgcgcacctactcgtcgccctctcgttttcccgtctccgctttctttatcctgcgggcggagcgggtagggtggggcggtcgttgctctcggatcaagagaaagggaggaaaaaaaaaacagcgctttctttctgtggccggcggttcgcccgtctctcactggctgtgtggccactggccaagcgggacacggaactcgagctccgtttggggattccggatcacttcgaggctaaagggattctgatcatcacttaagctcaagatcatgagttggttaaacaaaatttttaagggttcagtaaacagagtttcaaggggtcactatgatggagactggcatgaaggtcattcatctgatcacaccagagatacttacgatgacagtgataatgaagatatagatcgtgccattgcattatcgctagctgaggaagatcagaataaggggaagtcggtggctattgatactgactataatctggaggaagatgaacaacttgcacgggctctgcaggagagcctgaatgcagagtctcctcctcgacagaatgttcctattgaggatgtgccagtgcctcaatggaatattcctgttgagcgggtgcctcctcgacagtatgttccagcaaatgaaccaaccccacatgtttacccacggggtggatccaggatttgtgctggatgccaaaacccaattggccatggacgtttccttagttgtatggattcagtttggcatcctcaatgcttcagatgttttgcttgcaacaaacccatatcagagtatgagtttgctatgcatgatgatcagccataccacaaatcctgctacaaagagttttttcatccgaaatgcgatgtttgcaacaactttattccaaccaatagagatggcctcattgaataccgagcacatcctttctggatgcagaagtactgtccttcccatgaagatgatggcactcctcggtgctgcagttgtgaacgaatggagccaagggagatcaagtacataacattagatgatgggaggaaactctgcttggaatgtctcaattctgcagtaatggattctccagaatgtcaacatctttacatggatattcaggaattttttgaaggtttgaacatgaaagtagaacagcaaattccattacttttggttgagaggcaggctctgaatgaagccttggaagccgagaaaaatgggcaccacctaccggaaaccagaggtctatgcctttctgaggagcaagttgttagaacgatcttaaaaagaccacagattggaccaggaaacagaatcttagatatgattataggaccatacaagctgtctcggcggtgtgaagtgactgcaatccttatattatatggtctgccaagattacaaactggttccattcttgcccatgagatgatgcatgcatatcttcgtctcaaaggattccgaaaccttagtattgaggttgaagaaggcatctgccaagttttatcccacctgtggttagagtcggaaatcatcgctggttctagtagcaacgttgcatccagttcagaagcatcatcatcttcatcatcctcagctcctacctcttcaaagaagggtgcgaagaccgaattcgagaagaagcttggggcattcatcaagcaccagatcgaaacggattcttccgaggcatacggaggtggttttagagctggctatccggctgttgagcgctatggcttgaaaagaacccttgatcatatgaagttgacagggtctttcccatattaaagcaacagaagtaaaggagggggctttcttccagttgtgaggatacactccacattggaggttttggtttgggttatacataactgatatgcataccaaacgaggggaattgtctgtaaatcaggagaaccctctgctgcgcggaaacttattgcaaactgtctttttataggaaaacgatacatgcaagttttcagacagggaacttgagaggatcatatgtaatttttgggcacttgtttttgactcctttggttatcaaaaacaaggcaacataataagattgaaatttatcttcatctttaaattcaaaaaaaa

SEQ ID NO: 2674 - DNA, 923 bp, Zea mays
  Clone ID: TF_ZmC39_5
gtaccctccaggccttccggggcgcacctactcgtcgccctctcgttttcccgtctccgctttctttatcctgcgggcggagcgggtagggtggggcggtcgttgctctcggatcaagagaaagggaggaaaaaaaaacagcgctttctttctgtggccggcggttcgcccgtcgctcactggctgaagcggctgcacccgcgccctcttgctgtgtggccactggccaagcgggacacggaactcgagctccgtttggggattccggatcacttcgaggctaaagggattctgatcatcacttaagctcaagatcatgagttggttaaacaaaatttttaagggttcagtaaacagagtttcaaggggtcactatgatggagactggcatgaaggtcattcatctgatcacaccagagatacttacgatgacagtgataatgaagatatagatcgtgccattgcattatcgctagctgaggaagatcataataagggaaagtcggtggctattgatactgactataatctggaggaagatgaacaacttgcacgggctctgcaggaaagcctgaatgcagagtctcctcctcgacagaatgttcctattgaggatgtgccagtgcctcaatggaatattcctgttgagcgggtgcctcctcgacagtatgttccagcaaatgaaccaaccccacatgtttacccacggggtggatccaggatttgtgctggatgccaaaacccaattggccatggacgtttccttagttgtatggattcagtttggcatcctcaatgcttcagatgttttgcttgcaacaaacccatatcagagtatgagtttgctatgcatgatgatcagccataccacaaatcctgctacaaagagttttttcatccgaaatgcgatgtttgcaacaact

SEQ ID NO: 2675 - DNA, 666 bp, Zea mays
  Clone ID: TF_ZmC844_10
gtaagattctgtgttcaaccatctcaatcattcttccggtagtttgagccttcttcacttgacaacctgtcacagaaatctctcactcaagaatcacataaatacaagattcccagattaaataaatcgttatatccatgaagacagcaactgctgcatttctaagctgaaagtttcaattattgatatttttgcctaaagataaggaaaggtgacaggaatactgtacatgaatatcagtatgctgattgcaactcaccggttaagcatccaggtcactgttaataacactatgtaccacaagagctgcttcaagtgctgccatggagggtgcaccatcagcccttctaactacattgcgcacgaggggaagctgtactgcaagcaccaccacatccagctgatcaaggagaaggggaacttcagccagcttgagaatgaccacgagaagacatcacaggctgggtcactggaggaggatgatcaatactcttgttcactgagcacaaccacagatgaataatgaatcctcttgcatttgcctagagcactatgtatttctgtggcgtggttcgatttcagttttaccaatggaggtcatgtgtgttcagagaacaatgatattgttgtcttgtatctgcatgtaaacgttgttatctttgagtc

SEQ ID NO: 2676 - DNA, 257 bp, Zea mays
  Clone ID: TF_700450670H1
ggagtccacacaggcagacttgaccttgaccagatagtcttcaagatgctcaacttaggcggaggcgcaaaatgtggagcctgtgaaaagaccgtctaccatgcagaagaaatccagtgcaatggaaggagtttccacaagacgtgtttccactgcatggcctgcaggaaggctcttgacagcacgacagtcgcggctcatgagtcggagatctactgcaaggctggctatgggcgcagatgatgggcccaaaggat

SEQ ID NO: 2677 - DNA, 410 bp, Zea mays
  Clone ID: TF_LIB4185-052-R1-L1-E7
aattcggcacgaggcaccgctgcagtttctagagccctctctgccactcgtgatcccactagtcacgatgcctgccctcgctaagcccgcctcccgcaccgccaagcccgccgcggctccgaagccgaagcctgccgccgccaagccgaaggcggccaccgctggtgcctcccacgcggcttacttcgagatgatcaagggggctatcacggcgctgagggagaggaccgggtccggctcgcctgcgatgggcgtgggtggggcggtcacgtgcggcggctcgctcttcggcgtcttctggatctggggcgcgacgtcgccgctcgggtggggggcgctgaggccgcggccccgggcggcgggcgcgacggctcgcctgtatgcgcgcggggggggctccgtccctggcg

SEQ ID NO: 2678 - DNA, 282 bp, Zea mays
  unsure (1)..(282): unsure at all n locations
  Clone ID: TF_jC-zmX3059031Q1K1F04b1
ccgtgaaccttatgattgttctgcacaccactgcagtttcaatattggtttttggcaaaggtgatcccactagtcacaatgcctgcccttgctaagcccaccttccgcacggccaagcccgcctcggctcctaagccgaatcctgccgacatctggccgaaggcggccaccgctggtgcctcccacccgcctaacttcgagatgatcaaggaggctttcacggcgcttaaggagaggaccgacccaagattnccttgcgaacagccaagatccttnctggat

SEQ ID NO: 2679 - DNA, 278 bp, Zea mays
  Clone ID: TF_LIB3332-033-P1-K1-A2
ctcctccgccgacaacagcgtactgtagtgtaattcccgagagggctggggagagtggtaatgatcctcaatgtcgacggaggaggctgttgtccctgaagtcccggtgaccgaggtgccagcggaggtccctgcggcccatgtggtcgatgcgcccaatgcgaataaggctcccaacgagaagaaggcgcctaatgagaataagccgtccgctggcgaataagccggcggcgcaccctccctacgctgagatgattgtagaggcgatcgctgccctc

SEQ ID NO: 2680 - DNA, 300 bp, Zea mays
  Clone ID: TF_LIB143-015-Q1-E1-F7
acatccaccgcctccgccgccgacaacagcgtagtgtagtgtaattccggagagggttggggagagtaatagtgatccgcaatgtcaactgaggaggctgttgtggctgaggtcccggtgaccgaggtgccagcggatgtcccggctgaccaggtggccgaagcgcccaaggcgaataaggcgcccaaggagaataaggcgcctaaggacaagaatctttccgcggcgaatatcccagcggcgcaacctccctacgctgagattattgtacaggcgatcgctgccctcaaggagaggaag

SEQ ID NO: 2681 - DNA, 1921 bp, Zea mays
  Clone ID: TF_ZmC1172_2
tacctgggacggccgggccggccgggcccactttccaattcgacatcttcgccctcgaatcgagcttccctccaccgaatcgagttcctccatccaaatcgagctcattgccgccggatcgaggtctgcgtggatcgagctcgagctttggagaaggagaggaaacgggggacgggcacggggggagcaaggcaaccaaacgggtggagggaaacacgccaaacaggctcctcgatcgttccgggctcgggctgccacccgccattcggtgtcccctccttgacaggtgcccgagccgcgccgagctccagcctcatttccacggtccgcgccggcactcttccctctcccgatcgtcctcctcgtcgcctgccgcctcttccttcttcccactccactagcttcaggttggactgcacaacgtggagcggagatctatccgaacacgggattgattcatctggtggtgttacaacatagggtttttgatatagcaatgggattactcatgtataaatgaacaaagtttggagacagttggacctgacaattgccactttttacatgttttaactcattttttttctgggaaacaagtaattctgaagttaccttggaagtcctttgcgcttttgactggtcgggttgcataggccattgttgagaggtgatttggcctaagaatgggggctccaaaacaaaggtggacttctgaggaagaggctgctcttagagctggaatagcaaggcatggagttggaaaatggcgcacaatattgaaagatccagaatttagttccaccttatgctaccgctcaaatgttgatctcaaggacaagtggcgaaacatgaatgtgattgtcagtacatcgagttctcgtgacaaggcgaagtctgcattgaagagaatacgaactattcccaagaataatgagcacaccatggcaattaccagagttacttctgatattgatgatgagattgttgacgaaaagcctatagtatcattgcctagtgaagcaaagaacacatcaagttcgaagaaatctcacaggctagataatattataatggaggctataaagaacttaaatgagcctacgggatcacacagaactactattgctaattacatagaggagcaatattggccacctagtgattttgatcacttactatctgcaaaactgaaggacttgtccaccagtggcaaattgataaaggtgaaccggaagtacagaatagcacctagttcacccaattcagagcgccgaagccccaaaatgccactgttggaagatgtccaaagagagcctgtcaagatatggagtgatgatactaaaacccttaccagatctcaagttgatgctgaattggcacgtatggcaaccatgactgctgaggaagcttcagtggcagcggctcgagcagttgctgaagcagaggccatcatggcagaagctgaagctgcagcgaaagaggcagaggctgcagaagcagaagcccaagccgcacaagcatttgctgaagcagcgtttttgacattgaagaacagaaatgctggaaaattgatggcctaaggttgatcctacttggactctcggcctcgcggctgttctgaaacggcttttctgtgccatgtagatttgtacaacagtacgtgtttactacacttcggtttaaagcagctgccccggtgagtgtatcaccttatgttagtgggagccatgtgaaaactccagcctccagcgcactagtagcaacaatagcagcttgccacaacgccattcagaaaactgggtggcataaactcttccagtgtcaaatgtttcgctaacgatttgcagtattgcattgtgcatgaacagcctttgcattagtgcattattgcgctgcctgccaacagtcggcccgtttgctg

SEQ ID NO: 2682 - DNA, 394 bp, Zea mays
  Clone ID: TF_jC-zmX700092020b1
ccgtctccgccgccgacaacagggtggtgttttttagttccggagtgggttggggcgagtagtagtgatccgcaatgtctactgaggaggctgttgtggctgatgtcccggtgaccgaggtgccagcggaggtccctgtggcccatgtggcctaggcgcccaatgctaataaggcgcccaaggagaagaaggcgcctaatgagaagaagctttccgtggcgaataagccggtggcgcaccctccctactctgagatgattgtagaggcgatcgctgctctcaaggagaggaaggggtttagctcggtggccatcagcatgtacgttgaggggaagcatggtggtaagtttccctcaactttctgtagcatttcactgttcaactgaagaagctc

SEQ ID NO: 2683 - DNA, 612 bp, Zea mays
  unsure (1)..(612): unsure at all n locations
  Clone ID: TF_LIB4729-127-A1-K1-F6
aaaccccgcgccgcctccggcttccttcccctggaagcctcctcccctctcgcgccgctccaaaaacttgctccaactcccggcacgcgcacccaaagccaaaacccctcgcgtcgtcggccgtcgcgcacgcttccctccatcgtgcgtctgcgccgtcacgttttccgcgatgccccgccccagttcacgcgccaaggcggcatcacggccaggaggcggtggncgtcgcctcncagagaacccctgcggcaccctcgctaagctgacatgatcgcagaattgatcgctgacccccagaagaggaacgggtcgaggtatgcgtgcatcacaaagtacgtgcaggtgaagcatggcgacaaggtctgcaccatcttgggcaaggacctcactgtgcagctaaagaaggtcgctgacgacgataagttgacgagggtgaacaactccttcaagctgccggccaccgacgccaagcccaaggncgctaagcctcacgcacccaaggtcgcgtactagaccaagtcttcgccgaaggggaaggacaagaccgctgcgaagcccaaggcggcgtcgacacaacccaaggccaaggccaaggtcaagtctgtcgct

SEQ ID NO: 2684 - DNA, 645 bp, Zea mays
  Clone ID: TF_LIB4766-082-R1-K1-G7
ttgggtccctcgaggccggccggggtctcttcatacatcacccaccgcctccgtcggcgacgacagcgtaatgtaatgcttttccgttgagggttgctgagagtctactgatccgctgtgtcgaccgaggaggctgttgtgcgctgaggtcccggtgaccgaggtgccaacggaggtcccgtcggcccatgtggccgaggggcccaaggataataaggctcctcaaggagaagaaggtgcctaaggagaagaagctttccgcgccgaagaagccggcggcgcaccctccctacgctgagatgattgtagaggcgatctctgccctctaggagaggaatgcgtcgagctcggtggccatcaacaagtacgtcgaggggtaattatggcggcaagctccccaccatcttctgctggtagttcactgtgcagctgaataatgtcgctgtcgtcgggaagctgacgaggctgaagaactccttctagctggcgtgcaccgacgcctaggccaaggacgtcatgtccaatgcactctatgtcgcgcccaatgccaagccctcgacgagagtgatgtcaagaccgctgcgaattccaaggctgtgtcgtctcaatcctgcgccaaggacatggccaagcctgtcgctcctg

SEQ ID NO: 2685 - DNA, 381 bp, Zea mays
  Clone ID: TF_LIB3354-080-Q6-K6-F1
cccaccgcctccgccgccgacaacagggtggtggagtgtagttccggaaagggttggggagagtagtagtgatccgcaatgtcgacggaggaggctgttgtggctgaggtcccggtgaccgaggtgccagcggaggtcccggcggcccatgtggcctaggcgcccaaggcgaagaaggcgcggcaggagaataaggctcctaaggagaagaagcttttcgcggataataagccggcggcgcaccctacctactctgagatgattgtacaggcgatcgctgttttcaaggagaggaatgggtctagctccgtagccataatcaagtacttctaggggaagcatggcggcaagctcttccaccaacttacccaagcatgttac

SEQ ID NO: 2686 - DNA, 580 bp, Zea mays
  Clone ID: TF_LIB4730-100-Q1-K1-F2
atccactaccacatcgctctccgaaataaggtatttacaccgatgctgctatctacgagccctactctgccacacgggatcgcaatatgaacgatgcctgcccgcgctataccaggctcacgaagcgacaagcgcgacgaggctccgaagccgaagcgtgcagctgccaatccgaaggcgcgcaccgctggcgcctcccacccggcttacttccagatgatcaaggaggctatcacggcagaaaaggagaggatcgcttccagactctcaagcgcatcgacaaggaagtgggggacaaggacgatgaactctctgccggccaatttaaaaaagatgctttccatccaactccgagtgcactaagctaagggcaagctcgggaaggccaaggcgttcggacaagctctcggacgccgcctagaatgcatcccccaagaccaaggctaaaacgaggaaagccgccgctgctaagaacaccgcccccaagtgcggcaaggacgacgccgacaagtcaaagaacgaacgggttgccaagataaagaaggtcgctgatgctgagaccaagggctgagagcccgac

SEQ ID NO: 2687 - DNA, 299 bp, Zea mays
  Clone ID: TF_ZM5033.C5.o1.fg
atgccttggtcaagcaccacggccgacggcaggcggcagcagcagcggcgaacggtcgagtccagcctatccgaacccactatcgttgggagggagcctggcctggcccgggtcactccgatgatcgtcgccgccctcgccgcgctcgccgaggagaacggctccagccaggccgccatcgcgcgccgcatcgaggcggaggcccgcggcgacctgccggcctcgcacccggcgctcgtcgcagcccacctctcgcgcatgtccgccgccggggagctcgtcgccgttgcggggggaaa

SEQ ID NO: 2688 - DNA, 764 bp, Zea mays
  Clone ID: TF_ZmC366_3
cgttccccccctcgggtcgacccagcgtccgctccggtcgtcaccgtctccgaggagccggcgccggaagcggcgaaggaggtggtgaagaagccggaggaggggaagaagcccgacgaggagggtgacgagaggaagaaggccgaccccgccgccgagaaggagaagaaggcgaggaagccgcggagcaggaagcccaagtccgccgggctgcaccacccgccctatttcgagatgatcaaggaggcgatcctgtcgcaggacggcgggaaggtcggggcgagcccgtacgcgatcgccaagcacatgggggagaagcaccgggacgtgctcccgcccaattaccgctgcctcggcgccgtcgagggaggcacgtaaggtgcgcgcgaagcgagcgaggaaggtggccccggcgcccgcgcagcccaagcccaagccagcccgcgccgccgcttccggtgccggcaagaaggtcaacaaggccagcgcctgattagcggcggccgtcctggtccccccgcgcgcgcctccgtgtattatactagccggtagtagcagtaggagttgcaagtactagcagcgtggtagtcgtgatgatgttgtggtcgtcgtctccgccggcccgatcgatcgggcgctctgttccgccgtgtggcagagttttgtaaataactagtctggtgtgatgcgctcatggcaataaagcgcgcgcttctagcttcccttgatgaaaaaaaaaaaagggcggccgccaccgcggtgga

SEQ ID NO: 2689 - DNA, 303 bp, Zea mays
  Clone ID: TF_jC-zmX700095987b1
acaaggcagcggggggggtttaaaaaaaaagaggcgtttataccacacgagaccccacaagacacgatgcctgacctcgctaagcccgccacccgcaccgccaagcccgccgaggctccaaagccgaagcctgccgccgccaagcccaaggccaacaccgctggcgccaaccacccgccttacttcgagatgaacaaggaggctatcacggcgctaaaggagaggaccgactccagcccccaagcgatcgccaagtatgagggggacaagcacggcgcgtacatggcggccaactcaaagaag

SEQ ID NO: 2690 - DNA, 467 bp, Zea mays
  Clone ID: TF_LIB4741-005-R1-K1-D2
gggtcggggagagagtgtatccgactgacacgtgaggaggcctggtggggctgaggccccggagaccgaggtgccagcggaggtcccggcggtccatgtggctcgaggcgcccatggtgaagaaggcgcccaaggagaagaaggctcctaaggagaacaagccgtccgcggggaagaagccgacggcgcaccctacctatgctgagatgattgtataggcgatcgctgccctcaaggagaggaaggggtcgagctcgttggctcatcaccaagtacgtggaggggcagcacggtggagagctccccaccaacttccgcacgcagcttaccgagcagctgaagaagctcgctgccgccggtaagctgacgagggtgaagaactccttcaagctgacggccaccggacgccaagcccaaggccgcccaagttaacgcacccaaggacgggcccaagccaaagccctcgc

SEQ ID NO: 2691 - DNA, 376 bp, Zea mays
  unsure (1)..(376): unsure at all n locations
  Clone ID: TF_LIB3150-101-P1-N1-A3
cgnncgtacctttttgtcttttgttgtcgacttccgcggggnggagagtagatccggagagggtcggggagagtaccagtgatccttattgtcgacggaggaggctgttgtggctgaggacccggagaccgaggngccagtggaggtntaggaggtttatgttggntgaggtgntcaatgtgaagaaggtgcccaaggtgaagaaggcgcctaaggagaagaagcttttcgcggtgaaaaaccggcggcgcacccttcctacgctgagatgattgtagaggcgatcgctgcccttcaggagaggaagggttctagctctgtggccttaaactagttctttcaggggaagcatggtggtaagctccctaccaacttt

SEQ ID NO: 2692 - DNA, 1368 bp, Zea mays
  unsure (1)..(1368): unsure at all n locations
  Clone ID: TF_ZmC1172_3
cattggtaccctcgaggccggccggggcggtggagggatcgggcgtaccccggtgcccgttcaccgccgttcacgccgcgtgtgcgctctgggtctgccgctctctctctctcctgcgcgtggcgcagctgccgtcctataccaggcgcccaggtctagcctcgtcggtgccttcgccaggtctttctcgggcccttcgccaacgacgagcgcccgctagaaggtatgcattcgtgttcataatattgtatttgactaaaaagactgggcctacgcatgggggctccaaaacagaggtggacttctgaggaagaggctgctcttagagctggagtagccagacatggagttggaaattggcgcatgatattgaatgatccagaacttagctccacattgcgctaccgctcgaatgttgacctaaaggttaaatctattcactcgtttttacgtaagattgatttagtgaagggactgccatatttgggtattccttgaaatcatgtgtcttttggttttcaaatttctagattcatcttcaatcttaatgctcatatgttccttttttatttatcactacttaggacaatggcgcaacatgaatgtaattgtcacttcatcgagtactcgtgacagggggagaacttccgaagagctgctcctaatgagcacaccatggcaattaccagagttacttctgatattgatgatgagattgttgacgaaaagcctatagtatcattgcctagtgaagcaaagaacacatcaagttcgaagaaatctcacaggctagataatattataatggaggctataaagaacttaaatgagcctacgggatcacacagaactactattgctaattacatagaggagcaatattggccacctagtgattttgatcacttactatctgcaaaactgaaggacttgtccaccagtggcaaattgataaagatggcctaaggttgatcctacttggactctcggcctcgcggctgttctgaaacggcttttctgtgccatgtagatttgtacaacagtacgtgtttactacacttcggtttaaagcagctgccccggtgagtgtatcaccttatgttagtgggagccatgtgaaaactccagcctccagcgcactagtagcaacaatagcagcttgccacaacgccattcagaaaactgggtggcataaactcttccagtgtcaaatgtttcgctaaaaaaaaaaaaaaannnnnnnnnnnnnnnggacctgcagccaaccatctaccagcgactcagcgagcgagagcagcacacacgcagctagctaggagcagcagcagcggcggcggcgatggcggcctccatgatctcctcgtcagc

SEQ ID NO: 2693 - DNA, 327 bp, Zea mays
  Clone ID: TF_LIB3076-019-Q1-K1-B5
aacgcctccgaagcaacctcactacgctgacatgattttacagtccatacgcttacctcaacgtgatcgaggctttaagctcgctagccatcagccagtacattgagggcaaacatggcgacaaactcgttaccaactttcacaagcagcttactgcgcagctcaagacgctcactgtcgacgacaagctgacgagggtgaacaactccttcaagctgcctgccaccgacgccaatcccatcgccagcaactccaaggtacccaacgacgcgcccaatagcaacacctcgcactaagcgaatgccaataccgcttccaagcccaagg

SEQ ID NO: 2694 - DNA, 354 bp, Zea mays
  unsure (1)..(354): unsure at all n locations
  Clone ID: TF_LIB4730-055-R1-K1-C2
natccagacacacctccctctccgaattaaggtagcatactccgttgtagtttatagagccctatctgcactcgagatcctactagtgaagaagcctgacctcgcgaagccctgcctcgcgcaatcccaagaccgacgcggctacgaagcccaagcctgctgtcaatcaatcggaatgccatcaccgctggtggctcaaacccgccttacttgcagaagatcatggaggctatcgcggaactaatagaaaggaccggctgcagctcacaagcgattgacatgtatgtgggtgacaacgcacgactcctatctgagcgacatcttaaaaagcatgctttacattcaactccgtgg

SEQ ID NO: 2695 - DNA, 748 bp, Zea mays
  Clone ID: TF_LIB4740-123-A1-K1-G5
atccagtcgcacctccctctccgaaatcaaggtagcatacaccgctgcagtttctagagccctctctgccactcgtgatcccactagtcacgatgcctgccctcgccaagcccgcctcccgcaccgccaagcccgccgcggctccgaagccgaagcctgccgccgccaagccgaaggcggccaccgctggtgcctcccacccgccttacttcgagatgatcaaggaggctatcacggcgctaaaggagaggaccggctccagctccgtgggtccgcagccaagggcaagctcgtgaaggtcaaggcttcgtacaagctctcggacgccgccaagaaggcatcccccaagaccaaggctaagccggcaaaggccgccgctgccaagaccaccgcccccaagccggccaaggccgccgccgccaagtcaaagaaggcagcggctgccatgccaaagaaggccgctgctgctgggaccaagcgcaaagtgcccgagaagaaggtcgtggcgaagccgaagaagtcccccgccgccaaggccaaggccaagccgaagaccttgaagtcccctgcctccaagaaggcacggaaggcctccgcatgagatgggttgctttaggtctaagctctgattgtggttggtgtcagttaggtactgtacaaactaagtgtgtgcccaaagtgtctcaggcggtgtgttatgtgcttagcaagttctatctatcagagtgttttagtttaacaatggttt

SEQ ID NO: 2696 - DNA, 381 bp, Zea mays
  unsure (1)..(381): unsure at all n locations
  Clone ID: TF_LIB3354-043-P1-K1-D8
ntcggacccnnncgcgtccgtatcaagagcatgcgtatcactcagctgcagaactcctaggaggcctactttctaggcactgcgtagaccatgagctagtgcactaattgccatgactctagtgcaagcgccgcgatgacggaccgcagatcccgccggggctacgaatcggatcctgtcccactgaagtcgaatgcggtcaccgttggtggatgctactcggctgacttggagatgataaaggaggctatcaccgcgctcaaggagaggaccggttgcagttcgcaagcaatcggcaagtatgtgggggacaagcactgtgcgtgtatgaccgtcaacttaaagagagatgctctgcatgcagcttcgtgggttcccaga

SEQ ID NO: 2697 - DNA, 458 bp, Zea mays
  Clone ID: TF_LIB3732-029-Q1-K6-C1
cgggtttgaccagcgtttttgggcgcgtgggcgcctccgccgccagacacagcgtagtgtagtgtagttccggcaagggttggggagagtagtagtgatccgcaatgtcgacggaggaggctgttgtggctgaggtcccggtgaccgaggtgccagcgtgagttccggcggcccaggtggccgaggcgcccagggcgaggagggggcccaagtgataagaaggcgcctaaggtagaagaagccgttcgtggggaataatccggctgtgcatactgcctacgctgagatgattgtagatgtaatcggtggcttataggataggaaagggtttagctcgtgggccattagcaaatacctagaggggatataagcttgctaattgtgaaaaaattaacgttatcagataacagaacaattgaagatactcactgatgctagatgaatttctagattctaaa

SEQ ID NO: 2698 - DNA, 531 bp, Zea mays
  Clone ID: TF_LIB4730-140-A1-K1-H11
atcgtttcatcaccgcctatgctgtcgacaacttctgagtgaaatgcagttcccgatagggctggtcagagtattaccgatccagaatgtcaacggaggaggctgttatgcgtgaggtcgcggtgaccgaggcgccagctgacgacccgcctgcccaagaggccgaagacctccgatcggacgagtcagccccaccataataatcctcctactgagaagatactttccgcggtgaaaaaaccggcgcggcaccctccctacactgagatgtttgtatcaaggattcctgcacctctttgcttcgacgggaacgagctcggcggccatgggctagtacatccagaggaagtatggtggagagatcctcaccaacttccgtaagcagatcactgtgcatgtgtacaatctcgctgacgccggtaatctgactatggtgaataactccttcaagctggctgtctctgacgccaagcccgatgccgccatagcccgatgctcccgaggatgaggacaagtccacgtcctctgccg

SEQ ID NO: 2699 - DNA, 529 bp, Zea mays
  Clone ID: TF_ZmC190195_1
cgtacgaagctcggattcggctcgagctcgaccgctcgagccgctcgagccgctcgagttccgttaacgctctccaatacaaaataaccactcactgaatattcggtcgaagatgtccgccgccgaagaagctaaagttcccgccgtcgaaaagccggtggaggaggtgaaggcgccgaagcttgccaaggagaagaaacctaaggctccgaaggaaaagaagccgaaacaggccaaaactgcttctcatcctccatatctccagatgattaaggacgctttgattgctctgaacgagaaaggaggatcgagtccatatgcgatacgaagtacatggaggagaagcacaaggcggtgcttcctgcgaatttcaagaagatactaggtctgcaactgaagaaccaagctgcgagagggaaactcgtcaagatcaaggcttcgtacaagttagccgaagccgcgaagaaggtgaaggagagcaccgccaaagcgacgaaggaatcgcgtccgaaacgaaacaaaatcgcaa

SEQ ID NO: 2700 - DNA, 566 bp, Zea mays
  Clone ID: TF_LIB4730-130-A1-K1-G9
attacgtgcacctccctctccgaaatcagggatttacaccgctgtagtttctagagacctctctgccactcgtgatcccagtagtcacatatggctgccatcaccaagaccgcctctgggaccgccaatgccggcgcggcatccaaagccgaagcctgccgtcgacaattagaaagcgtccatcgatgtcggctcccactcgccttacttccagatgaacaaagaggctatcacggaactaaaagagagaaccgagtccagctcgctagctatagtcaagtatgtgaagaaagaagcacgatgcgactctgatggtcaacttcaatcaatatggttttcattcatctcggcgtcatcgcagtcaaggttaagctcgtgaaagctgaggcttctcataagctctcggacgccgtacaagaagggatcccccaagagcaaggctaagtcgactaaagtgcggcgctgccaagagcaccgcccgcaggccgcgcaaggccgactgcgccaagtgaaagaagggagcggctgccaagccaaagaaggtcgctgctgctgggaccaagcgc

SEQ ID NO: 2701 - DNA, 344 bp, Zea mays
  Clone ID: TF_LIB84-011-Q1-E1-B9
cccagacatcatcgtagcatacaccgctgcagtttctagagccctctctgccactcgtgatcccactagtcacgatgcctgccctcgctaagcccgcctcccgcagcgccaagcccgccgcggctccgacgccgaagcctgccgccgccaatccgattgcggccatcgctggtgcctcgcacactccttacttccagatgatcaacgaggttatcacggcgctaaagtgaatgaccggctcgaattcgcaagcgatctccacgtaagtgggggaaaagcaccgtgcgtctcggcctgttaacttcaagaacatgccttccaatcagctccgttggtccgcagtc

SEQ ID NO: 2702 - DNA, 449 bp, Zea mays
  Clone ID: TF_LIB3357-015-P1-K1-C2
gtcgtcgcggcccctcccctccacccccgagtccccgtgcgctgcgcccccaattcccacgcgcccagacacgccgagaggggagaggaagcgacagccagcagccgaggcggccagcgcaggcatggccactcccacttccagtggcgacggctcgcccccgggctcctctgacctcgtgcccccctcctaccccgaggcaaccctacctactttccctctgctctgcgctgctcctttccgccagatctgtgccgatctgccgaattgactgacccgtgcgcctgccctggctgctgcagatgatcgtcgccgccctcgccgcgctcgccgaggagaacggctccagccaggccgccatcgcgcgccgcatcgaggcggaggcccgcggcgacctgccggcctcgcacccggcgctcgtcgcagcccacctctcgcgcatgtccgcc

SEQ ID NO: 2703 - DNA, 574 bp, Zea mays
  unsure (1)..(574): unsure at all n locations
  Clone ID: TF_LIB3355-019-P1-K1-G4
ctccctctccgaaatcaaggtagcgtacaccgctgcagtttctagagccctctctgccactcgtgatcccactagtcacaatgcctgccctcgccaagcccgcctcccgcaccgccaagcccgccgcggctccgaagccgaagcctgccgccgccaagccgaaggcggccaccgctggtgcctcccacccgccttacttcgagatgatcaaggaggctantcacggcgctcaaggagaggaccggctccagctcgcaagcgatcgccaagtatgtgggggacaagcacggcccgtctctgccggccaacttcaagaagatgctttccatccagcttcctggggtccgcaggccaaggcaagctcgtgaaggtcaaggcttcgtacaagctttcggacgccgccaagaaggcattcccctaggccaaggctaagccggcaaaggccggcgctgccaagacacccgccccaagccggcccagggccgccgcgccaaatcaaagaaaggcagcgggttgccaggccaaaaaagggccggtgctgcttggaccaagccgaaagtgcccgagaagaagg

SEQ ID NO: 2704 - DNA, 798 bp, Zea mays
  Clone ID: TF_ZmC1022_21
gccggccgccccgccaaggcggccaagacgtcggccaaggccacgccaggaaagaaggcgccggtgaccaagaagcccgcggccgccgcgaagaaggcgccggtggccaagaagcccgttccggcgaagaaggcggctgcccctgcccgaaaagcgccggcacggaaggcgaagaagtagaggggtaggcggcggagaaatgtagggtttggttctcgtatgacgctagatgtttgctctccctttagcctaggtggtgtctgtgtgtgcaatgttgtaaatttgatatcggatgctgggaacactaagtcaatcttacaaggacaagctcccgcccaacttccgcaagcttctgaacgttcagctcaagaagctcgtcgccggcggcaagctgaccaaggtgaagaactcgtacaagctgtcgtccgccaccaagccaaaggccgccccgaagaagaccaagaccggcgtgaagaagcccaaggccgctgccaaaccgaaggccaagtcccccgcgaagcccaagcccgccgcgaagaaggcgccggtagccaagaaggccgctccggcgaagaaggcggctgcccctgcccgaaaagcgccgtctcggaaggcgaagaagtagaggaggggtaggcgtcggagaaatgtaaggtttggttctcgtattacgctagatgtttgctctccctttagcctaggtggtgtctgtgtgtgcaatgttgtaaatttgatatcggatgctgggaacactaagtcaatctttcagtataaaaaaaaaaaaaaaaaaggccccta

SEQ ID NO: 2705 - DNA, 388 bp, Zea mays
  Clone ID: TF_LIB4732-048-R1-K1-C12
atgctcatcattaaccgtactccgccgccgacaacaccgtagtgtagtgtactgccttagagggttggggacagtagctctgctgccacgatggcgtacgctgcaggctgctgtggttgacgtcacccggacttagtaggcaaggtcgggatcgacggcccccggggctgatgcgcccaaggtgcagaatgcgcataacgagatatcggcccttaacgacaacgaactttccgctgcgaacaagacagcgtctcaccctccctacgttgaaatgattgtagagtcgatccctgccctgcttgagaggaagggcgcgagctcgatggacatctgtaagtacatggcagcgtgaagaatgcgcggtgaagctccccaccgatttccgcga

SEQ ID NO: 2706 - DNA, 274 bp, Zea mays
  Clone ID: TF_LIB3245-197-P1-N1-D11
cgaggtagcattcaccccggcagcatcggggggggtgcgtgacactcgggatgcgactagccacgacgcctgccctcggtaagcccgcctcccgcaccgccaagcccgccgcggctccgaagccgaagcctgccgccgccaagccgaaggcggccaccgctggtgcctcccacccgccttacttcgagatgatcaaggaggctatcacggcgctaaaggagaggaccggctccagcttgcattgcgaacgcctagtctgcgggtgacaagcacg

SEQ ID NO: 2707 - DNA, 497 bp, Zea mays
  Clone ID: TF_LIB4746-104-R1-K1-C3
cttggccttggccttggccttgggtttgggcgacgccgccttgggcttcgcagcggtcttggccttcgccttcggcgagggcttgggcttgggcgcggccttgggtgccttgggcttggcggccttgggcttggcctcggtggccatcagcaagtacgtcgaggggaagcatggcggcaagctccccaccaacttccgcaagcagctcactgtgcagctgaagaagctcgctgccgccgccaagctgacaagggtgaataactccctacagctgccgagcagcgaatgagacccaacaggcagccagcccgagacatcgcaggagctgctaagaatgtagaagtcgctcgaggagcacctgctcctcaagggaaaaaccgcagtggacctccccatgaacagagaacaaaagcaccctgcgaaaaggaaggccggtttacattcaggcagacaaactgcacccaagctgttgtgaatgccacgctgaaaacattgga

SEQ ID NO: 2708 - DNA, 403 bp, Zea mays
  Clone ID: TF_LIB3732-023-Q1-K6-A11
aaccccgggtcgaccacgcttcttccaccgcctccgccacctaacacagggtggtgtagtgtagttccacgcaagggttggggggggtactagtgatccgcaatgtcgacggaggaggctgttgtggctgaggtcccggagacctgagtgccagcggaggtcccggcttttacgtggccgcagcgcccaaggcgaagagggcggggagggagaacaaggcgcctaatgagaagaagccattcgcggagaagaagcccacggcccacccttcctacgctaagatcattgtagaggagatcgatgccctcaaagagaggaaggggttaatctcagtgggcataaacaaatacatagaggggaagcacggcggcaagctaatcaccaactttcacaagcatctcac

SEQ ID NO: 2709 - DNA, 1767 bp, Zea mays
  Clone ID: TF_ZmC238_1
ttgggaccctcgaggccggccgggtccgccaccttctccacccaacaacaaaacaagcctaatgggtaatggcttcctcagttcctctccatctcacgccactgcgctgccctagaaccttcgccgccgcccctctttaggattaccgtgtcctcgatcgccccctggcacgcccgccccgatcgccccctggcacgcccgccccggatcctgcaccggaattccgtgtggaattccggacccgatcgaaatcgaaccgcctccctgcgtgctcccctgatcaagaaattctcacgccgcgcgaacgcacgcctgaggcggttggatcctctggtggggttccttggtctcgatttgctgtgtggatgggggcgccgaagcagcgctggacgccggaggaagaggccgctctcaaggccggcgtcgccaagcacgggcccggcaagtggcgcaccatcctccgagactcggacttcagcgcgctcctgcgcctccgctccaatgttgacctcaaggacaagtggcgcaacttgagcgtcactgcaggaggttatgggtctagagagaaggcaaggatggcgttgaagaaaggtagacgcgtggtgcctaagcttactgctgagccaatggatgtagatgtgaaggatatggatgacgctcatgacacagccattgatgtggaacctttagcaatggctttcgagtccttgccaactgaggaaagtccagataagtcagttgctaggctcgatgatctcatattagaagctataaggaagcttaaggagccttctgggtccagtaaggcagccattgctgcatacattgaggaccaatactggccacctgctgattttcagcgcctgctatctacaaaactgaaggcattggttaattccggaaaattaatcaaggtaaaccaaaagtacagaattgcaccaagtccacccccctcgggcagaataggcactaaggtatcctctgctgaaggcatgaaggcagaaaataataatgctaaacggctaactaagcatcaagtgattgctgagctggagaagatgaaaggcatgaccaaggaagaggcagctgcctttgctgccaaggcagttgctgaggcagaagtagcaatagcagaagctgaggaagcagcaagagttgcagaggctgcagaaaatgatgctgaagctgcaaaggcttttcttgatgctgtcactttatcaatgagaaacaggaatgctgcttccatgatgcttcgagcttgctgatcctttacccatgcggtcatatggttttggccagcagcacaccggtgtttctgctgcaaagattttctggatatatgagtttcttgtatagccttatttatagatcacgacgcatcaactggaggggtttttaacatcttgctgttggtcctttgtcgttgcagcctttagacaatcgacaatatgataacaagagttatcttgaaagtagtcttcatttatttttgttttctccccattgtgttgctttgtaattaaactctagccttttcgtttagttatttgaaattgtgtcgtctagtagaacaactgtagtgaaaagaaaatgtcagatagccaccttagttattcaatttgctgtgatagtatgtttctagatatgattagctaatgacagcgtttaagattacattcccccaatggggtggtttggaaataaactttagcccttttggttaggtaattgaaaaaaaaaaaaaaaaggcggccggttctaaaagga

SEQ ID NO: 2710 - DNA, 700 bp, Zea mays
  Clone ID: TF_LIB4762-057-R1-K1-H8
aaaaaaaggaaaaaaaaaaaaaaaaaaaaaaaaaaaaaaaaaaaaaaaaaaaaaaaaaaaaaaatttatccagtcgcatttccctttccgaaatcaaggtagcgtacaccgctgcagtttctagagccctctttgccactcgggatcccactagtcacaatgcctgccctcgccaagcccgcctcccgcaccgccaagcccgccggggttccgaagccgtagcctgccgccgccaagccgaaggcggccaccgctggtgcctcccacccgccttacttcgagatgatcaaggaggctatcacggcgctcaaggagaggaccggctccagctcgcaagcgatcgccaagtatgtgggggacaagcacggggcgtttttgccggccaacttcaagaagatgctttccatccagctccgtgggtccgcagccaagggcaagctcgtgaaggtcaaggcttcgtacaagctctcggacgccgccaagaaggcatcccccaagaccaaggctaagccggcaaaggccgccgttgccaagaccaccgcccccaagccggccaaggccgccgccgccaagtcaaaaaaggcagcggctgccaagccaaaaaaggccgctgctgctgggaccaagcgcaaagtgcccgagaagaaggtcgtggcgaagccgaagaagtcccccgccgccaaggccaaggccaagccga

SEQ ID NO: 2711 - DNA, 423 bp, Zea mays
  Clone ID: TF_ZmC1022_25
acacgtccgcccacgcgtccgcagctctcgccttctctctctcatcggcacacccgagcttgcgccctccttccacttcgaggtccgagtcctgctttgatggcgaccgacgtggctgagactcccgcgccgttggtggatgcggccccagaggcgcccgcggacgccccggcggcgcctgctgccgacgcgaagccggccaaggccaagaaggccaccgcaccgaagaagcgcgccagcccgacccaccctccgtacgccgagatggtctcggaggcgatcacgtcactcaaggagaggacggggtccagcagctatgcgattgccaagttcgtggaggacaagcacaaggacaagctcccgcccaacttccgcaagcttctgaacgttcagctcaagaagctcgtcgccggcagcaagctg

SEQ ID NO: 2712 - DNA, 462 bp, Zea mays
  Clone ID: TF_LIB3354-104-Q6-K2-F6
ggccccgcggctccgaagccgaagcctgcggccgccaagccgaaggccggcaccggtgctgcctgccacccgccttactttgcgaggatcaaagaggctatcacagcgctcaacgagaggaccgcatccagctcgaaggcgaccgccaagtatgtcagagacaagcacagagcgtctctgacggccaactcaaagaagatgctgtccatccagctgctgagctccacacacaagggcaagctgataaagggcaaggctccgtacaaactgtcggacgccgtcatgaaagcatcgcccaagaccaaggctaagacaacacaagccgacggtgccaagaccaccaggcccaagcgcgccaaggccgtcgccgtcaagtcaaacaacgcagcgattgccaacccaaagaaggacgttgctgctgggaccaagcacaaagtgcccgaaaagaaggacaagaccaag

SEQ ID NO: 2713 - DNA, 430 bp, Zea mays
  Clone ID: TF_LIB5116-036-A1-PF1-H4
gctcctcctcctcctccaatctcaagcgagcacaccgcgcaagtagcaccgcttcagtttcggtttcagagctccgcttcagtcagctgacatgcctgccctcgccaagcccgctgcccgccccgccaagcccgccgccgcggcgccgaagccgaagcccgccgccgccaagcccaaggcggccgccgctggagccgcccacccgacctactttgagatgatcaaggaggcgatcgcggcgctcaaggacaggaccgggtcgagctcggtcgccatcgccaagtacatcgaggagaagcacggcaaggctctcccgcccaacttcaagaagatgctctccgtccagctccgcgcttccgccgccaagggcaagctcgtcaaggtcaaggcctcctacaagctctccgacgccgccaagaaggactccccc

SEQ ID NO: 2714 - DNA, 654 bp, Zea mays
  Clone ID: TF_ZmC159_1
ttcctcagagccgtctcgtcgcggcccctcccccctctcccgtgcgctgcgcccccaattcccgctccccacgcacccagacacgccgagcgggagaggaagcgacagccagcagccgaggcggccagcgccagcaggcatgaccactcccactcccagtggcgacggctcgcccccgggctcctccgacctcgtgcccccttcctaccccgagatgatcgtcgccgcgatcaccgccctcgccgaggagaacggctccagccaggccgccatcgcgcgccgcatcgaggcgcaggcccgcggcgacctgccggcctcgcacccggcgctcgtcgccgcccacctctcgcgcatgtccgccgcaggggagctcgtcgccgtcgcgggggggaagtacgcgctgcccccgccgccggcgcagccggcgccggagtcaccggctgacgacggcgaagacgacgacgacgacgacgagtgcgccgacgaggtggacgaggaagaggaggcgccggagcctctgctcgtgcctgtgcctgtgccgcagccgcccgccaagcgcgggcgtgggaggcccccgaagccgcgtcccgctggcttccccatcggcgtccccggagccgctgcgtcccccgccgccgcgccgcgacggcgcgg

SEQ ID NO: 2715 - DNA, 660 bp, Zea mays
  Clone ID: TF_ZmC1022_9
ccggccagacccagcaccgcagagctctcatctcctctctctctctctctctctctctctctcgcgctcgctttgcttcctcgtcgaggtccagttcctgcattgatggcgaccgaggtggctgagactcccgcgccgttggcggaggcggtccccgagacccccgcggaggcaccggcggcgcccgccgccgaggcgaattctaccaaggccaagaaggcctctgcgcccaagaagcgtgccaacccgacccacccgccgtacgccgagatgatctcggaggctgtcacgtcgctcaaggagcggacggggtccagccagtacgcgatcgccaagttcgtcgaggacaagcacaaggacaagctcccgcccaacttccgcaagctcctgctcggccagctcaagaagctcgtcgccgccggcaagctcaccaaggtgaagaactcctacaagctgcccgcacgcgccccggccgccgccaagccgaagcccaagtccaagaccgctgtgaagaagcccaaggccggggcgaagaagcccaaggccgccaccaagcccaagcccaaggccaaggccaagtcccccgctaaggcgaagcccgctgcaaagcccaaggcagccgcgaagccgaaacccgcagcagccaagcccaaggcggcc

SEQ ID NO: 2716 - DNA, 444 bp, Zea mays
  Clone ID: TF_LIB4740-023-R1-K1-D9
tggagtactacccaccgcctccgccgccgacacagcgtagtgtagtgtagttccggagagggttggggagagtagtagtgatccgcaatgtcgacggaggaggctgttgtggctgaggtcccggtgaccgaggtgccagcggaggtcccggcggcccaggtggccgaggcgcccaaggcgaagaaggcgcccaaggagaagaaggcgcctaaggagaagaagccgtccgcggcgaagaaaccggcggcgcacccttcctacccttagatgattgtagaggcgatcgctgcccttaaagagaggaaggggtcgagctccgtggccattaacaagtacctcgaggggaagcacggcgggaagcttcccacccactttctgaaggcagttaacctgcaaattaagaaacctcgttgccgccgccaacttacacagggtcaaaaattc

SEQ ID NO: 2717 - DNA, 624 bp, Zea mays
  Clone ID: TF_LIB4826-020-A1-N1-C2
ccggccgggatccagtcgcatctccctctccgaaatcaaggtagcgtacaccgctgcagtttctagagccctctctgccactcgtgatcccactagtcacaatgcctgccctcgccaagcccgcctcccgcaccgccaagcccgccgcggctccgaagccgaagcctgccgccgccaagccgaaggcggccaccgctggtgcctcccacccgccttacttcgagatgatcaaggaggctatcacggcgctcaaggagaggaccggctccagctcgcaagcgatcgccaagtatgtgggggacaagcacggcgcgtctctgccggccaacttcaagaagatgctttccatccaacttcaagaagtcccaagccgaagaccgtgaagtcccctgcctccaagaaggcacggaaggcctccgcatgagatgggttgctttaggtctaagctctgattgtggttggtgtcagttaggtactgtacaaactaagtgtgtgcccaaagtgtctcaggcggtgtgttatgtgcttagcaagttctatctatcagagtgttttagtttaacaatggttttacctctggcttttgtagtcaggtttctgaaaaaaaaaaaaaaaaaagcggcc

SEQ ID NO: 2718 - DNA, 603 bp, Zea mays
  Clone ID: TF_ZmC8559_2
ctttttctttcttgttccggtgctgttcttggcgcggattcgtccttgggctggagaggtagctgggttcgggggatgctgccgcgctccatgcgtgctgcatggcggtttctttcgtttccgtttgactaaaaatatatataaaaaagagaattttctctgtggtgggaaacaattcattccgcacggcatccgggaaggtctgcgtcgtcgccatggccaccgaggaagtcgccaagccgtccccgatcccgccctaccccgagtgagctaaccgacggcgcgtcgtgttggttgggcgttccggcagatgatcctggcggcgatcgaggacttaggcgacaagagcgggtcgaacaagtcggccatctccaggtacatcgagggcaagtacgacggcgacctgccgcccgcgcacgcgtcgctgctggccgcgcacctggcgcgcatgaaggagtcgggcgagctggtcttcgtcaagaacaactacttccgcgtcgacgcgcccgacgcgccgccgaagcgcgggcgcgggcggcccccgaaggcgcgggaccccggcgcgccggtgtcgccgccatcggggcgcgggcgcgggcctgt

SEQ ID NO: 2719 - DNA, 363 bp, Zea mays
  unsure (1)..(363): unsure at all n locations
  Clone ID: TF_LIB3117-014-Q1-K1-C6
atctccctctccnaaatcaaggtagcgtacaccgcttcagtttctagagccctctctgcggctcggtatcccactagtcacagggcgtgccctcgccaagcccgcctcccgcaccgccaagcccgccgcggctccgaagccgaagcctgccgccgccaagccgaaggcggccaccgctggtgcctcccacccgccttacttcgagatgatcaaggaggctatcacggcgctcaaggagaggaccggctccagctcgcaagcgatcgccaagtatgtgggggacaagcacggcgcgtctctgccggccaacttcaagaagatgctttccatccagctccgtgggtccgcaaccaaaggcaagct

SEQ ID NO: 2720 - DNA, 504 bp, Zea mays
  Clone ID: TF_LIB3354-004-P1-K1-B9
ggtagcgtacaccgatgcagtttctagagccgtggctgccaatcgtgatcccactagacacaatgcctgccctcgccaagcccgcctcccgcaccgccaagcccgacgaggctccgaagccgaagcctgccgccgccaagccgaaggcgggcaccgctggtgcctcccacccgccttacttcgagatgatcaaggaggctatcacggcgctcaaggagaggaccggctccagctcgcaagcgatcgccaaggatgtgggggacaagcacggcgcgtgtctgccggccaacttcaagaagatgctttccatccagctccgtgggtccgcagccaagggcaagctcgtgaagggcaaggcttcgtacaagctctcggacgccgacaagaaggcatactccaagaccaaggctaagccggcaaagggcgccggtgacaagaccaccgaccccaagccggacaaggccggcggcggcaagttaaaaaaggcagcgggtgccaagccaa

SEQ ID NO: 2721 - DNA, 571 bp, Zea mays
  Clone ID: TF_LIB3587-232-Q1-K6-F2
cacccaccggctccgccgccgtcaacagcgtagtgtagtgtagttccggcgagggttggggagagtagtagtgatccgcaagtcgaccgaggaggctgttgtggctgaggtcccggtgaccgaggtgccagcggaggtcccggcggcccaggtggcccaggcgcccaagcgaagaagcgcccaaggagaagaaggcgcctaacgagaagaagctttcaccggcgaagaagccggttgcgcaccctccctacgctgagatgattgtagaggccatcgctgcccttaaggagaggaaggggtcgagctcggtggccatcagcaagtacgtctaggggaagcatggcggcaagctccctaccaactttcgcaagcagatcactgtgcaacttaagaagctctctgccgcccgcaagctgacgaaggtgaagaactccttcaagatgacggtcaccgacgccaagcccaaggtcggcaagcccaaagcacccaagaacgcgcccaagcccaagccctctcctatagcgaaggccaagaccgctgcgaatcccaagtcggcgtggcccaaacccaa

SEQ ID NO: 2722 - DNA, 1378 bp, Zea mays
  Clone ID: TF_ZmC1022_1
cccacgccgcccagctcacctcattgctccctcgacccggcgggcatacccaccccacagctctcgccttctctctcccatcggcacacccgagctcgctccctccttccacgtcgaggtccgagtcctgctttgatggcgaccgacgtggctgagactcccgcgccgttggtggatgcggccccagaggcgcccgccgacgccccggcggcgcctgctgccgacgcgaagccggccaaggccaagaaggccaccgcgccgaagaagcgcgccagcccgacccacccgccgtacgccgagatggtctcggaggcgatcacgtcgctcaaggagaggacggggtccagcagctatgcgattgccaagttcgtggaggacaagcacaaggacaagctcccgcccaacttccgcaagcttctgaacgttcagctcaagaagctcgtcgccggcggcaagctgaccaaggtgaagaactcgtacaagctgtcgtccgccgccaccaagccgaatcccaagcccaaggccgccccgaagaagcccaagaccggcgctaagaagcccaaggccgctgccaagaccaaagctaagacccccgccaaggcgaagcccgccacaaagcccaagcccgccgcgaagccgaaagccgtagtgaagccgaagacacccgccaagcccaaggccaagccagctgccaaggcgaagcccaagaccgccggcgctaagccgaagccacttgctaagaaagccggccgccccgccaaggcggcgaagacgtcggccaaggacacgccagggaagaaggcgccggtggccaagaagtccgctgctgccgcgaagaaggcccctgccaagaaggccgctccctcgaagaaggcggcgaccccggtgcggaaagcgccgtcccgtaaggccaagaagtaaagcggccaagaaggggggcgcgatgctgtaaatttgatatcggagaggctcgggtacactggtcattcagtatccgagaccgatagctgaggctagtggcgatggaggactgtgttattactactataaactggtggttgtgtttctgtaactggtgaatgatcaagttggaagcttttagtctatcttagatatatcagtggatagtgttttttgtattttcgttttcttttccaatgtgtgttgggtcttgtggattatcctttttttctaatctaatacaatgaagaggcatgtcttttgaagcttccataaaaaaaaaaaaaaaaataggctgagaaaaaaatggtattatctgaattccctatctgaaatagagaattgttcggtgtgctagctgaaatgaatggtcggtggcgaacaatgacgatggagattttttaaaaaaaaaaaaaaa

SEQ ID NO: 2723 - DNA, 1227 bp, Zea mays
  Clone ID: TF_ZmC1022_4
ccccgcgtccgccccgcgtccgcccacgcgtccgcccacgcgtccgcggctcctctctcccatcggcacacccaagctcgcgccctccttccacgtcgaggtccgagtcctgctttgatggcgaccgacgtggctgagactcccgcgccgttggtggatgcggccccagaggcgcccgccgacgccccggcggcgcctgctgccgacgcgaagccggccaaggccaagaaggccaccgcgccgaagaagcgcgccagcccgacccacccgccgtacgccgagatggtctcggaggcgatcacgtcgctcaaggagaggacggggtccagcagctatgcgattgccaagttcgtggaggacaagcacaaggacaagctcccgcccaacttccgcaagcttctgaacgttcagctcaagaagctcgtcgccggcggcaagctgaccaaggtgaagaactcgtacaagctgtcgtccgccgccaccaagccgaatcccaagcccaaggccgccccgaagaagcccaagactggcgctaagaagcccaaggccgctgccaagcccaaagctaagacccccgccaaggcgaagcccgccacaaagcccaagcccgccgcgaagccgaaagccgtagtgaaaccaagccgaaggccaagccagctgccaaggccaagccgaaggctgccgcggccaagccgaagccagctgccaagaaggccggccgccccgccaaggccgccaagacgtcagccaaggacacgcccgggaagaaagcggcgcccgccaagaagcccgctgctgcggccaagaaggcccctgccaagaaggccgccccagccaagaaggctcccaccccgtcgcggaaggtgccgtcgcgtaaggcgaagaagtagagcggtggtcttggcaggaatctagggtttcatgctccttcgattttagatgtttactcgtttttgctctagttgtgggtggtgtgcggggtgggttactaggttgtaaatttgatgccggaggctggggtacacatgggcattctgtaccagcggtggaagggcggaggcgccggcgacgatgacgaaccagtgtgtgttattattagaagacgaagttgtatttctgtagctgaattgtggagttgcggatatcattgtgcttctaaggttaatgtgacgataaagttaaatgtcgagagttaccaacaaaaaaaaacgtacactgggattattc

SEQ ID NO: 2724 - DNA, 831 bp, Zea mays
  unsure (1)..(831): unsure at all n locations
  Clone ID: TF_ZmC673846_1
gggtacctcgaggccggccgggatcagtcatcacccaccgcctccgccgccgacaacagcgtagtgtagtgtagttccggagagggttggggagagtagtagtgatccgcaatgtcgacggaggaggctgttgtggctgaggtcccggtgaccgaggtgccagcggaggtcccggcggcccaggtggccgaggcgcccaaggcgaagaaggcgcccaaggagaagaaggcgcctaaggagaagaagctttccgcggcgaagaagccggcggcgcaccctccctacgctgaggtgaggtttagtccgttgcgatctagccgattcgttgcttcgttaggatcgtctcctcttatggaatctgttggattgattctgtcgctctgttctgttcatgtccgcgaattcgatattgaatctgagacgcaacctgttgggtctgtctggctgcagatgattgtagaggcgatcgctgccctcaaggagaggaaggggtcgagctcggtggccatcagcaagtacgtcgaggggaagcatggcggcaagctccccaccaacttccgcaagcagctcactgtgcagctgaagaagctcgctgccgccggcaagctgacgagggtgaagaactccttcaagctgccggccaccgacgccaagcccaaggccgccaagcccaaggcacccaaggccgcgcccaagcccaagccctcgccgaaggcgaaggccaagaccgctgcgaagcccaaggcggcgtcgcccaagcccaaggccaaggccaaggccaagcctgtcgctccggctgtcgctcctgccngcgcgtcgccccaagccccg

SEQ ID NO: 2725 - DNA, 1227 bp, Zea mays
  unsure (1)..(1227): unsure at all n locations
  Clone ID: TF_ZmC1022_5
ccccgcgtccgccccgcgtccgcagctcccggctcctctctctcatcggcacacccaagctcgcgcccaccttccacgtcgaggtccgagtcctgctttgatggcgaccgacgtggctgagactcccgcgccgttggtggatgcggccccagaggcgcccgccgacgccccggcggcgcctgctgccgacgcgaagccggccaaggccaagaaggccaccgcgccgaagaagcgcgccagcccgacccacccgccgtacgccgaggtaattggtgccctccctttgatccttctgccgtgccgtgctgtgcgtgcctctccgccgcgtctggatcttactgaatagtggatggtcggtgcgcagatggtctcggaggcgatcacgtcgctcaaggagaggacggggtccagcagctatgcgattgccaagttcgtggaggacaagcacaaggacaagctcccgcccaacttccgcaagcttctgaacgttcagctcaagaagctcgtcgccggcggcaagctgaccaaggtgaagaactcgtacaagctgtcgtccgccgccaccaagccgaatcccaagcccaaggccgccccgaagaagcccaagactggcgctaagaagcccaaggccgctgccaagcccaaagctaagacccccgccaaggcgaagcccgccacaaagcccaagcccgccgcgaagccgaaagccgtagtgaaaccgaagacacccgccaagcccaaggccaagccagctgccaaggcgaagcccaagaccgccggcgctaagccaaagccacttgctaagaaagccggccgccccgccaaggcggcgaagacgtcggccaaggacacgccagggaagaaggcgccggtggccaagaagtccgctgccgccgcgaagaaggcccctgccaagaaggccgctccctcgaagaaggcggcggccctggtgcggaaagcgccgtcccgtaaggccaagaagtagagcggccaagatggggggcgcgatgttgtaaatttgatatcggagaggctcggggtacactggtcattcagtatccgagaccgatagctgaggctagcggcgatggaggactgtgttattactactataaactggaggttgtgtttctgtaactggtgaatgatcaagttggaagcttttagtctatcttaaatagatcagtggatagtgttttttgtaaaaaaaaaaaaaaaaaaaanacc

SEQ ID NO: 2726 - DNA, 1337 bp, Zea mays
  Clone ID: TF_ZmC13520_2
acctcgaggcctggagggccgggccgggccgggatatacgttaaataaaataaattagaaagctatctatccaggtggattagggtttttgcctcggctagcagtagtagctaatttggacgcaggagatacggagtagggcgaaccgcgaggagagcaagctatgggcgcgccgaagcagaagtggacgtcggaagaggaggatgcgctccgccgtggcgttcgcaagcacggcgccggcaaatggcggaccatccagaaggacccccagttcagcccgatcctctcctcccgctccaatatcgacctcaaggacaaatggaggaatttaagtttcagtgcaagtggactgggatcgagtaaagtacgggttccaaagataactggatcctcatcttcaccatcatctagctcacaggctctgcttctcccagcggcaaataatgttacagaagctatgctgcctgcagatgctgacaaaaagccacgggatgggaaaactccgccaaagtatggtgccatgattatggaagctctttcggaattgaatcagccgaatggttcagatattgatgcaatcttcgacttcataaagcaaaggcatgtggtgcaatcgacctttagaagatttctaccctcaaagttacggcgacttgcagactcaaacaaaattgaaaaggtcgataacttctataggctcccagattcatttgcaacaaggactccagctcaaataaaagtttcagatccaaaacagaaggatccatctaaggcgtcaaagaccatagcttgtttgctgcctccagccctgcactagaggcagcgatggcagctgctgtcaaggtgactgacgccgaggcaaaagcacatgatgcacatgatcagatgatggaggcagaaaggatgctgaagatggctgaggataccgagtctatcctcacaattgcagcagagatctatgatcgatgttcaaggggggagataaccacattagttccagtggcgcaaagggagttttgaaatctattggagactcttgtcttgtacatgggataggttttggaatccggaggcccttacttgggatatgccctagggttaataacaacagcgcaccgcctgtcttcagactttgtaatgatatgtaatcccatctttcccattcccagcctgtcactgcaagctgcggtcgtgaatcctgatggcagtaaagttttttttttgttgacatgacgaaagaatagagcaggaaaaagtggtttaaacagatgaggtagggtagtaggatggtaaagtgttactggtataagataatataatgtgccgcagttttttcc

SEQ ID NO: 2727 - DNA, 372 bp, Zea mays
  Clone ID: TF_LIB3357-042-P1-K1-C6
ccgccgacaacagcgtagtgtagtgtagttccggagagggttggggagagtagtagtgatccggaatgtcgacggatgaggctgttgtggctgatgtccctgtgaccgaggtgccagcggatgtcccggcggaccatgtggccgacgcgcccaaggcgaagaaagcgcccaaggagaagatagcgcctaaggagaagaagctttccgcggcgaagaagccggcggcgcaccctccctacgctgagatgattgtagaggcgatcgctgccctcaaggagaggaaggggtcgagctcggtgtccatcatcaagtacgtccaggggaatcatggcggtaagcttcccaacaactttcaaaagcagctcactgtgc

SEQ ID NO: 2728 - DNA, 1156 bp, Zea mays
  Clone ID: TF_ZmC366_1
atgacgctgagttccggcgcgacccgggtaggagcaaccgcttgcgtcagacgcacactgacggagagtgatcactgatttctggtcatgcgagtaggagcaaccgcttgcgtcagacgcacactgacggagagtgatcactgatttctggtcatggcaaccgtaactgaggaagttgctccggtcgtcaccgtctccgaggagccggcgccggaagcggcgaaggaggtggtggagaagccggaggaggggaagaagcccgacgaggagggtgacgagaggaagaaggccgaccccgccgccgagaaggagaagaaggccgaccccgccgccgagaaggagaagaaggcgaggaagccgcggagcaggaagcccaagtccgccgggctgcaccacccgccctatttcgagatgatcaaggaggcgatcctgtcgcaggacggcgggaaggtcggggcgagcccgtacgcgatcgccaagcacatgggggagaagcaccgggacgtgctcccgcccaattaccgcaaggtgctggccgtgcagctgcgcggcttcgccgccaagggccgcctcgtcaaggtcaaggcctccttcaagctcgccgccgccgaggagaggaagccctccaagaagaaggcgtcggcgggaatggccaagcgcaagagggccgccgcgccggccaagatgaagccggcggccgctgcctcggcgccgtcggcctcggcgccgtcgagggaggcacgtaaggtgcgcgcgaagcgagcgaggaaggtggccccggcgcccgcgcagcccaagcccaagccagcccgcgccgccgcttccggtgccggcaagaaggtcaacaaggccagcgcctgattagcggcggccgtcctggtccccccgcgcgcgcctccgtgtattatactagccggtagtagcagtaggagttgcaagtactagcagcgtggtagtcgtgatgatgttgtggtcgtcgtctccgccggcccgatcgatcgggcgctctgttccgccgtgtggcagagttttgtaaataactagtctggtgtgatgcgctcatggcaataaagcgcgcgcttctagcttccttgatgaaaaaaaaaaaaaaaaaaaactaaaaaaaaaagggcggccctcgcgatctagaactagt

SEQ ID NO: 2729 - DNA, 779 bp, Zea mays
  Clone ID: TF_ZmC366_2
ggcccgcttctcccagctggggggttccccccgggcagcagagcgagggccgggtaggagcaaccgcttgcgtcagacgcacactgacggagagtgatcactgatttctggtcatggcaaccgtaactgaggaagttgctccggtcgtcaccgtctccgaggagccggcgccggaagcggcgaaggaggtggtggagaagccggaggaggggaagaagcccgacgaggagggtgacgagaggaagaaggccgaccccgccgccgagaaggagaagaaggcgaggaagccgcggagcaggaagcccaagtccgccgggctgcaccacccgccctatttcgagatgatcaaggaggcgatcctgtcgcaggacggcgggaaggtcggggcgagcccgtacgcgatcgccaagcacatgggggagaagcaccgggacgtgctcccgcccaattaccgcaaggtgctggcagtgcagctgcgcggcttcgccgccaagggccgcctcgtcaaggtcaaggcttccttcaagctcgccgccgccgaggagaggaagccctccgcggccgcgaaggcgaagaagaaggcgtcggcgggaatggccaagcgcaagagggccgccgcgccggccaagaagaagccggcggccgctgcctcggcgccgtcgagggaggcacgtaaggtgcgcgcgaagcgagcgaggaatgtggccccggcgcccgcgcagcccaagcccaagccagcccgcgccgccgctttcggtgccggcaagaaagtcaacaag

SEQ ID NO: 2730 - DNA, 624 bp, Zea mays
  Clone ID: TF_LIB5075-005-R1-XP1-C6
gccggccgggtcgggatccagtcgcatctccctctccgaaatcaaggtagcgtacaccgctgcagtttctagagccctctctgccactcgtgatcccactagtcacaatgcctgccctcgccaagcccgcctcccgcaccgccaagcccgccgcggctccgaagccgaagcctgccgccgccaagccgaaggcggacaccgctggtgcctcccacccgccttacttcgagatgatcaaggaggctatcacggcgctcaaggagaggaccggctgccaagccaaagaaggccgctgctgctgggaccaagcgcaaagtgcccgagaagaaggacgtggcgaagccgaagaagtcccccgccgccaaggccaaggccaagccgaagaccgcgaagtcccctgcctccaagaaggcacggaaggcctccgcatgagatgggttgctttaggtctaagctctgattgtggatggtgtcagttaagtactgtacaaactaagtgtgtgcccaaagtgtctcaggcggcgcgctatgtgcttagcaagctctatctatcagagtgttttagtttagtttgcccagaagttccttgagtttgatccactgcatgatgaaaaaaggccccta

SEQ ID NO: 2731 - DNA, 770 bp, Zea mays
  unsure (1)..(770): unsure at all n locations
  Clone ID: TF_ZmC159_3
cagnaccgcgtcgtcgcggcccctcccccctctcccgtgcgctgcgcccccaattcccgctccccacgcacccagacacgccgagcgggagaggaagcgacagccagcagccgaggcggccagcgccagcgcaggcatgaccactcccactcccagtggcgacggctcgcccccgggctcctccgacctcgtgcccccttcctaccccgaggcaagcctccctccctccgttccaaccctacctctttcgactcctctccgctactcctttccgccagatctgcgccgatctgcggaatcgactgacccgtgcgcctgccctggctgctgcagatgatcgtcgccgcgatcgcagccctcgccgaggagaacggctccagccaggccgccatcgcgcgccgcatcgaggcgcaggcccgcggcgacctgccggcctcgcacccggcgctcgtcgccgcccacctctcgcgcatgtccgccgcaggggagctcgtcgccgtcgcgggggggaagtacgcgctgcccccgccgccggcgcagccggcgccggagtcaccggctgacgacggcgaagacgacgacgacgacgacgactgcgccgacgaggtggacgaggaagaggaggcgccggagcctctgctcgtgcccgtgcctgtgccgcagccgcccgccaagcgcgggcgtgggaggcccccgaagccgcggcccgctggcttcncccatcggcgtccccggagccgctgcgtcccccgccgccgcgccgcgacggc

SEQ ID NO: 2732 - DNA, 422 bp, Zea mays
  unsure (1)..(422): unsure at all n locations
  Clone ID: TF_jC-zmXLIB3527P017Dg06a1
caccgctgcagtttctagagccctctctggcactngtgatcccactagtcacattgcctgccctcgccaagcccgcctcccgcaccgncaagcccgccgcggctccgaagccgaagcctgccgccgccaagccgaaggcggncaccgntggtgnctncnancngncttacttnnaaatgatcaaggaggctatcacggcgctcaaggagaggaccggctccagctcgcaagcgatcgccaagtatgtgggggacaagcacggcgcgtctctgccggccaacttcaagaagatgctttccatccagctccgtgggtccgcagccaagggcaagctcgtgaaggtcaaggcttcgtacaagctctcggacgccgccnagaaggcatnccccaagaccaaggctaagccggcaaagggccgcgct

SEQ ID NO: 2733 - DNA, 633 bp, Zea mays
  Clone ID: TF_LIB4766-069-R1-K1-F8
cattgggtccctcgaggccggccgggatcagtttttcccaccgcctccgccgccgacaacagtcgtagtgtagtgtagttccggagagggttggggagagtagtagtgatccgcaatgtcaacggaggaggctgttgtggttgacgttccggtgaccgaggtgccagcggaggtcccggcggcccttgtggccgaggcgcccatggcgaagaaggcgtccaaggagaaaaatgcgcctaaggagaagaagctttccgcggcgaagaagccggcggcgcaccctccctacgctgagatgattgtagaggcgatctctgccctctaggagaggaaggggtcgagctcggtggccatcagcaagtacgtcaaggggaagcatgtcggcaagctcccctccaacttccgcaagcatctcactgtgcatctgaagaagctcgctgccgccggcaagctgacgagggtgaagaactccttcatgctgccggccaccgacgccaagtccaagggcgtcaagtccaagggaccctacgacgcgcccaatatccaagtcctcgtcctacgtgaaggccaatatcgctgcagaatccttggaggagtcgctctaaccctaggccaagggcaaggtcaagactg

SEQ ID NO: 2734 - DNA, 801 bp, Zea mays
  Clone ID: TF_ZmC4197_3
cacctccctctccgaaataaggtagcatacaccgctgcagtttctagagccctctctgccactcgtgatcccactagtcacgatgcctgccctcgccaagcccgcctcccgcaccgccaagcccgccgcggctccgaagccgaagcctgccgccgccaagccgaaggcggccaccgctggtgcctcccacccgccttacttcgagatgatcaaggaggctatcacggcgctaaaggagaggaccggctccagctcgcaagcgatcgccaagtatgtgggggacaagcacggcgcgtctctgccggccaacttcaagaagatgcttacaacgcagcgcggggggtccgcagccaagggcaagctcgtgaaggtcaaggcttcgtacaagctctcggacgccgccaagaaggcatcccccaagaccaaggctaagccggcaaaggccgccgctgccaagaccaccgcccccaagcgcaaagtgcccgagaagaaggtcgtggcgaagccgaagaagtcccccgccgccaaggccaaggccaagccgaagaccgtgaagtcccctgcctccaagaaggcacggaaggcctccgcatgagatgggttgctttaggtctaagctctgattgtggttggtgtcagttaggtactgtacaaactaagtgtgtgcccaaagtgtctcaggcggtgtgttatgtgcttagcaagttctatctatcagagtgttttagtttaacaatggttttcccataaaaaaaaaaaaaaaaaaaaaaaaaaaaaagtactctgcgttgttaccactgc

SEQ ID NO: 2735 - DNA, 553 bp, Zea mays
  Clone ID: TF_LIB3912-032-Q6-K6-H10
cccacgcgtccgccctgtccgaaaccaagtagcgtacaccgctgcagtttctagagccctctctgccactcgtgatcccactagtcacaatgcctgccctcgccaagcccgcctcccgcaccgccaagcccgccgcggctccgaagccgaagcctgccgacgccaagccgaaggcggccaccgatggtgcctaccacccgacttacttcgagatgatcaaggaggctatcacggcgctcaaggagaggaccggctccagctcgcaagcgatcgccaagtatgtgggggacaagcacggcgcgtctctgccggacaacttcaagaagatgctttccatccagctacgcgggtccgcagccaagggcaagctcgtgaaggtcaaggcttcgtacaagctctcggacgccgccaagaaggcatccgccaagaccaaggctaagccggcaaaggccgccgctgccaagaccaccgcccacaagccggccaaggacgccgacgacaagtcaaataacgcagcggctgccaagccaaataatgccgctgctgctgggac

SEQ ID NO: 2736 - DNA, 577 bp, Zea mays
  unsure (1)..(577): unsure at all n locations
  Clone ID: TF_LIB3959-022-Q1-K6-A5
gggtcgacccagcgttcgccccgcgtccggcacctccgggggggggggggggggggggacaccgctgcagtttctagagccctctctgccactcgtgatcccactagtcacgatgcctgccctcgccaagcccgcctcccgcaccgccaagcccgccgcgggtcctaaccnaacctgccccccgggggggggggggaccgctnntgcctcccacccgccttactttgagatgatcaagggggctatcacggggctaaaggagaggaccggctccagctcgcaagcgatcgccaagtatgtgggggacaagcacggcgcgtctctgccggccaacttcaagaagatgctttccatccagctccgtgggtccgcagccaagggcaagctcgtgaaggtcaaggcctcgtacaagctatcggacgccgccaagaaggcatcgcccaagaccaaggccaagccggcaaaggccggcgcagccaagaccaccggctccaagccggccaagcccgccgccgccaagtcaaagaaagcagcgggtgccaagcctaaaaaaaccggtgctgctgggaccaagcgc

SEQ ID NO: 2737 - DNA, 770 bp, Zea mays
  Clone ID: TF_ZmC163344_1
ttgggaccctcgaggccggccgggagatccaggttctctctccctttcactccggtggcggcgagagcaagtagcacaaacttatgtgaaagcgactccaaactacgatggatccccagatctagtgacattgagggcaagtagcaagagtttggcagcagtcgtggactacgacggatccaaacaagtcaacctctcagatctgatctggtgactacaaggtcaagcagcacaaactttggtggtagcagcttcagactacgaaaggtcgccaagagtaataagcaggattcaaagatgatggttacacgagagcatccaatgaggagcagggaatgccagctttgccatgaaaacccgctctcttcgccaagcatgaccaaaatgattgtagaggcgatcgctgccctcaaggagaggaaggggtcgagctcggtggccatcagcaagtacgtcgaggggaagcatggcggcaagctccccaccaacttccgcaagcagctcactgtgcagctgaagaagctcgctgccgccggcaagctgacgagggtgaagaactccttcaagctgccggccaccgacgccaagcccaaggccgccaagcccaaggcacccaaggccgcgcccaagcccaagccctcgccgaaggcgaaggccaagaccgctgcgaagcccaaggcggcgtcgcccaaacccaaggccaaggccaaggccaagagcctgtcgctcctgccgccgcgtcgcccaagccccgcgggcgccctcccaag

SEQ ID NO: 2738 - DNA, 694 bp, Zea mays
  unsure (1)..(694): unsure at all n locations
  Clone ID: TF_ZmC163344_2
ggtaccctcgaggccgggcggagatcaggttctctctccctttcaactccggtggcggcgagagcaagtagcacaaacttatgtgaaagcgactccaaactacgatggatccccaggagtaataagcaggattcaaagatgatggttacacgagagcatccaatgaggagcagggaatgccagctttgccatgaaaacccgctctcttcgccaagcatgaccaaaatgattgtagaggcgatcgctgccctcaaggagaggaaggggtcgagctcggtggccatcagcaagtacgtcgaggggaagcatggcggcaagctccccaccaacttccgcaagcagctcactgtgcagctgaagaagctcgctgccgccggcaagctgacgagggtgaagaactccttcaagctgccggccaccgacgccaagcccaaggccgccaagcccaaggcacccaaggccgcgcccaagcccaagccctcgccgaaggcgaaggccaagaccgctgcgaagcccaaggcggcgtcgcccaaacccaaggccaaggccaaggccaagcctgtcgctcctgccgccgcgtccaaaannnccccccgngggcgcccttccaaggtcgccaagacctccgccaaggcctcccccgccaagccagccaagaaggcggctgctccctgccaagaagggaaaggcagcg

SEQ ID NO: 2739 - DNA, 518 bp, Zea mays
  unsure (1)..(518): unsure at all n locations
  Clone ID: TF_LIB4730-062-R1-K1-F6
agtcatgacccaccgcactccggcgccgctacagcgtagcggtgtgtatctccttacatggttgcagagagtactatatactccgcaatgcgcgacggcacgacgcttgntgttggctgatgtcgcctggtgatccgagggtgccagcgatatgtctcaggcgtcgccacgtggcgcgaggcgacccaacgtcgatagcaacgccgcctcaagacgaataaggcgcctaaggagaagaagccgtccgcggctgaagaagccggcggcgcaccctccctacgctgtgatgattggagaggcgatcgctgccctcaaggagaggaaggggtcgagctcggaggccatcaacaagtacgtctgagcggaatcactgcggcaagctccccaccaacttccgcaagcagctcaacgtgcaagtgaagaaggttgcttacgtcagcaagctaacgagggtgaagaactgcttgaagctgccgtgcaccgacgccaagcccaaggccggcaagcccaaggcaccc

SEQ ID NO: 2740 - DNA, 428 bp, Zea mays
  Clone ID: TF_cC-zmle189061e03d1
ccgaaatcaaagtagcagacaccgctgcagtttctagagccctctctgccactcgagatcccactagtcacaaagcctgccctcgccaagcccgcctcccgcaccgccaagcccgccgaggctccgaagccgaagcctgccgccgccaagccgaaggcggccaccgctggtgcctcccacccgccttacttcgagatgatcaaagaggctatcacggcgctcaaggagaggaccggctccagctcgcaagcgatcgccaagtatgagggggacaagcacggcgcgtctctgccggccaacttcaagaagaagctttccatccagctccgagggtccgcagccaaaggcaagctcgagaaggtcaaagcttcgtacaagctctcggacgccgccaagaaggcatcccccaagaccaatgctaagccggc

SEQ ID NO: 2741 - DNA, 441 bp, Zea mays
  Clone ID: TF_jC-zmX189017Q1E1C8b1
gctgcccacgcgtccgcagctctcgccttctctctctcattggcacacccgagcttgcgccctccttccacttcgaggtccgagtcctgctttgatggcgaccgacgtggctgagactcccgcgccgttggtggatgcggccccagaggcgcccgcggacgccccggcggcgcctgctgccgacgcgaagccggccaaggccaagaaggccaccgcaccgaagaagcgcgccagcccgacccaccctccgtacgccgagatggtctcggaggcgatcacgtcactcaaggagaggacggggtccagcagctatgcgattgccaagttcgtggaggacaagcacaaggacaagctcccgcccaacttccgcaagcttctgaacgttcagttcaagaagctcgtcgccggcggcaagctgaccaaggtgaagaacttgtacaa

SEQ ID NO: 2742 - DNA, 1115 bp, Zea mays
  Clone ID: TF_ZmC4197_1
tgggtccctcgggctcggccggaacagccttctattatctattgtcttttagttatacgtgtgcttgggagtccttgcaatttgaataaagctgcgaccattgggtccctcgaggccggccgggatccagtcgcacctccctctccgaaatcaaggtagcatacaccgctgcagtttctagagccctctctgccactcgtgatcccactagtcacgatgcctgccctcgccaagcccgcctcccgcaccgccaagcccgccgcggctccgaagccgaagcctgccgccgccaagccgaaggcggccaccgctggtgcctcccacccgccttacttcgagatgatcaaggaggctatcacggcgctaaaggagaggaccggctccagctcgcaagcgatcgccaagtatgtgggggacaagcacggcgcgtctctgccggccaacttcaagaagatgctttccatccagctccgtgggtccgcagccaagggcaagctcgtgaaggtcaaggcttcgtacaagctctcggacgccgccaagaaggcatcccccaagaccaaggctaagccggcaaaggccgccgctgccaagaccaccgcccccaagccggccaaggccgccgccgccaagtcaaagaaggcagcggctgccaagccaaagaaggccgctgctgctgggaccaagcgcaaagtgcccgagaagaaggtcgtggcgaagccgaagaagtcccccgccgccaaggccaaggccaagccgaagaccgtgaagtcccctgcctccaagaaggcacggaaggcctccgcatgagatgggttgctttaggtctaagctctgattgtggttggtgtcagttaggtactgtacaaactaagtgtgtgcccaaagtgtctcaggcggtgtgttatgtgcttagcaagttctatctatcagagtgttttagtttaacaatggttttacctctggcttttgtagtcaggtttctgaaaaaaaaaaaaaaaaaaacggccaaaaaaaaaaaacctatccaaaaaaaaaaaaaaaaaaaaaaacacttgaaaaacgccttgaataaagcagaaagataaaccaagtgaagcaacagaacaactaaatga

SEQ ID NO: 2743 - DNA, 1579 bp, Zea mays
  Clone ID: TF_ZmC4197_2
ttgggaccctcgaggccggccgggatagggagtcctgaaccccctatccagtcgcatctccctctccgaaatcaaggtagcgtacaccgctgcagtttctagagccctctctgccactcgtgatcccactagtcacaatgcctgccctcgccaagcccgcctcccgcaccgccaagcccgccgcggctccgaagccgaagcctgccgccgccaagccgaaggcggccaccgctggtgcctcccacccgccttacttcgagatgatcaaggaggctatcacggcgctcaaggagaggaccggctccagctcgcaagcgatcgccaagtatgtgggggacaagcacggcgcgtctctgccggccaacttcaagaagatgctttccatccagctccgtgggtccgcagccaagggcaagctcgtgaaggtcaaggcttcgtacaagctctcggacgccgccaagaaggcatcccccaagaccaaggctaagccggcaaaggccgccgctgccaagaccaccgcccccaagccggccaaggccgccgccgccaagtcaaagaaggcagcggctgccaagccaaagaaggccgctgctgctgggaccaagcgcaaagtgcccgagaagaaggtcgtggcgaagccgaagaagtcccccgccgccaaggccaaggccaagccgaagaccgtgaagtcccctgcctccaagaaggcacggaaggcctccgcatgagatgggttgctttaggtctaagctctgattgtggttggtgtcagttaggtactgtacaaactaagtgtgtgcccaaagtgtctcaggcggtgtgttatgtgcttagcaagttctatctatcagagtgttttagtttaaaaaaaaaaaaaaaaaaacaaaaaaaaaaaaaaaaaagcggccgaaagatacttttccttttttctgttgattcaatgacacatacaaaatactcatcggtctgcatctgccgaaaactcgcgcaaggcacgttgccaagcttttgacctccatgctctgccttgagtagggctcgctctcgagggagacaacctccatcaataagacctactgcccgctcccgccactagaataacgacagatgcaactctaaaggtgaatattgctaaaacttatacatgttattcgcattctactatttttcaatctttgaatacttattagttaactctgattcaccatttacaaatgtagttgatcatcaggctgcaaacagcctcctatgtatagtacaactgacaggctaaactggagttctcacatgtgttggtccaatgctaatcaggacaagattgttgtctagaaataggacattatgttcgctaaccagtttttttattacttctaggttttggttgagagaatgggtctgcctaaaggaaataatggactataattgttgcaaacaatcgcttaagtatatggttttgaggttggtctttaattagcaaatcctcaatatcttggtagtgacaattcttgggctacttataatgattacactgttcatacatgagctgcagttttatttcaacacatacaccatgcatcag

SEQ ID NO: 2744 - DNA, 866 bp, Zea mays
  Clone ID: TF_ZmC4197_4
atccagtctcacctccctctccgaaataaggtagatacaccgctgcagtttctagagccctctctgccactcgtgatcccactagtcacgatgcctgccctcgctaagcccgcctcccgcaccgccaagcccgccgcggctccgaagccgaagcctgccgccgccaagccgaaggcggccaccgctggtgcctcccacccgccttacttcgagatgatcaaggaggctatcacggcgctaaaggagaggaccggctccagctcgcaagcgatcgccaagtatgtgggggacaagcacggcgcgtctctgccggccaacttcaagaagatgctttccatccagctccgtgggtccgcagccaagggcaagctcgtgaaggtcaaggcttcgtacaagctctcggacgccgccaagaaggcatcccccaagaccaaggccgccgccgccaagtcaaagaaggcagcggctgccaagccaaagaagaccgctgctgctgggaccaagcgcaaagtgtccgagaagaaggtcgtggcgaagccgaagaagtcccccgccgccaaggccaaggccaagccgaagaccgtgaagtcccctgcctctaagaaggcacggaaggcctccgcatgagatgggttgctttaggtctaagctctgattgtggttggtgtcagttaggtactgtacaaactaagtgtgcccaaagtgtctcaggcggtgtgttatgtgcttagcaagttctatctatcagagtgttttagtttaacaatggttttacgtctggcttttgtagtcaggtttcggaaatccctgttgtcgcgcagtctaaatttttgaattctagagcccccccatcgtttcgatcaaaa

SEQ ID NO: 2745 - DNA, 1001 bp, Zea mays
  Clone ID: TF_ZmC4197_5
ccctcgaggctggccgggcggttaaaaaaaattggttggctgcatgcatatttggagtcgcatctccctctccgaaataaggtagcgtacaccgctgcagtttctagagccctctctgccactcgtgatcccactagtacaatgcctgccctcgccaagcccgcctcccgcaccgccaagcccgccgcggctccgaagccgaagcctgccgccgccaagccgaaggcggccaccgctggtgcctcccacccgccttacttcgagatgatcaaggaggctatcacggcgctcaaggagaggaccggctccagctcgcaagcgatcgccaagtatgtgggggacaagcacggcgcgtctctgccggccaacttcaagaagatgctttccatccagctccgtgggtccgcagccaagggcaagctcgtgaaggtcaaggcttcgtacaagctctcggacgccgccaagaaggcatcccccaagaccaaggctaagccggcaaaggccgccgctgccaagaccaccgcccccaagccggccaaggccgccgccgccaagtcaaagaaggcagcggctgccaagccaaagaaggccgctgctgctgggaccaagcgcaaagtgcccgagaagaaggtcgtggcgaagccgaagaagtcccccgccgccaaggccaaggccaagccgaagaccgtgaagtcccctgcctccaagaaggcacggaaggcctccgcatgagatgggttgctttaggtctaagctctgattgtggttggtgtcagttaggtactgtacaaactaagtgtgtgcccaaagtgtctcaggcggtgtgttatgtgcttagcaagttctatctatcagagtgttttagtttaacaatggttttacctctggcttttgtagtgaggtttcggaaatccctgttctcgcgcagtctaaatttctgaattctagcgcagcacaatcgtttcgatctccgttctagtttatccatgtagaactgcgct

SEQ ID NO: 2746 - DNA, 676 bp, Zea mays
  Clone ID: TF_LIB4730-076-R1-K1-C7
ccggccgggagtatctctccccgcctccgccgccgacaacagcgtactgtactgtagttccggagagggttggggagagtagtagtgatccgcaatgtcgacggaggaggttgttgtggctgaggtcccggtgaccgaggtgccttcggaggtcccggcggcccaggtggccgaggcgcccaaggcgaagaaggcgcccaaggagaacaaggcgcctaatgagaagaagccgtccgcggcgaacaagccggcggagcaccctccctacgctgacatgattgttcaggcgatcgctgccctcaaggagaggtaatcgggtcgagctctgtggccatcagtaagtacgtcgaggggaatcacggcggtaagctccccaccaacttccgcaagcatctcaccgtgcagctgaagaagctcgctgccgccggtaagctgacgagggtgaagaactccttcaagctgccggccaccgacgcctagcccaaggccgccaagcccaaggcacccaatgccgctcccaagcccaagtcctcgtcgaaggcgaaggtcaagaccgctgctaagcccaaggcggcgtcggcctagcccaatgccaaggacaaggtcaaggccaaggccaaacctgtcgttcctgccgccgcgtcgcccaagcctcgcgggcgtcctcccaaggtcg

SEQ ID NO: 2747 - DNA, 312 bp, Zea mays
  Clone ID: TF_9462059
tcaaggaggctatcacggcgctaaaggagaggaccggctccagctcgcaagcgatcgccaagtatgtgggggacaagcacggcgcgtctctgccggccaacttcaagaagatgctttccatccagctccgtgggtccgcagccaagggcaagctcgtgaaggtcaaggcctcgtacaagctctcggacgccgccaagaaggcatcccccaagaccaaggccaagccggcaaaggcggcggctgccaagaccaccgcctccaagccggcaaaggccgccgccgccaagtcaaagaaagcagcggctgccaagc

SEQ ID NO: 2748 - DNA, 837 bp, Zea mays
  Clone ID: TF_ZmC1022_20
gctgggattcggcttggtggcggacgacagcttgtacgagttcttcaccttggtcagcttgccgccgtacgccgagatggtctcggaggcgatcacgtcgctcaaggagaggacggggtccagcagctacgcgattgccaagttcgtggaggacaagcacaaggccaagctcccgcccaacttccgcaagcttctgaacgttcagctcaagaagctggtcgccggcggcaagctgaccaaggtgaagaactcgtacaagctgtcgtccgccaccaagccgaatcccaagccagacccggccccgaagaagcccaagaccggcgtgaagaagcccaaggccgctgccaaaccgaaggccaagtcccccgcgaagcccaagaaggccaagacgtcggccaaggccacgccaggaaagaaggcgccggtgaccaagaagcccgcggcccccgcgaagaaggcgccggtagccaagagggccgctccggcgaagaaggcggctgcccctgcccgaaaagcgccgtctcggaaggcgaagaagtagaggaggggtaggcgtcggagaaatgtagggtttggttctcgtattacgctagatgtttgctctccctttagcctaggtggtgtctgtgtgtgcaatgttgtaaatttgatatcggatgctgggaacactagtcaatctttcagtacctgttgtgaatgggcggtggcgaacgatgacgatggagtgtttgttattttttctcgggaggattcatttccgtggatgatggtggatctgttcctcgttgaggtaaggcttatgtggtgataaatttttttgaaaaaaaaaaaccgagc

SEQ ID NO: 2749 - DNA, 759 bp, Zea mays
  unsure (1)..(759): unsure at all n locations
  Clone ID: TF_LIB4729-137-A1-K1-H11
atcagtcatcacccaccgcctccgccgccgacaacagcgtagtgtagtgtagttccggagagggttggggagagtagtagtgatccgcaatgtcgacggaggaggctgttgtggctgaggtcccggtgaccgaggtgccagcggaggtcccggcggcccaggtggccgaggcgcccaaggcgaagaaggcgcccaaggagaagaaggcgcctaaggagaagaagctttccgcggcgaagaagccggcggcgcaccctccctacgctgagatgattgtagaggcgatcgctgccctcaaggagaggaaggggtcgagctcggtggccatcagcaagtacgtcgaggggaagcatggcggcaagctccccaccaacttccgcaaggcagccaagaaggcggctgctcctgccaagaagggaaaggcagcggcggctcctaagaaggtggcaaccccgaagaaggctgctgctgctgccgccccggccaggaagggcgtggccaggaaggccaagaagtagtctgcctgccttgtcgctggcgagatccccccctcaattccgcctatagattcccctctttcatggattttgatccaatcgtaatattgtcagtagctctagattcgtcggtagctccagcatgagtgtcggtggtagttctgtgcctgtaaaaacttgngatagttgatcgcgtgtgatcagccgtcatgctcctccagtctctatgaacaagctaagctataatagtattttgctatct

SEQ ID NO: 2750 - DNA, 719 bp, Zea mays
  Clone ID: TF_ZmC1022_10
cctctctctctctctctttctcgcgctcgctttgcttcctcgtcgaggtccaagttcctgcattgatggcgaccgaggtggctgagactcccgcgccgttggcggaggcggtccccgagacccccgcggaggcaccggcggcgcccgccgccgaggcgaagcctaccaaggccaagaaggcctctgcgcccaagaagcgtgccaacccgacccacccgccgtacgccgaggtaattgcagcctttgtgccacgttagcttgcacccatgtcgtgtatgtcgcgtctggatctgacggaattgtggacggtttgctggtgcgcagatgatctcggaggctgtcacgtcgctcaaggagcggacggggtccagccagtacgcgatcgccaagttcgtcgaggacaagcacaaggacaagctcccgcccaacttccgcaagctcctgctcggccagctcaagaagctcgtcgccggcggcaagctcaccaaggtgaagaactcctacaagctgcccgcacgcgccccggccgccgccaagccgaagcccaagtccaagaccgctgtgaagaagcccaaggccggtgccaagaagcccaaggccgccaccaagcccaagccgaagcccaaggccaagtcccccgccaaggcgaagcccgccgcaaagcccaaggcagccgcgaagcccgccgctaagccgaaacccgcagcggccaagcccaa

SEQ ID NO: 2751 - DNA, 388 bp, Zea mays
  Clone ID: TF_LIB3150-009-Q1-N1-D8
cgccgacaacagcgtagtgtagggtagtggcggacagggttggggagagtactactgatccgcaatgtcgacggatgaagctgttgtggctgaagtcccgaagaccgaagtgccatcgaaagtcccagcggcccaagtggccgacgcgcccaaggcgaagaaagcgcccaaggagaagaaagcgcctaacgagaagaaactttccgaggcgaaaaagccggcggcgcaccctccctacactgagatgattgtagaagcgatcgctgccctcaaggagaggaaggggtcgagctcagtggccatcagcaagtacgtctaggggaatcatggctgcaagctccccaccaacttcctcaagcagctcactgtgcagctgatgaagctcact

SEQ ID NO: 2752 - DNA, 397 bp, Zea mays
  Clone ID: TF_LIB3060-018-Q1-K1-D2
cctgcctctccgaaatcaaggtagcatacaccgctgcagtttctagagccctctctggcgctggtgatcccactagtcacgatgcctgccctcgctaagcccgcctcccgcaccgccaagcccgccgcggctccgaagccgaagcctgccgccgccaagccgaaggcggccaccgctggtgcctcccacccgccttacttcgagatgatcaaggaggctatcacggcgctaaaggagaggaccggctccagctcgcaagctatcgccacgtatgtgggggacaagcacggcacgtgtctgacggccaacttcaagaagatgctgtccatccagctccgggggtccgcagccaaggtcaagcacgtgaaggtcaaggcttcgtacaagctctcggacg

SEQ ID NO: 2753 - DNA, 1031 bp, Zea mays
  Clone ID: TF_11544761
accgcatctgggaaggtctcgtcttgctcgcctccgtccatggccaccgacgaagccaccaagccgtccccgatcccaccctatcccgagatgatcctggcggcgatcgagggtctagacgacaagagcgggtcgaacaagtccgccatctccaagtacatcgagggcaagtacggctcgctgccccccgcgcacgcatcgctgctgaccgcgcacctggcgcgcatgaaggagtccggagagctcgtcttcctcaagaacaactacttccgcgcgggcgcccccgacgcgccgccgaagcgcgggcgcgggcgccctcccaaggcgcgggacccgaacgcgccggcgccggcgcccaagtcgccgtcgtccacggggcgcgggcgcgggcgcccgcccaaggccaagagcccgctggaagccgccgtgaagcaggccaccgcggggatgcccaagccccgcggccgcccgcccaagaaggccaagaccgagggcgccgcgtccccgtccccgtcccctgcccctgctggcgacgggtccacccccggcaagcgcggccgcggcaggccccccaaggtacgccccgccgtgcccagcgagacggccgcggcttgacggcgcttcttggggataatagttcgtcccgccgcgagatgggatggttagggcgtagcaattcgtcccgctgcagctgccgtgttaatgttggtaggcttggtctccatgcttcatctaattgttgtcgtcgccgtcgtctgttgctcaattaattaatggagtaattaggaggatttgatgtgctgtcttctgtgctgtgttgtgttcagttcagtttcaccgtgtgtcctctggtgttattatgtgctggatctgttgtaagctaagctagggagcttgagtgctgtgttggtcgattaattatttaagctgctaatgtggatgtgtcaattaattagaggatggtgatgatgttcgtaaaatgttgatttgaggggtgcaaaaaaaaaaaaaaaaaaaaaaaaaaaaaaaaa

SEQ ID NO: 2754 - DNA, 1190 bp, Zea mays
  Clone ID: TF_ZmC8319_1
agaccacccgaaaaacaagggaaaaaatagtaaagaaacggagcgaggctcctcctcgtttcctatctatcctgatccaaatccgccctactcgcttcatatatcctcctgcgaggaaaacaattcattccgcgccgcatctgggaaggtctcgtcttgctcgcctccgtccgtcgccgcaccctgcgtcgtcgccatggccaccgacgaagccaccaagccgtccccgatcccaccctatcccgagatgatcctggcggcgatcgagggtctagacgacaagagcgggtcgaacaagtccgccatctccaagtacatcgagggcaagtacggctcgctgccccccgcgcacgcgtcgctgctgaccgcgcacctggcgcgcatgaaggagtccggagagctcgtcttcctcaagaacaactacttccgcgcgggcgcccccgacgcgccgccgaagcgcgggcgcgggcgccctcccaaggcgcgggacccgaacgcgccggcgccggcgcccaagtcgccgtcgtccacggggcagcttgagtgctgtgttggtcgattaattatttaagctgaagccgccgtgaagcaggccaccgcggggatgcccaagccccgcggccgcccgcccaagaaggccaagaccgacggcgccgcgtccccgtccccgtcccctgcccctgcccctgctggcgacgggtccacccccggcaagcgcggccgcggcaggccccccaaggtacgccccgccgtgcccagcgagacggccgcggcttgaccccgcttcttggggataatagttcgtcccgccgcgagatgggatggttagggcgtagcaattcgtcccgctgcagctgcggctgcagctgccgtgttaatgttggtaggcttggtctccatgcttcatctaattgttgtcgtcgtcggcgtcgtcgttgctcaattaattaatggagtaattaggaggattcgatgtgctgtcttctgtgctgtgttgtgttcagttcagtttcaccgtgtgtctctggtgttatgtgctggatctgttgtaagctaagctagggagcttgagtgctgtgttggtcgattaattattataagctgctaatgtggatgtgtacaattaattagaggatggtgatgatgttcgtaaaatgttgatttgaaaaaaaaaaaaaaaaaaaaaaaaa

SEQ ID NO: 2755 - DNA, 1468 bp, Zea mays
  Clone ID: TF_ZmC13520_1
cctctccggaattccgggtcgacgcaggcgtccgcccacgcgtccgcccccgcgtcgtgggcggcctcgtggggtttccgcgtcggctagtttggacgcatggctgctgcaggagagtagagaccacagcgcgcgaggcgaggagaataagctatgggcgcgccgaagcagaaatggacgtcggaagaggaggatgcgctccgcgccggcgtgcgcaagcacggcgccggcaaatggcggaccatccagaaggaccccgagttcagcccggtcctctcctcccgctccaacatcgacctcaaggacaaatggaggaatttaagtttcagtgcaagtggactgggatcaagtaaactgcgggttccaaagataactggaccctcatcttccccatcatctagctcgcagcctctgcttctcccagcggcaaacaaatttactgaagctacactgcctgcagatgctgagaaaaagccacaggatgggaaaactctgccaaagtatggtgccatgatcatggaagctcttttggaattgaatgagccgaatggttcagatattgctgcaatcttcggcttcatagagcaaaggtatgcggtacaaccgaccttcagaagatttctagcctcaaagttacggcgacttgcagactcaaacaaaattgaaaagatcgataagtcctataggctcccagactcccttgcaacaaggactccagctccaatgaatgcttcagctccaaaacagaaggatccatcaaagccatcgaaggtgtcaaaggccataggattgttttctgcctccagccctgcactagaggctgcgatggcagctgctgtcaaggtggctgacgcggaggcaaaagcacatgatgcgcatgatcagacgatggaggcagaaaggatcttcaagatggccgaggataccgagtctctcctcataattgcagcagagatctatgatcgatgttcaaggggagagataaccacgttagttccagtggcacaaagggagatttgagatctattggagtctctcttgtgttgtttgttgtacatggataggttctggaatccagtggcccggattgctcctgttgtatgatgtaaccgtttgtgttgtactacctccgttctcgaatatttgtctccaatatttatcgtccctagtttatttttgaaataaaatgcaacaaataaaaaaaaagaaaaagggcggccgccaccgccaggaaaaagtggtttaaaatatgtaacccggtcatcatgggatagtgttacgctgcgatcgtgtatattgtggtcagcagttattttcttttttcagaggcatgatgagagaatagattagtgttctgagacaacgaagtagggtaggaaggggaagtgttcttggcctttgatacgaataatatgtgccgataacagttttttcaatttgagaatgttgtgttagacccttgttcatc

SEQ ID NO: 2756 - DNA, 645 bp, Zea mays
  Clone ID: TF_ZmC1022_11
cgcagagctctcatcctctctctctctctttctcgcgctcgctttgcttcctcgtcgaggtccaagttcctgcattgatggcgaccgaggtggctgagactcccgcgccgttggcggaggcggtccccgagacccccgcggaggcaccggcggcgcccgccgccgaggcgaagcctgccaaggccaagaaggcctctgcgcccaagaagcgtgccaacccgacccacccgccgtacgccgagatgatctcggaggctgtcacgtcgctcaaggagcggacggggtccagccagtacgcgatcgccaagttcgtcgaggacaagcacaaggacaagctcccgcccaacttccgcaagctcctgctcggccagctcaagaagctcgtcgccggcggcaagctcaccaaggtgaagaactcctacaagctgccagcgcgcgccccggccgccgccaagccgaagcccaagtccaagaccgctgtgaagaagcccaaggccggtgccaagaagcccaaggccgccaccaagcccaagccgaagcccaaggccaagtcccccgccaaggcgaagcccgccgcaaagactaaggcagccgcgaagcccaccgcgaagccgaaacccgcagcggccaagcccaaggcggccg

SEQ ID NO: 2757 - DNA, 665 bp, Zea mays
  Clone ID: TF_ZmC1022_13
ttcacgcgtccgcccacgcgttcgtgcacacctcgagcccggccggggccagcaccgcagagctctcatctcctctctctctcgcgctcgctttgcttcctcgtcgaggtccaagttcctgcattgatggcgaccgaggtggctgagactcccgcgccgttggcggaggcggtccccgagacccccgcggaggcaccggcggcgcccgccgccgaggcgaagcctaccaaggccaagaaggcctctgcgcccaagaagcgtgccaacccgacccacccgccgtacgccgagatgatctcggaggctgtcacgtcgctcaaggagcggacggggtccagccagtacgcgatcgccaagttcgtcgaggacaagcacaaggacaagctcccgcccaacttccgcaagctcctgctcggccagctcaagaagctcgtcgccggcggcaagctcaccaaggtgaagaactcctacaagctgcccgcacgcgccccggccgccgccaagccgaagcccaagtccaagaccgctgtgaagaagccgaaggccggggcgaagaagcccaaggcagccaccaagcccaagccgaagcccaagggcaagtcccccgccaaggcgaaacccggcgcaaagcccaaggcagccgcgaagccgaaaccggcagcagc

SEQ ID NO: 2758 - DNA, 634 bp, Zea mays
  Clone ID: TF_ZmC1022_18
acccagtaccgcagagctctcatcttctctctctctctttctcgcgctcgctttgcttcctcgtcgaggtccagttcctgcattgatggcgaccgaggtggctgagactcccgcgccgttggcggaggcggtccccgagacccccgcggaggcaccggcggcgcccgccgccgaggcgaagcctaccaaggccaagaaggcctctgcgcccaagaagcgtgccaacccgacccacccgccgtacgccgagatgatctcggaggctgtcacgtcgctcaaggagcggacggggtccagccagtacgcgatcgccaagttcgtcgaggacaagcacaaggacaagctcccgcccaacttccgcaagctcctgctcggccagctcaagaagctcgtcgccggcggcaagctcaccaaggtgaagaactcctacaagctgcccgcacgcgccccggccgccgccaagccgaagcccaagtccaagaccgctgtgaagaagccgaaggccggggcgaagaagcccaaggcagccaccaagcccaagccgaagcccaaggccaagtcccccgccaaggcgaagcccgccgcaaagcccaaggcagccgcgaagccgaaaccggcagcagccaagcccaag

SEQ ID NO: 2759 - DNA, 1745 bp, Zea mays
  Clone ID: TF_ZmC1022_2
cattgggtacctcgaggccggccgggactcagcaccgcagagctctcatccgcgctctctctctctttctcgcgctcgctttgcttcctcgtcgaggtccaagttcctgcattgatggcgaccgaggtggctgagactcccgcgccgttggcggaggcggtccccgagacccccgcggaggcaccggcggcgcccgccgccgaggcgaagcctaccaaggccaagaaggcctctgcgcccaagaagcgtgccaacccgacccacccgccgtacgccgagatgatctcggaggctgtcacgtcgctcaaggagcggacggggtccagccagtacgcgatcgccaagttcgtcgaggacaagcacaaggacaagctcccgcccaacttccgcaagctcctgctcggccagctcaagaagctcgtcgccggcggcaagctcaccaaggtgaagaactcctacaagctgcccgcacgcgccccggccgccgccaagccgaagcccaagtccaagaccgctgtgaagaagcccaaggccggtgccaagaagcccaaggccgccaccaagcccaagccgaagcccaaggccaagtcccccgccaaggcgaagcccgccgcaaagcccaaggcagccgcgaagcccgccgctaagccgaaacccgcagcggccaagcccaaggcggccgccaagccgaaggccaagccagctgccaaggctaagccgaaggctgccgcggccaagccgaagccagctgccaagaaggccggccgccccgccaaggccgccaagacgtcagccaaggacacgcccgggaagaaagcggcgcccgccaagaagcccgccgctgcggccaagaaggcccctgccaagaaggccgccccagccaagaaggctgcgaccccgtcgcggaaggtgccgtcccgtaaggcgaagaagtagagcggtggtcttggcaggaatctagggtttcgtgctccttcgattttagatgtttactcgtttttgctctagttgtgggtggtgcgcggggtgggttactaggttgtaaatttgatgtcggaggctggggtacacatgggcattctgtaccagcggtggaaggcgccggcgacgatgacgaaccagtgtgtgttattattattagaagacaacgttgtatttctgtagctgaattgttgagttgcggatatcattgtgctgctaaggttaatgtgacgataaagttaatgtcaagagttaccttccttcgcgtgtatgtactctgattattcaggctgtttttggctgggattaatctggtcttatctgaattccctatctgaaatagagaattgttcggtgtgcattttgtgaccaataaatatttttaatattttatttttttatttaatatttaaaaaagggcggtcgtttttgaggttccaagctttcttcctcttccttcgattttagatgtttactcgtttttgctctagtttttaattgtgcgcggggtgggttactaggttgtaaatttgatgtcggaggctggggtacacatgggcattctgtaccagcggtggaaggcgccggcgacgatgacgaaccagtgtgtgttattattattagaagacaacgttgtatttctgtagctgaattgttgagttgcggatatcattgtgctcctaaggttaatgtgacgataacgttaatgtcaagagttaccttcaaaaaaaaaaaaaaagggcggcgctcgcgatagaactagt

SEQ ID NO: 2760 - DNA, 556 bp, Zea mays
  Clone ID: TF_LIB4730-130-A1-K1-A1
cggccgggatccgcctccacatccctctgcgacatcaagggaacatacacctgctgcagcttctacagccctctctgctactgcgtgatcccactagtcacaatgcctgccatcgcgaagcccgcctcccgcaccgccaaggccgccgggtttccgaagccgaagactgccgccgccaagccgaaggcggacaccgctggtgcctcccacccggcttacttcgagatgatcgaggaggttatcacggagataaaggagatgaccggctccagctcgcaagtgatcgccaagtatgtgggggacaagcacggcgcgtctctgccggtcaacttcaagaagatgctttccatccagctccgtgggtccgcagccaagggcaagctcgtgaaggtcaaggattcgtacaagctctcggacgccgccaagaaggcatcccccaagaccaaggctaagccggcaaaggccgccgctgccaagaccaccgcccccaagccggccaaggccgccgccgccaagtcaaagaatgcagcggctgtcaagccaaagaaggccgctg

SEQ ID NO: 2761 - DNA, 581 bp, Zea mays
  Clone ID: TF_LIB5026-070-Q1-XP1-H9
gccggcccggtcgaaaatacagtggaacctccctctccttttcaaggtagatacaccgctgcagtgtctatagccctctctgtcactctggatcccactagtcacgatgcctgccctcgtcaagtccgcctcccgtaccgccaagtccgacgcgagtccgaatacgaagtctgtcgccgcctagtcgaaggcgagcaccgctggtgcctcccacccgccttacttctacatggtctgggaggttatctcgatgctaatggagaggaccgcctcctgatcataagcgatcgccgaggatgtgatggacattgatgctacgattctgccgcccgacttcaacaagatgctttccatccatatccgagggtccgtatgctagggcaagctcgagaaagtcaaagcttcgtacaagctctcggacaccgccaatatcgcatccccctagaacaagggtaattcggcaaaggacgacgctgccaagaccaccgccacctagccggacaatgccgtcgacgtcaagtcaaagaatgcagcgactggcaagacaatgaatgacggtgctgctgagaccaatcgcaaag

SEQ ID NO: 2762 - DNA, 556 bp, Zea mays
  Clone ID: TF_ZmC159_2
cggccgcgtgggcgacagccagcagccgaggcggccagcgcaggcatggccactcccacttccagtggcgacggctcgcccccgggctcctctgacctcgtgcccccctcctaccccgagatgatcgtcgccgccctcgccgcgctcgccgaggagaacggctccagccaggccgccatcgcgcgccgcatcgaggcggaggcccgcggcgacctgccggcctcgcacccggcgctcgtcgcagcccacctctcgcgcatgtccgccgccggggagctcgtcgccgttgcggggggaaagtacgcgctgccgccgccggtcccaccgccgccggagtcaccggctgacgacgaagaagacgactacgccgacgacgaagaggaggaggaggaggctccggagccggagcctctgccgcagccgcccgctaagcgcgggcgcgggaggcccccgaagccgcggcccacgggcttccccgccggcgtgcccggagctgctggcccgggccccatcggcgtccccggagccgccgccgccgccgccgcgccgcgccggc

SEQ ID NO: 2763 - DNA, 524 bp, Zea mays
  unsure (1)..(524): unsure at all n locations
  Clone ID: TF_LIB4766-078-R1-K1-E1
gggtacctcgaggccggccgggaaaaaaacttctcagtcatcacccaccgcttccgccgtcgacaacagcgtagtgtagtgtagtttcggagagggttggggagagtagtagtgatccgcaatgtcgacggaggaggatgttgtggctgaggtcncggtgaccgaggtcgcagcggaggacccggcggctcaggtggtcgaggtgcccaaggcgaagaaggcgtccaaggagaagaaggcgcctaaggagaagaagctgtccgcggcgaagaagccggcggcgtaccctacctacgctgagatgattgtagaggcggtcgctgcccttaaggagaggaaggggtcgagctcggtggtcatcagtgagtacgccgaggggaagtatggcggcaagcaacataccaattatcgcaagcagcncactgtgcagatgaagaagctcgctgccgctcggcagttgacgagggtgaagaagttcctcaagctgccggccatcgatcgtaagcccaggccgtgaagctgaa

SEQ ID NO: 2764 - DNA, 629 bp, Zea mays
  Clone ID: TF_LIB4732-039-R1-K1-A11
taataatcacccaccgtctccgccgccgacgactgcgtagtgtagtgtagttccggagagggttgtggagagtagtagtgatccgtaatgtctacagaggacgctgttgtggctgaagtcccggagaccgaggtgccagtggatgtcccggcggaccaggtggacgaggtcgcccaagtccaactaggcgcccaaggacaagaaggcgcctaaggagaacaatctttccgcggggaataagccggcggcgcaccctccctacgctgagatgattgtagatgcgatcgctgccctcaaggagaggaaggggtcgagctcggtggccatcagcaagtacgtcgaggtgaagcatggcggcaagctccccaccaacttcggcaagaagctcactgtgcagctgaagaagctcgctgccgtcgtcaagctgacgatggtgaagaactccttcaagctggcggacaccgacgtcaaggccaaggccgccatgcccaaggaacccaaggacgtgcccatgaccaagccctctcctaaggcgaatgccaagactgctgctaagctcaaggcgacgtcgtccaagtccaatgtcaatgactatgtcaaggccaacgtcaactctgtcgctcctgacg

SEQ ID NO: 2765 - DNA, 741 bp, Zea mays
  unsure (1)..(741): unsure at all n locations
  Clone ID: TF_LIB5116-004-A1-PF1-B7
atcgagctccttctcgaatctcaagcgaccacaccgcgcaagtcgcagcttcagtttcagtttcagagctccgcttcagttagccaccatgcctgccctcgccaagcccgccgccgcggcgccgaagccgaagccagccgccgccaagcccaaggcggccgccgctggagccgcccacccgacctacttcgagatgatcaaggaggcgatcgcggcgctcaaggacaggaccgggtccagctcggtcgccatcgccaagtacatcgaggagaagcacggcaaggctctcccggccaacttcaagaagatgctctccgtccagctacgcgcctccgccgccaagggcaagctcgtcaaggtcaaggcctcctacaagctctccgacgccgccaagaaggacgcgcccaagcccaaagccgcggcgaagccctccaaggacgccgccaagcccaagaagaaggcggccgagaagcccaagaagaccgccgccgctggcaccaagcgcaaggcgcccgagaagaagaagctggtcaccaaggccaagaagtcgcccgctgccaaggccaaggcgaagccgaagaccgtccgctccccggccgccaagaaggcccgcaaggtcgccgccgcctgatctgatctgatccggtccgatagtgggtcttagnagtgcttgatgttccaagggtctgtacaaaaggatgctcatctcccttgggttttaagtttcggttctgcttggca

SEQ ID NO: 2766 - DNA, 647 bp, Zea mays
  unsure (1)..(647): unsure at all n locations
  Clone ID: TF_LIB4172-047-R1-L1-C9
aattcggcacgaggctgcagatgattgtagaggcgatcgctgccctcaaggagaggaaggggtcgagctcggtggccatcagcaagtacgtcgaggggaagcatggcggcaagctccccaccaacttccgcaagcagctcactgtgcagctgaagaagctcgctgccgccggcaagctgacgagggtgaagaactccttcaagctgccggccaccgacgccaagcccaaggccgccaagcccaaggcacccaaggccgcgcccaagcccaagccctcgccgaaggcgaaggccaagaccgctgcgaagcccaaggcggcgtcgcccaaacccaaggccaaggccaaggccaagcctgtcgctcctgccgccgcgtcgcccaagccccgcgggcgccctcccaaggtcgccaagacctccgccaaggcctcccccgccaaggcagccaagaaggcggctgctcctgccaagaagggaaaggcagcggcggctcctaagaaggtggcaaccccgaagaagctgctgctgctgccgnccccgccaggaagggcgtggccagaaaggccaagaagtagtctgcctgccttgtcgctggcgagatcccccccctcattcccgctatagattcccctctgtcatggaattttg

SEQ ID NO: 2767 - DNA, 601 bp, Zea mays
  Clone ID: TF_LIB4767-003-R1-N1-F9
ccggccggggttgctgttatcgtgtgaactgttgagatctgttagcatgtgcacttttatctatttatttggtaccatcttgctatttcaccttttgcaatacaagaatgctctaagacctaaaaaaaaaaaaaaaaaaaaaaaaaaaaaaaaaaaaaaaaaaaaaaaaaaaaaaaaaaaaaaaaaaaaaaaaaaaaaaaaaaaaaaaaaaaaaaaaaaaaattcagttttcacccaccgcttccgccgccaaaaaaagggaagggaagggaatttccgaaaagggttgggaaaaaaaaaaggaaccccaaatgtcaacgaagaaggtttttggggttaaggccccgggaaccaaggggccagggaaggccccgggggccaagggggccaaggccccaaagggaaaaaaggccccaaaggaaaaaaaggccccaaaggaaaaaaaattttccggggaaaaaaaaccgggggggaaccctccttaccctaaaaaaattgaaaaggcaatccttgccctaaagaaaagaaaggggtcaacctcgggggccataaaaaagtacgtcaagggaaacaatgggggaaagttcccaacaaatttccg

SEQ ID NO: 2768 - DNA, 564 bp, Zea mays
  Clone ID: TF_ZmC8559_1
tctctctcttcgcagacacaaccaaaagaccaagggggaaaaatagtaaagaaacggagcgaggctcctccgatttcttatctatcctgatccaaaccctccgagggggaaacaattcattccgcacggcatccgggaaggtctgcgtcgtcgccatggccaccgaggaagtcgccaagccgtccccgatcccgccctaccccgagatgatcctggcggcgatcgaggacctaggcgacaagagcgggtcgaacaagtcggccatctccaggcacatcgagggcaagtacgacggcgacctgccgcccgcgcacgcgtcgctgctggccgcgcacctggcgcgcatgaaggagtcgggcgagctggtcttcgtcaagaacaactacttccgcgccgacgcgcccgacgcgccgccgaagcgcgggcgcgggcggcccccgaaggcgcgggaccccggcacgccggtgtcgccgccatcggggcgcgggcgcgggcgcccgcccaagcccaaggacccgctggacgccgccgtgaagcaggccaccgcgggcatgcccagggccc

SEQ ID NO: 2769 - DNA, 1260 bp, Zea mays
  Clone ID: TF_ZmC238_3
gattctccggtgggggttccttggtctcgatttgctgctgatgggggtgccgaagcagcgctggacgccggaggaagaggccgcgctcaaggccggcgtcgccaagcacgggcccggcaagtggcgcaccatcctccgggactcggacttcagcgcgctcctgcgcctccgctccaatgttgacctcaaggacaagtggcgcaacttgagcgtcaccgcaggaggttacgggtctagagagaaggcaaggatggcgttgaagaaaggcaggcgcgtggtgcctaagcttactgctgagccaatggatgtagatgagaaggatatggacaacgctcatgacacagtcattgatgtggaaccgttagcaatggctttcgagcccttgccacttttggaaagcccagataagtcagttgctaggctcgatgatctcatagtagaagctataaggaagcttaacgagccatctgggtccaataaggcagtcatttctggatatattgaggaccaatactggccgcctgctgattttcaatacctgctatctacaaaattgaagtcattggttaattctggaaaattaatcaaggtaaaccaaaagtacagaattgcaccaagttcttccttgggcggaataagcactaaggtatcctcttctgaagggatgaacacagaaaataataatgttaaacggctaactaagcctcaagtggttgctgaactggagaagatgaaaggcatgaccagggaagaggctgctgccttcgctgccaaggcagttgccgaggcagaagtagcaatggcagaagctgaggaagcagcaagagttgcagaggctgcagaaaatgatgctgaagctgcaaaggcttttcttgatgctgtcattttgtcaatgagaaacaggaacgctgcttccatgatacttcgagcttgctgatccttcacccatgccgtcgcatggttttggcagcagcacaccgatgttctgctgcaaagattttctggatagatgagtttcttgtatagtcttatagatcatggcgggttttcaacagcttgctgttgtcctgtgctgtgcagccaatcgacaacatgataacaagaatgatcgagaaagtagtcttcatttttttttgtttcccattgtgttgctttgtaattaaactatagccttttcctttcattagttgatgaagtgatgtcgtctaatagaacaactgtagtgaaaagaaaatgtcagaaagccgccttagttaatgc

SEQ ID NO: 2770 - DNA, 560 bp, Zea mays
  Clone ID: TF_LIB4730-072-R1-K1-F11
tggtaccctcgggctcggcccgtgcccacggcgctggcccgcctcgcgcacctcggcgcgcctcagcctgctcgcgaacgcgctctgcgggcccatcgccggccccgctgaggcgcctgcaggccctgacgcacgtcaagcccaaggacgacaaggtgcacaaggccaattaggcccctaaggagaagaagctttccgctgcgaagaagccggcggcgcacccttcctacgctgagatgattggagaggcgatcgctgccctcaaggagaggaagggggcgagctcggtggccatcagcaagtacgtcgaggggaagcatggcggtaagctccccaccaactttcgcgagcagctcactgtgcagctgaagaagctcgctgccgccggcaagctgacgagggtgaagaactccttcaaggtgccggccaccgacgccaatccccaagcccgccaagcccaaggcaccccaaggacgcgcccaagaccccaagccctcgccgtaaggcaatggcccatacccgctgcggaagccccaagacggctgttcgcccccaaaccc

SEQ ID NO: 2771 - DNA, 397 bp, Zea mays
  Clone ID: TF_LIB3060-027-Q1-K1-F9
gcctccgccgccgacagcagcgtactgttttgtatctcccgagaagggttgtgagaaggagtagtatcctcaatgtccacgggaggaagctgttgatgctgaggtcctcattgaccgacgtgccagcagaggtcccggcggtccaggtggccgatgcgcccaaagcgaaaaatgcgcccacagagaagaaggcgcctaaggagaagaagctttccgcggcgaaaaagccggcggcgcaccctacctacgctgagatgattgtagaggcgatcgctgccctcaaggagaggaaggtgtcgagctcggtggccatcatcaagtacgtctagggtgagcatggcggcaaagctcacaccaacttgcgcaagcagctcactgtgcagctgaagaagctcgc

SEQ ID NO: 2772 - DNA, 508 bp, Zea mays
  Clone ID: TF_LIB4766-079-R1-K1-A11
ctcgaggccggccgggatcagtattccccatcgcctccgccgccgacacggcgtatggtagtgtagttccgtatatgggttggggagagtagtatggatccgcaatgtcgacggaggaggatgttgtgggtgaagtgccggtgaccgatgtgccatgggaggtcccggaggcccaggcggacgaggagcccaaggcgaagaacgcccccaaggagaagaatgtgcctaaggagaagaagatttctcgcggtgaataagccggtggcgtgccctccctacgctgagatgattgtacaggctatcgctgccctcaatgataggaaggggtcgagctcggcgtacatcaacaagtacatccaggtgaagcatggcgacaagctcccctgcaacttctgcaaggagctcactgtgcatgtgaagaaggtcgctggcgtcggcaagctgactagggagaagaactgcttcaagatggcgtccaccgacgtcaagcccgaggccgcctagacca

SEQ ID NO: 2773 - DNA, 667 bp, Zea mays
  Clone ID: TF_LIB4742-052-R1-K1-C9
cattgggtacctcgaggccggccgggatcagtcatcacccaccgactccgccgccgacaacagcgtattgtagtgtagttccgcgagagggttgatggagagtagtagtgatccgcaatgtcgacggaggaggctgttgtggctgaggtcccggtgaccgaggtgccagcggaggtcccggcggcccaggtgggcgaggcgcccaaggcgaagaaggcgtccaaggagaagaaggcgcctaaggagaataagctttccgcggcgaagaagtcggaggtgcaccctccctacgctgagatgattgtagaggcgatcgctgccctcaaggagaggaaggggtcgagctcggtggccatcagcaagtacctcgaggggaagcatggcggcaagctccccaccaacttccgcaagcagctcactgtgcagctgaacaagctcgctgccgccggcaagctgaccaggctgaagaactccttcaagctgccggccaccgacgtcaagcccaagggcgccaagccctaggcacccatggccgcgcccaagctcaagtcctcgccgaaggcgaaagccaagacctctgcgaagaccatggtggcgtcgaccaaacccaaggccaaggccaaggtcaagtctgtcgctcctgccgtcgcgtcgccaaagccccgcg

SEQ ID NO: 2774 - DNA, 573 bp, Zea mays
  Clone ID: TF_LIB5116-023-A1-PF1-D3
acctccgctcgaactgtcttgcgaaatttcacgcgcgctcagcacaagtagcagtttcagtttcagagctccgcttcagttagccaccatgcctgccctcgccaagcccgccgccgcggcaccgaagccgaagccctccgccgccaagccgaagaaggatgccgccggcccttcccacccggcctacttcgaggtgagcgcccgagcctctcctgttgaatcctctgcatctctgtgattcgttcgtttcggtttgccattggggctgattggattttgatttcgatcttggcagatgatcaaggaggcgatcgcggcgctcaaggacaggaccgggtccagctcggtcgccatcggcaagtacatcgaggagaagcacggcaagtccctcccggccaacttcaagtagatgctctccgtccagctccggtcgttcgcctccaagggcaagctcgtcaaggtcaaggcctcctacaagctctcagacgccgccaagaaggacgcgcccaagcccaagcccaaggccaagcccgccgcccccaagggccgcggcgaagcccgccaaggacgccg

SEQ ID NO: 2775 - DNA, 462 bp, Zea mays
  unsure (1)..(462): unsure at all n locations
  Clone ID: TF_LIB4729-008-R1-K1-B2
ccaccgtctccgccgccgacatcttcgtagtgtagtgtagttccggagagggttggggagagtagtagtgatccgcaatgtcgacggaggaggctgttgtggctgaggtcccggtgaccgaggtgccagcggaggtcccggcggcccaggtggccgaggcgcccaaggcgaataaggcgcccaaggagaagaaggcgccgggggagaagaagctttccgcggcgaagaagccggcggcgcaccctccctacgctgagatgattgtagaggcgatcgctgccctcanggagaggtttggctcccgctcggtggccatcagcaagtcctctgaggggattcatggcggcgggctccctnccntcctgcgtacgcaggtttctgtgcggctggtgaggctccctgccgcccgcccgctgtcgaggttggttcactgcttccagttgnctgccaccttcgcctgcc

SEQ ID NO: 2776 - DNA, 557 bp, Zea mays
  Clone ID: TF_ZmC1022_12
cgaaatcaccagcgcacagcactcctcatcggcgcacccgagctcgccctctccttcctcatcgaggcccaagtcctgctgtgatgacgaccgacgtggctgagactcccgcgccgttggtggatgcggcccctgaggcgcccgcggacaccccggcggcgcctgctgctgatgcgaagccggccaaggccaagaaggccacagcgccgaagaagcgcgccagcccgacccatccgccgtacgccgagatggtatcggaggcgatcgcgtcgctcaaggagaggacggggtccagcagctttgctattgccaagttcttggaagacaagcacaaggacaagctcccgcccaacttccgcaaacttctgaacgttcagctcaagaagctcgtcgccggcggcaagctgaccaaggtgaagaactcgtacaagctgtcgtccgccaccaagccaaaggccgccccgaagaagcccaagaccggcgtgaagaagcccaaggccgctgccaaaccgaaggccaagtcccccgcgaagcccaagcccgccacaaaccccaag

SEQ ID NO: 2777 - DNA, 603 bp, Zea mays
  unsure (1)..(603): unsure at all n locations
  Clone ID: TF_ZmC1022_14
gcggacccacgcgtncgcccacgcgtccgcggacgcgtgggtcccagcgcacagctctcctcatcggcgcacccgagctcgccctctccttccacatcgaggcccgagtcctgctctgatggcgaccgacgtggctgagactcccgcgccgttggtggatgcggcccctgaggcgcccgcggacaccccggcggcgcctgctgctgacgcgaagccggccaaggccaagaaggccacagcgccgaagaagcgcgccagcccgacccatccgccgtacgccgagatggtctcggaggcaatcgcgtcgctcaaggagaggacagggtccagcagctttgctattgccaagttcttggaggacaagcacaaggacaagctcccgcccaacttccgcaagcttctgaacgttcagctcaagaagctcgtcgccggcggcaagctgaccaaggtgaagaactcgtacaagctgtcgtccgccaccaagccgaagcccaagccaaaggcggccacgaagaagcccaagaccggcgtgaagaagcccaaggccgctgccaaaccgaaggccaagtcccccgcgaagcccaagcccgccacaaagcccaa

SEQ ID NO: 2778 - DNA, 968 bp, Zea mays
  Clone ID: TF_ZmC1022_7
gacccacgcgtgggcacctcgaggccggccggggacatcaccagcgcacagctctcctcatcggcgcacccgagctcgccctctccttcctcatcgaggcccgagtcctgctctgatggcgaccgacgtggctgagactcccgcgccgttggtggatgcggcccctgaggcgcccgcggacaccccggcggcgcctgctgttgacgcgaagccggccaaggccaagaaggccacagcgccgaagaagcgcgccagcccgacccatccgccgtacgccgagatggtctcggaggcgatcgcgtcgctcaaggagaggacggggtccagcagctttgctattgccaagttcttggaggacaagcacaaggacaagctcccgcccaacttccgcaagcttctgaacgttcagctcaagaagctcgtcgccggcggcaagctgaccaaggtgaagaactcgtacaagctgtcgtccgccaccaagccaaaggccgccccgaagaagaccaagaccggcgtgaagaagcccaaggccgctgccaaaccgaaggccaagtcccccgcgaagcccaagcccgccacaaagcccaaggcggccgccaagagtgagctcccaagacccccggcgttaagccaaagccccttgctaaaaaggccggccgccccgccaaggcggcgaaaacgtcggccaaggacaccccagggaaaaaggcgccggtggccaaaaagtccgctgctgccgcgaaaaaggcccctgccaaaaaggccgctccctcgaaaaaggcggcgaccccggcgcggaaagccccgtcccgtaaggccaaaaagtaaagcggcccaaaagggtgtgccatgttgtaaatttgatatcggaggggctcgggtacactggtcattcagtatctttgccccttcctcgtacctctgctgtacgtcctatggtttctttcccagataatagtcttcccccc

SEQ ID NO: 2779 - DNA, 619 bp, Zea mays
  unsure (1)..(619): unsure at all n locations
  Clone ID: TF_ZmC1022_8
ttgggtaccccctcgagnngccggccaggactcggcatagacagacactcgacacaaatcaccagcgcacagcactcctcatcgccacacccgagctcgccctctccttcctcatcgaggcccgagtcctgctttgatggcgaccgacgttgctgagactcccgcgccgctggtggatgcggcccctgaggcgcccgcggacaccccggcggcgcctgctgttgacgcgaagccggccaaggccaagaaggccacagcgccgaagaagcgcgccagcccgacccatccgccgtacgccgagatggtctcggaggcgatcgcgtcgctcaaggagaggacggggtccagcagctttgctattgccaagttcttggaggacaagcacaaggacaagctcccgcccaacttccgcaagcttctgaacgttcagctcaagaagctcgtcgccggcggcaagctgaccaaggtgaagaactcgtacaagctgtcgtccgccaccaagccaaaggccgccccgaagaagaccaagaccggcgtgaagaagcccaaggccgctgccaaaccgaaggccaagtcccccgcgaagcccaagcccgccacaaagcccaaggcggccctc

SEQ ID NO: 2780 - DNA, 756 bp, Zea mays
  Clone ID: TF_ZmC4197_8
cacctccctctccgaaatcaaggtagcatacaccgctgcagtttctagagccctctctgccactcgtgatcccactagtcacgatgcctgccctcgccaagcccgcctcccgcaccgccaagcccgccgcggctccgaagccgaagcctgccgccgccaagccgaaggcggccaccgctggtgcctcccacccgccttacttcgaggtgagccttgtcgacctgcgttcggtttttattgattgatattggtttccgtcggaattggtgttgatggaatctcatgtttcgtcgttcagatgatcaaggaggctatcacggcgctaaaggagaggaccggctccagctcgcaagcgatcgccaagtatgtgggggacaagcacggcgcgtctctgccggccaacttcaagaagatgctttccatccagctccgtgggtccgcagccaagggcaagctcgtgaaggtcaaggcttcgtacaagctctcggacgccgccaagaaggcatcccccaagaccaaggctaagccggcaaaggccgccgctgccaagaccaccgcccccaagccggccaaggccgccgccgccaagtcaaagaaggcagcggctgccaagccaaagaaggccgctgctgctgggaccaagcgcaaagtgcccgagtagaaggtcgtggcgaagccgaaagaagtcccccgccgccaaggccaaggccaagccgaaagaccttggaagtccctggcctccagaaaggcacggaa

SEQ ID NO: 2781 - DNA, 377 bp, Zea mays
  unsure (1)..(377): unsure at all n locations
  Clone ID: TF_LIB3245-307-P1-N1-F12
caactctgcactttctacaaagnctatgatctgtcagaaaagcatgttgtcgactcttcgattaattatcaatcacccaaacaacatttacaatgcctccaaagaaagcttccaccagcgctgctgccagctctgcctccaagaaggccgctcccagccattcttcctatcgcgatatgatcaaggatgctattattaacttgaaagatcgcaacggtagcagccgtcaatccatcaagaaatatgttcagaacaacaacaagatcaccgtcgtgtcgcaagctgctttcgacgctcagttcaacaaggccatcaaagctggcgttgagaaaggagaattcagtcaacccaagggaccctctggccccgtgaagctc

SEQ ID NO: 2782 - DNA, 450 bp, Zea mays
  Clone ID: TF_LIB3354-039-P1-K1-B7
cggaaaagccgggggagaccacgcggccgagaagccgggaaaccaacagcgaacggaggaggcaggcgcgggacacgccccggcgaccgaggagccagcggagggcccgagagcccaggcggccgaacgcgcccaaggcgaacaaggcgcccaaggagaacaaggcgcccaaggagaagaagctctccgcggcgaacaagccggcggcacaccctccctacgctgagacgacggcagaggcgagcgctaccctcaaggagaggaaggggtcaagctcggtggccatcagcaagtacttctaggggaatcatagcggcaagctccccacaaacttccgtaagcaacttactacgcagctgaagaagctcgctgccaacaccaagctgacgagggtgaaaaactccttcaagctgacgggcaccgacgccaagcccaaggccgccaagccta

SEQ ID NO: 2783 - DNA, 715 bp, Zea mays
  Clone ID: TF_ZmC366_4
aattcggcacgagggtctgctggggacctggggtgatcgaggtcagatgatcaaggaggcgatcctgtcgcaggacggcgggaaggtcggggcgagcccgtacgcgatcgccaagcacatgggggagaagcaccgggacgtgctcccgcccaattaccgcaaggtgctggcagtgcagctgcgcggcttcgccgccaagggccgcctcgtcaaggtcaaggcttccttcaagctcgccgccgccgaggagaggaagccctccgcggccgcgaaggcgaagaagaaggcgtcggcgggaatggccaagcgcaagagggccgccgcgccggccaagaagaagccggcggccgctgcctcggcgccgtcgagggaggcacgtaaggtgcgcgcgaagcgagcgaggaaggtggccccggcgcccgcgcagcccaagcccaagccagcccgcgccgccgcttccggtgccggcaagaaggtcaacaaggccagcgcctgattagcggcggccgtcctggtccccccgcgcgcgcctccgtgtattatactagccggtagtagcagtaggagttgcaagtactagcagcgtggtagtcgtgatgatgttgtggtcgtcgtctccgccggcccgatcgatcgggcgctctgttccgccgtgtggcagagttttgtaaataactagtctggtgtgatgcgctcatggcaataaagcgcgcgc

SEQ ID NO: 2784 - DNA, 446 bp, Zea mays
  unsure (1)..(446): unsure at all n locations
  Clone ID: TF_LIB4602-009-Q1-K1-G5
caacagcgtagtgtattgtatttccggagtagtggttggggagagtagtattgatccgcattgtcgacggaggatgctgttgtggctgatgtcccggtgaccgatgtgccatcggatgtcccggcggcccatgtggccgatgcgcccaaggcgaataatgcgcccaaggagaatatggcgcctaaggagaagaagccgtccgcggcgattaatccggcggcgcaccctccctacgctgagatgattgtagatgcgatcgctgccctcatggagaggaaggggtcgagctcggtggccatcatgctgtacgtcgaggggattcacggcggcntgctccccaccatcttccgcatgctgctcaccgtgcagctgatgatgctcgctgccgccggcntgcttgcgagggtgatgttctccttcntgctgccggcctccgtcgcccttcc

SEQ ID NO: 2785 - DNA, 291 bp, Zea mays
  Clone ID: TF_LIB3076-020-Q1-K1-B1
tccgagggatcactcttcgtactctgacatgtttgaagaggcgatcgttgccctaaagcagatgatttcttcaagctgcgggggcatcatcaagtacgtcgatggcaaccatgacacgtagctacccaccaaattacttaagcacctcactgcgcaccttaagaagctagatgacgccctcaaactgactaaggtgaagaactccttaaagctgccggtcaccgacgccaatcccaaagccgacaagtccaaggcacccaaggtcgcgcccaatcccaatccctcttcgaa

SEQ ID NO: 2786 - DNA, 1182 bp, Zea mays
  Clone ID: TF_ZmC154725_1
cccacgcgtccgatagattgtccaaaccccactcaccgcaacgagccgccgtatccatggccggcaaagacggctccgtcccttccccgcctcctcccctggccttaactttacggctgcaccgaccgaaaacccccatttcctcttctccaaaccccactcaccgcaacgagccgccggatccatggccggcaaagacgggtccccgcctcctcccccgctcccatcctaccctgagatgatcgtggaggcaatccgggcgctgggactcgagaacggctgcaacaagactgcgatctcggactacatcaagggcagctacggctccaacctccctgcccagcacaacgccgtcctcacgggtcacctcgcccgcatgaaggctaccggcgagctcgccttcctcaggaacaactatctcctccccaacgaggacgaagcctccccgctgagcaccggtgggcacaagggccccgccgccgccgaggaggagtctactggcgtgttggacgttggtgacgatgtgttgcttgcttcccctctcgtcatcgacgctgacgccgtcgacattgatgtgcctgctccagctcccgttgtcaccgctgatgtcgacgatattgacgtgcctgctccagctcccgttgtcaccgctgatgtcaaccctgttcataccaagcggggacgcggacggcccccgaagcccaaggaccccgttgctgagggctacggtggtaagcccgctacagctcccgtcgccgccgctgccgtgcctgtcaagcgcgggcgcggacgtccgccgaaacccaagaaccccgtcgccgaggactcagctcccactgcggcttccgttgtcaccactgatggcaatgccgtgcctggtgaagcgtgggcgcggacgccccccaaagctcaaggaccccatcaatgtggccactgaccaggccaccagcggcatgctgagcccgacgtggccgtgggcgcccgcccaagcagctcaggtcctggtggaagatcccagaggtgacctgctgaattgaatcctatggtggctgaggtttgggagtagcttggtgtatcaaattgagttctgaactatcttatccagttgggtgcatagcatcggaagactaatctcaataatcgagaaatttgctgttttgccactcgcaaaaaaaaaaaaaa

SEQ ID NO: 2787 - DNA, 594 bp, Zea mays
  Clone ID: TF_LIB3958-009-Q1-K6-G6
ctccggtggcggcgagtgcaagtagcacaaacttatgtgaaatctactccaacctacgatggatccccagatccggcgacggcgagggaaagtgacatagacttcagtggtagtggctctagattacaacacaccccgagcggatcaaccacatagattcattgtgtattgacatatcattcataggaccactgatgcgtatcctctcagatccaaattctctcaccctttttagatctagtgacattgagggcaagtagaagagtttggcaacagtcgtggactacgacagatccaaacaagtcaacctctcaaatctggagtaataagcaggattcaaagatgatggttacacgagagcatccaatgaggagcagggaatgccagctttgccatgaaaacccgctctcttcgccaagcatgaccaaaatgattgtagaggcgatcgctgccctcaaggagaggaaggggtcgagctcggtggccatcagcaagtacgtcgaggggaagcacggcggcaagctccccaccaacttccgcaagcagctcaccgtgcagctgaagaagctcgctgccgccggcaagctgacgagg

SEQ ID NO: 2788 - DNA, 534 bp, Zea mays
  unsure (1)..(534): unsure at all n locations
  Clone ID: TF_LIB4765-025-R1-K1-H5
gggtacctcgaggccggccggggcgcgcgaggctcgctggaaacgccagtctacgggcaccgatttgcacgtgctgcatccaacgaacctggtttgatgcccttgtcggcatcggggggcttcgcctacccgcatcacccacgctctccccgcttccctatccctcacgcagtcaggagatccccaattccccattcaccaatccccagtattgtagtaggggggaaaaacgagagaaaagaaacagcagtagcggaggcaagacgaaatggtggccgccgtcgcgtcgccttcgtcggcggcaccctccgccggccgtccccatccgacatacaaggagatgatcatgcaggcgctgacggagctgcgggacccgagcgggtcgagccgcagcgccatcgccagctacatcgccgaccacttctccggnctccactcgcgccacgatgccctcctctccgtccatctccgcagcctcaagtcccatgggcaacttcgcctcgtctctggcaactacttcgtctccaccgccgc

SEQ ID NO: 2789 - DNA, 801 bp, Zea mays
  Clone ID: TF_ZmC1022_15
gggtaccctgggcctccgaactaaccgcacacagctctcgccttctctctcccatcggcacacccgagctcgctccctccttccacgtcgaggtccgagtcctgctttgatggcgaccgacgtggctgagactcccgcgccgttggtggatgcggccccagaggctcccgctgacgccccggcggcgcctgctgcggacgcgaagccggccaaggccaagaaggccgccgcaccgaagaagcgcgccagcccgacccacccgccgtacgccgagatggtctcggaggcggtcacgtcactgaaggagaggacggggtccagcagctatgcgattgccaagttcgtagaggacaagcacaaggacaagctcccacccaacttccgcaagcttctgaacgttcagctcaagaagctcgtcgccggcggcaagctgaccaaggtgaagaactcgtacaagctgtcgtccgccaccaagccgaatcccaagcccaaggccgccccgaagaaggcccctgacaacgcaaggcccctccctcgaagaagccgacgaccccggtgcggaaagcgccgcccgccacgtaaagcggccaagcccggccgcgatgctaaaatttgatatcggagactcgggtacactgctcattcagtatccgagaccgatagctgaggctagtggcgatggaggactgtgttattactactataaactggtgggttgtggtttctgtaactggtgaatgatcaagttggaagcttttagtctatcttagatatatcaggggatagtggtttttggatttt

SEQ ID NO: 2790 - DNA, 745 bp, Zea mays
  Clone ID: TF_LIB4729-085-Q1-K1-C11
gtctcatcagtcttctccctccgcctccgccgtcgacaacagcgtagtgtagtgtagttccggagagggtcggggagagtagtagtgatccgcaatgtcgacggaggaggttgttgtggctgaggtcccggtgaccgaggtgccagcgtaggtcccggcggtccaggtggccgaggcgcccatggcgaataaggcgccctaggagaagaaggcgcctaaggataagaatctttccgcggcgaagaagccggcggcgcaccctccctacgctgagatgattgtagaggcgatcgctgccctcaaggagaggaaggggtcgagctcggtgttcatcagcaagtacgtcgaggggaagcatggtggcaagctccccaccaacttccgcaagcagctctctgtgcagctgaagaagctcgctgcctccgtcaagctgtcgaggttgaataactccttctagttgccggccaccgacgccaagcccaagggcgccaagcccaaggcacccaagggcgcgtccaagcccaagccctcgccgaaggtgaagggctagaccgctgctaagtccaaggcggcgtctcccaaactccaaggtcaaggtcaatgacaagcctgtctctcctgccgccgcgtcgcccaaattatcccgcgggtgcacctcccaaggtcgccaagacctccgccaaggtctcccccgtgcaggcagccaagaaggcgtctgctcctgcctacaagggaaaggcagcgg

SEQ ID NO: 2791 - DNA, 1542 bp, Zea mays
  Clone ID: TF_ZmC13520_3
atgggcgcgccgaagcagaagtggacgtcggaagaggaggatgcgctccgccgtggcgttcgcaagcacggcgccggcaaatggcggaccatccagaaggacccccagttcagcccgatcctctcctcccgctccaatatcgacctcaaggactttagggtgcttggtggtctccctgctggctgctgcagttttgtcggtagtaccgtagtagatttgggccatcgaaggcgagattttgtgttcggggtaactgataaatgtaggcgaaggttgaaatggccgtgttatgctgccgagggatgctttgatgtgatcattttgctcaaggacaatgatgctgtggtggtcatggacacgcagtgtcggattacatgtggcacatgccagcgaagaggcactctagtcagtgactcaacgtgctcagcagttattgctgttgggataggattcagtgtgataaatttgaaggatatcctgctaatgataccacactgtacagggattcatggttgggaagatattgccctcaagaagtttcttagagttttcaaccttagcaatttaaggccatggtatggtgccatgattatggaagctctttcggaattgaatcagccgaatggttcagatattgatgcaatcttcgacttcataaagcaaaggcatgtggtgcaatcgacctttagaagatttctaccctcaaagttacggcgacttgcagactcaaacaaaattgaaaaggtcgataacttctataggctcccagattcatttgcaacaaggactccagctcaaataaaagtttcagatccaaaacagaaggatccatctaaggcgtcaaagaccataggcttgtttgctgcctccagccctgcactagaggcagcgatggcagctgctgtcaaggtgactgacgccgaggcaaaagcacatgatgcacatgatcagatgatggaggcagaaaggatgctgaagatggctgaggataccgagtctatcctcacaattgcagcagagatctatgatcgatgttcaaggggggagataaccacattagttccagtggcgcaaagggagttttgagatctattggagtctctcttgtgttgtttgttgtacatggataggttctggaatccagtggcccggattgctcctgttgtatgatgtaaccgtttgtgttgtactatctccgttctccgatatttgtcttaccctagttcatttttaaaataaaatgcgacaaataaaaaagaacggagtgagtacttaggatgtgccctagggttaacaaaataacatcagcgcaccgcctgccttcaaaattctgtaatatgtaaccccgtctttcccagcctgtcactgcaagctgcgatcgtgtatcctgatgtcagtattgtattatttttccttggcatgatgagagaatagggaagtgttctaaacagatgaagtagggtaggaaggtgatgtgttcttggtatgcgataacaataatctgtgccgcacttgtacctttcaatttgagaatgttgtgtt

SEQ ID NO: 2792 - DNA, 678 bp, Zea mays
  Clone ID: TF_LIB4730-078-R1-K1-C8
aaatcgctcctcaaaccaactggtccagtcgacacaagcagcatcccgccggcggtgatggacctggcgtccagcgacctcgcggagctgggcgcggcgatagctggtccgcgtctacgggatcatcccgcgagaggatccgagcaccttgtaactactcagcagtctgaggcatattcactatgatccgcaatgttcacgcgaagacggtgatgtcgatgacgtccctgcgaccgatccggcagcggaagtcccggaggtccacgtggcctaggcgcccaaggttaataaggcgcccaaggagaacaaagcgcctaatgagaagaagccgtccgcggcgaagaagccggcggcgcaccctccctacgctgagatgattgtacaggcgatcgctgccctcaaggagaggaaggggtcgagctcggtggccatcaccaagtacgtcgaggggaagcacggcggcaagctccccaccaacttccgcaagcagctcaccgtgcagctgaagaagctcgctgccgccggcaagctgacgagggtgaagaactccttcaagctgccggccaccgacgccaagcccaaaggcgccaagcccaaggcacccaaggccgcgcccaaacccaagccctcgccgaaggcgaaggccaaaaccgctgcaaagcccaaagcggcgtcccc

SEQ ID NO: 2793 - DNA, 614 bp, Zea mays
  Clone ID: TF_LIB3689-248-Q1-K6-E3
caacagcgtagtgtagtgtagttccggagaggttggggagagtagtagtgatccgcaatgtcgacggaggaggctgttgtggctgaggtcccggtgaccgaggtgccagcggaggtcccggcggcccatgtggccgatgcgcccaaggcgaagaaggcgcccaaggagaagaaggcgcctaaggagaagaagctttccgcggcgaataagccggcggcgcaccctccctacgctgagatgattgtagaggcgatcgctgccctcaaggagaggaaggggtcgagctcggtggccatcagcaagtacgtcgaggggaagcatggcggcaagctccccaccaacttccgcaagcagctcactgtgcagctgaagaagctcgctgccgccggcaagctgacgagggtgaagaactccttcaagctgccggccaccgacgccaatcccaatgccgccaagcccatagcacccatagccgcgcccaatcccaagccctcgccgaatgcgatagccaagaccgctgcgaagcccaaggcggcgtcgcccaaacccaatgccaatgccaatgccaagcctgtcgctcctgccgccgcgtcgcccaatccccgctggcgccc

(The sequence listing continues in the following parts.)
